(19) United States
(12) Patent Application Publication
(10) Pub. No.: US 2026/0015627 A1
(43) Pub. Date: Jan. 15, 2026

(54) COMPOSITIONS AND METHODS FOR IMPROVED PROTEIN TRANSLATION FROM RECOMBINANT CIRCULAR RNAS

(71) Applicant: The Board of Trustees of the Leland Stanford Junior University, Stanford, CA (US)

(72) Inventors: Robert Chen, Stanford, CA (US); Sean Wang, Stanford, CA (US); Laura Amaya, Stanford, CA (US); Howard Y. Chang, Stanford, CA (US)

(21) Appl. No.: 18/847,095

(22) PCT Filed: Mar. 17, 2023
(86) PCT No.: PCT/US23/64606

§ 371 Date: Sep. 13, 2024

Related U.S. Application Data
(60) Provisional application No. 63/320,952, filed on Mar. 17, 2022.
(60) Provisional application No. 63/353,110, filed on Jun. 17, 2022.
(60) Provisional application No. 63/423,641, filed on Nov. 8, 2022.
(60) Provisional application No. 63/449,409, filed on Mar. 2, 2023.
(60) Provisional application No. 63/450,272, filed on Mar. 6, 2023.

(51) Int. Cl. C12N 15/85; A61K 39/00; A61P 37/04; C12N 15/115

(52) U.S. Cl. CPC C12N 15/85; A61K 39/0011; A61P 37/04; C12N 15/115; A61K 2039/53; C12N 2310/16; C12N 2840/203

(57) ABSTRACT

The present disclosure relates to compositions and methods for improving protein translation from recombination circular RNAs. In particular, provided herein are formulations for delivery of recombinant circular RNA (circRNA) molecules and circRNAs comprising viral and/or synthetic internal ribosome entry sites (IRESs), as well as methods for use thereof.

### STATEMENT OF RELATED APPLICATIONS

[0001] This application claims priority to U.S. Provisional Patent Application No. 63/320,952, filed Mar. 17, 2022, U.S. Provisional Patent Application No. 63/353,110, filed Jun. 17, 2022, U.S. Provisional Patent Application No. 63/450,272, filed Mar. 6, 2023, U.S. Provisional Patent Application No. 63/423,641, filed Nov. 8, 2022, and U.S. Provisional Patent Application No. 63/449,409, filed Mar. 2, 2023, the entire contents of which are incorporated herein by reference for all purposes.

### STATEMENT REGARDING FEDERALLY SPONSORED RESEARCH

[0002] This invention was made with Government support under contract CA209919 and contract number 5T32GM008412 awarded by the National Institutes of Health. The Government has certain rights in the invention.

### FIELD

[0003] The present disclosure relates to compositions and methods for improving protein translation from recombination circular RNAs. In particular, provided herein are formulations for delivery of recombinant circular RNA (circRNA) molecules and circRNAs comprising viral and/or synthetic internal ribosome entry sites (IRESs), as well as methods for use thereof.

### SEQUENCE LISTING

[0004] The text of the computer readable sequence listing filed herewith, titled “STDU2-40616-601_SQL”, created Mar. 16, 2023, having a file size of 33,377,290 bytes, is hereby incorporated by reference in its entirety.

### BACKGROUND

[0005] Circular RNAs (circRNAs) are a type of single-stranded RNA which, unlike linear RNA, comprises a covalently closed continuous loop. circRNAs occur naturally in mammalian cells, and play important roles in various biological processes. circRNAs innately possess greater stability and resistance to intra- and extracellular RNAses than mRNAs, making them attractive candidates for delivery of key payloads where long-lasting expression is necessary.

[0006] Recently, there has been an interest in using recombinant circRNAs to express a protein of interest, in vitro or in vivo. Introduction of an internal ribosome entry sequence (IRES) into a circular RNA allows translation of a protein encoded by a circRNA. However, IRES elements that exist in nature may or may not support translation from engineered circular RNAs, as IRES elements are often evolved in the context of linear RNA genomes.

[0007] Accordingly, there is in the need in the art to identify IRES elements that can drive protein translation from recombinant circRNAs. Further, there is a need for engineered IRES elements that improve the amount and/or duration of protein expression from a circRNA, as well as methods of delivering circRNAs to cells in vitro and in vivo.

### BRIEF SUMMARY

[0008] The present disclosure relates to compositions and methods for improving protein translation from recombination circular RNAs. In particular, provided herein are formulations for delivery of recombinant circular RNA (circRNA) molecules and circRNAs comprising viral and/or synthetic internal ribosome entry sites (IRESs), as well as methods for use thereof. Provided herein is a composition, comprising: a complex of a charge-altering releasable transporter (CART) and a circular RNA molecule comprising a protein-coding sequence. In some embodiments, the protein-coding sequence is operably linked to an internal ribosome entry site (IRES) sequence. In some embodiments, the IRES sequence is a viral sequence; and wherein the protein-coding sequence encodes a non-viral protein.

[0009] In some embodiments, provided herein is a method of inducing immunity in a subject, comprising administering a composition, comprising: a complex of a charge-altering releasable transporter (CART) and a circular RNA molecule to the subject such that the composition induces immunity in the subject. In some embodiments, the circular RNA molecule comprises a protein-coding sequence (e.g., an antigen or a therapeutic protein). In some embodiments, the composition further comprises an antigen. In some embodiments, the immunity is innate immunity or an antigen-specific T cell response.

[0010] Also provided is a method of immunizing a subject, comprising administering a composition, comprising: a) a complex of a charge-altering releasable transporter (CART) and a circular RNA molecule; and b) an antigen to the subject such that the subject is immunized against the antigen.

[0011] Further provided is a method of treating cancer in a subject, comprising administering a composition, comprising: a) a complex of a charge-altering releasable transporter (CART) and a circular RNA molecule; and b) an antigen. In some embodiments, the antigen is a tumor antigen. In some embodiments, the administering induces antigen-specific T-cell-based cellular immunity in the subject.

[0012] In some embodiments, the administering treats or prevents a disease or disorder (e.g., cancer) in the subject. In some embodiments, the delivering is intraperitoneally, intranasally, or intravenously. In some embodiments, the subject is a human or a non-human animal.

[0013] In some embodiments, the circular RNA is synthesized from a vector comprising self-splicing introns, 5′ PABP spacer, HBA1 3′ UTR, and an internal ribosome entry site (IRES) sequence.

[0014] In some embodiments, the CART is 1:1 mixture of oleyl (0) and nonenyl-substituted (N) carbonate monomers followed by a block of α-amino ester monomers (A). For example, a block length of 6 nonenyl and 6 oleyl carbonate units and 9 cationic amino-ester units. In some embodiments, the circular RNA and the CART are complexed at a 1:10 charge ratio. In some embodiments, the CART directs said circular RNA to immune cells. In some embodiments, the composition is a pharmaceutical composition.

[0015] Also provided is a composition, comprising: a circular RNA molecule comprising an internal ribosome entry site (IRES) sequence operably linked to a protein-coding sequence, a 5′ UTR, and a 3′ UTR; wherein the IRES sequence is a viral sequence; and wherein the protein-coding sequence encodes a non-viral protein.

[0016] In some embodiments, the 5′ UTR is ACUCACUAUUUGUUUUCGCGCCCAGUUGCAAAAAGUGUCG (SEQ ID NO: 33143) or AGCGUAACCUCCAUCCGAGUUGCAAGAGAGGGAAACGCAGUCUC and the 3′ UTR is a β-globin 3′ UTR or a truncated β-globin 3′ UTR.

[0017] Further provided is a composition, comprising: a circular RNA molecule comprising an internal ribosome entry site (IRES) sequence operably linked to a protein-coding sequence, wherein said IRES sequence comprises a locked nucleic acid (LNA) against a non-base-paired linker region between domains of said IRES; wherein the TRES sequence is a viral sequence; and wherein the protein-coding sequence encodes a non-viral protein. In some embodiments, the IRES is iCVB3 and said LNA is against a non-base-paired linker region between iCVB3 domains I and II.

[0018] Additionally provided is a composition, comprising: a circular RNA molecule comprising an iHRV-B3 internal ribosome entry site (IRES) sequence a 5′ UTR, and a 3′ UTR; operably linked to a protein-coding sequence, wherein said circular RNA comprises 5% m⁶A. In some embodiments, the non-viral protein is a mammalian protein. In some embodiments, the non-viral protein is a human protein.

[0019] In some embodiments, the IRES is a Type 1 IRES. In some embodiments, the IRES is an enterovirus IRES. In some embodiments, the IRES is a human rhinovirus (HRV) IRES. In some embodiments, the IRES is any one of the IRES listed in Table 7. In some embodiments, the IES is any one of the following IRES: iEMCV, iHCV, iCVB5, iSwineVesicular, iHRV-A2, iHRV-C3, iHRV-C11, iCVB1, iPV2, iHRV-B17, iEchoV-E15, iEV71, iHRV-A9, iSiminanV4, iEV-D94, iSimianA5, iPV3, iHRV-C54, iHRV-A100, iHiRV-B37, iHRV-B4, iHRV-B92, iHRV-B3, iHRV-A1, iEV107, or a fragment or derivative thereof. In some embodiments, the IRES is any one of the following IRES: iEV-B83, iHRV-A57, iHRV-B35, iHRV-B4, iEV-D68, iHRVB_R93, iHRV-B5, iHRVB-B52, iHRVB-B93, iHRV-B84, iHRV-B83 SC2220, iHRV-B72, iHRV-B69, iHRVB_SC0739, iHRV-B91, iHRV-B42, iHRV-B6, iHRV-B83, iHRV-B48, iHRV-B99, iHRV-B79, iHRV-B97, iHRV-B27, iHRVB_3039, iHRVB-B14, iCosV-B1, or a fragment or derivative thereof. In some embodiments, the IRES is iCVB3, or a fragment or derivative thereof. In some embodiments, the IRES is iHRV-B3, or a fragment or derivative thereof.

[0020] In some embodiments, the IRIS is a synthetic IRES sequence comprising an aptamer and a second aptamer.

[0021] In some embodiments, the aptamer is a wildtype aptamer. In some embodiments, the aptamer is an aptamer was designed and/or evolved to bind one or more DNA sequences. In some embodiments, the aptamer is a mutant aptamer. In some embodiments, the aptamer is modified to have an extended stem region.

[0022] In some embodiments, the aptamer is positioned within the secondary structure of the IRES so that is spatially proximal to portion of the IRES responsible for translation initiation. In some embodiments, the aptamer does not interrupt the native eIF4G binding site of the IRES and does not interrupt a native GRNA tetraloop within the IRES.

[0023] In some embodiments, the aptamer is an eIF4G-binding aptamer. In some embodiments, the eIF4G-binding aptamer comprises or is encoded by the sequence of SEQ ID NO: 33143. In some embodiments, the IRES is a Type 1 IRES. In some embodiments, the IRES is a modified enterovirus IRES. In some embodiments, the IRES is a modified human rhinovirus (HRV) IRES. In some embodiments, the IRES comprises or is encoded by the sequence of any one of SEQ ID NO: 33169-33173.

[0024] In some embodiments, synthetic IRES sequence is a modified iCVB3 IRES. In some embodiments, modified iCVB3 IRES comprises an aptamer inserted in domain I, II, III, IV, V, VI or VII thereof. In some embodiments, the modified iCVB3 IRES comprises an aptamer inserted in domain IV thereof. In some embodiments, the modified iCVB3 aptamer is modified to have an extended stem region. In some embodiments, the modified iCVB3 aptamer is positioned within the secondary structure of the IRES so that is spatially proximal to portion of the IRES responsible for translation initiation. In some embodiments, the modified iCVB3 aptamer does not interrupt the native eIF4G binding site of the IRES and does not interrupt a native GRNA tetraloop within the IRES.

[0025] In some embodiments, the synthetic IRES sequence is a modified iHRV-B3 IRES. In some embodiments, the modified iHRV-B3 IRES comprises an aptamer inserted in domain I, II, III, IV, V, or VI thereof. In some embodiments, the modified iHRV-B3 IRES comprises an aptamer inserted in domain IV thereof. In some embodiments, the modified iHRV-B3 IRES aptamer is modified to have an extended stem region. In some embodiments, the modified iHRV-B3 IRES aptamer is positioned within the secondary structure of the IRES so that is spatially proximal to portion of the IRES responsible for translation initiation. In some embodiments, the modified iHRV-B3 aptamer does not interrupt the native eIF4G binding site of the IRES and does not interrupt a native GRNA tetraloop within the IRES.

[0026] In some embodiments, the circular RNA comprises a least one 2-thiouridine (2ThioU) or at least one 2′-O-methylcitidine (2OMeC).

[0027] Also provided is a nucleic acid that encodes one or more of the circular RNA molecules described herein.

[0028] Also provided is a composition comprising one or more of the circular RNA molecules and/or the nucleic acids described herein.

[0029] Also provided are host cells comprising one or more of the circular RNA molecules and/or the nucleic acids described herein.

[0030] Also provided are methods for producing a protein in a cell, the method comprising contacting a cell with a circular RNA molecule or a nucleic acid described herein under conditions whereby the protein-coding nucleic acid sequence of the circular RNA is translated and the protein is produced in the cell.

[0031] Also provided are methods for producing a protein in vitro, the method comprising contacting a cell-free extract with a circular RNA molecule or a nucleic acid under conditions whereby the protein-coding nucleic acid sequence of the circular RNA is translated and the protein is produced.

[0032] Further provided is a method of delivering a protein to a subject, comprising: administering a composition described herein to a subject. In some embodiments, the protein is a therapeutic protein. In some embodiments, the administering treats or prevents a disease or disorder in the subject. In some embodiments, the delivering is intraperitoneally or intravenously. In some embodiments, the subject is a human or a non-human animal.

[0033] These and other embodiments will be described in further detail below, and in the appended drawings.

### BRIEF DESCRIPTION OF THE DRAWINGS

[0034] FIG. 1. A modular cloning platform for circRNA enables rapid design-build-test cycles. Schematic describing the modular cloning (MoClo) platform used to create template plasmids for circRNA synthesis. Parts 1-6 corresponding to the upstream intron and 5′ untranslated region (UTR), IRES, N-terminal (N′) tag, coding sequence (CDS), C-terminal (C′) tag, and 3′ UTR and downstream intron were individually cloned into parts plasmids via Golden Gate reactions (see FIG. 7). Parts plasmids and the circRNA backbone were then combined in a second Golden Gate reaction to create a circRNA plasmid. The circRNA backbone contains a CAG promoter enabling circRNA transcription after transient transfection in cellulo, a T7 promoter enabling in vitro transcription (IVT), homology sequences that assist with RNA circularization, low-structure regions that facilitate RNaseR processivity, and a bacterially expressed GFP dropout sequence to negatively select for incorrect assemblies. If a CDS without N′ or C′ tags was used, parts 3-5 were replaced with a single part. PCR products from circRNA plasmids were subsequently used as templates for in vitro transcription to synthesize RNA. Lastly, RNaseR cleanup was performed to digest linear RNAs and isolate circRNA.

[0035] FIG. 2. Optimization of RNA modifications and noncoding elements enable stronger circRNA translation. (A)NanoLuc activity after transfection of HeLa cells with circRNAs containing different RNA modifications. Data shown are mean SEM for n=3 biological replicates. ***P<0.001 by unpaired t-test compared to unmodified circRNA. (B) NanoLuc activity after transfection of HeLa cells with circRNAs containing either a 3′ or 5′ IRES and spacer sequences of varying lengths. When the IRES is 3′ to the NanoLuc reporter, translation through the td splicing scar is unavoidable. The predicted secondary structure of this scar is shown. Data shown are mean±SEM for n=3 biological replicates. (C) NanoLuc activity after transfection of HeLa cells with circRNAs containing different 5′ spacer sequences. Data shown are mean±SEM for n=3 biological replicates. *P=0.0213, **P=0.0051, ***P<0.001 by unpaired t-test compared to a random 50 bp spacer sequence. (D) NanoLuc activity after transfection of HeLa cells with circRNAs containing different 3′ UTR sequences. NanoLuc activity was normalized to constitutive firefly luciferase activity from the same sample, then divided by values from mock transfection. Data shown are mean±SEM for n=3 biological replicates. ***P=0.0012, ****P<0.001 by unpaired two-sided t-test compared to a random 50 nt spacer sequence. PR, protected region; MR, minimal region; BR, binding region.

[0036] FIG. 3. IRES truncations and the secondary structure of the IRES-coding sequence junction affect circRNA translation. (A) NanoLuc activity at 24 hours after transfection of HeLa cells with circRNAs containing deletions of different IRES domains starting from the 5′ end. Secondary structure and truncation points are indicated on the diagram. Data shown are mean±SEM for n=3 biological replicates. *P<0.05 by unpaired t-test compared to full-length (FL) iCVB3. (B) NanoLuc activity at 24 hours after transfection of HeLa cells with circRNAs containing deletions of individual IRES domains. NanoLuc activity was normalized to constitutive firefly luciferase activity from the same sample, then divided by values from mock transfection. Data shown are mean±SEM for n=3 biological replicates (C) NanoLuc activity at 24 hours after transfection of HeLa cells with circRNAs containing successive 10 bp deletions starting from the 3′ end of the IRES, immediately prior to the AUG start codon. (D) Correlations between the indicated properties and NanoLuc activity at 24 hours after transfection of HeLa cells with circRNAs containing different N-terminal leader sequences between the AUG start codon and NanoLuc reporter. Data shown are mean t SEM for n=3 biological replicates.

[0037] FIG. 4. A synthetic IRES containing an eIF4G-recruiting aptamer drives stronger circRNA translation. (A) NanoLuc activity at 24 hours after co-transfection of HeLa cells with circRNA and escalating doses (4.2-33.3 nM) of locked nucleic acids (LNAs) #1-3 or a non-targeting (NT) LNA. LNAs #1-3 were designed to be complementary to regions of iCVB3 as indicated in the schematic. NanoLuc activity was normalized to constitutive firefly luciferase activity from the same sample, then divided by values from mock transfection. Data shown are mean±SEM for n=3 biological replicates. *P=0.0233, **P<0.01, ***P=0.0001 by unpaired two-sided t-test compared to an equal dose of NT LNA. (B) NanoLuc activity at 24 hours after transfection of HeLa cells with circRNAs containing an eIF4G-recruiting aptamer (Apt-eIF4G), shown in inset. Apt-eIF4G was inserted into iCVB3 at 11 different positions as indicated in the schematic. Data shown are mean±SEM for n=3 biological replicates. **P=0.0017, ***P=0.0002 by unpaired t-test compared to wild-type iCVB3. (C) mNeonGreen fluorescence at 24 hours after electroporation of HeLa cells with mRNA or circRNAs containing successive optimizations. mRNA was synthesized with CleanCap reagent, 100% NIP incorporation, and a 100 bp poly(A) tail. Data shown are histograms for n>50,000 live singlet cells per condition and meant SEM for n=3 biological replicates. **P=0.0044, ***P=0.0006 by unpaired two-sided t-test. (D) The gating strategy is shown to analyze live singlet HEK293T cells after electroporation.

[0038] FIG. 5. Large-scale screens and IRES engineering expand the repertoire of strong IRESs (A)NanoLuc activity at 24 hours after transfection of HeLa, HepG2, and HEK293T cells with circRNAs containing the indicated IRESs. Data shown are mean±SEM for n=3 biological replicates. (B) NanoLuc activity after in vitro transcription-translation (IVTT) of circRNA plasmids containing shuffled IRESs. DNA shuffling was performed on human rhinovirus IRESs by fragmenting IRESs and cloning the resulting pool into circRNA plasmids. Purified plasmids were then subjected to IVTT using HeLa lysate. NanoLuc activity was divided by values from mock IVTT. Data shown are mean SEM for n=4 biological replicates. P<0.05, **P=0.0095, ****P<0.0001 by unpaired two-sided t-test compared to wild-type iHRV-B3. (C) NanoLuc activity at 24 hours after transfection of HeLa cells with circRNAs containing different insertions of Apt-eIF4G into an IRES of indeterminate structure (iHRV-B3). The putative secondary structure for iHRV-B3, predicted eIF4G and eIF4A binding sites, and locations of Apt-eIF4G insertions are shown. Versions (v1-v6) of each insertion were designed with different stem lengths. Double aptamer refers to insertion of Apt-eIF4G at both the distal and proximal loops. NanoLuc activity was normalized to constitutive firefly luciferase activity from the same sample, then divided by values from mock transfection. Data shown are mean±SEM for n=3 biological replicates. *P=0.0422, **P=0.0018, ***P=0.0003, ****P<0.0001 by unpaired two-sided t-test compared to wild-type iHRV-B3. (D) NanoLuc activity at 24 hours after transfection of HeLa cells with mRNA or circRNAs containing successive optimizations. mRNA was synthesized with CleanCap reagent, 100% N1′P incorporation, and a 120 nt poly(A) tail. NanoLuc activity was normalized to constitutive firefly luciferase activity from the same sample, then divided by values from mock transfection. Data shown are mean±SEM for n=4 biological replicates. **P=0.0051, ***P=0.0001, ****P<0.0001 by unpaired two-sided t-test. (E) AkaLuc activity at 24 hours after electroporation of HeLa cells with circRNAs encoding AkaLuc-P2A-CyOFP. CircRNA iCVB3-AkaLuc-P2A-CyOFP was synthesized with 5% m6A, upstream IRES topology, and random UTR spacers. AkaLuc activity was divided by values from mock electroporation. Sizes indicate lengths of the coding sequence for NanoLuc and AkaLuc-P2A-CyOFP. ****P<0.0001 by unpaired two-sided t-test.

[0039] FIG. 6. In vivo gene replacement validates engineered circRNAs with extended duration and intensity of translation. (A) CircRNA encoding NanoLuc was synthesized with the following optimizations: 5% m6A incorporation, upstream IRES topology, 5′ PABP spacer, HBA1 3′ UTR, and HRV-B3 IRES with proximal loop Apt-eIF4G insertion. CircRNAs were formulated for intraperitoneal delivery in mice using charge-altering releasable transporters (CARTs). Expression was assayed using an Ami HT optical imaging system following intraperitoneal injections of the fluorofurimazine substrate at the indicated time points. At 336 hours (14 days) after the first administration of circRNA NanoLuc, mice were redosed. (B) In vivo luminescence image of an untreated mouse (left) versus mice receiving circRNA NanoLuc (right) at 24 hours after dosing. (C) Quantification of luminescence per mouse at different time points after circNanoLuc administration. Redosing was performed at 336 hours (14 days). Data shown are mean±SEM for n=3 animals per condition. (D) An optimized circRNA encoding human erythropoietin (hEPO) was synthesized with the following optimizations: 5% m6A incorporation, upstream IRES topology, 5′ PABP spacer, HBA1 3′ UTR, and HRV-B3 IRES with proximal loop Apt-eIF4G insertion. a 120 nt poly(A) tail. Equimolar doses of circRNA and mRNA were formulated for intravenous delivery in mice using CARTs. Plasma hEPO was measured by ELISA in one cohort at the indicated time points. Reticulocytes were counted in a separate cohort at 168 hours (7 days). (E) Quantification of plasma hEPO expression at different time points after circRNA EPO or mRNA EPO administration. Data shown are mean±SEM for n=4 animals per condition. (F) Plasma hEPO expression normalized to the 24-hour level of each mouse at different time points after circRNA EPO or mRNA EPO administration. Data shown are mean±SEM for n=4 animals per condition. *P=0.0487, ***P=0.0001 by unpaired t-test with Bonferroni correction compared to mRNA. (G) Reticulocyte percentage among red blood cells at 168 hours after circRNA hEPO or mRNA hEPO administration. Data shown are mean±SEM for n=4 animals per condition. **P=0.0080 by unpaired two-sided t-test. ns, not significant. (H) Shows the gating strategy to analyze reticulocytes from peripheral mouse blood.

[0040] FIG. 7. Additional details for circRNA MoClo platform and NanoLuc assay, related to FIG. 1. (A) Part plasmids containing parts 1-6 flanked by the indicated overhangs were synthesized by combining a PCR product or premade DNA fragment with the parts entry vector in a BsmBI Golden Gate reaction. These parts corresponded to the upstream intron and 5′ untranslated region (UTR), IRES, N-terminal (N′) tag, coding sequence (CDS), C-terminal (C′) tag, and 3′ UTR and downstream intron. Parts plasmids and the circRNA backbone were subsequently combined in a BsaI Golden Gate reaction to create a circRNA plasmid. Fully assembled circRNA plasmids included the indicated restriction enzyme cut sites at key junctions to facilitate subcloning and in-frame glycine-serine linkers between parts 3, 4, and 5. Linkers were omitted if parts 3-5 were replaced with a single part. (B) Standard curve quantitation for the NanoLuc assay used to assess circRNA translation, demonstrating linearity across a 2²¹ (2 million)-fold dilution range. Data shown are mean for n=3 technical replicates.

[0041] FIG. 8. RNA modifications extend circRNA stability in vitro, related to FIG. 2. (A) NanoLuc activity at 24 hours after transfection of HeLa cells with circRNAs containing 10% incorporation of different RNA modifications. (B) Quantification of circRNA levels in HeLa cells at 24 hours after transfection with circRNAs containing the indicated RNA modifications. Data shown are mean±SEM for n=3 biological replicates. (C) Resistance of mRNA and circRNAs with indicated RNA modifications to degradation in escalating doses of fetal bovine serum (FBS). RNAs were incubated in the indicated percentages of FBS at 37° C. for 30 minutes, then briefly denatured in RNA loading buffer before gel electrophoresis. The same amount of ladder per gel and RNA per well were used to allow for comparisons between gels. (D) NanoLuc activity in supernatant after electroporation of HeLa cells with circRNA or mRNA encoding secreted NanoLuc. CircRNA was synthesized with 5% m6A incorporation and the HRV-B3 IRES. mRNA was synthesized with CleanCap reagent, 100% N1Ψ incorporation, and a 120 nt poly(A) tail. At the indicated hours (h) and days (d) post-electroporation, media was harvested to assay secreted NanoLuc and replaced. Data shown are mean±SEM for n=3 biological replicates. (E) NanoLuc activity at 24 hours after transfection of HeLa cells with circRNAs containing the indicated number of stop codons. Data shown are mean±SEM for n=3 biological replicates. (F) mNeonGreen fluorescence at 24 hours after electroporation of HeLa cells with unmodified circRNA or circRNA containing 5% m6A. Mean mNeonGreen expression was measured by flow cytometry and normalized by values from mock electroporation. Data shown are histograms for n>50,000 live singlet cells per condition and mean±SEM for n=3 biological replicates.

[0042] FIG. 9. eIF4G-binding site deletions are translation-lethal and irrecoverable, related to FIG. 4. NanoLuc activity at 24 hours after transfection of HeLa cells with circRNAs containing wild-type iCVB3, iCVB3 with Apt-eIF4G insertion, iCVB3 with eIF4G footprint deletions, or iCVB3 with eIF4G footprint deletions and attempted rescue with Apt-eIF4G. Sub-domain deletions (v1-v4) differed in the position where the stem loop was truncated, but at a minimum all ablated the eIF4G footprint.

[0043] FIG. 10. Additional large-scale screening and validation of IRESs, related to FIG. 5. (A) NanoLuc activity after in vitro transcription-translation (IVTT) of circRNA plasmids containing enterovirus (EV) or human rhinovirus B (HRV-B) IRESs. All known EV and HRV-B IRES sequences were cloned into circRNA plasmids. Purified plasmids were then subjected to IVTT using HeLa lysate (B) NanoLuc activity at 24 hours after transfection of HeLa cells with circRNAs or linear RNAs containing strong IRESs from the IVTT-based screen. Linear RNA sequences were identical to those of circRNAs with the exclusion of self-splicing introns. Data shown are mean±SEM for n=3 biological replicates. (C) NanoLuc activity at 24 hours after transfection of HeLa, HepG2, HEK293T, and KG-I cells with circRNAs containing the indicated IRESs. Values for HeLa, HepG2, and HEK293T cells are the same as in FIG. 5a.

[0044] FIG. 11. (A) TapeStation gel electrophoresis depicting the size of circRNAs encoding NanoLuc and possessing the indicated number of stop codons. (B) Western blot depicting NanoLuc protein in HeLa lysate at 24 hours after electroporation with circRNAs encoding NanoLuc and possessing the indicated number of stop codons. Each lane was loaded with 10 μg of total protein.

[0045] FIG. 12. In silico RNA structure prediction can inform IRES engineering. RNA structure predictions for synthetic IRESs synIRES01-11 at the site of aptamer insertion. For inter-domain insertions (synIRES01, 03, 05, 09, and 11), structure prediction was performed on Apt-eIF4G and the adjacent iCVB3 domains. For loop insertions (synIRES02, 04, 06, 07, 08, and 10), structure prediction was performed on Apt-eIF4G and the iCVB3 domain containing the insertion. In each structure, nucleotides corresponding to Apt-eIF4G are shown in white.

[0046] FIG. 13. iHRV-B3 enhances the activity of circRNA encoding Cre. Percentage of eGFP-positive cells at 24 hours after transfection of CreR-293T cells with mRNA or circRNAs encoding Cre recombinase. In this cell line, DsRed is expressed before Cre recombination and eGFP is expressed after. eGFP and DsRed expression were measured by flow cytometry. Data shown are mean±SEM for n=2 for biological replicates for mock and n=3 biological replicates for all other conditions. *P=0.0147 by unpaired two-sided t-test.

[0047] FIG. 14. CircRNA optimizations do not adversely affect circRNA synthesis. (A) Effect of successive circRNA optimizations on total RNA production when starting from 1 μg of in vitro transcription template. (B) Effect of successive circRNA optimizations on circRNA percentage, defined as the percentage of RNA remaining after digestion with RNaseR.

[0048] FIG. 15. Circular RNA uptake is specific to myeloid cells. a, Schematic representation of experimental model for circRNA uptake measurements. b, CircRNA and linRNA uptake measured by flow cytometry in distinct hematopoietic cell subsets from human peripheral blood after 2 hours incubation. c, Fluorescent intensity of human myeloid immune subsets after distinct incubation time points with fluorescently labeled circRNA (n=3, bars represent SEM). d, Confocal microscopy of labeled circRNA (increasing concentrations) and miRNA (last image) in human macrophages after 2 hours incubation. e, Percentage of fluorescently labeled cells after circRNA uptake in mouse (top) and human (bottom) cell lines (n=5, bars represent SEM).

[0049] FIG. 16. Circular RNA uptake is a fast and active process. a, Time course analysis of circRNA uptake measured by flow cytometry in RAW264 cells (n=5, bars represent SEM). b, Saturation curve of circRNA uptake in RAW264 cells after 24 hours incubation. Logarithmic and linear scale displayed for accurate visualization (n=3, bars represent SEM). c, Competitor assay showing fold change of circRNA uptake after normalization to cy5-circRNA control in RAW264 cells (n=3, bars represent SEM). d, Fluorescent intensity of RAW264 cells after incubation or lipofectamine transfection with fluorescently labeled circRNA at increasing concentrations comparing temperature effect (representative sample on the left and summary quantification on the right) (n=4, bars represent SEM, One sample t and Wilcoxon test **P<0.001, ****P<0.0001). e, Increasing concentration of sodium azide effect on circRNA uptake in RAW264 cells (representative sample on the left and summary quantification on the right) (n=3, bars represent SEM). One-way ANOVA followed by Tukey's test was applied in c and e *P<0.05, **P<0.01, ***P<0.001, ****P<0.0001. Differences between groups were considered significant for P values<0.05. NS, not significant FIG. 17. Circular RNA is translated and presented to the immune system. a, Nanoluciferase intensity measured in RAW264 cells after transfection (left) and uptake (right) of circNanoLuc at different time points. (n=3, bars represent SEM). b, Fluorescent intensity of SIINFEKL bound to H-2 Kb of MHC class I antibody compared to control after 24 incubation with cirOVA, Ova protein, or SIINFEKL control in MutuDC cells (n=4, bars represent Min and Max). c, Proliferation assay comparing antigen specific T cell proliferation level of OT-I cells co-cultured with MutuDC cells incubated with Ova protein, SIINFEKL, and circOVA or non translatable circRNA control (representative sample on the right and summary quantification on the left) (n=4, bars represent SEM). d, circOVA titration with and without CART to determine the minimum amount required to induce antigen-specific T cell proliferation. e, qRT-PCR quantification of immune receptors and cytokines. f, flow cytometry quantification of secreted inflammatory cytokines and g, flow cytometry quantification of activation markers after circOVA uptake or transfection compared to CpG in MutuDC cells (n=4, bars represent Min and Max). One-way ANOVA followed by Tukey's test was applied in b and g *P<0.05, **P<0.01, ***P<0.001, ****P<0.0001. Differences between groups were considered significant for P values<0.05. NS, not significant.

[0050] FIG. 18. Circular RNA in vivo delivery tropism and innate recognition. a, Schematic representation of in vivo circRNA delivery and monitoring. 50 ug of AF488-circRNA was delivered subcutaneously, serum samples were collected 6 and 24 hours after delivery. b, Absolute fraction of fluorescently positive innate cell subsets that take up circRNA (n=5, bars represent Min and Max). c, Quantification of innate cell subsets proportions and d, fluorescent intensity of activation marker CD86 in distinct innate immune cell subsets in lymph nodes, 24 hours after s.c. delivery of fluorescently labeled circRNA (n=5, bars represent Min and Max). e, Time course analysis of cytokines in serum after circRNA delivery measured by Luminex (n=5). One-way ANOVA followed by Tukey's test was applied in b-e *P<0.05, **P<0.01, ***P<0.001, ****P<0.0001.

[0051] FIG. 19. Adjuvant effect of circRNA by different routes of delivery. a, Schematic representation of circRNA immunization strategy via different delivery routes and monitoring of immune responses. Percentage of Ova-specific T cell responses in lung, spleen, and lymph nodes after b, 7 days or c, 779 30 days post-boost (n=5, bars represent Min and Max). d, Frequency of CD69+ and CD69+CD103+CD8 TRM in lungs at Day 30 post-boost (as percentage of antigen-specific CD8 T cells) (n=5, bars represent Min and Max). One-way ANOVA followed by Tukey's test was applied in b-e, n=5, *P<0.05, **P<0.01, ***P<0.001, ****P<0.0001. Differences between groups were considered significant for P values<0.05. NS, not significant.

[0052] FIG. 20. Circular RNA delivery in vivo activates T cell specific responses. a, Schematic representation of immunization strategy and monitoring of adaptive immune responses. b, Percentage of Ova-specific T cell responses in lung and spleen at day 42 (representative sample). c, Quantification of Ova-specific T cells in lung and spleen at day 7 and day 42 (n=5, bars represent Min and Max). d, Time course analysis of anti-Ova IgG antibodies in serum measured by ELISA (n=5, bars represent Min and Max). One-way ANOVA followed by Tukey's test was applied in c and d *P<0.05, **P<0.01, ***P<0.001, ****P<0.0001.

[0053] FIG. 21. circRNA uptake validation in different cell lines. a, Gating strategy used to define myeloid human cell population after uptake of circRNA. b, Histogram representation of fluorescent intensity shift after circRNA uptake in human immune cell subsets corresponding to FIG. 1c (representative sample). c, Flow cytometry quantification of increasing concentration of circRNA and linRNA in human PBMC-derived macrophages. d, CircRNA is taken up by human classical monocytes in a dose and time dependent manner (n=4, bars represent SEM). e, circRNA is taken up by J774 and RAW cells in a dose dependent manner (n=4, bars represent SEM). f, Histogram representation of fluorescence intensity shift after circRNA uptake in human liver and lung cell lines (representative sample).

[0054] FIG. 22. circRNA and linRNA uptake. a, circRNA uptake is inhibited at cold temperatures in human liver and lung cell lines (n=3, bars represent SEM). b, ATP inhibitors negatively inhibit circRNA uptake in RAW264 cells (n=4, bars represent SEM). c, Maturation signals promote circRNA uptake in RAW264 cells (n=3, bars represent SEM). d, qRT-PCR quantification of circRNA compared to mRNA after uptake or transfection in RAW264 cells (n=3, bars represent SEM). e, Representative sample of circRNA uptake compared to mRNA in distinct cell types measured by flow cytometry. f, Representative sample of circRNA uptake measurement comparison between cy5-circRNA or pHrodo-circRNA at distinct concentrations in RAW264 cells.

[0055] FIG. 23. circRNA and linRNA translation. a, Nanoluciferase intensity measured in HepG2 cells shows similar translation efficiency after uptake of mRNA (left) or circRNA (right) encoding Nanoluciferase protein. b, Detection of Ovalbumin protein after transfection of 293T with circOVA by western blot and ELISA. c, Percentage of fluorescently labeled cells after circRNA uptake in RAW264 cells (n=4, bars represent SEM).

[0056] FIG. 24. Transcriptome analysis after in vitro 825 delivery of circRNA. a, PCA analysis of normalized and transformed t 826 ranscriptome counts grouped by condition: Untreated, circRNA and CART-cirRNA (n=2). b, Volcano plot with the log 2 fold changes in gene expression between circRNA uptake and circRNA transfection with CART. c, Heatmap of normalized expression data showing differentially regulated genes following circRNA uptake or circRNA transfection with CART compared to untreated cells. Functional analysis of the top differentially expressed genes and their linkages with biological concepts (GO terms) after d, circRNA uptake and e, circRNA transfection with CART.

[0057] FIG. 25. Transcriptome analysis after in vitro 825 delivery of circRNA. a, PCA analysis of normalized and transformed t 826 ranscriptome counts grouped by condition: Untreated, circRNA and CART-cirRNA (n=2). b, Volcano plot with the log 2 fold changes in gene expression between circRNA uptake and circRNA transfection with CART. c, Heatmap of normalized expression data showing differentially regulated genes following circRNA uptake or circRNA transfection with CART compared to untreated cells. Functional analysis of the top differentially expressed genes and their linkages with biological concepts (GO terms) after d, circRNA uptake and e, circRNA transfection with CART.

[0058] FIG. 26. Innate response to circRNA immunization 842 with and without CART. a, Frequencies of innate cell subsets in the draining inguinal LNs 24 h after s.c. delivery of circRNA, circRNA delivered in CART (CART-circOVA), and CART alone. b, Frequencies of circRNA+ cells as % of given cell subsets (indicating c 845 ircRNA uptake). c, CD86 expression on innate cell subsets in the four immunization groups.

[0059] FIG. 27 Adjuvant effect of circRNA 848 by different routes of delivery. a, Gating strategy used to distinguish adaptive immune subsets after delivery of circRNA. b, Anti-Ova IgG and c, IgA antibodies in serum measured by ELISA at day 30 post-boost after circRNA immunization by different delivery routes (n=5, bars represent Min and Max). d, Percentage of Ova-specific TRM cells (gated as CD69+) in lung (as % of CD45+ live cells). e, Frequency of Class I tetramer+CD8 T cells. f, anti-853 Ova IgG (reciprocal EC50 titers shown), and g, IgA antibodies (endpoint titer shown) in serum measured by ELISA at day 30 post-boost of i.n. delivery of circRNA compared to Poly(IC) (n=5, bars represent Min and Max). One-way ANOVA followed by Tukey's test was applied in b-e, n=5. No values are displayed as no significant differences were found.

[0060] FIG. 28. Adaptive immune responses after immunization with circRNA. a, Gating strategy used through immunization experiments to measure antigen specific T cell responses. b, Percentage of Ova-specific T cell in lung after i.n. immunization with naked circOVA (n=5, bars represent SEM). c, Percentage of Ova-specific T cells in peripheral blood at day 7 post-prime (n=4, bars represent SEM). d, Proportion of SLEC and MPEC subsets at day 7 post-prime and day 21 post-boost (n=5, bars represent Min and Max).

[0061] FIG. 29. a, Schematic representation of immunization strategy and monitoring of tumor volume after inoculation with B16-F10-OVA cells. b, Tumor volume monitoring over 22 days (n=5, bars represent SEM).

[0062] FIG. 30. Adaptive immune responses after immunization with circOVA. a, Representative bioluminescence images and b, quantification of tumors from control mice and mice vaccinated with circOVA. (n=4, bars represent SD). Unpaired t-test was applied *p<0.05.

### DETAILED DESCRIPTION

[0063] Protein translation in eukaryotic cells typically relies on the m⁷G cap present at the 5′ end of mRNAs. However, several cap-independent translation mechanisms have been identified. For example, some viral mRNAs employ alternative mechanisms of translation initiation based on internal ribosome entry via an internal ribosome entry sequence (IRES). Cap-independent translation of proteins typically suffers from lower translation strength, as compared to cap-dependent (mRNA translation).

[0064] Provided herein are viral and synthetic IRES that can drive expression of a protein (e.g., a non-viral protein) from a circular RNA, along with optimization of circRNAs comprising such IRESs. The viral and synthetic IRES described herein satisfy an unmet need in the field of cap-independent translation. The IRESs identified may also be used for polycistronic mRNA gene delivery. Because the IRESs described herein drive expression at a wide range of strengths and some in a cell type-dependent manner, the choice of IRES can be used to independently control expression levels of the two or more proteins in a single transcript. This expression level tunability offers an additional layer of control over just dosing leveling.

[0065] Further provided herein are methods of delivery of circRNAs to cells (e.g., in vitro or in vivo) and research, screening, and clinical uses thereof.

### Definitions

[0066] To facilitate an understanding of the present technology, a number of terms and phrases are defined below. Additional definitions are set forth throughout the detailed description.

[0067] The use of the terms “a” and “an” and “the” and “at least one” and similar referents in the context of describing the invention (especially in the context of the following claims) are to be construed to cover both the singular and the plural, unless otherwise indicated herein or clearly contradicted by context.

[0068] The use of the term “at least one” followed by a list of one or more items (for example, “at least one of A and B”) is to be construed to mean one item selected from the listed items (A or B) or any combination of two or more of the listed items (A and B), unless otherwise indicated herein or clearly contradicted by context.

[0069] Recitation of ranges of values herein are merely intended to serve as a shorthand method of referring individually to each separate value falling within the range, unless otherwise indicated herein, and each separate value is incorporated into the specification as if it were individually recited herein.

[0070] All methods described herein can be performed in any order unless otherwise indicated herein or otherwise clearly contradicted by context. The use of any and all examples, or exemplary language (e.g., “such as”) provided herein, is intended merely to better illuminate the invention and does not pose a limitation on the scope of the invention unless otherwise claimed. No language in the specification should be construed as indicating any non-claimed element as essential to the practice of the invention.

[0071] Nomenclature for nucleotides, nucleic acids, nucleosides, and amino acids used herein is consistent with International Union of Pure and Applied Chemistry (IUPAC) standards (see, e.g., bioinformatics.org/sms/iupac.html).

[0072] When referring to a nucleic acid sequence or protein sequence, the term “identity” is used to denote similarity between two sequences. Sequence similarity or identity may be determined using standard techniques known in the art, including, but not limited to, the local sequence identity algorithm of Smith & Waterman, Adv. Appl. Math. 2, 482 (1981), by the sequence identity alignment algorithm of Needleman & Wunsch, J Mol. Biol. 48,443 (1970), by the search for similarity method of Pearson & Lipman, Proc. Natl. Acad. Sci. USA 85, 2444 (1988), by computerized implementations of these algorithms (GAP, BESTFIT, FASTA, and TFASTA in the Wisconsin Genetics Software Package, Genetics Computer Group, 575 Science Drive, Madison, WI), the Best Fit sequence program described by Devereux et al., Nucl. Acid Res. 12, 387-395 (1984), or by inspection. Another algorithm is the BLAST algorithm, described in Altschul et al., J Mol. Biol. 215, 403-410, (1990) and Karlin et al., Proc. Natl. Acad. Sci. USA 90, 5873-5787 (1993). A particularly useful BLAST program is the WU-BLAST-2 program which was obtained from Altschul et al., Methods in Enzymology, 266, 460-480 (1996); blast.wustl/edu/blast/README.html. WU-BLAST-2 uses several search parameters, which are optionally set to the default values. The parameters are dynamic values and are established by the program itself depending upon the composition of the particular sequence and composition of the particular database against which the sequence of interest is being searched; however, the values may be adjusted to increase sensitivity. Further, an additional useful algorithm is gapped BLAST as reported by Altschul et al, (1997) Nucleic Acids Res. 25, 3389-3402. Unless otherwise indicated, percent identity is determined herein using the algorithm available at the internet address: blast.ncbi.nlm.nih.gov/Blast.cgi.

[0073] The terms “internal ribosome entry site,” “internal ribosome entry sequence,” “IRES” and “IRES sequence region” are used interchangeably herein and refer to cis elements of viral or human cellular RNAs (e.g., messenger RNA (mRNA) and/or circRNAs) that bypass the steps of canonical eukaryotic cap-dependent translation initiation. The canonical cap-dependent mechanism used by the vast majority of eukaryotic mRNAs requires an m⁷G cap at the 5′ end of the mRNA, initiator Met-tRNAmet, more than a dozen initiation factor proteins, directional scanning, and GTP hydrolysis to place a translationally competent ribosome at the start codon. IRESs typically are comprised of a long and highly structured 5′-UTR which mediates the translation initiation complex binding and catalyzes the formation of a functional ribosome. “Aptamers” are short, single-stranded DNA or RNA molecules that can selectively bind to a specific target. The target may be, for example, a protein, peptide, carbohydrate, small molecule, toxin, or a live cell. Some aptamers can bind DNA, RNA, self-aptamers or other non-self aptamers. Aptamers assume a variety of shapes due to their tendency to form helices and single-stranded loops. Illustrative DNA and RNA aptamers are listed in the Aptamer database (scicrunch.org/resources/Any/record/nlx_144509-1/SCR_001781/resolver?q=*&l=). The terms “coding sequence,” “coding sequence region,” “coding region,” and “CDS” when referring to nucleic acid sequences may be used to refer to the portion of a DNA or RNA sequence, for example, that is or may be translated to protein. The terms “reading frame,” “open reading frame,” and “ORF,” may be used herein to refer to a nucleotide sequence that begins with an initiation codon (e.g., ATG) and, in some embodiments, ends with a termination codon (e.g., TAA, TAG, or TGA). Open reading frames may contain introns and exons, and as such, all CDSs are ORFs, but not all ORF are CDSs.

[0074] The terms “complementary” and “complementarity” refers to the relationship between two nucleic acid sequences or nucleic acid monomers having the capacity to form hydrogen bond(s) with one another by either traditional Watson-Crick base-paring or other non-traditional types of pairing. The degree of complementarity between two nucleic acid sequences can be indicated by the percentage of nucleotides in a nucleic acid sequence which can form hydrogen bonds (e.g., Watson-Crick base pairing) with a second nucleic acid sequence (e.g., about 50%, about 60%, about 70%, about 80%, about 90%, and 100% complementary). Two nucleic acid sequences are “perfectly complementary” if all the contiguous nucleotides of a nucleic acid sequence will hydrogen bond with the same number of contiguous nucleotides in a second nucleic acid sequence. Two nucleic acid sequences are “substantially complementary” if the degree of complementarity between the two nucleic acid sequences is at least 60% (e.g., at least 65%, at least 70%, at least 75%, at least 80%, at least 85%, at least 90%, at least 95%, at least 97%, at least 98%, at least 99%, or 100%) over a region of at least 8 nucleotides (e.g., at least 9, at least 10, at least 11, at least 12, at least 13, at least 14, at least 15, at least 16, at least 17, at least 18, at least 19, at least 20, at least 21, at least 22, at least 23, at least 24, at least 25, at least 30, at least 35, at least 40, at least 45, at least 50, or more nucleotides), or if the two nucleic acid sequences hybridize under at least moderate, or, in some embodiments high, stringency conditions. Exemplary moderate stringency conditions include overnight incubation at 37° C. in a solution comprising 20% formamide, 5×SSC (150 mM NaCl, 15 mM trisodium citrate), 50 mM sodium phosphate (pH 7.6), 5×Denhardt's solution, 10% dextran sulfate, and 20 mg/ml denatured sheared salmon sperm DNA, followed by washing the filters in 1×SSC at about 37-50° C., or substantially similar conditions, e.g., the moderately stringent conditions described in Sambrook, J., Molecular Cloning: A Laboratory Manual, Cold Spring Harbor Laboratory Press; 4th edition (Jun. 15, 2012). High stringency conditions are conditions that use, for example (1) low ionic strength and high temperature for washing, such as 0.015 M sodium chloride/0.0015 M sodium citrate/0.1% sodium dodecyl sulfate (SDS) at 50° C., (2) employ a denaturing agent during hybridization, such as formamide, for example, 50% (v/v) formamide with 0.1% bovine serum albumin (BSA)/0.1% Ficoll/0.1% polyvinylpyrrolidone (PVP)/50 mM sodium phosphate buffer at pH 6.5 with 750 mM sodium chloride and 75 mM sodium citrate at 42° C., or (3) employ 50% formamide, 5×SSC (0.75 MNaCl, 0.075 M sodium citrate), 50 mM sodium phosphate (pH 6.8), 0.1% sodium pyrophosphate, 5×Denhardt's solution, sonicated salmon sperm DNA (50 μg/ml), 0.1% SDS, and 10% dextran sulfate at 42° C., with washes at (i) 42° C. in 0.2×SSC, (ii) 55° C. in 50% formamide, and (iii) 55° C. in 0.1×SSC (optionally in combination with EDTA). Additional details and an explanation of stringency of hybridization reactions are provided in, e.g., Sambrook, supra; and Ausubel et al., eds., Short Protocols in Molecular Biology, 5th ed., John Wiley & Sons, Inc., Hoboken, N.J. (2002). The term “hybridization” or “hybridized” when referring to nucleic acid sequences is the association formed between and/or among sequences having complementarity.

[0075] The term “secondary structure,” or “secondary structure element” or “secondary structure sequence region” as used herein in reference to nucleic acid sequences (e.g., RNA, DNA, etc), refers to any non-linear conformation of nucleotide or ribonucleotide units. Such non-linear conformations may include base-pairing interactions within a single nucleic acid polymer or between two polymers. Single-stranded RNA typically forms complex and intricate base-pairing interactions due to its increased ability to form hydrogen bonds stemming from the extra hydroxyl group in the ribose sugar. Examples of secondary structures or secondary structure elements include but are not limited to, for example, stem-loops, hairpin structures, bulges, internal loops, multiloops, coils, random coils, helices, partial helices and pseudoknots. In some embodiments, the term “secondary structure” may refer to a SuRE element. The term “SuRE” stands for stem-loop structured RNA element (SuRE).

[0076] The term “free energy,” as used herein, refers to the energy released by folding an unfolded polynucleotide (e.g., RNA or DNA, etc.) molecule, or, conversely, the amount of energy that must be added in order to unfold a folded polynucleotide (e.g., RNA or DNA, etc.) The “minimum free energy (MFE)” of a polynucleotide (e.g., DNA, RNA, etc.) describes the lowest value of free energy observed for the polynucleotide when assessed for various secondary structures thereof. The MFE of an RNA molecule may be used to predict RNA or DNA secondary structure and is affected by the number, composition, and arrangement of the RNA or RNA nucleotides. The more negative free energy a structure has, the more likely is its formation since more stored energy is released by formation of the structure.

[0077] The term “melting temperature (Tm)” refers to the temperature at which about 50% of double-stranded nucleic acid structures (e.g., DNA/DNA, DNA/RNA, or RNA/RNA duplexes) denature and dissociate to single-stranded structures.

[0078] The term “recombinant,” as used herein, means that a particular nucleic acid (DNA or RNA) is the product of various combinations of cloning, restriction, polymerase chain reaction (PCR) and/or ligation steps resulting in a construct having a structural coding or non-coding sequence distinguishable from endogenous nucleic acids found in natural systems. DNA sequences encoding polypeptides can be assembled from cDNA fragments or from a series of synthetic oligonucleotides to provide a synthetic nucleic acid which is capable of being expressed from a recombinant transcriptional unit contained in a cell or in a cell-free transcription and translation system. Genomic DNA comprising the relevant sequences can also be used in the formation of a recombinant gene or transcriptional unit. Sequences of non-translated DNA may be present 5′ or 3′ from the open reading frame, where such sequences do not interfere with manipulation or expression of the coding regions and may act to modulate production of a desired product by various mechanisms. Alternatively, DNA sequences encoding RNA that is not translated may also be considered recombinant. Thus, the term “recombinant” nucleic acid also refers to a nucleic acid which is not naturally occurring, e.g., is made by the artificial combination of two otherwise separated segments of sequence through human intervention. This artificial combination is often accomplished by either chemical synthesis means, or by the artificial manipulation of isolated segments of nucleic acids, e.g., by genetic engineering techniques. Such is usually done to replace a codon with a codon encoding the same amino acid, a conservative amino acid, or a non-conservative amino acid. Alternatively, the artificial combination may be performed to join together nucleic acid segments of desired functions to generate a desired combination of functions. This artificial combination is often accomplished by either chemical synthesis means, or by the artificial manipulation of isolated segments of nucleic acids, e.g., by genetic engineering techniques. When a recombinant polynucleotide encodes a polypeptide, the sequence of the encoded polypeptide can be naturally occurring (“wild type”) or can be a variant (e.g., a mutant) of the naturally occurring sequence. Thus, the term “recombinant” polypeptide does not necessarily refer to a polypeptide whose sequence does not naturally occur. Instead, a “recombinant” polypeptide is encoded by a recombinant DNA sequence, but the sequence of the polypeptide can be naturally occurring (“wild type”) or non-naturally occurring (e.g., a variant, a mutant, etc.). Thus, a “recombinant” polypeptide is the result of human intervention, but may comprise a naturally occurring amino acid sequence.

[0079] The terms “operably linked” and “operatively linked,” as used herein, refer to an arrangement of elements that are configured so as to perform, function or be structured in such a manner as to be suitable for an intended purpose. For example, a given promoter operably linked to a coding sequence is capable of effecting the expression of the coding sequence when the proper enzymes are present. Expression is meant to include the transcription of any one or more of a recombinant nucleic acid encoding a circular RNA, or mRNA from a DNA or RNA template and can further include translation of a protein from a recombinant circular RNA comprising an IRES sequence (e.g., a non-native IRES). Thus, for example, intervening untranslated yet transcribed sequences can be present between a promoter sequence and a coding sequence and the promoter sequence can still be considered to be “operably linked” to the coding sequence.

### Circular RNAs

[0080] The instant disclosure provides recombinant circular RNA molecules comprising an internal ribosome entry site (IRES) sequence operably linked to a protein-coding sequence, and DNA sequences encoding the same. In some embodiments, the protein coding sequence encodes a non-viral protein. For example, in some embodiments, the protein coding sequence encodes an animal protein, a plant protein, a bacterial protein, a fungal protein, or an artificial protein. In some embodiments, the protein coding sequence encodes a mammalian protein, such as a human protein.

[0081] Recombinant circRNA molecules may be generated or engineered according to several methods. For example, recombinant circRNA molecules may be generated by back-splicing of linear RNAs. For example, in some embodiments, a recombinant circular RNA is produced by back-splicing of a downstream 5′ splice site (splice donor) to an upstream 3′ splice site (splice acceptor). The splice donor and/or splice acceptor may be found, for example, in a human intron or portion thereof that is typically used for circRNA production at endogenous loci. In some embodiments, a recombinant circular RNA is produced by contacting a cell with a DNA plasmid, wherein the DNA plasmid encodes a linear RNA, and the linear RNA is back-spliced to produce a recombinant circular RNA. In some embodiments, the DNA plasmid comprises introns from the mammalian ZKSCAN1 gene.

[0082] In some embodiments, circular RNAs can be generated by a non-mammalian splicing method. For example, linear RNAs containing various types of introns, including self-splicing group I introns, self-splicing group II introns, spliceosomal introns, and tRNA introns can be circularized. In particular, group I and group II introns have the advantage that they can be readily used for production of circular RNAs in vitro as well as in vivo because of their ability to undergo self-splicing due to their autocatalytic ribozyme activity.

[0083] Alternatively, circular RNAs can be produced in vitro from a linear RNA by chemical or enzymatic ligation of the 5′ and 3′ ends of the RNA. Chemical ligation can be performed, for example, using cyanogen bromide (BrCN) or ethyl-3-(3′-dimethylaminopropyl) carbodiimide (EDC) for activation of a nucleotide phosphomonoester group to allow phosphodiester bond formation (Sokolova, FEBS Lett, 232:153-155 (1988); Dolinnaya et al., Nucleic Acids Res., 19: 3067-3072 (1991); Fedorova, Nucleosides Nucleotides Nucleic Acids, 15: 1137-1147 (1996)). Alternatively, enzymatic ligation can be used to circularize RNA. Exemplary ligases that can be used include T4 DNA ligase (T4 Dnl), T4 RNA ligase 1 (T4 Rnl 1), and T4 RNA ligase 2 (T4 Rnl 2).

[0084] In some embodiments, splint ligation may be used to generate circular RNA. Splint ligation involves the use of an oligonucleotide splint that hybridizes with the two ends of a linear RNA to bring the ends of the linear RNA together for ligation. Hybridization of the splint, which can be either a deoxyribo-oligonucleotide or a ribooligonucleotide, orients the 5′-phosphate and 3′-OH of the RNA ends for ligation. Subsequent ligation can be performed using either chemical or enzymatic techniques, as described above. Enzymatic ligation can be performed, for example, with T4 DNA ligase (DNA splint required), T4 RNA ligase 1 (RNA splint required) or T4 RNA ligase 2 (DNA or RNA splint). Chemical ligation, such as with BrCN or EDC, is more efficient in some cases than enzymatic ligation if the structure of the hybridized splint-RNA complex interferes with enzymatic activity (see, e.g., Dolinnaya et al. Nucleic Acids Res, 21(23): 5403-5407 (1993); Petkovic et al., Nucleic Acids Res, 43(4): 2454-2465 (2015)).

[0085] In some embodiments, the modular cloning platform shown in FIG. 7 is used to generate plasmids for use in generating cirRNAs. This platform allows for the rapid synthesis of large libraries. The platform can be used for random library generation, as demonstrated with IRES shuffling. Independent libraries can also be modularly assembled to produce rich RNA element data sets, such as combining shuffled 5′ UTR and shuffled 3′ UTR regions to flank a reporter gene. strengths. This approach can vastly expand the repertoire of usable IRESs and may enable delivery of circRNAs with finely tuned translational activities that parallel physiological expression. Translation from the a given IRES can differ by 100-fold depending on whether the RNA was circular or linear. This is consistent with a recent screen for sequences driving cap-independent translation in circular and linear RNAs and indicates that there are mechanisms of translational control unique to circRNAs (Chen, C. K. et al. Structured elements drive extensive circular RNA translation. Mol. Cell 81, 4300-4318.e13 (2021), the contents of which are herein incorporated by reference in their entirety).

[0086] In some embodiments, circRNAs comprise optimized 3′ and/or 5′ UTRs. In some embodiments, the 5′ UTR comprises or is ACUCACUAUUUGUUUUCGCGCCCAGUUGCAAAAAGUGUCG and the 3′ UTR comprises or is a β-globin 3′ UTR or a truncated β-globin 3′ UTR or a sequence at least 90% (e.g., at least 95%, 96%, 97%, 98%, or 99%) identical thereof). In some embodiments, the β-globin 3′ UTR is truncated after the AAUAAA polyadenylation signal. In some embodiments, 10, 20, 30, 40, 5-, 60, 70, 80, 90, or 100 nucleotides are truncated 3′ of the polyadenylation site.

[0087] While circular RNAs generally are more stable than their linear counterparts, primarily due to the absence of free ends necessary for exonuclease-mediated degradation, additional modifications may be made to the recombinant circRNA described herein to further improve stability. Still other kinds of modifications may improve circularization efficiency, purification of circRNA, and/or protein expression from circRNA. For example, the recombinant circRNA may be engineered to include “homology arms” (i.e., 9-19 nucleotides in length placed at the 5′ and 3′ ends of a precursor RNA with the aim of bringing the 5′ and 3′ splice sites into proximity of one another), spacer sequences, and/or a phosphorothioate (PS) cap (Wesselhoeft et al., Nat. Commun., 9: 2629 (2018)). The recombinant circRNA also may be engineered to include 2′-O-methyl-, -fluoro- or —O-methoxyethyl conjugates, phosphorothioate backbones, or 2′,4′-cyclic 2′-O-ethyl modifications to increase the stability thereof (Holdt et al., Front Physiol., 9: 1262 (2018); Krützfeldt et al., Nature, 438(7068): 685-9 (2005); and Crooke et al., Cell Metab., 27(4): 714-739 (2018)). The recombinant circRNA molecule also may comprise one or more modifications that reduce the innate immunogenicity of the circRNA molecule in a host, such as at least one N6-methyladenosine (m⁶A).

[0088] In some embodiments, the recombinant circRNA molecule comprises at least one 2-thiouridine (2ThioU) or at least one 2′-O-methylcytidine (2OMeC). 2-thiouridine is a modified nucleobase found in tRNAs that has been shown to stabilize U:A base pairs and destabilize U:G wobble pairs (Rodriguez-Hernandez et al., J. Mol. Biol. 2013; 425:3888-3906). Methylation of 2′-hydroxyl groups is one of the most common posttranscriptional modifications of naturally occurring stable RNA molecules (Satoh et al., RNA 2000. 6: 680-686). For example, methylation of tRNA at the 2′-OH position of the ribose sugar is generally thought to increase the stability of tRNA via mechanisms that protect against spontaneous hydrolysis or nuclease digestion (e.g., in non-helical regions) and reinforce intra-loop interactions that stabilize the tertiary structure of the molecule (Endres et al., PLoS ONE 15 (2): e0229103). Any number of nucleotides (e.g., uridine and/or cytidine) in a particular circRNA molecule generated as described herein may be modified (e.g., replaced) with a corresponding number of 2-thiouridine (2ThioU) or 2′-O-methylcytidine (2OMeC). Ideally, at least one nucleotide in the circRNA molecule is replaced with a 2ThioU or a 2OMeC. In some embodiments, at least 1% (e.g., 1%, 2%, 3%, 4%, 5%, 6%, 7%, 8%, 9% or more) of the nucleotides in the recombinant circular RNA molecule are replaced with 2ThioU or a 2OMeC. In other embodiments, at least 10% (e.g., 10%, 11%, 12%, 13%, 14%, 15%, 20%, 30%, 40%, 50%, 60%, 70%, 80%, 90%, or more) of the nucleotides in the recombinant circular RNA molecule are replaced with 2ThioU or 2OMeC. For example, the recombinant circRNA molecule comprises about 2% to about 5% (e.g., 2.5%, 3%, 3.5%, 4%, or 4.5%) 2-thiouridine or 2-O-methylcytidine. In some embodiments, the recombinant circRNA molecule comprises about 2.5% 2ThioU or 2OMeC. In other embodiments, all (i.e., 100%) of the uridine nucleotides in the recombinant circular RNA molecule may be replaced with 2ThioU, or all (i.e., 100%) of the cytidine nucleotides in the recombinant circRNA molecule may be replaced with 2OMeC. It will be appreciated that the number of 2ThioU or 2OMeC modifications introduced into a recombinant circular RNA molecule will depend upon the particular use of the circRNA.

[0089] In some embodiments, a DNA sequence encoding a circular RNA molecule comprises sequences that encode at least two introns and at least one exon. The term “exon,” as used herein, refers to a nucleic acid sequence present in a gene which is represented in the mature form of an RNA molecule after excision of introns during transcription. Exons may be translated into protein (e.g., in the case of messenger RNA (mRNA)). The term “intron,” as used herein, refers to a nucleic acid sequence present in a given gene which is removed by RNA splicing during maturation of the final RNA product. Introns are generally found between exons. During transcription, introns are removed from precursor messenger RNA (pre-mRNA), and exons are joined via RNA splicing. In some embodiments, the recombinant circular RNA molecule comprises a nucleic acid sequence which includes one or more exons and one or more introns. Accordingly, circular RNAs can be generated using either an endogenous or exogenous intron, as described in WO 2017/222911. As used herein, the term “endogenous intron” means an intron sequence that is native to the host cell in which the circRNA is produced. For example, a human intron is an endogenous intron when the circRNA is expressed in a human cell. An “exogenous intron” means an intron that is heterologous to the host cell in which the circRNA is generated. For example, a bacterial intron would be an exogenous intron when the circRNA is expressed in a human cell. Numerous intron sequences from a wide variety of organisms and viruses are known and include sequences derived from genes encoding proteins, ribosomal RNA (rRNA), or transfer RNA (tRNA). Representative intron sequences are available in various databases, including the Group I Intron Sequence and Structure Database (rna.whu.edu.cn/gissd/), the Database for Bacterial Group II Introns (webapps2.ucalgary.ca/-groupii/index.html), the Database for Mobile Group II Introns (fp.ucalgary.ca/group2introns), the Yeast Intron DataBase (emblS16 heidelberg.de/Externallnfo/seraphin/yidb.html), the Ares Lab Yeast Intron Database (compbio.soe.ucsc.edu/yeast_introns.html), the Ul2 Intron Database (genome.crg.es/cgibin/u12db/u12db.cgi), and the Exon-Intron Database (bpg.utoledo.edu/-afedorov/lab/eid.html).

[0090] In some embodiments, a nucleic acid (e.g., a DNA) encoding a circular RNA molecule comprises a self-splicing group I intron. Group I introns are a distinct class of RNA self-splicing introns which catalyze their own excision from mRNA, tRNA, and rRNA precursors in a wide range of organisms. All known group I introns present in eukaryote nuclei interrupt functional ribosomal RNA genes located in ribosomal DNA loci. Nuclear group I introns appear widespread among eukaryotic microorganisms, and the plasmodial slime molds (myxomycetes) contain an abundance of self-splicing introns. The self-splicing group I intron included in the DNA encoding the circular RNA molecule may be obtained or derived from any organism, such as, for example, bacteria, bacteriophages, and eukaryotic viruses. Self-splicing group I introns also may be found in certain cellular organelles, such as mitochondria and chloroplasts, and such self-splicing introns may be incorporated into the nucleic acid encoding a circular RNA molecule.

[0091] In some embodiments, a nucleic acid encoding a recombinant circular RNA molecule comprises a self-splicing group I intron of the phage T4 thymidylate synthase (td) gene. The group I intron of phage T4 thymidylate synthase (td) gene is well characterized to circularize while the exons linearly splice together (Chandry and Belfort, Genes Dev., 1: 1028-1037 (1987); Ford and Ares, Proc. Natl. Acad Sci. USA, 91: 3117-3121 (1994); and Perriman and Ares, RNA, 4: 1047-1054 (1998)). When the td intron order is permuted (i.e., 5′ half placed at the 3′ position and vice versa) flanking any exon sequence, the exon is circularized via two autocatalytic transesterification reactions (Ford and Ares, supra; Puttaraju and Been, Nucleic Acids Symp. Ser., 33: 49-51 (1995)).

[0092] In some embodiments, a nucleic acid (e.g., a DNA) encoding the recombinant circular RNA molecule comprises a ZKSCAN1 intron. The ZKSCAN1 intron is described in, for example, Yao, Z., et al., Mol. Oncol. (2017) 11(4):422-437. In some embodiments, a nucleic acid encoding the recombinant circular RNA molecule comprises a miniZKSCAN1 intron. The recombinant circular RNA molecule may be of any length or size. For example, the recombinant circular RNA molecule may comprise between about 200 nucleotides and about 10,000 nucleotides (e.g., about 300, about 400, about 500, about 600, about 700, about 800, about 900, about 1,000, about 2,000, about 3,000, about 4,000, about 5,000, about 6,000, about 7,000, about 8,000, or about 9,000 nucleotides, or a range defined by any two of the foregoing values). In some embodiments, the recombinant circular RNA molecule comprises between about 500 and about 6,000 nucleotides (about 550, about 650, about 750, about 850, about 950, about 1,100, about 1,200, about 1,300, about 1,400, about 1,500, about 1,600, about 1,700, about 1,800, about 1,900, about 2,100, about 2,200, about 2,300, about 2,400, about 2,500, about 2,600, about 2,700, about 2,800, about 2,900, about 3,100, about 3,300, about 3,500, about 3,700, about 3,800, about 3,900, about 4,100, about 4,300, about 4,500, about 4,700, about 4,900, about 5,100, about 5,300, about 5,500, about 5,700, or about 5,900 nucleotides, or a range defined by any two of the foregoing values). In one embodiment, the recombinant circular RNA molecule comprises about 1,500 nucleotides.

[0093] In some embodiments, a recombinant circular RNA molecule comprises an internal ribosome entry site (TRES) sequence operably linked to a protein-coding sequence; wherein the IRES sequence is a viral sequence; and wherein the protein-coding sequence encodes a non-viral protein.

[0094] In some embodiments, a recombinant circular RNA molecule comprises a protein-coding nucleic acid sequence region and an internal ribosome entry site (IRES) sequence region operably linked to the protein-coding nucleic acid sequence region, wherein the IRES comprises: at least one sequence region having secondary structure element; and a sequence region that is complementary to an 18S ribosomal RNA (rRNA); wherein the IRES has a minimum free energy (MFE) of less than −18.9 kJ/mol and a melting temperature of at least 35.0° C. In some embodiments, the IRES sequence is linked to the protein-coding nucleic acid sequence region in a non-native configuration.

[0095] The disclosure also provides a recombinant circular RNA molecule comprising a protein-coding nucleic acid sequence region and an internal ribosome entry site (TRES) sequence region operably linked to the protein-coding nucleic acid sequence; wherein the IRES is encoded by any one of the nucleic acid sequences listed in Table 1A or Table 1B, or a nucleic acid sequence that has at least 90% or at least 95% identity or homology thereto. In some embodiments, the IRES sequence is linked to the protein-coding nucleic acid sequence region in a non-native configuration.

### Internal Ribosome Entry Sequences

[0096] The recombinant circular RNAs described herein comprise an internal ribosome entry site (IRES). These IRES sequences may be operably linked to a protein-coding sequence of the circRNA. Inclusion of an IRES permits the translation of one or more open reading frames from a circular RNA. The IRES attracts a eukaryotic ribosomal translation initiation complex and promotes translation initiation.

[0097] Provided herein are various IRES sequences which, when present in a circRNA, drive translation of a protein encoded by the circRNA. In some embodiments, the IRES of a circRNA may be operably linked to a protein-coding nucleic acid sequence. In some embodiments, the IRES of a circRNA is operably linked to a protein-coding nucleic acid sequence in a non-native configuration. In some embodiments, the IRES is a human IRES. In some embodiments, the IRES is a viral IRES. In some embodiments, the IRES is a type 1 IRES.

[0098] As used herein, the term “non-native configuration” refers to a linkage between an IRES and a protein-coding nucleic acid that does not occur in a naturally occurring circRNA molecule. For example, a viral IRES may be operably linked to a protein-coding nucleic acid sequence in a circular RNA, or an IRES that is not found in naturally occurring circRNA molecules may be operably linked to a protein-coding nucleic acid sequence in a circRNA. In some embodiments, an IRES that is found in naturally occurring circRNA molecules operably linked to a certain protein-coding nucleic acid is operably linked to a different protein-coding nucleic acid (i.e., a nucleic acid to which the IRES is not operably linked in any naturally-occurring circRNA). In some embodiments, an IRES that is found in naturally occurring linear mRNAs is operably linked to a protein coding sequence in a circular RNA.

[0099] A number of linear IRES sequences are known and may be included in a recombinant circular RNA molecule as described herein. For example, linear IRES sequences may be derived from a wide variety of viruses, such as from leader sequences of picornaviruses (e.g., encephalomyocarditis virus (EMCV) UTR) (Jang et al., J. Virol., 63: 1651-1660 (1989)), the polio leader sequence, the hepatitis A virus leader, the hepatitis C virus IRES, human rhinovirus type 2 IRES (Dobrikova et al., Proc. Natl. Acad. Sci., 100(25): 15125-15130 (2003)), an IRES element from the foot and mouth disease virus (Ramesh et al., Nucl. Acid Res., 24: 2697-2700 (1996)), and a giardiavirus IRES (Garlapati et al., J. Biol. Chem., 279(5): 3389-3397 (2004)). A variety of nonviral IRES sequences also can be included in a circular RNA molecule, including but not limited to, IRES sequences from yeast, the human angiotensin II type 1 receptor IRES (Martin et al., Mol. Cell Endocrinol., 212: 51-61 (2003)), fibroblast growth factor IRESs (e.g., FGF-1 IRES and FGF-2 IRES, Martineau et al., Mol. Cell. Biol., 24(17): 7622-7635 (2004)), vascular endothelial growth factor IRES (Baranick et al., Proc. Natl. Acad Sci. U.S.A., 105(12): 4733-4738 (2008); Stein et al., Mol. Cell. Biol., 18(6): 3112-3119 (1998); Bert et al., RATA, 12(6): 1074-1083(2006)), and insulin-like growth factor 2 IRES (Pedersen et al., Biochem. J., 363(Pt 1): 37-44 (2002)).

[0100] IRES sequences and vectors encoding IRES elements are commercially available from a variety of sources, such as, for example, Clontech (Mountain View, CA), Invivogen (San Diego, CA), Addgene (Cambridge, MA) and GeneCopoeia (Rockville, MD), and IRESite: The database of experimentally verified IRES structures (iresite.org). Notably, these databases focus on activity of IES sequences in mRNA (i.e., linear RNAs), and do not focus on circRNA IRES activity profiles.

### Viral IRES Sequences

[0101] In some embodiments, the circRNAs described herein comprise viral IRES sequence. The viral IRES sequence may be operably linked to a protein-coding sequence in a non-native configuration. For example, the viral IRES sequence may be operably linked to a sequence that encodes a non-viral protein. In some embodiments, the protein coding sequence encodes an animal protein, a plant protein, a bacterial protein, a fungal protein, or an artificial protein. In some embodiments, the protein coding sequence encodes a mammalian protein, such as a human protein. In some embodiments, the viral IRES sequence, when placed into a circular RNA, drives potent translation of a protein encoded by the circular RNA.

[0102] Table 7 below provides a non-limiting list of viral IRES that may be used in a circRNA to drive expression of a protein encoded by the circular RNA. Also provided in Table 7 are GenBank Accession Nos. for the genomic sequences from which the viral IRES were identified, Sequences encoding the viral IRES are provided in the SEQUENCE APPENDIX.

TABLE 7
Illustrative viral IRES sequences

| Viral IRES | GenBank Accession No. |
|---|---|
| iPV1 | NC_002058 |
| iPV2 | D00625 |
| iPV3 | AJ293918 |
| iHRV1 | NC_038311 |
| iHRV2 | X02316 |
| iHRV-B3 | NC_038312 |
| iCVA1 | AF499635 |
| iCVA16 | KC117318 |
| iCVB2 | AF081485 |
| iCVB3 | NC_038307 |
| iEV-A71 | KT354875 |
| iEV-A120 | LK021688 |
| iEV71 | HM003207 |
| iEV-B107 | AB426609 |
| iHRV-A9 | FJ445177 |
| iHRV-A21 | FJ445121 |
| iHRV-A57 | JN614995 |
| iHRV-A89 | NC_001617 |
| iHRV-A100 | FJ445175 |
| iHRV-B4 | DQ473490 |
| iHRV-B17 | EF173420 |
| iHRV-B26 | FJ445124 |
| iHRV-B37 | EF173423 |
| iHRV-B92 | FJ445169 |
| iHRV-C3 | EF186077 |
| iHRV-C11 | EU840952 |
| iHRV-C54 | KP282614 |
| iCVB1 | M16560 |
| iCVB5 | AF114383 |
| iEchoV1 | AF029859 |
| iEchoV-E11 | X80059 |
| iEchoV-E15 | AY302541 |
| iCVA20 | AF499642 |
| iEV-D94 | DQ916376 |
| iSimianEV-A | NC_003988 |
| iSimianA5 | AF326751 |
| iSimianV4 | NC_038309 |
| iSwineVesciular | MK038999 |
| iHRV-B3_SC2220 | KY684757 |
| iHRV-B5 | FJ445112 |
| iHRV-B6 | DQ473486 |
| iHRV-B14 | MN306034 |
| iHRV-B27 | FJ445186 |
| iHRV-B35 | DQ473487 |
| iHRV-B42 | FJ445130 |
| iHRV-B48 | DQ473488 |
| iHRV-B52 | FJ445188 |
| iHRV-B69 | FJ445151 |
| iHRV-B70 | DQ473489 |
| iHRV-B72 | FJ445153 |
| iHRV-B79 | FJ445155 |
| iHRV-B83 | MN306025 |
| iHRV-B84 | FJ445162 |
| iHRV-B86 | FJ445164 |
| iHRV-B91 | FJ445168 |
| iHRV-B93 | EF173425 |
| iHRV-B97 | FJ445172 |
| iHRV-B99 | FJ445174 |
| iHRVB_SC0739 | MN306037 |
| iHRVB_G001-19 | MN212904 |
| iHR_VB_R93 | KF958309 |
| iHR_VB_BCH214 | GU568096 |
| iHR_VB_3039 | KF958308 |
| iEV-B69 | AY302560 |
| iEV-B73 | AF241359 |
| iEV-B74 | AY556057 |
| iEV-B75 | AY556070 |
| iEV-B77 | AJ493062 |
| iEV-B79 | AB426610 |
| iEV-B80 | AY843298 |
| iEV-B81 | AY843299 |
| iEV-B82 | AY843300 |
| iEV-B83 | AY843301 |
| iEV-B84 | DQ902712 |
| iEV-B85 | AY843303 |
| iEV-B86 | AY843304 |
| iEV-B87 | KC292019 |
| iEV-B88 | AY843306 |
| iEV-B93 | MN580134 |
| iEV-B97 | AY843307 |
| iEV-B98 | AB426608 |
| iEV-B100 | DQ902713 |
| iEV-B101 | AY843308 |
| iEV-B106 | KF990476 |
| iEV-B107_TN94-0349 | AB426609 |
| iEV-B111 | KF312882 |
| iEV-B113 | KC344833 |
| iEV-D68 | NC_038308 |
| iEV-D70 | NC_001430 |
| iEV-D94 | DQ916376 |
| iEV-D111 | MK032895 |
| iHCosV-B1 | NC_012801 |
| iEcho-E7 | LS451295 |
| iEcho-E9 | AF524866 |
| iPV3_PAK1019536 | KY941934.1 |
| iPV3_NIE1219535 | KY941933.1 |
| iPV3_SWI10947 | FJ914252.2 |
| iPV3_FIN84 | FJ842158.1 |

[0103] In some embodiments, a circRNA comprises any one of the IRES in Table 7, or a fragment or derivative thereof. In some embodiments, a circRNA comprises an IRES encoded by any one of SEQ ID NO: 33145-33169, or a fragment or derivative thereof. In some embodiments, the IRES is a Type 1 IRES. Type I IRES elements occur in the RNA genome of enterovirus species, including poliovirus (PV), coxsackievirus B3 (CVB3), enterovirus 71 (EV71), and human rhinovirus (HRV). In some embodiments, the IRES is an enterovirus IRES. In some embodiments, the IRES is an HRV IRES.

[0104] In some embodiments, a circRNA comprises any one of the following IRES: iCVA20; iEchoV-E11, iSimianEV-A, iCovidl9, iHRV-A57, iEchoVl1, iCrPV, iHRV-A89, iHRV-B26, iBEV, iEchoV1, iHRV-A21, iPV1, iCVB3, iEMCV, iHCV, iCVB5, iSwineVesicular, iHRV-A2, iHRV-C3, iHRV-C11, iCVB1, iPV2, iHRV-B17, iEchoV-E15, iEV71, iHRV-A9, iSiminanV4, iEV-D94, iSimianA5, iPV3, iHRV-C54, iHRV-A100, iHRV-B37, iHRV-B4, iHRV-B92, iHRV-B3, iHRV-A1, iEV107, or a fragment or derivative thereof.

[0105] In some embodiments, a circRNA comprises any one of the following IRES: iEMCV, iHCV, iCVB5, iSwineVesicular, iHRV-A2, iHRV-C3, iHRV-C11, iCVB1, iPV2, iHRV-B17, iEchoV-E15, iEV71, iHRV-A9, iSiminanV4, iEV-D94, iSimianA5, iPV3, iHRV-C54, iHRV-A100, iHRV-B37, iHRV-B4, iHRV-B92, iHRV-B3, iHRV-A1, iEV107, or a fragment or derivative thereof.

[0106] In some embodiments, a circRNA comprises any of the following IRES: iEV-B79, iEV-B77, iPV3_SWI10947, iHRV-B26, iHRV-B37, iHRV-A89, iEV-B86, iEV-B113, iEV-B87, iHRVA021, iEV-B88, iHRV-C11, iEV-B93, iEVD70, iEV-B111, iHRV-B92, iEV-B69, iEV-B73, iEV-B107, iEV107, iHRV-C54, iEV-B100, iHRVB_BCH214, iEV-B98, iPV3_NIE21219535, iEV-D111, iEcho-E9, iEV-B82, iEV-D94, iEV-B75, iEV97, iEV-B84, iHRV-C3, iHRV-A1, iEcho-E7, iEV-B81, iPV3_PAK1019536, iHRV-A9, iEV-B106, iHRV-A100, iPV3_FIN84, iEV-B85, iHRV-B86, iEV-B101, iHRV-B3, iHRV-B17, iHRVB_G001-10, iHRV-B70, iEV-B74, iEV-B80, iCVB3, iEV-B83, iHRV-A57, iHRV-B35, iHRV-B4, iEV-D68, iHRVB_R93, iHRV-B5, iHRVB-B52, iHRVB-B93, iHRV-B84, iHRV-B83_SC2220, iHRV-B72, iHRV-B69, iHRVB_SC0739, iHRV-B91, iHRV-B42, iHRV-B6, iHRV-B83, iHRV-B48, iIHRV-B99, iHRV-B79, iHRV-B97, iHRV-B27, iHRVB_3039, iHRVB-B14, iCosV-B1. In some embodiments, a circRNA comprises any of the following IRES: iEV-B83, iHRV-A57, iHRV-B35, iHRV-B4, iEV-D68, iHRVB_R93, iHRV-B5, iHRVB-B52, iHRVB-B93, iHRV-B84, iHRV-B83_SC2220, iHRV-B72, iHRV-B69, iHRVB_SC0739, iHRV-B91, iHRV-B42, iHRV-B6, iHRV-B83, iHRV-B48, iHRV-B99, iHRV-B79, iHRV-B97, iHRV-B27, iHRVB_3039, iHRVB-B14, iCosV-B1, or a fragment or derivative thereof.

[0107] In some embodiments, a circRNA comprises the iCVB3 IRES. In some embodiments, a circRNA comprises a fragment or derivative of the iCVB3 IRES. In some embodiments, a circRNA comprises the iHRV-B3 IRES. In some embodiments, a circRNA comprises a fragment or derivative of the iHRV-B3 IRES.

### Synthetic IRES

[0108] In some embodiments, a circRNA comprises a synthetic IRES. A “synthetic IRES” is an IRES that is modified relative to a wildtype IRES in order to modulate its structure and/or activity. For example, in some embodiments, an IRES that is modified to incorporate an aptamer sequence is a synthetic IRES.

[0109] In some embodiments, a synthetic IRES comprises an aptamer. In some embodiments, a synthetic IRES comprises a first aptamer and a second aptamer. In some embodiments, a synthetic comprises two, three, four, five, six, seven, eight, nine, ten, or more aptamers. In some embodiments, the aptamer is a wildtype aptamer. In some embodiments, the aptamer is a fragment of a wildtype aptamer. In some embodiments, the aptamer is an aptamer that was designed to bind DNA or RNA. Synthetic aptamers can be created that bind a specific DNA or RNA sequence by evolution through one or more rounds of evolution using, for example, SELEX technology.

[0110] In some embodiments, the aptamer is a modified version of a known aptamer (e.g., a mutant aptamer). In some embodiments, the aptamer is modified to have an extended stem region. For example, the length of the stem region may be extended by about 10% to about 25%, about 25% to about 50%, about 50% to about 75%, about 75% to about 100%, about 125%, about 150%, about 175%, about 200% or more. In some embodiments, the length of the stem region is extended by about 1, about 2, about 3, about 4, about 5, about 6, about 7, about 8, about 9, about 10 base pairs. As will be understood by those of skill in the art, extension of a stem region by 1 base pair comprises adding 2 nucleotides to the aptamer sequence. Accordingly, an aptamer which comprises a stem region extended by 3 base pairs have a nucleotide sequence that is 6 nucleotides longer than the same aptamer in which the stem region is not extended. The aptamer may be inserted into the IRES sequence in any location which is permissive to such changes. In some embodiments, the aptamer is positioned within the secondary structure of the IRES so that is spatially proximal to portion of the IRES responsible for translation initiation. In some embodiments, the aptamer is located in a position where it can bind to one or more translation initiation factors, such as eIF4G. In some embodiments, the aptamer does not interrupt the native eIF4G binding site of the IRES. In some embodiments, the IRES does not interrupt a native GRNA tetraloop within the IRES.

[0111] In some embodiments, the aptamer is an eIF4G-binding aptamer, such as any one of the aptamers listed in Table 6. In some embodiments, the aptamer is a fragment or derivative of any of the aptamers listed in Table 6. In some embodiments, the eIF4G-binding aptamer comprises or is encoded by the sequence of SEQ ID NO: 33143. In some embodiments, the eIF4G-binding aptamer comprises the sequence of SEQ ID NO: 33178.

[0112] In some embodiments, RNA aptamers function to enable small molecule control over circRNA translation or directing circRNAs toward specific intracellular targets. Additionally, incorporation of RNA aptamers may provide an avenue for cell type-specific expression of circRNAs.

TABLE 6
eIF4G-Binding Aptamers

| Aptamer | | | SEQ ID |
|---|---|---|---|
| ID | DNA Sequence | RNA Sequence | NOs: |
| A | TAA TAC GAC TCA CTA | UAAUACGACUCACUAUAGG | 33170, |
| | TAG GG ACTC ACT ATT TGT | GACUCACUAUUUGUUUUCG | 33174 |
| | TTT CGC GCC CAG TTG | CGCCCAGUUGCAAAAAGUG | |
| | CAA AAA GTG TCG CCG | UCGCCGCAUCUAGAGGGCC | |
| | CAT CTA GAG GGC C | | |
| B | TAA TAC GAC TCA CTA | UAAUACGACUCACUAUAGG | 33171, |
| | TAG GGT CCA G?C CCC | GUCCAGACCCCAACAGACU | 33175 |
| | AAC AGA CTC CAT AAC | CCAUAACUAAUAUGUCGCA | |
| | TAA TAT GTC GCA AAA | AAACCGCAUCUAGAGGGCC | |
| | CCG CAT CTA GAG GGC C | | |
| C | TAA TAC GAC TCA CTA | UAAUACGACUCACUAUAGG | 33172, |
| | TAG GGT CCG TAG AAA | GUCCGUAGAAACGCGUUAA | 33176 |
| | CGC GTT AAG GTG AAA | GGUGAAAGUUUGAGGGCUC | |
| | GTT TGA GGG CTC CTC | CUCACCGCAUCUAGAGGGC | |
| | ACC GCA TCT AGA GGG CC | C | |
| D | TAA TAC GAC TCA CTA | UAAUACGACUCACUAUAGG | 33173, |
| | TAG GGT CCG CGG CGC | GUCCGCGGCGCCAUCUCAU | 33177 |
| | CAT CTC ATG TTT AGT TGT | GUUUAGUUGUCCUAUGUCG | |
| | CCT ATG TCG AGC CCG | AGCCCGCAUCUAGAGGGCC | |
| | CAT CTA GAG GGC C | | |
| E | ACTCACTATTTGTTTTCGCG | ACUCACUAUUUGUUUUCGC | 33143, |
| | CCCAGTTGCAAAAAGTGTC | GCCCAGUUGCAAAAAGUGU | 33178 |
| | G | CG | |

[0113] In some embodiments, the IRES is a type I IRES. In some embodiments, the IRES is an enterovirus IRES. In some embodiments, the IRES is an HRV IREs.

[0114] SEQ ID NO: 33145-33169 shown in the SEQUENCE APPENDIX provide illustrative IRES sequences, wherein the IRES sequences comprise an aptamer. The aptamer insertion is shown in capital letters.

[0115] In some embodiments, a synthetic IRES sequence comprises a modified iCVB3 IRES. In some embodiments, the modified iCVB3 IRES comprises an aptamer inserted in domain I, II, III, IV, V, VI, or VII thereof. In some embodiments the modified iCVB3 IRES comprises an aptamer inserted in domain I, II, III, IV, V, VI, or VII thereof, in a location that minimally disrupts the native RNA structure. In some embodiments, the modified iCVB3 IRES comprises an aptamer inserted in domain IV thereof. In some embodiments, the aptamer is modified to have an extended stem region. The stem region may be extended, for example, by 1, 2, 3, 4, 5, 6, or more base pairs. In some embodiments, the aptamer is positioned within the secondary structure of the IRES so that is spatially proximal to portion of the IRES responsible for translation initiation. In some embodiments, the aptamer does not interrupt the native eIF4G binding site of the IRES and/or does not interrupt a native GRNA tetraloop within the IRES. In some embodiments, a synthetic IRES sequence comprises a modified iHRV-133 IRES. In some embodiments, the modified iHRV-B3 IRES comprises an aptamer inserted in domain I, II, III, IV, V, VI, or VII thereof. In some embodiments, the modified iHRV-B3 IRES comprises an aptamer inserted in domain IV thereof. In some embodiments, the aptamer is modified to have an extended stem region. The stem region may be extended, for example, by 1, 2, 3, 4, 5, 6, or more base pairs. In some embodiments, the aptamer is positioned within the secondary structure of the IRES so that is spatially proximal to portion of the IRES responsible for translation initiation. In some embodiments, the aptamer does not interrupt the native eIF4G binding site of the IRES and/or does not interrupt a native GRNA tetraloop within the IRES.

### IRES Elements and Features

[0116] In some embodiments, a circRNA comprises an IRES, such as a synthetic or viral IRES, that comprises one or more of the IRES elements or features described below. In some embodiments, a circRNA comprises an IRES that comprises at least one RNA secondary structure element. Intramolecular RNA base pairing is often the basis of RNA secondary structure and in some circumstances be a critical determinant of overall macromolecular folding. In conjunction with cofactors and RNA binding proteins (RBPs), secondary structure elements can form higher order tertiary structures and thereby confer catalytic, regulatory, and scaffolding functions to RNA. Thus, the IRES may comprise any RNA secondary structure element that imparts such structural or functional determinants. In some embodiments, the RNA secondary structure may be formed from the nucleotides at about position 40 to about position 60 of the IRES, relative to the 5′ end thereof. The most common RNA secondary structures are helices, loops, bulges, and junctions, with stem-loops or hairpin loops being the most common element of RNA secondary structure. A stem-loop is formed when the RNA chains fold back on themselves to form a double helical tract called the stem, with the unpaired nucleotides forming a single-stranded region called the loop. Bulges and internal loops are formed by separation of the double helical tract on either one strand (bulge) or on both strands (internal loops) by unpaired nucleotides. A tetraloop is a four-base pairs hairpin RNA structure. There are three common families of tetraloop in ribosomal RNA: UNCG (SEQ ID NO: 33179), GNRA (SEQ ID NO: 33180), and CUUG (SEQ ID NO: 33181) (N is one of the four nucleotides and R is a purine). Pseudoknots are formed when nucleotides from the hairpin loop pair with a single stranded region outside of the hairpin to form a helical segment. RNA secondary structure is further described in, e.g., Vandivier et al., Annu Rev Plant Biol., 67: 463-488 (2016); and Tinoco and Bustamante, supra). In some embodiments, the IRES of the recombinant circRNA molecule comprises at least one stem-loop structure. The at least one RNA secondary structure element may be located at any position of the IRES, so long as translation is efficiently initiated from the TRES. In some embodiments, the stem portion of the stem-loop may comprise from 3-7 base pairs, 4, 5, 6, 7, 8, 9, 10, 11 or 12 base pairs or more. The loop portion of the stem-loop may comprise from 3-12 nucleotides, including 4, 5, 6, 7, 8, 9, 10, 11, 12 or more nucleotides. The stem-loop structure may also have on either side of the stem one or more bulges (mismatches). In some embodiments, the RNA secondary structure element is formed from the nucleotides at about position 40 to about position 60 of the IRES, wherein the first nucleic acid at the 5′ end of the IRES is considered to be position 1. In some embodiments, the sequence that is complementary to an 18S rRNA is located 5′ to the at least one RNA secondary structure element (i.e., in the range of about position 1 to about position 40 of the IRES). In some embodiments, the sequence that is complementary to an 18S rRNA is located 3′ to the a least one RNA secondary structure element (i.e., in the range of about position 61 to the end of the IRES). Sequences encoding exemplary secondary structure-forming RNA sequences that may be included in the IRES described herein are set forth in Table 2.

[0117] In some embodiments, the at least one RNA secondary structure element of the IRES is a stem-loop. In some embodiments, the at least one RNA secondary structure element is encoded by any one of the nucleic acid sequences listed in Table 2. In some embodiments, the at least one RNA secondary structure element is encoded by a nucleic acid sequence having at least 80%, at least 85%, at least 90%, at least 91%, at least 92%, at least 93%, at least 94%, at least 95%, at least 96%, at least 97%, at least 98%, or at least 99% sequence identity relative to any one of the nucleic acid sequences listed in Table 2. In some embodiments, the at least one RNA secondary structure element is encoded by a nucleic acid sequence having at least 1, at least 2, at least 3, at least 4, at least 5, at least 6, at least 7, at least 8, at least 9 at least 10, or more nucleotide substitutions relative to any one of the nucleic acid sequences listed in Table 2.

[0118] RNA secondary structure typically can be predicted from experimental thermodynamic data coupled with chemical mapping, nuclear magnetic resonance (NMR) spectroscopy, and/or sequence comparison. In some embodiments, the RNA secondary structure is predicted by a machine-learning/deep-learning algorithm (e.g., CNN) (See, Zhao, Q., et al., “Review of Machine-Learning Methods for RNA Secondary Structure Prediction,” Sep. 1, 2020 (available on the world wide web at: arxiv.org/abs/2009.08868). A variety of algorithms and software packages for RNA secondary structure prediction and analysis are known in the art and can be used in the context of the present disclosure (see, e.g., Hofacker I. L. (2014) Energy-Directed RNA Structure Prediction, In: Gorodkin J., Ruzzo W. (eds) RNA Sequence, Structure, and Function: Computational and Bioinformatic Methods. Methods in Molecular Biology (Methods and Protocols), vol 1097. Humana Press, Totowa, NJ; Mathews et al., supra; Mathews, et al. “RNA secondary structure prediction,” Current Protocols in Nucleic Acid Chemistry, Chapter 11 (2007): Unit 11.2. doi:10.1002/0471142700.ncI102s28; Lorenz et al., Methods, 103: 86-98 (2016); Mathews et al., ColdSpring Harb PerspectBiol., 2(12): a003665 (2010)). In some embodiments, the IRES of the recombinant circRNA may comprise a nucleic acid sequence that is complementary to 18S ribosomal RNA (rRNA). Eukaryotic ribosomes, also known as “80S” ribosomes, have two unequal subunits, designated small subunit (40S) (also referred to as “SSU”) and large subunit (60S) (also referred to as “LSU”) according to their sedimentation coefficients. Both subunits contain dozens of ribosomal proteins arranged on a scaffold composed of ribosomal RNA (rRNA). In eukaryotes, eukaryotic 80S ribosomes contain greater than 5500 nucleotides of rRNA: 18S rRNA in the small subunit, and 5S, 5.8S, and 25S rRNA in the large subunit. The small subunit monitors the complementarity between tRNA anticodon and mRNA, while the large subunit catalyzes peptide bond formation. Ribosomes typically contain about 60% rRNA and about 40% protein. Although the primary structure of rRNA sequences can vary across organisms, base-pairing within these sequences commonly forms stem-loop configurations.

[0119] In some embodiments, the IRES sequence comprises a locked nucleic acid (LNA) against a non-base-paired linker region between domains of the IRES.

[0120] In some embodiments, the IRES of the recombinant circRNA may comprise any nucleic acid sequence that is complementary to any eukaryotic 18S rRNA sequence. In some embodiments, the nucleic acid sequence that is complementary to 18S rRNA is encoded by any one of the nucleic acid sequences set forth in Table 3. In some embodiments, the nucleic acid sequence that is complementary to 18S rRNA is encoded by a nucleic acid sequence that has at least 80%, at least 85%, at least 90%, at least 91%, at least 92%, at least 93%, at least 94%, at least 95%, at least 96%, at least 97%, at least 98%, or at least 99% identity or homology to a sequence set forth in Table 3. In some embodiments, the nucleic acid sequence that is complementary to 18S rRNA is encoded by a nucleic acid sequence that has at least 1, at least 2, at least 3, at least 4, at least 5, at least 6, at least 7, at least 8, at least 9, at least 10, or more nucleotide substitutions relative to a nucleic acid sequence set forth in Table 3.

TABLE 3
Illustrative DNA sequences that encode RNA
sequences that are complementary to 18S RNA

| SEQ ID | |
|---|---|
| NO: | Nucleic Acid Sequence |
| 34425 | CACCTACGGAAACCTTGTTACGACTTTTACTTCCTCTAGATAGTCAAGTTC |
| | GACCGTCTTCTCAGCGCTCCGCCAGGGCCGTGGGCCGACCCCGGCGGGGC |
| | CGATCCGAGGGCCTCACTAAACCATCCAATCGGTAGTAGCGACGGGCGGT |
| | GTGTACAAAGGGCAGGGACTTAATCAACGCAAGCTTATGACCCGCACTTA |
| | CTGGGAATTCCTCGTTCATGGGGAATAATTGCAATCCCC |
| 34426 | GGGACGCCGACCGCTCGGGGGTCGCGTAACTAGTTAGCATGCCAGAGTCT |
| | CGTTCGTTATCGGAATTAACCAGACAAATCGCTCCACCAACTAAGAACGG |
| | CCATGCACCACCACCC |
| 34427 | GTTTATGGTCGGAACTACGACGGTATCTGATCGTCTTCGAACCTCCGACTT |
| | TCGTTCTTGATTAATGAAAACATTCTTGGCAAATGCTTTCGCTCTGGTCCG |
| | TCTTGCGCCGGTCCAAGAATTTCACCTCTAGCGGCGCAATACGAATGCCCC |
| | CGGCCGTCCCTCTTAATCATGGCCTCAGTTCCGAAAACCAACAAAATAGAA |
| | CCGCGGTCCTATTCCATTATTCCTAGCTGCGGTATCCAGGCGGCTCGGGCC |
| | TGCTTTGAACACTCTAATTTTTTCAAAGTAAACGCTTCGGG |
| 34428 | AGAGCATCGAGGGGGCGCCGAGAGGCAAGGGGGGGGACGGGCGGTGGC |
| | TCGCCTCGCGGCGGACCGCCCGCCCGCTCCC |
| 34429 | TACGAGCTTT |
| 34430 | ATACGCTATTGGAGCTGGAATTACCGCGGCTGCTGGCACCAGACTTGCCCT |
| | CCAATGGATCCTCGTTAAAGGATTTAAAGTGGACTCATTCCAATTACAGGG |
| | CCTCGAAAGAGTCCTGTA |
| 34431 | GGGGGCGTGCGATCGGCCCGAGGTTATCTAGAGTCACCAAAGCCGCCGGC |
| | GCCCGCCCCCCGGCCGGGGCCGGAGAGGGG |

[0121] The most commonly used criterion for RNA secondary structure prediction is the minimum free energy (MFE), since, according to thermodynamics, the MFE structure is not only the most stable, but also the most probable one in thermodynamic equilibrium. The MFE of an RNA or DNA molecule is affected by three properties of nucleotides in the RNA/DNA sequence: number, composition, and arrangement. For example, longer sequences are on average more stable because they can form more stacking and hydrogen bond interactions, guanine-cytosine (GC)-rich RNAs are typically more stable than adenine-uracil (AU)-rich sequences, and nucleotide order influences the folding structure stability because it determines the number and the extension of loops and double-helix conformations. It has been found that mRNAs and microRNA precursors, unlike other non-coding RNAs, have greater negative MFE than expected given their nucleotide numbers and compositions. Thus, free energy also can be employed as a criterion for the identification of functional RNAs.

[0122] The IRES of the recombinant circRNA molecule may comprise a minimum free energy (MFE) of less than about −15 kJ/mol (e.g., less than about −16 kJ/mol, less than about −17 kJ/mol, less than about −18.5 kJ/mol, less than about −19 kJ/mol, less than about −18.9 kJ/mol, less than about −20 kJ/mol, less than about −30 kJ/mol). In some embodiments, the MFE is greater than about −90 kJ/mol (e.g., greater than about −85 kJ/mol, greater than about −80 kJ/mol, greater than about −70 kJ/mol, greater than about −60 kJ/mol, greater than about −50 kJ/mol, greater than about −40 kJ/mol). In some embodiments, the IRES has a has a minimum free energy (MFE) of about −18.9 kJ/mol or less. In some embodiments, the IRES has a MFE in the range of about −15.9 kJ/mol to about −79.9 kJ/mol. In some embodiments, the IRES may comprise a MFE in the range of about −12.55 kJ/mol to about −100.15 kJ/mol. In some embodiments, the IRES is a viral IRES and has an MFE in the range of about −15.9 kJ/mol to about −79.9 kJ/mol. In some embodiments, the IRES is a human IRES and has a MFE in the range of about −12.55 kJ/mol to about −100.15 kJ/mol.

[0123] In some embodiments, the at least one secondary structure element of an IRES of may comprise a minimum free energy (MFE) of less than about −0.4 kJ/mol, less than about −0.5 kJ/mol, less than about −0.6 kJ/mol, less than about −0.7 kJ/mol, less than about −0.8 kJ/mol, less than about −0.9 kJ/mol, or less than about −1.0 kJ/mol. In some embodiments, the at least one secondary structure element of the IRES may comprise a MFE of less than about −0.7 kJ/mol. In some embodiments, the RNA sequence comprising the nucleotides at about position 40 to about position 60 of an IRES of a circRNA described herein may comprise a minimum free energy (MFE) of less than about −0.4 kJ/mol, less than about −0.5 kJ/mol, less than about −0.6 kJ/mol, less than about −0.7 kJ/mol, less than about −0.8 kJ/mol, less than about −0.9 kJ/mol, or less than about −1.0 kJ/mol. In some embodiments, the RNA sequence comprising the nucleotides at about position 40 to about position 60 of the IRES may comprise an MFE of less than about −0.7 kJ/mol.

[0124] As discussed, above, the minimum free energy of a particular RNA (e.g., an RNA produced from a DNA sequence) may be determined using a variety of computational methods and algorithms. The most commonly used software programs, employed to predict the secondary RNA or DNA structures by MFE algorithms, make use of the so-called nearest-neighbor energy model. This model uses free energy rules based on empirical thermodynamic parameters (Mathews et al., J Mol Biol, 288: 911-940 (1999); and Mathews et al., Proc Natl Acad Sci USA, 101: 7287-7292 (2004)) and computes the overall stability of an RNA or DNA structure by adding independent contributions of local free energy interactions due to adjacent base pairs and loop regions. In sequences with homogeneous nucleotide arrangements and compositions, the additive and independent nature of the local free energy contributions suggests a linear relationship between computed MFE and sequence length (Trotta, E., PLoS One, 9(11): e113380 (2014)). Algorithms for determining MFE are further described in, e.g., Hajiaghayi et al., BMC Bioinformatics, 13: 22 (2012); Mathews, D. H., Bioinformatics, Volume 21, Issue 10: 2246-2253 (2005); and Doshi et al., BMC Bioinformatics, 5: 105 (2004) doi 10.1186/1471-2105-5-105). One of ordinary skill in the art will appreciate that the melting temperature (Tm) of a particular circRNA molecule may also be indicative of stability. Indeed, RNA sequences with high Tm generally contain thermo-stable functionally important RNA structures (see, e.g., Nucleic Acids Res., 45(10): 6109-6118 (2017)). Thus, in some embodiments, the IRES of the recombinant circRNA molecule has a melting temperature of at least 35.0° C. In some embodiments, the IRES of the recombinant circRNA molecule has a melting temperature of at least 35.0° C., but not more than about 85° C. In some embodiments, in some embodiments, the RNA secondary structure has a melting temperature of at least 35° C., at least 36° C., at least 37° C., at least 38° C., at least 39° C., at least 40° C., at least 41° C., at least 42° C., at least 43° C., at least 44° C., at least 45° C., at least 46° C., at least 47° C., at least 48° C., at least 49° C. or greater. In some embodiments, the melting temperature is not more than about 85° C., not more than about 75° C., not more than about 70° C., not more than about 65° C., not more than about 60° C., not more than about 55° C., not more than about 50° C. or less.

[0125] The melting temperature of a particular nucleic acid molecule can be determined using thermodynamic analyses and algorithms described herein and known in the art (see, e.g., Kibbe W. A., Nucleic Acids Res., 35(Web Server issue): W43-W46 (2007). doi:10.1093/nar/gkm234; and Dumousseau et al., BMC Bioinformatics, 13: 101 (2012). doi.org/10.1186/1471-2105-13-101).

[0126] In some embodiments, the IRES comprises at least one RNA secondary structure element; and a nucleic acid sequence that is complementary to an 18S ribosomal RNA (rRNA); wherein the IRES has a minimum free energy (MFE) of −18.9 kJ/mol or less and a melting temperature of at least 35.0° C. In some embodiments, the RNA secondary structure element of the IRES has a has a minimum free energy (MFE) of less than −18.9 kJ/mol, and is formed from the nucleotides at about position 40 to about position 60 of the IRES, wherein the first nucleic acid at the 5′ end of the IRES is considered to be position 1. In some embodiments, the RNA secondary structure element has a melting temperature of at least 35.0° C., and is formed from the nucleotides at about position 40 to about position 60 of the IRES, wherein the first nucleic acid at the 5′ end of the IRES is considered to be position 1.

[0127] Because circRNA molecules are often generated from linear RNAs by back-splicing of a downstream 5′ splice site (splice donor) to an upstream 3′ splice site (splice acceptor), the recombinant circular RNA molecule may further comprise a back-splice junction. In some embodiments, the IRES may be located within about 100 to about 200 nucleotides of the back-splice junction. In addition, it has been observed that regions of RNA with higher G-C content have more stable secondary structures than RNA strands with lower G-C content. Thus, in some embodiments, the IRES of the recombinant circRNA molecule may further comprise a minimum level of G-C base pairs. For example, the non-native IRES of the recombinant circRNA molecule may comprise a G-C content of at least 25% (e.g., at least 30%, at least 35%, at least 40%, at least 45% or more), but not more than about 75% (e.g., about 70%, about 65%, about 60%, about 55%, about 50% or less). In some embodiments, the IRES has a G-C content of at least 25%.

[0128] G-C content of a given nucleic acid sequence may be measured using any method known in the art, such as, for example chemical mapping methods (see, e.g., Cheng et al., PNAS, 114 (37): 9876-9881 (2017); and Tian, S. and Das, R., Quarterly Reviews of Biophysics, 49: e7 doi:10.1017/S0033583516000020 (2016)).

[0129] Exemplary sequences encoding IRESs for use in the circRNA molecules of the present disclosure are set forth in Table TA and Table 1B. Thus, the disclosure further provides a recombinant circular RNA molecule comprising a protein-coding nucleic acid sequence and an IRES operably linked to the protein-coding nucleic acid sequence in a non-native configuration; wherein the IRES is encoded by any one of the nucleic acid sequences listed in Table 1A or Table 1B.

[0130] In some embodiments, the IRES is encoded by any one of the nucleic acid sequences set forth in Table 1A. In some embodiments, the IRES is encoded by a nucleic acid sequence that has at least 80%, at least 85%, at least 90%, at least 91%, at least 92%, at least 93%, at least 94%, at least 95%, at least 96%, at least 97%, at least 98, or at least 99% identity to one or the nucleic acid sequences of Table 1A. In some embodiments, the IRES is encoded by a nucleic acid sequence that has at least 1, at least 2, at least 3, at least 4, at least 5, at least 6, at least 7, at least 8, at least 9, at least 10 or more nucleotide substitutions relative to any one of the sequences in Table 1A.

[0131] In some embodiments, the IRES is encoded by any one of the nucleic acid sequences set forth in Table 1B. In some embodiments, the IRES is encoded by a nucleic acid sequence that has at least 80%, at least 85%, at least 90%, at least 91%, at least 92%, at least 93%, at least 94%, at least 95%, at least 96%, at least 97%, at least 98, or at least 99% identity or homology to one or the nucleic acid sequences of Table 1B. In some embodiments, the IRES is encoded by a nucleic acid sequence that has at least 1, at least 2, at least 3, at least 4, at least 5, at least 6, at least 7, at least 8, at least 9, at least 10 or more nucleotide substitutions relative to any one of the sequences in Table 1B.

[0132] In some embodiments, the IRES is encoded by the nucleic acid sequences denoted Index 876 (SEQ ID NO: 553), 6063 (SEQ ID NO: 2292), 7005 (SEQ ID NO: 2624), 8228 (SEQ ID NO: 3064), or 8778 (SEQ ID NO: 3266) in Table 1B. In some embodiments, the IRES is encoded by the nucleic acid sequence of SEQ ID NO: 32956, In some embodiments, the IRES is encoded by any one of the nucleic acid sequences set forth in Table 5. In some embodiments, the IRES is encoded by a nucleic acid sequence that has at least 80%, at least 85%, at least 90%, at least 91%, at least 92%, at least 93%, at least 94%, at least 95%, at least 96%, at least 97%, at least 98, or at least 99% identity or homology to one or the nucleic acid sequences of Table 5. In some embodiments, the IRES is encoded by a nucleic acid sequence that has at least 1, at least 2, at least 3, at least 4, at least 5, at least 6, at least 7, at least 8, at least 9, at least 10 or more nucleotide substitutions relative to any one of the sequences in Table 5.

TABLE 5
Illustrative Sequences Encoding IRES sequences

| Oligo- | | SEQ |
|---|---|---|
| nucleotide | | ID |
| Identifier | Sequence | NO: |
| 4173 | CATCCTCCTGCTGAAGTGACAAGCCACGCTGCTTCTGGA | 38403 |
| | GCCAAAGCTGACCAAGAAGAACAAATCCACCCCAGATC | |
| | TAGACTCAGGTCACCTCCTGAAGCCCTCGTTCAGGGTCG | |
| | ATATCCCCACATCAAGGACGGTGAGGATCTTAAAGACCA | |
| | CTCAACAGAAAGTAAAAAA | |
| 2125 | GCAGAAGGGAAACGTGAAGAAGGTGAAGATGGCGGTGG | 38404 |
| | CCAGGGCCGGGGTCTTGGGAGTCCAGTGGCTGCAAAGG | |
| | GCATCCCGGAACGTGATGCCGCTGGGCGCACGGACAGC | |
| | CTCCCACATGACCAAGGACATGTTCCCGGGGCCCTATCC | |
| | TAGGACCCCAGAAGAACGGGC | |
| 6742 | AGACTCGGGAACTGCCTGAATGTGGTTTGGGACACGAG | 38405 |
| | ACCTCATCATATTGATGAGCGAACAAACAAGAACATTTC | |
| | CTCCCTCCCCTCCTTTGAATTGAAATGGCACATTAAGACT | |
| | TGTCACGGCTTCTCACTGGGACTGGAGACCTCGTTCCTTC | |
| | ACCCCGCGTGTCGCCAG | |
| 8839 | AGGTGGGCGGTGGCGGTAGGTGGGTGGCCAGCGACTGG | 38406 |
| | CAACGCGGTGGCTTAGACGCGCGAGATCCGGCCAGGGT | |
| | CAGAGTACTGTAAGATTGATGTTAAAGGCATGGTGTTCA | |
| | CCCCACTTCATCAGCGTACATAAGTTATCTCTTCTTTTGG | |
| | ACCCTTATTTTATGCCATA | |
| 8279 | GGAGGCAGGTTGATGTGTTTGTGCTTCCTTCTACAGCCA | 38407 |
| | ATATGAAAAGGCCTAGTAAGTGGGGTCGGGAGGCGGGC | |
| | GTGGAGGGACCCACGTCTGGAAGTTGCTGCAGCCACCAC | |
| | GACGCTCTTCTACGGCTACGGCTTTGTCTCTGCTGAGTTA | |
| | AAGAAAGCAAGTAAACGC | |
| 1637 | ATTTATAAGCAATAGTAGCTTATTTGGCTCACAGTTCTG | 38408 |
| | GAGGCTGAGAAGATCGTGAGGCTGCATCTGGCAAGGGC | |
| | CTTCTTGCTGCTTCATAACATGGCAGAAGACATCATGCG | |
| | GGTGTGTGTCTGGGGAAGAGACTTACAGAAGTGGAGTT | |
| | GCTGAGTCAAAGATCTAACC | |
| 27147 | TCTTTTGGTGCAGAAGGTGACGGGAAACAGGCCGCAGA | 38409 |
| | CCTGAACTTCCAACCGTATGTAGGCGAGAAGCCGGTGCC | |
| | GATACTCCCACTATCCCACAATGTCCCACTGGGCCCCAG | |
| | AGTGGAAGAGGGCGGAGGCTAATCCAAGAGACCTTGGG | |
| | GCCAGCTGGGATGTCAGGGG | |
| 7408 | ATCCACCATGAAGCAGAATCTAAAGAAAAAGGTCCAAG | 38410 |
| | CATGAAGGAACCAAATCCAATTTCTCCACCAATTTTCCA | |
| | TGGTCTGGACACCCTAACCGTGATGGGCATTGCGTTTGC | |
| | AGCCTTTGTGATCGGAGCACTCCTGACGGGGGCCTTGTG | |
| | GTACATCTATTCTCACACA | |
| 29135 | CAGATTAGAGGACGGGCGCTTTGGAGCCGGCCCCAGGC | 38411 |
| | AGCGTGTGTCGGTCGCCTAGTCTGGAGAACTAGTCCTCG | |
| | ACTCACGTGCAAGGATGATGCTGAAAGGAATAACAAGG | |
| | CTTATCTCTAGGATCCATAAGGCCAAGCATGGGGATCAG | |
| | CACGAGGGTCAGCACTACAA | |
| 7806 | CTCTCGGGGGCCAGGGGTCATCGGTTTGACCCCTGACCT | 38412 |
| | ATAAGCCAAGATACCCCATAAACACACTCAGAAAGCAG | |
| | AGAAAAAGGACAAGAGTCTGTGTTTGAGAGGGGGTCTG | |
| | CCATTCCTGCTTGGGGACTGGTGGGGAAGAGGGCCAGG | |
| | ACATCTTCTGAGCCAGGACGT | |
| 661 | AGTCTGGCTGCGGCGGCAGAGCTGAAGTGAGCGGAGCC | 38413 |
| | ACCAGGAGGCCATGTCGGGTGAGGACGCTGAGGTCCGG | |
| | GCAGTCTCTGAAGATGTCTCCAATGGAAGCAGTGGCTCG | |
| | CCCAGCCCTGGGGACACACTGCCCTGGAACCTTGGGAAA | |
| | ACGCAGCGGAGCCGGCGCAG | |
| 1258 | ATCTGCCTCAGCCTCTTTGTCACTGCCTGGACCATTGTCC | 38414 |
| | CTGCTGTTTCTCAGACAGCATAGAGGCTGAGGCTGGGGC | |
| | CAGGACCCAGACAGAGACACACGGTCACTGCAGCTGAA | |
| | GCCGCTGCCCCTGCTACAGGCACCACCAGGACCAGCTGA | |
| | TCATTCCAGCCCACAGCA | |
| 6757 | CTCAGGCTGTGGCCCCACCTGCCCCCAAGCCCACCCAGG | 38415 |
| | CTGGGGAAGGAACGCTGTCAGAGGCCCTGCTGCAGCTG | |
| | CAGTTTGATGATGAAGACCTGGGGGCCTTGCTTGGCAAC | |
| | AGCACAGACCCAGCTGTGTTCACAGACCTGGCATCCGTC | |
| | GACAACTCCGAGTTTCAGC | |
| 5825 | CTCAAGGTTTTGAAGAGACAGGGGACACGCTCTATGCCC | 38416 |
| | CCTATTCCACACATTTTCAGCTGCAGAACCAGCCTCCCC | |
| | AAAAGGAATTCTCCATCCCACGGGCCCACGCTTGGCCGA | |
| | GCCCTTACAAAGACTATGAAGTAAAGAAAGAGGGCAGC | |
| | TAACTCTGTCCTGAAGAGT | |
| 27115 | GCTTCCGTAGAGGCCAGCTGGTTGCTACGCAGCAACAGG | 38417 |
| | AAACATTCCGCGCTACCGAGTACTTTCTACTCCCGACCA | |
| | GGCATTGCTCTCTCTGGAGACCCTCGGCGGTGGTTGCTG | |
| | TATTTTGACTTGGAGTAAGGATGACTTTTCGGGCCACAG | |
| | ATAGTGAATTTGACCTGA | |
| 3130 | CTGGAGGGCCGCACTCCCGTTCCAGCCAGGCTGAGCCTT | 38418 |
| | CTGTCCCCTGCCTCTGGGGCCTGGGAACCCCCCTTCTTCT | |
| | TTCTCCTGAATGGCACCCCCGCCCTAGAATCCAGACACC | |
| | GAGTTTCCCACTGTGGCTGGTTCAAGGAGCTCCCTGGTG | |
| | ACAGTCTGTGGCTGAGC | |
| 5065 | TAGAGTGGGGGGTGGAAGATGATTCTCGCCTGTTGCTGG | 38419 |
| | GGATTTATGAACATGGCTATGGAAACTGGGAGTTAATTA | |
| | AAACAGACCCAGAGCTTAAATTAACTGACAAAATTCTGC | |
| | CGGTGGAGACAGATAAAAAGCCTCAGGGGAAGCAGCTA | |
| | CAGACCCGAGCGGATTACT | |
| 8066 | AGCGGCTGCAGCATCCAGCCAGCTTGGATGTCTGGCCTG | 38420 |
| | TGAGCCTGGGGAAACTATTATTAATAATATTTACTGTTG | |
| | ATAATATTGGGGAAAACAGCCCTTAACTCTGAGGTTTCT | |
| | GCTGTGCTCCTTTCCAAAACAGACTTCCAGGACTCTGAA | |
| | GAAACAGTTACAAGCAGG | |
| 1952 | AAGGGAGGAGGCGCCGAGCTGACCGGGCGACGCCGCGG | 38421 |
| | GAGGTTCTGGAAACGCCGGGAGCTGCGAGTGTCCAGAC | |
| | ACTTCCCTCTGTGACCATGAAACTCTGGGTGTCTGCATTG | |
| | CTGATGGCCTGGTTTGGTGTCCTGAGCTGTGTGCAGGCC | |
| | GAATTCTTCACCTCTATTG | |
| 5020 | GCGAACTGAAGGTGGCCCAAGGGAAGGCTCTGCAAGAG | 38422 |
| | AATTTGGCCCTCCTGACCCAGACCCTAGCTGAAAGAGAA | |
| | GAGGAGGTGGAGACTCTGCGGGGACAAATCCAGGAACT | |
| | GGAGAAGCAACGGGAAATGCAGAAGGCTGCTTTGGAAT | |
| | TGCTGTCTCTGGACCTGAAGA | |
| 8766 | AGGAAGCCGAGGAAGGCTGTGTTTCTGACTCACACGGG | 38423 |
| | GGAGTCGGGGGAGTCGTAAACAACCCTGAAGAGAACAG | |
| | CCAGGCCTGGCGCTCTGGGCTTGGTCCTGGGACACCCGT | |
| | TTGACACTGTAAAGGTGAGGCTGCAGACCCAGACCACCT | |
| | ACCGGGGCATCGTTGATTGC | |
| 27433 | CTGCCTCCCCCCCGCTCCCGCTCCCCTGAGCCCAGCCAG | 38424 |
| | ACCCCGCGCCGCCCGCGCCCCGCTCGACTCCGGAGGCTC | |
| | CCGCAGCCCCGGCGTCCGCCCCGCTGCCCCCTCCCCCGG | |
| | GGGCCATGGGGGCGCCCCCGGGCTACCGGCCCTCAGCTT | |
| | GGGTGCATCTCCTCCACC | |
| 27818 | CTCAGTGAAGCAACGAGGATGCCGGGGAGAGGGAAGGG | 38425 |
| | GCTGGGCTCTGGGCGGTGCCAAGTCTGTGAGGGGGCGC | |
| | GGTCACCGCCCAGGGTTCCCACGAACGCCAAGGCGGCC | |
| | ACGTCCTGCTCCCCCTGGTGAAGAAGCTGCCCTGGGCTT | |
| | GTCGTCCTAGGGTCTCCAGAC | |
| 8861 | CTGATGTGAGCTAGTTTGTCTGGTTGAGTTGGATGTTTAA | 38426 |
| | ATAGAAGGCAGAACAACAACAGGTACTCCACATCAGCA | |
| | TTCTCAAGACTGGAGAAGTTAGGCCTCAGACATCCCAAG | |
| | CCTTCTCCTTTCATTGGAAACTTGACATTTTTCCGCCAGG | |
| | GTTTTTGGGAAAGCCAA | |
| 8040 | GCCACATTCCACACTAACGTGTTGGTGAATTCTTCTGGG | 38427 |
| | CATTGCCAGTACCTGCCTCCAGGCATATTCAAGAGTTCC | |
| | TGCTACATCGATGTACGCTGGTTTCCCTTTGATGTGCAGC | |
| | ACTGCAAACTGAAGTTTGGGTCCTGGTCTTACGGAGGCT | |
| | GGTCCTTGGATCTGCAG | |
| 27907 | TCCTGCCTCGGCAACCCCGGGCCCTGAGGGCAGGCCCCA | 38428 |
| | ACCGCGGAGGAGCAGGAGAGGGCGGAGGCCGGCGGGC | |
| | CATGCCCTGGTCGTCCCGCGGCGCCCTCCTTCGGGACCT | |
| | GGTCCTGGGCGTGCTGGGCACCGCCGCCTTCCTGCTCGA | |
| | CCTGGGCACCGACCTGTGGG | |
| 2392 | AAGTTTGAAACTGGTAACTTCGGGAGTTGAGCCACGAGC | 38429 |
| | TGTTGTGCATCCAGAGGTGGAATTGGGGCCCGGCATTCC | |
| | CTCCTCGTCCCGGGCTGGCCCTTGCCCCCACCCTGCAACT | |
| | CCTGGTTGAGATGGGCTCAGCCAAGAGCGTCCCAGTCAC | |
| | ACCAGCGCGGCCTCCGC | |
| 7802 | AGCCTTCGCTGGATCTCCTTCCCGAACTCACAAATCCTG | 38430 |
| | ACGAGCTCCTGTCTTATCTGGACCCCCCCGACCTGCCGA | |
| | GCAATAGTAACGATGACCTCCTGTCTCTATTTGAGAACA | |
| | ACTGAGGGCCACCCGGTCGGGGCCATCCCTCCACACTCT | |
| | GCATCCTACCCCACCTAC | |
| 7655 | TTTTTAGAGGTTGGTTGTTGTGTTTTAGGATTCTGTCCAT | 38431 |
| | TTTCTTTTAAAGTTATAAACACGTACTTGTGCGAATTATT | |
| | TTTTTAAAGTGATTTGCCATTTTTGAAAGCGTATTTAATG | |
| | ATAGAATACTATCGAGCCAACATGTACTGACATGGAAA | |
| | GATGTCAAAGATATGT | |
| 981 | AGCCAGCGGACGTCCAGGAACCGGGATGCCTCCAGCAG | 38432 |
| | TGAGGCGGTCAGCCTGCAGCATGGGATGGCTGTGGATCT | |
| | TTGGGGCAGCCCTGGGGCAGTGTCTGGGCTACAGTTCAC | |
| | AGCAGCAAAGGGTGCCATTTCTTCAGCCTCCCGGTCAAA | |
| | GTCAACTGCAAGCGAGTTA | |
| 5027 | GGGACCAGGAACTGGAGGCTCTGCAGCAAGAACAGCAG | 38433 |
| | CAGGCCCAGGGACAGGAGGAGAGGGTGAAGGAAAAGG | |
| | CAGACGCCCTCCAGGGAGCTCTGGAGCAAGCCCATATG | |
| | ACACTGAAGGAGCGTCATGGAGAGCTTCAGGACCACAA | |
| | GGAACAGGCACGAAGGCTGGAGG | |
| 7683 | CTACTCCGGAGCCTGAGGTGGGAGGATCGCTTGAGTCTG | 38434 |
| | GGAGGCAGAGGCTGCATTGAGCTATGATCATGGCACTGC | |
| | ATTCCAGCCTGGGTGACAGTGCAAGACCTTGTCTCAGAA | |
| | TAAATAAAGTATGTGATGAAGATGTGCATACATTATATG | |
| | CAAATACTGTTTTTTTTT | |
| 8650 | CACCAATTCGGCTGGCGTCTCCGAGACCGCGGACTCCCG | 38435 |
| | TAGGGTCCCCGTGGCCCCGAGTTGTAGTCGGGACACCCC | |
| | GGCCGCGGGTGATCGTCGGGTCTCCACGCGCCCGGGTCG | |
| | CTGACGCGGATCCGGCCTCGGCGCCTTCTCAGGGCGCCC | |
| | TGCAAGGCCGCAGGCAGG | |
| 6898 | CCTCCTCTCTGGCTAATCAACAGCTGCCCCCAGCCTGTG | 38436 |
| | GTGCCAGGCAACTCAGCAAGCTGAAAAGGTTCCTTACTA | |
| | CCCTGCAGCAGTTTGGCAATGACATTTCACCCGAGATAG | |
| | GAGAAAGAGTTCGCACCCTCGTTCTGGGACTAGTGAACT | |
| | CCACTTTGACAATTGAAG | |
| 2042 | TTTAGTGTCACAGGAGACACGAGGGCAAAGTGCTGAGG | 38437 |
| | AAACTCTAGAGCAACATCGGAATGCATGGTGAAGCATC | |
| | AGATGGTGAAGGAGAAGGAGACACAGAAGTGATGCAGC | |
| | AGGAGACAGTTCCAGTTCCTGTACCTTCAGAGAAAACCA | |
| | AACAGCCTAAAGAATGTTTTT | |
| 1686 | GCCACTTCTCTTCCCTTCATTCTTCGCCAGGCTCTCTGCT | 38438 |
| | GACTCAAGTTCTTCAGTTCACGATCTTCTAGTTGCAGCG | |
| | ATGAGTGCACGAGTGAGATCAAGATCCAGAGGAAGAGG | |
| | AGATGGTCAGGAGGCTCCCGATGTGGTTGCATTCGTGGC | |
| | TCCCGGTGAATCTCAGCA | |
| 5902 | CTTCAACTTGGCAACAGTTGCCTGGGGTAGCTCTACACA | 38439 |
| | ACTCTGTCCAGCCCACAGCAATGATTCCAGAGGCCATGG | |
| | GGAGTGGACAGCAGCTAGCTGACTGGAGGAATGCCCAC | |
| | TCTCATGGCAACCAGTACAGCACTATCATGCAGCAGCCA | |
| | TCCTTGCTGACTAACCATG | |
| 3399 | CACCCTGACCCAAGCCGAGACAGGTTCCAAACCTCAACC | 38440 |
| | TGCAGCCGGAAGGGGGAAGTGAAACTCGGCTGGGGGTG | |
| | GGGGCTCAGAAGCCGCCCCAGAAAGCACTGAAAGCCAC | |
| | AGCACGTACACCCACTCCAGGGATCTGCCAGCACCCTGT | |
| | GGGGCCCAGACTACAGGCTG | |
| 6560 | GGGACGCCATTGTGATTGGGGGGGGGATCCAGGGCTGCT | 38441 |
| | TCACTGCATACCACCTGGCCAAACACAGGAAGAGGATC | |
| | CTCCTGCTGGAGCAGTTCTTTCTACCACACTCCCGAGGA | |
| | AGCTCCCATGGACAAAGCCGGATAATCCGAAAGGCGTA | |
| | CCTGGAAGACTTTTACACCC | |
| 2890 | CACCGTAGTGCTTAGAGGCCGAAAAAGTACAGCCCCTTC | 38442 |
| | CGGGCTCCGCGGTACGGGAAGACAGCTTTGGGATGTCG | |
| | GAAGATCCTAGAGGTCCCAAGGTACCACGAAAGGCAGT | |
| | GGTAGAAAAGCCAGCTCGGGCAGCAGAGCGAGAGGCCC | |
| | GGGCCCTGCTGGAGAAGAACC | |
| 4343 | ATTGGCTGAGCCCGGCTGTCAGTCCTTTCGCGCCTCGGC | 38443 |
| | GGCGCGGCATAGCCCGGCTCGGCCTGTAAAGCAGTCTCA | |
| | AGCCTGCCGCAGGGAGAAGATGGCGGTCGCCGTGAGAA | |
| | CTTTGCAGGAACAGCTGGAAAAGGCCAAAGAGAGTCTT | |
| | AAGAACGTGGATGAGAACAT | |
| 6138 | ACAAGGAGACTGGGAGGTGTCTCAAGTGCCTGTACCAC | 38444 |
| | ACGGAAGGGGAACACTGTCAGTTCTGCCGGTTTGGATAC | |
| | TATGGTGATGCCCTCCAGCAGGACTGTCGAAAGTGTGTC | |
| | TGTAATTACCTGGGCACCGTGCAAGAGCACTGTAACGGC | |
| | TCTGACTGCCAGTGCGACA | |
| 2241 | GAGGAAGGAGAGAGTGGAGGAGGAGGGCTTTGGGTTAG | 38445 |
| | GGAGAGTGCTTTCGTTTGTTTTAAATGGGAGAAACTGGA | |
| | GCATGTTGCCAAGGGCAGAGAGCCAGCAGAGAGGGGTG | |
| | AATGGAAGAAGGAGCGAGAAGGGGGTTACTGACGAAGC | |
| | CTTATCCTGGAGGAGAGAAGG | |
| 5715 | CAAGTGGTCCTGTCGAAGTATTTATCACTGAGACTCCGA | 38446 |
| | GTCAGCCCAACTCCCACCCCATCCAGTGGAATGCACCAC | |
| | AGCCATCTCACATTTCCAAGTACATTCTCAGGTGGAGAC | |
| | CTAAAAATTCTGTAGGCCGTTGGAAGGAAGCTACCATAC | |
| | CAGGCCACTTAAACTCCT | |
| 3456 | CTAGACCAAAGGGTGCGGCTGCTGCAGAGGTGGCTGAT | 38447 |
| | GCAGGTTTCCATCCTTGGGGAATGACCACGCAACTGGGC | |
| | CCAGCCCTGGTGCTGGGGGTGGCCCTGTGCCTGGGTTGT | |
| | GGCCAGCCCCTACCACAGGTCCCTGAACGCCCCTTCTCT | |
| | GTGCTGTGGAATGTACCCT | |
| 5260 | ATCTCCAGCCATTGCTCCTCCAACAGAGACCATGGCTCC | 38448 |
| | TCCAGTCAGGGATCCTGTTCCTGGGAAACCCACGGTCAC | |
| | CATCCGGACTCGAGGCGCCATTATTCAAACCCCAACCCT | |
| | AGGCCCCATCCAGCCTACTCGGGTGTCAGAAGCTGGCAC | |
| | CACAGTTCCTGGCCAGAT | |
| 1288 | GGAGGCAGGCGGTGCCGCGGCGCCGGGACCCGACTCAT | 38449 |
| | CCGGTGCTTGCGTGTGGTGGTGAGCGCAGCGCCGAGGAT | |
| | GAGGAGGTGCAACAGCGGCTCCGGGCCGCCGCCGTCGC | |
| | TGCTGCTGCTGCTGCTGTGGCTGCTCGCGGTTCCCGGCG | |
| | CTAACGCGGCCCCGCGGTCG | |
| 8756 | CACCCCCACCGACCTCTCGGAGACAGGAATCCGCTCTGC | 38450 |
| | CCCTGCATCCTCCTCTGCTCACCCTTCTCTCAGTAGTGTT | |
| | TGTCAGACACCAGTCCGGACCTCAGCTCTCGATCTAGTT | |
| | CCCGAGTAAGATTTAGCTCCCGGGAAAGCGTGCCTGAAA | |
| | CAAGCCGGAGTGAGCCT | |
| 8952 | CCTGTACCATAACCAGGAGGCTGATGGTTGCTCAGGCCT | 38451 |
| | CCCTCAAACTAGCCAATGAGAAGTGCACGGGTCCTGGTC | |
| | GCCTAGGAAACCGCGTGACAACAAGATGGCGGCGCTGC | |
| | GGGACGGCTAGCGGCCCTGCGTGGGAGTTCCTGACAGCT | |
| | GGATTCTAGAAGTAGAACT | |
| 2759 | TTCCCCGGAAGTGTTGGTTAAAGCCCCTCCAATCAGCGG | 38452 |
| | CTCGGTGCGGCAAGTTTGAATTTCGTGGAGGCTCGGGTT | |
| | GTGAGGGTTCCTGCTTCGGAGTCGGCGGTGGTCGTCCAG | |
| | ACCGAGTGTTCTTTACTTTTTGTTTGGTTGAGGTTTCACG | |
| | CTAGAAGGTGGCTCAGG | |
| 1241 | CTGTCCATACACTCTCTCATCATCCTGTTCCTTGGATTGG | 38453 |
| | ACTTCACTAAGCAATTTATCACTCACCTTCAGACTTACAT | |
| | GTGGGAGTTTTCACAACAGTAGTTTTGGAATCATTAGAA | |
| | CTTGGATTGATTTCATCATTTAACAGAAACAAACAGCCC | |
| | AAATTACTTTATCACC | |
| 28013 | GAGCTCCAGCCTCCAGGCACCCGGGATCCAGCGCCGCCG | 38454 |
| | CTCATAACACCCGCGACCCCGCAGCTAAGCGCAGCTCCC | |
| | GACGCAATGGACCCGGCGCTGGCAGCCCAGATGAGCGA | |
| | GGCTGTGGCCGAGAAGATGCTCCAGTACCGGCGGGACA | |
| | CAGCAGGCTGGAAGATTTGC | |
| 4681 | TGTTGACTCATGCAAATGAGGTATCTGAACTGCAGCTTC | 38455 |
| | AGTATTAGCAGAGCCACAGGCCGCCTCTGTGGCATCACC | |
| | AGGGTTTCTCTGAAGAAGAGGGTCTGCATTTTCCTAAAC | |
| | CCAGTGCTGCTCTCCCATCTCCCATCTTCCTCTCGCAGCT | |
| | TGATGAGCCCCGGTGTG | |
| 5602 | TGCCCCAGCCCTCAGGGCCGCCAGCAAGGAAGAAATTT | 38456 |
| | GTGATACCCCTCGACGAGGATGAGGTCCCTCCTGGAGTG | |
| | GCCAAGCCCTTATTCCGATCTACACAGAGCCTTCCCACT | |
| | GTGGACACCTCGGCCCAGGCGGCCCCTCAGACCTACGCC | |
| | GAATATGCCATCTCACAGC | |
| 1945 | GAGAGGCCGGCGTCTCTCCCCCAGTTTGCCGTTCACCCG | 38457 |
| | GAGCGCTCGGGACTTGCCGATAGTGGTGACGGCGGCAA | |
| | CATGTCTGTGGCTTTCGCGGCCCCGAGGCAGCGAGGCAA | |
| | GGGGGAGATCACTCCCGCTGCGATTCAGAAGATGTTGGA | |
| | TGACAATAACCATCTTATT | |
| 5229 | AACCCCAACCCTAGGCCCCATCCAGCCTACTCGGGTGTC | 38458 |
| | AGAAGCTGGCACCACAGTTCCTGGCCAGATTCGCCCAAC | |
| | GATGACCATTCCTGGCTATGTGGAGCCTACTGCAGTTGC | |
| | TACCCCTCCCACAACCACCACCAAGAAGCCACGAGTATC | |
| | CACACCAAAACCAGCAAC | |
| 7542 | CTGCAGCATCTTCTACGTCGGGACCACAGCCTCCGCCTC | 38459 |
| | CACAAAGCCTGAACCTCCTTTCGCAGGCTCAGCTGCAGG | |
| | CACAGCCTCTTGCGCCAGGCGGAACTCAAATGAAAAAG | |
| | AAAAGTGGCTTCCAGATAACTAGCGTTACTCCTGCTCAG | |
| | ATCTCCGCTAGTATCAGCT | |
| 6866 | CCAATACCTGGGATCCATTGCCTCTCCTTCTGTGCACCCA | 38460 |
| | GCAACGCCCATTTCACCTGGACGTGCCAGCGGCATGACA | |
| | ACCCTCTCTGCAGAACTTTCCAGTCGACTCTCAACGGCA | |
| | CCCGACCTGACAGCGTTCAGCGACCCGCGCCAGTTCCCC | |
| | GCGCTGCCCTCCATCTC | |
| 1849 | TCTCTTGCTTCAACAGTGTTTGGACGGAACAGATCCGGG | 38461 |
| | GACTCTCTTCCAGCCTCCGACCGCCCTCCGATTTCCTCTC | |
| | CGCTTGCAACCTCCGGGACCATCTTCTCGGCCATCTCCTG | |
| | CTTCTGGGACCTGCCAGCACCGTTTTTGTGGTTAGCTCCT | |
| | TCTTGCCAACCAACC | |
| 2558 | AGTTACCTCTCCCCTTTCACGTAGTTTTCATTTGTGGTGA | 38462 |
| | GATTCTCTCCCAGGCCACAAGACATTTCCTGCTCGGAAC | |
| | CTTGTTTACTAATTTCCACTGCTTTTAAGGCCCTGCACTG | |
| | AAAATGCAAGCTCAGGCGCCGGTGGTCGTTGTGACCCAA | |
| | CCTGGAGTCGGTCCCG | |
| 2109 | ATCAGCCCAAAGGTAGGCTCAGGCTCCGACGGTGGCCG | 38463 |
| | GCGGGGGTCACGAGGCTTCGTAGTGGAGGAACGGGTTT | |
| | GGCGTGTGGGACGCAGCTGCCTCTGTACTGGGGAGTCAC | |
| | GGAGTGGCCGGGCTCCAGGGACATGGCGGCGGCCTCTG | |
| | CGGTGTCGGTGCTGCTGGTGG | |
| 297 | ATCCGGAGGCAGCCTGCAGGAAGCCGTAGCGCCGGTAC | 38464 |
| | GTGCCCCTCTCCTGTCTGGAGGCGGGTGTAGAAGTCCGA | |
| | CCGCGGAAGCCAGACTGCTGTCCAGTCGGCGAGCGCGT | |
| | ACCATTCAGCATCGGCTCCGCCCGAGTCCCACCTTCCTC | |
| | AGGCTCTGATTGGCTGACAC | |
| 2621 | CAACAGAAGCCAAGAAGGAAGCCGTCTATCTTGTGGCG | 38465 |
| | ATCATGTATAAGCTGGCCTCCTGCTGTTTGCTTTTCATAG | |
| | GATTCTTAAATCCTCTCTTATCTCTTCCTCTCCTTGACTCC | |
| | AGGGAAATATCCTTTCAACTCTCAGCACCTCATGAAGAC | |
| | GCGCGCTTAACTCCGG | |
| 6574 | TGGCTGACACATTCCTGGAGCACATGTGCCGCCTGGACA | 38466 |
| | TTGATTCACCACCCATCACAGCCCGGAACACTGGCATCA | |
| | TCTGTACCATTGGCCCAGCTTCCCGATCAGTGGAGCTGA | |
| | AGAAGGGAGCCACTCTCAAAATCACGCTGGATAACGCC | |
| | TACATGGAAAAGTGTGACG | |
| 1033 | GACATTTACATCCTGCCCAGCGACAACTCTGGACAAGTC | 38467 |
| | AGTCCCCCAGAGTCTCCAACTGTGACCACTTCCTGGCAG | |
| | TCTGAGAGCTTACCTGTGTCACTGTCAGCTAGCCAGAGT | |
| | TGGCACACAGAAAGCCTGCCAGTGTCACTAGGCCCTGAG | |
| | TCCTGGCAGCAGATTGCA | |
| 8789 | CCTCTGACTTGACCCAATGAAAGAAGCATATGGCACTTG | 38468 |
| | TGAAGATAAATGTTACTCCTCCCTTTTTAATTGGAACTTC | |
| | TGCTTAGGACCTGTGTATGACGTTTCACCTGTGATCTGTT | |
| | CTTTCGGTAGCCACTGACTTTGAGTTACAGGAAGGTCTC | |
| | CGAAGATTTGTGTCAA | |
| 6392 | CTTCCCTGAGGAGGACGACCCCACCAACTGGCTGCGTTG | 38469 |
| | CTACTACTACGAAGACACCATCAGCACCATCAAGTCTGT | |
| | GGCCTGGGAGGGAGGGGCCTGTCCAGCCTTCCTGCCATC | |
| | CCTACGACCACTGCCCCTCACATCACCTTCTCATGGGTCC | |
| | CTCTCCCACTCCAAAGC | |
| 6885 | ATTTATGATTTCAACATGGATACATATTTCAGTTCTTTCT | 38470 |
| | TTTTCTCACTATCTGAAAATACATTTCCCTCCCTCTCTTC | |
| | CCCCCAATATCTCCCTTTTTTTCTCTCTTCCTCTATCTTCC | |
| | AAACCCCACTTTCTCCCTCCTCCTTTTCCTGTGTTCTCTTA | |
| | AGCAGATAGCAC | |
| 561 | CCCTTCCGGCTGGCCCCGCTCAGTCACCCGCAGCAGGCG | 38471 |
| | TGCAGTTTCCCGGCTCTCCGCGCGGCCGGGGAAGGTCAG | |
| | CGCCGTAATGGCGTTCTTGGCGTCGGGACCCTACCTGAC | |
| | CCATCAGCAAAAGGTGTTGCGGCTTTATAAGCGGGCGCT | |
| | ACGCCACCTCGAGTCGTG | |
| 7556 | ATACAAATTTGCCTTTGGCACAACAGATACCACTAAGTT | 38472 |
| | CTACCCAGTTCTCCGCACAATCATTAGCTCAGGCAATTG | |
| | GAAGCCAAATTGAAGATGCCAGGCGTGCAGCGGAGCCC | |
| | TCCTTAGTTGGCTTACCTCAGACTATCAGTGGTGACAGT | |
| | GGGGGAATGTCAGCAGTTT | |
| 8800 | TCCGTCCTCCAGGATCTGGGGAGAAAGAGCCCCATCCCT | 38473 |
| | TCTCTCTCTGCCACCATTTCGGACACCCCGCAGGGACTC | |
| | GTTTTGGGATTCGCACTGACTTCAAGGAAGGACGCGAAC | |
| | CCTTCTCTGACCCCAGCTCGGGCGGCCACCTGTCTTTGCC | |
| | GCGGTGACCCTTCTCTC | |
| 5781 | GTTTACTTCCCCTGCCAGCATTGGGGTGCTCTCTAAGCA | 38474 |
| | ACAGTAGGCGGAGAGTGGTCTGGCGTATTAAAAACAAA | |
| | GGATCGTCAAGTGGGCCTTCCCAGGCATTGCTTTGACTT | |
| | AGTACATGTAGAGGATGTGGCAGTTCTCTCCGTCCCTGC | |
| | CACTGCTGGTTTCTTTGTT | |
| 2930 | TATTTTAAGCCCAGTCTTCCCTGGGCCACCTTTAGCAGAT | 38475 |
| | CCTCGTGCGCCCCCGCCCCCTGGCCGTGAAACTCAGCCT | |
| | CTATCCAGCAGCGACGACAAGTAAAGTGGCCCGCCGGTT | |
| | TCTGAGCCTTCTGCCCTGCGGGGACACGGTCTGCACCCT | |
| | GCCCGCGGCCACGGACC | |
| 3426 | CCAGCGGAAGTAATTCTTTCGACTGCCCCGGAACCCACC | 38476 |
| | GGAGCAGGCAGCTGGGGGTGGGGGGGCGGCCCTGGGAT | |
| | AGGGGCTGTGGCAGTACGCGGGGACCCGGCTGCGGTGG | |
| | CTGCGGGACTGACGAATGGAGAGGAGAAAACCTATGGT | |
| | GGCTGTGAAGGACCTGATGCC | |
| 5800 | ATGGGGAAGGTGAAGGTCGGAGTCAACGGATTTGGTCG | 38477 |
| | TATTGGGCGCCTGGTCACCAGGGCTGCTTTTAACTCTGG | |
| | TAAAGTGGATATTGTTGCCATCAATGACCCCTTCATTGA | |
| | CCTCAACTACATGGTTTACATGTTCCAATATGATTCCACC | |
| | CATGGCAAATTCCATGGC | |
| 27433 | CTGCCTCCCCCCCGCTCCCGCTCCCCTGAGCCCAGCCAG | 38478 |
| | ACCCCGCGCCGCCCGCGCCCCGCTCGACTCCGGAGGCTC | |
| | CCGCAGCCCCGGCGTCCGCCCCGCTGCCCCCTCCCCCGG | |
| | GGGCCATGGGGGCGCCCCCGGGCTACCGGCCCTCAGCTT | |
| | GGGTGCATCTCCTCCACC | |
| 424 | ATTTCTGGGAAGCAGTCGATATTATCTGTACGCCTAGAA | 38479 |
| | CAGTGCCCTCTGCAGCTGAATAACCCTTTTAACGAGTAT | |
| | TCCAAATTTGATGGCAAGGGTCATGTAGGTACAACAGCA | |
| | ACCAAGAAGATCGATGTCTACCTCCCTCTGCACTCGAGC | |
| | CAGGACAGACTGCTGCCA | |
| 28259 | CTCTGGTGATACAGAAGAAAAGACAGTCTCCATTTTCAA | 38480 |
| | ACAGTCCCTCCTGGGAGAACACAGACAGGCAGAGGATT | |
| | ACAACACAAGGCAGCAAGCACTGGGAGACGAAAGTTTT | |
| | GGCATCTGTTCCCTGGCTGTGCCAAGATGGGCGATTGGA | |
| | GCTTCCTGGGAAATTTCCTG | |
| 6972 | GTCTACTATGTCTGAACTGTGGTTTCTTGTTTATCCTTTTT | 38481 |
| | TCCTTAGTTGGACTGTAATGTATGGTCTGTCAACCTGTGA | |
| | ATCTTTAAAGTATGATTCAGGTATTGTTGTATTCTTTACT | |
| | GTGTAATAAAAAAGTTGAAAAAAATCTGGATCCTCTGTC | |
| | TCCCTCGTCCCCGG | |
| 417 | TTTCGTGACCTTGTCCAGTAGAAGGCTATTTAATTTTCAC | 38482 |
| | AACTGCTTGAATTTTGACATACAAGATGAAGCAAGATGC | |
| | CTCAAGAAATGCTGCCTACACTGTGGATTGTGAAGATTA | |
| | TGTGCATGTGGTAGAATTTAATCCCTTTGAGAATGGGGA | |
| | TTCAGGAAACCTAATTG | |
| 8182 | TGTCTGCACCAGCCGGCCTCCAGCCTGGCTGGACCCTGC | 38483 |
| | TGCCTGTGTGGCCCGGAGCCAGAGGCCCCCACACTCCCA | |
| | GCTGCTCTTCTACAGATGCCATCAACGAGCAGGACTCTG | |
| | GGTGGCTCCACTGTCTAAGGGCTCTGCGAGTGACCCGGC | |
| | GGGCGAGCTCCGTGCTGC | |
| 7572 | CTTACGTAGTAATTACATTTCCTTGAAAAAACTATAGTG | 38484 |
| | AATAGAAATCCCTAGCCATTTCATTTTTTATGTTTTTAAT | |
| | GAAGATCTTTAAAATACCATAGGTGGTAATCGTGGAAAA | |
| | TTTGAAAAATCTCATGTCAGTGTATTAAGATGGTGGAGA | |
| | AGTTTTTTTCTCCATTA | |
| 1415 | ATTCATGAAAATCCACTACTCCAGACAGACGGCTTTGGA | 38485 |
| | ATCCACCAGCTACATCCAGCTCCCTGAGGCAGAGTTGAG | |
| | AATGGAGAGAATGTTACCTCTCCTGGCTCTGGGGCTCTT | |
| | GGCGGCTGGGTTCTGCCCTGCTGTCCTCTGCCACCCTAA | |
| | CAGCCCACTTGACGAGGA | |
| 7327 | GAGCTTCCAGGGATATTTGAGGCACCATCCCTGCCATTG | 38486 |
| | CCGGGCACTCGCGGCGCTGCTAACGGCCTGGTCACATGC | |
| | TCTCCGGAGAGCTACGGGAGGGCGCTGGGTAACCTCTAT | |
| | CCGAGCCGCGGCCGCGAGGAGGAGGGAAAAGGCGAGC | |
| | AAAAAGGAAGAGTGGGAGGA | |
| 705 | GCCCCCTCCCCTGACTATCAAAGCAGCGGCCGGCTGTTG | 38487 |
| | GGGTCCACCACGCCTTCCACCTGCCCCACTGCTTCTTCGC | |
| | TTCTCTCTTGGAAAGTCCAGTCTCTCCTCGGCTTGCAATG | |
| | GACCCCAACTGCTCCTGCGCCGCTGGTGTCTCCTGCACC | |
| | TGCGCTGGTTCCTGCA | |
| 8561 | AGTCGCATAGTGGTTTTTCCGCTCGCGTCGCTGTGTGAA | 38488 |
| | AGTTGGCTCGCCGCTCTTTGCACGCCCTCCCTGGAGGCC | |
| | GACCCGAGACGCCAAGCTGGAGAGACCGTGCCTCCCCG | |
| | AGGCCGGCCGCCCCGCGAGCACAGCCTCCGCCCCCGTTG | |
| | CACTGCCGGGCTGGGCAAT | |
| 1679 | GGTGGCGGGAAGAGGAGGCGCGAGAATGGAGGTGGAG | 38489 |
| | GCCGTCTGTGGTGGCGCGGGCGAGGTGGAGGCCCAGGA | |
| | CTCTGACCCTGCCCCTGCCTTCAGCAAGGCCCCCGGCAG | |
| | CGCCGGCCACTACGAACTGCCGTGGGTTGAAAAATATAG | |
| | GCCAGTAAAGCTGAATGAAAT | |
| 5635 | TATTTCCCTCTACTGAGTAAACCCTATCTGTGATTCCCCC | 38490 |
| | AAACATCTGGCATGGCTCCCTTTTGTCCTTCCTGTGCCCT | |
| | GCAAATATTAGCAAAGAAGCTTCATGCCAGGTTAGGAA | |
| | GGCAGCATTCCATGACCAGAAACAGGGACAAAGAAATC | |
| | CCCCCTTCAGAACAGAGG | |
| 5583 | TGTTACTTAAGAATGCTTTCCAGGTGGAAAGTTCCTTAA | 38491 |
| | GTTTGAGGCTTCAAATTCCATACAGCACATTAAAATCCC | |
| | ATTCATGAGTTTGAAATACTGCTCTGTTGTCTTGGAAATA | |
| | CCAATCAGATTGTTGGCTGAAGTGATGTGGATAAAGAAG | |
| | GGATCTTAGAAAAACTA | |
| 9027 | ACGAAGTTCCGGAAATGGAATTACCGAGTCAGATGAGA | 38492 |
| | AACACAAGTCATCAATGAATTAACAAGCAACACATTGTC | |
| | ACATCCAGCTGTTGAAGAGTGGTTAACTCAGCTTGATCT | |
| | CCGAAGACTCTTCTGCACCCCACCCCGCCCCCAACTGCT | |
| | TTCCAAAGAGAAACAGAAA | |

[0133] The IRES may be of any length or size. For example, the IRES may be about 100 nucleotides to about 600 nucleotides in length (e.g., about 200, about 225, about 250, about 275, about 300, about 325, about 350, about 375, about 400, about 425, about 450, about 475, about 500, about 525, about 550, or about 575 nucleotides in length, or a range defined by any two of the foregoing values). In some embodiments, the IRES may be about 200 nucleotides to about 800 nucleotides in length (about 200, about 210, about 220, about 240, about 260, about 280, about 320, about 340, about 360, about 380, about 420, about 440, about 460, about 480, about 500, about 520, about 540, about 560, about 580, about 600, about 620, about 640, about 660, about 680, about 700, about 720, about 740, about 760, about 780, or about 800 nucleotides in length, or a range defined by any two of the foregoing values). In some embodiments, the IRES may be about 200 to about 400, about 400 to about 600, about 600 to about 700, or about 600 to about 800 nucleotides in length. In some embodiments, the IRES is about 210 nucleotides in length. In some embodiments, the IRES may be about 100 to about 3000 nucleotides in length.

[0134] In some embodiments, a circular RNA molecule comprises of an IRES sequence that consists of a sequence encoded by a DNA sequence from Table 1A or Table 1B. In some embodiments, a circular RNA molecule comprises an IRES sequence encoded by a DNA sequence from Table 1A or Table 1B, wherein the IRES sequence additionally comprises up to 1000 additional nucleotides. In some embodiments, the IRES sequence is encoded by a sequence from Table 1A or 1B and additionally comprises up to 1000 additional nucleotides located at the 5′ end of that sequence. In some embodiments, the IRES sequence is encoded by a sequence from Table 1A or 1B and additionally comprises up to 1000 additional nucleotides located at the 3′ end of that sequence. In some embodiments, the IRES sequence is encoded by a sequence from Table 1A or 1B and additionally comprises up to 1000 additional nucleotides located at the 5′ end of that sequence and up to 1000 additional nucleotides located at the 5′ end of that sequence.

[0135] In some embodiments, a circular RNA molecule comprises an internal ribosome entry site (IRES) sequence region, wherein the IRES sequence region comprises a sequence encoded by a DNA sequence from Table 1A or Table 1B, and wherein the sequence encoded by a DNA sequence from Table 1A or Table 1B has a minimum free energy (MFE) of less than −18.9 kJ/mol and a melting temperature of at least 35.0° C.

[0136] In some embodiments, a circular RNA molecule comprises an internal ribosome entry site (IRES) sequence region, wherein the IRES sequence region comprises a sequence encoded by a DNA sequence from Table 1A or Table 1B, and wherein the IRES sequence region has a minimum free energy (MFE) of less than −18.9 kJ/mol and a melting temperature of at least 35.0° C., over its entire length.

[0137] In some embodiments, a circular RNA molecule comprises an internal ribosome entry site (IRES) sequence region, wherein the IRES sequence region comprises a sequence encoded by a DNA sequence from Table TA or Table 1B, and additionally comprises up to 1000 additional nucleotides located at the 5′ end of and up to 1000 additional nucleotides located at the 5′ end, and wherein the IRES sequence region has a minimum free energy (MFE) of less than −18.9 kJ/mol and a melting temperature of at least 35.0° C., over its entire length. In some embodiments, the recombinant circular RNA molecule comprises a protein-coding nucleic acid sequence operably linked to the IRES, optionally in a non-native configuration. Any protein or polypeptide of interest (e.g., a peptide, polypeptide, protein fragment, protein complex, fusion protein, recombinant protein, phosphoprotein, glycoprotein, or lipoprotein) may be encoded by the protein-coding nucleic acid sequence. In some embodiments, the protein coding-nucleic acid sequence encodes a therapeutic protein. Examples of suitable therapeutic proteins include cytokines, toxins, tumor suppressor proteins, growth factors, hormones, receptors, mitogens, immunoglobulins, neuropeptides, neurotransmitters, and enzymes. Alternatively, the protein-coding nucleic acid sequence can encode an antigen of a pathogen (e.g., a bacterium, virus, fungus, protist, or parasite), and the circRNA can be used as, or as one component of, a vaccine. Therapeutic proteins, and examples thereof, are further described in, e.g., Dimitrov, D. S., Methods Mol Biol., 899: 1-26 (2012); and Lagasse et al., F1000Research, 6: 113 (2017).

[0138] Ideally, the IRES is “in-frame” with respect to the protein-coding nucleic acid sequence, that is, the IRES is positioned in the circRNA molecule in the correct reading frame for the encoded protein. Examples of IRES elements that were found to be in-frame with one or more coding sequences are set forth in Table 4. In some embodiments, however, the TRES may be “out of frame” with respect to the protein-coding nucleic acid sequence, such that the position of the IRES disrupts the ORF of the protein-coding nucleic acid sequence. In other embodiments, the IRES may overlap with one or more ORFs of the protein-coding nucleic acid sequence. In addition, while in some embodiments the protein-coding nucleic acid sequence comprises at least one stop codon, in other embodiments the protein-coding nucleic acid sequence may lack a stop codon. The instant inventors have found that a circRNA molecule comprising a protein-coding nucleic acid sequence having an in frame non-native IRES and lacking a stop codon can initiate a recursive (i.e., infinite loop) translation mechanism. Such recursive translation may produce a concatenated protein multimer (e.g., >200 kDa). This particular circRNA design allows for the production of repeating ORF units up to 10 times the size of the single ORF. Without being bound to any particular theory, use of the circRNAs described herein for recursive gene encoding may represent a novel “data compression” algorithm for genes, addressing the gene size limitation associated with many current gene therapy applications.

[0139] In some embodiments, the IRES comprises (i) at least one RNA secondary structure element and (ii) a sequence that is complementary to an 18S rRNA. In some embodiments, the IRES comprises (i) at least one RNA secondary structure element and (ii) a sequence that is complementary to an 18S rRNA, wherein the RNA secondary structure of the IRES is formed from the nucleotides at about position 40 to about position 60 of the IRES, wherein the first nucleic acid at the 5′ end of the IRES is considered to be position 1. The relative location of the at least one RNA secondary structure and the sequence that is complementary to an 18S RNA may vary. For example, in some embodiments, the IRES comprises (i) at least one RNA secondary structure element and (ii) a sequence that is complementary to an 18S rRNA, and wherein the at least one RNA secondary structure is located 5′ to the sequence that is complementary to an 18S rRNA. In some embodiments, the IRES comprises (i) at least one RNA secondary structure element and (ii) a sequence that is complementary to an 18S rRNA, and wherein the at least one RNA secondary structure element is located 3′ to the sequence that is complementary to an 18S rRNA).

[0140] In some embodiments, the circular RNA may comprise one or more IRES RNA control elements. These elements may, in come embodiments, act as a conditional “off” switch. For example, the IRES RNA control element may be a miRNA binding site. miRNA binding to the circRNA may lead to degradation of the circRNA, destroying its activity.

### DNA Molecules and Host Cells

[0141] In some embodiments, the disclosure provides a DNA molecule comprising a nucleic acid sequence encoding any one of the recombinant circRNA molecules disclosed herein. Accordingly, described herein are DNA sequences that may be used to encode circular RNAs. In some embodiments, a DNA sequence encodes a circular RNA comprising an IRES. In some embodiments, a DNA sequence encodes a circular RNA comprising a protein-coding nucleic acid. In some embodiments, the DNA sequence encodes a circular RNA molecule; wherein the circular RNA molecule comprises a protein-coding nucleic acid sequence and an internal ribosome entry site (IRES) operably linked to the protein-coding nucleic acid sequence in a non-native configuration. In some embodiments, the DNA sequence encodes a protein coding-nucleic acid sequence, wherein the protein is a therapeutic protein.

[0142] The DNA sequences disclosed herein may, in some embodiments, comprise at least one non-coding functional sequence. For example, the non-coding functional sequence may be a microRNA (miRNA) sponge. A microRNA sponge may comprise a complementary binding site to a miRNA of interest. In some embodiments, a sponge's binding sites are specific to the miRNA seed region, which allows them to block a whole family of related miRNAs. In some embodiments, the miRNA sponge is selected from any one of the miRNA sponges shown in the table below.

| miRNA | Binding sites | Cell context |
|---|---|---|
| 92, empty | four bulged | rat cerebellar neuronal cultures |
| | sites | |
| miR-155, empty | eight bulged | B cell lymphoma cell line |
| | sites | |
| 15a, empty | two perfect | human prostate cell lines, xenograft |
| | sites | |
| 113, empty | two perfect | mouse cardiac myocytes, heart |
| | sites | |
| 326, empty | seven bulged | tail vein injection, TH cells |
| | sites | |
| 16, 20, 21, | four to nine | mammalian cell lines |
| 30-5p, CXCR4 | bulged sites | |
| 16, 20, CXCR4 | four to nine | mammalian cell lines |
| | bulged sites | |
| let-7, 22, 124, 125, | five to seven | rat hippocampal neuronal cultures |
| 132, 143, empty | bulged sties | |
| 183, CXCR4 | seven bulged | HEK293T cell line |
| | sites | |
| A.t. 156, 319, | one bulged site | transgenic Arabidopsis plants |
| empty | | |
| 16, CXCR4 | seven to nine | human multiple myeloma cell |
| | bulged sites | lines, xenograft |
| 16, 23a, 142-3p. | four perfect or | U937 cell line, mouse hematopoietic |
| 221, 223, | four | stem/progenitor cells, transplant |
| nonspecific | bulged sites | |
| KSHV miR-K1, | nine bulged | BC-3 B cell lymphoma cell line |
| CXCR4, empty | sites | |
| 21, 140-3p, | one to two | mammalian cell lines |
| 140-5p, empty | perfect sites | |
| 133, empty | three perfect | mouse cardiac myocytes |
| | sites | |
| 204, 211, empty | two perfect | ST2 cell line, osteogenic and |
| | sites | adipogenic differentiation |
| 96/182/183, empty | four bulged | mouse retina |
| | sites each | |
| let-7, 16, empty | six to nine | lung cancer cell line |
| | bulged sites | |
| D.m. 7, 8, 9a, 276a | 10 bulged sites | Transgenic fruitflies |
| 9, 10b, CXCR4 | eight bulged | 4T1 breast cancer cell line, xenograft |
| | sites | |
| herpesvirus miR-K12-7, K12-8, | six bulged sites | human B cell lines |
| BARTI-5p, BART4, empty | | |
| 144, 451, empty | four perfect | mouse hematopoietic stem/progenitor |
| | sites | cells, transplant |
| let-7, 29, 125, | 16 bulged sites | neural stem cells |
| let-7/125, | | |
| 128, empty | | |
| 21, empty | two perfect | mouse cardiocytes |
| | sites | |
| 18a, 19b, 20a, | one perfect site | K562 cell line |
| nonspecific | | |
| 145/146, empty | eight to nine | mouse hematopoietic stem/progenitor |
| | bulged | cells, transplant |
| | sites each | |
| 31, CXCR4 | seven bulged | MCF7-Ras breast cancer cell line, |
| | sites | xenograft |

[0143] In some embodiments, the non-coding sequence may be an RNA binding protein site. RNA binding proteins and binding sites therefore are listed in numerous databases known to those of skill in the art, including RBPDB (rbpdb.ccbr.utoronto.ca). In some embodiments, the RNA binding protein comprises one or more RNA-binding domains, selected from RNA-binding domain (RBD, also known as RNP domain and RNA recognition motif, RRM), K-homology (KH) domain (type I and type II), RGG (Arg-Gly-Gly) box, Sm domain; DEAD/DEAH box, zinc finger (ZnF, mostly C-x8-X-x5-X-x3-H), double stranded RNA-binding domain (dsRBD), cold-shock domain; Pumilio/FBF (PUF or Pum-HD) domain, and the Piwi/Argonaute/Zwille (PAZ) domain.

[0144] In some embodiments, the DNA sequence comprises an aptamer. Aptamers are short, single-stranded DNA molecules that can selectively bind to a specific target. The target may be, for example, a protein, peptide, carbohydrate, small molecule, toxin, or a live cell. Some aptamers can bind DNA, RNA, self-aptamers or other non-self aptamers. Aptamers assume a variety of shapes due to their tendency to form helices and single-stranded loops. Illustrative DNA and RNA aptamers are listed in the Aptamer database (scicrunch.org/resources/Any/record/nlx_144509-1/SCR_001781/resolver?q=*&l=). In some embodiments, the DNA sequence encodes a circular RNA molecule that comprises between about 200 nucleotides and about 10,000 nucleotides.

[0145] In some embodiments, the DNA sequence encodes a circular RNA molecule that comprises a spacer between the IRES and a start codon of the protein-coding nucleic acid sequence or at another location (e.g., upstream of the IRES). The spacer may be of any length (e.g., 10 to 100 nucleotide, 10 to 90 nucleotides, 10 to 80 nucleotides, 10 to 70 nucleotides, 10 to 60 nucleotides, 10 to 50 nucleotides, 10 to 40 nucleotides, 10 to 30 nucleotides, 10 to 20 nucleotides, 20 to 100 nucleotides, 20 to 90 nucleotides, 20 to 80 nucleotides, 20 to 70 nucleotides, 20 to 60 nucleotides, 20 to 50 nucleotides, 20 to 40 nucleotides, 20 to 30 nucleotides, 30 to 100 nucleotides, 30 to 90 nucleotides, 30 to 80 nucleotides, 30 to 70 nucleotides, 30 to 60 nucleotides, 30 to 50 nucleotides, 30 to 40 nucleotides, 40 to 100 nucleotides, 40 to 90 nucleotides, 40 to 80 nucleotides, 40 to 70 nucleotides, 40 to 60 nucleotides, 40 to 50 nucleotides, 50 to 100 nucleotides, 50 to 90 nucleotides, 50 to 80 nucleotides, 50 to 70 nucleotides, 50 to 60 nucleotides, 60 to 100 nucleotides, 60 to 90 nucleotides, 60 to 80 nucleotides, 60 to 70 nucleotides, or 50 nucleotides). For example, in some embodiments, the length of the spacer is selected to optimize translation of the protein-coding nucleic acid sequence.

[0146] In some embodiments, the DNA sequence encodes a circular RNA molecule comprising an IRES that is configured to promote rolling circle translation. In some embodiments, the DNA sequence encodes a circular RNA comprising a protein-coding nucleic acid sequence that lacks a stop codon. In some embodiments, the DNA sequence encodes a circular RNA molecule comprising (i) an IRES that is configured to promote rolling circle translation, and (ii) a protein-coding nucleic acid sequence that lacks a stop codon.

[0147] The DNA sequences described herein may be comprised in one or more vectors. For example, in some embodiments, a viral vector comprises a DNA sequence encoding a circular RNA. The viral vector may be, for example, an adeno-associated virus (AAV) vector, an adenovirus vector, a retrovirus vector, a lentivirus vector, a vaccinia or a herpesvirus vector. In some embodiments, the viral vector is an AAV. As used herein, the term “adeno-associated virus” (AAV), includes but is not limited to, AAV1, AAV2, AAV3 (including types 3 A and 3B), AAV4, AAV5, AAV6, AAV7, AAV8, AAV9, AAV10, AAV11, AAV12, avian AAV, bovine AAV, canine AAV, equine AAV, ovine AAV, and any other AAV now known or later discovered. In some embodiments, the AAV vector may be a modified form (i.e., a form comprising one or more amino acid modifications relative thereto) of one or more of AAV1, AAV2, AAV3 (including types 3 A and 3B), AAV4, AAV5, AAV6, AAV7, AAV8, AAV9. AAV10, AAV11, AAV12, avian AAV, bovine AAV, canine AAV, equine AAV, or ovine AAV. Various AAV serotypes and variants thereof are described, e.g., BERNARD N. FIELDS et al, VIROLOGY, volume 2. chapter 69 (4th ed., Lippincott-Raven Publishers). A number of relatively new AAV serotypes and clades have been identified (see, e.g., Gao et al, (2004) J Virology 78:6381-6388; Moris et al. (2004) Virology 33-:375-383). The genomic sequences of various serotypes of AAV, as well as the sequences of the native terminal repeats (TRs), Rep proteins, and capsid subunits are known in the art. Such sequences may be found in the literature or in public databases such as the GenBank© Database. See, e.g. , GenBank Accession Numbers NC 044927, NC 002077, NC_001401, NC_001729, NC 001863, NC 001829, NC_001862, NC_000883, NC 001701, NC 001510, NC_006152, NC 006261, AF063497, U89790, AF043303, AF028705, AF028704, J02275, JO 1901, J02275, X01457, AF288061, AH009962, AY028226, AY028223, NC 001358, NC 001540, AF513851, AF513852, AY530579; the disclosures of which are incorporated by reference herein for teaching parvovirus and AAV nucleic acid and amino acid sequences. See also, e.g., Srivistava et al. (1983) J Virology 45:555; Chiorini et al. (1998) J. Virology 71:6823; Chiorini et al (1999) J Virology 73:1309; Bantel-Schaal et al. (1999) J. Virology 73:939; Xiao et al. (1999) J. Virology 73:3994; Muramatsu et al. (1996) Virology 221:208; Shade et al. (1986) J Virol. 58:921; Gao et al. (2002) Proc. Nat. Acad. Sci. USA 99: 1 1854; Moris et al. (2004) Virology 33-:375-383; international patent publications WO 00/28061, WO 99/61601, WO 98/11244; and U.S. Pat. No. 6,156,303; the disclosures of which are incorporated by reference herein.

[0148] In some embodiments, a DNA sequence described herein is comprised in an AAV2 vector, or a variant thereof. In some embodiments, a DNA sequence described herein is comprised an AAV4 vector, or a variant thereof. In some embodiments, a DNA sequence described herein is comprised in an AAV8 vector, or a variant thereof. In some embodiments, a DNA sequence described herein is comprised in an AAV9 vector, or a variant thereof. In some embodiments, a DNA sequence described herein is comprised in a viral-like particle (VLP). Viral like particles are molecules that closely resemble viruses, but are non-infectious because they contain little or no viral genetic material. They can be naturally occurring or synthesized through the individual expression of viral structural proteins, which can then self-assemble into a virus-lie structure. Combinations of structural capsid proteins from different viruses can be used to create VLPs. For example VLPs may be derived from the, AAVs, retrovirus, Flaviviridae, paramyoxoviridae, or bacteriophages. VLPs can be produced in multiple cell culture systems, including bacteria, mammalian cell lines, insect cell lines, yeast and plant cells.

[0149] In some embodiments, a DNA sequence described herein is comprised in a non-viral vector. The non-viral vector may be, for example, a plasmid comprises the DNA sequence. In some embodiments, the non-viral vector is a closed-ended DNA. A closed-ended DNA is a non-viral, capsid-free DNA vector with covalently closed ends (see, e.g., WO2019/169233). In some embodiments, a mini-intronic plasmid vector comprises a DNA sequence described herein. Mini-intronic plasmids are expression systems that contain a bacterial replication origin and selectable marker maintaining the juxtaposition of the 5′ and the 3′ ends of transgene expression cassette as in a minicircle (see, e.g., Lu, J., et al., Mol Ther (2013) 21(5) 954-963).

[0150] In some embodiments, a DNA sequence described herein is comprised in a lipid nanoparticle. Lipid nanoparticles (or LNPs) are submicron-sized lipid emulsions, and may offer one or more of the following advantages: (i) control and/or targeted drug release, (ii) high stability, (iii) biodegradability of the lipids used, (iv) avoid organic solvents, (v) easy to scale-up and sterilize, (vi) less expensive than polymeric/surfactant based carriers, (vii) easier to validate and gain regulatory approval. In some embodiments, the lipid nanoparticles range in diameter between about 10 and about 1000 nm.

[0151] In some embodiments, a DNA sequence encodes a circular RNA molecule, wherein the circular RNA molecule comprises a protein-coding nucleic acid sequence and an internal ribosome entry site (IRES) operably linked to the protein-coding nucleic acid sequence in a non-native configuration wherein the IRES comprises: at least one RNA secondary structure; and a sequence that is complementary to an 18S ribosomal RNA (rRNA).

[0152] In some embodiments, a DNA sequence encodes a circular RNA molecule, wherein the circular RNA molecule comprises a protein-coding nucleic acid sequence and an internal ribosome entry site (IRES) operably linked to the protein-coding nucleic acid sequence in a non-native configuration wherein the IRES comprises: at least one RNA secondary structure element; and a sequence that is complementary to an 18S ribosomal RNA (rRNA); wherein the IRES has a minimum free energy (MFE) of less than −18.9 kJ/mol and a melting temperature of at least 35.0° C.; and wherein the RNA secondary structure element is formed from the nucleotides at about position 40 to about position 60 of the IRES, wherein the first nucleic acid at the 5′ end of the IRES is considered to be position 1.

[0153] In some embodiments, a DNA sequence comprises a nucleic acid sequence encoding a circular RNA molecule; wherein the circular RNA molecule comprises a protein-coding nucleic acid sequence and an internal ribosome entry site (IRES) operably linked to the protein-coding nucleic acid sequence in a non-native configuration; wherein the IRES is encoded by any one of the nucleic acid sequences listed in Table 1A or Table 1B, or a nucleic acid sequence that is at least 90% or at least 95% identical thereto.

[0154] Also provided herein are cells comprising a recombinant circRNA molecule, a DNA molecule, or a vector described herein. Any prokaryotic or eukaryotic cell that can be contacted with and stably maintain the recombinant circRNA molecule, DNA molecule encoding the recombinant circRNA molecule, or vector comprising the recombinant circRNA molecule may be used in the context of the present disclosure. Examples of prokaryotic cells include, but are not limited to, cells from the genera Bacillus (such as Bacillus subtilis and Bacillus brevis), Escherichia (such as E. coli), Pseudomonas, Streptomyces, Salmonella, and Erwinia. In some embodiments, the host cell is a eukaryotic cell. Suitable eukaryotic cells are known in the art and include, for example, yeast cells, insect cells, and mammalian cells. Examples of yeast cells include those from the genera Hansenula, Kluyveromyces, Pichia, Rhinosporidium, Saccharomyces, and Schizosaccharomyces. Suitable insect cells include Sf-9 and HIS cells (Invitrogen, Carlsbad, Calif.) and are described in, for example, Kitts et al., Biotechniques, 14: 810-817 (1993); Lucklow, Curr. Opin. Biotechnol., 4: 564-572 (1993); and Lucklow et al., J. Virol., 67: 4566-4579 (1993).

[0155] In some embodiments, the cell is a mammalian cell. A number of mammalian cells are known in the art, many of which are available from the American Type Culture Collection (ATCC, Manassas, Va.). Examples of mammalian cells include, but are not limited to, HeLa cells, HepG2 cells, Chinese hamster ovary cells (CHO) (e.g., ATCC No. CCL61), CHO DHFR-cells (Urlaub et al., Proc. Natl. Acad. Sci. USA, 97: 4216-4220 (1980)), human embryonic kidney (HEK) 293 or 293T cells (e.g., ATCC No. CRL1573), and 3T3 cells (e.g., ATCC No. CCL92). Other mammalian cell lines are the monkey COS-1 (e.g., ATCC No. CRL1650) and COS-7 cell lines (e.g., ATCC No. CRL1651), as well as the CV-1 cell line (e.g., ATCC No. CCL70). Further exemplary mammalian host cells include primate cell lines and rodent cell lines, including transformed cell lines. Normal diploid cells, cell strains derived from in vitro culture of primary tissue, as well as primary explants also are suitable. Other mammalian cell lines include, but are not limited to, mouse neuroblastoma N2A cells, HeLa, mouse L-929 cells, and BHK or HaK hamster cell lines, all of which are available from the American Type Culture Collection (ATCC; Manassas, VA). Methods for selecting mammalian cells and methods for transformation, culture, amplification, screening, and purification of such cells are well known in the art (see, e.g., Ausubel et al., supra). In some embodiments, the mammalian cell is a human cell.

### Method of Producing a Protein

[0156] The disclosure further provides a method of producing a protein in a cell, which comprises contacting a cell with the above-described recombinant circular RNA molecule, the above-described DNA molecule comprising a nucleic acid sequence encoding the recombinant circRNA molecule, or a vector comprising the recombinant circRNA molecule under conditions whereby the protein-coding nucleic acid sequence is translated and the protein is produced in the cell.

[0157] In some embodiments, a method of producing a protein in a cell comprises contacting a cell with a DNA sequence described herein, or a vector comprising the DNA sequence, under conditions whereby the protein-coding nucleic acid sequence is translated and the protein is produced in the cell. Also provided is a protein produced by the disclosed methods.

[0158] In some embodiments, production of the protein is tissue-specific. For example, the protein may be selectively produced in one or more of the following tissues: muscle, liver, kidney, brain, lung, skin, pancreas, blood, or heart.

[0159] In some embodiments, the protein is expressed recursively in the cell.

[0160] In some embodiments, the half-life of the circular RNA in the cell is about 1 to about 7 days. For example, the half-life of the circular RNA may be about 1, about 2, about 3, about 4, about 5, about 6, about 7, or more days.

[0161] In some embodiments, the protein is produced in the cell for at least about 10%, at least about 20%, or at least about 30% longer than if the protein-coding nucleic acid sequence is provided to the cell using a viral vector encoding a linear RNA or as a linear RNA. In some embodiments, the protein is produced in the cell at a level that is at least about 10%, at least about 20%, or at least about 30% higher than if the protein-coding nucleic acid sequence is provided to the cell using a viral vector or as a linear RNA.

[0162] Use of the IRES sequences described herein to express a protein from a circular RNA may, in some embodiments, allow for continued expression of a protein from the circular RNA in a cell even under stress conditions. In response to one or more stress conditions, production of proteins from linear RNA is often suppressed. Accordingly, in some embodiments, circRNA can be used as an alternative for production of proteins from linear RNAs during stress conditions. In some embodiments, a protein expressed from a circular RNA in a cell is expressed under one or more stress conditions. In some embodiments, expression of a protein from a circular RNA in a cell is not substantially disrupted when the cell is exposed to one or more stress conditions. For example, exposure of the cell to one or more stress conditions may change expression of a protein from a circular RNA by less than 15%, less than 10%, less than 5%, less than 3%, less than 1%, or less than 0.5%. In some embodiments, a protein expressed from a circular RNA is expressed at a level under one or more stress conditions that is substantially the same as the level expressed in the same cell in the absence of the one or more stress conditions. In some embodiments, the level of expression of a protein from a circular RNA in a cell is at least about 70%, at least about 75%, at least about 80%, at least about 85%, at least about 90%, at least about 95%, or at least about 99%, relative to the level of expression in the absence of the one or more stress conditions. A non-limiting list of conditions which may cause cellular stress include changes in temperature (including exposure to extreme temperatures and/or heat shock), exposure to toxins (including viral or bacterial toxins, heavy metals, etc.), exposure to electromagnetic radiation, mechanical damage, viral infection, etc.

[0163] In some embodiments, the circRNAs described herein (including components thereof, such as the IRES sequences) facilitate cap-independent translation activity from the circRNA. Canonical translation via a cap-independent mechanism may be reduced in some human diseases. Accordingly, the use of circRNAs to express proteins may be particularly helpful for treating such diseases. In some embodiments, use of the circRNAs described herein facilitates cap-independent translation activity from the circRNA under conditions wherein cap-dependent translation is reduced or turned-off in a cell.

[0164] As discussed above, translation of the protein-coding nucleic acid sequence may occur in an infinite loop (i.e., recursively) when the IRES is in-frame with the protein-coding nucleic acid sequence and the protein-coding sequence lacks a stop codon. Thus, in some embodiments, the method of producing a protein in a cell produces a concatenated protein. Any prokaryotic or eukaryotic host cell described herein may be contacted with the recombinant circRNA molecule or a vector comprising the circRNA molecule. The host cell may be a mammalian cell, such as a human cell. In some embodiments, the cell is in vivo. In some embodiments, the cell is in vitro. In some embodiments, the cell is ex vivo. In some embodiments, the cell is in a mammal, such as a human.

[0165] In some embodiments, regardless of cell type chosen, 5′ cap-dependent translation is impaired in the cell (e.g., decreased, reduced, inhibited, or completely obliterated). In some embodiments, there is no substantial 5′ cap-dependent translation in the cell.

[0166] The circRNAs described herein may also be produced in vitro, such as by in vitro transcription or other cell-free transcription system. Typical in vitro transcription protocols comprise providing (i) a purified DNA template, wherein the DNA template encodes a circular RNA, (ii) ribonucleotide triphosphates, (iii) a buffer system that includes DTT and magnesium ions, and (iv) an appropriate phage RNA polymerase. The DNA template may comprise, for example, a plasmid construct engineered by cloning, a cDNA template generated by first- and second-strand synthesis from an RNA precursor (e.g., aRNA amplification), or a linear template generated by PCR or by annealing chemically synthesized oligonucleotides. These components are then combined, and incubated under conditions which allows the RNA polymerase to transcribe the DNA to RNA, typically a linear RNA. Commercial kits are available for performing in vitro transcription, such as the Invitrogen MAXIscript® or MEGAscript® kits. In some embodiments, a polyA tail may be added to an RNA produced using in vitro transcription. Linear RNAs produced in vitro may be circularized using one or more of the following exemplary methods. For example, linear RNAs produced in vitro may be circularized according to chemical methods, using a condensing agent such as cyanogen bromide. In some embodiments, linear RNAs produced in vitro may be circularized using an enzymatic method. For example, the linear RNAs may be circularized using RNA or DNA ligases (e.g., T4 RNA ligase I or II). Alternatively, the linear RNAs may be circularized using ribozymatic methods, such as methods which employ self-splicing introns.

[0167] In some embodiments, a protein is produced from a circular RNA in a cell free system. The cell-free system may comprise, for example, all factors required for transcribing circular RNA from DNA, circularizing the RNA, and translating the protein from therefrom. In some embodiments, the circular RNA is more stable than a linear RNA in a cell-free system, which allows for increased expression of a protein from the circular RNA.

[0168] In some embodiments, a method for producing a protein comprises contacting a circular RNA with a cell-free extract comprising protein translation initiation factors (e.g., eIF1, eIF2, eIF3, eIF5, eIF6), under conditions wherein the protein is expressed. In some embodiments, a method for producing a protein comprises: (i) providing a linear RNA encoding a protein of interest, (ii) circularizing the RNA, (iii) contacting the circular RNA with a cell-free extract comprising protein translation initiation factors, under conditions wherein the protein is expressed.

[0169] In some embodiments, a method for producing a protein comprises contacting a linear RNA with a cell-free extract comprising protein translation initiation factors, under conditions wherein the RNA is circularized and the protein is expressed. In some embodiments, the linear RNA may comprise self-splicing introns.

[0170] In some embodiments, a method for producing a protein comprises contacting a DNA with a cell-free extract comprising protein translation initiation factors, under conditions wherein a linear RNA is expressed, the linear RNA is circularized, and the protein is expressed. In some embodiments, the DNA may encode may comprise self-splicing introns.

[0171] The recombinant circular RNA molecule, a DNA molecule encoding same, or vectors comprising same, may be introduced into a cell by any method, including, for example, by transfection, transformation, or transduction. The terms “transfection,” “transformation,” and “transduction” are used interchangeably herein and refer to the introduction of one or more exogenous polynucleotides into a host cell by using physical or chemical methods. Many transfection techniques are known in the art and include, for example, calcium phosphate DNA co-precipitation (see, e.g., Murray E. J. (ed.), Methods in Molecular Biology, Vol. 7, Gene Transfer and Expression Protocols, Humana Press (1991)); DEAE-dextran; electroporation; cationic liposome-mediated transfection; tungsten particle-facilitated microparticle bombardment (Johnston, Nature, 346: 776-777 (1990)); strontium phosphate DNA co-precipitation (Brash et al., Mol. Cell. Biol., 7: 2031-2034 (1987); and magnetic nanoparticle-based gene delivery (Dobson, J., Gene Ther, 13 (4): 283-7 (2006)).

[0172] Naked RNA, DNA molecules encoding circular RNA molecules, or vectors comprising the circular RNAs or DNAs encoding circular RNAs may be administered to cells in the form of a composition. In some embodiments, the composition comprises a pharmaceutically acceptable carrier. The choice of carrier will be determined in part by the particular circular RNA molecule, DNA sequence, or vector and type of cell (or cells) into which the circular RNA molecule, DNA sequence, or vector is introduced. Accordingly, a variety of formulations of the composition are possible. For example, the composition may contain preservatives, such as, for example, methylparaben, propylparaben, sodium benzoate, and benzalkonium chloride. A mixture of two or more preservatives optionally may be used. In addition, buffering agents may be used in the composition. Suitable buffering agents include, for example, citric acid, sodium citrate, phosphoric acid, potassium phosphate, and various other acids and salts. A mixture of two or more buffering agents optionally may be used. Methods for preparing compositions for pharmaceutical use are known to those skilled in the art and are described in more detail in, for example, Remington: The Science and Practice of Pharmacy, Lippincott Williams & Wilkins; 21st ed. (May 1, 2005).

[0173] In some embodiments, the composition containing the recombinant circular RNA molecule, DNA sequence, or vector, can be formulated as an inclusion complex, such as cyclodextrin inclusion complex, or as a liposome. Liposomes can be used to target host cells or to increase the half-life of the circular RNA molecule. Methods for preparing liposome delivery systems are described in, for example, Szoka et al., Ann. Rev. Biophys. Bioeng., 9: 467 (1980), and U.S. Pat. Nos. 4,235,871; 4,501,728; 4,837,028; and 5,019,369. The recombinant circRNA molecule may also be formulated as a nanoparticle.

[0174] A host cell can be contacted in vivo or in vitro with a recombinant circRNA molecule, a DNA sequence, or a vector, or compositions containing any of the foregoing. The term “in vivo” refers to a method that is conducted within living organisms in their normal, intact state, while an “in vitro” method is conducted using components of an organism that have been isolated from its usual biological context. When the method is conducted in vivo, in some embodiments the production of the protein is tissue-specific. By “tissue-specific” is meant that the protein is produced in only a subset of tissue types within an organism, or is produced at higher levels in a subset of tissue types relative to the baseline expression across all tissue types. The protein may be produced in any tissue type, such as, for example, tissues of muscle, liver, kidney, brain, lung, skin, pancreas, blood, or heart.

[0175] In some embodiments, circRNAs expressing a protein of interest are delivered to cells (e.g., in vitro or in vivo) using a charge-altering releasable transporter (CART) (See e.g., McKinlay et al., herein incorporated by reference in its entirety). CARTs address delivery challenges posed by the mRNA cargo. These dynamic materials function initially as polycations that noncovalently complex, protect, and deliver polyanionic mRNA and then subsequently lose their cationic charge through a controlled self-immolative degradation to a neutral small molecule. It is contemplated that this charge alteration reduces or eliminates the chelative electrostatic anion-binding ability of the originally cationic material, thereby facilitating endosomal escape and enabling free mRNA release into the cytosol for translation. The present disclosure is not limited to a particular CART. In some exemplary embodiments, the CART is 1:1 mixture of oleyl (0) and nonenyl-substituted (N) carbonate monomers followed by a block of α-amino ester monomers (A) (O₆-stat-N₆:A₉). In some embodiments, the CART comprises a block length of 6 nonenyl and 6 oleyl carbonate units and 9 cationic amino-ester units.

[0176] In some embodiments, circRNAs expressing a protein of interest are delivered to cells (e.g., in vitro or in vivo) using any of a selection of cell-penetrating complexes such as those described in International Publication WO2022/020810, the contents of which are incorporated herein by reference in their entirety. Such cell-penetrating complexes may contain any of the cationic amphipathic polymers as described in WO2022/020810 and may also contain any of the lipophilic polymers or polymer domains as described in WO2022/020810. Variations of such cell-penetrating complexes useful in the present disclosure are taught in, for example, the detailed disclosure, examples and claims of WO2022/020810 and may alternatively be referred to as charge-altering releasable transporters (CARTs).

[0177] In some embodiments, circRNAs expressing a protein of interest are delivered to cells (e.g., in vitro or in vivo) using any of a selection of immolative cell-penetrating complexes such as those described in International Publication WO2018/022930, the contents of which are incorporated herein by reference in their entirety. Such immolative cell-penetrating complexes include those defined starting materials or complexes or variations thereof taught in WO2018/022930 and specifically any of the enumerated Embodiments 1-93 or the cell-penetrating complexes claimed therein. Such cell-penetrating complexes may comprise a nucleic acid non-covalently bound to a cationic amphipathic polymer, said cationic amphipathic polymer comprising a pH sensitive immolation domain as described in WO2018/022930.

[0178] In some embodiments, circRNAs expressing a protein of interest are delivered to cells (e.g., in vitro or in vivo) using any of a selection of hybrid immolative cell-penetrating complexes such as those described in International Publication WO2020/097614, the contents of which are incorporated herein by reference in their entirety. Such hybrid immolative cell-penetrating complexes include those described in any of the enumerated “P Embodiments” 1-114 and/or any of the enumerated Embodiments 1-93 or the hybrid immolative cell-penetrating complexes claimed therein.

[0179] In some embodiments, circRNAs expressing a protein of interest are delivered to cells (e.g., in vitro or in vivo, specifically to lung cells) using any of a selection of immolative cell-penetrating complexes such as those described in International Publication WO2020/160511, the contents of which are incorporated herein by reference in their entirety. Such immolative cell-penetrating complexes include those described in any of the enumerated Embodiments or claimed therein.

[0180] In some embodiments, circRNAs expressing a protein of interest are delivered to cells (e.g., in vitro or in vivo) using any of a selection of co-oligomeric vehicles (co-oligomers) such as those described in International Publication WO2013/036532, the contents of which are incorporated herein by reference in their entirety. Such co-oligomers include those defined as formulas I, 11, III, IV or variations thereof taught in WO2013/036532 and specifically any of those listed in Table 1 therein.

[0181] In some embodiments, circRNAs expressing a protein of interest are delivered to cells (e.g., in vitro or in vivo) using any of a selection of cell-penetrating guanidinium-rich oliophosphotriester transporter compounds such as those described in International Publication WO2017/083637, the contents of which are incorporated herein by reference in their entirety. Such transporter compounds include those defined as formulas I, II, III, IV, V, VI, VII or variations thereof taught in WO2017/083637 and specifically any of those claimed therein.

[0182] In some embodiments, circRNAs are utilized to deliver a nucleic acid encoding a therapeutic peptide to a subject. In some embodiments, such circRNAs find use in treating a disease or condition. The present disclosure is not limited to particular therapeutic proteins, diseases, or conditions. The technology described herein finds use in the treatment or prevention of any number of diseases or conditions (e.g., metabolic disorders, cancer, and the like). In some embodiments, circRNAs are administered multiple times to the same subject (e.g., to treat a disease or condition). The present disclosure is not limited to particular dosing schedules. In some embodiments, a cirRNA is administered in a single dose. In some embodiments, administration is repeated one (e.g., 2, 3, 4, 5, 6, 7, 8, 9, 10 or more) times at regular or irregular intervals (e.g., daily, weekly, bimonthly, monthly, etc).

### Methods of Inducing Immunity

[0183] In some embodiments, provided herein is a method of inducing immunity in a subject, comprising administering a composition, comprising: a complex of a charge-altering releasable transporter (CART) and a circular RNA molecule to the subject such that the composition induces immunity in the subject. In some embodiments, the circular RNA molecule comprises a protein-coding sequence (e.g., an antigen or a therapeutic protein). In some embodiments, the composition further comprises an antigen. In some embodiments, the immunity is innate immunity or an antigen-specific T cell response.

[0184] Also provided is a method of immunizing a subject, comprising administering a composition, comprising: a) a complex of a charge-altering releasable transporter (CART) and a circular RNA molecule; and b) an antigen to the subject such that the subject is immunized against the antigen.

[0185] In some embodiments, the administering treats or prevents a disease or disorder in the subject (e.g., cancer). In some embodiments, the delivering is intraperitoneally, intranasally, or intravenously. In some embodiments, the subject is a human or a non-human animal.

[0186] In some embodiments, the disclosed compositions find use in treating cancer (e.g., as a cancer vaccine). For example, in some embodiments, provided herein is a method of treating cancer in a subject, comprising administering a composition, comprising: a) a complex of a charge-altering releasable transporter (CART) and a circular RNA molecule; and b) an antigen. In some embodiments, the antigen is a tumor antigen. In some embodiments, the administering induces antigen-specific T-cell-based cellular immunity in the subject.

[0187] Non-limiting examples of tumor antigens include but are not limited to alphafetoprotein (AFP), carcinoembryonic antigen (CEA), CA-125, MUC-1, tpithelial tumor antigen (ETA), tyrosinase, melanoma-associated antigen (MAGE), and abnormal products of ras and p53.

[0188] In some embodiments, the CART is optimized to deliver the circular RNA to a particular cell type or tissue.

### Mega Tables

[0189] The patent application contains a lengthy table section. Copies of the tables are available in electronic form from the USPTO web site. An electronic copy of the tables will also be available from the USPTO upon request and payment of the fee set forth in 37 CFR 1.19(b)(3).

### EXAMPLES

[0190] The following examples further illustrate the invention but, of course, should not be construed as in any way limiting its scope.

### Example 1: Viral IRES Screen

Development of a Modular circRNA Assembly Platform

[0191] Synthesis of circRNAs via intron-assisted splicing and RNaseR digestion has been previously described (Chen 2017) but rapid creation of different circRNA species was difficult. To address this need, a modular cloning (MoClo) platform including of a set of backbones and parts in a clearly-defined but adaptable format that is compatible with both Golden Gate cloning (Engler 2008) and Gibson cloning (Gibson 2009) was developed (FIGS. 1 and 7A). Through various iterations of backbones, versions enabling circRNA transcription after transient transfection in cellulo from a CAGGS promoter, in vitro transcription via T7 promoter, and easy digestion of precursor linear RNA with RNaseR were developed. The backbone incorporates homology sequences that assist with RNA circularization as well as low-structure regions that assist in RNaseR processivity and complete digestion. The Golden Gate overhangs were carefully chosen to produce robust assembly of all seven parts without error, which was assessed over the course of testing by sequencing of hundreds of clones selected by sequencing. The circRNA MoClo system includes a bacterially-expressed GFP dropout in its backbones to negative select for incorrect assemblies, creates in-frame glycine-serine linkers for fusion proteins between parts 3-5, and leaves residual consistent restriction enzyme cut sites at key junctions for subcloning purposes. The platform is amenable to synthesis of large libraries through combinatorial assembly of parts, which themselves can constitute pools of sequences.

[0192] Finally, the downstream circRNA synthesis and purification protocols were optimized for speed, ease, and robustness. A NanoLuciferase (NanoLuc)-based assay was adapted for assessment of circRNA translation strength because of its advantages of having a broad quantitative range (FIG. 7B), amenability to a multiwell plate format, and amenability for both secreted and intracellularly retained forms of NanoLuc.

### RNA Modifications Improve Translation Strength and Stability

[0193] RNA nucleoside modifications are important to the efficacy of RNA therapeutics due to their relevance in controlling mRNA (Karikó 2005, Durbin 2016, Svitkin 2017) and circRNA immunity (Chen 2019). As a baseline, an unmodified circRNA encoding NanoLuc driven by the coxsackievirus B3 (CVB3) IRES (iCVB3) from the picornavirus family, with the translation cassette flanked by 50 bp random sequence spacers was used. In separate syntheses, eight RNA modifications were incorporated-5-methylcytidine (5 mC), 5-methyluridine (5 mU), 5-methoxycytidine (5moC), 5-methoxyuridine (5moU), 5-hydroxymethylcytidine (5hmC), 5-hydroxymethyluridine (5hmU), pseudouridine (Ψ), and N1-methylpseudouridine (N1Ψ)—that have demonstrated relevancy in improving mRNA translation (Karikó 2005); N6-methyladenosine (m6A) because of its relevance in modulating circRNA immunity (Chen 2019); and five RNA modifications—N1-ethylpseudouridine (N1ethΨ), 2′-fluoro-2′-deoxycytidine (2′FdC), 2′-fluoro-2′-deoxyuridine (2′FdU), 2-thiouridine (2ThioU), and 2′-O-Methylcytidine (2′OMeC)—whose effects on RNA translation have not been described (FIG. 8A). On first-pass, all RNA modifications were tested at a 10% incorporation level to ensure a large effect size, and upon synthesis it was found that none of these modifications greatly reduced circRNA yield. When assayed for translation of NanoLuc, most modifications at 10% incorporation blunted translation compared to unmodified circRNA. However, 2ThioU and 2′OMeC inhibited translation to a lesser extent, indicating that further titration of their incorporation levels might improve translation strength.

[0194] Following further titration of RNA modifications at 2.5% and 5% incorporation, optimized incorporation levels for eight RNA modifications in circRNAs were determined (FIG. 2A). Of these, 2′OMeC significantly improved translation while m6A and 2ThioU resulted in non-significant increases. Changes in translation were not due to differences in the amount of transfected RNA, which was equivalent among circRNA samples (FIG. 8B). Noticeably, nucleoside modifications known to improve mRNA translation such as NIT (Karikó 2005, Durbin 2016, Svitkin 2017) did not appear to have the same effect in circRNAs.

[0195] In separate preparations, the same circRNAs were synthesized with 5% m6A incorporation. Compared to unmodified circRNAs, circRNAs containing 5% m6A showed equivalent translation after transfection or electroporation in vitro (FIG. 8 A and B).

[0196] A fetal bovine serum (FBS) degradation assay which makes use of the endogenous RNases in FBS was developed (FIG. 8C). CleanCap and 100% NIP-modified mRNA, the industry standard for mRNA-based therapies, was fully degraded by 1% FBS alongside unmodified circRNA. Conversely, circRNA containing 5% m6A was more resistant to nucleases and was not fully degraded until 2% FBS. These results indicate that nucleoside modification of circRNAs can confer stability against nucleases (FIG. 8C), which may help extend translation duration. However, when circRNAs are delivered into cells, certain RNA modifications improve translation strength despite having equivalent intracellular RNA stability (FIG. 2A).

[0197] Although circRNA translation in vitro was greatest with 2.5% 2′OMeC, attempts to combine this modification with m6A to block immune recognition abrogated translation efficiency. Subsequent optimization efforts were focused on m6A-modified circRNAs, which are shielded from innate immunity in vivo (Chen 2019). To compare the expression kinetics of 5% m6A-modified circRNA with CleanCap and 100% NIT-modified mRNA, a time course using secreted NanoLuc as the reporter was performed (FIG. 8D). mRNA and circRNA were electrocuted into cells and media harvested at time points out to 24 days, at which the NanoLuc signal was indistinguishable from background. While mRNA yielded a stronger maximum translation signal, translation rapidly dropped after 48 hours. On the other hand, circRNA translation peaked at 48 hours but continued yielding detectable expression out to almost 20 days. Moving forward, 5% m6A was incorporated in every circRNA preparation unless otherwise explicitly stated.

Vector Topology and Spacer Requirements for circRNA Translation

[0198] Principles behind circRNA vector topology that are necessary for strong translation were investigated. First, circRNAs with the IRES downstream, or 3′, of the reporter NanoLuc gene, maintaining the reading frame through the residual scar formed by the self-splicing reaction of the T4 td intron were synthesized. In this orientation, translation through the splicing scar is unavoidable. Hypothesizing that the highly structured scar sequence may obfuscate the translation start site, circRNA variants with in-frame spacers of varying lengths between the translation start and the splicing scar were synthesized. The peptides encoded by these spacers reflected consensus viral leader peptide sequences from the rhinovirus family. Testing the expression of these circRNAs indicated that increasing the spacer length was non-beneficial for translation, and that the ribosome was unaffected by the td splicing scar's secondary structure (FIG. 2B).

[0199] The topology of the circRNA vector was reversed, placing the IRES immediately upstream of the NanoLuc gene. Flanking this translation cassette, adding spacers derived from random 50% GC content sequences of varying lengths in the 5′ and 3′ untranslated regions (UTRs) of the circRNA were tested. When assayed for NanoLuc expression, it was found that circRNAs with spacers 50 bp in length yielded the strongest translation (FIGS. 2B and 9A,B). It was also tested whether the number of stop codons following the coding sequence affected circRNA expression and found that adding more than two stop codons (the number used in the MoClo platform) reduced translation strength (FIG. 8E) without affecting the size of the encoded protein (FIG. 8F and FIG. 11). The results indicate that IRES-mediated translation of circRNAs can occur readily through an intron splicing scar, though with reduced efficiency compared to the IRES being directly upstream of a gene. Furthermore, translation of circRNAs can be improved by the addition of 50 bp spacers separating the IRES and gene of interest from the splicing scar.

5′ and 3′ UTRs can Improve circRNA Translation

[0200] 5′ and 3′ UTRs in mRNAs can recruit RNA-binding proteins (RBPs) that enable strong translation as well as aspects of post-transcriptional regulation (Jackson 2010). One such family of RBPs are poly(A)-binding proteins (PABPs), which interact with polyadenosine tracts of 12 bp or longer in the 3′ UTR and subsequently trigger binding of eIFs (Mangus 2003). Other well-characterized RBPs include poly(C)-binding proteins (PCBPs), which recruit ribosomal proteins and trans-activating factors to picornavirus RNAs (Blyn 1997, Gamarnik 1997, Graff 1998, Walter 1999, Luo 2014), as well as YTIDF family members, which bind m6A and have been shown to regulate mRNA translation and stability (Wang 2014, Shi 2017). Previously, strong circRNA translation was reported using 5′ and 3′ UTR sequences consisting of −50 bp sequences that are mostly adenosine (e.g., with 84% adenine) in 1-10 bp stretches and cytidine interspersed—termed polyAC spacers (Wesselhoeft 2018). It was investigated if specific sequences could be installed to improve translation. 50 bp spacers encoding RNA-binding motifs for the three aforementioned RBP families were synthesized as 5′ UTRs, designing several versions per motif to account for any sequence-specific variability. Additionally, two highly structured sequences with well defined effects: xrRNA ((AGCGUAACCUCCAUCCGAGUUGCAAGAGAGGGAAACGCAGUCUC)), an RNA hairpin found in dianthoviruses that blocks degradation by the 5′-3′ exonuclease Xm120, and Apt-eIF4G, an eIF4G-recruiting aptamer that has been shown to increase mRNA translation when added to the 5′ UTRs of transcripts, were tested. Apt-eIF4G (ACUCACUAUUUGUUUUCGCGCCCAGUUGCAAAAAGUGUCG), is an eIF4G-recruiting aptamer that has been shown to increase mRNA translation when added to the 5′ UTRs of transcripts (Tusup 2018). Upon incorporating these sequences into the 5′ UTR of circRNAs and assaying for NanoLuc expression, it was found that PABP motifs and the eIF4G aptamer improved translation the most (FIG. 2C).

[0201] The 3′ spacer downstream of the stop codons was optimized, drawing upon a wide array of 3′ UTRs. These included the human α-globin 1 (HBA1) 3′ UTR in its shortened (Truong 2019) and full-length forms (Richner 2017); the region of human α-globin 2 (HBA2) protected from RNase digestion by the α-complex, an RNA-protein complex implicated in mRNA stabilization (Holcik 1997); minimal regions for α-complex binding to HBA2, rabbit 15-lipoxygenase, human a(I)-collagen, and rat tyrosine hydroxylase tiled in triplicate (Holcik 1997); the human β-globin 3′ UTR truncated after the AAUAAA polyadenylation signal (Jiang 2006; herein incorporate by reference in its entirety); the amino-terminal enhancer of split (AES) 3′ UTR alone and in combination with mitochondrially encoded 12S rRNA (mtRNR1) (Orlandini von Niessen 2019); the 3′ UTR of mouse Rps27a which was highly expressed in Hep3B and 293T cells (Zeng 2020); and the HuR-binding region from Sindbis virus that protects its transcript from RNase digestion (Sokoloski 2010). When incorporated into circRNAs and assayed by NanoLuc expression, the majority of these 3′ UTRs that drive strong translation in an mRNA context failed to do so for circRNAs. However, replacing the 3′ spacer with either the short or full-length form of the HBAT 3′ UTR significantly improved translation strength (FIG. 2D).

### A Full-Length Viral IRES is Critical for Strong Translation

[0202] Viral IRESs are diverse and highly-structured RNA regions found primarily in viral 5′ UTRs that promote cap-independent translation (Kieft 2008, Filbin 2009, Martinez-Salas 2018). Because iCVB3, the baseline IRES used in this study, is nearly 750 bp, it was determined if it was possible to truncate an IRES while retaining circRNA translation. A previous structure map of iCVB3 divided the sequence into seven domains (Bailey 2007), beginning with domain I containing a cloverleaf structure thought to be critical for viral replication (Murray 2004). Domains II-V have also been reported to interact with multiple TRES trans-activating factors (ITAFs) (de Breyne 2009, Souii 2013, Sweeney 2013), while domain VI hosts an AUG upstream of the true translation initiation site that recruits the 43 S ribosomal preinitiation complex (Nicholson 1991, Yang 2003, Sweeny 2013).

[0203] IRES domain truncations were performed starting from the 5′ end of iCVB3, choosing truncations at boundaries where there was little known secondary structure base pairing. Compared to the full-length IRES, deletion of domain I significantly cut circRNA translation by 25%, and further deletions completely eliminated translational activity (FIG. 3A). Deletions of other individual iCVB3 domains similarly reduced circRNA translation; removal of domain VII decreased luminescence by 29%, and loss of domain II, III, IV, or VI completely ablated protein production (FIG. 3B). Successive truncations of iCVB3 from the 3′ end were then performed. This region between domain VII and the start codon is highly variable in both sequence and length among different picornavirus IRESs, so it was contemplated that it would be amenable to shortening. 3′ deletion of as few as ten terminal nucleotides from this region nearly ablated circRNA translation (FIG. 3B). Together, these data show that a full-length IRES is necessary for strong circRNA translation.

### IRES-Coding Sequence Junction Secondary Structure Dictates Translation Strength

[0204] Coding sequence-specific factors that influence translation initiation in circRNAs were investigated. To assess this, circRNAs with nine different 24 bp N-terminal leader sequences in frame between the AUG start codon and the NanoLuc reporter were synthesized (FIG. 3D). Various features of these leader sequences—secondary structure, GC content, and translated hydrophilicity—were compared against the resulting NanoLuc reporter strength. Indicators of secondary structure stability, such as predicted minimum free energy and free energy change for the most stable hairpin, were most correlated with NanoLuc translation (Gruber 2008), with 34.2% and 28.3% of variation in translation strength explained by those factors, respectively. On the other hand, the GC content of the N-terminal leader and hydrophilicity of its encoded peptide were not predictive of translation efficiency. These findings indicate that in silico optimization of base-pairing interactions between an IRES and coding sequence can yield additional benefits for circRNA translation.

Disruption of eIF4G Binding to iCVB3 Abrogates Translation

[0205] eIF4G and eIF4A binding to domain V of iCVB3 is thought to be a key step in initiating translation from this IRES (de Breyne 2009). While it is unknown how these same eIFs contribute in the context of circRNAs, it was contemplated that interfering with their binding to iCVB3 might adversely affect translation. To disrupt eIF binding sites, locked nucleic acids (LNAs), modified nucleic acids with especially high antisense binding affinity (Wahlestedt 2000, Huston 2021) against a non-base-paired linker region between iCVB3 domains I and II (LNA #1), the footprint of eIF4A (LNA #2), the footprint of eIF4G (LNA #3), and a random sequence (NC LNA) were used.

[0206] The effect of LNAs was tested across a range of concentrations, using NanoLuc as a readout for circRNA translation (FIG. 4A). NC LNA had minimal impact on the strength of iCVB3. In contrast, LNA #3 dose-dependently disrupted NanoLuc activity, implicating eIF4G sites in iCVB3 domain V as necessary for translating circRNAs. It was also found that locking the secondary structure of the domain I-II junction with LNA #1 improved translation in a dose-dependent manner. Because RNA flexibility is a hallmark of picornavirus IRESs (Martinez-Salas 2018), it is contemplated hat this increase in translation strength may be due to fewer unfavorable base-pairing interactions between this region and the circRNA backbone. The improvement was dose-dependent rather than reduction in translation with LNA #2, supporting that direct binding of eIF4A to iCVB3 domain V is not needed for circRNA translation. However, it is still possible that eIF4A in this context may directly interact with eIF4G.

[0207] Four variants of iCVB3 with sub-domain deletions of where eIF4G interacts with the upper stem of domain V were synthesized (FIG. 9). These variants differed in the position where the stem loop was truncated, but at a minimum all ablated the eIF4G footprint. As expected, deletion of this key portion of iCVB3 domain V completely abrogated translational activity.

Synthetic IRES Engineering with an eIF4G-Binding Aptamer

[0208] From the LNA experiments, it was concluded that eIF4G plays a pivotal role in initiating translation from IRESs in circRNAs. It was thus hypothesized that engineering iCVB3 to have greater affinity for eIF4G might result in stronger circRNA translation. Apt-eIF4G, an eIF4G-recruiting aptamer, can improve cap-dependent translation when inserted in the 5′ UTR of mRNAs (Tusup 2018). Synthetic variants of the iCVB3 where Apt-eIF4G was inserted at hypothetically permissible regions within the IRES (FIG. 4B) were generated. These positions were either within the flexible non-base-paired interdomain regions (synIRES01, 03, 05, 09, and 11), which were chosen to avoid aberrant Apt-eIF4G-linker interactions, or at the end of loop domains (synIRES02, 04, 06, 07, 08, and 10), with removal of several wild-type nucleotides to smoothly transition from the stem-loop structure into Apt-eIF4G's RNA stem. In all cases, rational engineering choices were informed by in silico RNA structure prediction (FIG. 12). Using the NanoLuc assay, it was found that domain IV's cruciform structure was the most permissive to Apt-eIF4G insertion. Both synIRES06 and synIRES08, where Apt-eIF4G was inserted in the distal and proximal loops of domain IV, respectively, showed significantly improved translation over wild-type iCVB3. Conversely, insertion at the apical loop of domain IV completely abrogated translation, consistent with reports of an essential internal C-rich loop and GNRA tetraloops at this site (Garmarnik 2000, Bhattacharyya 2006).

[0209] Using flow cytometry, the result was validated with a different reporter, mNeonGreen, a bright monomeric green fluorescent protein (Shaner 2013). Compared to CleanCap and 100% N1Ψ-modified mRNA or unmodified circRNA with random 5′ and 3′ UTRs, 5% m6A-modified circRNA with the 5′ PABP spacer and HBA1 3′ UTR exhibited greater mNeonGreen expression (FIG. 4C). This was further improved by aptamer engineering of iCVB3 to include Apt-eIF4G. For gating strategy, see FIG. 4D.

[0210] The rescue of iCVB3 domain V eIF4G footprint deletions through addition of Apt-eIF4G to the proximal loop of domain IV were assayed (FIG. 9). However, no recovery of translation was achieved by this strategy for any of the four variants. Prior toe-printing analysis deduced conformational changes in domain VI and the 3′ end of iCVB3 following the recruitment of eIF4G and eIF4A (de Breyne 2009). The results indicate that these RNA conformational changes are indeed crucial for proper ribosome assembly and that simply recruiting eIF4G locally is insufficient for translation initiation.

### Identification of Robust Higher-Strength IRESs

[0211] IRESs have evolved a variety of mechanisms to utilize host factors for initiating translation. Based on these mechanisms, IRESs have been categorized into several types—type 1 IRESs can be found in enteroviruses, type 2 in cardioviruses and aphthoviruses, type 3 in some picornaviruses, and type 4 in teschoviruses (Daijogo 2011). To further optimize circRNA expression, IRESs with stronger translation than those previously described in the literature (Mokrejs 2006, Wesselhoeft 2018) were identified. Over several rounds of synthesis and testing, a number of IRESs spanning different types and species in circRNAs were characterized. IRESs representing canonical IRES types (type in parenthesis), such as from CVB3 (1), poliovirus 1 (PV1) (1), human rhinovirus A1 (HRV-A1) (1), encephalomyocarditis virus (EMCV) (2), hepatitis C virus (HCV) (3), and cricket paralysis virus (CrPV) (4) were assayed. Type 1 IRESs appeared to drive strong translation in the context of circRNAs (FIG. 5A), (Filbin 2009). The screen was expanded to include a large set of putative type 1 IRESs from the enterovirus genus, which were incorporated into circRNAs and assayed for NanoLuc translation.

[0212] In the screen, many IRESs with stronger translation than iCVB3 across multiple cell lines were identified (FIG. 5A). In particular, IRESs from the human rhinovirus B (HRV-B) and enterovirus B (EV-B) species drove strong circRNA translation. To validate this result with a different transgene, a fluorescent reporter assay was used to assess Cre-mediated recombination after transfection of circRNAs encoding Cre recombinase (FIG. 13). At 24 hours post-transfection, greater recombination was observed with iHRV-B3 compared to iCVB3, supporting iHRV-B3 as a stronger IRES for circRNA translation.

[0213] With this knowledge, IRESs from every HRV-B and EV-B subspecies with a publicly available sequence on NCBI Virus were synthesized and incorporated into circRNA expression plasmids. Given the scale of this screen, an in vitro coupled transcription-translation (IVTT) approach, using circRNA expression plasmids rather than purified circRNAs as the input material was used (FIG. 10A). In the IVTT-based NanoLuc assay, a large number of HRV-B and EV-B IRESs with greater translational activity than iCVB3 were found. These IRESs were validated in cellulo using purified circRNAs (FIG. 10B). While many hits turned out to be false positives, the discovery of iHRV-B92 and iHRV-B97 as higher-strength IRESs were recapitulated. When these same IRESs were also tested in a linear RNA format, relative differences in translation strength held, but with a 100-fold reduction in absolute expression compared to circRNAs (FIG. 10B). For the strongest IRESs, NanoLuc translation was tested in four different cell lines and found that the many drove efficient translation independent of cell type (FIG. 10C). At the same time, some IRESs demonstrated stronger translation in a specific cell type, such as HEK293T cells for iHCV and iHRV-C54 and KG-1 cells for iHRV-A100 and iHRV-B4.

[0214] The earlier circRNA optimizations (FIGS. 2 and 4) were compared to the improvement conferred by changing the IRES (FIG. 5B). The CVB3 IRES downstream of NanoLuc was used as a starting point and successively incorporated m6A, reversed the vector topology, added random 5′ and 3′ UTR spacers, modified the 5′ spacer to include a PABP motif, replaced the 3′ UTR spacer with the HBA1 3′ UTR, and switched the IRES to iHRV-B3. It was found that these changes progressively increased circRNA expression, with the final design exhibiting significantly more translation than CleanCap and 100% NIT-modified mRNA. To validate this with a separate transgene, a two-color fluorescent reporter assay was used to assess Cre-mediated recombination after transfection of circRNA encoding Cre recombinase (FIG. 13). Specifically, a transgenic HEK293T reporter cell line in which DsRed, a red fluorescent protein, is expressed before Cre recombination, and enhanced green fluorescent protein (eGFP) is expressed after was used. Twenty-four hours after transfection of circRNA encoding iCVB3-driven Cre recombinase, recombination was observed in 34.3% of cells (FIG. 5C). This was significantly improved to 44.6% with the stronger HRV-B3 IRES.

### Synthetic IRES Engineering Through Unbiased DNA Shuffling

[0215] DNA shuffling is an unbiased approach commonly used to generate large diverse libraries for selecting novel engineered proteins (Michnick 1999). Shuffling particularly makes sense over other library generating strategies, such as point mutagenesis, when a homologous family of related proteins is available to act as seed templates for the shuffling reaction. Because the strongest translation overall was observed with IRESs from HRV, DNA shuffling by fragmenting 41 HRV IRESs and cloning the resulting pool into circRNA plasmids (FIG. 5D). 93 circRNA expression plasmids with unique shuffled IRESs were used to measure their translation strength using an IVTT assay, with iHRV-B3 as an internal benchmarking control. From these 93 shuffled IRESs, nine were identified with significantly stronger translational activity than wild-type iHRV-B3, illustrating the ability of IRES shuffling to engineer improved IRESs for circRNA applications.

Validation of Apt-eIF4G IRES Engineering with iHRV-B3

[0216] It was hypothesized that the aptamer engineering approach with Apt-eIF4G might also improve translation for IRESs of indeterminate structure. To test this, the domain architecture of a strong IRES, iHRV-B3 was predicted in silico (Gruber 2008), which identified six domains including a cruciform structure in domain IV (FIG. 5E). Loops within this cruciform structure were used to perform Apt-eIF4G insertions at the distal, apical, and proximal loop locations, varying the length of the resulting stem by rationally inserting base-paired RNA nucleotides and validating the structure in silico. It was contemplated that by assessing a range of stem lengths, one might uncover a particular position for Apt-eIF4G most favorable to cooperative binding effects. It was found that Apt-eIF4G insertions at the proximal loop of domain IV significantly improved circRNA translation compared to wild-type iHRV-B3, demonstrating the broader utility of the aptamer engineering strategy to synthesize stronger IRESs. As with iCVB3, apical loop insertions of Apt-eIF4G also destroyed iHRV-B3 activity, consistent with a predicted GNRA tetraloop in this region. While a double aptamer insertion of Apt-eIF4G at both the distal and proximal loops was performed, this greatly reduced circRNA translation.

Quantification of Combined circRNA Optimizations

[0217] Each of the earlier circRNA optimizations was compared in a single experiment (FIG. 5d). Initially, iCVB3 downstream was of NanoLuc and successive incorporation of m6A, reversal of the vector topology, random 5′ and 3′ UTR spacers, modified 5′ spacer to include a PABP motif, replacement of the 3′ UTR spacer with the HBA1 3′ UTR, Switching of the IRES to iHRV-B3, and insertion of a proximal loop aptamer into iHRV-B3 were performed. It was found that these changes progressively increased circRNA expression without compromising RNA yield or circularization efficiency (FIG. 14A,B) with the final design exhibiting a 224-fold improvement relative to unoptimized circRNA and significantly more translation than CleanCap and 100% N1Ψ-modified mRNA.

[0218] To validate these findings with a larger transgene, circRNAs expressing AkaLuc-P2A-CyOFP, a coding sequence more than four times longer than NanoLuc, were prepared (FIG. 5e). When assayed for Aka luciferase (AkaLuc) activity, the combined additions of a 5′ PABP spacer, HBA1 3′ UTR, HRV-B3 IRES, and proximal loop Apt-eIF4G insertion again improved circRNA translation, supporting the generalizability of these optimizations.

In Vivo Expression of Optimized circRNAs

[0219] The above circRNA optimizations—5% m6A incorporation, upstream IRES topology, 5′ PABP spacer, HBA1 3′ UTR, and HRV-B3 IRES with proximal loop Apt-eIF4G insertion were combined to test the expression of optimized circRNA in vivo. To deliver RNAs, they were formulated them with charge-altering releasable transporters (CARTs), temporarily cationic molecules capable of mediating mRNA expression in mice (McKinlay 2017). A circRNA encoding an intracellularly expressed NanoLuc was administered it in mice via intraperitoneal injections (FIGS. 6A and 6B). Compared to untreated animals, those receiving circRNA showed greater luminescent activity for at least one week (FIG. 6C), indicating that engineered circRNAs can be expressed in vivo. When redosed two weeks after the first injection, NanoLuc expression was also indistinguishable from initial levels (FIG. 6C), supporting that repeat administration of circRNAs may be feasible.

[0220] A head-to-head comparison of optimized circRNA versus CleanCap and 100% N1Ψ-modified mRNA in vivo using RNAs encoding human erythropoietin (hEPO), a secreted protein used to treat anemia was performed. Following intravenous administration in mice, plasma hEPO levels from circRNA were initially less than those from mRNA (FIGS. 6D and 6E). However, while mRNA expression of hEPO declined rapidly within 48 hours, circRNA expression remained consistent until at least 96 hours post-injection (FIGS. 6E and 6F). Functionally, hEPO can elevate reticulocyte production in mice, although much higher concentrations are required than for mouse EPO52. Reticulocyte counts were significantly increased in mice that received a single dose of hEPO-encoding circRNA after one week, while reticulocyte levels after an equimolar dose of mRNA were no different than those from untreated animals (FIG. 6G). Together, the data show that engineered circRNAs can express in vivo at strengths comparable to modified mRNAs, and with greater duration. For gating strategy, see FIG. 6H.

### Methods

### Molecular Cloning

[0221] Part plasmids (see FIG. 7) were synthesized by cloning PCR products or premade DNA fragments (Integrated DNA Technologies) into a custom entry vector (pRC0569) via a Golden Gate reaction. Overhangs were included as indicated by FIG. 7. Parts and pRC0569 were combined stoichiometrically 2:1 to a total volume of 2 μL, after which 0.5 μL NEB Golden Gate Enzyme Mix (BsmBI-v2), 0.5 μL of T4 ligase buffer, and ddH2O to 5 μL were added. The reaction was incubated at 42° C. for 2 minutes followed by 16° C. for 2 minutes for 30 cycles, followed by 60° C. for 5 minutes before cooling to 4° C. Turbo Competent (NEB) cells were transformed using 2 μL of the reaction and plated onto carbenicillin plates. Non-green colonies were picked, miniprepped, and sequenced.

[0222] CircRNA plasmids were assembled by cloning parts 1-6 into a custom backbone (pRC0940) via a second Golden Gate reaction. Part plasmids and pRC0940 were combined stoichiometrically 2:1 to a total volume of 4 4 L, after which 0.5 μL NEB Golden Gate Enzyme Mix (BsaJ) and 0.5 μL of T4 ligase buffer were added. The reaction was incubated at 37° C. for 2 minutes followed by 16° C. for 2 minutes for 30 cycles, followed by 60° C. for 5 minutes before cooling to 4° C. Turbo Competent (NEB) cells were transformed using 2 μL of the reaction and plated onto carbenicillin plates. Non-green colonies were picked, miniprepped, and sequenced.

circRNA Synthesis

[0223] CircRNAs were synthesized using in vitro transcription (IVT) kits (HiScribe T7 High Yield RNA Synthesis Kit). IVT templates were PCR amplified (Q5 Hot Start High-Fidelity 2× Master Mix) for 30 cycles and column purified prior to RNA synthesis (DNA Clean & Concentrator-100). The following forward and reverse oligos were used

circBB-T7promoter F:
AAAAAAAAAAAAAAAAAAAAAAAAAAAggccagtgaat
tgtaatacgactcactataggg
circBB-intron-poly(A) R:
TTTTTTTTTTTTTTTTTTTTTTTTTTTTTTTTTTTTTT
TTTTTTTtagaaggcacagttaacgcggccgc

One microgram of circRNA template was used per 20 μL IVT reaction. Reactions were incubated overnight at 37° C. with shaking at 1,000 rpm with a heated lid. IVT templates were subsequently degraded with 2 μL of DnaseI per IVT reaction for 20 minutes at 37° C. with shaking at 1,000 rpm. The remaining RNA was column purified prior to further enzymatic reactions.

[0224] To isolate circRNAs, column purified RNA was digested with one unit of RnaseR per microgram of RNA for 60 minutes at 37° C. with shaking at 1,000 rpm. Samples were then column purified, quantified using a Nanodrop One spectrophotometer, and verified for complete digestion using an Agilent TapeStation. In some instances due to reagent shortages, verification was performed with agarose gel under formamide-based denaturing conditions (NEB B0363S). In cases of incomplete digestion of linear RNAs, RnaseR digestion was repeated.

mRNA Synthesis

[0225] IVT templates for mRNA synthesis were PCR amplified (Q5 Hot Start High-Fidelity 2× Master Mix) for 30 cycles and column purified prior to RNA synthesis (DNA Clean & Concentrator-100). The reverse primer in this reaction incorporated a 100 bp poly(A) tail after the 3′ UTR. mRNA was then synthesized using IVT kits (HiScribe T7 High Yield RNA Synthesis Kit) with the following modifications: CleanCap AG (TriLink N-7113) was added to a 4 mM final concentration, and N1Ψ (TriLink N-1019) was fully substituted for UTP. One microgram of mRNA template was used per 20 μL IVT reaction, Reactions were incubated for 2 hours at 37° C. with shaking at 1,000 rpm with a heated lid. IVT templates were subsequently degraded with 2 μL of DnaseI per IVT reaction for 20 minutes at 37° C. with shaking at 1,000 rpm. The remaining mRNA was column purified prior to use.

### RNA Gel Electrophoresis

[0226] 1% agarose gels were prepared by melting RNase-free agarose in Tris-acetate-EDTA running buffer with addition of ethidium bromide. RNA was denatured in RNA loading buffer (Thermo Fisher) by diluting 1:1 volumetrically, heating to 72° C. for 3 minutes, and cooling on ice for 1 minute. RNA was loaded into each well and run at 100 V at room temperature until the bromophenol blue dye reached the edge of the gel. Images were taken using a Bio-Rad Gel Doc XR and Image Lab 5.2 software using the “SYBR-Safe” settings.

### Cell Culture and Transfection

[0227] HeLa (CCL-2), HEK293T (CRL-11268), HepG2 (HB-8065), and KG-1 (CCL-246) cells from ATCC were maintained with DMEM (Thermo Fisher) supplemented with 10% FBS (Gibco) and 1% penicillin-streptomycin (Gibco). For routine subculture, 0.25% TrypLE (Thermo Fisher) was used for cell dissociation. For the selection of transduced cells, puromycin (Thermo Fisher) was used at a final concentration of 1 μg/mL.

[0228] RNA delivery was achieved with TransIT-mRNA transfection, Lipofectamine transfection, or NEON electroporation. Within each experiment, the molar amount of mRNA or circRNA delivered and transfection method used was the same for all samples. For TransIT-mRNA transfections, 3 μL of TransIT-mRNA reagent (Mirus Bio) was used per microgram of circRNA. Besides this change, transfections were performed following manufacturer's instructions.

### In Vitro NanoLuciferase Assay

[0229] Cells were electroporated with the pGL4.54[luc2/TK] vector (Promega) expressing firefly luciferase and transfected with mRNA or circRNA 48 hours later. Cells were harvested at 24 hours post-transfection in 100 μL of passive lysis buffer (Promega) and lysed by rocking and pipetting for roughly 15 minutes at room temperature. Lysate was centrifuged at 4,000 ref for 10 minutes to clear debris, and 5 μL of clarified lysate was transferred into a 384-well white-bottom assay plate (Perkin Elmer). To each well, 10 μL of ONE-Glo EX from the Promega Nano-Glo Dual-Luciferase Reporter Assay System was added, after which the plate was vortexed for 1 minute, incubated at room temperature for an additional 2 minutes, and read on a TECAN Infinite Pro microplate reader.

[0230] Samples were first measured for firefly luminescence, which was used as a constitutive control. To each well, 10 μL of freshly-made NanoDLR Stop & Glo Reagent was then added, after which the plate vortexed for 1 minute and incubated at room temperature for an additional 9 minutes before NanoLuc luminescence was read. Normalized luminescence per well was calculated by dividing NanoLuc signal by firefly luminescence. Within each experiment, normalized luminescence was displayed in terms of fold change relative to mock (no RNA) transfections.

mNeonGreen Flow Cytometry Assay

[0231] CircRNAs and mRNAs expressing mNeonGreen driven by different iterations of RNA backbones were electroporated into HeLa cells via NEON electroporation. At 24 hours post-electroporation, cells were lifted using warmed TrypLE (Thermo Fisher), which was quenched with DMEM (Thermo Fisher), and incubated in PBS containing propidium iodide live-dead stain (Thermo Fisher) at room temperature for 15 minutes. Cells were analyzed via flow cytometry on an Attune NxT with the same voltages applied to all conditions. At least 50,000 live singlet cells were recorded per sample.

### Cre Reporter Assay

[0232] Cre reporter loxP-DsRED-STOP-loxP-eGFP (Addgene, #62732) was used to create a lentiviral-derived stable Cre reporter HEK293T cell line. For virus production, five million HEK293T cells were plated, and after 24 hours, plasmid encoding lentivirus Cre reporter was co-transfected with pMD2. G and psPAX2 using Lipofectamine 3000 (Thermo Fisher) following manufacturer's instructions. The supernatant containing viral particles was collected 48 hours after transfection, concentrated using Lenti-X concentrator (Clontech), and stored at −80° C. Viral particles were added to 25% confluent cells at a multiplicity of infection of 1. Cre reporter expressing HEK293T cells (CreR-293T) were selected 48 hours after transfection, maintained in selection media for seven days, and allowed to recover for one day before downstream experiments.

[0233] CircRNA and mRNA encoding Cre recombinase were synthesized as described above using the Cre sequence from LV-Cre pLKo.1 plasmid (Addgene #25997). Stable CreR-293T cells were seeded in a 12-well plate at 300,000 cells per well. CreR-293T cells were transfected with 4 μg of circRNA or mRNA encoding Cre using Lipofectamine 2000 (Thermo Fisher) following manufacturer instructions. Cre-mediated recombination was analyzed 24 hours after transfection via flow cytometry on an Attune NxT by measuring the fraction of eGFP-positive cells.

### In Vitro Transcription-Translation

[0234] Coupled IVTT was performed using the 1-Step Human Coupled IVT kit (Thermo Scientific) following manufacturer's instructions. Briefly, circRNA plasmids were incubated with HeLa lysate, accessory proteins, and the reaction mix for at least 90 minutes. An aliquot from each reaction was then used to measure NanoLuc activity as described above.

### AkaLuc Assay

[0235] CircRNAs expressing AkaLuc-P2A-CyOFP54 with different optimizations were electroporated into HeLa cells via NEON electroporation and plated in a 96-well plate. At 24 hours post-electroporation, cells were washed with PBS and incubated with 100 μL of TokeOni AkaLumine-HCl substrate (Sigma-Aldrich) diluted to 250 μM in Opti-MEM (Gibco) for 5 minutes at room temperature. Luminescence was read on a SpectraMax M5 Microplate Reader (Molecular Devices) using SoftMax Pro 7.1 software with an integration time of 1,000 ms.

### CART Synthesis

[0236] O₆-stat-N₆:A₉ CARTs, consisting of a 1:1 mixture of oleyl (O) and nonenyl-substituted (N) carbonate monomers followed by a block of α-amino ester monomers (A), were prepared as previously described (Haabeth, 2021). End group analysis of the polymer confirmed block lengths of 6 nonenyl and 6 oleyl carbonate units and 9 cationic amino-ester units.

In Vivo Delivery of circRNA and mRNA

[0237] All animal experiments were performed in 3-6 month old female BALB/c mice obtained from The Jackson Laboratory. To formulate RNAs, 10.7 ng/nucleotide of linear or circular RNA (equivalent to 10 μg of hEPO mRNA) were diluted in pH 5.5 phosphate-buffered saline, mixed with O₆-stat-N₆:A₉ CARTs at a 10:1 cation:anion ratio, and immediately injected either intraperitoneally or intravenously via the tail vein. Particle sizes for CART/circRNA complexes were −170 nm. A total volume of 150 μL was used per injection. A total volume of 150 μL was used per injection. All experimental procedures were approved by the Institutional Animal Care and Use Committee at Stanford University.

### NanoLuciferase In Vivo Imaging

[0238] In vivo circNanoLuc activity was measured using an Ami HT optical imaging system (Spectral Instruments Imaging). At each time point, mice were anesthetized with isoflurane and intraperitoneally injected with 200 μL of the fluorofurimazine substrate (Promega) reconstituted in 2.1 mL of PBS per vial. Mice were imaged after 10 minutes using default settings and an exposure time of 10 seconds. Luminescent activity was quantified using Aura 4.0 imaging software.

hEPO ELISA Assay

[0239] hEPO levels in mice were measured using the SimpleStep Human Erythropoietin ELISA kit (Abcam). At each time point, approximately 100 μL of blood was collected in heparinized capillary tubes from the tail vein of each mouse and transferred into an EDTA-coated tube. Blood was centrifuged at 2,000×g for 10 minutes with the resulting plasma used as input for the ELISA. Final concentrations for hEPO were adjusted based on the volume of plasma measured.

### Reticulocyte Counts

[0240] Reticulocytes in peripheral mouse blood were measured using the Reticulocyte Reagent System (BD Biosciences), which uses thiazole orange to label reticulocytes. Briefly, 10 μL of blood was collected from the tail vein of each mouse and immediately mixed with 1 mL of the reagent. After incubating in the dark at room temperature for 30 minutes, samples were analyzed on a BD LSR II flow cytometer with 100,000 events recorded per sample. Reticulocytes were defined as singlet red blood cells positive for thiazole orange.

### Western Blotting

[0241] HeLa cells were lysed 24 hours after electroporation using RIPA Lysis and Extraction Buffer (Thermo Fisher) containing Halt Protease and Phosphatase Inhibitor Cocktail (Thermo Fisher). The resulting lysate was clarified by centrifugation and quantified for protein using bicinchoninic acid. Subsequently, 10 μg of total protein from each sample was separated on a Bis-Tris gel and transferred to a nitrocellulose membrane using the iBlot 2 Gel Transfer Device. After blocking with 5% bovine serum albumin in 0.1% Tween-20 diluted in PBS for one hour at room temperature, the membrane was stained with a 1:500 dilution of anti-NanoLuc antibody (R&D Systems, MAB10026) in blocking buffer overnight at 4° C. Following washes, the membrane was then incubated with a 1:10,000 dilution of IRDye 680RD goat anti-mouse secondary antibody (LI-COR Biosciences, 926-68070) and visualized on an Odyssey CLx Imaging System (LI-COR Biosciences).

### RNA Structure Predictions

[0242] RNA structures were predicted using the RNAfold web server (rna.tbi.univie.ac.at/cgi-bin/RNAWebSuite/RNAfold.cgi) with default settings except for deselecting “avoid isolated base pairs.” The optimal secondary structure based on minimal free energy prediction was subsequently used to represent the RNA sequence.

### Example 1 References

[0243] Bailey, J. M., and Tapprich, W. E. (2007). Structure of the 5′Nontranslated Region of the Coxsackievirus B3 Genome:Chemical Modification and Comparative Sequence Analysis. J. Virol. 81, 650-668.
[0244] Bhattacharyya, S., and Das, S. (2006). An Apical GAGA Loop within 5′ UTR of the Coxsackievirus B3 RNA Maintains Structural Organization of the IRES Element Required for Efficient Ribosome Entry. Http://Dx.Doi.Org/10.4161/Rna.3.2.2990 3, 60-68.
[0245] Blyn, L. B., Towner, J. S., Semler, B. L., and Ehrenfeld, E. (1997). Requirement of poly(rC) binding protein 2 for translation of poliovirus RNA. J. Virol. 71, 6243-6246.
[0246] Chen, Y G., Chen, R., Ahmad, S., Verma, R., Kasturi, S. P., Amaya, L., Broughton, J. P., Kim, J., Cadena, C., Pulendran, B., et al. (2019). N6-Methyladenosine Modification Controls Circular RNA Immunity. Mol. Cell 76, 96-109.e9.
[0247] Chen, Y. G., Kim, M. V., Chen, X., Batista, P. J., Aoyama, S., Wilusz, J. E., Iwasaki, A., and Chang, H. Y. (2017). Sensing Self and Foreign Circular RNAs by Intron Identity. Mol. Cell 67, 228-238.e5.
[0248] Daijogo, S., and Semler, B. L. (2011). Mechanistic Intersections Between Picornavirus Translation and RNA Replication. Adv. Virus Res. 80, 1-24.
[0249] De Breyne, S., Yu, Y., Unbehaun, A., Pestova, T. V., and Hellen, C. U. T. (2009). Direct functional interaction of initiation factor eIF4G with type 1 internal ribosomal entry sites. Proc. Natl. Acad. Sci. 106, 9197-9202.
[0250] Durbin, A. F., Wang, C., Marcotrigiano, J., and Gehrke, L. (2016). RNAs Containing Modified Nucleotides Fail To Trigger RIG-I Conformational Changes for Innate Immune Signaling. MBio 7, e00833-16.
[0251] Engler, C., Kandzia, R., and Marillonnet, S. (2008). A one pot, one step, precision cloning method with high throughput capability. PLoS One 3.
[0252] Filbin, M. E., and Kieft, J. S. (2009). Toward a structural understanding of IRES RNA function. Curr. Opin. Struct. Biol. 19, 267-276.
[0253] Gamarnik, A. V., and Andino, R. (1997). Two functional complexes formed by KH domain containing proteins with the 5′ noncoding region of poliovirus RNA. Rna 3, 882-892.
[0254] Gamarnik, A. V., Boddeker, N., and Andino, R. (2000). Translation and Replication of Human Rhinovirus Type 14 and Mengovirus in Xenopus Oocytes. J. Virol. 74, 11983-11987.
[0255] Gibson, D. G., Young, L., Chuang, R. Y., Venter, J. C., Hutchison, C. A., and Smith, H. O. (2009). Enzymatic assembly of DNA molecules up to several hundred kilobases. Nat. Methods 6, 343-345.
[0256] Graff, J., Cha, J., Blyn, L. B., and Ehrenfeld, E. (1998). Interaction of Poly(rC) Binding Protein 2 with the 5′ Noncoding Region of Hepatitis A Virus RNA and Its Effects on Translation. J. Virol. 72, 9668-9675.
[0257] Gruber, A. R., Lorenz, R., Bernhart, S. H., Neubock, R., and Hofacker, I. L. (2008). The Vienna RNA Websuite. Nucleic Acids Res. 36, W70-W74.
[0258] Holcik, M., and Liebhaber, S. A. (1997). Four highly stable eukaryotic mRNAs assemble 3′ untranslated region RNA-protein complexes sharing cis and transcomponents. Proc. Natl. Acad. Sci. 94, 2410-2414.
[0259] Huston, N.C., Wan, H., Strine, M. S., de Cesaris Araujo Tavares, R., Wilen, C. B., and Pyle, A. M. (2021). Comprehensive in vivo secondary structure of the SARS-CoV-2 genome reveals novel regulatory motifs and mechanisms. Mol. Cell 81, 584-598.e5.
[0260] Jackson, R. J., Hellen, C. U. T., and Pestova, T. V. (2010). The mechanism of eukaryotic translation initiation and principles of its regulation. Nat. Rev. Mol. Cell Biol. 11, 113-127.
[0261] Jiang, Y., Xu, X. S., and Russell, J. E. (2006). A Nucleolin-Binding 3′ Untranslated Region Element Stabilizes β-Globin mRNA In Vivo. Mol. Cell. Biol. 26, 2419-2429.
[0262] Karikó, K., Buckstein, M., Ni, H., and Weissman, D. (2005). Suppression of RNA recognition by Toll-like receptors: The impact of nucleoside modification and the evolutionary origin of RNA. Immunity 23, 165-175.
[0263] Kieft, J. S. (2008). Viral IRES RNA structures and ribosome interactions. Trends Biochem. Sci. 33, 274-283.
[0264] Kuersten, S., and Goodwin, E. B. (2003). The power of the 3′ UTR: translational control and development. Nat. Rev. Genet. 2003 48 4, 626-637.
[0265] Luo, Z., Dong, X., Li, Y., Zhang, Q., Kim, C., Song, Y., Kang, L., Liu, Y., Wu, K., and Wu, J. (2014). PolyC-binding protein 1 interacts with 5′-untranslated region of enterovirus 71 RNA in membrane-associated complex to facilitate viral replication. PLoS One 9, 1-13.
[0266] Martinez-Salas, E., Francisco-Velilla, R., Femandez-Chamorro, J., and Embarek, A. M, (2018). Insights into structural and mechanistic features of viral IRES elements. Front. Microbiol. 8, 2629.
[0267] Mayr, C. (2019). What Are 3′ UTRs Doing?Cold Spring Harb. Perspect. Biol. 11, a034728.
[0268] McKinlay, C. J., Vargas, J. R., Blake, T. R., Hardy, J. W., Kanada, M., Contag, C. H., Wender, P. A., and Waymouth, R. M. (2017). Charge-altering releasable transporters (CARTs) for the delivery and release of mRNA in living animals. Proc. Natl. Acad. Sci. U.S.A 114, E448-E456.
[0269] Michnick, S. W., and Arnold, F. H. (1999). “Itching” for new strategies in protein engineering. Nat. Biotechnol. 1999 1712 17, 1159-1160.
[0270] Mokrejs, M., Vopilenskj, V., Kolenaty, O., Masek, T., Feketovi, Z., Sekyrova, P., Skaloudovi, B., Kriz, V., and Pospisek, M. (2006). IRESite: the database of experimentally verified IRES structures (www.iresite.org). Nucleic Acids Res. 34, D125-D130.
[0271] Murray, K. E., Steil, B. P., Roberts, A. W., and Barton, D. J. (2004). Replication of Poliovirus RNA with Complete Internal Ribosome Entry Site Deletions. J. Virol. 78, 1393-1402.
[0272] Nicholson, R., Pelletier, J., Le, S. Y., and Sonenberg, N. (1991). Structural and functional analysis of the ribosome landing pad of poliovirus type 2: in vivo translation studies. J. Virol. 65, 5886-5894.
[0273] Obi, P., and Chen, Y. G. (2021). The design and synthesis of circular RNAs. Methods 196, 85-103.
[0274] Orlandini von Niessen, A. G., Poleganov, M. A., Rechner, C., Plaschke, A., Kranz, L. M., Fesser, S., Diken, M., Löwer, M., Vallazza, B., Beissert, T., et al. (2019). Improving mRNA-Based Therapeutic Gene Delivery by Expression-Augmenting 3′ UTRs Identified by Cellular Library Screening. Mol. Ther. 27, 824-836.
[0275] Ramanathan, M., Majzoub, K., Rao, D. S., Neela, P. H., Zarnegar, B. J., Mondal, S., Roth, J. G., Gai, H., Kovalski, J. R., Siprashvili, Z., et al. (2018). RNA-protein interaction detection in living cells. Nat. Methods 2018 153 15, 207-212.
[0276] Richner, J. M., Himansu, S., Dowd, K. A., Butler, S. L., Salazar, V., Fox, J. M., Julander, J. G., Tang, W. W., Shresta, S., Pierson, T. C., et al. (2017). Modified mRNA Vaccines Protect against Zika Virus Infection. Cell 168, 1114-1125.e10.
[0277] Shaner, N.C., Lambert, G. G., Chammas, A., Ni, Y., Cranfill, P. J., Baird, M. A., Sell, B. R., Allen, JR., Day, R. N., Israelsson, M., et al. (2013). A bright monomeric green fluorescent protein derived from Branchiostoma lanceolatum. Nat. Methods 2013 105 10, 407-409.
[0278] Shi, H., Wang, X., Lu, Z., Zhao, B. S., Ma, H., Hsu, P. J., Liu, C., and He, C. (2017). YTHDF3 facilitates translation and decay of N 6-methyladenosine-modified RNA. Cell Res. 27, 315-328.
[0279] Sokoloski, K. J., Dickson, A. M., Chaskey, E. L., Garneau, N. L., Wilusz, C. J., and Wilusz, J. (2010). Sindbis Virus Usurps the Cellular HuR Protein to Stabilize Its Transcripts and Promote Productive Infections in Mammalian and Mosquito Cells. Cell Host Microbe 8, 196-207.
[0280] Souii, A., Ben M'Hadheb-Gharbi, M., and Gharbi, J. (2013). Role of RNA Structure Motifs in IRES-Dependent Translation Initiation of the Coxsackievirus B3: New Insights for Developing Live-Attenuated Strains for Vaccines and Gene Therapy. Mol. Biotechnol. 2013 552 55, 179-202.
[0281] Svitkin, Y. V., Cheng, Y. M., Chakraborty, T., Presnyak, V., John, M., and Sonenberg, N. (2017). N1-methyl-pseudouridine in mRNA enhances translation through eIF2α-dependent and independent mechanisms by increasing ribosome density. Nucleic Acids Res. 45, 6023-6036.
[0282] Sweeney, T. R., Abaeva, I. S., Pestova, T. V., and Hellen, C. U. T. (2014). The mechanism of translation initiation on Type 1 picornavirus IRESs. EMBO J. 33, 76-92.
[0283] Truong, B., Allegri, G., Liu, X. B., Burke, K. E., Zhu, X., Cederbaum, S. D., Haberle, J., Martini, P. G. V., and Lipshutz, G. S. (2019). Lipid nanoparticle-targeted mRNA therapy as a treatment for the inherited metabolic liver disorder arginase deficiency. Proc. Natl. Acad. Sci. U.S.A 116, 21150-21159.
[0284] Tusup, M., Kundig, T., and Pascolo, S. (2018). An eIF4G-recruiting aptamer increases the functionality of in vitro transcribed mRNA. EPH—Int. J. Med. Heal. Sci. (ISSN 2456-6063) 4, 29-37.
[0285] Wahlestedt, C., Salmi, P., Good, L., Kela, J., Johnsson, T., Hökfelt, T., Broberger, C., Porreca, F., Lai, J., Ren, K., et al. (2000). Potent and nontoxic antisense oligonucleotides containing locked nucleic acids. Proc. Natl. Acad. Sci. 97, 5633-5638.
[0286] Walter, B. L., Nguyen, J. H. C., Ehrenfeld, E., and Semler, B. L. (1999). Differential utilization of poly(rC) binding protein 2 in translation directed by picornavirus TRES elements. RNA 5, S1355838299991483.
[0287] Wang, X., Lu, Z., Gomez, A., Hon, G. C., Yue, Y., Han, D., Fu, Y., Parisien, M, Dai, Q., Jia, G., et al. (2014). N 6-methyladenosine-dependent regulation of messenger RNA stability. Nature 505, 117-120.
[0288] Wesselhoeft, R. A., Kowalski, P. S., and Anderson, D. G. (2018). Engineering circular RNA for potent and stable translation in eukaryotic cells. Nat. Commun. 9.
[0289] Yang, D., Cheung, P., Sun, Y., Yuan, J., Zhang, H., Carthy, C. M., Anderson, D. R., Bohunek, L., Wilson, J. E., and McManus, B. M. (2003). A Shine-Dalgarno-like Sequence Mediates in Vitro Ribosomal Internal Entry and Subsequent Scanning for Translation Initiation of Coxsackievirus B3 RNA. Virology 305, 31-43.
[0290] Zeng, C., Hou, X., Yan, J., Zhang, C., Li, W., Zhao, W., Du, S., Dong, Y., Zeng, C., Hou, X., et al. (2020). Leveraging mRNA Sequences and Nanoparticles to Deliver SARS-CoV-2 Antigens In Vivo. Adv. Mater. 32, 2004452.

### Example 2

### Methods

### CircRNA Design and In Vitro Transcription

[0291] CircRNA templates were synthesized by cloning DNA fragments into a custom entry vector which contains self-splicing introns, 5′ PABP spacer, HBA1 3′ UTR, and HRV-B3 IRES. CircRNA were synthesized using HiScribe T7 High Yield RNA Synthesis Kit (NEB E2040S). IVT templates were PCR amplified (Q5 Hot Start High-Fidelity 2×Master Mix) 440 and column purified (Zymo DNA Clean & Concentrator-100) prior to RNA synthesis as previously described (Chen and Wang, 2022). Briefly, 1 μg of circRNA PCR-template was used per 20 μL IVT reaction. Reactions were incubated overnight at 37° C. IVT templates were subsequently degraded with 2 μL of DnaseI (NWB M0303S) for 20 minutes at 37° C. The remaining RNA was column purified and digested with 1 U of RnaseR per microgram of RNA for 60 minutes at 37° C. Samples were then column purified, quantified using a Nanodrop One spectrophotometer, and verified for complete digestion using an Agilent TapeStation. When compared to linear RNA, the same sequence was used as IVT template with the addition of 100 bp poly(A) tail incorporated after the 3′ UTR. Linear RNA was then synthesized using the same IVT kit with 4 nM CleanCap AG (TriLink N-7113). CircRNA or mRNA were fluorescently labeled by incorporating 5% of Fluorescein-12-UTP (Sigma-Aldrich 11427857910) in the corresponding IVT reaction, or by post-transcriptional modification using Label ITR Nucleic Acid Labeling Kit (Mirus Bio Cy3, Cy5, Fluorescein, or AF488). In all experiments we used a mixture of unlabeled circRNA and fluorescently labeled-circRNA at 20:1 ratio. Three different circRNA were produced, circOVA which encodes Ova protein, circNanoLuc which encodes nanoluciferase protein, and circFOR that has a shift-frame mutation that interferes with protein translation. Both circOVA and circNanoLuc were enhanced for translation by adding 5% m6A modifications and 5% of 2′OMeC for in vivo delivery. Circular RNA elements and modifications are listed in Table 8.

### CircRNA Uptake by Human PBMCs

[0292] Human peripheral blood mononuclear cells (PBMCs) were isolated from buffy coat obtained from healthy donors at Stanford Blood Center on a Ficoll-Paque gradient. 10 ng/ul of circRNA either unlabeled or cy3 labeled was added to 1×105 cells in RPMI-1640 medium and incubated at 37° C. for 2 hours. Subsequently, the cells were washed with FACS buffer and stained with anti-CD14 (AF647, BioLegend 325611), anti-CD3 (AF647, BioLegend 300422), anti-CD19 (AF647, BioLegend 302222), anti-CD56 (AF647, BioLegend 318313), anti-CD15 (AF647, BioLegend 323012), or anti-CD41a (AF647, BioLegend 303725). After 30 minutes incubation on ice, the cells were then washed with FACS buffer and stained with DAPI. Uptake of circRNA in each cell subtype was analyzed by flow cytometry. Unlabeled and cy3-linear RNA were used as negative controls.

### CircRNA Uptake by Human Monocytes

[0293] Peripheral blood mononuclear cells were prepared from whole blood from healthy volunteers using Lymphoprep (StemCell Technologies 07801) following the manufacturer's protocol. Briefly, whole blood was diluted 1:1 in complete media (RPMI+2% FBS-HI (Heat Inactivated at 65 C for 30 min) and carefully layered onto an equal volume of Lymphoprep (15 ml), centrifuged at 800 g for 30 min at room temperature with brakes off, and buffy coat was carefully transferred to a fresh vial. After washing once with complete media, red blood cells were lysed at 4 C for 10 min, the cells were washed in complete media twice, and cells were frozen using a 1:1 dilution in freezing media (90% FBS-HI, 10% DMSO). Frozen PBMC were thawed, washed in media, and viability assessed using a Countess automated cell counter (ThermoFisher). 1×106 cells in 50 ul were aliquoted into each well of a 96-well plate, an equal volume of cy3-labeled circRNA dilutions. Cells were placed at 37° C. 5% CO₂ for the 484 indicated time points. At each time point, the cells were transferred to a fresh 96 well V-bottom 485 plate and washed with FACS buffer. Cells were incubated with the following at room temperature protected from light: ZombieRed live/dead stain (Biolegend 423110) for 10 min, Human TruStain FcX (Biolegend 422302) for 5 min, and the following antibody mixture for 30 min: anti-CD3e (FITC, Biolegend 300406), anti-CDllc (BV785, Biolegend 101245), anti-HLADR (BV650, Biolegend 307650), anti-CD16 (BV510, Biolegend 360733), anti-CD123 (BV421, Biolegend 306017), anti-CD19 (AF700, Biolegend 302225), anti-CD14 (AF647, Biolegend 325611). Cells were washed twice in FACS buffer and fixed in 4% PFA for 30 min. The fixed cells were washed with FACS buffer and stored at 4° C. until analyzed by flow cytometry.

### CircRNA Uptake by Human Macrophages

[0294] Human primary macrophages were differentiated as described previously28. Briefly, human PBMCs were enriched for monocytes using EasySep™ Human Monocyte Enrichment Kit without CD16 Depletion (STEMCELL Technologies 19059). The resulting monocytes were resuspended in IMDM Glutamax in the presence of 10% Human Serum and 1× Penicillin-Streptomycin at a density of 1×10⁶ cells/mL and cultured in a tissue culture dish at 37° C. for 6-7 days to obtain differentiated macrophages. Aliquot 2×10⁵ differentiated macrophage cells in 100 μl medium in a 24-well plate and add circRNA to the final concentrations as indicated. After incubation for 2 hr, the cells were harvested and cytospinned on the glass slides. The cells were stained by DAPI and the localization of the circRNA was analyzed under fluorescence microscopy.

### Cell Lines

[0295] The RAW264.7 (TIB-71) and J774A.1 (TIB-67) cell lines were purchased from ATCC and cultured in DMEM medium supplemented with 10% FBS and 1% penicillin/streptomycin (Thermo Fisher), Cells were passaged after reaching 90% confluence, detached with cell scraper, and subcultured at 1:8 ratio every two days. U937 (CRL-159.2) and THP-1 (TIB-202) cells were acquired from ATCC. Cells were maintained in suspension culture with RPMI 1640 medium supplemented with 2 mM glutamine, 10% FBS, and 1% penicillin-streptomycin. Cells were subcultured when cell concentration reached 8×105 cells/mL. MutuDC cells were purchased from Applied Biological Materials Inc. (abm T0528). Cells were maintained in EVIDM-Glutamax (Gibco 31980) medium supplemented with 10% FBS, 1% penicillin-515 streptomycin, 10 mM Hepes (Gibco 15630), and 50 μM β-mercaptoethanol (GIBCO 31350). KG-1 (CCL-246) cells were acquired from ATCC. Cells were maintained in DMEM medium supplemented with 20% FBS and 1% penicillin-streptomycin. Calu-3 (HTB-55), IMR-90 (CCL-186), and Hep G2 (HB-8065) cells were acquired from ATCC and maintained in EMEM medium supplemented with 10% FBS, 1% penicillin-streptomycin. For routine subculture, 0.25% Trypsin-EDTA (Thermo Fisher) were used for cell dissociation. All cell lines were kept in culture at 37° C. in a humidified incubator with 5% CO₂, and regularly tested for mycoplasma contamination (Lonza LT07-318).

circRNA Uptake and Transfection

[0296] Cell lines were seeded at 1×10⁵ cells per well in a 96-well plate in complete media. After 24 hours cells were washed twice with serum-free media and circRNA was added at 1 μg/pl or at the indicated concentrations. Cells were placed at 37° C. and 5% CO₂ for 18 h or the indicated time points. Media containing circRNA was then removed, cells were transferred to a v-bottom plate and washed twice with PBS, stained with Live/dead NIR fixable dye and analyzed by flow cytometry. To reduce background surface binding, we perform a mild trypsin treatment before every flow cytometry analysis, to ensure the removal of membrane bound dyes. CircRNA or mRNA transfection was performed using TransIT-mRNA transfection kit (Mirus MIR 2250), with 3 μL of TransIT-mRNA reagent (Mirus Bic) per microgram of RNA.

Inhibitors and Promoters of circRNA Uptake

[0297] RAW264 cells were seeded as previously described and incubated with 100 nM cy3-circRNA in serum free media in combination with either: 1.5 μM of unlabeled circRNA, linRNA, plasmid DNA, Poly(I:C) (Sigma-Aldrich P9582), tRNA (Roche TRNABAK-RO) or heparin (Sigma-Aldrich H3149). After 24-hour incubation, cells were analyzed by flow cytometry as previously described. RAW264 cells were seeded as previously described and treated with increasing concentrations of sodium azide (Sigma-Aldrich S2002). After 30 min pre-incubation, with sodium azide, cells were washed twice with PBS and lug of cy5-circRNA was added into serum-free media or transfected into cells. 24 hours after treatment, cells were analyzed by flow cytometry as previously described. RAW264 cells were seeded as previously described and treated for 30 min with 20 mM of 2-Deoxy-D-glucose (Tocris 4515) or 2 mg/ml of oligomycin (Sigma-Aldrich 04876). Cells were then washed twice with PBS and lug of cy5-circRNA in serum-free media was added onto cells. RAW264 cells were seeded as previously described and 1 μg/pl of cy5-circRNA in serum-free media was added onto cells in combination with 20 ng/ml of LPS (Sigma-Aldrich L4516), 0.75 μg/ml of CD40 L (AcroBiosystems M5248), or 5 ng/ml of PMA (Sigma-Aldrich P1585). 24 hours after treatment, cells were analyzed by flow cytometry as previously described.

### In Vitro NanoLuciferase Assay

[0298] Cells were harvested at 24 hours post-uptake or transfection in 100 μL of passive lysis buffer (Promega) and lysed by rocking and pipetting for roughly 15 minutes at room temperature. Lysate was centrifuged at 4,000 rcf for 10 minutes to clear debris, and 5 μL of clarified lysate was transferred into a 384-well white-bottom assay plate (Perkin Elmer). To each well, 10 μL of ONE Glo EX from the Promega Nano-Glo Dual-Luciferase Reporter Assay System was added, after which the plate was vortexed for 1 minute, incubated at room temperature for an additional 2 minutes, and read on a TECAN Infinite Pro microplate reader.

### T Cell Proliferation Assay

[0299] OT-I CD8 T cells were purified from TCR-transgenic mice OT-I by negative selection using immunomagnetic beads (Miltenyi Biotech). For direct MHC-I antigen presentation assays, MutuDC lines were seeded at 10,000 cells per well in round-bottom 96-well plates. For MHC-I restricted antigen presentation assays, MutuDC were incubated for 2 h with 1 nM SIINFEKL (OVA257-264, Sigma-Aldrich S7951), 1 mg/ml of Ovalbumin protein (InvivoGen vac-pova), 1 μg of circFOR, or 1 μg of circOVA, in the presence or absence of 1 μM CpG (ODN 1585, InvivoGen). Cells were washed three times in medium and incubated with 50,000 purified OT-I CD8 T cells (CFSE-labeled). T cell proliferation was measured after 60 h of culture by flow cytometry analysis excluding doublets and dead cells. OT-I CD8 T cells were gated as CD8+Va2+ cells. Live dividing T cells were detected as low for cell proliferation dyes (CFSE low). MutuDC were similarly transfected with circOVA with or without CART reagent at the indicated concentrations.

qRT-PCR Measurement of Immune Receptors

[0300] MutuDC cells were seeded as previously described and treated with 1 M CpG, lug circRNA in media or delivered with TransIT. 24 hours after treatment total RNA was isolated from cells using TRIzol (Invitrogen, 15596018) and Direct-zol RNA Miniprep (Zymo Research, R2052) with on column DNase I digestion, following the manufacturer's instructions. RT-qPCR analysis was performed in triplicate using Brilliant II SYBR Green qRT-PCR Master Mix (Agilent, 600825) and a LightCycler 480 (Roche). The relative RNA level was calculated by the ddCt method compared to β-Actin control. Primer sequences are listed in Table 9.

### Flow Cytometry Analysis of Cytokines and Surface Receptors

[0301] MutuDC cells were seeded as previously described and treated with luM CpG, lug circRNA in media or delivered with TransIT. 24 hours after treatment cell supernatant was collected and the cytokines levels were quantified using the cytometric bead array kit for mouse inflammatory cytokines (CBA; BD Biosciences). Similarly, cell suspensions transferred to a v-bottom plate and washed twice with PBS, stained with Live/dead NIR fixable dye and stained with anti-MHC-II (redFluor 710 Tonbo 80-5321-U025), anti-MCH-I (PE, eBioscience 12-5958-82), anti-CD86 (APCFire/750, BioLegene 105045), anti-CD40 (PerCP-eFluor 710, eBioscience 46-0401-80), and anti-CD80 (Pe-cy5, sBioscience 15-0801-82). After 30 minutes incubation on ice, the cells were then washed with FACS buffer and analyzed by flow cytometry.

### Mice and Immunizations

[0302] C57BL/6, mice were purchased from Jackson Laboratories. Mice were matched for sex and aged between 8 and 14 weeks. For immunization, mice were injected intranasally with 30 μl of circRNA (25 μg per mouse), intravenously with 100 μl of circRNA (25 or 85 μg per mouse), subcutaneously at the base of the tail with 100 μl of circRNA (25 or 50 μg per mouse), and intraperitoneally with 100 μl of CART-circOVA (9 μg per mouse). When indicated, 50 μg of Ovalbumin protein (InvivoGen vac-pova) were also delivered in combination with 30 μg of Poly(I. C) (HMW VacciGrade, InvivoGen vac-pic) or 50 ug Addavax (InvivoGen). All mice in this study were maintained under specific pathogen-free conditions, a 12-h light/12-h dark cycle and temperatures of ˜18-23° C. with 40-60% humidity.

### Flow Cytometry Analysis of Innate Immune Subsets

[0303] Draining inguinal lymph nodes from immunized mice were collected and digested with 1 mg/ml collagenase type IV (Worthington) for 20 min at 37° C., followed by smashing with a 100 μm strainer to make a single-cell suspension. Single-cell samples were then stained with Zombie UV (BUV496, BioLegend 423107), anti-Ly6C (BV780, BioLegend 128041), anti-Ly6G (APC Cy7, BioLegend 127624), anti-CD19 (BUV395, BD 563557), anti-CD3 (BB700, BD742175), anti-MHCII (AF700, eBioscience 56-5321-82), anti-CD11b (BV650, BioLegend 101239), anti-CD11c (BV421, BioLegend 117330), anti-CD86 (A647, BioLegend 105020), anti-Siglec-F (PE615 CF594, BD 562757), anti-CD45 (BV610, BioLegend 103140), anti-CD169 (PE-Cy7, BioLegend 142412), anti-PDCA-1 (BUV563, BD 749275), anti-CD8a (BUV805, BD 612898), anti-CD103 (PE, eBioscience 12-1031-82), anti-NK1.1 (BV510, BioLegend 108738) and anti-F4/80 (BUV737, BD 749283).

### CD8 T Cell Flow Cytometry Analysis

[0304] Whole lung or spleen from immunized mice were collected and digested with 1 mg/ml collagenase type IV (Worthington) for 20 min at 37° C., followed by smashing with a 100-μm strainer to make a single-cell suspension. Red blood cells were lysed before staining. Single-cell samples were then stained with Zombie Yellow (BUV570, BioLegend 423103), anti-CD3 (clone 145-2C11, BioLegend), anti-CD8ct (clone 53-6.7, BioLegend), anti-CD4 (clone RM4-5, BioLegend), anti CD44 (clone IM7, BioLegend), anti-CD45 (clone 30-F11, BioLegend), anti-CD69 (clone H1.2F3, BioLegend), anti-CD103 (clone 2E7, BioLegend) and Ova-specific Tetramer (residues 257-264).

### Antibody ELISA

[0305] Ovalbumin (Ova) protein was purchased from InvivoGen. High-binding 96-well plates were coated with 100 ng of Ova protein diluted at a concentration of 10 μg/ml in PBS. The plates were washed once and blocked with 3% non-fat milk for 1 h at 37° C. Sera samples serially diluted in 1% non-fat milk containing PBS were added to the plates and incubated at 37° C. for 1 h. The plates were washed 3× with PBS-T, and horseradish peroxidase-conjugated goat anti-mouse IgG, IgA (SouthemBiotech, 1:5,000 dilution) in PBS-T containing 1% non-fat milk was added and incubated for 1 h at 37° C. Wells were washed three times with PBS-T before addition of 3,3′,5,5′-tetramethylbenzidine substrate solution (Thermo Pierce). The reaction was stopped after 5 min by addition of 0.16 M sulfuric acid. The optical density at 450 nm was measured with a Bio-Rad microplate reader.

### Luminex Assay

[0306] This assay was performed by the Human Immune Monitoring Center at Stanford University. Mouse 48 plex Procarta kits (EPX480-20834-901) were purchased from Thermo-Fisher/Life Technologies, Santa Clara, California, USA, and used according to the manufacturer's recommendations with modifications as described. Briefly: Beads were added to a 96 well plate and washed in a BioTek ELx405 washer. Samples were added to the plate containing the mixed antibody-linked beads and incubated overnight at 4° C. with shaking. Cold (4° C.) and Room temperature incubation steps were performed on an orbital shaker at 500-600 rpm. Following the overnight incubation plates were washed in a BioTek ELx405 washer and a biotinylated detection antibody added for 60 minutes at room temperature with shaking. Plate was washed as described and streptavidin-PE was added for 30 minutes at room temperature. Plate was washed as above and reading buffer was added to the wells. Each sample was measured in duplicate or single wells. Plates were read using a Luminex 200 or a FM3D FlexMap instrument with a lower bound of 50 beads per sample per cytokine. Custom Assay Chex control beads were purchased from Radix BioSolutions, Georgetown, Texas; and added to all wells.

CART Synthesis and circRNA Complex

[0307] O6-stat-N6:A9 CARTs (in this example referred simply as CART), comprising a block of on average 12 subunits made up of a statistical 1:1 mixture of oleyl (0) and nonenyl-substituted (N) carbonate subunits followed by a block of on average 9 α-amino ester subunits (A), were prepared as previously described26. circRNA was diluted in PBS pH 5.5 and mixed with CART at 1:10 charge ratio immediately before in vitro transfection or intraperitoneal delivery into mice.

### Transcriptome Data Analysis

[0308] MutuDC cells were incubated with naked circRNA as previously described or transfected with CART-circRNA complex. After 24 hours of incubation, total RNA was extracted from the cells using the RNeasy Mini Kit (Qiagen) according to the manufacturer's protocol. The integrity of the total RNA was analyzed using an Agilent 2100 Bio-analyzer and RIN numbers were above 9. RNA libraries were prepared with the Illumina Ribo-Zero Plus rRNA Depletion Kit. The adaptor ligated libraries were sequenced using an Illumina NextSeq 500. Transcript abundances were calculated by pseudocounts using Salmon (version 1.4.0). Normalization and differential gene expression analyses were performed by the DESeq2 package (v1.32.0) in R (version 4.1.1). Enrichment analysis for GO terms were performed by the ClusterProfiler package (v4.0.5) and graphs were produced by the ggplot2 package (v3.3.5).

### Mouse Model of Subcutaneous Melanoma

[0309] B16-F10-OVA cells were harvested for injection in PBS at 1×10⁶ cells/ml. 100 ul of cell suspension (1×10⁵ cells/mouse) were subcutaneously injected into C57BL/6 mice. Mice were monitored daily for tumor incidence and growth. When palpable, tumors were measured every other day using digital calipers and measured in two dimensions. Tumor volume (V) was determined by using the formula V=L×W×D×3.14/6. Mice were sacrificed before the tumors became necrotic in the center.

### Statistical Analysis

[0310] All other statistical analysis was performed with Prism (GraphPad Software v9.2.0). For comparing two groups, P values were determined using Student's t-tests (two-tailed). For comparing more than two groups, one-way ANOVAs followed by Tukey's test were applied. Differences between groups were considered significant for P values<0.05. No statistical methods were used to predetermine sample sizes. Mice were assigned to the various experimental groups randomly. Data collection and analysis were not performed blind to the conditions of the experiments.

### Results

Naked circRNA are Taken Up by Specific Human Immune Cells

[0311] To understand the interactions between circRNAs and the hematopoietic system, circRNA uptake by human blood cells was assayed using in vitro-transcribed circRNA as previously described 11, with the incorporation of fluorescently labeled UTPs (FIG. 15a). The possibility of dye-specific uptake was minimized by swapping different fluorescent dyes such as 78 cy5, cy3 and fluorescein throughout the experiments, and similar results were obtained. Primary human peripheral blood mononuclear cells (PBMCs) were isolated from healthy donors and incubated for 2 hours with fluorescently labeled circRNA in serum-free medium, which prevents circRNA binding to albumin21, and cellular uptake of circRNA was 81 quantified by flow cytometry. Uptake of cy3-labeled circRNA (cy3-circRNA) was observed in monocytes, neutrophils, B cells, and platelets based on the expression of the cell surface markers CD14, CD15, CD19 and CD41a, respectively, on cy3+ cells (FIG. 15b). Notably, the uptake of circRNA by monocytes was highly significant compared to the rest of the subsets. In contrast, no cellular uptake was detected in any of the PBMC subsets when a Cy3-labeled linear RNA (cy3-linRNA) with the same sequence as its circRNA counterpart was used, possibly due to the unstable nature of linear RNAs. Examination of specific human myeloid subsets showed that classical monocytes (defined here as CD14+CD16−) showed higher uptake of circRNA over a 24 hour time course (FIG. 15c; FIG. 21a,b).

Differentiated Macrophages Efficiently Take Up circRNA in a Dose-Dependent Manner

[0312] CircRNA uptake was imaged via confocal microscopy, which can distinguish RNA internalization compared to cell surface binding and provides an orthogonal validation to flow cytometry. Considering that classical monocytes can differentiate into macrophages, which are specialized phagocytic cells, uptake and cellular localization of circRNA by human primary macrophages was examined, Different concentrations of cy3-circRNA were incubated with macrophages for 2 hours. As shown in FIG. 15d, the uptake of cy3-circRNA by the macrophages was dose dependent and was saturated at 40 μg/ml, which was consistent with the results obtained by flow-based uptake assay (FIG. 21c). Cy3-circRNA was detected in the cytoplasm of human macrophages, and no uptake was detected with cy3-linRNA, which was used as a negative control (FIG. 15d).

[0313] To establish a baseline model to study the molecular dynamics of circRNA uptake, circRNA uptake was measured in a panel of human and murine myeloid cell lines. CircRNA uptake levels were cell line-specific, and the strongest circRNA uptake was observed in differentiated macrophage lines mouse RAW264 and J774, human KG-1, and mouse dendritic cells line MutuDC (DCs) (FIG. 15e). Low levels of circRNA uptake were observed in monocyte like human cell lines, THP1 and U937. CircRNA uptake was concentration dependent as observed in both human classical monocytes (FIG. 21d) and macrophages cell lines J774 and RAW264 (FIG. 21e). Because many RNA therapeutics localize to liver hepatocytes when delivered in vivo22, circRNA uptake was evaluated in tissue-specific cell lines and observed strong uptake of cy5-labeled circRNA (cy5-circRNA) in the human hepatoma cell line HepG2, lung epithelial cell line Calu-3, and lung fibroblasts IMR-90 (FIG. 210.

### CircRNA Uptake by Macrophages is Fast, Saturable, and ATP-Dependent

[0314] The kinetics and potential mechanisms of circRNA uptake was quantitated using the macrophage cell line RAW264. Uptake of cy5-circRNA was observed immediately after 5 min, and continued to accumulate for 24 hours, indicating a fast and continuous process (FIG. 16a). The percentage of fluorescently positive cells increased linearly over time (R2=0.7805, p value=0.0196, y=0.03877×+18.17), which may indicate the involvement of a fluid-phase endocytosis mechanism. Additional hallmarks of receptor-mediated endocytosis are (i) saturation at high ligand concentrations and (ii) specific competition for uptake by an excess of the same or related ligands. When uptake of circRNA was analyzed at increasing concentrations of cy5-circRNA, one observed a saturable process that plateaus at 1 mM circRNA concentration (FIG. 16b). To determine the specificity of circRNA uptake, a competition assay was performed. As illustrated in FIG. 16c, unlabeled circRNA, linRNA and plasmid DNA efficiently competed for cy5-circRNA uptake. In contrast, Poly(I. C), which is structurally similar to double-stranded RNA, and tRNA did not compete with circRNA uptake and instead had a positive effect in circRNA uptake. In addition, heparin, which is comparable in mass and charge to some oligonucleotides, failed to interfere with circRNA uptake. These results indicate that macrophages take up circRNAs via a saturable and ligand-selective process, likely involving one or more receptors.

[0315] A cellular uptake process is termed active if it requires energy. This is typically determined by inhibiting energy production with cold temperature or metabolic blockade. CircRNA uptake was severely inhibited at 4° C. compared to 37° C. incubation across multiple ligand concentrations (FIG. 16d), indicating that circRNA uptake in RAW264 cells is energy dependent. CircRNA uptake was also substantially blunted at 4° C. in HepG2, IMR-90, and Calu3 cells (FIG. 22a). When RAW264 cells were treated with ATP inhibitor, sodium azide, circRNA uptake was reduced by 50% (FIG. 16e). In contrast, no effect was observed in circRNA delivery when cy5-circRNA was delivered by lipid-mediated transfection in RAW264 cells (FIG. 16e). Similar results were confirmed with other metabolic inhibitors such as oligomycin that inhibits ATP synthase, and 2-deoxyglucose that interferes with d-glucose metabolism (FIG. 22b). Conversely, it was tested if circRNA uptake is promoted by activating macrophages and thus increasing their phagocytosis mechanisms. PMA, but not LPS or CD40 L treatment, resulted in significant increase of cy5-circRNA uptake (FIG. 22c).

[0316] To quantify circRNA uptake in the absence of fluorescent dyes, qRT-PCR was performed in RAW264 cells after 24-hour incubation with unlabeled circRNA using primers that specifically target the back splice regions of circRNA. CircRNA levels after uptake were comparable to lipofectamine transfection (FIG. 22d). Uptake of linear RNA was also detectable by qRT-PCR, a more sensitive assay than fluorescence. (FIG. 22d). CircRNA uptake was greater than linRNA uptake in RAW264 and J774 cells but comparable in HepG2 cells (FIG. 22e). To track internalization of circRNA in live cells, circRNA that was covalently bound to the intracellular pH indicator pHrodo-Red, a fluorogenic probe that is weakly fluorescent at neutral pH and increasingly fluorescent in acidic conditions was used. A close correlation of pHrodo-Red signal and cy5 fluorescence (FIG. 22f). These results corroborate intracellular localization of circRNA and might indicate that some fraction of circRNA is localized in acidic compartments such as endosomes or lysosomes.

### CircRNA Uptake by Dendritic Cells Results in Translation and Presentation to T Cells

[0317] To determine if circRNA can be translated after being taken up by macrophages and dendritic cells, two circRNA molecules were designed, one encoding the reporter protein Nano luciferase (hereafter named circNanoLuc), and the other encoding a model antigen, chick Ovalbumin (hereafter named circOVA). To maximize circRNA translation, previously optimized elements were used for circRNA design and transcription11. These elements include optimized RNA chemical modification, 5′ and 3′ untranslated regions, internal ribosome entry sites (IRESs), and synthetic aptamers shown to increase circRNA translation over mRNA after a single transfection. Compared to lipid-mediated transfection, circNanoLuc uptake resulted in similar luminescent readouts 24 hours after transfection/uptake, which indicated circRNA is stable and readily available for translation after uptake in RAW264 cells (FIG. 17a). circRNA translation was also comparable to the mRNA form of the same protein, as observed in RAW264 and HepG2 cells after incubation with increasing concentrations of the corresponding mRNA or circRNA encoding NanoLuciferase (FIG. 23a).

[0318] An essential process for the initiation of cytotoxic immune responses is antigen cross presentation. Only dendritic cells, but not macrophages, contain a specialized cross-presenting transport system required for MHC class I antigen-processing. To determine if circRNA can be translated and processed for antigen presentation by dendritic cells, the antigen presentation capacity of MutuDCs was tested after incubation with circOVA. Protein translation capacity of circOVA was verified in 293T cells. 24 hours after transfection with circOVA, Ovalbumin protein was detected in cell lysate and supernatant (FIG. 23b). Using specific MHC tetramers, ovalbumin-derived peptide SIINFEKL bound to H-2 Kb of MHC class I on MutuDC cells after 24 hours incubation with circOVA, SIINFEKL peptide, or Ova protein was tested. CircOVA incubation resulted in 5-fold increase of antigen presentation capacity compared to control (FIG. 17b). Furthermore, the capability of antigen-primed dendritic cells to induce T-cell specific proliferation in vitro was measured. CircOVA uptake in MutuDC cells resulted in the strongest induction of antigen-specific T-cell proliferation after 3-day co-culture of OT-1-transgenic CD8 T cells, even above OVA protein or SINFEKL peptide incubation (FIG. 17c). This effect was enhanced after addition of CpG oligodeoxynucleotides, short synthetic single-stranded DNA, known to induce dendritic cell maturation 23. In combination, these results indicate that circRNA can be taken up, translated in the cytosol, and protein encoded by circRNA can be processed and presented to the immune system.

CircRNA Uptake Vs. CART-Mediated Delivery

[0319] To further optimize circRNA translation, circRNA delivery was tested using charge-altering releasable transporters (CARTs), a class of synthetic biodegradable materials shown to complex, protect, and efficiently deliver mRNA and circRNA intracellularly, leading to highly efficient protein translation (11,22). Efficient delivery of circRNA with CART was validated by measuring fluorescence of RAW264 cells 24 hours after delivery of AF488-labeled circRNA (FIG. 23c). The T-cell proliferation assay was performed with different amounts of circOVA delivered with or without CART into MutuDC cells. A ˜100-fold reduction in the input material required to achieve antigen-specific T-cell proliferation when circRNA is complexed with CART was observed (FIG. 17d). This observation indicated that most of the naked circRNA that is naturally internalized by dendritic cells is not efficiently translated.

[0320] To further investigate the differences in translation efficiency after circRNA uptake compared to CART delivery, the transcriptome profile of MutuDC cells was examined after delivery of naked circRNA (hereafter referred to as circRNA) or in complex with CART (hereafter referred to as CART-circRNA). Principal component analysis (PCA) revealed each condition is easily distinguished from each other which indicates distinct transcriptome profiles characterize the path of circRNA delivery (FIG. 24a). CircRNA uptake was characterized by upregulation of CD74, a critical chaperone in antigen processing, which directs transport to the endosomal/lysosomal system (FIG. 24b). On the other hand, CART-circOVA resulted in significant upregulation of Hmox1, a membrane-bound enzyme with cytoprotective effects, in addition to upregulation of several interferon induced transmembrane proteins (FIG. 24b). Differential expression analysis between treatments revealed specific upregulation of cell membrane components involved in substrate recognition and antigen processing and presentation (CD74, Asb2, MHC-I splice variants) in the circRNA group, whereas the CART-circOVA condition resulted in significant upregulation of cytoplasmic receptors (Dhx58, Oas1 g, Oas2) (FIG. 24c). Functional annotation of differentially expressed genes after circRNA uptake compared to control resulted in significant association with “Cellular response to LPS” (FIG. 24d), indicative of Toll-like receptor signaling from endosomes. Conversely, the functional profile of CART-circOVA treated cells was more related to “Response to virus” and dsRNA signaling from cytosol (FIG. 24e). Chromatin assembly and organization, which may correlate with the CART reagent forming nanoparticle aggregates with DNA, was also among the top biological processes (FIG. 24e). In combination, the GO enrichment analysis supports that naked circRNA is localized/detected in the cell membrane or endosomal compartments, whereas circRNA delivered with CART is localized in the cytosol and readily available for translation. These results indicate that depending on the internalization method, circRNA is localized to distinct cellular compartments, and thus is recognized and processed differently. However, both treatments lead to activation of viral responses and immune effector processes. Next, the immune phenotype of antigen presenting cells after delivery of circRNA by distinct routes was determined. CircRNA uptake in MutuDC cells induced a significant increase in the mRNA levels of the cytosolic RNA sensor RIG-I and MDA5, and transcripts encoding IL1-B, TNFa and IL-6, cytokines required for dendritic cell differentiation and maturation24. Neither circRNA transfection nor CpG treatment induced these (FIG. 17e). Moreover, measurement of secretion of inflammatory cytokines and the level of activation markers on the surface of MutuDCs after circRNA uptake indicated a significant increase in TNFa and IL-6 proteins only after circRNA uptake (FIG. 17f), in addition to increased levels of MCP1, monocyte chemoattractant protein-1, which has the ability to drive the chemotaxis of myeloid and lymphoid cells25. CircRNA uptake significantly increased surface expression of DC activation markers MHC-II, MHC-1, CD80, CD40, CD86 compared to untreated samples or circRNA transfection, but comparable to CpG control (FIG. 17g). These results indicate that circRNA uptake leads to innate immune receptor activation14, leading to dendritic cell maturation. The differences observed in innate immune responses when circRNA is delivered by naked uptake or lipid encapsulation highlights the differences of the internalization mechanisms involved and the activation of distinct receptors and signaling pathways.

circRNA Induces Activation of Innate Immune Cells when Injected into Mice.

[0321] To examine the biodistribution of circRNAs when delivered in vivo, its uptake and the subsequent activation of the innate immune response following immunization were examined. g circRNA was conjugated to the fluorophore AF488 (AF488-circRNA) and subcutaneously (s.c.) injected it into C57BL/6 mice. Serum was analyzed by a Luminex panel of innate cytokines at 6- and 24-hours following immunization (FIG. 18a), while innate immune cell subsets in the draining inguinal lymph nodes (iLNs) were analyzed via flow cytometry at 24 hours following immunization (FIG. 18a, FIG. 25a). Monocytes were defined as CD11b+Ly6C+ cells, dendritic cells as CD11chigh MHCII high cells, with DC subsets further subdivided into migratory CD103+ or CD11b+DCs (mDC) and resident CD8a+ or CD11b+DCs (rDC). Lymph node (LN) macrophages were identified as CD11b+Ly6CloF4/80+/−CD169+/− and plasmacytoid dendritic cells (pDCs) as CD11b-PDCA-1+ cells. Lastly, neutrophils were defined as CD11b+Ly6G+, and eosinophils as CD11b+Signlec-F+(FIG. 25a). Innate cell activation was measured by the upregulation of the activation marker CD86 on each cell subset. At 24 hours following s.c. injection, circRNA was detected in monocytes, dendritic cells, and several macrophage subsets in the draining lymph nodes. The macrophage subsets taking up circRNAs include marginal cord macrophage (MCMs), marginal sinus macrophage (MSMs), and subcapsular sinus macrophages, (SSM), with MCMs and MSMs having the most significant uptake of circRNA (FIG. 18b). These results are similar to those observed with human primary cells in vitro (FIG. 15b), where macrophages and monocytes showed uptake of circRNA. While circRNA uptake was observed in human B cells in vitro (FIG. 15b), mouse iLN B cells did not show uptake of circRNA at 24 hours following immunization. Even though no circRNA uptake was observed by B cells in mice, B cell frequencies in the iLNs significantly increased at 24 hours post immunization (FIG. 18c), and B cell activation, as measured by CD86 upregulation, increased as well (FIG. 18d). A significant increase was observed in the frequency (FIG. 18c) and activation (FIG. 18d) of monocytes in the iLNs, as well as activation of all macrophage and dendritic cell subsets (FIG. 18d).

[0322] To investigate whether the innate activation and circRNA uptake is different between naked and CART-mediated circRNA delivery, mice were s.c. immunized with CART alone, naked circRNA, or CART-circRNA. Innate cell frequencies, activation and circOVA uptake was measured in the inguinal LNs at 24 h following immunization. While immunization with CART alone induced some innate immunity, such as increased monocyte frequencies in the iLNs (FIG. 26a), as well as increased CD86 expression on mDCs (FIG. 26c), its addition to circRNA did not significantly alter circRNA uptake by immune cells (FIG. 26b) or the innate cell infiltration and activation in the iLNs (FIG. 26a,c). Thus, CART does not impact the innate immune activation and uptake of circRNA.

[0323] To examine the serum cytokine response to immunization with circRNA, sera from immunized mice were analyzed at 6 and 24 hours post immunization with a Luminex panel for innate cytokines (FIG. 25b). Significant production of chemokines: CCL5, CCL4, CCL3, CCL7, CXCL10, CCL2; and cytokines: IL-6, TNFa, IL-12; were observed, with a peak at 6 hours after immunization, followed by a decrease at 24 hours (FIG. 18e). BAFF and CCL11 showed a continued increase with a peak at 24 hours (FIG. 18e). Taken together, the data supports that naked circRNA is taken up by innate immune cells when injected into mice and induces subsequent activation of several innate immune cell types and release of multiple chemokines. This observation that circRNA activates innate immunity prompted the investigation of the capacity of circRNA to induce adaptive immune responses—both when used as an adjuvant and when encoding an antigenic sequence.

circRNA Acts as a Potent Vaccine Adjuvant when Combined with Soluble Protein, Inducing Strong T Cell and Antibody Responses with Multiple Routes of Immunization

[0324] circRNA can act as an adjuvant when combined with soluble Ova protein14. To further evaluate the adjuvant capacity of circRNA, mice were immunized with immunogenic circRNA (lacking m6A modification (14)) and Ova protein (hereafter referred as OVAp) and the T cell and antibody responses were measured in the spleen, draining lymph nodes and lungs at Day 7 and Day 30 post-boost (FIG. 19). The magnitude of T cell and antibody responses were compared with three delivery strategies: subcutaneously (s.c), intranasally (i.n.), and intravenously (i.v.). In addition, circRNA was compared to the common vaccine adjuvants AddaVax, as well as Poly(I:C). It was observed that at Day 7 post-boost, subcutaneous injection of circRNA+OVAp induced comparable T cell responses to AddaVax+OVAp in the lungs, spleens and LNs (as measured by the frequency of MHC class I tetramer+CD8 T cells) (FIG. 27a). Intranasal inoculation of circRNA+OVAp induced the highest responses in the lungs at Day 7 post-boost, with the frequencies of tetramer positive cells as high as 40% in some mice (FIG. 19b).

[0325] It was observed that subcutaneous delivery of circRNA+OVAp induced a 2-fold higher frequency of antigen-specific CD8 T cells (˜10%) compared to AddaVax+OVAp (˜5%) at Day 30 post-boost (FIG. 19c), indicating a potentially enhanced memory T cell induction by circRNA compared to AddaVax. In addition, strong lung memory CD8 T cell responses were observed with the intranasal and intravenous delivery methods (FIG. 19c), with the induction of lung resident memory CD8 T cells (TRM) of both CD69+ and CD69+CD103+ subsets (FIG. 27d). To measure the antibody responses following immunization, mice were bled 30 days post-boost. Similar levels of anti-Ova IgG antibodies were observed in serum among all routes of delivery, however, only intranasal and i.v. immunization induced in anti-OVA IgA antibodies in serum (FIG. 27b,c).

[0326] Lastly, to compare circRNA and Poly(I:C) as intranasal adjuvants, mice were immunized with either adjuvant in combination with soluble Ova. circRNA and Poly(J: C) induced comparable frequencies of antigen specific CD8 T cells in the lungs at 30 days post boost (FIG. 17e), including CD69+ and CD69+CD103+ antigen-specific resident memory T cells (FIG. 19d and FIG. 27d). In addition, similar levels of anti-321 Ova IgG and IgA antibodies were induced in serum (FIG. 27f,g). Taken together, the results indicate that circRNA can be used as a potent vaccine adjuvant in many routes of immunization and induce comparable responses to Poly(I:C) and AddaVax. Moreover, mucosal immunization with circRNA as an adjuvant induces potent resident memory CD8 T cell (TRM) responses.

### CircRNA Encoding Antigen Induces Strong T Cell Responses In Vivo.

[0327] To optimize how circRNA encoding an antigen sequence can induce adaptive immune responses in vivo, the immunogenicity of circOVA was compared to soluble Ova protein combined with circRNA (hereafter referred to as circRNA+OVAp). Mice were intranasally immunized with either m6A-modified or unmodified circOVA, and 30 days post-boost lungs were analyzed for antigen-specific T cell responses. We have previously shown that the presence of m6A abrogates circRNA immunity (16), and as expected, the naked delivery of m6A-modified circOVA did not induce any OVA-specific T cell responses (FIG. 28b). For this reason, unmodified circOVA was used for the next experiments. A subset of animals in the unmodified circOVA group did generate potent OVA-specific CD8 T cell responses after naked circRNA delivery, but many other animals did not (FIG. 28b). This phenomenon indicated inefficient expression of naked circOVA when delivered in vivo and demonstrated that a delivery vehicle may be required for optimal immune responses induced by circOVA.

[0328] To deliver circRNAs for in vivo translation, circOVA was complexed with CART. CARTs have been shown to work effectively in mice, have a high encapsulation efficiency, are well tolerated and non-immunogenic (22,26). Three groups of mice were intraperitoneally immunized with either CART alone (vehicle only control), CART-circOVA, and circRNA+OVAp at Days 0 and 21. Antigen-specific CD8 T cell responses were assessed by MHC class I tetramer staining of lung, spleen and blood T cells at Day 7 (7 days post-prime) and Day 42 (21 days post-boost). It was observed that CART-circOVA induced potent CD8 T cell responses in the lungs, spleen (FIG. 20a, c) and blood (FIG. 20c) at 7 days following one immunization. Three weeks after the booster immunization (Day 42), significant levels of CD8 T cell responses could be seen in the CART-circOVA group in spleens and lungs (FIGS. 20b and 20c), whereas circRNA+OVAp (i.p.) did not result in strong CD8 T cell responses at this time point. In addition, KLRG1-CD127+ memory cells represented around 40% of the antigen-specific T cell population in the CART-circOVA group (FIG. 28a,d). Thus, circOVA complexed with CART induces potent T cell responses in mice. Even though circRNA uptake and innate cell activation with and without CART was not significantly different (FIG. 25c), the T cell responses were significantly enhanced with CART, indicating that the events following the circRNA uptake could be differentially influenced by CART delivery.

circRNA Uptake could be Differentially Influenced by CART Delivery.

[0329] To measure the antibody responses following immunization, mice were bled at Days 0, 7, 21 (pre-boost) and 42. It was observed that while circRNA+OVAp induces consistent and significantly higher anti-Ova IgG compared to CART-circOVA, anti-Ova antibodies were still detectable but in limited amounts in the CART-circOVA group (FIG. 20d). The lack of consistent antibody responses might result from a reduced protein secretion after CART-circOVA immunization. It was not possible to detect Ova protein in blood 24 h after immunization. This indicates the immunization strategy leads to a T-cell bias response and further optimization may provide strong antibody responses to circOVA. Taken together, the data indicates that synthetic circular RNAs can encode both the antigen and adjuvant activity required for immunization, and the route, dose, and manner of circRNA delivery impacts the potency, consistency, and memory of the programmed immune response.

### CircRNA Vaccine Induces Antitumor Efficacy.

[0330] Cancer vaccination aims to induce antigen-specific T-cell-based cellular immunity capable of targeting and clearing tumor cells (44). The strong cytotoxic T-cell responses observed systemically in tissue and blood after immunization with circOVA complexed with CART prompted an investigation of circRNA as a cancer vaccine. It was contemplated that that vaccine-induced OVA-specific T cells would eradicate OVA-expressing tumor. Moreover, the anti-tumor response may be systemic and elicited by vaccinating at a site distant from the tumor (i.e., abscopal effect). The antitumor efficacy of the CART-circRNA vaccine was tested in a therapeutic regime. C57BL/6 mice were randomly assigned into two groups: a control group (untreated) and a CART-circOVA (vaccine) group. Syngeneic B16-F10-OVA melanoma cells were inoculated subcutaneously on the backs of all mice. CART-circOVA formulations were injected intraperitoneally 4 and 8 days after tumor cell inoculation (FIG. 29a). The circRNA vaccine group showed a significant tumor growth inhibition compared to the untreated group (FIG. 29b). Bioluminescence imaging confirmed eradication of luciferase labeled cancer cells (FIG. 30 a, b). These results indicate that circRNA immunization serves as an effective cancer immunotherapy to inhibit tumor growth in vivo.

TABLE 8

| | | | RNA | | | | |
|---|---|---|---|---|---|---|---|
| FIG. | circRNA | CDS | modification | IRES | 5′UTR | 3′UTR | Labeling |
| FIG. | circForeign | GFP (out of | none | iCVB3 | none | none | cy3 |
| 15b-d | | frame) | | | | | |
| FIG. | circForeign | GFP (out of | none | iCVB3 | none | none | cy5 |
| 15e | | frame) | | | | | |
| FIG. | circForeign | GFP (out of | none | iCVB3 | none | none | cy5 |
| 16a, b | | frame) | | | | | |
| FIG. | circForeign | GFP (out of | none | iCVB3 | none | none | none |
| 16c | | frame) | | | | | |
| FIG. | circForeign | GFP (out of | none | iCVB3 | none | none | cy5 |
| 16d, e | | frame) | | | | | |
| FIG. | circNanoLuc | Nanoluciferase | 5% m6A | syn1RE S- | 5′ | HBA1 | none |
| 17a | | | | RC25 | PABP | | |
| | | | | (iHRVB3- | spacer | | |
| | | | | based) | | | |
| FIG. | circOVA | Ovalbumin | 5% m6A | synIRE S- | 5′ | HBA1 | none |
| 17b | | | | RC25 | PABP | | |
| | | | | (iHRVB3- | spacer | | |
| | | | | based) | | | |
| FIG. | circOVA | ovalbumin | 5% m6A | synIRE S- | 5′ | HBA1 | none |
| 17c | | | | RC25 | PABP | | |
| | | | | (iHRVB 3- | spacer | | |
| | | | | based) | | | |
| FIG. | circForeign | GFP (Out of | none | iCVB3 | none | none | none |
| 17c | | frame) | | | | | |
| FIG. | circOVA | Ovalbumin | 5% m6A | synIRE S- | 5′ | HBA1 | none |
| 17d-g | | | | RC25 | PABP | | |
| | | | | (iHRVB3- | spacer | | |
| | | | | based) | | | |
| FIG. | circForeign | GFP (out of | none | iCVB3 | none | none | AF488 |
| 18a-e | | frame) | | | | | |
| FIG. | circOVA | Ovalbumin | 5% m6A | syn1RE S- | 5′ | HBA1 | none |
| 19a-d | | | | RC25 | PABP | | |
| | | | | (iHRVB3- | spacer | | |
| | | | | bascd) | | | |
| FIG. | circForeign | GFP (out of | none | iCVB4 | none | none | none |
| 20a-d | | frame) | | | | | |
| FIG. | circOVA | Ovalbumin | 5% 2′-O- | synIRE S- | 5′ | HBA1 | none |
| 20a-d | | | MethylIC | RC25 | PABP | | |
| | | | | (iHRVB3- | spacer | | |
| | | | | based) | | | |
| FIG. | circForeign | GFP (out of | none | iCVB3 | none | none | cy3 |
| 21 a-d | | frame) | | | | | |
| FIG. | circForeign | GFP (out of | none | iCVB3 | none | none | cy5 |
| 21e-f | | frame) | | | | | |
| FIG. | circForeign | GFP (out of | none | iCVB3 | none | none | cy5 |
| 22a-c | | frame) | | | | | |
| FIG. | circForeign | GFP (out of | none | iCVB3 | none | none | none |
| 22d | | frame) | | | | | |
| FIG. | circForeign | GFP (out of | none | iCVB3 | none | none | AF488 |
| 22e | | frame) | | | | | |
| FIG. | circForeign | GFP (out of | none | iCVB3 | none | none | cy5 |
| 22f | | frame) | | | | | |
| FIG. | circNanoLuc | Nanoluciferase | 5% m6A | syn1RES- | 5′ | HBA1 | none |
| 23a | | | | RC25 | PABP | | |
| | | | | (iHRVB 3- | spacer | | |
| | | | | based) | | | |
| FIG. | circOVA | Ovalbumin | 5% m6A | syn1RES- | 5′ | HBA1 | none |
| 23b | | | | RC25 | PABP | | |
| | | | | (iHRVB 3- | spacer | | |
| | | | | based) | | | |
| FIG. | circForeign | GFP (out of | none | iCVB3 | none | none | AF488 |
| 23c | | frame) | | | | | |
| FIG. | circForeign | GFP (out of | none | iCVB3 | none | none | none |
| 24a-c | | frame) | | | | | |
| FIG. | circForeign | GFP (out of | none | iCV83 | none | none | AF488 |
| 25a-c | | frame) | | | | | |
| FIG. | circOVA | Ovalbumin | none | syn1RES- | 5′ | HBA1 | AF488 |
| 26a-c | | | | RC25 | PABP | | |
| | | | | (iHRVB 3- | spacer | | |
| | | | | based) | | | |
| FIG. | circForeign | GFP (out of | none | iCVB3 | none | none | none |
| 27a-f | | frame) | | | | | |
| FIG. | circOVA | Ovalbumin | 5% 2′-O- | syn1RES- | 5′ | HBA1 | none |
| 28a-d | | | MethylIC | RC25 | PABP | | |
| | | | | (iHRVB3- | spacer | | |
| | | | | based) | | | |
| FIG. | circForeign | GFP (out of | none | iCV83 | none | none | none |
| 28a-d | | frame) | | | | | |

TABLE 9

| Primer name | Sequence | SEQ ID NO: |
|---|---|---|
| qRTPCR-mus-RIGI-R | CAG ATC CGA GAC ACT AAA GGG A | 33182 |
| qRTPCR-mus-RIG1-F | TCC TCA TCA GCC TTG CTT TCA | 33183 |
| qRTPCR-mus-MDA5-F | ATG GAC GCA GAT GTT CGT GG | 33184 |
| qRTPCR-mus-MDA5-R | TCC CTT CTC GAA GCA AGT GTC | 33185 |
| qRTPCR-mus-PKR-F | ATG CAC GOA GTA GCC ATT ACG | 33186 |
| qRTPCR-mus-PKR-R | TGA CAA TCC ACC TTG IT TCG T | 33187 |
| qRTPCR-mus-IL1B-F | AAG GGC TGC TTC CAA ACC TTT GAC | 33188 |
| qRTPCR-mus-IL1B-R | ATA CTG CCT GCC TGA AGC TCT TGT | 33189 |
| qRTPCR-mus-TNF-A-F | TCT CAT GCA CCA CCA TCA AGG ACT | 33190 |
| qRTPCR-mus-TNF-A-R | ACC ACT CTC CCT TTG CAG AAC TCA | 33191 |
| qRTPCR-mus-IL6-F | TCCAGTTGCCTTCTTGGGAC | 33192 |
| qRTPCR-mus-1L6-R | GTACTCCAGAAGACCAGAGG | 33193 |
| qRTPCR-mus-TLR2-F | ACAGCAAGGTCTTCCTGGTTCC | 33194 |
| qRTPCR-mus-TLR2-R | GCTCCCTTACAGGCTGAGTTCT | 33195 |
| qRTPCR-mus-B-ACT-F | GAC TAC CTC ATG AAG ATC CTG ACC | 33196 |
| qRTPCR-mus-B-AGT-R | CTC AGT AAC AGT CCG CCT AGA AG | 33197 |

### Example 2 References

[0331] 1. Kristensen, L. S. et al. The biogenesis, biology and characterization of circular RNAs. Nat Rev Genet 1-17 (2019). doi:10.1038/s41576-019-0158-7
[0332] 2. Memczak, S. et al. Circular RNAs are a large class of animal RNAs with regulatory potency. Nature 495, 333-338 (2013).
[0333] 3. Hansen, T. B. et al. Natural RNA circles function as efficient microRNA sponges. Nature 495, 384-388 (2013).
[0334] 4. Ashwal-Fluss, R. et al. circRNA biogenesis competes with pre-mRNA splicing. Molecular Cell 56, 55-66 (2014).
[0335] 5. Huang, A., Zheng, H., Wu, Z., Chen, M. & Huang, Y. Circular RNA-protein interactions: functions, mechanisms, and identification. Theranostics 10, 3503-3517 (2020).
[0336] 6. Yang, Q. et al. A circular RNA promotes tumorigenesis by inducing c-myc nuclear translocation. Cell Death Differ 24, 1609-1620 (2017).
[0337] 7. Pamudurti, N. R. et al. Translation of CircRNAs. Molecular Cell 66, 9-21.e7 (2017).
[0338] 8. Chen, C. K. et al. Structured elements drive extensive circular RNA translation. Molecular Cell 81, 4300-4318.e13 (2021).
[0339] 9. Yang, Y. et al. Extensive translation of circular RNAs driven by N6-methyladenosine. Cell Res. 27, 626-641 (2017).
[0340] 10. Wesselhoeft, R. A., Kowalski, P. S. & Anderson, D. G. Engineering circular RNA for potent and stable translation in eukaryotic cells. Nature Communications 9, 2629 (2018).
[0341] 11. Chen, R. & Wang, S. K. Engineering circular RNA for enhanced protein production. Nature Biotechnology 1-40 (2022).
[0342] 12. Liu, C. X. et al. Structure and Degradation of Circular RNAs Regulate PKR Activation in Innate Immunity. CELL 177, 865-880.e21 (2019).
[0343] 13. Feng, Z. et al. Functions and Potential Applications of Circular RNAs in Cancer Stem Cells. Front Oncol 9, 500 (2019).
[0344] 14. Chen, Y. G. et al. N6-Methyladenosine Modification Controls Circular RNA Immunity. Molecular Cell 76, 96-109.e9 (2019).
[0345] 15. Liu, C. X. & Chen, L. L. Expanded regulation of circular RNA translation. Molecular Cell 81, 4111-4113 (2021).
[0346] 16. Zhang, Z., Yang, T. & Xiao, J. Circular RNAs: Promising Biomarkers for Human Diseases. EBioMedicine 34, 267-274 (2018).
[0347] 17. Lasda, E. & Parker, R. Circular RNAs Co-Precipitate with Extracellular Vesicles: A Possible Mechanism for circRNA Clearance. PLoS ONE 11, e0148407-11 (2016).
[0348] 18. Vausort, M. et al. Myocardial Infarction-Associated Circular RNA Predicting Left Ventricular Dysfunction. J Am Coll Cardiol 68, 1247-1248 (2016).
[0349] 19. Hansen, E. B. et al. The transcriptional landscape and biomarker potential of circular RNAs in prostate cancer. Genome Med 14, 8-16 (2022).
[0350] 20. Qu, L. et al. Circular RNA vaccines against SARS-CoV-2 and emerging variants. CELL 185, 1728-1744.e16 (2022).
[0351] 21. Alinovskaya, L. I., Sedykh, S. E 913., Ivanisenko, N. V., Soboleva, S. E. & Nevinsky, G. A. How human serum albumin recognizes DNA and RNA. Biol Chem 399, 347-360 (2018).
[0352] 22. McKinlay, C. J. et al. Charge-altering releasable transporters (CARTs) for the delivery and release of mRNA in living animals. Proc. Natl. Acad. Sci. U.S.A. 114, E448-E456 (2017).
[0353] 23. Askew, D., Chu, R. S., Krieg, A. M. & Harding, C. V. CpG DNA induces maturation of dendritic cells with distinct effects on nascent and recycling MHC-II antigen-processing mechanisms. J. I. 165, 6889-6895 (2000).
[0354] 24. Wu, X., Xu, F., Liu, J. & Wang, G. Comparative study of dendritic cells matured by using IL-1β, IL-6, TNF-α and prostaglandins E2 for different time span. Exp Ther Med 14, 1389-1394 (2017).
[0355] 25. Cortez, A. & Muxfeldt, E. Monocyte chemoattractant protein-1 and hypertension: An overview. Hipertens Riesgo Vasc 39, 14-23 (2022).
[0356] 26. Haabeth, O. A. W. et al. An mRNA SARS-CoV-2 Vaccine Employing Charge-Altering Releasable Transporters with a TLR-9 Agonist Induces Neutralizing Antibodies and T Cell Memory. ACS Cent Sci 7, 1191-1204 (2021).
[0357] 27. Chen, Y. G. et al. Sensing Self and Foreign Circular RNAs by Intron Identity. Molecular Cell67, 228-238.e5 (2017).
[0358] 28. Liu, J. et al. Targeting macrophage checkpoint inhibitor SIRPα for anticancer therapy. JCI Insight 5, (2020).

[0359] Various embodiments of this invention are described herein, including the best mode known to the inventors for carrying out the invention. Variations of these embodiments may become apparent to those of ordinary skill in the art upon reading the foregoing description. The inventors expect skilled artisans to employ such variations as appropriate, and the inventors intend for the invention to be practiced otherwise than as specifically described herein. Accordingly, this invention includes all modifications and equivalents of the subject matter recited in the claims appended hereto as permitted by applicable law. Moreover, any combination of the above-described elements in all possible variations thereof is encompassed by the invention unless otherwise indicated herein or otherwise clearly contradicted by context.

[0360] All references, including publications, patent applications, and patents, cited herein are hereby incorporated by reference to the same extent as if each reference were individually and specifically indicated to be incorporated by reference and were set forth in its entirety herein.

SEQUENCE APPENDIX

| Description | Sequence | SEQ ID NO: |
|---|---|---|
| iPV1 IRES | ttaaaacagctctggggttgtacccaccccagaggcccacgtggc | 33045 |
| | ggctagtactccggtattgcggtacccttgtacgcctgttttata | |
| | ctcccttcccgtaacttagacgcacaaaaccaagttcaatagaag | |
| | ggggtacaaaccagtaccaccacgaacaagcacttctgtttcccc | |
| | ggtgatgtcgtatagactgcttgcgtggttgaaagcgacggatcc | |
| | gttatccgcttatgtacttcgagaagcccagtaccacctcggaat | |
| | cttcgatgcgttgcgctcagcactcaaccccagagtgtagcttag | |
| | gctgatgagtctggacatccctcaccggtgacggtggtccaggct | |
| | gcgttggcggcctacctatggctaacgccatgggacgctagttgt | |
| | gaacaaggtgtgaagagcctattgagctacataagaatcctccgg | |
| | cccctgaatgcggctaatcccaacctcggagcaggtggtcacaaa | |
| | ccagtgattggcctgtcgtaacgcgcaagtccgtggcggaaccga | |
| | ctactttgggtgtccgtgtttccttttattttattgtggctgctt | |
| | atggtgacaatcacagattgttatcataaagcgaattggattggc | |
| | catccggtgaaagtgagactcattatctatctgtttgctggatcc | |
| | gctccattgagtgtgtttactctaagtacaatttcaacagttatt | |
| | tcaatcagacaattgtatcata | |
| iPV2 IRES | ttaaaacagctctggggttgttcccaccccagaggcccacgtggc | 33046 |
| | ggccagtacactggtatcgcggtacctttgtacgcctgttttata | |
| | ctcccttcccccgtaacttagaagcacaacgtccaagttcaatag | |
| | aagggggtacaaaccagtaccaccacgaacaagcacttctgttcc | |
| | cccggtgaggctgtataggctgtttccacggctaaaagcggctga | |
| | tccgttatccgctcatgtacttcgagaagcctagtatcaccttgg | |
| | aatcttcgatgcgttgcgctcaacactcaaccccagagtgtagct | |
| | taggtcgatgagtctggacgttcctcaccggcgacggtggtccag | |
| | gctgcgttggcggcctacctgtggcccaaagccacaggacgctag | |
| | ttgtgaacaaggtgtgaagagcctattgagctacctgagagtcct | |
| | ccggcccctgaatgcggctaatcctaaccacggagcaggcagtgg | |
| | caatccagcgaccagcctgtcgtaacgcgcaagttcgtggcggaa | |
| | ccgactactttgggtgtccgtgtttccttttatttttacaatggc | |
| | tgcttatggtgacaattattgatagttatcataaagcaaattgga | |
| | ttggccatccggtgagaatttgattattaaattactctcttgttg | |
| | ggattgctcctttgaaatcctgtgcactcacacctattggaatta | |
| | cctcattgttgagatattattaccact | |
| iPV3 IRES | ttaaaacagctctggggttgctcccaccccagaggcccacgtggc | 33047 |
| | ggccagtactctggtattgcggtacctttgtacgcctgttttata | |
| | ctccctccccccgtgcaactttagaagaaatccacaaagttcaat | |
| | agagggggtgcaaaccagcaccaccacgaacaagcacttctgttt | |
| | ccccggtgatgtcgtataagctgtacccacggctgaaggcgacgg | |
| | atccgttatccgcttgagtacttcgagaagcctagtattaccttg | |
| | gaatcttcgacgcgttgcgctcagcactctaccccgagtgtagct | |
| | taggtcgatgagtctgggcacgccccaccggcgacggtggcccag | |
| | gctgcgttggcggcctacccatggctatcaccatgggacgctagt | |
| | tgtgaacaaggtgtgaagagcctattgagctacccaagagtcctc | |
| | cggcccctgaatgcggctaatcctaaccacggagcaagtgtcctc | |
| | aacccaggggatggcttgtcgtaacgcgaaagtctgtggcggaac | |
| | cgactactttgggtgtccgtgtttccttttatttttatgtatggc | |
| | tgcttatggtgacaatcaaaggttgttaccataaagcaatttgga | |
| | ttggccatccggtgagaatcaaacatattatctacctgtttgttg | |
| | ggttttcttcttttacttgaacaatacctctaataataactgcta | |
| | tattgtcaataagacattatcatcaca | |
| iHRV1 IRES | ttaaaactgggtgtgggttgttcccacccacaccacccaatgggt | 33048 |
| | gttgtactctgttattccggtaactttgtacgccagtttttccct | |
| | cccctccccatccttttacgtaacttagaagttttaaatacaaga | |
| | ccaatagtaggcaactctccaggttgtctaaggtcaagcacttct | |
| | gtttccccggttgatgttgatatgctccaacagggcaaaaacaac | |
| | agataccgttatccgcaaagtgcctacacagagcttagtaggatt | |
| | ctgaaagatctttggttggtcgttcagctgcatacccagcagtag | |
| | accttgcagatgaggctggacattccccactggtaacagtggtcc | |
| | agcctgcgtggctgcctgcgcacctctcatgaggtgtgaagccaa | |
| | agatcggacagggtgtgaagagccgcgtgtgctcactttgagtcc | |
| | tccggcccctgaatgcggctaaccttaaacctgcagccatggctc | |
| | ataagccaatgagtttatggtcgtaacgagtaattgcgggatggg | |
| | accgactactttgggtgtccgtgtttcactttttcctttattaat | |
| | tgcttatggtgacaatatatatattgatatatattggcatc | |
| iHRV2 IRES | ttaaaactggatccaggttgttcccacctggatttcccacaggga | 33049 |
| | gtggtactctgttattacggtaactttgtacgccagttttatctc | |
| | ccttcccccatgtaacttagaagtttttcacaaagaccaatagcc | |
| | ggtaatcagccagattactgaaggtcaagcacttctgtttccccg | |
| | gtcaatgttgatatgctccaacagggcaaaaacaactgcgatcgt | |
| | taaccgcaaagcgcctacgcaaagcttagtagcatctttgaaatc | |
| | gtttggctggtcgatccgccatttcccctggtagacctggcagat | |
| | gaggctagaaataccccactggcgacagtgttctagcctgcgtgg | |
| | ctgcctgcacaccctatgggtgtgaagccaaacaatggacaaggt | |
| | gtgaagagccccgtgtgctcgctttgagtcctccggcccctgaat | |
| | gtggctaaccttaaccctgcagctagagcacgtaacccaatgtgt | |
| | atctagtcgtaatgagcaattgcgggatgggaccaactactttgg | |
| | gtgtccgtgtttcactttttcctttatatttgcttatggtgacaa | |
| | tatatacaatatatatattggcacc | |
| iHRV-B3 IRES | ttaaaacagcggatgggtaccccaccatccgacccactgggtgta | 33050 |
| | gtactctggtacttcgtacctttgtacgcctgttcttcccattgt | |
| | acccttcctgaacttccaacccaagtaacgttagaagctcaacat | |
| | ttagtacaacaggaagcaccacatccagtggtgtttagtacaagc | |
| | acttctgtttccccggagcgaggtataggctgtacccactgccaa | |
| | aaacctttaaccgttatccgccaaccaactacgtaaaagctagta | |
| | gtattatgtttttaactaggcgttcgatcaggtggatttcccctc | |
| | cactagtttggtcgatgaggctaggaattccccacgggtgaccgt | |
| | gtcctagcctgcgtggcggccaacccagcttatgctgggacgcct | |
| | ttttatagacatggtgtgaagactcgcatgtgcttggttgtgatt | |
| | cctccggcccctgaatgcggctaaccttaaccctggagccttgtg | |
| | tcacaaaccagtgatgataaggtcgtaatgagcaattccgggacg | |
| | ggaccgactactttgggtgtccgtgtttcttatttttcttattat | |
| | tgtcttatggtcacagcatatatataacatatactgtgatc | |
| iCVA1 IRES | ttaaaacagctctggggttgttcccaccccagaggcccacgtggc | 33051 |
| | ggccagtactctggtattgcggtacctttgtacgcctgttttata | |
| | tcccctccccaagtaactttagaagcaattcacaaagttcaatag | |
| | agggggtacaaaccagtaccaccatgaacaagcacttctgtttcc | |
| | ccggtgaagctgtatagactgttcccacggtcgaaaatggcagat | |
| | ccgttatccgctcacgtacttcgagaagcctagtatcatcttgga | |
| | atcttcgacgcgttgcgctcagcactctaccccgagtgtagctta | |
| | ggccgatgagtctgggcataccccaccggcgacggtggcccaggc | |
| | tgcgttggcggcctacccatggctaatgtcatgggacgctagttg | |
| | tgaacaaggtgtgaagagcctattgagctacttgagagtcctccg | |
| | gcccctgaatgcggctaatcctaaccatggagcaagtgcccacaa | |
| | gccagtgggtggcttgtcgtaatgcgcaagtctatggcggaaccg | |
| | actactttgggtgtccgtgtttccttttattcttattatggctgc | |
| | ttatggtgacaacctaagattgttgtcatatagcttttggattgg | |
| | ccatccggtgatctttgagattaatataccttccttattacttca | |
| | tagtactcatttattcattacactactgtagttaca | |
| iCVA16 IRES | ttaaaacagcctgtgggttgttcccacccacagggcccactgggc | 33052 |
| | gctagcacactgattctacgggatccttgtgcgcctgttttataa | |
| | tccttcccccaagtagcaacttagaagctttgtacaatcacgacc | |
| | agtagtgggcgtggcgcgccagtcacgtcttggtcaagcacttct | |
| | gtatccccggactgagtatcaatagactgctcacgcggttgaagg | |
| | agaaaacgttcgttacccggctaactacttcgagaaacccagtag | |
| | caccgtgaaagttgcggagtgtttcgctcagcacttcccccgtgt | |
| | agatcaggtcgatgagtcactgtaaaccccacgggcgaccgtgac | |
| | agtggctgcgttggcggcctgcccatggggtaacccatgggacgc | |
| | tctaatacagacacggtgtgaagagtctattgagctagttagtag | |
| | tcctccggcccctgaatgcggctaatcctaactgcggagcgcgca | |
| | ccctcaacccagggggcggcgtgtcgtaatgggtaactctgcagc | |
| | ggaaccgactactttgggtgtccgtgtttccttttattccttatt | |
| | ggctgcttatggtgacaattgaaaagttgttaccatatagctatt | |
| | ggattggccatccggtgtctaatagagctattgtttacttattta | |
| | ttggatacgtccctcttaatctcaaagtcattcaaactcttgatt | |
| | atatattgctccttaactgtaagaa | |
| iCVB2 IRES | ttaaaacagcctgtgggttgatcccacccacagggcccactgggc | 33053 |
| | gctagcacactggtattacggtacctttgtgcgcctgttttatct | |
| | acccttgcccaatgcaacatagaagcttagtccaaaaggtcaata | |
| | ggcagcccagtgcaccaactgggtccagaccaagcacttctgtta | |
| | ccccggaccaagtatcagtaggctgctcacgcggtgaaggagaaa | |
| | acgttcgttacccggccaactacttcgagaaacctagtagcacca | |
| | tgaaggttgcgcagtgtttcgctccgcacagccccagtgtagatc | |
| | aggtcgatgagccaccgcattccccacggggtgaccgtggcgggt | |
| | ggctgcgttggcggcctgcccatggggtaacccatgggacgcttc | |
| | aatactgacatggtgtgaagagtctattgagctagttggtagtcc | |
| | tccggcccctgaatgcggctaatcctaactgcggagcgtgcgctt | |
| | gcaacccagtgagtagcacgtcgtaatgggtaactctgcagcgga | |
| | accgactactttgggtgtccgtgtttcctttattccttgtctggc | |
| | tgcttatggtgacaattgagagattgttgccatatagctattgga | |
| | ttggccatccggtatctaacagggcgatcatttacctgtttgttg | |
| | gtttcatacccttgaatcttgaggtttataataccctcactctta | |
| | taataaaactcaatacatcaag | |
| iCVB3 IRES | ttaaaacagcctgtgggttgatcccacccacagggcccattgggc | 33054 |
| | gctagcactctggtatcacggtacctttgtgcgcctgttttatac | |
| | cccctcccccaactgtaacttagaagtaacacacaccgatcaaca | |
| | gtcagcgtggcacaccagccacgttttgatcaagcacttctgtta | |
| | ccccggactgagtatcaatagactgctcacgcggttgaaggagaa | |
| | agcgttcgttatccggccaactacttcgaaaaacctagtaacacc | |
| | gtggaagttgcagagtgtttcgctcagcactaccccagtgtagat | |
| | caggtcgatgagtcaccgcattccccacgggcgaccgtggcggtg | |
| | gctgcgttggcggcctgcccatggggaaacccatgggacgctcta | |
| | atacagacatggtgcgaagagtctattgagctagttggtagtcct | |
| | ccggcccctgaatgcggctaatcctaactgcggagcacacaccct | |
| | caagccagagggcagtgtgtcgtaacgggcaactctgcagcggaa | |
| | ccgactactttgggtgtccgtgtttcattttattcctatactggc | |
| | tgcttatggtgacaattgagagattgttaccatatagctattgga | |
| | ttggccatccggtgaccaatagagctattatatatctctttgttg | |
| | ggtttataccacttagcttgaaagaggttaaaacattacaattca | |
| | ttgttaagttgaatacagcaaa | |
| iEV-A71 IRES | ttaaaacagcctgtgggttgcacccactcacagggcccacgtggc | 33055 |
| | gctagcactctggttctacggaacctttgtgcgcctgttttacgc | |
| | cccttcccccaatttgcaacttagaagcaatacacaacactggtc | |
| | aacagtaggcatggcgcaccagccatgtcttgatcaagcacttct | |
| | gtttccccggaccgagtatcaatagactgctcacgcggttgaagg | |
| | agaaagcgtccgttatccggctaactacttcgagaaacttagtaa | |
| | caccattgaagctgcagagtgtttcgctcggcacttcccccgtgt | |
| | agatcaggtcgatgagtcactgcaatccccacgggtgaccgtggc | |
| | agtggctgcgctggcggcctgcctatggggtaacccataggacgc | |
| | tctaatgcggacatggtgcgaagagtctattgagctagttagtgg | |
| | tcctccggcccctgaatgcggctaatcctaactgcggagcacatg | |
| | ccttcaatccagagggtagtgtgtcgtaatgggcaactctgcagc | |
| | ggaaccgactactttgggtgtccgtgtttccttttattcttatat | |
| | tggctgcttatggtgacaattacagaattgttaccatatagctat | |
| | tggattggccatccggtgtgcaatagagctattatatacctattt | |
| | gttggctttgtgccactaaccttaaaatctataaccaccctcgac | |
| | tttatactaaccctcaatacagtcaaac | |
| iEV-A120 IRES | ttaaaacagcctgtgggttgtacccacccacagggcccactgggc | 33056 |
| | gctagcacactgatttcacggaatccttgtgcgcctgttttacac | |
| | cccctccccccaactcagtaacttagaagttgtaaacacacgtgg | |
| | ccaacagcgggcgtagcgcaccagctatgtcttggtcaagcactt | |
| | ctgtttccccggacagagtatcaataagctgcttgcgcggctgaa | |
| | ggagaaaatgttcgttacccggtcaactacttcgagaaacctagt | |
| | agcatcatgaatgttgcgaggcgtttcgctcagcacttcccccgt | |
| | gtagatcaggtcgatgagtcactgcactccccacgggcgaccgtg | |
| | gcagtggctgcgttggcggcctgcccatggggtgacccatgggac | |
| | gcttcaatacggacatggtgtgaagagtctattgagctagttgat | |
| | aatcctccggcccctgaatgcggctaatcctaactgcggagcaca | |
| | taccctcaacccagggggcggtgtgtcgtaacgggcaactctgca | |
| | gcggaaccgactactttgggtgtccgtgtttccttttatacttat | |
| | actggctgcttatggtgacaattgaagaattgttaccatatagct | |
| | attggattggccatccggtgactaacagagctattatatatttat | |
| | ttgttggatttgttccattaacatacacatctttcagcactttac | |
| | acctcattttacaatacaatacaagaaa | |
| iEV71 IRES | ttaaaacagcctgtgggttgcacccactcacagggcccactgggc | 33057 |
| | gcaagcactctggtacctcggtacctttgtgcgcctgttttacac | |
| | cccccccccagtgaaacttagaagcagcaaaccacgatcaatagc | |
| | gggcataacgctccagttatgtcttgatcaagcacttctgtttcc | |
| | ccggactgagtatcaatagactgctcgcgcggttgaaggagaaaa | |
| | cgttcgttatccggctagctacttcgggaaacctagtaacaccat | |
| | gaaagttgcggagagcttcgttcagcactcccccagtgtagatca | |
| | ggtcgatgagtcaccgcattccccacgggcgaccgtggcggtggc | |
| | tgcgttggcggcctgcccatggggtaacccatggggcgctctaat | |
| | acggacatggtgtgaagagtctactgagctagttagtagtcctcc | |
| | ggcccctgaatgcggctaatcccaactgcggagcacacgcccaca | |
| | agccagcgggtagcgtgtcgtaacgggtaactctgcagcggaacc | |
| | gactactttgggtgtccgtgtttctttttatctttatactggctg | |
| | cttatggtgacaattaaagaattgttaccatatagctattggatt | |
| | ggccatccggtgtgcaacagagcaattgtttacctattcattggt | |
| | ttcgtaccattaaccttgaagtctgtgaccacccttaactacatc | |
| | ttgacccttaacacagctaaac | |
| iEV-B107 IRES | ttaaaacagcctgtgggttgttcccacccgcagggcccactgggc | 33058 |
| | gctagcacactggtatcccggtacccttgtgcgcctgttttatat | |
| | accctcccccttatgtaacttagaagtatgattcaaacggtcgac | |
| | aggcggctcagtgcaccaactgagtcatgaccaagcacttctgtt | |
| | accccggactgagtatcaataagctgttcacacggctgaaggaga | |
| | aaacgttcgttacccggccaattacttcgagaaacctagtaccac | |
| | catgaaggttgcgcagtgtttcgctccacacaaccccagtgtaga | |
| | tcaggtcgatgagtcaccgcattccccacgggcgaccgtggcggt | |
| | ggctgcgttggcggcctgcccatggggcaacccatgggacgcttc | |
| | aatactgacatggtgtgaagagtctattgagctaattggtagtcc | |
| | tccggcccctgaatgcggctaatcccaactgtggagcagatactc | |
| | acaaaccagtgagcggtctgtcgtaacgggcaactccgcagcgga | |
| | accgactactttgggtgtccgtgtttctttttattcttacattgg | |
| | ctgcttatggtgacaattgacaaattgttaccatatagctattgg | |
| | attggccatccggtgacaaacagagctattgtttacttgtttgtt | |
| | ggtttcataccattaaattacaaggtcttagaaactctcaacttt | |
| | attttgacactcaatacagcaaa | |
| iHRV-A9 IRES | ttaaaactggatctgggttgttcccactcagatctcccacgtgga | 33059 |
| | gtagtacactattattacggtaatcttgtacgccagttttataat | |
| | ccccttacccaagtaacttagaagataaacacaaagaccaatagg | |
| | agatgatcatccagatcatcataggtcaagcacttctgtttcccc | |
| | ggtcaaggttgatatgctctaacagggcaaaaacagctgagatcg | |
| | ttatccgcaaagcgcctacgcaaagcctagtaactatctggaagt | |
| | tgcttggttggtcgctccgccatatcccatggtagacctggcaga | |
| | tgaggctagaaattccccactggtgacagtgttctagcctgcgtg | |
| | gctgcctgcacaccctctgggtgtgaaaccaagtaatggacaggg | |
| | tgtgaagagccccgtgtgctcgctttgagtcctccggcccctgaa | |
| | tgtggctaaccttaaccctgcagctagggcacacaatccagtgtg | |
| | tatctagtcgtaatgagcaattgcgggatgg tgggaccaactac | |
| | tttgggtgtccgtgtttcttgtttttcttttatgtttgcttatgg | |
| | tgacaatatatagtaatatattttggcatc | |
| iHRV-A21 IRES | ttaaaactgggtccaggttgttcccacctggatctcctattggga | 33060 |
| | gttgtactctattattccggtaattttgtacgccagttttatctc | |
| | cccttccccaattgcaacttagaagtttatcaatatgaccaatag | |
| | gcggtagttagccaaactaccagaggtcaagcacttctgtttccc | |
| | cggtcaaagttgatatgctccaacagggcaaaaacaactgagatc | |
| | gttatccgcaaagtgcctacgcaaagcctagtaacacctttgaag | |
| | atttatggttggtcgttccgctatttcccatagtagacctggcag | |
| | atgaggctagaaattccccactggcgacagtgttctagcctgcgt | |
| | ggctgcctgcgcaccccttgggtgcgaagccatacattggacaag | |
| | gtgtgaagagccccgtgtgctcactttgagtcctccggcccctga | |
| | atgtggctaaccttaaccctgcagctagtgcatgtaatccaacat | |
| | gttgctagtcgtaatgagcaattgcgggacgggaccaactacttt | |
| | gggtgtccgtgtttcactttttccttttaatattgcttatggtga | |
| | caatatatataaacatatatattgacacc | |
| iHRV-A57 IRES | ttgtttgatgccagttttatctccccccccaattgcaacttagaa | 33061 |
| | gatgtacacaaagaccaataggcagtggtcacccagaccactgaa | |
| | ggtcaagcacttctgtctccccggtcaaagttgatatgctccaac | |
| | agggcaaaaacaacttagatcgttatccgcaaagtgcctacgcaa | |
| | agcttagtaccatctttgagagcctatggttggtcgctccactga | |
| | accccacagtagacctggcagatgaggctagaagacccccactgg | |
| | cgacagtgttctagcctgcgtggctgcctgcacacccttacgggt | |
| | gtgaagccatatgtttgacaaggtgcgaagagccccgtgtgctca | |
| | ctttgagtcctccggcccctgaatgtggctaaccttaaccctgca | |
| | gctagtgcacacaagccagtgtgttgctagtcgtaatgagcaatt | |
| | gcgggatgggaccaactactttgggtgtccgtgtttcacttttta | |
| | cctttattttgcttatggtgacaatatatatagtatatatattgg | |
| | cacc | |
| iHRV-A89 IRES | ttaaaactgggagtgggttgttcccactcactccacccatgcggt | 33062 |
| | gttgtactctgttattacggtaactttgtacgccagtttttccca | |
| | cccttccccataatgtaacttagaagtttgtacaatatgaccaat | |
| | aggtgacaatcatccagactgtcaaaggtcaagcacttctgtttc | |
| | cccggtcaatgaggatatgctttacccaaggcaaaaaccttagag | |
| | atcgttatccccacactgcctacacagagcccagtaccatttttg | |
| | atataattgggttggtcgctccctgcaaacccagcagtagacctg | |
| | gcagatgaggctggacattccccactggcgacagtggtccagcct | |
| | gcgtggctgcctgctcacccttcttgggtgagaagcctaattatt | |
| | gacaaggtgtgaagagccgcgtgtgctcagtgtgcttcctccggc | |
| | ccctgaatgtggctaaccttaaccctgcagccgttgcccataatc | |
| | caatgggtttgcggtcgtaatgcgtaagtgcgggatgggaccaac | |
| | tactttgggtgtccgtgtttcctgtttttcttttgattgcatttt | |
| | atggtgacaatttatagtgtatagattgtcatc | |
| iHRV-A100 | ttaaaactgaatccagattgttcccatctggatttcctacatgga | 33063 |
| IRES | gttgtactctattattccggtaattttgtacgccagttttatcac | |
| | cccttcccccgtaacttagaagtttgaaacaaaagaccaatagga | |
| | ggtaactatccaagttactataggtcaagcacttctgtttccccg | |
| | gtcaaagttgatatgctccaccagggcaaaaacaattgagatcgt | |
| | tatccgcaaagtgcctacgcaaagcctagtagtatcttgaaaagc | |
| | atgtggttggttgctccgctgtaccccacagtaaacctggcagat | |
| | gaggctagaagttccccactggtgacagtgttctagcctgcgtgg | |
| | ctgcctgcgcactctttgagtgcgaagccatatgtttgacaaggt | |
| | gtgaagagccccgtgtgctcactttgagtcctccggcccctgaat | |
| | gtggctaaccttaaccctgcagctagtgcatgcaatccagcatgt | |
| | ggctagtcgtaatgagcaattgcgggatgggaccaactactttgg | |
| | gtgtccgtgtttcacttttttccttttataattgcttatggtgac | |
| | aatatatagtgatatatattgacacc | |
| iHRV-B4 IRES | ttaaaacagcggatgggtttcccaccatccgacccactgggtgta | 33064 |
| | gtgctctggtattttgtacctttgcacgcctgtttcccatttgta | |
| | cccttccttaatctccttcccccgtaacgttagaagttttggaat | |
| | tttaaagtacaataggaagcgccacatccagtggtgttgcgtaca | |
| | aatacttctgtttacccggagcgaggtataggttgtacccacggc | |
| | caaaagcctttaaccgttatccgccaatcaactacgtaacggcta | |
| | gtatcatcttgcttttgatttggtgttcgatcaggtggtatcccc | |
| | cactagtctggtcgatgaggctaggaattccccacgggcgaccgt | |
| | gtcctagcctgcgtggcggccagcccagcttttgctgggacgcct | |
| | tttcaaagacatggtgtgaagacctgcatgtgcttggttgtgagt | |
| | cctccggcccctgaatgcggctaaccttaaccctggagcccagca | |
| | gcataatccaatgttgtttgggtcgtaatgagcaattccgggacg | |
| | ggaccgactactttgggtgtccgtgtttccttttattcttacatt | |
| | gtcttatggtcacagcatatatattatatatactgtgatc | |
| iHRV-B17 IRES | tttaaacagcggatgggttccccaccatccgacccactgggtgta | 33065 |
| | gtactctggtattttgtacctttgtacgcctgtttctcccctacc | |
| | tcccaacctaaacaatcctggtaacttagaagacttaaatcatcg | |
| | tacaataggtgctgtcacatccagtgacggctagtacaagcactt | |
| | ctgtttccccggagcggagtataaatggccaccgctgtcaaaagc | |
| | tcttaaccgttatccgccaattaactacgcaacggctagtaacat | |
| | cttgttatttttagggcgttcgatcaggtgagtaaacccctcact | |
| | agtctggtcgatgaggctgagaattccccacgggcgaccgtgtct | |
| | cagcctgcgtggcggccagcccagctaatgctgggacgccttaat | |
| | tgtgacatggtgtgaagacccacgtgtgcttaattgtgagtcctc | |
| | cggcccctgaatgcggctaacctaaaccctggagccttgagacac | |
| | aatccagtgttggcaaggtcgtaatgagtaattccgggacgggac | |
| | cgactactttgggtgtccgtgtttccttttattttcaaattgttc | |
| | ttatggtcacaatataagtaatatattgtgatc | |
| iHRV-B26 IRES | ttaaaacagcgggtgggtatcccaccacccgacccactgggtgtt | 33066 |
| | gtacactggtattttgtacctttgtatgcctgtttgcacctcccc | |
| | accccttccaattacccttacccgaattttattatgcggtaacat | |
| | tagaagaagtgaacacagtgcaataggacgtatcacatccagtga | |
| | tataaagcacaagcaattcttgttccccggagctggatatagact | |
| | gctaacgtggttgaaggtccttaaccgttatccgccaaccaacta | |
| | cgagacggctagtaatatcatgtttgtctttgagcgttcgatcag | |
| | gtgaattccccattcactagtttggtcgatgaggctgagaactcc | |
| | ccacaggtgactgtgtctcagcctgcgtggcggccaacccagcca | |
| | cggctgggacgcccactgatagacatggtgtgaagacccaattgt | |
| | gcttggttgtgactcctccggcccctgaatgcggctaacctcaac | |
| | cccggagccttgtagtgtaagccaacacatacaaggtcgtaatgg | |
| | gcaactctgggacgggaccgactactttgggtgtccgtgtttcct | |
| | ttatttttatcttttgtgtcttatggttacaagtattgattgtaa | |
| | cc | |
| iHRV-B37 IRES | tttaaacagcggatgggtatcccaccatccgacccactgggtgta | 33067 |
| | gtactctggtattttgtacctttgtacgcctgttgttcctaatgt | |
| | acccaccctaaaacttcctacccaagtaacgttagaagtttcatc | |
| | aacaagtacaataggaagcatcacatccagtggtgttttgtacaa | |
| | gcacttctgtttccccggagcgaggtataggctgtacccactgcc | |
| | gaaagcctttaaccgttatccgccaaccaactacgtaaaagctag | |
| | tatcatcatgttttaaaataggcgttcgatcaggtggatcccccc | |
| | tccactagtttggtcgatgaggctaggaactccccacgggtgacc | |
| | gtgtcctagcctgcgtggcggccaacccagcttctgctgggacgc | |
| | ctttttatggacatggtgtgaagactcgcatgtgcttggttgtga | |
| | ctcctccggcccctgaatgcggctaaccttaaccccggagccctg | |
| | tgttgcaatccagtaacattagggtcgtaatgagcaatttcggga | |
| | cgggaccgactactttgggtgtccgtgtttctcatttttcttatt | |
| | attgtcttatggtcacagcatatatataacgtatatactgtgatc | |
| iHRV-B92 IRES | ttaaaacagcggatgggtatcccaccatccggcccactgggtgta | 33068 |
| | gtactctggtacattgtacctttgtacgcctgttttccccctctt | |
| | gtacccgcccttcaagctccttgcccaagtaacgttagaagtttg | |
| | aacattggtacaataggaagcatcacatccagtggtgtactgtac | |
| | aaacacttctgttgccccggagcgaggtatagatggtccccaccg | |
| | tcaaaagcctttaaccgttatccgccaatcaactacgtaatggct | |
| | agtagcaccttggatttaagttggcgttcgatcaggtggtaaccc | |
| | ccactagtttggtcgatgaggctaggaattccccacgggtgaccg | |
| | tgtcctagcctgcgtggcggccaacccagcatccgctgggacgcc | |
| | aatttaatgacatggtgtgaagacctgcatgtgcttgattgtgag | |
| | tcctccggcccctgaatgcggctaaccctaaccccggagccttgc | |
| | agcacaatccagtgttgttaaggtcgtaatgagcaattctgggat | |
| | gggaccgactactttgggtgtccgtgtttcttatttttcttgaat | |
| | ttttcttatggtcacagcatatatacattatatactgtgatc | |
| iHRV-C3 IRES | ttaaagctggatcatggttgttcccaccatgattacccacgcggt | 33069 |
| | gcagtggtcttgtattacggtacatttccataccagttttataca | |
| | ccccaccccgaaactcatagaagtttgtacacaatgaccaatagg | |
| | tggtggccatccaggtcgctaatggtcaagcacttctgtttcccc | |
| | ggcacccttgtatacgcttcacccgaggcgaaaaatgaggttgtc | |
| | gttatccgcaaagtgcctacgaaaagcctagtaacactttgaaaa | |
| | cccatggttggtcgctcagctgtttacccaacagtagacctggca | |
| | gatgaggctagacattccccaccagcgatggtggtctagcctgcg | |
| | tggctgcctgcacaccctgccgggtgtgaagccagaaagtggaca | |
| | aggtgtgaagagcctattgtgctcactttgagtcctccggcccct | |
| | gaatgtggctaaccctaaccccgtagctgttgcatgtaacccaac | |
| | atgtatgcagtcgtaatgggcaactatgggatgggaccaactact | |
| | ttgggtgtccgtgtttcctgttttactttttcattgcttatggtg | |
| | acaattgtatctgatacacttgttacc | |
| iHRV-C11 IRES | ttaaaactggatacaggttgttcccacctgtatcacccaagtggt | 33070 |
| | gtggtgctcttgtatttcggtacgtttgcacgccagtttgctacc | |
| | ccttcccttttacgtaacttagaagtttacacaaagaccaatagg | |
| | cggtggtaaatccataccactaacggtcaaatacttctgtttccc | |
| | cggcatgcgaggaataggctccaaaagggctgaagccactagtgt | |
| | cgttatccgcattggtactacgcaaagcctagtattaccttgaaa | |
| | atttcttggctggtcgctccaccagataccccactggtagacctg | |
| | gcagatgaggcaggacttaccccactggcgacagtggtcctgcct | |
| | gcgtggctgcctgcacaccccttacggggtgtgaagcccagaaac | |
| | agacaaggtgtgaagagccccgtgtgctactagtgagtcctccgg | |
| | cccctgaatgcggctaatcttaccccacagctgttgcacgcaaac | |
| | cagcgtgtatgcagtcgtaatgagcaattgtgggatggaaccgac | |
| | tactttgggtgtccgtgtttctttttattcctattatttgcttat | |
| | ggtgacaatattgatattatcagtgttgtcatc | |
| iHRV-C54 IRES | ttaaaacagctgtgtggttgttcccaccaccaggcacactgtgcg | 33071 |
| | ttgtacactgggattccggtcactttgtacgcctgtttgctatcc | |
| | cccccaacttatgtaatttagaagatgtacacaacgcccattagg | |
| | atgcggccaaaccaggtccgcttagggcaagcacttctgtttccc | |
| | cgggtgtgtgaatagactctaacagggttgaagctgtagcactcg | |
| | ttatccgcgcaactactacgcgaatgttagtagcatcctgtgttg | |
| | catttgggatttcgctccgcagaaaaccccatctgtagattaggg | |
| | caatgaggctacacataccccactggcgacagtggtgtagcctgc | |
| | gtggtgccctacccaggccttcttggcctgggattccacttacaa | |
| | gacagggtgtgaaggcactagtgtgctagttgtgagtcctccggc | |
| | ccctgaatgcggctaatcttaaccccgtagcccccgcaagtaaac | |
| | caacttgtaggtggtcgtaatgagtaattacgggatggaaccgac | |
| | tactttgggtgtccgtgtttccttttattctttatatttgcatcc | |
| | tatggttacaacataagtaatc | |
| iCVB1 IRES | ttaaaacagcctgtgggttgttcccacccacaggcccattggggc | 33072 |
| | tagcactctggtatcacggtacctttgtgcgcctgttttacatcc | |
| | cctccccaaattgtaatttagaagtttcacacaccgatcattagc | |
| | aagcgtggcacaccagccatgttttgatcaagcacttctgttacc | |
| | ccggactgagtatcaatagaccgctaacgcggttgaaggagaaaa | |
| | cgttcgttacccggccaactacttcgaaaaacctagtaacaccat | |
| | ggaagttgcggagtgtttcgctcagcactaccccagtgtagatca | |
| | ggtcgatgagtcaccgcgttccccacgggcgaccgtggcggtggc | |
| | tgcgttggcggcctgcctacggggaaacccgtaggacgctctaat | |
| | acagacatggtgcgaagagtctattgagctagttggtaatcctcc | |
| | ggcccctgaatgcggctaatcctaactgcggagcacataccctca | |
| | aaccagggggcagtgtgtcgtaacgggcaactctgcagcggaacc | |
| | gactactttgggtgtccgtgtttcattttattcctatactggctg | |
| | cttatggtgacaattgacaggttgttaccatatagttattggatt | |
| | ggccatccggtgactaacagagcaattatatatctctttgttggg | |
| | tttataccacttagcttgaaagaggttaaaacactacatctcatc | |
| | attaaactaaatacaacaaa | |
| iCVB5 IRES | ttaaaacagcctgtgggttgttcccacccgcagggcccactgggc | 33073 |
| | gccagcactctggtatcacggtacctttgtgcgcctgttttaaaa | |
| | ccctctccccaatttgaaacttagaagcaatacacctcgatcaat | |
| | agtaggcatgacacgccagccatgtcttgatcaagcacttctgtt | |
| | tccccggactgagtatcaataaactgcttgcgcggtcgaaggaga | |
| | aaacgtccgttacccgactaactacttcgagaaacccagtaacac | |
| | catggaaattgcggagtgtttcactcagcacattcccagtgtaga | |
| | tcaggtcgatgagtcaccgcattccccacgggtgaccgtggcggt | |
| | ggctgcgctggcggcctgcccatggggcaacccatgggacgcttc | |
| | aatatggacatggtgtgaagagtctattgagctagttagtagtcc | |
| | tccggcccctgaatgcggctaatcctaactgcggagcacgtgcct | |
| | ccattccagggggtggcgtgtcgtaacgggcaactctgcagcgga | |
| | accgactactttgggtgtccgtgtttcttttaattttatactggc | |
| | tgcttatggtgacaattgaaagattgttgccatatagctattgga | |
| | ttggccatccggtatccaacagagcaattgtgtacctttttgttg | |
| | gatttgtaccacttaccagaacaagttttcatacactgtgttaca | |
| | ttattagactaaacacagaaaa | |
| iEchoV1 IRES | ttaaaacagcctgtgggttgttcccacccacagggcccactgggc | 33074 |
| | gttagcacactggtatcacggtacctttgtgcgcctgttttatac | |
| | tcccccccctaaggaaactttagaagcaaagcaattgtgatcaat | |
| | agtgggtatggcacaccagtcatatcttgatcaagcacttctgtt | |
| | cccccggacttagtaccaatagactgctcaagcggttgaagggga | |
| | aaacgttcgttatccggccaactacttcgagaaacctagtagcac | |
| | catgaaagttgcggagtgtttcgctcagcacttcccccgtgtaga | |
| | tcaggctgatgagtcaccgtattccccacgggcgaccgtgacggt | |
| | ggctgcgttggcggcctgcccatggggtaacccatgggacgctct | |
| | aaaacagacacggtgcgaagagtctattgagctagttggtagtcc | |
| | tccggcccctgaatgcggccaatcctaactgcggagcacatactc | |
| | ccaatccagggagcagtgtgtcgtaatgggtaactctgcagcgga | |
| | accgactactttgggtgtccgtgtttccttttattctcacattga | |
| | ctgcttatggtgacaattgaaagattgttaccatatagctattgg | |
| | attggtcatccggtgagcaatagagctattgtttatcaatttgtt | |
| | ggatttgtaccactcaacttttctgttttgagaacactcaactac | |
| | atcttactgctaaacacatcaaa | |
| iEchoV-E11 | ttaaaacagcctgtgggttgtacccacccacagggcccactgggc | 33075 |
| IRES | gctagcacactggtatcacggtacctttgtgcgcctgttttatac | |
| | ccccttcccgcaaccgcaaatttagaagcaaagctaacccgatcg | |
| | atagcggatgcgcatgccagccgcattttgatcaagtacttctgt | |
| | ttccccggaccgagtatcaatagactgctcacgcggttgaaggag | |
| | aaaacgtccgttacccgaccaactacttcgagaaacctagtaaca | |
| | tcatgaatgttgcagggcgtttcgatcagcacgaccctggtgtag | |
| | atcaggctgatgagtcaccgcattccccacgggtgaccgtggcgg | |
| | tggctgcgttggcggcctgcctatggggtgacccataggacgctc | |
| | taatacggacatggtgcgaagagtctattgagctagttggtagtc | |
| | ctccggcccctgaatgcggttaatcctaactgcggacgacatacc | |
| | cctaatccaaggggcagtgtgtcgtaacgggcaactctgcagcgg | |
| | aaccgactactttgggtgtccgtgtttccttttatttttatactg | |
| | gctgcttatggtgacaatctcagagttgttaccatatagctattg | |
| | gattggccatccggtgagcaacagagctgtcatttatcagtttgt | |
| | tggctttatacctctaaatcacacggttttttttttttggaacgc | |
| | ttgtattcatcttaaccctcaataaggcaaa | |
| iEchoV-E15 | ttaaaacagcctgtgggttgtacccacccacagggcccactgggc | 33076 |
| IRES | gctagcactctggtattacggtacccttgtgcgcctgttttatat | |
| | accccgccccaagcaaacgctagatgtaacgcacttatgatcaat | |
| | agcaggcgtggcactccagccacgttatgatcaagcacttctgtc | |
| | tccccggaccgagtatcaatagactgctcacgcggtcgaaggaga | |
| | aaacgttcgttacccgaccagctacttcgagaaacctagtaactc | |
| | catggaggttgcagagtgtttcgttcagcacttcccccgtgtaga | |
| | tcaggctgatgagtcaccgcgttcctcacgggcgaccgtggcggt | |
| | ggctgcgttggcggcctgcctatgggtatacccataggacgctct | |
| | aatactgacatggtgcgaagagtctattgagctagttggtagtcc | |
| | tccggcccctgaatgcggctaatcctaactgcggagcacataccc | |
| | ccaacccagggggcagtgtgtcgtaacgggtaactctgcagcgga | |
| | accgactactttgggtgtccgtgtttccttttattcttacattgg | |
| | ctgcttatggtgacaattgagagattgttaccatatagctattgg | |
| | attggccatccagtgactaacagagctattatttacctttttgtt | |
| | ggcttcgtatcacttggtttaaaagaggttagtactttatattgc | |
| | attatattactaaacacgagaaa | |
| iCVA20 IRES | ttaaaacagctctggggttgtacccaccccagaggcccacgtggc | 33077 |
| | ggctagtactccggtattacggtacccttgtacgcctgttttata | |
| | ctccctccctcgtaacttagaagcacaaaaccaagttcaatagaa | |
| | gggggtgcaaaccagtaccaccacgaacaagcatttctgtttccc | |
| | cggtgatgttgtatagactgcccgcgcggttgaaagcaacggatc | |
| | cgttacccgctcaagtacttcgagaagcctagtattaccttggaa | |
| | tcttcgatgcgttgcgttcagcactcgaccctggagtgtagctta | |
| | ggctgatgagtctggacgtccctcaccggtgacggtggtccaggc | |
| | tgcgttggcggcctacctatggctaacgccataggacgctagttg | |
| | tgaacaaggtgtgaagagcctattgagctacttgagagtcctccg | |
| | gcccctgaatgcggctaatcctaaccatggagcaggcggtcacag | |
| | accagtgactagcttgtcgtaatgcgcaagtctatggcggaaccg | |
| | actactttgggtgtccgtgtttccttttatttttattatggctgc | |
| | ttatggtgacaatcattgattgttatcataaagcgaattggattg | |
| | gccatccggtgaaagcgagacttactatttacttacttgttggac | |
| | ttaccacacttaatacatttattctaggtgtcacttgtatagcaa | |
| | ttagaatcaaacagttgcatcata | |
| iEV-D94 IRES | ttaaaacagcctgtgggttgttcccaccccagaggcccacgtggc | 33078 |
| | ggccagtactctggtatcacggtacctttgtacgcctgttttata | |
| | tccccttcccccgcaacttagaagaaaacaaatcaagttcactag | |
| | gagggggtacaaaccagtaccaccacgaacaagcacttctgtttc | |
| | cccggtgatgtcgtatagactgtaaccacggttgaaaacgattga | |
| | tccgttatccgctcttgtacttcgaaaagcccagtatcaccttgg | |
| | aatcttcgatgcgttgcgctcagcactcaaccccagagtgtagct | |
| | taggtcgatgagtctggacactcctcaccggcgacggtggtccag | |
| | gctgcgttggcggcctacctgtggtccaaagccacaggacgctag | |
| | ttgtgaacaaggtgtgaagagcctattgagctacaagagaatcct | |
| | ccggcccctgaatgcggctaatcctaaccacggagcaagggtaca | |
| | caaaccagtgtatatcttgtcgtaacgcgcaagtctgtggcggaa | |
| | ccgactactttgggtgtccgtgtttccttttgtttttatcatggc | |
| | tgcttatggtgacaatctaagattgttatcatatagctgttggat | |
| | tggccatccggtaatttattgagatttgagcatttgcttgtttct | |
| | tcaacaatttcacctattcattgcatttcagcagtcaaa | |
| iSimianEV-A | gagtgttcccacccaacaggcccactgggtgttgtactctggtat | 33079 |
| IRES | tacggtacctttgtacgcctattttatttcccccccctttttgaa | |
| | acttagaagttaataataaacacgctcactaggtgcactacatcc | |
| | agtagtgtaatgagcaagcacttctgtctyccccgggagggatat | |
| | atggtacgctgtgcaaacggcggaaattaatcctaccgttaaccg | |
| | cccacctactccgagaagcctagtacctaattggatttatcaatg | |
| | gagttgcgctcagcaggtgaccctgacctgccagctccggctgat | |
| | ggacctgggctttccccacaggcgactgtggcccaggtcgcgtgg | |
| | cggccggcccacccccctgggtgggacgccttgataatgacaagg | |
| | tgggaagagcctattgggctagctggtttcctccggcctcctgaa | |
| | tgcggctaaccttaaccccagagcatatggtagcaacccagctac | |
| | tagtatgtcataatgcgtaagtctgggatgggaccgactactttg | |
| | gagagtccgtgtttctattgtttctttaatcaatcttatggtgac | |
| | aatttatagtgccctgagtattgattggttgttgcttttgacaat | |
| | tattgagacatcacatagacata | |
| iSimianA5 IRES | ttaaaatagcctgtgggttgctcccacccacagggcccaagtggc | 33080 |
| | gtagtacttggtattccggtacctttgtacacctatttacaaacc | |
| | ctaccccttgtaaccttagaagcaattatttaaccgctcactagg | |
| | gggtgtgctatccaagcacatcaagagcaagcacttctgtctccc | |
| | cgggaggggctaatggtacgctgtgcccacggcggaaatgagccc | |
| | taccgttaaccggcagtctacttcgggaagcccagtaactacatt | |
| | gaaactttgaggcgttacactcagcacataaccccaatgtgtagt | |
| | tctggtcgatgagccttggcatcccccacaggcgactgtggccaa | |
| | ggctgcgttggcggccagcctgcggaccaaaagtccgtaggacgc | |
| | ctaattgtggacatggtgtgaagagcctactgagctagactgtag | |
| | tcctccggcccctgaatgcggctaatcctaaccctggagcatccg | |
| | cgtgcaacccagtacgtagggtgtcgtaatgcgtaagtctgggat | |
| | ggaaccgactactttgggtgtccgtgtttcttgtttttcatactg | |
| | ggtcgcttatggttacaactaattgttgtaatcattggcagtgcg | |
| | cgctgaccacgcgattattgatatttccatttgttggatactcca | |
| | atagtgtcaactcatatacacaacttttaccactgatcaagataa | |
| | aa | |
| iSimian V4 IRES | ttaaaatagctgctgggttgttcccatccagcaggcccactgggc | 33081 |
| | gtgatactctggtattgcggtacctttgtatgcctattttacctc | |
| | ccttccccctgaaacttagaagaaagaaacaaacacgctcactag | |
| | gtacactgcatccagcagtgtaatgagcaagcacttctgtttccc | |
| | cggaagggatatatggtacgctgtgcaaacggcggaaattaatcc | |
| | taccgttaaccgcccatctactccgagaagcctagtacctaattg | |
| | aacttatcaatggagttgcgctcagcaggtgaccctgacctgcca | |
| | gctccggctgatggacctgggcatcccccacaggcgactgtggcc | |
| | caggtcgcgtggcggccggcccactcttttgagtgggacgccttg | |
| | ataatgacaaggtgggaagagcctattgggctagctggtttcctc | |
| | cggcctcctgaatgcggctaaccctaaccccggagcatatggtgg | |
| | caacccagccactggtatgtcgtaacgcgtaagtctgggatggga | |
| | ccgactactttggagagtccgtgtttccattattttctttattga | |
| | atcttatggtgacaaattgggagttactcgggtgacgattgatta | |
| | ttacttctgaaaacgtagagatatagaatcaacaca | |
| iSwine Vesciular | ttaaaacagcctgtgggttgttcccacccacagggcccactgggc | 33082 |
| IRES | gctagcacactggtatcacggtacctttgtgcgcctgtttgactt | |
| | accctccccaaacgcaacttagaagcacaacttaaatggtcaata | |
| | ggcggctcagtatgccaactgagtctcgatcaagcacttctgtta | |
| | ccccggactgagtaccaataggctgctcacgcggctgaaggggaa | |
| | accgttcgttacccgactaactacttcgagaaacctagtaccacc | |
| | atgaaagttgcgcagcgtttcgctccgcacaaccccagtgtagat | |
| | caggtcgatgagtcaccgcaaaccccacgggcgaccgtggcggtg | |
| | gctgcgctggcggcctgcccatggggcaactcatgggacgcttca | |
| | atactgacatggtgcgaagagtctattgagctagttggtagtcct | |
| | ccggcccctgaatgcggctaatcctaactgcggagcagataccca | |
| | cgcaccagtgggcagtctgtcgtaatgggcaactctgcagcggaa | |
| | ccgactactttgggtgtccgtgtttccttttgttcttatactggc | |
| | tacttatggtgacaattgagagattgtaaccatattgctattgga | |
| | ttggccacccggcgacgaatagaacagttgcttacctgtttgtta | |
| | gtctcgtatcactgaactacaaatccttaaacaccctttaatttc | |
| | gtcataacgctcaatacgttaaa | |
| iHRV-B3 SC2220 | ttaaaacagcggatgggtatcccaccatccgacccactgggtgta | 33083 |
| IRES | gtactctggtactttgtacctttgtacgcctgttcttcccattgt | |
| | acccttcctaaacttccaacccaagtaacgttagaagctcaactt | |
| | tcagtacaataggaagcaccacatccagtggtgtttagtacaagc | |
| | acttctgtttccccggagcgaggtataggctgtacccactgccaa | |
| | aagcctttaaccgttatccgccaaccaactacgtaaaagctagta | |
| | acatcatgtttgtaaatgggtgttcgatcaggtggatttcccctc | |
| | cactagtttggtcgatgaggctaggaattccccacgggtgaccgt | |
| | gtcctagcctgcgtggggccaacccagcgtatgctgggacgcctt | |
| | tttatagacatggtgcgaagactcgcatgtgcttggttgtgagtc | |
| | ctccggcccctgaatgcggctaaccctaaccctggagccttgagt | |
| | cacaatccagtgatggcaaggtcgtaatgagcaattccgggatgg | |
| | gaccgactactttgggtgtccgtgtttctcatttttcttattatt | |
| | gtcttatggtcacagcatatatagtatatatactgtgatc | |
| iHRV-B5 IRES | ttaaaacagcgggtgggtatcccaccacccgacccactgggtgtg | 33084 |
| | gtacactggtactttgtacctttgtatgcctgtttgcttccactc | |
| | ccctttacctaatattcttccccaagtatattttgcggtaacgtt | |
| | agaagaagcaaagttagtgcaataggatgtatcacaaccagtggt | |
| | ataaagcacaagcaattcttgttccccggagctggatatagactg | |
| | ctaacgtggtcaaaagtccttaaccgttatccgccagctaactgc | |
| | gagaagactagtaacaccatgtttgtttttagacgttcgatcagg | |
| | tgaataccccattcactagtttggtcgatgaggctgagaataccc | |
| | cacaggtaactgtgtctcagcctgcgtggcggccaacccgactca | |
| | tgtcgggacgcctactaatagacatggtgtgaagatcctattgcg | |
| | cttagttgtgagtcctccggcccctgaatgcggctaaccctaacc | |
| | ccggagccttgtggtgtaaaccaacatttgcaaggtcgtaatgag | |
| | taattctgggatgggaccgactactttgggtgtccgtgtttcctt | |
| | tatttttattgtgtgtgtcttatggttacaaatacaatttgtaat | |
| | c | |
| iHRV-B6 IRES | ttaatacagcggatgggtatcccaccatccgacccactgggtgta | 33085 |
| | gtactctggtattatgtacctttgtacgcctgttcttcccattgt | |
| | acccttcccaaatttccaacccaagtaacgttagaagtttgacat | |
| | taaagtacaataggaggcaccacatccagtggtgttttgtacaag | |
| | cacttctgtttccccggagcgaggtataggctgtacccactgcca | |
| | aaaacctttaaccgttacccgccagccaactacgtaaaagctagt | |
| | aacatcttgtttgtaacttggcgttcgatcaggtggattccccct | |
| | ccactagtttggtcgatgaggctaggaactccccacgggtgaccg | |
| | tgtcctagcctgcgtggcggccaacccagctcttgctgggacgcc | |
| | cttttatagacatggtgtgaagactcgcatgtgcttggttgtgat | |
| | tcctccggcccctgaatgcggctaaccctaaccctggagccttgt | |
| | gttacaaaccagtaatattaaggtcgtaatgagcaattccgggac | |
| | gggaccgactactttgggtgtccgtgtttctcatttttcttatta | |
| | ttgtcttatggtcacagcatatttgttaaatatactgtgatc | |
| iHRV-B14 IRES | tactctggtattatgtacctttgtacgcctgtttcttccctacaa | 33086 |
| | ccccttcctaaaactcccacccatgaaacgttagaagcttgacat | |
| | ttaagtacaataggtggcaccacatccagtggtgtctacgtacaa | |
| | gcacttctgtttccccggagcgaggtataggctgtacccactgcc | |
| | aaaagcctttaaccgttatccgccaaccaactacgtaacagctag | |
| | tatcatcttgttcttcactggacgttcgatcaggtggattccccc | |
| | tccactagtttggtcgatgaggctaggagctccccacgggtgacc | |
| | gtgtcctagcctgcgtggcggccaacccagctcatgctgggacgc | |
| | ccttttaaggacatggtgtgaagactcgcatgtgcttggttgtga | |
| | gtcctccggcccctgaatgcggctaaccttaaccctggagcctta | |
| | tgccacgaaccagtggttgtaaggtcgtaacgagcaattccggga | |
| | tgggaccgactactttgggtgtccgtgtttcctatttttctttat | |
| | attgtcttatggtcacagcatatatataagtatatactgtgatc | |
| iHRV-B27 IRES | ttaaaacagcggatgggtatcccaccatccgacccacagggtgta | 33087 |
| | gtgctctggtattttgtacctttgcacgcctgtttccccattgta | |
| | cccctccttaaatttcctccccaagtaacgttagaagtttaagga | |
| | aacaaatgtacaataggaagcatcacatccagtggtgttatgtac | |
| | aagcacttctgtttccccggagcgaggtataagtggtacccaccg | |
| | ccgaaagcctttaaccgttatccgccaatcaactacgtaatggct | |
| | agtattaccatgtttgtgacttggtgttcgatcaggtggttcccc | |
| | ccactagtttggtcgatgaggctaggaactccccacgggtgaccg | |
| | tgtcctagcctgcgtggcggccaacccagcttttgctgggacgcc | |
| | tttttacagacatggtgtgaagacctgcatgtgcttgattgtgag | |
| | tcctccggcccctgaatgcggctaaccttaaccccggagccttgc | |
| | aacataatccaatgttgttgaggtcgtaatgagtaattctgggat | |
| | gggaccgactactttgggtgtccgtgtttccttttattctttata | |
| | ttgtcttatggtcacagcatatatagcatatatactgtgatc | |
| iHRV-B35 IRES | ttaaaacagcggatgggttccctaccatccgacccactgggtgta | 33088 |
| | gtactctggtactctgtacctttgtacgcctgtttatccactacc | |
| | cttttcctaaattttccacccgtgtaaccttagaagcaaacaaat | |
| | tgtacaatagggtgcatcacaaccagtgatgtacagtacaagcac | |
| | ttctgtttccccggagcggggtatagacggtcaccactgtcaaaa | |
| | gcccttaaccgttacccgccaaccaactacgtaacggctagtaac | |
| | accatgaatttgtcttgacgttcgatcaggtggtaaccccccact | |
| | agtttggtcgatgaggctgagaactccccacgggtaaccgtgtct | |
| | cagcctgcgtggcggccaacccagcttctgctgggacgccaattc | |
| | attgacatggtgtgaagacctgcatgtgcttggttgtgattcctc | |
| | cggcccctgaatgcggctaaccctaaccccggagccacgcggcat | |
| | aatccaatgtcgtatgggtcgtaatgagtaattctgggatgggac | |
| | cgactactttgggtgtccgtgtttcctgtttttccaaattattct | |
| | tatggtcacagcatataaatagatatatactgtgatc | |
| iHRV-B42 IRES | ttaaaacagcgggtgggtatcccaccacccgacccactgggtgtg | 33089 |
| | gtacactggtactttgtacctttgtatgcctgtttgcatcccctt | |
| | ccctttacctaacatccctccccaagttatattttgcggtaacgt | |
| | tagaagaagtgaacAtagtgcaacaggaagtatcaccaccagtga | |
| | tataacgcacaagcaattcttgttccccggagctggatatagact | |
| | gctaacgtggttgaaagtccttaaccgttatccgccaATCaactg | |
| | cgaaaagactagtaacatcatgcacatttctaggtgttcgatcag | |
| | gtgaaaaccccattcactagtttggtcgatgaggctgagagtacc | |
| | ccacaggcgactgtgtctcagcctgcgtggcggccaacccgactt | |
| | atgtcgggacgcctattaatagacatggtgtgaagatcctattgc | |
| | gcttagctgtgagtcctccggcccctgaatgcggctaaccttaac | |
| | cccggagtcttgtgatgtaagccaacatttgcaaggtcgtaatga | |
| | gtaattctgggatgggaccgactactttgggtgtccgtgtttcct | |
| | ttattcttatcatttgtgtttcatggttacaagcattgtttgtaa | |
| | tc | |
| iHRV-B48 IRES | ttaaaacagcggatgggtatcccaccatccgacccactgggtgta | 33090 |
| | gtactctggtactctgtacctttgtacgcctgtttctcctcaacc | |
| | ctcccctacccgttatatatctcagtaacttagaagaATtcatta | |
| | ccgcacaatagggaccgttgtaaccagcaacggtcagtgcaagca | |
| | cttctgtttccccggagcggagtatagacggccactgctgtcaaa | |
| | agctcttaaccgttacccgccagtATactacacaacagctagtaa | |
| | catcttgttgttcttagggcgttcgatcaggtgagtttaccccct | |
| | cactagtctggtcgatgaggctgagaaatccccacgggtgaccgt | |
| | gtctcagcctgcgtggcggccagcccagcttatgctgggacgcct | |
| | taagtatgacatggtgtgaagactcgcgtgtgcttagctgtgagt | |
| | cctccggcccctgaatgcggctaacctaaaccccggagccttgag | |
| | gcacaatccagtgcccgcgaggtcgtaacgagaaattctgggacg | |
| | ggaccgactactttgggtgtccgtgtttccttttatctttttgat | |
| | gttcttatggttacaatatataaagtatattgtaatc | |
| iHRV-B52 IRES | ttaaaacagcggatgggtatcccaccatccgacccactgggtgta | 33091 |
| | gtactctggtattatgtacctttgtacgcctgtttctccccccca | |
| | ttacccctccccacatatcccagtaacttagaagaattaaattat | |
| | cgcacaataggagctattacaaccagtaatagttagtgcaagtac | |
| | ttctgtttccccggagcggagtatagatggccaccgctgtcaaaa | |
| | gctcttaaccgttatccgccagtATactacgtaacggctagtaac | |
| | atcttgttgtgcttaaggtgttcgatcaggtgaagagacaccccc | |
| | ttcactagtctggtcgatgaggctgagaaatccccacgggcgacc | |
| | gtgtctcagcctgcgtggcggccagcccagcttatgctgggacgc | |
| | cttaagtatgacatggtgtgaagacccgcatgtgcttaactgtga | |
| | gtcctccggcccctgaatgcggctaaccttaaccctggagccttg | |
| | gggtacaatccagtgctaacaaggtcgtaacgagcaattccggga | |
| | cgggaccgactactttgggtgtccgtgtttccttttatttcatta | |
| | ttgttcttatggttacaatatatagagtatattgtaatc | |
| iHRV-B69 IRES | ttaaaacagcggatgggtatcccaccatccgacccactgggtgta | 33092 |
| | gtactctggtactttgtacctttgtacgcctgtttctccctccct | |
| | tcccaacctaaacaatccttgtaacttagaaggtttcgattatcg | |
| | cacaatagggactattgcaaccagcaatagtcagtgcaagcactt | |
| | ctgtttccccggagcggagtgtagatggccaccgctgtcaaaagc | |
| | tcttaaccgttatccgccagtATactacgcaacggctagtagtgc | |
| | cttgttgcttttatggcgttcgatcaggcgagatttaccccctcg | |
| | ctagtctggtcgatgaggctgagaattccccacgggcgaccgtgt | |
| | ctcagcctgcgtggcggccagcccagcctttgctgggacgccttg | |
| | attgcgacatggtgtgaagacccgcgtgtgcttaactgtgagtcc | |
| | tccggcccctgaatgcggctaacctaaaccctggagccttgaaac | |
| | acaacccagtgttcgcaaggtcgtaacgagcaattccgggacggg | |
| | accgactactttgggtgtccgtgtttcctttattctttcaattgt | |
| | tcttatggtcacaatataagtgttatattgtgatc | |
| iHRV-B70 IRES | ttaaaacagctgatgggttccccaccatccgacccaatgggtgta | 33093 |
| | gtactctggtattctgtacctttgtacgcctgtttctccccaccc | |
| | ccccgtcctaaataatcccagtaacttagaagatttgaattatcg | |
| | tacaataggtgctgtcacatccagtgatggctagtacaagcactt | |
| | ctgtttccccggagcggagtatagatggccaccgctgtcaaaagc | |
| | tcttaaccgttatccgccaattaactacgcaacggttagtaacat | |
| | cttgtcatttttgaggcgttcgatcaggtgagtacacccctcact | |
| | agtctggtcgatgaggctgagaattccccacgggcgaccgtgtct | |
| | cagcctgcgtggcggccagcccagcttatgctgggacgccttaat | |
| | tgtgacatggtgcgaagacccacgtgtgcttaattgtgagtcctc | |
| | cggcccccgaatgcggctaacctaaaccccggagccttgagacac | |
| | aatccagtgttagcaaggtcgtaacgagcaattctgggacgggac | |
| | cgactactttgggtgtccgtgtttcctgttattctcaaattgttc | |
| | ttatggtcacaatataagtaatatatatattgtgatc | |
| iHRV-B72 IRES | ttaaaacagcggatgggttctcccaccatccgacccactgggtgt | 33094 |
| | agtactctggtatgatgtacctttgtacgcctgtttattcccaaa | |
| | cccccacccgttattcgcccaacccctgtaacgttagaagtttgg | |
| | aacttaattgtacaatagggagcaccatatccaatggtgtaacgt | |
| | acaagcacttctgtttccccggagcgaggtataggtggtacccac | |
| | tgccgaaagcctttaaccgtcatccgccaatcaactacgtaacag | |
| | ctagtaacatcttgttgttgattggacgttcgatcaggtggttca | |
| | ccccccactagtttggtcgatgaggctgggaatcccccacgggtg | |
| | accgtgtcccagcctgcgtggcggccaacccagcttatgctggga | |
| | cgccctttcaatgacatggtgtgaagactcgcatgtgcttgattg | |
| | tgagtccgccggcccctgaatgcggctaaccctaaccctggagcc | |
| | ttgcaccacaatccagtggtgtctgggtcgtaatgagtaattctg | |
| | ggatgggaccgactactttgggtgtccgtgtttctcatttttctt | |
| | ttaattgtcttatggtcacagcatatagtattatatactgtgatc | |
| iHRV-B79 IRES | ttaaaacagcggacgggtatcccaccatccggctcactgagcgta | 33095 |
| | gtactctggtattgtgtacctttgtacgcctgttttccccaaatc | |
| | ccctaccctttatatctcctaccccgtaacgtaagaagttttcaa | |
| | acagtacaataggaagcaccacatccagtggtgttatgtacaagc | |
| | acttctgtttccccggagcgaggtataggtggtcaccaccgccaa | |
| | aagcctttaaccgttacccgccaaccaactacgtaatggctagta | |
| | acatcattgatttagattggcgttcgatcaggtggtatcccccca | |
| | ctagtttggtcgatgaggctaggaataccccacgggtgaccgtgt | |
| | cctagcctgcgtggcggccaacccagcatacgctgggacgccagt | |
| | ttactgacatggtgcgaagacttgcatgtgcttggttgagagtcc | |
| | tccggcccctgaatgcggctaaccttaaccccggagcctcgcagc | |
| | ataatccaatgttgtagaggtcgtaacgagtaattctgggatggg | |
| | accgactactttgggtgtccgtgtttcctgtttttctttaaaatg | |
| | tcttatggtcacagcatatatactgtatatactgtgatc | |
| iHRV-B83 IRES | gtacaataggttgcactacatccagtggtgtttcgtacaagcact | 33096 |
| | tctgtttccccggagcggggtatagacggtacccactgtcaaaag | |
| | cccttaaccgttatccgccaatcaactacgtaatggctagtaaca | |
| | tcatgaaggtgagttgacgttcgatcaggtggtaacccccactag | |
| | tttggtcgatgaggctaggaatcccccacgggtaaccgtgtccta | |
| | gcctgcgtggcggccaacccagcgtttgctgggacgccaattcac | |
| | tgacatggtgcgaatacttgcatgtgcttgattgtgattcctccg | |
| | gcccctgaatgcggctaaccttaaccccggagccttgcagcataa | |
| | accaatgttgtggaggtcgtaatgagcaattctgggatgggaccg | |
| | actactttgggtgtccgtgtttcctgtttttctcaaattgtctta | |
| | tggtcacagcatatatattgtatatactgtgatc | |
| iHRV-B84 IRES | ttaaaacagcggatgggtatcccaccatccggcccactgggcgta | 33097 |
| | gtacactggtattctgtacctttgtacgcctgtttgccgcccctc | |
| | ccccttttattaccacatttgtggtcgctgcaacgttagaagatt | |
| | ttaaagtagtgcaataggaagcatcacaaccagtggtgttatgca | |
| | caaacacttctgtttccccggagcgaggtatagacggtccccact | |
| | gtcaaaagcctttaaccgttatccgccaaccaactacgagacagc | |
| | tagtaatgccctgttctcctgcaaggcgttcgatcagacagattt | |
| | cccctctgttagtctggtcgatgaggctagaagtaccccacaggt | |
| | aactgtgttctagcctgcgtggcggccagcccagcttctgctggg | |
| | acgcctttcaagagacatggtgtgaagactcaattgtgcttggtt | |
| | gtgagtcctccggcccctgaatgcggctaaccttaaacccggTAc | |
| | catgctatgcaaaccagcatagttatggtcgtaatgggcaactct | |
| | gggatgggaccgactactttgggtgtccgtgtttccatttttact | |
| | ttttgtgtcatttatggttacaattaagttgtaacc | |
| iHRV-B86 IRES | ttaaaacagcggatgggtaccctaccatccgacccactgggtgta | 33098 |
| | gtacactggtacattgtacctttgtacgcctgtttctccctattg | |
| | taccttccctcacaatcctaacccctgtaacgttagaagatgtgc | |
| | aactcgtgcaataggagatactgcaaccagtggtatcaagcacaa | |
| | gaacttctgtttcctcggagcggagtatagatggtccccaccgtc | |
| | aaaagctcttaaccgttatccgccaatcaactacgtgacgactgg | |
| | tagca Tcattttgacactttgacgttcgatcaggtaggcttacc | |
| | ccacctactagtttggccgatgaggctgggagtccctcacaggta | |
| | actgtgtcccagcctgcgtggcggccaacccagcaattgctggga | |
| | cgccaatttgttgacatggtgtgaagatcttaatgtgcttggttg | |
| | tgagtcctccggcccctgaatgcggctaaccttaaccccggagcc | |
| | ttgtgtcacaagccagtgacattaaggtcgtaatgagtaatttcg | |
| | ggatgggaccgactactttgggtgtccgtgtttcctgtttttctt | |
| | tatgattgtcttatggtcacagcatatagtaattatatactgtga | |
| | tc | |
| iHRV-B91 IRES | ttaaaacagcggatgggtttcccaccatccgacccactgggtgta | 33099 |
| | gtactctggtacattgtacctttgtacgcctgtttctcccctccc | |
| | tcccaacctatacaatcccggcaacttagaagatttgaactattg | |
| | tacaataggcgctgtcacatccagtggcggctagtacaagcactt | |
| | ctgtttccccggagcggagtatagatggccaccgctgtcaaaagc | |
| | tcttaaccgttatccgccaattaactacgcaacggctagtaatat | |
| | catgtaacttttagggtgttcgatcaggtgagtgtacccctcact | |
| | agtctggtcgatgaggctgagaattccccacgggcgaccgtgtct | |
| | cagcctgcgtggcggccagcccagcttatgctgggacgccttaat | |
| | tgtgacatggtgtgaagacccacgtgtgcttaattgtgagtcctc | |
| | cggcccctgaatgcggctaacctaaaccctggagccttgaaacac | |
| | aatccagtgttagcaaggtcgtaatgagtaattccgggacgggac | |
| | cgactactttgggtgtccgtgtttccttttatttttaagttgttc | |
| | ttatggtcacaatataagtaatatatattgtgatc | |
| iHRV-B93 IRES | ttaaaacagtggatgggtttcctaccatccgacccactgggtgta | 33100 |
| | gtgctctggtatattgtacctttgcacgcctgttttcccattgta | |
| | cccttccttaaattcctccccatgtaacgttagaagtttaagaac | |
| | ataaatgtacaataggaagcatcacatccagtggtgtatggtaca | |
| | agcacttctgtttatccggagcgaggtataagcggtacccactgc | |
| | tgaaagcctttaaccgtATaccgccaatcaactacgtaacggcta | |
| | gtattaccttgtttgcaatctggcgttcgatcaggtggttccccc | |
| | cactagtttggtcgatgaggctaggagttccccacgggcgaccgt | |
| | gtcctagcctgcgtggcggccaacccagcatttgctgggacgcct | |
| | ttttgtagacatggtgtgaagacctgcatgtgcttgattgtgagt | |
| | cctccggcccctgaatgcggctaaccttaaccccggagccttgtg | |
| | acataatccaatgtcattaaggtcgtaatgagcaattctgggacg | |
| | ggaccgactactttgggtgtccgtgtttctctttattctttacat | |
| | tgtcttatggtcacagcatatataatacatatatactgtgatc | |
| iHRV-B97 IRES | ttaaaacagcggatgggtttcccaccatccgacccactgggtgta | 33101 |
| | gtgctctggtattttgtacctttgcacgcctgtttcccctttgta | |
| | cccatcctgaatttcctccctctgcaacgttagaagtttgtgaaa | |
| | ttaaaagtacaataggaagcatcacatccagtggtgttcagtaca | |
| | agcactcctgtttccccggagcgaggtataggttgtacccacgac | |
| | cgaaagcctttaaccgttatccgccaatcaactacataacggcta | |
| | gtatcatcatgtttttgatctggcgttcgatcaggtggtttcccc | |
| | cactagtctggtcgatgaggctaggatttccccacgggcgaccgt | |
| | gtcctagcctgcgtggcggccagcccagcttatgctgggacgcct | |
| | ttttaaagacatggtgtgaagacctgcatgtgcttgattgtgagt | |
| | cctccggcccctgaatgcggctaaccttaaccctggagcccgaca | |
| | gcataatccaatgttgtttgggtcgtaatgagcaattccgggatg | |
| | ggaccgactactttgggtgtccgtgtttctttttattcttatatt | |
| | gtcttatggtcacagcatatatagtatatatactgtgatc | |
| iHRV-B99 IRES | ttaaaacagcgggtgggtatcccaccacccgacccactgggtgta | 33102 |
| | gtacactggtattttgtacctttgtatgcctgtttgccatccctc | |
| | cctctcctcttacccttacccttattttgcggtaactttagaagt | |
| | ttgtaaatcacgcgcaatagggtataccacatccagtggtatgaa | |
| | gcacaagcaattcttgttccccggagctggatataaactgctaac | |
| | gtggttgaaagtccttaaccgttatccgccagtTAactgcgagaa | |
| | gactagtaactccatgtttgtttttaagcgttcgatcaggtggat | |
| | accccattcactagtttggtcgatgaggctgggaatcccccacag | |
| | gtaactgtgtctcagcctgcgtggcggccaacccagcttttgctg | |
| | ggacgcttactgacagacatggtgtgaagatcctattgcgcttaa | |
| | ctgtgagtcctccggcccctgaatgcggctaacctcaaccccgga | |
| | gccttgtggtgtaaaccaacactcgcaaggtcgtaacgagtaatt | |
| | ctgggacgggaccgactactttgggtgtccgtgtttcctttattt | |
| | cttattgattgtctcctatggttacaaatttactgtaatc | |
| iHRVB_SC0739 | ttaaaacagcgggtgggtatcccaccacccgacccactgggtgtg | 33103 |
| IRES | gtacactggtactttgtacctttgtatgcctgtttgcatcccttt | |
| | cccctcgcctaacatccttccccaaagtatattttgcggtaacgt | |
| | tagaagaagtgaactcagtgcaacaggaagtatcaccaccagtga | |
| | tataatgcacaagcaattcttgttccccggagctggatatagact | |
| | gctaacgtggttgaaagtccttaaccgttatccgccagctaactg | |
| | cgagaagactagtaacatcatgtacatttctagacgttcgatcag | |
| | gtgaataccccattcactagtttggtcgatgaggctgagagttcc | |
| | ccacaggtgactgtgtctcagcctgcgtggcggccaacccgactt | |
| | atgtcgggacgcctattaatggacatggtgcgaagatcctattgc | |
| | gcttagctgtgagtcctccggcccctgaatgcggctaaccttaac | |
| | cccggagccttgtggtgcaaaccagcatttgcaaggtcgtaatga | |
| | gcaattctgggatgggaccgactactttgggtgtccgtgtttcct | |
| | ttattcttattatttgtgtttcatggttacaagcatagtttgtaa | |
| | tc | |
| iHRVB_G001-19 | TTAAAACAGCGGatgggtttcccaccatccgacccactgggtgta | 33104 |
| IRES | gtgctctggtattttgtacccttgcacgcctgtttcccatttgta | |
| | cccttccttaatttcctacccctgtaacattagaagttttggaat | |
| | tttacggtacaataggaagcgccacatccagtggtgttgtgtaca | |
| | agcacttctgtttacccggagcgaggtataggttgtacccacggc | |
| | caaaaaccttcaaccgttatccgccaaccaactacgtaacggcta | |
| | gtatcatcttgtatttgacttggcgttcgatcaggtggtatcccc | |
| | cactagtctggtcgatgaggctaggaattccccacgggcgaccgt | |
| | gtcctagcctgcgtggcggccagcccagctttagctgggacgcct | |
| | tttcaaagacatggtgtgaagacctgcatgtgcttggttgtgagt | |
| | cctccggcccctgaatgcggctaaccttaaccccggagcccagtg | |
| | acataatccaatgttatttgggtcgtaatgagtaattccgggatg | |
| | ggaccgactactttgggtgtccgtgtttccttttattctttatat | |
| | tgtcttatggtcacagcatatatagtatatatactgtgatc | |
| iHRVB_R93 | ttaaaacagcggatgggttctcccaccatccgacccactgggtgt | 33105 |
| IRES | agtactctggtattatgtacctttgtacgcctgtttattcccaaa | |
| | ccccctcccgttacatttccaacccctgtaacgttagaagtttgg | |
| | aacttaacagtacaataggaggcaccatatccaatggtgtaatgt | |
| | acgagcacttctgtttccccggagcgaggtataggtggtacccac | |
| | cgctgaaagcctttaaccgttatccgccaatcaactacgtaacag | |
| | ctagtagcattttgttgttgactggacgttcgatcaggtggttta | |
| | cccccccactagtttggtcgatgaggctggaaattccccacgggt | |
| | gaccgtgttccagcctgcgtggcggccaacccagctcatgctggg | |
| | acgccctttcaatgacatggtgtgaagactcgcatgtgcttgatt | |
| | gtgaatcctccggcccctgaatgcggctaaccctaaccccggagc | |
| | cttgcatcacaatccagtgatgttagggtcgtaatgagtaattct | |
| | gggatgggaccgactactttgggtgtccgtgtttctcatttttct | |
| | ttgaattgtcttatggtcacagcatatagtaatatatactgtgat | |
| | c | |
| iHRVB_BCH214 | ttaaaacagcgggtgggtatcccaccacccgacccactgggtgtg | 33106 |
| IRES | gtacactggtactttgtacctttgtatgcctgtttgcatcccttt | |
| | tcccttcacctaacatcctcccccaaagtatattttgcggtaacg | |
| | ttagaagaagtgaactcagtgcaacaggaagtatcaccaccagtg | |
| | atataacgcacaagcaattcttgttccccggagctggatatagac | |
| | tgctaacgtggtcaaaagtccttaaccgttatccgccagctaact | |
| | gcgagaagactagtaacatcatgcacatttctagacgttcgatca | |
| | ggtgaataccccattcactagtttggtcgatgaggctgagagttc | |
| | cccacaggtgactgtgtctcagcctgcgtggcggccaacccgact | |
| | tatgtcgggacgcctattaatggacatggtgtgaagatcctattg | |
| | cgcttagctgtgagtcctccggcccctgaatgcggctaaccttaa | |
| | ccccggagccttgtggtgcaaaccagcatttgcaaggtcgtaatg | |
| | agcaattctgggatgggaccgactactttgggtgtccgtgtttcc | |
| | tttattcttattatttgtgtttcatggttacaagcatagtttgta | |
| | atc | |
| iHRVB_3039 | ttaaaacagcggatgggtatcccaccatccgacccactgggtgta | 33107 |
| IRES | gtactctggtattatgtacctttgtacgcctgtttctccctccct | |
| | accaccccgccccacgtatcccgtaacttagaagaattgaacaat | |
| | cgcacaataggagctattacaaccagtaatagttggtgcaagcac | |
| | ttctgtttccccggagcggagtatagacggccaccgctgtcaaaa | |
| | gctcttaaccgttacccgccagCtaactacgtaacggctagtaac | |
| | atcttgtcgtgcttagggtgttcgatcaggtgaagaaaaaccccc | |
| | ttcactagtctggtcgatgaggctgagaagtccccacgggtaacc | |
| | gtgtctcagcctgcgtggcggccagcccagcatatgctgggacgc | |
| | cttaagtatgacatggtgtgaagacccgcatgtgcttagctgtga | |
| | gtcctccggcccctgaatgcggctaacctaaaccctggagccttg | |
| | gagcacaagccagtgcttgcaaggtcgtaatgagcaattccggga | |
| | cgggaccgactactttgggtgtccgtgtttccttttatctcatta | |
| | ttgttcttatggttacaatatatagagtatattgtaatc | |
| iEV-B69 IRES | ttaaaacagcctgtgggttgtacccacccacagggcccactgggc | 33108 |
| | gctagcacactggtatcacggtacctttgtgcgcctgttttatac | |
| | cccctaccccaactttaaacttagaagcaaagcaaacccgatcaa | |
| | tagcagatgtagcaagccagttgcatcttgatcaagtacttctgt | |
| | ctccccggactgagtatcaatagactgctcacgcggttgaaggag | |
| | aaaacgttcgttacccgaccaactacttcgagaaacctagtaaca | |
| | ccatgaaagtagcagggtgtttcgatcagcacaaccccagtgtag | |
| | atcaggctgatgagtcaccgcatcccccacgggcgaccgtggcgg | |
| | tggctgcgctggcggcctgcccatggggcaacccatgggacgctc | |
| | taatatggacatggtgtgaagagtctattgagctagttggtagtc | |
| | ctccggcccctgaatgcggctaatcctaactgcggagcacatacc | |
| | ccaaagccaaggggcagtgtgtcgtaacgggcaactctgcagcgg | |
| | aaccgactactttgggtgtccgtgtttccttttattctcaaactg | |
| | gctgcttatggtgacaatctcagagttgttaccatatagctattg | |
| | gattggccatccggtgagcaacagagcaattgtctaccaatttgt | |
| | tggatttattccactcaatctagcggttttcagaacattgaatta | |
| | tattctaaccctcaacaagacgaa | |
| iEV-B73 IRES | ttaaaacagcctgtgggttgtacccacccacagggcccactgggc | 33109 |
| | gctagcacactggtatcacggtacctttgtgcgcctgttttatac | |
| | cccctaccccaactttaaacttagaagcaaagcaaacccgatcaa | |
| | tagcagatgtagcaagccagttgcatcttgatcaagtacttctgt | |
| | ctccccggactgagtatcaatagactgctcacgcggttgaaggag | |
| | aaaacgttcgttacccgaccaactacttcgagaaacctagtaaca | |
| | ccatgaaagtagcagggtgtttcgatcagcacaaccccagtgtag | |
| | atcaggctgatgagtcaccgcatcccccacgggcgaccgtggcgg | |
| | tggctgcgctggcggcctgcccatggggcaacccatgggacgctc | |
| | taatatggacatggtgtgaagagtctattgagctagttggtagtc | |
| | ctccggcccctgaatgcggctaatcctaactgcggagcacatacc | |
| | ccaaagccaaggggcagtgtgtcgtaacgggcaactctgcagcgg | |
| | aaccgactactttgggtgtccgtgtttccttttattctcaaactg | |
| | gctgcttatggtgacaatctcagagttgttaccatatagctattg | |
| | gattggccatccggtgagcaacagagcaattgtctaccaatttgt | |
| | tggatttattccactcaatctagcggttttcagaacattgaatta | |
| | tattctaaccctcaacaagacgaa | |
| iEV-B74 IRES | ttaaaacagcctgtgggttgttcccactcacagggcccactgggc | 33110 |
| | gctagcacactggtatcacggtacccttgtgcgcctgttttattc | |
| | accccccccaaatgtaacttagaagcataacccaaatggtcaata | |
| | gacagcccagtacaccagctgggtttcggccaagtacttctgtta | |
| | ccccggaccgagtatcaataggctgctcacgcggctgaaggagaa | |
| | aacgttcgttatccggccaattacttcgagaaacctagtaacacc | |
| | atgaaagttgcgcagtgtttcgctccgcacaaccccagtgtagat | |
| | caggtcgatgagtcaccgcgttccccacgggcgaccgtggcggtg | |
| | gctgcgttggcggcctgcccatggggcaacccatgggacgcttca | |
| | atactgacatggtgcgaagagtctattgagctaattggtagtcct | |
| | ccggcccctgaatgcggctaatcctaactgcggagcagataccca | |
| | catgccagtgggcggtctgtcgtaacgggcaactccgcagcggaa | |
| | ccgactactttgggtgtccgtgtttccttttattcttaatctggc | |
| | tgcttatggtgacaattgaaagattgttgccatatagctattgga | |
| | ttggccatccggtgacaaacagggcgattatttatttgtttgttg | |
| | gttttgttccattaaactatagagttttgaatactctagaattta | |
| | ttataacactcaacacaacaaa | |
| iEV-B75 IRES | tttaaaacagtcctgtgggttgttacccacccacagggcccactg | 33111 |
| | ggcgccagcacactggtatcacggtacctttgtgcgcctgtttta | |
| | tatacccttcccctactaagtaacttagaagcaattaaacaaaga | |
| | ccaacagtaagcacagcgcaccagctgtgtttcggtcaagcactt | |
| | ctgttaccccggactgagtatcaataggctactcacgtggctgaa | |
| | ggagaaaacgttcgttacccgaccaattacttcgagaagcctagt | |
| | aacaccatggaggttgcgcggcgtttcgctccacacaaccccagt | |
| | gcagatcaggtcgatgagccaccgcattccccacgggcgaccgtg | |
| | gcggtggctgcgttggcggcctgcccatggggcaacccatgggac | |
| | gcttcaatactgacatggtgcgaagagtctattgagctaattggt | |
| | agtcctccggcccctgaatgcggctaatcccaactgcggagcaga | |
| | tacccacgcgccagtgggcagtctgtcgtaatgggcaactctgca | |
| | gcggaaccgactactttgggtgtccgtgtttcctttattcttata | |
| | ctggctgcttatggtgacaattgagagattgttaccatatagcta | |
| | ttggattggccatccggtgacgagcagagctattatttacctatt | |
| | tgttggttttataccattgaactataaagttttaaaaaccttaaa | |
| | cttcatcttagtactcaatacagcaaa | |
| iEV-B77 IRES | ttaaaacagcctgtgggttgtacccacccacagggcccattgggc | 33112 |
| | gctagcacactggtattccggtacccttgtgcgcctgttttatct | |
| | acccttccctactgcaacttagaagttaaacagtcacggtcgata | |
| | ggcggttcagtaaaccaactggatcttgaccaagcacttctgtta | |
| | ccccggactgagtatcaataagctgcttacgtggctgaaggagaa | |
| | aacgttcgttacccggccaattacttcgagaaacctagtaccacc | |
| | atgaaggttgcgcagcgtttcgctccgcacaaccccagtgtagat | |
| | caggtcgatgagtcaccgcactcctcacgggcgaccgtggcggtg | |
| | gctgcgctggcggcctgcccatggggcaacccatgggacgcttca | |
| | atactgacatggtgcgaagagtctattgagctaattggtaatcct | |
| | ccggcccctgaatgcggctaatcccaactgcggagcaggtaccca | |
| | cacaccagtgggcagcctgtcgtaacgggcaactctgcagcggaa | |
| | ccgactactttgggtgtccgtgtttccttttattcctatactggc | |
| | tgcttatggtgacaattgaaagattgttaccatatagctattgga | |
| | ttggccatccagtgacaaacagagcaattgtctatctatttgtcg | |
| | gttttgtaccaataaatttcaaagtcctaaaaaccctcaatttca | |
| | tattgttacttaacacaacaag | |
| iEV-B79 IRES | ttaaaacagcctgtgggttgtacccacccacagggcccattgggc | 33113 |
| | gctagcacactggtatcacggtacccttgtgcgcctgttttatcc | |
| | gcccctccccattgtaacttagaagataactaaacacggtcgtta | |
| | ggtggctcagtacgccaactgagtcttgaccaagcacttctgtta | |
| | ccccggactgagtatcaataggctgctcacgcggctgaaggagaa | |
| | aacgttcgttatccggccaattacttcgagaaacctagtaccacc | |
| | atggaggttgcgcagtgtttcgctccgcacaaccccagtgtagat | |
| | caggccgatgagtcaccgcattccccacgggcgaccgtggcggtg | |
| | gctgcgctggcggcccgcccatgggtaacccatgggacgcttcaa | |
| | tactgacatggtgtgaagagtctattgagctaattggtagtcctc | |
| | cggcccctgaatgcggctaatcccaactgcggagcagatacccac | |
| | acaccagtgggcagtctgtcgtaacgggcaactctgcagcggaac | |
| | cgactactttgggtgtccgtgtttccttttattccaatactggct | |
| | gcttatggtgacaattgaaagattgttaccatatagctattggat | |
| | tggccatccggtgacaaacagagcgattgtttacctatttgtagg | |
| | tttcataccattgaattttaaagttttaagaacccttaactttat | |
| | attagcacttaacacaacaaa | |
| iEV-B80 IRES | ttaaaacagcctgtgggttgatcccacccacagggcccactgggc | 33114 |
| | gtcagcactctggtatcacggtacctttgtgcgcctgttttatac | |
| | tccctccccccaaccgtaacttagaagcagcactaactgatcaat | |
| | agccagcgcggcatgccagccacgcttcgatcaagcacttctgtt | |
| | accccggactgagtatcaatagactgctcacgcggttgaaggaga | |
| | aaacgttcgtcatccggccaactacttcgagaaacctagtaacac | |
| | catggaagttgcggagtgtttcgctcagcactaccccagtgtaga | |
| | tcaggtcgatgagtcaccgcattccccacaggcgactgtggcggt | |
| | ggctgcgttggcggcctgcccatggggaaacccatgggacgctct | |
| | tatatagacatggtgcgaagagtctattgagctagttggtagtcc | |
| | tccggcccctgaatgcggctaatcctaactgcggagcatacaccc | |
| | tcaaaccagagggcagtgtgtcgtaatgggcaactctgcagcgga | |
| | accgactactttgggtgtccgtgtttcactttatttctaaattgg | |
| | ctgcttatggtgacaattgagagattgttaccatatagctattgg | |
| | attggccatccggtgaccaatagagctattatatatctctttgtt | |
| | gggttcataccacttagcttgaaagaggttaaaactctgcattac | |
| | attatactattgaattccgcaaa | |
| iEV-B81 IRES | ttaaaacagcctgtgggttgtacccacccacagggcccattgggc | 33115 |
| | gcttgcacactggtattccggtacctttgtgcgcctgttttatac | |
| | atcctacccccgtaacttagaagcaagatcacccgatcaccagga | |
| | aatgtggcaaaccagtcacattctgatcaagcacttctgtttccc | |
| | cggactgagtatcaataggctgttcacacggctgaaggagaaaac | |
| | gttcgttacccggccaactacttcgaaaaacctagtatcaccgtg | |
| | aacgttgcagagtgtttcgctcagcactttccccgtgtagatcag | |
| | gtcgatgagtcaccgcattccccacgggcgaccgtggcggtggct | |
| | gcgttggcggcctgcctgcggggcaacccgtaggacgctctaata | |
| | cagacacggtgtgaagagtctattgagctagttggtagtcctccg | |
| | gcccctgaatgcggctaatcctaactgcggagcgagcgcttgtaa | |
| | tccaacaggtagctcgtcgtaacgggtaactctgcagcggaaccg | |
| | actactttgggtgaccgtgtttccttttatttcattactggctgc | |
| | ttatggtgacaatcacagagttgttaccatatagctattggattg | |
| | gccatccggtgtcaaatagagcaattgtgtttctttttgttgggt | |
| | ttgtaccacttgacttgaccagctacaacactctgtgctacattg | |
| | ttagattgaacacagcaaa | |
| iEV-B82 IRES | ttaaaacagcctgtgggttgcacccacccgcagggcccactgggc | 33116 |
| | gctagtacactggtaccccggtacccttgtacgcctgttttattt | |
| | ctccctcccccaaccagtaacctagaagtaaagcaaacccgatca | |
| | atagcaggtgcgacacaccagtcgtatcttgatcaagcacttctg | |
| | taaccccgggccgagtatcaatagactgctcacgcggttgaggga | |
| | gaaaacgctcgttatccggctgactacttcgagaaacccagtaac | |
| | accatagaagttgcagagtgtttcgctcagcactttccccgtgta | |
| | gatcaggtcgatgagtcaccgcattccccacgggtgaccgtggcg | |
| | gtggctgcgttggggcctgcctatggggcaacccatgggacgctc | |
| | taatacagacatggtgtgaagagtcaattgagctagtcagtattc | |
| | ctccggcccctgaatgcggctaatcctaactgcggagcacgtgcc | |
| | tccaatccagggggtggcgtgtcgtaacgggtaactctgcagcgg | |
| | aaccgactactttgggtgtccgtgtttccttttattcttatcttg | |
| | gctgcttatggtgacaattgaaggattgttaccatatagctattg | |
| | gattggccatccggtgactaacagagcaatcatataccaatttgt | |
| | tggttttataccattgaattacaaagttctaatcacccttaaatt | |
| | cattttaacacttaatacgtcaaa | |
| iEV-B83 IRES | tttaaaacagcctgtgggttgttcccacccacagggcccactggg | 33117 |
| | cgctagcactctggtatcacggtacccttgtgcgcctgttttata | |
| | tccccaccccagtggaacattagaagcagcacacctatgatcaat | |
| | agtgggcgtggcatccagtcacgttatgatcaagcacttctgtga | |
| | ccccggactgagtatcaatagactgctcacgcggttgaaggagaa | |
| | aacgttcgttacccggccagttacttcgagaaacccagtaacacc | |
| | atgaatgttgcagagtgtttcgctcagcacttcccccgtgtagat | |
| | caggtcgatgagccactgcattccccacgggcgaccgtggcagtg | |
| | gctgcgttggcggcctgcctatggggtcacccataggacgctcta | |
| | atactgacatggtgcgaagagtctattgagctaactggtagtcct | |
| | ccggcccctgaatgggctaatcctaactgtggagcacattccccc | |
| | aatccagggggcagtgtgtcgtaacgggcaactctgcagcggaac | |
| | cgactactttgggtgtccgtgtttctttttattctcatattggct | |
| | gcttatggtgacaattacagaattgttaccatatagctattggat | |
| | tggccatccggtgactaacagagcaattatttatcaattcgttgg | |
| | atttgtcccactcgatttcaaagcagtcaatacactctcatatat | |
| | cgttacactcaacacaacaaa | |
| iEV-B84 IRES | ttaaaacagcctgtgggttgttcccacccacagggcccaccgggc | 33118 |
| | gccagcacactggtatcacggtacccttgtgcgcctgttttatcc | |
| | accccttcccacagtaacttagaagcacaccatgtatacggtcaa | |
| | taggcggctcagtacaccaactgggccacgaccaagcacttctgt | |
| | taccccggactgagtatcaataagctgctcacgcggctgaaggag | |
| | aaaacgttcgttacccggccaattacttcgagaaacccagtacca | |
| | ccatgaaggttgcgcagcgtttcgttccgcacaaccccagtgtag | |
| | atcaggtcgatgagtcaccgcgttcctcacgggtgaccgtggcgg | |
| | tggctgcgttggcggcctgcccatggggcaacccatgggacgctt | |
| | caatactgacatggtgcgaagagtctattgagctaattggtagtc | |
| | ctccggcccctgaatgcggctaatcctaactgcggagcagatacc | |
| | cacaaaccagtgggcagtctgtcgtaacgggcaactctgcagcgg | |
| | aaccgactactttgggtgtccgtgtttccttttatccttacactg | |
| | gctgcttatggtgacaattgagaaattgttaccatatagctattg | |
| | gattggccatccggtgacaaacagagcagttgtttacctatttgt | |
| | tggtttcgtaccgctgaaccttaaagttctaaagaccctcaattt | |
| | tatcttagcacttaacacagcaaa | |
| iEV-B85 IRES | ttaaaacagcctgtgggttgttcccacccacagggcccaccgggc | 33119 |
| | gctagcacactggtattgcggtacctttgtgcgcctgttttatac | |
| | acccctccttaatgtaactcagaagtacaacattaccggtcaaca | |
| | gatgactcagtaaaccaactgagcctcgaccaagcacttctgttt | |
| | ccccggaccgagtatcaataggctgctcacgcggctgaaggagaa | |
| | agtgttcgttacccggccaattacttcgagaagcccagtaccacc | |
| | atggaggttgcgcggcgtttcgctccgcacatccccagtgtagat | |
| | caggctgatgagtcaccgcgttccccacgggtgaccgtggcggtg | |
| | gctgcgctggcggcctgcccatggggtaacccatgggacgcttca | |
| | atactgacatggtgtgaagagcctattgagctaattggtagtcct | |
| | ccggcccctgaatgcggctaatcctaactgcggagcagataccca | |
| | cacaccagcgggcagtctgtcgtaacgggcaactctgcagcggaa | |
| | ccgactactttgggtgtccgtgtttccttttatttttatgctggc | |
| | tgcttatggtgacaattgaggaattgttaccatatagctattgga | |
| | ttggccatccagtgtccaacagagcgatcatttacctgttcgttg | |
| | ggttcgtaccactaaaccacaagtcactcagcacacttaattaca | |
| | ttataactctcaacacaacaag | |
| iEV-B86 IRES | ttaaaacagcctgtgggttgtacccacccacagggcccactgggc | 33120 |
| | gctagcacactggtattacggtacccttgtgcgcctgttttattt | |
| | acccctcccccacgcaacctagaagcatgacttaagcggtcaata | |
| | gatggctcagtatgccaactgagttatgaccaagcacttctgtta | |
| | ccccggaccgagtatcaataggctgctcacgcggctgaaggagaa | |
| | agtgttcgttacccggccagttacttcgagaaacctagtatcatc | |
| | atgaaggttgcgaggcgtttcgctccacacgaccccggtgtagat | |
| | caggctgatgagtcaccgcattccccacgggcgaccgtggcggtg | |
| | gctgcgctggcggcctgcccatggggcaacccatgggacgcttca | |
| | atattgacatggtgcgaagagtctattgagctaactggtagtcct | |
| | ccggcccctgaatgcggctaatcctaactgcggagcagacaccca | |
| | catgccagtgggcagtctgtcgtaacgggcaactctgcagcggaa | |
| | ccgactactttgggtgtccgtgtttccttttattcttatattggc | |
| | tgcttatggtgacaattgaaagattgttgccatatagctattgga | |
| | ttggccatccagtgactaacagagcaattgtctacctgttcgttg | |
| | gttacgtaccactaaattataaagttttgaacacacttaatttta | |
| | ttatagcacttaacaccttaaa | |
| iEV-B87 IRES | ttaaaacagcctgtgggttgttcccacccacagggcccatagggc | 33121 |
| | gccagcactctggtatcccggtacctttgtgcgcctgttttatcc | |
| | acccttccccaagcgtaacttagaagcccatcatacacggtcaat | |
| | aggtggttcagtatgccaactgagtcttgaccaagcacttctgtt | |
| | accccggactgagtatcaataagctgctcacgcggctgaaggaga | |
| | aaacgttcgttatccggccaattacttcgagaaacctagtaacac | |
| | catgaaggttgcgcagcgtttcgctccgcacaaccccagtgtaga | |
| | tcaggtcgatgagtcaccgcactccccacgggcgaccgtggcggt | |
| | ggctgcgttggcggcctgcccatggggcaacccatgggacgcttc | |
| | aatactgacatggtgcgaagagtctattgagataattggtagtcc | |
| | tccggcccctgaatgcggctaatcctaactgcggagcagataccc | |
| | acatgccagtgggcagtctgtcgtaacgggcaactctgcagcgga | |
| | accgactactttgggtgtccgtgtttccttttatttctatactgg | |
| | ctgcttatggtgacaattgacagattgttaccatatagctattgg | |
| | attggccatccggtgacgaacagagcaattatttacttatttgtt | |
| | ggttttataccattaaatttcaaagttttaaaaaccctcaactta | |
| | gttttgtcactcaactcagcaaa | |
| iEV-B88 IRES | ttaaaacagcctgtgggttgatcccacccacagggcccactgggc | 33122 |
| | gctagcacactggtattccggtacttttgtgcgcctgttttatac | |
| | acccttccccttcatgtaacttagaagtaaaacacaaacggtcaa | |
| | taggtagctcagcaaaccagctgagcctcggccaagcacttctgt | |
| | taccccggactgagtatcaataagctgttaacacggctgaaggag | |
| | aaaacgttcgttatccggccaattacttcgagaaacctagtaaca | |
| | ccatgaaggttgcgtagcgtttcgctccacacaaccccagtgtag | |
| | atcaggtcgatgagtcaccgctctccccacgggtgaccgtggcgg | |
| | tggctgcgttggcggcctgcccatggagcactccatgggacgctt | |
| | caatactgacatggtgtgaagagtctattgagctaattggtagtc | |
| | ctccggcccctgaatgcggctaatcctaactgcggagcagacacc | |
| | cacacgccagtgggcagtctgtcgtaatgggcaactctgcagcgg | |
| | aaccgactactttgggtgtccgtgtttccttttattcttacattg | |
| | gctgcttatggtgacaatcaaggaattgttaccatatagctattg | |
| | gattggccatccggtatctaacagagcaattgtttacctcttcac | |
| | cggttttgtaccattgaattgcaatagtctcaacaccctttgcta | |
| | tatcattaaattgaactcagcaaa | |
| iEV-B93 IRES | aaagcaggctttaaaacagctctggggttgttcccacccacaggg | 33123 |
| | cccactgggcgctagcactctggtatcacggtacctttgtgcgcc | |
| | tgtttttccacccctccccatacgcaacttagaagagagactcaa | |
| | ccggtcaatagacagcctagtacaccaactaggttctgaccaaga | |
| | acttctgtttccccggaccgagtatcaataggctgcttacgcggc | |
| | tgaaggagaaaacgttcgttacccggccaattacttcgagaaacc | |
| | tagtatcaccatggaagttgcgcagtgtttcgctccgcacaaccc | |
| | cagtgtagatcaggtcgatgagtcaccgcattccccacaggcgac | |
| | tgtggcggtggctgcgttggcggcctgcccgtggggcaacccacg | |
| | ggacgcttcaataccgacatggtgcgaagagtctattgagctaat | |
| | tggtagtcctccggcccctgaatgcggctaatcctaactgtggag | |
| | cagatacccacgcgccagtgggcagtctgtcgtaatgggcaactc | |
| | cgcagcggaaccgactactttgggtgtccgtgtttccttttatcc | |
| | tcataatggctgcttatggtgacaattgaaagattgttaccatat | |
| | agctattggattggccatccggtgactaacagagcaattatttat | |
| | ttgtttgttgggtttgtaccattgaactacaaggtccttaatact | |
| | ctaaactacattataagtcttaatacagtgca | |
| iEV-B97 IRES | ttaaaacagcctgtgggttgttcccacccacagggcccactgggc | 33124 |
| | gccagcacactggtatcacggtacctttgtgcgcctgttttatcc | |
| | acccttccccaatgtaacttagaagtaaaactagaaagatcaata | |
| | gcaagcacagtatgccaactgtgttatgatcaagcacttctgtta | |
| | ccccggactgagtatcaataagctgctaaagcggctgaaggagaa | |
| | aacgttcgttacccggccaactacttcgagaaacccagtaccacc | |
| | atgaaggttgcgcagtgtttcgctccacacaatcccagtgtagat | |
| | caggtcgatgagtcaccgcgttccccacgggcgaccgtggcggtg | |
| | gctgcgttggcggcctgcccatgggatgacccatgggacgcttca | |
| | atactgacatggtgcgaagagtctattgagctagttggtagtcct | |
| | ccggcccctgaatgcggctaatcctaactgcggagcagataccca | |
| | cacaccagtgggcagtctgtcgtaacgggtaactctgcagcggaa | |
| | ccgactactttgggtgtccgtgtttctttttatcctcaaattggc | |
| | tgcttatggtgacaattgataagttgttaccatatagctattgga | |
| | ttggccatccggtgtctaacagagctattgtttatttatttgttg | |
| | gtttcgtgccactaaattacaaagtttttgaaactctcaacttca | |
| | ttttgacactcaataaagcaaa | |
| iEV-B98 IRES | ttaaaacagcctgtgggttgttcccacccacagggcccaatgggc | 33125 |
| | gccagcactctggtattacggtacctttgtgcgcctgttttatat | |
| | cccctcccccaattgtaacttagaagcaacacgcaccgaccaaca | |
| | gtgggcgtggcacaccagccacgtcttggtcaagcacatctgttt | |
| | ccccggactgagtatcaatagactgctcacgcggtcgaaggagaa | |
| | aacgttcgttatccggccaactacttcgagaagcccagtaacacc | |
| | atgaatattgcgaagtgtttcgctcagcacactcccagtgtagat | |
| | caggtcgatgagtcaccgcattccccacgggcgaccgtggcggtg | |
| | gctgcgttggcggcctgcctatggggcaacccgtaggacgcttca | |
| | atatggacatggtgtgaagagtctattgagctagttggtagtcct | |
| | ccggcccctgaatgcggctaatcctaaccgcggagcaggcaccca | |
| | caaaccagtgggcagcttgtcgtaacgggtaactctgcggcggaa | |
| | ccgactactttgggtgtccgtgtttccttttattcttatactggc | |
| | tgcttatggtgacaattgagagattgttgccatatagctattgga | |
| | ttggccatccggtgacaaacagagcaattgtttatctatttgttg | |
| | gttttataccgttaagttttaaagtcctaaaaacccttaacttgg | |
| | tcatactactcaactcagcaaa | |
| iEV-B100 IRES | ttaaaacagtctgtgggttgttcccacccacagggcccacgtggc | 33126 |
| | gccagcacactggtatctcggtacctttgtgcgcctgttttatcc | |
| | accctaaaccccgttgtaacttagaagatgagcaacactgatcaa | |
| | tagtgggtgcaacatgccagttgcatcacgatcaagcacttctgt | |
| | atccccggactgagtatcaataggctgctcacgcggctgaaggag | |
| | aaaacgttcgttatccggccagttacttcgagaaacctagtaaca | |
| | tcatggaggttgcgcagtgtttcgctccgcacacccccagtgtag | |
| | atcaggtcgatgagtcaccgcgttccccacgggcgaccgtggcgg | |
| | tggctgcgttggcggcctgcccatgggataacccatgggacgctt | |
| | caatactgacatggtgtgaagagtctattgagctaactggtagtc | |
| | ctccggcccctgaatgcggctaatcctaactgtggagcagacacc | |
| | cacatgccagtgggcagtctgtcgtaacgggcaactccgcagcgg | |
| | aaccgactactttgggtgtccgtgtttccttttattcctatattg | |
| | gctgcttatggtgacaattgaaagattgttaccatatagctattg | |
| | gattggccatccggtgtcaaacagagcaatcatttatttgtttgt | |
| | tggttttatacctctgaactttaaagtgctaaagactctcaattt | |
| | tatattatatctcaacaaatcagg | |
| iEV-B101 IRES | ttaaaacagcctgtgggttgttcccacccacagggcccactgggc | 33127 |
| | gccagcactctggtattacggtacctttgtgcgcctgttttatat | |
| | ccccctccccacttgaaacttagaagtgaaacacactgatcaata | |
| | gttgacatggcaagccagccatgtcttgatcaagcacctctgttt | |
| | ccccggacctagtatcaatagactgctcgcgcggttgaaagagaa | |
| | agcgttcgttacccggctaactacttcgagaaacttagtaacacc | |
| | atggaagttgcggagtgtttcgctcagcacatccccagtgtagat | |
| | caggccgatgagtcaccgcattccccacgggcgaccgtggcggtg | |
| | gctgcgttggcggcctgcctgtggggcaacccacaggacgctcta | |
| | atacaaacatggtgcgaagagtctattgagctagttagtagtcct | |
| | ccggcccctgaatgcggctaatcctaactgcggagcacgtgcttc | |
| | caatccaggaggtggcgtgtcgtaacgggtaactctgcagcggaa | |
| | ccgactactttgggtgtccgtgtttccttttattcttgcattggc | |
| | tgcttatggtgacaattgagagattgttaccatatagctattgga | |
| | ttggccatccggtgacaaacagagcaattatatatctctttgttg | |
| | gatacattccattgaactacaaggagttaaaaaccctcaattata | |
| | ttctgttcttgaattccgcaag | |
| iEV-B106 IRES | ttaaaacagcctgtgggttgttcccacccacagggcccatggggc | 33128 |
| | gccagcacactggtattgcggtacctttgtgcgcctgttttattc | |
| | accctttcccaatgaaacttagaagcttaactcaaccggtcgata | |
| | gacagcccagtacaccaactgggttttgaccaagtactcctgttt | |
| | ccccggactgagtatcaataagctgctcgcgcggctgaaggagaa | |
| | aacgttcgttacccggccaattacttcgagaaacctagtaccacc | |
| | atgaacgttgcgcagtgtttcgctccgcacaaccccagtgtagat | |
| | caggtcgatgagtcaccgcaatccccacgggcgaccgtggcggtg | |
| | gctgcgctggcggcctgcccatggggcatcccatgggacgcttca | |
| | atactgacatggtgcgaagagtctattgagctaattggtaatcct | |
| | ccggcccctgaatgcggctaatcctaactgcggggcagacaccca | |
| | cacgccagtgggcagtctgtcgtaacgggtaactccgcagcggaa | |
| | ccgactactttgggtgtccgtgtttccttttatctttatattggc | |
| | tgcttatggtgacaattgaaagattgttgccatatagctattgga | |
| | ttggccatccggtgtctaatagagcaattatatatctctttgttg | |
| | gcttcatcccgttaaataaagtgagctaccagaccctgtgctata | |
| | ttatcaaattgaacacaataaa | |
| iEV-B107_ | ttaaaacagcctgtgggttgttcccacccgcagggcccactgggc | 33129 |
| TN94-0349 | gctagcacactggtatcccggtacccttgtgcgcctgttttatat | |
| IRES | accctcccccttatgtaacttagaagtatgattcaaacggtcgac | |
| | aggcggctcagtgcaccaactgagtcatgaccaagcacttctgtt | |
| | accccggactgagtatcaataagctgttcacacggctgaaggaga | |
| | aaacgttcgttacccggccaattacttcgagaaacctagtaccac | |
| | catgaaggttgcgcagtgtttcgctccacacaaccccagtgtaga | |
| | tcaggtcgatgagtcaccgcattccccacgggcgaccgtggcggt | |
| | ggctgcgttggcggcctgcccatggggcaacccatgggacgcttc | |
| | aatactgacatggtgtgaagagtctattgagctaattggtagtcc | |
| | tccggcccctgaatgcggctaatcccaactgtggagcagatactc | |
| | acaaaccagtgagcggtctgtcgtaacgggcaactccgcagcgga | |
| | accgactactttgggtgtccgtgtttctttttattcttacattgg | |
| | ctgcttatggtgacaattgacaaattgttaccatatagctattgg | |
| | attggccatccggtgacaaacagagctattgtttacttgtttgtt | |
| | ggtttcataccattaaattacaaggtcttagaaactctcaacttt | |
| | attttgacactcaatacagcaaa | |
| iEV-B111 IRES | ttaaaacagcctgtgggttgttcccacccacagggcccactgggc | 33130 |
| | gccagcacactggtatcacggtacccttgtgcgcctgttttataa | |
| | acccttccccaatgcaacttagaagctcaactttaccggtcaata | |
| | gacagtccagtacgccaactgggcttcgatcaagcacttctgtta | |
| | ccccggactaagtatcaataggctgctcacgcggctgaaggagaa | |
| | aacgttcgttacccggccaattacttcgagaaacccagtaacact | |
| | atggaggttgcgcagtgtttcgttccacacaaccccagtgtagat | |
| | caggtcgatgagtcaccgctttccccacgggcgaccgtggcggtg | |
| | gctgcgttggcggcctgcccatggggcaacccatgggacgcttca | |
| | atactgacatggtgtgaagagtctattgagctaattggtattcct | |
| | ccggcccctgaatgcggctaatcctaactgcggagcagatactca | |
| | cgagccagtgggcagtctgtcgtaacgggtaactctgcagcggaa | |
| | ccgactactttgggtgtccgtgtttccttttattcatatattggc | |
| | tgcttatggtgacaattgagagattgttaccatatagctattgga | |
| | ttggccatccggtgactaatagagcaattgtttacctatttgttg | |
| | gctttgtgccgttgaactacaaggttttaaaaactattaactaca | |
| | tcctagtacttaacacgttgaa | |
| iEV-B113 IRES | actctggtattgcggtacctttgtacgcctgttttatatcccttc | 33131 |
| | cccatgtaactttagaagcaattcacaaggttcaatagagggggt | |
| | acaaaccagtaccaccacgaacaagcacttctgtttccccggtga | |
| | agctgtatagactgtccccacggtcaaaaacggcagatccgttat | |
| | ccgcttatgtacttcgagaagcctagtatcatcttggaatcttcg | |
| | atggttgcgttcagcactctatcccgagtgtagcttaggtcgatg | |
| | agtctgggcattccccaccggcgacggtggcccaggctgcgttgg | |
| | cggcctacccatggctaacgccatgggacgctagttgtgaacaag | |
| | gtgtgaagagcctattgagctacatgagagtcctccggcccctga | |
| | atgcggctaatcccaaccacggagcaagtactcacaacccagtgg | |
| | gcagcttgtcgtaacgcgtaagtctgtggcggaaccgactacttt | |
| | gggtgtccgtgtttcctttttatttttgatatggctgcttatggt | |
| | gacatctaagattgttatcatatagcttttggattggccatccgg | |
| | tgatttttgagactaaaacgcttgtttgccttatcacacaattta | |
| | gtattttgttatattcatacggtcata | |
| iEV-D68 IRES | ttaaaacagctctggggttgttcccactcaagggcccacgtggcg | 33132 |
| | gctagtactctggtatctcggtacctttgtacgcctgttttaatt | |
| | ccctccccaacgtaacttagaagcttttaaaccaaagctcaatag | |
| | gtggagcgcaaaccagcgctcttatgagcaagcacttctgtctcc | |
| | ccggtgtggttgtatagactgtccccacggttgaaaacaacttat | |
| | ccgttaCccgctatagtacttcgagaaacctagtattgccttcgg | |
| | agtgttgatgcgttgcgctcagcacactaacccgtgtgtagcttg | |
| | ggtcgatgagtctggacgtaccccactggcgacagtggtccaggc | |
| | tgcgttggcggcctactcatggtgaaaaccatgGgacgctagaca | |
| | tgaacaaggtgtgaagagtctattgagctgctatagagtcctccg | |
| | gcccctgaatgcggctaatcctaaccatggagcaagtgctcacaa | |
| | accagtgagttacttgtcgtaacgcgcaagtccgtggcggaaccg | |
| | actactttgggtgtccgtgtttcactttttacttttatgactgct | |
| | aatggtgacaatttaatattgttaccatttggcttgtcgaattga | |
| | tcacataagatctatagttttgttcactgatttgctttgaaataa | |
| | tctcacctcaaaacctccagtacataacatttaaagagtttaaac | |
| | ttatttataaca | |
| iEV-D70 IRES | ttaaaacagctctggggttgttcccaccccagaggcccacgtggg | 33133 |
| | gctagtactccggtaccccggtacccttgtacgcctgttttatac | |
| | tccctttcccaagtaactttagaagaaataaactaatgttcaaca | |
| | ggagggggtacaaaccagtaccaccacgaacacacacttctgttt | |
| | ccccggtgaagttgcatagactgtacccacggttgaaagcgatga | |
| | atccgttacccgcttaggtacttcgagaagcctagtatcatcttg | |
| | gaatcttcgatgcgttgcgatcagcactctaccccgagtgtagct | |
| | tgggtcgatgagtctggacaccccacaccggcgacgtggtccagg | |
| | ctgcgttggcggcctacccatggctagcaccatgggacgctagtt | |
| | gtgaacaaggtgcgaagagcctattgagctacctgagagtcctcc | |
| | ggcccctgaatgcggctaatcccaaccacggagcaaatgctcaca | |
| | atccagtgagtggtttgtcgtaatgcgcaagtctgtggcggaacc | |
| | gactactttgggtgtccgtgtttccttttatttttattatggctg | |
| | cttatggtgacaatctgagattgttatcatatagctattggatta | |
| | gccatccggtgaCatcttgaaattttgccataactttttcacaaa | |
| | tcctacaacattacactacactttctcttgaataattgagacaac | |
| | tcata | |
| iEV-D94 IRES | ttaaaacagcctgtgggttgttcccaccccagaggcccacgtggc | 33134 |
| | ggccagtactctggtatcacggtacctttgtacgcctgttttata | |
| | tccccttcccccgcaacttagaagaaaacaaatcaagttcactag | |
| | gagggggtacaaaccagtaccaccacgaacaagcacttctgtttc | |
| | cccggtgatgtcgtatagactgtaaccacggttgaaaacgattga | |
| | tccgttatccgctcttgtacttcgaaaagcccagtatcaccttgg | |
| | aatcttcgatgcgttgcgctcagcactcaaccccagagtgtagct | |
| | taggtcgatgagtctggacactcctcaccggcgacggtggtccag | |
| | gctgcgttggcggcctacctgtggtccaaagccacaggacgctag | |
| | ttgtgaacaaggtgtgaagagcctattgagctacaagagaatcct | |
| | ccggcccctgaatgcggctaatcctaaccacggagcaagggtaca | |
| | caaaccagtgtatatcttgtcgtaacgcgcaagtctgtggcggaa | |
| | ccgactactttgggtgtccgtgtttccttttgtttttatcatggc | |
| | tgcttatggtgacaatctaagattgttatcatatagctgttggat | |
| | tggccatccggtaatttattgagatttgagcatttgcttgtttct | |
| | tcaacaatttcacctattcattgcatttcagcagtcaaa | |
| iEV-D111 IRES | ttcccaccctagaggcccacgtggcggctagtactctggtattac | 33135 |
| | ggtacctttgtacgcctgttttatatccctttccccattgtaact | |
| | tagaagtttcaaagtacagttcaatagacagtagtacaaaccagt | |
| | actgctacgaacaagcacttctgttgccccggtgtagttgcatag | |
| | actgtacccacggttgaaagcaactgatccgttatccgctttagt | |
| | acttcgagaagcctagtagcaccttgggatcttcgatgcgttgcg | |
| | ctcagcactcaaccccagagtgtagcttgggtcgatgagtctgga | |
| | cattcctcaccggcgacggtggtccaggctgcgttggcggcctac | |
| | ctgtggcccaaagccacaggacgctagttgtgaacaaggtgtgaa | |
| | gagcctattgagctactaaagagtcctccggcccctgaatgcggc | |
| | taatcctaaccacggagcaagtgctcacagtccagtgagtagctt | |
| | gtcgtaatgagcaattctgtggcggaaccgactactttgggtgtc | |
| | cgtgtttccttttatttttatcattggctgcttatggtgacaatc | |
| | taaggttgccatcatatagcttttggattggccatcccggtgata | |
| | tttcgaattattcaatttgctgtttgcagctccttttaaacagta | |
| | ttcactcaccagcattcatattttactcttgagttattaacaaat | |
| | agtcaaaa | |
| iHCosV-B1 IRES | ttgccagttttttgaaacgtgtggtttgacgtctaaccattatgg | 33136 |
| | cagtgggtggagtactgcaaagatgtcaccgtgctttacacggtt | |
| | tttgaaccccacaccggctgtttggcgcttgcaggacagcaggtt | |
| | tattttcttttaactctctctttctagccacacacgatctatgtg | |
| | tgtgggcggagtgatactcccgttccttcttggacaggcggcctc | |
| | cacgccctttgtggatcttaaggctaccaagtcactggtgttgga | |
| | aagtgaagagaaaggagttccttgggaactacatgtggcattgac | |
| | agaggttgtagcgatgctgtgtgtgtgtgcggattacccccgtgg | |
| | cgacacggaccccacaggccaaaagccctgtccgaaaggacccac | |
| | acagtggagcaaccccagctcccctcttcaatgttttgtgttagc | |
| | aaccttggtattattttctctcaagcttccaatacaccgggcccc | |
| | aaagatgtcctgaaggtaccccgtgtatctgaggatgagcaccat | |
| | caactacccggacttgttctttcgagaacagacgcatgtggtaac | |
| | ccagccccgatcctaaggggtcggggcttttgctcactcagcaca | |
| | ggatctgatcaggagacctcccccccctgctttacagggggcggg | |
| | ggtttaaaaattgcccaaggcctggcaaataacctaggggactag | |
| | gttttcctttttattttaaagttgtcaat | |
| iEcho-E7 IRES | ttcccacccacagggcccactgggcgctagcacactggtatcacg | 33137 |
| | gtacctttgtgcgcctgttttatccaccctcccccaatgtaactt | |
| | agaagcacaccaaacgcggtcaataggcggctcagtacaccaact | |
| | gagtctcgaccaagcacttctgttaccccggactgagtatcaata | |
| | ggctgctcacgcggctgaaggagaaaacgttcgttacccggccaa | |
| | ttacttcgagaaacctagtaccaccatgaaggttgcgcggcgttt | |
| | cgctccacacaaccccagtgtagatcaggtcgatgagccaccgca | |
| | ttccccacgggcgaccgtggcggtggctgcgctggcggcctgccc | |
| | atggggcaacccatgggacgcttcaatactgacatggtgtgaaga | |
| | gtctattgagctaattggtagtcctccggcccctgaatgcggcta | |
| | atcctaactgcggagcagacacccacatgccagtgggcagtctgt | |
| | cgtaacgggtaactctgcagcggaaccgactactttgggtgtccg | |
| | tgtttccttttattctcatactggctgcttatggtgacaattgaa | |
| | agattgttgccatatagctattggattggccatccggtgacaaac | |
| | agagcggttgtttacctatttgtcggttttataccattgaattac | |
| | aaggttctgaaaaccctcaatttcattttagcacttaataccaca | |
| | aa | |
| iEcho-E9 IRES | ttaaaacagcctgtgggttgttcccacccacagggcccattgggc | 33138 |
| | gctagcacactggtatcacggtacccttgtgcgcctgttttatcc | |
| | acccctccccatcgtaacctagaagcatgactccaacggtcaata | |
| | gacagctcagtaaaccaattgagccttgaccaagcacttctgtta | |
| | ccccggactgagtatcaataggctgctcacgcggccgaaggagaa | |
| | aatgttcgttacccggccaattacttcgagaaacctagtaccacc | |
| | atgaaggttgcgcggtgtttcgctcagcacaaccccagtgtagat | |
| | caggccgatgagtcaccgcattccccacgggtgaccgtggcggtg | |
| | gctgcgctggggcctgcccatggggcaacccatgggacgcttcaa | |
| | tactgacatggtgtgaagagtctattgagctaattggtagtcctc | |
| | cggcccctgaatgcggctaatcctaactgcggagcagatacccac | |
| | gcaccagtgggcagtctgtcgtaacgggcaactctgcagcggaac | |
| | cgactactttgggtgtccgtgtttccttttattcttgtactggct | |
| | gcttatggtgacaattgagagattgttaccatatagctattggat | |
| | tggccatccagtgtcaaacagagcgattgtctacttgttcattgg | |
| | ttttataccattgagttacaaggttctagccactcttaacttcat | |
| | tttaacactcaatacatcaaa | |
| iPV3_PAK1019536 | tggggttaaaacagctctggggttgttcccaccccagaggcccac | 33139 |
| IRES | gtggcggctagtactctggtatcatggtacctttgtacgcctgtt | |
| | ttatacccctaccccacgtaactttagaagcaactcaacaagttc | |
| | aatagggggggtacaaaccagtaccaccacgaacaagcactcctg | |
| | ttaccccggtgatcttgcataagctgtgcccacggctgaaggcga | |
| | gagatccgttatccgcttgagtacttcgagaagcctagtatcacc | |
| | ttgggatcttcgacgcgttgcgctcagcactccacccgagtgtag | |
| | cttaggctgatgagcctgggcattccccaccggcgacggtggccc | |
| | aggctgcgttggcggcctacccatggctaacaccatgggacgcta | |
| | gatgtgaacaaggtgtgaagagcctattgagctactcaagagtcc | |
| | tccggcccctgaatgcggctaatcccaaccacggagcaggtgtct | |
| | tcaacccagaaggtagcctgtcgtaacgcgtaagtctgtggcgga | |
| | accgactactttgggtgtccgtgtttccttttatcttttatatgg | |
| | ctgcttatggtgacaatcacagattgttatcataaagcgatttgg | |
| | attggccatccggtgaagtacaaacacattatctacttgtttgtt | |
| | ggatttactccactcacacaccccacccccaatataacatctatt | |
| | gttttgttGacaagaaattactttcgaa | |
| iPV3_NIE1219535 | gttaaaacagctctggggttgttcccaccccagaggcccaagtgg | 33140 |
| IRES | cggctagtactccggtatcacggtacccttgtacgcctgttttat | |
| | actcccttcccccgtaacttagaagagttaaaccaagttcaatag | |
| | aagggggtacaaaccagtaccaccacgaacaagcacttctgtttc | |
| | cccggtgatattgtatagactgtacccacggtcgaaaatgattga | |
| | tccgttatccgctctcatacttcgagaagcctagtatcatcttgg | |
| | aatcttcgatgcgttgcgctcggcactcgatcccggagtgtagct | |
| | taggtcgatgagtctggacactcctcaccggtgacggtggtccag | |
| | actgcgttggcggcctacctgtggtccaaagccacaggacgctag | |
| | ttgtgaacaaggtgtgaagagcctattgagctatgagagagtcct | |
| | ccggcccctgaatgcggctaatcccaaccacggagcgagagtgcg | |
| | caagccagcgtatatctcgtcgtaacgcgcaagtctgtggcggaa | |
| | ccgactactttgggtgtccgtgtttccttttatttttgtattggc | |
| | tgcttatggtgacaatcacagattgttatcataaagcgaattgga | |
| | ttggccatccggtgaaagtgaaatacattatttgcttatttattg | |
| | gattcagtccacctaattgctatactcacgaacccaccacagccg | |
| | ttttgttGactgaaagccggtaccaata | |
| iPV3_SWI10947 | ttaaaacagctctggggttgttcccaccccagaggcccacgtggc | 33141 |
| IRES | ggctagtactccggtatcacggtacccttgtacgcctgttttata | |
| | ctcccttccccgtaacttagaagtatacaaaccaagttcaataga | |
| | agggggtacaaaccagtaccaccacgaacaagcacttctgtttcc | |
| | ccggtgaagttgcatagattgtccccacggtcgaaagcgactgat | |
| | ccgttatccgctcttgtacttcgggaagcctagtatcaccttcgg | |
| | atcttcgatgcgttgcgctcagcactcaaccccagagtgtagctt | |
| | aggtcgatgagtctggacgaacctcactggtgacagtggtccagg | |
| | ctgcgttggcggcctacctgtggcccaaagccacaggacgctagt | |
| | tgtgaacaaggtgtgaagagcctactgagctacatgagagtcctc | |
| | cggcccctgaatgcggctaatcccaaccacggagcaggtggtcac | |
| | aaaccagtggtttgcctgtcgtaacgcgaaagtctgtggcggaac | |
| | cgactactttgggtgtccgtgtttccttttattcttattatggct | |
| | gcttatggtgacaatcttagattgttatcataaagcgaattggat | |
| | tggccatccggggaaaattaagcatatcatacacttgtttgttgg | |
| | attcacccctctgattacacatactcttggcttgattaggattgt | |
| | tgcattgataagacactattgttgca | |
| iPV3_FIN84 | gggttgttcccaccccagaggcccacgtggcggctagtactccgg | 33142 |
| IRES | tatcacggtacccttgtacgcctgttttatactcccttccccgta | |
| | acttagaagtatacaagccaagttcaatagaagggggtacaaacc | |
| | agtaccaccacgaacaagcacttctgtttccccggtgaagttgca | |
| | tagattgttcccacggtcgaaagcgactgatccgttacccgctca | |
| | tgtacttcgggaagcctagtatcaccttcggatcttcgatgcgtt | |
| | gcgctcagcactcaaccccagagtgtagcttaggtcgatgagtct | |
| | ggacaaacctcactggcgacagtggtccaggctgcgttggcggcc | |
| | tacctgtggcccaaagccacaggacgctagttgtgaacaaggtgt | |
| | gaagagcctactgagctacatgagagtcctccggcccctgaatgc | |
| | ggctaatctcaaccacggagcaggtggtcacaaaccagtgatttg | |
| | cctgtcgtaacgcgaaagtctgtggcggaaccgactactttgggt | |
| | gtccgtgtttccttttactctcattatggctgcttatggtgacaa | |
| | tcctagattgttatcataaagcgagttggattggccatccggtga | |
| | aaatcaagcacatcatatatttgtttgttgggtttaaccctctga | |
| | ttgcacgcactcttggcttggttaggattattgtgtggaaaaggc | |
| | accatagttaca | |
| Apt-eIF4G | ACTCACTATTTGTTTTCGCGCCCAGTTGCAAAAAGTGTCG | 33143 |
| synIRES-RC01 | ttaaaacagcctgtgggttgatcccacccacaggcccattgggcg | 33144 |
| | ctagcactctggtatcacggtacctttgtgcgcctgttttatacc | |
| | ccctACTCACTATTTGTTTTCGCGCCCAGTTGCAAAAAGTGTCGc | |
| | ccccaactgtaacttagaagtaacacacaccgatcaacagtcagc | |
| | gtggcacaccagccacgttttgatcaagcacttctgttaccccgg | |
| | actgagtatcaatagactgctcacgcggttgaaggagaaagcgtt | |
| | cgttatccggccaactacttcgaaaaacctagtaacaccgtggaa | |
| | gttgcagagtgtttcgctcagcactaccccagtgtagatcaggtc | |
| | gatgagtcaccgcattccccacgggcgaccgtggcggtggctgcg | |
| | ttggcggcctgcccatggggaaacccatgggacgctctaatacag | |
| | acatggtgcgaagagtctattgagctagttggtagtcctccggcc | |
| | cctgaatgcggctaatcctaactgcggagcacacaccctcaagcc | |
| | agagggcagtgtgtcgtaacgggcaactctgcagcggaaccgact | |
| | actttgggtgtcgtgtttcattttattcctatactggctgcttat | |
| | ggtgacaattgagagatcgttaccatatagctattggattggcca | |
| | tccggtgactaatagagctattatatatccctttgttgggtttat | |
| | accacttagcttgaaagaggttaaaacattacaattcattgttaa | |
| | gttgaatacagcaaa | |
| synIRES-RC02 | ttaaaacagcctgtgggttgatcccacccacaggcccattgggcg | 33145 |
| | ctagcactctggtatcacggtacctttgtgcgcctgttttatacc | |
| | ccctcccccaactgtaacttagaagtaacacacaccgatcaacag | |
| | tcagcgtgACTCACTATTTGTTTTCGCGCCCAGTTGCAAAAAGTG | |
| | TCGcacgttttgatcaagcacttctgttaccccggactgagtatc | |
| | aatagactgctcacgcggttgaaggagaaagcgttcgttatccgg | |
| | ccaactacttcgaaaaacctagtaacaccgtggaagttgcagagt | |
| | gtttcgctcagcactaccccagtgtagatcaggtcgatgagtcac | |
| | cgcattccccacgggcgaccgtggcggtggctgcgttggcggcct | |
| | gcccatggggaaacccatgggacgctctaatacagacatggtgcg | |
| | aagagtctattgagctagttggtagtcctccggcccctgaatgcg | |
| | gctaatcctaactgcggagcacacaccctcaagccagagggcagt | |
| | gtgtcgtaacgggcaactctgcagcggaaccgactactttgggtg | |
| | tcgtgtttcattttattcctatactggctgcttatggtgacaatt | |
| | gagagatcgttaccatatagctattggattggccatccggtgact | |
| | aatagagctattatatatccctttgttgggtttataccacttagc | |
| | ttgaaagaggttaaaacattacaattcattgttaagttgaataca | |
| | gcaaa | |
| synIRES-RC03 | ttaaaacagcctgtgggttgatcccacccacaggcccattgggcg | 33146 |
| | ctagcactctggtatcacggtacctttgtgcgcctgttttatacc | |
| | ccctcccccaactgtaacttagaagtaacacacaccgatcaacag | |
| | tcagcgtggcacaccagccacgttttgatcaagcacttctgttac | |
| | cACTCACTATTTGTTTTCGCGCCCAGTTGCAAAAAGTGTCGccgg | |
| | actgagtatcaatagactgctcacgcggttgaaggagaaagcgtt | |
| | cgttatccggccaactacttcgaaaaacctagtaacaccgtggaa | |
| | gttgcagagtgtttcgctcagcactaccccagtgtagatcaggtc | |
| | gatgagtcaccgcattccccacgggcgaccgtggcggtggctgcg | |
| | ttggcggcctgcccatggggaacccatgggacgctctaatacaga | |
| | catggtgcgaagagtctattgagctagttggtagtcctccggccc | |
| | ctgaatgcggctaatcctaactgcggagcacacaccctcaagcca | |
| | gagggcagtgtgtcgtaacgggcaactctgcagcggaaccgacta | |
| | ctttgggtgtcgtgtttcattttattcctatactggctgcttatg | |
| | gtgacaattgagagatcgttaccatatagctattggattggccat | |
| | ccggtgactaatagagctattatatatccctttgttgggtttata | |
| | ccacttagcttgaaagaggttaaaacattacaattcattgttaag | |
| | ttgaatacagcaaa | |
| synIRES-RC04 | ttaaaacagcctgtgggttgatcccacccacaggcccattgggcg | 33147 |
| | ctagcactctggtatcacggtacctttgtgcgcctgttttatacc | |
| | ccctcccccaactgtaacttagaagtaacacacaccgatcaacag | |
| | tcagcgtggcacaccagccacgttttgatcaagcacttctgttac | |
| | cccggactgagtatcaatagactgcACTCACTATTTGTTTTCGCG | |
| | CCCAGTTGCAAAAAGTGTCGgcggttgaaggagaaagcgttcgtt | |
| | atccggccaactacttcgaaaaacctagtaacaccgtggaagttg | |
| | cagagtgtttcgctcagcactaccccagtgtagatcaggtcgatg | |
| | agtcaccgcattccccacgggcgaccgtggcggtggctgcgttgg | |
| | cggcctgcccatggggaaacccatgggacgctctaatacagacat | |
| | ggtgcgaagagtctattgagctagttggtagtcctccggcccctg | |
| | aatgcggctaatcctaactgcggagcacacaccctcaagccagag | |
| | ggcagtgtgtcgtaacgggcaactctgcagcggaaccgactactt | |
| | tgggtgtcgtgtttcattttattcctatactggctgcttatggtg | |
| | acaattgagagatcgttaccatatagctattggattggccatccg | |
| | gtgactaatagagctattatatatccctttgttgggtttatacca | |
| | cttagcttgaaagaggttaaaacattacaattcattgttaagttg | |
| | aatacagcaaa | |
| synIRES-RC05 | ttaaaacagcctgtgggttgatcccacccacaggcccattgggcg | 33148 |
| | ctagcactctggtatcacggtacctttgtgcgcctgttttatacc | |
| | ccctcccccaactgtaacttagaagtaacacacaccgatcaacag | |
| | tcagcgtggcacaccagccacgttttgatcaagcacttctgttac | |
| | cccggactgagtatcaatagactgctcacgcggttgaaggagaaa | |
| | gcgttcgttatACTCACTATTTGTTTTCGCGCCCAGTTGCAAAAA | |
| | GTGTCGccggccaactacttcgaaaaacctagtaacaccgtggaa | |
| | gttgcagagtgtttcgctcagcactaccccagtgtagatcaggtc | |
| | gatgagtcaccgcattccccacgggcgaccgtggcggtggctgcg | |
| | ttggcggcctgcccatggggaaacccatgggacgctctaatacag | |
| | acatggtgcgaagagtctattgagctagttggtagtcctccggcc | |
| | cctgaatgcggctaatcctaactgcggagcacacaccctcaagcc | |
| | agagggcagtgtgtcgtaacgggcaactctgcagcggaaccgact | |
| | actttgggtgtcgtgtttcattttattcctatactggctgcttat | |
| | ggtgacaattgagagatcgttaccatatagctattggattggcca | |
| | tccggtgactaatagagctattatatatccctttgttgggtttat | |
| | accacttagcttgaaagaggttaaaacattacaattcattgttaa | |
| | gttgaatacagcaaa | |
| synIRES-RC06 | ttaaaacagcctgtgggttgatcccacccacaggcccattgggcg | 33149 |
| | ctagcactctggtatcacggtacctttgtgcgcctgttttatacc | |
| | ccctcccccaactgtaacttagaagtaacacacaccgatcaacag | |
| | tcagcgtggcacaccagccacgttttgatcaagcacttctgttac | |
| | cccggactgagtatcaatagactgctcacgcggttgaaggagaaa | |
| | gcgttcgttatccggccaactacttcgaaaaacctagtaacaccg | |
| | tggaagttgcagagtgtttcgctcagcactACTCACTATTTGTTT | |
| | TCGCGCCCAGTTGCAAAAAGTGTCGagtgtagatcaggtcgatga | |
| | gtcaccgcattccccacgggcgaccgtggcggtggctgcgttggc | |
| | ggcctgcccatggggaaacccatgggacgctctaatacagacatg | |
| | gtgcgaagagtctattgagctagttggtagtcctccggcccctga | |
| | atgcggctaatcctaactgcggagcacacaccctcaagccagagg | |
| | gcagtgtgtcgtaacgggcaactctgcagcggaaccgactacttt | |
| | gggtgtcgtgtttcattttattcctatactggctgcttatggtga | |
| | caattgagagatcgttaccatatagctattggattggccatccgg | |
| | tgactaatagagctattatatatccctttgttgggtttataccac | |
| | ttagcttgaaagaggttaaaacattacaattcattgttaagttga | |
| | atacagcaaa | |
| synIRES-RC07 | ttaaaacagcctgtgggttgatcccacccacaggcccattgggcg | 33150 |
| | ctagcactctggtatcacggtacctttgtgcgcctgttttatacc | |
| | ccctcccccaactgtaacttagaagtaacacacaccgatcaacag | |
| | tcagcgtggcacaccagccacgttttgatcaagcacttctgttac | |
| | cccggactgagtatcaatagactgctcacgcggttgaaggagaaa | |
| | gcgttcgttatccggccaactacttcgaaaaacctagtaacaccg | |
| | tggaagttgcagagtgtttcgctcagcactaccccagtgtagatc | |
| | aggtcgatgagtcaccgcACTCACTATTTGTTTTCGCGCCCAGTT | |
| | GCAAAAAGTGTCGgcggtggctgcgttggcggcctgcccatgggg | |
| | aaacccatgggacgctctaatacagacatggtgcgaagagtctat | |
| | tgagctagttggtagtcctccggcccctgaatgcggctaatccta | |
| | actgcggagcacacaccctcaagccagagggcagtgtgtcgtaac | |
| | gggcaactctgcagcggaaccgactactttgggtgtcgtgtttca | |
| | ttttattcctatactggctgcttatggtgacaattgagagatcgt | |
| | taccatatagctattggattggccatccggtgactaatagagcta | |
| | ttatatatccctttgttgggtttataccacttagcttgaaagagg | |
| | ttaaaacattacaattcattgttaagttgaatacagcaaa | |
| synIRES-RC08 | ttaaaacagcctgtgggttgatcccacccacaggcccattgggcg | 33151 |
| | ctagcactctggtatcacggtacctttgtgcgcctgttttatacc | |
| | ccctcccccaactgtaacttagaagtaacacacaccgatcaacag | |
| | tcagcgtggcacaccagccacgttttgatcaagcacttctgttac | |
| | cccggactgagtatcaatagactgctcacgcggttgaaggagaaa | |
| | gcgttcgttatccggccaactacttcgaaaaacctagtaacaccg | |
| | tggaagttgcagagtgtttcgctcagcactaccccagtgtagatc | |
| | aggtcgatgagtcaccgcattccccacgggcgaccgtggcggtgg | |
| | ctgcgttggcggcctgcccatgggACTCACTATTTGTTTTCGCGC | |
| | CCAGTTGCAAAAAGTGTCGcccatgggacgctctaatacagacat | |
| | ggtgcgaagagtctattgagctagttggtagtcctccggcccctg | |
| | aatgcggctaatcctaactgcggagcacacaccctcaagccagag | |
| | ggcagtgtgtcgtaacgggcaactctgcagcggaaccgactactt | |
| | tgggtgtcgtgtttcattttattcctatactggctgcttatggtg | |
| | acaattgagagatcgttaccatatagctattggattggccatccg | |
| | gtgactaatagagctattatatatccctttgttgggtttatacca | |
| | cttagcttgaaagaggttaaaacattacaattcattgttaagttg | |
| | aatacagcaaa | |
| synIRES-RC09 | ttaaaacagcctgtgggttgatcccacccacaggcccattgggcg | 33152 |
| | ctagcactctggtatcacggtacctttgtgcgcctgttttatacc | |
| | ccctcccccaactgtaacttagaagtaacacacaccgatcaacag | |
| | tcagcgtggcacaccagccacgttttgatcaagcacttctgttac | |
| | cccggactgagtatcaatagactgctcacgcggttgaaggagaaa | |
| | gcgttcgttatccggccaactacttcgaaaaacctagtaacaccg | |
| | tggaagttgcagagtgtttcgctcagcactaccccagtgtagatc | |
| | aggtcgatgagtcaccgcattccccacgggcgaccgtggcggtgg | |
| | ctgcgttggcggcctgcccatggggaaacccatgggacgctctaa | |
| | tacagacatggtgcgaagagtctattgagctagttggtagtcACT | |
| | CACTATTTGTTTTCGCGCCCAGTTGCAAAAAGTGTCGCCCCctcc | |
| | ggcccctgaatgcggctaatcctaactgcggagcacacaccctca | |
| | agccagagggcagtgtgtcgtaacgggcaactctgcagcggaacc | |
| | gactactttgggtgtcgtgtttcattttattcctatactggctgc | |
| | ttatggtgacaattgagagatcgttaccatatagctattggattg | |
| | gccatccggtgactaatagagctattatatatccctttgttgggt | |
| | ttataccacttagcttgaaagaggttaaaacattacaattcattg | |
| | ttaagttgaatacagcaaa | |
| synIRES-RC10 | ttaaaacagcctgtgggttgatcccacccacaggcccattgggcg | 33153 |
| | ctagcactctggtatcacggtacctttgtgcgcctgttttatacc | |
| | ccctcccccaactgtaacttagaagtaacacacaccgatcaacag | |
| | tcagcgtggcacaccagccacgttttgatcaagcacttctgttac | |
| | cccggactgagtatcaatagactgctcacgcggttgaaggagaaa | |
| | gcgttcgttatccggccaactacttcgaaaaacctagtaacaccg | |
| | tggaagttgcagagtgtttcgctcagcactaccccagtgtagatc | |
| | aggtcgatgagtcaccgcattccccacgggcgaccgtggcggtgg | |
| | ctgcgttggcggcctgcccatggggaaacccatgggacgctctaa | |
| | tacagacatggtgcgaagagtctattgagctagttggtagtcctc | |
| | cggcccctgaatgcggctaatcctaactgcggagcacacaccctc | |
| | ACTCACTATTTGTTTTCGCGCCCAGTTGCAAAAAGTGTCGgaggg | |
| | cagtgtgtcgtaacgggcaactctgcagcggaaccgactactttg | |
| | ggtgtcgtgtttcattttattcctatactggctgcttatggtgac | |
| | aattgagagatcgttaccatatagctattggattggccatccggt | |
| | gactaatagagctattatatatccctttgttgggtttataccact | |
| | tagcttgaaagaggttaaaacattacaattcattgttaagttgaa | |
| | tacagcaaa | |
| synIRES-RC11 | ttaaaacagcctgtgggttgatcccacccacaggcccattgggcg | 33154 |
| | ctagcactctggtatcacggtacctttgtgcgcctgttttatacc | |
| | ccctcccccaactgtaacttagaagtaacacacaccgatcaacag | |
| | tcagcgtggcacaccagccacgttttgatcaagcacttctgttac | |
| | cccggactgagtatcaatagactgctcacgcggttgaaggagaaa | |
| | gcgttcgttatccggccaactacttcgaaaaacctagtaacaccg | |
| | tggaagttgcagagtgtttcgctcagcactaccccagtgtagatc | |
| | aggtcgatgagtcaccgcattccccacgggcgaccgtggcggtgg | |
| | ctgcgttggcggcctgcccatggggaaacccatgggacgctctaa | |
| | tacagacatggtgcgaagagtctattgagctagttggtagtcctc | |
| | cggcccctgaatgcggctaatcctaactgcggagcacacaccctc | |
| | aagccagagggcagtgtgtcgtaacgggcaactctgcagcggaac | |
| | cgactactttgggtgtcgtgtttcattttACTCACTATTTGTTTT | |
| | CGCGCCCAGTTGCAAAAAGTGTCGattcctatactggctgcttat | |
| | ggtgacaattgagagatcgttaccatatagctattggattggcca | |
| | tccggtgactaatagagctattatatatccctttgttgggtttat | |
| | accacttagcttgaaagaggttaaaacattacaattcattgttaa | |
| | gttgaatacagcaaa | |
| synIRES-RC12 | ttaaaacagcggatgggtaccccaccatccgacccactgggtgta | 33155 |
| | gtactctggtacttcgtacctttgtacgcctgttcttcccattgt | |
| | acccttcctgaacttccaacccaagtaacgttagaagctcaacat | |
| | ttagtacaacaggaagcaccacatccagtggtgtttagtacaagc | |
| | acttctgtttccccggagcgaggtataggctgtacccactgccaa | |
| | aaacctttaaccgttatccgccaaccaactacgtaaaagctagta | |
| | gtattatgtttttaactaggcgttcgatcaggCACTCACTATTTG | |
| | TTTTCGCGCCCAGTTGCAAAAAGTGTCGGCCagtttggtcgatga | |
| | ggctaggaattccccacgggtgaccgtgtcctagcctgcgtggcg | |
| | gccaacccagcttatgctgggacgcctttttatagacatggtgtg | |
| | aagactcgcatgtgcttggttgtgattcctccggcccctgaatgc | |
| | ggctaaccttaaccctggagccttgtgtcacaaaccagtgatgat | |
| | aaggtcgtaatgagcaattccgggacgggaccgactactttgggt | |
| | gtccgtgtttcttatttttcttattattgtcttatggtcacagca | |
| | tatatataacatatactgtgatc | |
| synIRES-RC13 | ttaaaacagcggatgggtaccccaccatccgacccactgggtgta | 33156 |
| | gtactctggtacttcgtacctttgtacgcctgttcttcccattgt | |
| | acccttcctgaacttccaacccaagtaacgttagaagctcaacat | |
| | ttagtacaacaggaagcaccacatccagtggtgtttagtacaagc | |
| | acttctgtttccccggagcgaggtataggctgtacccactgccaa | |
| | aaacctttaaccgttatccgccaaccaactacgtaaaagctagta | |
| | gtattatgtttttaactaggcgttcgatcaggCGACTCACTATTT | |
| | GTTTTCGCGCCCAGTTGCAAAAAGTGTCGCGCCagtttggtcgat | |
| | gaggctaggaattccccacgggtgaccgtgtcctagcctgcgtgg | |
| | cggccaacccagcttatgctgggacgcctttttatagacatggtg | |
| | tgaagactcgcatgtgcttggttgtgattcctccggcccctgaat | |
| | gcggctaaccttaaccctggagccttgtgtcacaaaccagtgatg | |
| | ataaggtcgtaatgagcaattccgggacgggaccgactactttgg | |
| | gtgtccgtgtttcttatttttcttattattgtcttatggtcacag | |
| | catatatataacatatactgtgatc | |
| synIRES-RC14 | ttaaaacagcggatgggtaccccaccatccgacccactgggtgta | 33157 |
| | gtactctggtacttcgtacctttgtacgcctgttcttcccattgt | |
| | acccttcctgaacttccaacccaagtaacgttagaagctcaacat | |
| | ttagtacaacaggaagcaccacatccagtggtgtttagtacaagc | |
| | acttctgtttccccggagcgaggtataggctgtacccactgccaa | |
| | aaacctttaaccgttatccgccaaccaactacgtaaaagctagta | |
| | gtattatgtttttaactaggcgttcgatcaggCGGACTCACTATT | |
| | TGTTTTCGCGCCCAGTTGCAAAAAGTGTCGCCGCCagtttggtcg | |
| | atgaggctaggaattccccacgggtgaccgtgtcctagcctgcgt | |
| | ggcggccaacccagcttatgctgggacgcctttttatagacatgg | |
| | tgtgaagactcgcatgtgcttggttgtgattcctccggcccctga | |
| | atgcggctaaccttaaccctggagccttgtgtcacaaaccagtga | |
| | tgataaggtcgtaatgagcaattccgggacgggaccgactacttt | |
| | gggtgtccgtgtttcttatttttcttattattgtcttatggtcac | |
| | agcatatatataacatatactgtgatc | |
| synIRES-RC15 | ttaaaacagcggatgggtaccccaccatccgacccactgggtgta | 33158 |
| | gtactctggtacttcgtacctttgtacgcctgttcttcccattgt | |
| | acccttcctgaacttccaacccaagtaacgttagaagctcaacat | |
| | ttagtacaacaggaagcaccacatccagtggtgtttagtacaagc | |
| | acttctgtttccccggagcgaggtataggctgtacccactgccaa | |
| | aaacctttaaccgttatccgccaaccaactacgtaaaagctagta | |
| | gtattatgtttttaactaggcgttcgatcaggtggaACTCACTAT | |
| | TTGTTTTCGCGCCCAGTTGCAAAAAGTGTCGtccactagtttggt | |
| | cgatgaggctaggaattccccacgggtgaccgtgtcctagcctgc | |
| | gtggggccaacccagcttatgctgggacgcctttttatagacatg | |
| | gtgtgaagactcgcatgtgcttggttgtgattcctccggcccctg | |
| | aatgcggctaaccttaaccctggagccttgtgtcacaaaccagtg | |
| | atgataaggtcgtaatgagcaattccgggacgggaccgactactt | |
| | tgggtgtccgtgtttcttatttttcttattattgtcttatggtca | |
| | cagcatatatataacatatactgtgatc | |
| synIRES-RC16 | ttaaaacagcggatgggtaccccaccatccgacccactgggtgta | 33159 |
| | gtactctggtacttcgtacctttgtacgcctgttcttcccattgt | |
| | acccttcctgaacttccaacccaagtaacgttagaagctcaacat | |
| | ttagtacaacaggaagcaccacatccagtggtgtttagtacaagc | |
| | acttctgtttccccggagcgaggtataggctgtacccactgccaa | |
| | aaacctttaaccgttatccgccaaccaactacgtaaaagctagta | |
| | gtattatgtttttaactaggcgttcgatcaggtggaGACTCACTA | |
| | TTTGTTTTCGCGCCCAGTTGCAAAAAGTGTCGCtccactagtttg | |
| | gtcgatgaggctaggaattccccacgggtgaccgtgtcctagcct | |
| | gcgtggcggccaacccagcttatgctgggacgcctttttatagac | |
| | atggtgtgaagactcgcatgtgcttggttgtgattcctccggccc | |
| | ctgaatgcggctaaccttaaccctggagccttgtgtcacaaacca | |
| | gtgatgataaggtcgtaatgagcaattccgggacgggaccgacta | |
| | ctttgggtgtccgtgtttcttatttttcttattattgtcttatgg | |
| | tcacagcatatatataacatatactgtgatc | |
| synIRES-RC17 | ttaaaacagcggatgggtaccccaccatccgacccactgggtgta | 33160 |
| | gtactctggtacttcgtacctttgtacgcctgttcttcccattgt | |
| | acccttcctgaacttccaacccaagtaacgttagaagctcaacat | |
| | ttagtacaacaggaagcaccacatccagtggtgtttagtacaagc | |
| | acttctgtttccccggagcgaggtataggctgtacccactgccaa | |
| | aaacctttaaccgttatccgccaaccaactacgtaaaagctagta | |
| | gtattatgtttttaactaggcgttcgatcaggtggaGGACTCACT | |
| | ATTTGTTTTCGCGCCCAGTTGCAAAAAGTGTCGCCtccactagtt | |
| | tggtcgatgaggctaggaattccccacgggtgaccgtgtcctagc | |
| | ctgcgtggcggccaacccagcttatgctgggacgcctttttatag | |
| | acatggtgtgaagactcgcatgtgcttggttgtgattcctccggc | |
| | ccctgaatgcggctaaccttaaccctggagccttgtgtcacaaac | |
| | cagtgatgataaggtcgtaatgagcaattccgggacgggaccgac | |
| | tactttgggtgtccgtgtttcttatttttcttattattgtcttat | |
| | ggtcacagcatatatataacatatactgtgatc | |
| synIRES-RC18 | ttaaaacagcggatgggtaccccaccatccgacccactgggtgta | 33161 |
| | gtactctggtacttcgtacctttgtacgcctgttcttcccattgt | |
| | acccttcctgaacttccaacccaagtaacgttagaagctcaacat | |
| | ttagtacaacaggaagcaccacatccagtggtgtttagtacaagc | |
| | acttctgtttccccggagcgaggtataggctgtacccactgccaa | |
| | aaacctttaaccgttatccgccaaccaactacgtaaaagctagta | |
| | gtattatgtttttaactaggcgttcgatcaggtggatttcccctc | |
| | cactagtttggtcgatgaggctaggaACTCACTATTTGTTTTCGC | |
| | GCCCAGTTGCAAAAAGTGTCGtcctagcctgcgtggcggccaacc | |
| | cagcttatgctgggacgcctttttatagacatggtgtgaagactc | |
| | gcatgtgcttggttgtgattcctccggcccctgaatgcggctaac | |
| | cttaaccctggagccttgtgtcacaaaccagtgatgataaggtcg | |
| | taatgagcaattccgggacgggaccgactactttgggtgtccgtg | |
| | tttcttatttttcttattattgtcttatggtcacagcatatatat | |
| | aacatatactgtgatc | |
| synIRES-RC19 | ttaaaacagcggatgggtaccccaccatccgacccactgggtgta | 33162 |
| | gtactctggtacttcgtacctttgtacgcctgttcttcccattgt | |
| | acccttcctgaacttccaacccaagtaacgttagaagctcaacat | |
| | ttagtacaacaggaagcaccacatccagtggtgtttagtacaagc | |
| | acttctgtttccccggagcgaggtataggctgtacccactgccaa | |
| | aaacctttaaccgttatccgccaaccaactacgtaaaagctagta | |
| | gtattatgtttttaactaggcgttcgatcaggtggatttcccctc | |
| | cactagtttggtcgatgaggctaggaattccccacggACTCACTA | |
| | TTTGTTTTCGCGCCCAGTTGCAAAAAGTGTCGccgtgtcctagcc | |
| | tgcgtggcggccaacccagcttatgctgggacgcctttttataga | |
| | catggtgtgaagactcgcatgtgcttggttgtgattcctccggcc | |
| | cctgaatgcggctaaccttaaccctggagccttgtgtcacaaacc | |
| | agtgatgataaggtcgtaatgagcaattccgggacgggaccgact | |
| | actttgggtgtccgtgtttcttatttttcttattattgtcttatg | |
| | gtcacagcatatatataacatatactgtgatc | |
| synIRES-RC20 | ttaaaacagcggatgggtaccccaccatccgacccactgggtgta | 33163 |
| | gtactctggtacttcgtacctttgtacgcctgttcttcccattgt | |
| | acccttcctgaacttccaacccaagtaacgttagaagctcaacat | |
| | ttagtacaacaggaagcaccacatccagtggtgtttagtacaagc | |
| | acttctgtttccccggagcgaggtataggctgtacccactgccaa | |
| | aaacctttaaccgttatccgccaaccaactacgtaaaagctagta | |
| | gtattatgtttttaactaggcgttcgatcaggtggatttcccctc | |
| | cactagtttggtcgatgaggctaggaattccccacgggtgaccgt | |
| | gtcctagcctgcgtggcggccaacccACTCACTATTTGTTTTCGC | |
| | GCCCAGTTGCAAAAAGTGTCGgggacgcctttttatagacatggt | |
| | gtgaagactcgcatgtgcttggttgtgattcctccggcccctgaa | |
| | tgcggctaaccttaaccctggagccttgtgtcacaaaccagtgat | |
| | gataaggtcgtaatgagcaattccgggacgggaccgactactttg | |
| | ggtgtccgtgtttcttatttttcttattattgtcttatggtcaca | |
| | gcatatatataacatatactgtgatc | |
| synIRES-RC21 | ttaaaacagcggatgggtaccccaccatccgacccactgggtgta | 33164 |
| | gtactcctggtacttcgtacctttgtacgcctgttcttcccattg | |
| | tacccttcctgaacttccaacccaagtaacgttagaagctcaaca | |
| | tttagtacaacaggaagcaccacatccagtggtgtttagtacaag | |
| | cacttctgtttccccggagcgaggtataggctgtacccactgcca | |
| | aaaacctttaaccgttatccgccaaccaactacgtaaaagctagt | |
| | agtattatgtttttaactaggcgttcgatcaggtggatttcccct | |
| | ccactagtttggtcgatgaggctaggaattccccacgggtgaccg | |
| | tgtcctagcctgcgtggcggccaacccGACTCACTATTTGTTTTC | |
| | GCGCCCAGTTGCAAAAAGTGTCGCgggacgcctttttatagacat | |
| | ggtgtgaagactcgcatgtgcttggttgtgattcctccggcccct | |
| | gaatgcggctaaccttaaccctggagccttgtgtcacaaaccagt | |
| | gatgataaggtcgtaatgagcaattccgggacgggaccgactact | |
| | ttgggtgtccgtgtttcttatttttcttattattgtcttatggtc | |
| | acagcatatatataacatatactgtgatc | |
| synIRES-RC22 | ttaaaacagcggatgggtaccccaccatccgacccactgggtgta | 33165 |
| | gtactctggtacttcgtacctttgtacgcctgttcttcccattgt | |
| | acccttcctgaacttccaacccaagtaacgttagaagctcaacat | |
| | ttagtacaacaggaagcaccacatccagtggtgtttagtacaagc | |
| | acttctgtttccccggagcgaggtataggctgtacccactgccaa | |
| | aaacctttaaccgttatccgccaaccaactacgtaaaagctagta | |
| | gtattatgtttttaactaggcgttcgatcaggtggatttcccctc | |
| | cactagtttggtcgatgaggctaggaattccccacgggtgaccgt | |
| | gtcctagcctgcgtggcggccaacccGGACTCACTATTTGTTTTC | |
| | GCGCCCAGTTGCAAAAAGTGTCGCCgggacgcctttttatagaca | |
| | tggtgtgaagactcgcatgtgcttggttgtgattcctccggcccc | |
| | tgaatgcggctaaccttaaccctggagccttgtgtcacaaaccag | |
| | tgatgataaggtcgtaatgagcaattccgggacgggaccgactac | |
| | tttgggtgtccgtgtttcttatttttcttattattgtcttatggt | |
| | cacagcatatatataacatatactgtgatc | |
| synIRES-RC23 | ttaaaacagcggatgggtaccccaccatccgacccactgggtgta | 33166 |
| | gtactctggtacttcgtacctttgtacgcctgttcttcccattgt | |
| | acccttcctgaacttccaacccaagtaacgttagaagctcaacat | |
| | ttagtacaacaggaagcaccacatccagtggtgtttagtacaagc | |
| | acttctgtttccccggagcgaggtataggctgtacccactgccaa | |
| | aaacctttaaccgttatccgccaaccaactacgtaaaagctagta | |
| | gtattatgtttttaactaggcgttcgatcaggtggatttcccctc | |
| | cactagtttggtcgatgaggctaggaattccccacgggtgaccgt | |
| | gtcctagcctgcgtggcggccaacccagcACTCACTATTTGTTTT | |
| | CGCGCCCAGTTGCAAAAAGTGTCGgctgggacgcctttttataga | |
| | catggtgtgaagactcgcatgtgcttggttgtgattcctccggcc | |
| | cctgaatgcggctaaccttaaccctggagccttgtgtcacaaacc | |
| | agtgatgataaggtcgtaatgagcaattccgggacgggaccgact | |
| | actttgggtgtccgtgtttcttatttttcttattattgtcttatg | |
| | gtcacagcatatatataacatatactgtgatc | |
| synIRES-RC24 | ttaaaacagcggatgggtaccccaccatccgacccactgggtgta | 33167 |
| | gtactctggtacttcgtacctttgtacgcctgttcttcccattgt | |
| | acccttcctgaacttccaacccaagtaacgttagaagctcaacat | |
| | ttagtacaacaggaagcaccacatccagtggtgtttagtacaagc | |
| | acttctgtttccccggagcgaggtataggctgtacccactgccaa | |
| | aaacctttaaccgttatccgccaaccaactacgtaaaagctagta | |
| | gtattatgtttttaactaggcgttcgatcaggtggatttcccctc | |
| | cactagtttggtcgatgaggctaggaattccccacgggtgaccgt | |
| | gtcctagcctgcgtggcggccaacccagcCACTCACTATTTGTTT | |
| | TCGCGCCCAGTTGCAAAAAGTGTCGGgctgggacgcctttttata | |
| | gacatggtgtgaagactcgcatgtgcttggttgtgattcctccgg | |
| | cccctgaatgcggctaaccttaaccctggagccttgtgtcacaaa | |
| | ccagtgatgataaggtcgtaatgagcaattccgggacgggaccga | |
| | ctactttgggtgtccgtgtttcttatttttcttattattgtctta | |
| | tggtcacagcatatatataacatatactgtgatc | |
| synIRES-RC25 | ttaaaacagcggatgggtaccccaccatccgacccactgggtgta | 33168 |
| | gtactctggtacttcgtacctttgtacgcctgttcttcccattgt | |
| | acccttcctgaacttccaacccaagtaacgttagaagctcaacat | |
| | ttagtacaacaggaagcaccacatccagtggtgtttagtacaagc | |
| | acttctgtttccccggagcgaggtataggctgtacccactgccaa | |
| | aaacctttaaccgttatccgccaaccaactacgtaaaagctagta | |
| | gtattatgtttttaactaggcgttcgatcaggtggatttcccctc | |
| | cactagtttggtcgatgaggctaggaattccccacgggtgaccgt | |
| | gtcctagcctgcgtggcggccaacccagcCCACTCACTATTTGTT | |
| | TTCGCGCCCAGTTGCAAAAAGTGTCGGGgctgggacgccttttta | |
| | tagacatggtgtgaagactcgcatgtgcttggttgtgattcctcc | |
| | ggcccctgaatgcggctaaccttaaccctggagccttgtgtcaca | |
| | aaccagtgatgataaggtcgtaatgagcaattccgggacgggacc | |
| | gactactttgggtgtccgtgtttcttatttttcttattattgtct | |
| | tatggtcacagcatatatataacatatactgtgatc | |
| synIRES-RC26 | ttaaaacagcggatgggtaccccaccatccgacccactgggtgta | 33169 |
| | gtactctggtacttcgtacctttgtacgcctgttcttcccattgt | |
| | acccttcctgaacttccaacccaagtaacgttagaagctcaacat | |
| | ttagtacaacaggaagcaccacatccagtggtgtttagtacaagc | |
| | acttctgtttccccggagcgaggtataggctgtacccactgccaa | |
| | aaacctttaaccgttatccgccaaccaactacgtaaaagctagta | |
| | gtattatgtttttaactaggcgttcgatcaggtggaACTCACTAT | |
| | TTGTTTTCGCGCCCAGTTGCAAAAAGTGTCGtccactagtttggt | |
| | cgatgaggctaggaattccccacgggtgaccgtgtcctagcctgc | |
| | gtggcggccaacccagcACTCACTATTTGTTTTCGCGCCCAGTTG | |
| | CAAAAAGTGTCGgctgggacgcctttttatagacatggtgtgaag | |
| | actcgcatgtgcttggttgtgattcctccggcccctgaatgcggc | |
| | taaccttaaccctggagccttgtgtcacaaaccagtgatgataag | |
| | gtcgtaatgagcaattccgggacgggaccgactactttgggtgtc | |
| | cgtgtttcttatttttcttattattgtcttatggtcacagcatat | |
| | atataacatatactgtgatc | |

1. A composition, comprising: a complex of a charge-altering releasable transporter and a circular RNA molecule comprising a protein-coding sequence.

2. (canceled)

3. The composition of claim 1, wherein the charge-altering releasable transporter comprises a mixture of oleyl (O) and nonenyl-substituted (N) carbonate monomers followed by a block of α-amino ester monomers (A).

4. (canceled)

5. (canceled)

6. The composition of claim 1, wherein the circular RNA molecule comprises an internal ribosome entry site (IRES) sequence operably linked to the protein-coding sequence, a 5′ UTR, and a 3′ UTR;
wherein the IRES sequence is a viral sequence; and
wherein the protein-coding sequence encodes a non-viral protein.

7. (canceled)

8. (canceled)

9. The composition of claim 6, wherein the IRES comprises a locked nucleic acid (LNA) against a non-base-paired linker region between domains of said IRES.

10. (canceled)

11. The composition of claim 6, wherein the IRES is a Type 1 IRES or a synthetic IRES.

12.-18. (canceled)

19. The composition of claim 6, wherein the synthetic IRES sequence comprises one or more aptamers.

20.-22. (canceled)

23. The composition of claim 19, wherein the aptamer is positioned within the secondary structure of the IRES so that itis spatially proximal to a portion of the IRES responsible for translation initiation.

24. (canceled)

25. The composition of claim 19, wherein the aptamer is an eIF4G-binding aptamer encoded by the sequence of SEQ ID NO: 33143.

26. (canceled)

27. The composition of claim 1, wherein the circular RNA molecule comprises at least one 2-thiouridine (2ThioU) or at least one 2′-O-methylcitidine (2OMeC).

28. (canceled)

29. A nucleic acid that encodes the circular RNA molecule of claim 6.

30. A host cell comprising the nucleic acid of claim 29.

31. A method of producing a protein, the method comprising contacting a cell or cell-free extract with the composition of claim 1 under conditions whereby the protein-coding nucleic acid sequence of the circular RNA is translated and the protein is produced.

32. The method of claim 31, wherein the cell is an immune cell.

33. The method of claim 32, wherein the immune cell is a macrophage, a dendritic cell or a monocyte.

34. A method of delivering a protein to a subject, comprising: administering the composition of claim 1 to a subject.

35.-38. (canceled)

39. A method for expressing a protein in a subject comprising administering to the subject the composition of claim 1, wherein the circular RNA molecule comprises a protein coding sequence that is operably linked to an internal ribosome entry site (IRES) sequence.

40. (canceled)

41. A method of treating cancer in a subject, wherein the method comprises
administering a composition, comprising: a complex of a charge-altering releasable transporter and a circular RNA molecule comprising a sequence that encodes a tumor antigen and an IRES operably linked to the sequence encoding the tumor antigen.

42.-43. (canceled)

44. A method of inducing an immune response in a subject in need comprising administering to the subject a composition comprising a complex of a charge-altering releasable transporter and a circular RNA molecule, wherein the charge-altering releasable transporter and the circRNA molecule are complexed at a 1:10 charge ratio, and wherein the circRNA is directed to immune cells.

45. The method of claim 44, wherein the circular RNA molecule comprises a sequence encoding a therapeutic protein and an IRES linked to the sequence encoding the therapeutic protein.

46.-50. (canceled)

51. The method of claim 44, wherein the immune cells are macrophages, dendritic cells and/or monocytes.

The application's sequence listing, which the Patent Office published only in electronic form, follows.

SEQUENCE LISTING (33197 sequences)

SEQ ID NO: 1 - DNA, 203 bp, synthetic construct
  source 1..203: mol_type = other DNA
ggcgcgccagtcctccgggaacccctaccccatccccttattcagcacatgaaataaacaaggggcatccaaatcttgcggcaacgcccccgggacatgcatcgtcccctggactctctcaaaccccttatccctctggacagaatgcaggtccaaccacgctggtataccctcaaacccctcagacacgactcggaccgatg

SEQ ID NO: 2 - DNA, 203 bp, synthetic construct
  source 1..203: mol_type = other DNA
ggcgcgccagtccttgctccggctgccggccggcggccccgcgctcgcccgccccgcttccgcccgctgtcctgctgcacgaacccttccaactctcctttcctcccccacccttgagttacccctctgtctttcctgctgttgcgcgggtgctcccacagcggagcggagattacagagccgccgggcgactcggaccgatg

SEQ ID NO: 3 - DNA, 203 bp, synthetic construct
  source 1..203: mol_type = other DNA
ggcgcgccagtcctctgtctctgcctggcaggcgcacgcgcccagcaccctgcctccggcgatgccgccccagcccctctgatggccctcctctctgctgccactcattccagaacaggaggcatgagcccggaacgcgcttgcttttaggagacagccactttctgtgtggtacgctggattcaaggcgactcggaccgatg

SEQ ID NO: 4 - DNA, 203 bp, synthetic construct
  source 1..203: mol_type = other DNA
ggcgcgccagtccttttcgcgagtgtgagagggaagcgccgcggcctgtatttctagacctgcccttcgcctggttcgtggcgccttgtgaccccgggcccctgccgcctgcaagtcggaaattgcgctgtgctcctgtgctacggcctgtggctggactgcctgctgctgcccaactggctggcaagcgactcggaccgatg

SEQ ID NO: 5 - DNA, 203 bp, synthetic construct
  source 1..203: mol_type = other DNA
ggcgcgccagtcctaagtcctggagcctccagagggctgtcggcgcagtagcagcgagcagcagagtccgcacgctccggcgaggggcagaagagcgcgagggagcgcggggcagcagaagcgagagccgagcgcggacccagccaggacccacagccctccccagctgcccaggaagagccccagcccgactcggaccgatg

SEQ ID NO: 6 - DNA, 203 bp, synthetic construct
  source 1..203: mol_type = other DNA
ggcgcgccagtcctgggacctggaagcgccccagccccgcagcgatcgcagattcggctttcaaacaaaagaggcgccccggggggtgggaccgggacctcacccggtcctcgcagagttgcggccgcccgccccttcagccccggctctccgtatgcgcatgagcagaggcgcctccctctgttcctcgactcggaccgatg

SEQ ID NO: 7 - DNA, 203 bp, synthetic construct
  source 1..203: mol_type = other DNA
ggcgcgccagtcctttaaaacagcctgtgggttgatcccacccacagggcccattgggcgctagcactctggtatcacggtacctttgtgcgcctgttttataccccctcccccaactgtaacttagaagtaacacacaccgatcaacagtcagcgtggcacaccagccacgttttgatcaagcacttcgactcggaccgatg

SEQ ID NO: 8 - DNA, 203 bp, synthetic construct
  source 1..203: mol_type = other DNA
ggcgcgccagtcctttaaaacagctctggggttgttcccaccccagaggcccacgtggcggctagtacactggtatcacggtacctttgtacgcctgttttatactccctcccccgcaacttagaagcatacaattcaagctcaataggagggggtgcaagccagcgcctccgtgggcaagcactactcgactcggaccgatg

SEQ ID NO: 9 - DNA, 203 bp, synthetic construct
  source 1..203: mol_type = other DNA
ggcgcgccagtcctgataaaagaacctataatcccttcgcacaccgcgtcacaccgcgctatatgctgctcattaggaattacggctccttttttgtggatacaatctcttgtatacgatatacttattgttaatttcattgacctttacgcaatcctgcgtaaatgctggtatagggtgtacttcggcgactcggaccgatg

SEQ ID NO: 10 - DNA, 203 bp, synthetic construct
  source 1..203: mol_type = other DNA
ggcgcgccagtcctcaaaattgcgtgcgagaaagcacgcaaatcaaagtctagtgcgtaattcactcactaccggcgtaatttgtggttatgctattgcgttgagagtgttgtgggcgtagtacgggggcttttggtttgtgtgtgattaatatgcattcccagttttgtttagttttagattactgacgactcggaccgatg

SEQ ID NO: 11 - DNA, 203 bp, synthetic construct
  source 1..203: mol_type = other DNA
ggcgcgccagtcctcttctttccggggctcctagggacgccagaaggaagtcaacctctgctgcttctccttggcctgcgttggaccttcctttttttgttgtttttttttgtttttcccctttcttccttttgaattaactggcttcttggctggatgttttcaacttctttcctggctgcgaacttcgactcggaccgatg

SEQ ID NO: 12 - DNA, 203 bp, synthetic construct
  source 1..203: mol_type = other DNA
ggcgcgccagtcctttctccttggcctgcgttggaccttcctttttttgttgtttttttttgtttttcccctttcttccttttgaattaactggcttcttggctggatgttttcaacttctttcctggctgcgaacttttccccaattgttttccttttacaacagggggagaaagtgctctgtggtccgactcggaccgatg

SEQ ID NO: 13 - DNA, 203 bp, synthetic construct
  source 1..203: mol_type = other DNA
ggcgcgccagtcctaacttctttcctggctgcgaacttttccccaattgttttccttttacaacagggggagaaagtgctctgtggtccgaggcgagccgtgaagttgcgtgtgcgtggcagtgtgcgtggcaggatgtgcgtgcgtgtgtaacccgagccgcccgatctgtttcgatctgcgccgcgcgactcggaccgatg

SEQ ID NO: 14 - DNA, 203 bp, synthetic construct
  source 1..203: mol_type = other DNA
ggcgcgccagtcctcgtggcagtgtgcgtggcaggatgtgcgtgcgtgtgtaacccgagccgcccgatctgtttcgatctgcgccgcggagccctccctcaaggcccgctccacctgctgcggttacgcggcgctcgtgggtgttcgtgcctcggagcagctaaccggcgggtgctgggcgacggtggcgactcggaccgatg

SEQ ID NO: 15 - DNA, 203 bp, synthetic construct
  source 1..203: mol_type = other DNA
ggcgcgccagtcctgtcagggctgagtcacccagctgatgtagacagtggctgccttccgaagagtgcgtgtttgcatgtgtgtgactctgcggctgctcaactcccaacaaaccagaggaccagccacaaacttaaccaacatccccaaacccgagttcacagatgtgggagagctgtagaaccctgcgactcggaccgatg

SEQ ID NO: 16 - DNA, 203 bp, synthetic construct
  source 1..203: mol_type = other DNA
ggcgcgccagtcctatgtgggagagctgtagaaccctgagtgtcatcgactgggccttcttatgattgttgttttaagattagctgaagatctctgaaacgctgaattttctgcactgagcgttttgacagaattcattgagagaacagagaacatgacaagtacttctagctcagcactgctccaaccgactcggaccgatg

SEQ ID NO: 17 - DNA, 203 bp, synthetic construct
  source 1..203: mol_type = other DNA
ggcgcgccagtcctcttctagctcagcactgctccaactactgaagctgattttcaaggctacttaaaaaaatctgcagcgtacattaatggatttctgttgtgtttaaattctccacagattgtattgtaaatattttatgaagtagagcatatgtatatatttatatatacgtgcacatacattagcgactcggaccgatg

SEQ ID NO: 18 - DNA, 203 bp, synthetic construct
  source 1..203: mol_type = other DNA
ggcgcgccagtccttatatatacgtgcacatacattagtagcactacctttggaagtctcagctcttgcttttcgggactgaagccagttttgcatgataaaagtggccttgttacgggagataattgtgttctgttgggactttagacaaaactcacctgcaaaaaactgacaggcattaactactgcgactcggaccgatg

SEQ ID NO: 19 - DNA, 203 bp, synthetic construct
  source 1..203: mol_type = other DNA
ggcgcgccagtcctcttgcttttcgggactgaagccagttttgcatgataaaagtggccttgttacgggagataattgtgttctgttgggactttagacaaaactcacctgcaaaaaactgacaggcattaactactggaacttccaaataatgtgtttgctgatcgttttactcttcgcataaatatcgactcggaccgatg

SEQ ID NO: 20 - DNA, 203 bp, synthetic construct
  source 1..203: mol_type = other DNA
ggcgcgccagtcctaaaactgacaggcattaactactggaacttccaaataatgtgtttgctgatcgttttactcttcgcataaatattttaggaagtgtatgagaattttgccttcaggaacttttctaacagccaaagacagaacttaacctctgcaagcaagattcgtggaagatagtctccactcgactcggaccgatg

SEQ ID NO: 21 - DNA, 203 bp, synthetic construct
  source 1..203: mol_type = other DNA
ggcgcgccagtcctttcaggaacttttctaacagccaaagacagaacttaacctctgcaagcaagattcgtggaagatagtctccactttttaatgcactaagcaatcggttgctaggagcccatcctgggtcagaggccgatccgcagaaccagaacgttttcccctcctggactgttagtaacttacgactcggaccgatg

SEQ ID NO: 22 - DNA, 203 bp, synthetic construct
  source 1..203: mol_type = other DNA
ggcgcgccagtcctgggtatgtggcgagacagagccctgcacccctaattcccggtggaaaactcctgttgccgtttccctccaccggcctggagtctcccagtcttgtcccggcagtgccgccctccccactaagacctaggcgcaaaggcttggctcatggttgacagctcagagagagaaagatccgactcggaccgatg

SEQ ID NO: 23 - DNA, 203 bp, synthetic construct
  source 1..203: mol_type = other DNA
ggcgcgccagtcctccacacacagcgcgggcttctagcgctcggcaccggcgggccaggcgcgtcctgccttcatttatccagcagcttttcggaaaatgcatttgctgttcggagtttaatcagaagacgattcctgcctccgtccccggctccttcatcgtcccatctcccctgtctctctcctggcgactcggaccgatg

SEQ ID NO: 24 - DNA, 203 bp, synthetic construct
  source 1..203: mol_type = other DNA
ggcgcgccagtcctcctgccttcatttatccagcagcttttcggaaaatgcatttgctgttcggagtttaatcagaagacgattcctgcctccgtccccggctccttcatcgtcccatctcccctgtctctctcctggggaggcgtgaagcggtcccgtggatagagattcatgcctgtgtccgcgcgcgactcggaccgatg

SEQ ID NO: 25 - DNA, 203 bp, synthetic construct
  source 1..203: mol_type = other DNA
ggcgcgccagtccttcgatctggaaatcctcctaatttttactccctctccccccgactcctgattcattgggaagtttcaaatcagctataactggagagtgctgaagattgatgggatcgttgccttatgcatttgttttggttttacaaaaaggaaacttgacagaggatcatgctgtacttaaacgactcggaccgatg

SEQ ID NO: 26 - DNA, 203 bp, synthetic construct
  source 1..203: mol_type = other DNA
ggcgcgccagtcctaaacgcacctgattttttacttattagtttgttttttctttaacctttcagcatcacagaggaagtagactgatattaacaatacttactaataataacgtgcctcatgaaataaagatccgaaaggaattggaataaaaatttcctgcgtctcatgccaagagggaaacaccacgactcggaccgatg

SEQ ID NO: 27 - DNA, 203 bp, synthetic construct
  source 1..203: mol_type = other DNA
ggcgcgccagtccttgcctcatgaaataaagatccgaaaggaattggaataaaaatttcctgcgtctcatgccaagagggaaacaccagaatcaagtgttccgcgtgattgaagacaccccctcgtccaagaatgcaaagcacatccaataaaatagctggattataactcctcttctttctctggggcgactcggaccgatg

SEQ ID NO: 28 - DNA, 203 bp, synthetic construct
  source 1..203: mol_type = other DNA
ggcgcgccagtcctaaattctacataagagtctatcattgatttctttttgtggtaaaaatcttagttcatgtgaagaaatttcatgtgaatgttttagctatcaaacagtactgtcacctactcatgcacaaaactgcctcccaaagacttttcccaggtccctcgtatcaaaacattaagagtatacgactcggaccgatg

SEQ ID NO: 29 - DNA, 203 bp, synthetic construct
  source 1..203: mol_type = other DNA
ggcgcgccagtcctgccaggggtccgcaacccttgccgcatccacgaaactttgcccatagcagcgggcgggcactttgcactggaacttacaacacccgagcaaggacgcgactctcccgacgcggggaggctattctgcccatttggggacacttccccgccgctgccaggacccgcttctctgaacgactcggaccgatg

SEQ ID NO: 30 - DNA, 203 bp, synthetic construct
  source 1..203: mol_type = other DNA
ggcgcgccagtcctcgggcgggcactttgcactggaacttacaacacccgagcaaggacgcgactctcccgacgcggggaggctattctgcccatttggggacacttccccgccgctgccaggacccgcttctctgaaaggctctccttgcagctgcttagacgctggatttttttcgggtagtggaacgactcggaccgatg

SEQ ID NO: 31 - DNA, 203 bp, synthetic construct
  source 1..203: mol_type = other DNA
ggcgcgccagtcctggaacttacaacacccgagcaaggacgcgactctcccgacgcggggaggctattctgcccatttggggacacttccccgccgctgccaggacccgcttctctgaaaggctctccttgcagctgcttagacgctggatttttttcgggtagtggaaaaccagcagcctcccgcgacgactcggaccgatg

SEQ ID NO: 32 - DNA, 203 bp, synthetic construct
  source 1..203: mol_type = other DNA
ggcgcgccagtcctcctcccccttccctcccccttttttttgttttccgttcccctttcccctcccttccctatccccgacgaccggatcctgaggaggcagctgcggtggcagctgctgagttctcggtgaaggtatttcatttctcctgtcccctcccctccccaccccatctattaatattattccgactcggaccgatg

SEQ ID NO: 33 - DNA, 203 bp, synthetic construct
  source 1..203: mol_type = other DNA
ggcgcgccagtccttctagatgggggtcctgggccccagggtgtgcagccactgacttggggactgctggtggggtagggatgagggagggaggggcattgtgatgtacagggctgctctgtgagatcaagggtctcttaagggtgggagctggggcagggactacgagagcagccagatgggctgaacgactcggaccgatg

SEQ ID NO: 34 - DNA, 203 bp, synthetic construct
  source 1..203: mol_type = other DNA
ggcgcgccagtcctatgtatgcatgtgtatgtatgtatatgcatgtatgtgtatgtgtatatatgtatgtgtgtgtatgtatatgtgtgtgtatgtgtatgtgtgtgtgtatgtgtgtgtgtatgtatgtatgtatgtatatgtattatacacatatacacatattggtttttttaatcatttgagagcgactcggaccgatg

SEQ ID NO: 35 - DNA, 203 bp, synthetic construct
  source 1..203: mol_type = other DNA
ggcgcgccagtcctcccactcggcagccttcctctccaggatccccaaggctaggaggccaacctactaacaggtgggtgggtatggtgtgtggtttcactcagttcttctcatggggtttctctgagctccattcataccagaaagggagcaggagagagaggacaagtggatccaacagccttcgccgactcggaccgatg

SEQ ID NO: 36 - DNA, 203 bp, synthetic construct
  source 1..203: mol_type = other DNA
ggcgcgccagtccttactaacaggtgggtgggtatggtgtgtggtttcactcagttcttctcatggggtttctctgagctccattcataccagaaagggagcaggagagagaggacaagtggatccaacagccttcgctccaggggaatcagggcatcgcctccttttctgggaggacactcccttctcgactcggaccgatg

SEQ ID NO: 37 - DNA, 203 bp, synthetic construct
  source 1..203: mol_type = other DNA
ggcgcgccagtcctggggtttctctgagctccattcataccagaaagggagcaggagagagaggacaagtggatccaacagccttcgctccaggggaatcagggcatcgcctccttttctgggaggacactcccttctgatggtgaatgggaactcccttcctcctgcagcagcctgcctgcagctgtcgactcggaccgatg

SEQ ID NO: 38 - DNA, 203 bp, synthetic construct
  source 1..203: mol_type = other DNA
ggcgcgccagtcctacaagtggatccaacagccttcgctccaggggaatcagggcatcgcctccttttctgggaggacactcccttctgatggtgaatgggaactcccttcctcctgcagcagcctgcctgcagctgtcctggtagaacagtgtggacattgcagaagctgtcactgccccagaaagacgactcggaccgatg

SEQ ID NO: 39 - DNA, 203 bp, synthetic construct
  source 1..203: mol_type = other DNA
ggcgcgccagtcctggctggcgtgtgaccccgttttgagtcaggtggacagagggctggccaccttcggaaccatgggtgcaatacggagtcagacctcaatacaagcccactctttcacatatttgaacttttttcacatatcaactttttttgttcactgtgcagggattgttcattgctgctggacgactcggaccgatg

SEQ ID NO: 40 - DNA, 203 bp, synthetic construct
  source 1..203: mol_type = other DNA
ggcgcgccagtccttttcacatatttgaacttttttcacatatcaactttttttgttcactgtgcagggattgttcattgctgctggaggaagatcatggactgtcgcgggaaactgaagtggttgagtatccactagtcgtggatgagggcagtgacttcgcagttttttgcgaattacacatctctcgactcggaccgatg

SEQ ID NO: 41 - DNA, 203 bp, synthetic construct
  source 1..203: mol_type = other DNA
ggcgcgccagtcctcagggattgttcattgctgctggaggaagatcatggactgtcgcgggaaactgaagtggttgagtatccactagtcgtggatgagggcagtgacttcgcagttttttgcgaattacacatctctttgattatgttgtgactagttttgttagatagtcatttagtgtttgggatcgactcggaccgatg

SEQ ID NO: 42 - DNA, 203 bp, synthetic construct
  source 1..203: mol_type = other DNA
ggcgcgccagtcctggagaacttcacagttgctactcctgtgataggtttatcttagtttcattgtggtataaatggaatagcaggtgttgtcaggtacaaggtttgtagcttgccaatatgttcattaccaacactgcagattcccattgagttggtgggggttttgttacctttgttttttttctccgactcggaccgatg

SEQ ID NO: 43 - DNA, 203 bp, synthetic construct
  source 1..203: mol_type = other DNA
ggcgcgccagtcctacaaaagaggcgccccggggggtgggaccgggacctcacccggtcctcgcagagttgcggccgcccgccccttcagccccggctctccgtatgcgcatgagcagaggcgcctccctctgttcctcccaaggctaaactttctaattcccttctttgggctcgggggctcccggacgactcggaccgatg

SEQ ID NO: 44 - DNA, 203 bp, synthetic construct
  source 1..203: mol_type = other DNA
ggcgcgccagtcctgcagaggcgcctccctctgttcctcccaaggctaaactttctaattcccttctttgggctcgggggctcccggagcagggcgagagctcgcgtcgccggaaaggaagacgggaagaaagggcaggcggctcggcgggcgtcttctccactcctctgccgcgtccccgtggctgccgactcggaccgatg

SEQ ID NO: 45 - DNA, 203 bp, synthetic construct
  source 1..203: mol_type = other DNA
ggcgcgccagtcctgccgggcgaactcaaggggcgcagctctttgctttgacagagctggccggcggaggcgtgcagagcggcgagccggcgagccaggctgagaaactcgacccgggaacaaagaggggtcggactgagtgtgtgtgtcggctcgagctccgggagaggcatttgcccgaggccccgcgactcggaccgatg

SEQ ID NO: 46 - DNA, 203 bp, synthetic construct
  source 1..203: mol_type = other DNA
ggcgcgccagtcctcggaggcgtgcagagcggcgagccggcgagccaggctgagaaactcgacccgggaacaaagaggggtcggactgagtgtgtgtgtcggctcgagctccgggagaggcatttgcccgaggccccgctgtgactccccgagactccgcagtgccctccactgggagtccccgcgctcgactcggaccgatg

SEQ ID NO: 47 - DNA, 203 bp, synthetic construct
  source 1..203: mol_type = other DNA
ggcgcgccagtcctgagaggcatttgcccgaggccccgctgtgactccccgagactccgcagtgccctccactgggagtccccgcgcttgccggaaaaactttattcttggcaaacttctctttctcttcccctcctcctcggcccccatcttctgctcctcctccttctctagcagattaaatgagccgactcggaccgatg

SEQ ID NO: 48 - DNA, 203 bp, synthetic construct
  source 1..203: mol_type = other DNA
ggcgcgccagtcctccttctctagcagattaaatgagcctcgagaagaaaaaccgaagcgaaagggaagaaaataagaagatctaaaacggacatctccagcgtgggtggctcctttttctttttctttttttcccacccttcaggaagtggacgtttcgttatcttctgatccttgcaccttcttttcgactcggaccgatg

SEQ ID NO: 49 - DNA, 203 bp, synthetic construct
  source 1..203: mol_type = other DNA
ggcgcgccagtcctggaagaaaataagaagatctaaaacggacatctccagcgtgggtggctcctttttctttttctttttttcccacccttcaggaagtggacgtttcgttatcttctgatccttgcaccttcttttggggcaaacggggcccttctgcccagatcccctctcttttctcggaaaaccgactcggaccgatg

SEQ ID NO: 50 - DNA, 203 bp, synthetic construct
  source 1..203: mol_type = other DNA
ggcgcgccagtccttttttctttttctttttttcccacccttcaggaagtggacgtttcgttatcttctgatccttgcaccttcttttggggcaaacggggcccttctgcccagatcccctctcttttctcggaaaacaaactactaagtcggcatccggggtaactacagtggagagggtttccgcgcgactcggaccgatg

SEQ ID NO: 51 - DNA, 203 bp, synthetic construct
  source 1..203: mol_type = other DNA
ggcgcgccagtcctatcccctctcttttctcggaaaacaaactactaagtcggcatccggggtaactacagtggagagggtttccgcggagacgcgccgccggaccctcctctgcactttggggaggcgtgctccctccagaaccggcgttctccgcgcgcaaatcccggcgacgcggggtcgcggggcgactcggaccgatg

SEQ ID NO: 52 - DNA, 203 bp, synthetic construct
  source 1..203: mol_type = other DNA
ggcgcgccagtcctcactttggggaggcgtgctccctccagaaccggcgttctccgcgcgcaaatcccggcgacgcggggtcgcggggtggccgccggggcagcctcgtctagcgcgcgccgcgcagacgcccccggagtcgccagctaccgcagccctcgccgcccagtgcccttcggcctcggggccgactcggaccgatg

SEQ ID NO: 53 - DNA, 203 bp, synthetic construct
  source 1..203: mol_type = other DNA
ggcgcgccagtccttttttaaatttgcaattttatattttgcaaatattttgagagacattgatttttctccccgtgctcccccgttcttccctgcggagtgcgctgcgccgcccagccctgtcgccccccggaggtgatccctccctcctgcctgcccgccagcctgacctgtgcccggctcgcgggcgactcggaccgatg

SEQ ID NO: 54 - DNA, 203 bp, synthetic construct
  source 1..203: mol_type = other DNA
ggcgcgccagtcctccgtgctcccccgttcttccctgcggagtgcgctgcgccgcccagccctgtcgccccccggaggtgatccctccctcctgcctgcccgccagcctgacctgtgcccggctcgcgggccgcagcctcggcccccgcgcgcccccggcagctctcggcgcgatgagcatagagacgcgactcggaccgatg

SEQ ID NO: 55 - DNA, 203 bp, synthetic construct
  source 1..203: mol_type = other DNA
ggcgcgccagtcctgcaatccggagtgtcagctctccatctgtctctgcctggcaggcgcacgcgcccagcaccctgcctccggcgatgccgccccagcccctctgatggccctcctctctgctgccactcattccagaacaggaggcatgagcccggaacgcgcttgcttttaggagacagccacttcgactcggaccgatg

SEQ ID NO: 56 - DNA, 203 bp, synthetic construct
  source 1..203: mol_type = other DNA
ggcgcgccagtcctttgtaagtatcattatgaactaatgaattttcaacatatttgatatatttcaatccattgccatcattgttcttatcgatatttgagttggctcactttgccagtaagagtctattcaaattggcttctgagtccatttgacacaacacctttgatctttgacagtttccttggcgactcggaccgatg

SEQ ID NO: 57 - DNA, 203 bp, synthetic construct
  source 1..203: mol_type = other DNA
ggcgcgccagtcctcaatccattgccatcattgttcttatcgatatttgagttggctcactttgccagtaagagtctattcaaattggcttctgagtccatttgacacaacacctttgatctttgacagtttccttggttttaggtgctagatgatttctcaggctcaccttagacatttcctgccaccgactcggaccgatg

SEQ ID NO: 58 - DNA, 203 bp, synthetic construct
  source 1..203: mol_type = other DNA
ggcgcgccagtcctctcaccttagacatttcctgccacagacttagaatcagccatttctctaaggaccctgattccatttcatgagaaatgatagagaccacaatcaaaacaagtcatgaatttatactgatattttcaattcaaattaaagatgaggtttttgctaaatttttttgagtttatattcgactcggaccgatg

SEQ ID NO: 59 - DNA, 203 bp, synthetic construct
  source 1..203: mol_type = other DNA
ggcgcgccagtccttttcctaattagtaacataattattcatttgatgggtaaatattttagggccgattctttggttttatagccaagataccctgttgataaagtcttgtgggagcaattataagactggcttattttgaagctttttaaaaaagacatccttacctgttttaactgtagattatacgactcggaccgatg

SEQ ID NO: 60 - DNA, 203 bp, synthetic construct
  source 1..203: mol_type = other DNA
ggcgcgccagtcctgctgggagcgtgctttccacgacggtgacacgcttccctggattggcagccagactgccttccgggtcactgccatggaggagccgcagtcagatcctagcgtcgagccccctctgagtcaggaaacattttcagacctatggaaactacttcctgaaaacaacgttctgtccccgactcggaccgatg

SEQ ID NO: 61 - DNA, 203 bp, synthetic construct
  source 1..203: mol_type = other DNA
ggcgcgccagtcctatggaggagccgcagtcagatcctagcgtcgagccccctctgagtcaggaaacattttcagacctatggaaactacttcctgaaaacaacgttctgtcccccttgccgtcccaagcaatggatgatttgatgctgtccccggacgatattgaacaatggttcactgaagacccacgactcggaccgatg

SEQ ID NO: 62 - DNA, 203 bp, synthetic construct
  source 1..203: mol_type = other DNA
ggcgcgccagtccttttgcacctctccctgcccgggtgctcgagctgccgttgcaaagccaactttggaaaaagttttttgggggagacttgggccttgaggtgcccagctccgcgctttccgattttgggggcctttccagaaaatgttgcaaaaaagctaagccggcgggcagaggaaaacgcctgcgactcggaccgatg

SEQ ID NO: 63 - DNA, 203 bp, synthetic construct
  source 1..203: mol_type = other DNA
ggcgcgccagtcctcgctttccgattttgggggcctttccagaaaatgttgcaaaaaagctaagccggcgggcagaggaaaacgcctgtagccggcgagtgaagacgaaccatcgactgccgtgttccttttcctcttggaggttggagtcccctgggcgcccccacaccggtagacgcctcggctggcgactcggaccgatg

SEQ ID NO: 64 - DNA, 203 bp, synthetic construct
  source 1..203: mol_type = other DNA
ggcgcgccagtcctccggcgggcagaggaaaacgcctgtagccggcgagtgaagacgaaccatcgactgccgtgttccttttcctcttggaggttggagtcccctgggcgcccccacaccggtagacgcctcggctggttcgcgacgcagccccccggccgtggatgctcactcgggctcgggatccgcgactcggaccgatg

SEQ ID NO: 65 - DNA, 203 bp, synthetic construct
  source 1..203: mol_type = other DNA
ggcgcgccagtcctgactgccgtgttccttttcctcttggaggttggagtcccctgggcgcccccacaccggtagacgcctcggctggttcgcgacgcagccccccggccgtggatgctcactcgggctcgggatccgcccaggtagccggctcggacccaggtcctgcgcccaggtcctcccctgcccgactcggaccgatg

SEQ ID NO: 66 - DNA, 203 bp, synthetic construct
  source 1..203: mol_type = other DNA
ggcgcgccagtcctcacaccggtagacgcctcggctggttcgcgacgcagccccccggccgtggatgctcactcgggctcgggatccgcccaggtagccggctcggacccaggtcctgcgcccaggtcctcccctgccccccagcgacggagccggggccgggggcggcggcgcccgggggccatgcgcgactcggaccgatg

SEQ ID NO: 67 - DNA, 203 bp, synthetic construct
  source 1..203: mol_type = other DNA
ggcgcgccagtcctcagcctctgcagcggccgcggtggctgaggaggcccgagaggagtcggtggcagcggcggcggcgggaccggcagcagcagcagcagcagcagcagcaaccactagcctcctgccccgcggcgctgccgcacgagccccacgagccgctcaccccgccgttctcagcgctgccccgactcggaccgatg

SEQ ID NO: 68 - DNA, 203 bp, synthetic construct
  source 1..203: mol_type = other DNA
ggcgcgccagtcctcactagcctcctgccccgcggcgctgccgcacgagccccacgagccgctcaccccgccgttctcagcgctgcccgaccccgctcgcgcgccctcccgccgccagtcccggcagcgccctcagttgtcctccgactcgccctcggccttccgcgccagccgcagccacagccgcacgactcggaccgatg

SEQ ID NO: 69 - DNA, 203 bp, synthetic construct
  source 1..203: mol_type = other DNA
ggcgcgccagtcctccagtcccggcagcgccctcagttgtcctccgactcgccctcggccttccgcgccagccgcagccacagccgcaacgccacccgcagccacagccacagccacagccccaggcatagccttcggcacagccccggctccggctcctgcggcagctcctctgggcaccgtccctgcgactcggaccgatg

SEQ ID NO: 70 - DNA, 203 bp, synthetic construct
  source 1..203: mol_type = other DNA
ggcgcgccagtcctcatcaccgaacgatgagagaggactacagcgacaaagtgaaagccagccactggagtcgcagcccgcctcggccgccgcgggagcggttcgagttgggagacggccggaagccagtaaaagaagagaaaatggaagaaagggacctgctgtccgacttacaggacatcagcgaccgactcggaccgatg

SEQ ID NO: 71 - DNA, 203 bp, synthetic construct
  source 1..203: mol_type = other DNA
ggcgcgccagtcctacggccggaagccagtaaaagaagagaaaatggaagaaagggacctgctgtccgacttacaggacatcagcgacagcgagaggaagaccagctcggccgagtcctcgtcagcagaatcaggctcaggttctgaggaagaagaggaggaggaggaagaggaggaggaggaagggacgactcggaccgatg

SEQ ID NO: 72 - DNA, 203 bp, synthetic construct
  source 1..203: mol_type = other DNA
ggcgcgccagtccttcagcagaatcaggctcaggttctgaggaagaagaggaggaggaggaagaggaggaggaggaagggagcaccagtgaagaatcagaggaggaagaggaagaggaggaggaggagaccggcagcaactctgaggaggcatcagagcagtctgccgaagaagtaagtgaggaagaacgactcggaccgatg

SEQ ID NO: 73 - DNA, 203 bp, synthetic construct
  source 1..203: mol_type = other DNA
ggcgcgccagtcctgtttacatatttatgtaaaataagcatttaaaaattattagttttattctgcctgcttaaatattactttcctcaaaaagagaaaacaaaaatgctagattttactttatgacttgaatgatgtggtaatgtcgaactctagtatttagaattagaatgtttcttagcggtcgtcgactcggaccgatg

SEQ ID NO: 74 - DNA, 203 bp, synthetic construct
  source 1..203: mol_type = other DNA
ggcgcgccagtccttttactttatgacttgaatgatgtggtaatgtcgaactctagtatttagaattagaatgtttcttagcggtcgtgtagttatttttatgtcataagtggataatttgttagctcctataacaaaagtctgttgcttgtgtttcacattttggatttcctaatataatgttctctcgactcggaccgatg

SEQ ID NO: 75 - DNA, 203 bp, synthetic construct
  source 1..203: mol_type = other DNA
ggcgcgccagtcctatcaacctgagctttctccgcctcttccgagctgcccggctcatcaaacttctccgtcagggttacaccatccgcattcttctctggacctttgtgcagtccttcaaggccctgccttatgtctgtctgctgatcgccatgctcttcttcatctatgccatcattgggatgcagcgactcggaccgatg

SEQ ID NO: 76 - DNA, 203 bp, synthetic construct
  source 1..203: mol_type = other DNA
ggcgcgccagtcctacttccggaccttcttccaggccctcatgcttctcttccggagtgccaccggggaagcttggcacaacatcatgctttcctgcctcagcgggaaaccgtgtgataagaactctggcatcctgactcgagagtgtggcaatgaatttgcttatttttactttgtttccttcatctcgactcggaccgatg

SEQ ID NO: 77 - DNA, 203 bp, synthetic construct
  source 1..203: mol_type = other DNA
ggcgcgccagtcctggggaagcttggcacaacatcatgctttcctgcctcagcgggaaaccgtgtgataagaactctggcatcctgactcgagagtgtggcaatgaatttgcttatttttactttgtttccttcatcttcctctgctcgtttctgatgctgaatctctttgtcgccgtcatcatggaccgactcggaccgatg

SEQ ID NO: 78 - DNA, 203 bp, synthetic construct
  source 1..203: mol_type = other DNA
ggcgcgccagtcctatttttactttgtttccttcatcttcctctgctcgtttctgatgctgaatctctttgtcgccgtcatcatggacaactttgagtacctcacccgagactcctccatcctgggcccccaccacctggatgagtacgtgcgtgtctgggccgagtatgaccccgcagcttggggcccgactcggaccgatg

SEQ ID NO: 79 - DNA, 203 bp, synthetic construct
  source 1..203: mol_type = other DNA
ggcgcgccagtcctctccatcctgggcccccaccacctggatgagtacgtgcgtgtctgggccgagtatgaccccgcagcttggggccgcatgccttacctggacatgtatcagatgctgagacacatgtctccgcccctgggtctggggaagaagtgtccggccagagtggcttacaagcggcttctcgactcggaccgatg

SEQ ID NO: 80 - DNA, 203 bp, synthetic construct
  source 1..203: mol_type = other DNA
ggcgcgccagtcctagtatgaccccgcagcttggggccgcatgccttacctggacatgtatcagatgctgagacacatgtctccgcccctgggtctggggaagaagtgtccggccagagtggcttacaagcggcttctgcggatggacctgcccgtcgcagatgacaacaccgtccacttcaattccacgactcggaccgatg

SEQ ID NO: 81 - DNA, 203 bp, synthetic construct
  source 1..203: mol_type = other DNA
ggcgcgccagtcctacaacaccgtccacttcaattccaccctcatggctctgatccgcacagccctggacatcaagattgccaagggaggagccgacaaacagcagatggacgctgagctgcggaaggagatgatggcgatttggcccaatctgtcccagaagacgctagacctgctggtcacacctccgactcggaccgatg

SEQ ID NO: 82 - DNA, 203 bp, synthetic construct
  source 1..203: mol_type = other DNA
ggcgcgccagtcctcggcttgaggcagagaccaggaggcagctagaggagcagacgtctcactccgctcgcggaagggtgtgagaggggtgtgtgggggtcggcagcgaggggtgtgtgccatcagccaccggcgacgatctgagacagtcgcagcggctttccgagcggcgtccgcttcccgcccggcgactcggaccgatg

SEQ ID NO: 83 - DNA, 203 bp, synthetic construct
  source 1..203: mol_type = other DNA
ggcgcgccagtcctcgctcgcggaagggtgtgagaggggtgtgtgggggtcggcagcgaggggtgtgtgccatcagccaccggcgacgatctgagacagtcgcagcggctttccgagcggcgtccgcttcccgcccgggcagctcccgccagaggggtgaagcggcgactggagtggccgtgcttttgcgactcggaccgatg

SEQ ID NO: 84 - DNA, 203 bp, synthetic construct
  source 1..203: mol_type = other DNA
ggcgcgccagtcctgagcggcgtccgcttcccgcccgggcagctcccgccagaggggtgaagcggcgactggagtggccgtgcttttgtgccctgggtcccggtaccctcccctggtgcggcccgaggcaagcccaccgaggtgaccacccctcgacgccgcttggagatcccgggcatccaccctgccgactcggaccgatg

SEQ ID NO: 85 - DNA, 203 bp, synthetic construct
  source 1..203: mol_type = other DNA
ggcgcgccagtcctggtgcggcccgaggcaagcccaccgaggtgaccacccctcgacgccgcttggagatcccgggcatccaccctgcgccccgagcagctgatacccagggaggtgtcaggacctgcccggggcgcggggtcgccggaagccaggcgggagccccggctgctttctggcaatctagtcgactcggaccgatg

SEQ ID NO: 86 - DNA, 203 bp, synthetic construct
  source 1..203: mol_type = other DNA
ggcgcgccagtcctatgaaaccggctcggattccgcccgcgtgcgccatcccctcagctagcaggtgtgagcggctttctgcccgcagtctctacacagctcagcatcctgacgcctcctccccttgcaggggcgtgaagctacttcagactctgctgtgacgacttggccgccaggcaccgatcctccgactcggaccgatg

SEQ ID NO: 87 - DNA, 203 bp, synthetic construct
  source 1..203: mol_type = other DNA
ggcgcgccagtcctaccttggggcgtccccaatctccacctctgggctccagtaacgaggactctgcaataccccctagccccctggccaagacaaccgaacttgttccgtggatatttgggatcctccacctgccaaacctgagcgattttttttgtactgcgcccccacccccaatgattctgccccgactcggaccgatg

SEQ ID NO: 88 - DNA, 203 bp, synthetic construct
  source 1..203: mol_type = other DNA
ggcgcgccagtccttgcaataccccctagccccctggccaagacaaccgaacttgttccgtggatatttgggatcctccacctgccaaacctgagcgattttttttgtactgcgcccccacccccaatgattctgcccctcctccagctgttgcagcgtggaaaaggggaaacaaatcaccgggggggcgactcggaccgatg

SEQ ID NO: 89 - DNA, 203 bp, synthetic construct
  source 1..203: mol_type = other DNA
ggcgcgccagtcctaggggaaacaaatcaccgggggggatttttttcgtctatttttatttttcgcacttgctgggaatggtgaagtgcttcttgtgaatgattctagccaaaggatgctcttcatttcctgctttctatggagacctcagtgttgagtttgcctctgctggaactgcgtctaccacccgactcggaccgatg

SEQ ID NO: 90 - DNA, 203 bp, synthetic construct
  source 1..203: mol_type = other DNA
ggcgcgccagtcctgatgctcttcatttcctgctttctatggagacctcagtgttgagtttgcctctgctggaactgcgtctaccaccttctctaccttccaaggtctttgcctctatctacaacctggcattgtctgtgggtccatgaaggcttggatgaccttagagggaaggtctgggagtccaccgactcggaccgatg

SEQ ID NO: 91 - DNA, 203 bp, synthetic construct
  source 1..203: mol_type = other DNA
ggcgcgccagtccttagagggaaggtctgggagtccaccctcatagactaagcagcaatggctgggcatattttaagccgcattttaacatgggtcaagccatcagtagaaggcaagtgctaagactaaagacttatttgaattttatttaaattagatggactgggccttggccaatttccatgcaacgactcggaccgatg

SEQ ID NO: 92 - DNA, 203 bp, synthetic construct
  source 1..203: mol_type = other DNA
ggcgcgccagtcctgggccttggccaatttccatgcaagaaaaagtatatttcattttctaggcacaacttctgagtgtcagatacttgctgtctttgagtcttgtggcgtcatcaccggacagcatcccagacagacttccagatttgaacatctaccccccaacacgtaggtgtatgggagaccaccgactcggaccgatg

SEQ ID NO: 93 - DNA, 203 bp, synthetic construct
  source 1..203: mol_type = other DNA
ggcgcgccagtcctacaacttctgagtgtcagatacttgctgtctttgagtcttgtggcgtcatcaccggacagcatcccagacagacttccagatttgaacatctaccccccaacacgtaggtgtatgggagaccacatcatttcatgacttatgtttgaggaacactaggctgttgtctagacgagcgactcggaccgatg

SEQ ID NO: 94 - DNA, 203 bp, synthetic construct
  source 1..203: mol_type = other DNA
ggcgcgccagtcctacacgtaggtgtatgggagaccacatcatttcatgacttatgtttgaggaacactaggctgttgtctagacgaggcaagctctggaaagcaacgccgagtctctgagaagagggagcataggctgtgctgatttaaaaacagaaaatgcaaagttggactgaaaatatcccacgcgactcggaccgatg

SEQ ID NO: 95 - DNA, 203 bp, synthetic construct
  source 1..203: mol_type = other DNA
ggcgcgccagtcctacactaggctgttgtctagacgaggcaagctctggaaagcaacgccgagtctctgagaagagggagcataggctgtgctgatttaaaaacagaaaatgcaaagttggactgaaaatatcccacgtcttctaagcaatctgcttaaggcttccaaacttaccttaatttggtaagcgactcggaccgatg

SEQ ID NO: 96 - DNA, 203 bp, synthetic construct
  source 1..203: mol_type = other DNA
ggcgcgccagtccttgtgctgatttaaaaacagaaaatgcaaagttggactgaaaatatcccacgtcttctaagcaatctgcttaaggcttccaaacttaccttaatttggtaagaaaataagctgccctatttttctttcttcttctcttacaactggaagcagccatttccccaaaccaccaccatcgactcggaccgatg

SEQ ID NO: 97 - DNA, 203 bp, synthetic construct
  source 1..203: mol_type = other DNA
ggcgcgccagtcctccctggcgtcccggccgaggcagcatcccagcctttaccctgtgggcccaacgtgaggagtgtgaggagcggcatgcggcgccccctggctggttcggtgtcttttgacctgctgttgactgctcccagggggccctgacgccctggggcacttttgctctgcacaggaccacgcgactcggaccgatg

SEQ ID NO: 98 - DNA, 203 bp, synthetic construct
  source 1..203: mol_type = other DNA
ggcgcgccagtcctgggtgtagaggaaggaaggagcaagaccagcctgtagactgtgcccctggctgggcaaaagggccaggggcccggagccttccctccactgccctcgaacgcctcacttcctaagtctctgcatttctcagtcagtggacagcttttgggactcttgtgtgaggactttgggggcgactcggaccgatg

SEQ ID NO: 99 - DNA, 203 bp, synthetic construct
  source 1..203: mol_type = other DNA
ggcgcgccagtcctctggctgggcaaaagggccaggggcccggagccttccctccactgccctcgaacgcctcacttcctaagtctctgcatttctcagtcagtggacagcttttgggactcttgtgtgaggactttgggggaccaggccaggctgggcctctgctgattgagatcttgggatccagacgactcggaccgatg

SEQ ID NO: 100 - DNA, 203 bp, synthetic construct
  source 1..203: mol_type = other DNA
ggcgcgccagtccttgccacccggcgtggaggacggggtccaccctggtgggctgagcgcgaggccggagggctgggaggctgcggctgggctgagcactgcggagggccgtcggcttatcccaggtcccggtcacgcagcggccacgctcggggagcgcgcggacctgagcgggcaccacgagccgccgactcggaccgatg

SEQ ID NO: 101 - DNA, 203 bp, synthetic construct
  source 1..203: mol_type = other DNA
ggcgcgccagtcctggacgcggcagggcccggggacagcggggacgccgcccactccaccgggtatgaagctaaaatacagtggttacaacacaggaggttgacaggcctgacctttgaatcccagttcatccacaaacggagctttgtaatctcggattgtaagggccaagcttgtggactttagtgcgactcggaccgatg

SEQ ID NO: 102 - DNA, 203 bp, synthetic construct
  source 1..203: mol_type = other DNA
ggcgcgccagtcctgggccaagcttgtggactttagtgacttctgatctaagaacctccaccagggctgagggagctcaagtttcagcctgaggcatgggccaggaggccatggtgacctgagacccgtggattctgtccagtacaccctgttgctccttctgcctcccctctcctgtattgaaagcgcgactcggaccgatg

SEQ ID NO: 103 - DNA, 203 bp, synthetic construct
  source 1..203: mol_type = other DNA
ggcgcgccagtcctggctgagggagctcaagtttcagcctgaggcatgggccaggaggccatggtgacctgagacccgtggattctgtccagtacaccctgttgctccttctgcctcccctctcctgtattgaaagcgtttgtgttcatcttatcagggacctgaccctaagagaatccttcccctgccgactcggaccgatg

SEQ ID NO: 104 - DNA, 203 bp, synthetic construct
  source 1..203: mol_type = other DNA
ggcgcgccagtccttgacctgagacccgtggattctgtccagtacaccctgttgctccttctgcctcccctctcctgtattgaaagcgtttgtgttcatcttatcagggacctgaccctaagagaatccttcccctgccaaggcagttccagcccccagaactcatcaccccatctcctgaggtggttcgactcggaccgatg

SEQ ID NO: 105 - DNA, 203 bp, synthetic construct
  source 1..203: mol_type = other DNA
ggcgcgccagtcctgaaaagaccgactccagctaagcaagaggcacagcagcagtggcagaagcagacaggagcagctggtattccggtgattaaatagttctcatagcctttttgctgtacccggtctgctccctggggtaaggcctcgtgtccgagaaggaagctgcattttaacggtgtgctgaacgactcggaccgatg

SEQ ID NO: 106 - DNA, 203 bp, synthetic construct
  source 1..203: mol_type = other DNA
ggcgcgccagtcctgctgcattttaacggtgtgctgaacagaggtctgaatcattccagctggctgcttgttttgaaaaggacaatgtgtgtataaataaaaagactgctggaagggtccagacaccggcaccggagctgaggagtgctctcagaatcctgttgaggcagatggcacgaactgaaagccgactcggaccgatg

SEQ ID NO: 107 - DNA, 203 bp, synthetic construct
  source 1..203: mol_type = other DNA
ggcgcgccagtcctgccacctccggtcggcgactgcggcgggctcgacgaggcggctgacggggcggcggcgggaagacggccgggtgcgccttggggtttagtggcggcttctccatgggtccagccagccgcttccctgtgctgtgagtgtttccaccactccaggagacagcattcagagttgaccgactcggaccgatg

SEQ ID NO: 108 - DNA, 203 bp, synthetic construct
  source 1..203: mol_type = other DNA
ggcgcgccagtcctcggcggcgggaagacggccgggtgcgccttggggtttagtggcggcttctccatgggtccagccagccgcttccctgtgctgtgagtgtttccaccactccaggagacagcattcagagttgaccttgtgagagctggccataatttaattccatctctaggttttctgtcttacgactcggaccgatg

SEQ ID NO: 109 - DNA, 203 bp, synthetic construct
  source 1..203: mol_type = other DNA
ggcgcgccagtcctttgtggagtcgcccttcccccgaggaggggagcgggcagcgccgggcgcgggatttctcccgcccagggccgaggaggagccctgggctcctcaaccgatcgggccacctccgggagcggcgccccttttctttcgggtcattcctgcagagggaaaactcctgcgtgcgcctgcgactcggaccgatg

SEQ ID NO: 110 - DNA, 203 bp, synthetic construct
  source 1..203: mol_type = other DNA
ggcgcgccagtcctcgggccacctccgggagcggcgccccttttctttcgggtcattcctgcagagggaaaactcctgcgtgcgcctgcccccaggctagcgtttggactgttttgtttttggcggaactaccgggcaggaagattgcacaagtcagggggcgtttccaatcgggtgtcaattttggacgactcggaccgatg

SEQ ID NO: 111 - DNA, 203 bp, synthetic construct
  source 1..203: mol_type = other DNA
ggcgcgccagtcctttccaatcgggtgtcaattttggatctccccccccccacccccctttggatcttgtcgggctttccacgtttcacttaaaaaaaattcttgtaacgtccaaggcaagctccccacgacccgaacacgcccagaggaaccttggggcctctggggacttggctagcaggtattcacgactcggaccgatg

SEQ ID NO: 112 - DNA, 203 bp, synthetic construct
  source 1..203: mol_type = other DNA
ggcgcgccagtcctgtcccgcgaagaaaaagataaagacatctcgtagaaatattaaaataaattcctaaagtcgttggtttctcgttcactttcgctgcctgctcaggacgagggccacaccaagaggcaagagaaacaaaaagagggaacataggaacaggaaccagataatagtgacataagcgacgactcggaccgatg

SEQ ID NO: 113 - DNA, 203 bp, synthetic construct
  source 1..203: mol_type = other DNA
ggcgcgccagtccttcctaaagtcgttggtttctcgttcactttcgctgcctgctcaggacgagggccacaccaagaggcaagagaaacaaaaagagggaacataggaacaggaaccagataatagtgacataagcgaccctttcgcaaatattttggcgcaaaatgagcgggcgccaagtgccgcgtcgactcggaccgatg

SEQ ID NO: 114 - DNA, 203 bp, synthetic construct
  source 1..203: mol_type = other DNA
ggcgcgccagtcctatgagcgggcgccaagtgccgcgtggtggagccgcctgaaaatgacatggaaaattcgccgaaaatcgcgcgttttggcagcatcaatcccaaagcacaaaattaatttctatcataatttctgggtgcaacacggacccataattgaatcgaatatagggcttatctgatagccgactcggaccgatg

SEQ ID NO: 115 - DNA, 203 bp, synthetic construct
  source 1..203: mol_type = other DNA
ggcgcgccagtcctaaaattcgccgaaaatcgcgcgttttggcagcatcaatcccaaagcacaaaattaatttctatcataatttctgggtgcaacacggacccataattgaatcgaatatagggcttatctgatagcccggcagcaacattgaactttccggctgcaaaggagacgacaccgagatccgactcggaccgatg

SEQ ID NO: 116 - DNA, 203 bp, synthetic construct
  source 1..203: mol_type = other DNA
ggcgcgccagtcctgggctccggcgataagaaatccatgctgataaggacaggaggacggtctgcggcaaattgaattcgattctgacctgtatgaaagccagcggagatacggatacctctgggtttatgggtagaaaacgcagagcgtcgcgccaacatcgaaattatttgcgtttgcatcttctccgactcggaccgatg

SEQ ID NO: 117 - DNA, 203 bp, synthetic construct
  source 1..203: mol_type = other DNA
ggcgcgccagtcctcggcaaattgaattcgattctgacctgtatgaaagccagcggagatacggatacctctgggtttatgggtagaaaacgcagagcgtcgcgccaacatcgaaattatttgcgtttgcatcttctcgtcctttcgtttatcgttctgattgccatcgtggtggcgcggtttctattcgactcggaccgatg

SEQ ID NO: 118 - DNA, 203 bp, synthetic construct
  source 1..203: mol_type = other DNA
ggcgcgccagtcctcatcgtggtggcgcggtttctattaattttgcttctgtatcgtttgcaaaatctcaaaagattcaaaaagttcgtcatcagcagccgcaacacaaaaaccaacgagtgtaaagccgagcatacaaatatcaataaaaacataaacatttacccaatctcaatctcaaaacattccgactcggaccgatg

SEQ ID NO: 119 - DNA, 203 bp, synthetic construct
  source 1..203: mol_type = other DNA
ggcgcgccagtcctaactagaggataaggctacttaaggatcaaaaaacaccaaggagacgagattttctaccaaatcgagagacgaggggcaggttaatttcgtcatttttggccaagacagcaaatagaggaacagcaaagcgaaaatcattttatacctcacacaacaactacacactaactaagcgactcggaccgatg

SEQ ID NO: 120 - DNA, 203 bp, synthetic construct
  source 1..203: mol_type = other DNA
ggcgcgccagtcctcttaagtgttcaaagtatatttagtttactttgtatataagaaaagtagctaaaagcacgcggacagggaggcaggagcaccacagtcactagccactaagcagagtcacagtcacgatcacgttcactccaggatcaggactcggggcgggatcagcagacgctgaggaagctcgactcggaccgatg

SEQ ID NO: 121 - DNA, 203 bp, synthetic construct
  source 1..203: mol_type = other DNA
ggcgcgccagtccttgttcaaagtatatttagtttactttgtatataagaaaagtagctaaaagcacgcggacagggaggcaggagcaccacagtcactagccactaagcagagtcacagtcacgatcacgttcactccaggatcaggactcggggcgggatcagcagacgctgaggaagctgccacgcgactcggaccgatg

SEQ ID NO: 122 - DNA, 203 bp, synthetic construct
  source 1..203: mol_type = other DNA
ggcgcgccagtcctctttaccgacaacgtccagcggtccagtcgagaagtaagtagtccgcgctgcgagcataactctaccagagaaacgcgcactttattggtcaagacagacggaagccggcggttggacgcaaaggttgactcggaagctgagagattgttgagtaacacgcagaagtcttgaaacgactcggaccgatg

SEQ ID NO: 123 - DNA, 203 bp, synthetic construct
  source 1..203: mol_type = other DNA
ggcgcgccagtcctttgttgagtaacacgcagaagtcttgaaagtatcaagtattgaacatatttcaagggacttggtttcggtgaagtcgtcaattccttttatcgtcaacgtttccacagccctcagaatagaaatttccaacaagccaaagcctacgtaatgaagcgccccaataaccggccgaccgactcggaccgatg

SEQ ID NO: 124 - DNA, 203 bp, synthetic construct
  source 1..203: mol_type = other DNA
ggcgcgccagtccttcactccagcaacaacaacaacaacggcagcagcagcaataacgacaacaacagcaacgacgacgcagcaagtagcagcaacagcaaaaacaacaacaccagcaacgagagcagccacagcaacaacaatactagtagcataattgcagaggcggccgccaagtttctactgaacgactcggaccgatg

SEQ ID NO: 125 - DNA, 203 bp, synthetic construct
  source 1..203: mol_type = other DNA
ggcgcgccagtcctggcggccgccaagtttctactgaaaaatggcctaaacggcagtagcagcaccagctacccccctctgccaccgcctctgcccgccaacttaagcaggacgaccacgcccacgacaacgacaacgccctcatcctccagctccaccgcctcaaatggctttttgccgcatgccaacgactcggaccgatg

SEQ ID NO: 126 - DNA, 203 bp, synthetic construct
  source 1..203: mol_type = other DNA
ggcgcgccagtccttaaaccccagttttatatcgtatatgctatctacaggtccactttacacttaataatataaaaatactactataaaggaaccagaaaaataaaaaagggtcattatttatttgagcagatcattatcaaacgcataggaagagaaaaaacacagttttattttttttccacacacgactcggaccgatg

SEQ ID NO: 127 - DNA, 203 bp, synthetic construct
  source 1..203: mol_type = other DNA
ggcgcgccagtcctttttgtgactctccctctttgtactattgctctctcactctgtcacacagtaaacggcgcactgttctcgttgcttcgagagagcgcgcctcgaatgttcgcgaaaagagcgccggagtataaatagaggagcttcgtcgacggagagtcaattctattcaaacaagtaaagtgcgactcggaccgatg

SEQ ID NO: 128 - DNA, 203 bp, synthetic construct
  source 1..203: mol_type = other DNA
ggcgcgccagtcctacgttcgttcgatggcaacggattggataacaggcgcgcgctttgttttattatccacattatcagctgcattattgttattattggccctcagcgctttaccgctcgcccacgcgtccgcccgtgaatgccgcgcggaaaagtcgctttccactagattggcgtccagattcgcgactcggaccgatg

SEQ ID NO: 129 - DNA, 203 bp, synthetic construct
  source 1..203: mol_type = other DNA
ggcgcgccagtcctttatccacattatcagctgcattattgttattattggccctcagcgctttaccgctcgcccacgcgtccgcccgtgaatgccgcgcggaaaagtcgctttccactagattggcgtccagattcgaggaaatccgtcagcagacgcattcgcgcccgttcggtcagcactatggccgactcggaccgatg

SEQ ID NO: 130 - DNA, 203 bp, synthetic construct
  source 1..203: mol_type = other DNA
ggcgcgccagtcctaaatccaaaggaggcaaaggaacagcacagaaagcgaggaaacactcaaataaaatccgccaaaaatcgcagatccctggaaaccaattcgtgtgaaatcggtcaagcccccaacgacttttagcccgtctcagacggagcaccgccaagattcttaccgccagcagcgcaatgcgactcggaccgatg

SEQ ID NO: 131 - DNA, 203 bp, synthetic construct
  source 1..203: mol_type = other DNA
ggcgcgccagtcctcactctggtatcacggtacctttgtgcgcctgttttataccccctcccccaactgtaacttagaagtaacacacaccgatcaacagtcagcgtggcacaccagccacgttttgatcaagcacttctgttaccccggactgagtatcaatagactgctcacgcggttgaaggagacgactcggaccgatg

SEQ ID NO: 132 - DNA, 203 bp, synthetic construct
  source 1..203: mol_type = other DNA
ggcgcgccagtcctcagccacgttttgatcaagcacttctgttaccccggactgagtatcaatagactgctcacgcggttgaaggagaaagcgttcgttatccggccaactacttcgaaaaacctagtaacaccgtggaagttgcagagtgtttcgctcagcactaccccagtgtagatcaggtcgatcgactcggaccgatg

SEQ ID NO: 133 - DNA, 203 bp, synthetic construct
  source 1..203: mol_type = other DNA
ggcgcgccagtccttaccccagtgtagatcaggtcgatgagtcaccgcattccccacgggcgaccgtggcggtggctgcgttggcggcctgcccatggggaaacccatgggacgctctaatacagacatggtgcgaagagtctattgagctagttggtagtcctccggcccctgaatgcggctaatcccgactcggaccgatg

SEQ ID NO: 134 - DNA, 203 bp, synthetic construct
  source 1..203: mol_type = other DNA
ggcgcgccagtcctctctaatacagacatggtgcgaagagtctattgagctagttggtagtcctccggcccctgaatgcggctaatcctaactgcggagcacacaccctcaagccagagggcagtgtgtcgtaacgggcaactctgcagcggaaccgactactttgggtgtccgtgtttcattttattcgactcggaccgatg

SEQ ID NO: 135 - DNA, 203 bp, synthetic construct
  source 1..203: mol_type = other DNA
ggcgcgccagtcctaataaggccggtgtgcgtttgtctatatgttattttccaccatattgccgtcttttggcaatgtgagggcccggaaacctggccctgtcttcttgacgagcattcctaggggtctttcccctctcgccaaaggaatgcaaggtctgttgaatgtcgtgaaggaagcagttcctccgactcggaccgatg

SEQ ID NO: 136 - DNA, 203 bp, synthetic construct
  source 1..203: mol_type = other DNA
ggcgcgccagtccttcttttggcaatgtgagggcccggaaacctggccctgtcttcttgacgagcattcctaggggtctttcccctctcgccaaaggaatgcaaggtctgttgaatgtcgtgaaggaagcagttcctctggaagcttcttgaagacaaacaacgtctgtagcgaccctttgcaggcagcgactcggaccgatg

SEQ ID NO: 137 - DNA, 203 bp, synthetic construct
  source 1..203: mol_type = other DNA
ggcgcgccagtccttctgtagcgaccctttgcaggcagcggaaccccccacctggcgacaggtgcctctgcggccaaaagccacgtgtataagatacacctgcaaaggcggcacaaccccagtgccacgttgtgagttggatagttgtggaaagagtcaaatggctctcctcaagcgtattcaacaagcgactcggaccgatg

SEQ ID NO: 138 - DNA, 203 bp, synthetic construct
  source 1..203: mol_type = other DNA
ggcgcgccagtcctccagtcataccttgatcaagcacttctgtttccccggactgagtatcaataggctgctcgcgcggctgaaggagaaaacgttcgttacccgaccaactacttcgagaagcttagtaccaccatgaacgaggcagggtgtttcgctcagcacaaccccagtgtagatcaggctgacgactcggaccgatg

SEQ ID NO: 139 - DNA, 203 bp, synthetic construct
  source 1..203: mol_type = other DNA
ggcgcgccagtcctttcgagaagcttagtaccaccatgaacgaggcagggtgtttcgctcagcacaaccccagtgtagatcaggctgatgagtcactgcaacccccatgggcgaccatggcagtggctgcgttggcggcctgcccatggagaaatccatgggacgctctaattctgacatggtgtgaacgactcggaccgatg

SEQ ID NO: 140 - DNA, 203 bp, synthetic construct
  source 1..203: mol_type = other DNA
ggcgcgccagtccttccggcccctgaatgcggctaatcctaactgcggagcacatgctcacaaaccagtgggtggtgtgtcgtaacgggcaactctgcagcggaaccgactactttgggtgtccgtgtttccttttattcctatattggctgcttatggtgacaatcaaaaagttgttaccatatagccgactcggaccgatg

SEQ ID NO: 141 - DNA, 203 bp, synthetic construct
  source 1..203: mol_type = other DNA
ggcgcgccagtccttctttccaggtctagaggggtaacactttgtactgtgtttggctccacgctcgatccactggcgagtgttagtaacagcactgttgcttcgtagcggagcatgacggccgtgggaactcctccttggtaacaaggacccacggggccaaaagccacgcccacacgggcccgtcacgactcggaccgatg

SEQ ID NO: 142 - DNA, 203 bp, synthetic construct
  source 1..203: mol_type = other DNA
ggcgcgccagtcctgccccggacctcccaccgaggtggggggaaaggggccctggaccggccgggtggaaggcccggaaccggtccatcttcctcaaggttgaggaaggggtacgtctatgggtccggtgggtccgaaaggcgtctggatgcctagtgttagggttcgtaggtggtaaatcccagctacgactcggaccgatg

SEQ ID NO: 143 - DNA, 203 bp, synthetic construct
  source 1..203: mol_type = other DNA
ggcgcgccagtcctgtggaaggcccggaaccggtccatcttcctcaaggttgaggaaggggtacgtctatgggtccggtgggtccgaaaggcgtctggatgcctagtgttagggttcgtaggtggtaaatcccagctaggcgtgaaagcgctataggataggcttatcccggtgaccgctgccccggacgactcggaccgatg

SEQ ID NO: 144 - DNA, 203 bp, synthetic construct
  source 1..203: mol_type = other DNA
ggcgcgccagtcctgtctatgggtccggtgggtccgaaaggcgtctggatgcctagtgttagggttcgtaggtggtaaatcccagctaggcgtgaaagcgctataggataggcttatcccggtgaccgctgccccggaaccagccccgcggttctttggacacggtccacaggttgggggtaccggtgcgactcggaccgatg

SEQ ID NO: 145 - DNA, 203 bp, synthetic construct
  source 1..203: mol_type = other DNA
ggcgcgccagtccttatcccggtgaccgctgccccggaaccagccccgcggttctttggacacggtccacaggttgggggtaccggtgtgaataaccccccgactgaagcgtcagtcgttaaacggagacggtctcctgagatcgcaacgacgccccacgtacgggaacgccgccaaaaccttcgggacgactcggaccgatg

SEQ ID NO: 146 - DNA, 203 bp, synthetic construct
  source 1..203: mol_type = other DNA
ggcgcgccagtcctgtccacaggttgggggtaccggtgtgaataaccccccgactgaagcgtcagtcgttaaacggagacggtctcctgagatcgcaacgacgccccacgtacgggaacgccgccaaaaccttcgggacagctatgcgggttgacaatcccagtggggggccggggaccagctgattacgactcggaccgatg

SEQ ID NO: 147 - DNA, 203 bp, synthetic construct
  source 1..203: mol_type = other DNA
ggcgcgccagtcctggggggccggggaccagctgattacttgtcctgcgagttcctcttgagactggccgaaaggcagccacggggccaccaaggcggcgcagcgctgcatgcggcaaggggaaaaatccttcgggtgacccctggtggcaatcccttcccttaggagcatgagtgtggtcgacacatcgactcggaccgatg

SEQ ID NO: 148 - DNA, 203 bp, synthetic construct
  source 1..203: mol_type = other DNA
ggcgcgccagtccttggccgaaaggcagccacggggccaccaaggcggcgcagcgctgcatgcggcaaggggaaaaatccttcgggtgacccctggtggcaatcccttcccttaggagcatgagtgtggtcgacacattcaccatggcttggctgtggttgctggtttgcttccccctcgcgggggggcgactcggaccgatg

SEQ ID NO: 149 - DNA, 203 bp, synthetic construct
  source 1..203: mol_type = other DNA
ggcgcgccagtcctcactgggtgcaagccccagaaaccgacgcctactgaagtagacgtaatggccccggcccgaaccggcgaccggccaaaaggtggtggatgggtgatgacagggttggtaggtcgtaaatcccggtcatcctggtagccactataggtgggtcttaaggggaggctacggtccctcgactcggaccgatg

SEQ ID NO: 150 - DNA, 203 bp, synthetic construct
  source 1..203: mol_type = other DNA
ggcgcgccagtccttcttaaggggaggctacggtccctcttgcgcatatggaggaaaagcgcacggtccacaggtgttggtcctaccggtgtaataaggacccggcgctaggcacgccgttaaaccgagcccgttactcccctgggcaaacgacgcccacgtacggtccacgtcgcccttcaatgtctcgactcggaccgatg

SEQ ID NO: 151 - DNA, 203 bp, synthetic construct
  source 1..203: mol_type = other DNA
ggcgcgccagtcctggtccacgtcgcccttcaatgtctctcttgaccaataggcgtagccggcgagttgacaaggaccagtgggggccgggcgggagggggaaggacccccaccgctgcccttcccggggaggcgggaaatgcatggggccacccagctccgcggcggcctacagccggggtagcccacgactcggaccgatg

SEQ ID NO: 152 - DNA, 203 bp, synthetic construct
  source 1..203: mol_type = other DNA
ggcgcgccagtcctgctgcccttcccggggaggcgggaaatgcatggggccacccagctccgcggcggcctacagccggggtagcccaagaaccttcgggtgagggcgggtggcattttcttttcctataccgatcatggcagtccttctgctcctactcgtggtggaggccggggctattttagccccgactcggaccgatg

SEQ ID NO: 153 - DNA, 203 bp, synthetic construct
  source 1..203: mol_type = other DNA
ggcgcgccagtcctgcggcctacagccggggtagcccaagaaccttcgggtgagggcgggtggcattttcttttcctataccgatcatggcagtccttctgctcctactcgtggtggaggccggggctattttagccccggccacccatgcttgtagcgcgaaagggcaatatttcctcacaaactgtcgactcggaccgatg

SEQ ID NO: 154 - DNA, 203 bp, synthetic construct
  source 1..203: mol_type = other DNA
ggcgcgccagtcctctgtaggagtctaaattggggacacagatgtttggaacgtcaccttgcagtgttaacttggctttcatgaatctctttgatcttccacaaggggtaggctacgggtgaaacctcttaggctaatacttctatgaagagatgccttggatagggtaacagcggcggatattggtgcgactcggaccgatg

SEQ ID NO: 155 - DNA, 203 bp, synthetic construct
  source 1..203: mol_type = other DNA
ggcgcgccagtcctagggctgtctttaggcttaattccagacctctctgtgcttagggcaaacatcatttggccttaaatgggattctgtgagaggggatccctccattgacagctggactgttctttggggccttatgtggtgtttgcctctgaggtactcaggggcatttaggtttttcctcattccgactcggaccgatg

SEQ ID NO: 156 - DNA, 203 bp, synthetic construct
  source 1..203: mol_type = other DNA
ggcgcgccagtcctcggaaccggtgagtacaccggaattgccaggacgaccgggtcctttcttggataaacccgctcaatgcctggagatttgggcgtgcccccgcaagactgctagccgagtagtgttgggtcgcgaaaggccttgtggtactgcctgatagggtgcttgcgagtgccccgggaggtcgactcggaccgatg

SEQ ID NO: 157 - DNA, 203 bp, synthetic construct
  source 1..203: mol_type = other DNA
ggcgcgccagtcctgataaacccgctcaatgcctggagatttgggcgtgcccccgcaagactgctagccgagtagtgttgggtcgcgaaaggccttgtggtactgcctgatagggtgcttgcgagtgccccgggaggtctcgtagaccgtgcaccatgagcacgaatcctaaacctcaaagaaaaacccgactcggaccgatg

SEQ ID NO: 158 - DNA, 203 bp, synthetic construct
  source 1..203: mol_type = other DNA
ggcgcgccagtccttttagtcagtgtggaaaatctctagcagtggcgcccgaacagggacctgaaagcgaaagggaaaccagaggagctctctcgacgcaggactcggcttgctgaagcgcgcacggcaagaggcgaggggcggcgactggtgagtacgccaaaaattttgactagcggaggctagaacgactcggaccgatg

SEQ ID NO: 159 - DNA, 203 bp, synthetic construct
  source 1..203: mol_type = other DNA
ggcgcgccagtccttacggtaactttgtacgccagttttatctcccttcccccatgtaacttagaagtttttcacaaagaccaatagccggtaatcagccagattactgaaggtcaagcacttctgtttccccggtcaatgttgatatgctccaacagggcaaaaacaactgcgatcgttaaccgcaacgactcggaccgatg

SEQ ID NO: 160 - DNA, 203 bp, synthetic construct
  source 1..203: mol_type = other DNA
ggcgcgccagtcctaagtttttcacaaagaccaatagccggtaatcagccagattactgaaggtcaagcacttctgtttccccggtcaatgttgatatgctccaacagggcaaaaacaactgcgatcgttaaccgcaaagcgcctacgcaaagcttagtagcatctttgaaatcgtttggctggtcgacgactcggaccgatg

SEQ ID NO: 161 - DNA, 203 bp, synthetic construct
  source 1..203: mol_type = other DNA
ggcgcgccagtcctcaagcacttctgtttccccggtcaatgttgatatgctccaacagggcaaaaacaactgcgatcgttaaccgcaaagcgcctacgcaaagcttagtagcatctttgaaatcgtttggctggtcgatccgccatttcccctggtagacctggcagatgaggctagaaataccccaccgactcggaccgatg

SEQ ID NO: 162 - DNA, 203 bp, synthetic construct
  source 1..203: mol_type = other DNA
ggcgcgccagtcctaacaactgcgatcgttaaccgcaaagcgcctacgcaaagcttagtagcatctttgaaatcgtttggctggtcgatccgccatttcccctggtagacctggcagatgaggctagaaataccccactggcgacagtgttctagcctgcgtggctgcctgcacaccctatgggtgtgcgactcggaccgatg

SEQ ID NO: 163 - DNA, 203 bp, synthetic construct
  source 1..203: mol_type = other DNA
ggcgcgccagtcctgagccccgtgtgctcgctttgagtcctccggcccctgaatgtggctaaccttaaccctgcagctagagcacgtaacccaatgtgtatctagtcgtaatgagcaattgcgggatgggaccaactactttgggtgtccgtgtttcactttttcctttatatttgcttatggtgacacgactcggaccgatg

SEQ ID NO: 164 - DNA, 203 bp, synthetic construct
  source 1..203: mol_type = other DNA
ggcgcgccagtcctgagcctattgagctacataagaatcctccggcccctgaatgcggctaatcccaacctcggagcaggtggtcacaaaccagtgattggcctgtcgtaacgcgcaagtccgtggcggaaccgactactttgggtgtccgtgtttccttttattttattgtggctgcttatggtgaccgactcggaccgatg

SEQ ID NO: 165 - DNA, 203 bp, synthetic construct
  source 1..203: mol_type = other DNA
ggcgcgccagtcctgcgcctccgtgggcaagcactactgtttccccggtgaggccgcatagactgttcccacggttgaaagtggccgatccgttatccgctcatgtacttcgagaagcctagtatcgctctggaatcttcgacgcgttgcgctcagcactcaaccccggagtgtagcttgggccgatgcgactcggaccgatg

SEQ ID NO: 166 - DNA, 203 bp, synthetic construct
  source 1..203: mol_type = other DNA
ggcgcgccagtcctgttcccacggttgaaagtggccgatccgttatccgctcatgtacttcgagaagcctagtatcgctctggaatcttcgacgcgttgcgctcagcactcaaccccggagtgtagcttgggccgatgagtctggacagtccccactggcgacagtggtccaggctgcgctggcggcccgactcggaccgatg

SEQ ID NO: 167 - DNA, 203 bp, synthetic construct
  source 1..203: mol_type = other DNA
ggcgcgccagtcctcccggagtgtagcttgggccgatgagtctggacagtccccactggcgacagtggtccaggctgcgctggcggcccacctgtggcccaaagccacgggacgctagttgtgaacagggtgtgaagagcctattgagctacatgagagtcctccggcccctgaatgcggctaatcctcgactcggaccgatg

SEQ ID NO: 168 - DNA, 203 bp, synthetic construct
  source 1..203: mol_type = other DNA
ggcgcgccagtcctctagttgtgaacagggtgtgaagagcctattgagctacatgagagtcctccggcccctgaatgcggctaatcctaaccatggagcaggcagctgcaacccagcagccagcctgtcgtaacgcgcaagtccgtggcggaaccgactactttgggtgtccgtgtttccttttattccgactcggaccgatg

SEQ ID NO: 169 - DNA, 203 bp, synthetic construct
  source 1..203: mol_type = other DNA
ggcgcgccagtcctcggcccctgaatgcggctaatcctaaccatggagcaggcagctgcaacccagcagccagcctgtcgtaacgcgcaagtccgtggcggaaccgactactttgggtgtccgtgtttccttttattcttgaatggctgcttatggtgacaatcatagattgttatcataaagcgagtcgactcggaccgatg

SEQ ID NO: 170 - DNA, 203 bp, synthetic construct
  source 1..203: mol_type = other DNA
ggcgcgccagtcctggggtcgccgtcctacacattgttgtgacgtgcggcccagattcgaatctgtaataaaagctttttcttctatatcctcagattggcagtgagaggagattttgttcgtggtgttggctggcctactgggtggggtagggatccggactgaatccgtagtatttcggtacaacacgactcggaccgatg

SEQ ID NO: 171 - DNA, 203 bp, synthetic construct
  source 1..203: mol_type = other DNA
ggcgcgccagtcctgtaataaaagctttttcttctatatcctcagattggcagtgagaggagattttgttcgtggtgttggctggcctactgggtggggtagggatccggactgaatccgtagtatttcggtacaacatttgggggctcgtccgggattcctccccatcggcagaggtgcctactgttcgactcggaccgatg

SEQ ID NO: 172 - DNA, 203 bp, synthetic construct
  source 1..203: mol_type = other DNA
ggcgcgccagtccttttgttcgtggtgttggctggcctactgggtggggtagggatccggactgaatccgtagtatttcggtacaacatttgggggctcgtccgggattcctccccatcggcagaggtgcctactgtttcttcgaactccggcgccggtaagtaagtacttgattttggtacctcgcgcgactcggaccgatg

SEQ ID NO: 173 - DNA, 203 bp, synthetic construct
  source 1..203: mol_type = other DNA
ggcgcgccagtcctgacgctgccgggaagctccacctccgctcagcaggggacgccctggtctgagctctgtggtatctgattgttgttgaaccgtctctaagacggtgatactataagtcgtggtttgtgtgtttgtttgttaccttgtgtttgttcgtcacttgtcgacagcgccctgcgaattggcgactcggaccgatg

SEQ ID NO: 174 - DNA, 203 bp, synthetic construct
  source 1..203: mol_type = other DNA
ggcgcgccagtcctagctctgtggtatctgattgttgttgaaccgtctctaagacggtgatactataagtcgtggtttgtgtgtttgtttgttaccttgtgtttgttcgtcacttgtcgacagcgccctgcgaattggtgtacccacaccgcgcggcttgcgaataatactttggagagtcttttgcccgactcggaccgatg

SEQ ID NO: 175 - DNA, 203 bp, synthetic construct
  source 1..203: mol_type = other DNA
ggcgcgccagtcctagtcgtggtttgtgtgtttgtttgttaccttgtgtttgttcgtcacttgtcgacagcgccctgcgaattggtgtacccacaccgcgcggcttgcgaataatactttggagagtcttttgcctccagtgtcttccgtttgtactcgtcctcctctccctctccggccgggatgggcgactcggaccgatg

SEQ ID NO: 176 - DNA, 203 bp, synthetic construct
  source 1..203: mol_type = other DNA
ggcgcgccagtccttactggggggtgtgtgggaccgtacctggagtgcacggtatatatgcattcccgcatggcaagggcgtgctaccttgccccttgacgcatggtatgcgtcatcatttgccttggttaagccccatagaaacgaggcgtcacgtgccgaaaatccctttgcgtttcacagaaccacgactcggaccgatg

SEQ ID NO: 177 - DNA, 203 bp, synthetic construct
  source 1..203: mol_type = other DNA
ggcgcgccagtcctcccgcatggcaagggcgtgctaccttgccccttgacgcatggtatgcgtcatcatttgccttggttaagccccatagaaacgaggcgtcacgtgccgaaaatccctttgcgtttcacagaaccatcctaaccatgggtgtagtatgggaatcgtgtatggggatgattaggatccgactcggaccgatg

SEQ ID NO: 178 - DNA, 203 bp, synthetic construct
  source 1..203: mol_type = other DNA
ggcgcgccagtcctatcatttgccttggttaagccccatagaaacgaggcgtcacgtgccgaaaatccctttgcgtttcacagaaccatcctaaccatgggtgtagtatgggaatcgtgtatggggatgattaggatctctcgtagagggataggtgtgccattcaaatccagggagtactctggctccgactcggaccgatg

SEQ ID NO: 179 - DNA, 203 bp, synthetic construct
  source 1..203: mol_type = other DNA
ggcgcgccagtcctaaaggtctcgagatgccacgtggacgagggcatgcccaaagcacatcttaacctgagcgggggtcgcccaggtaaaagcagttttaaccgactgttacgaatacagcctgatagggtgctgcagaggcccactgtattgctactaaaaatctctgctgtacatggcacatggagcgactcggaccgatg

SEQ ID NO: 180 - DNA, 203 bp, synthetic construct
  source 1..203: mol_type = other DNA
ggcgcgccagtccttgcccatagtaggactagcaaaacggagggactagccatagtggcgagctccctgggtggtctaagtcctgagtacaggacagtcgtcagtagttcgacgtgagcagaagcccacctcgagatgctacgtggacgagggcatgccaagacacaccttaaccctagcgggggtcgcgactcggaccgatg

SEQ ID NO: 181 - DNA, 203 bp, synthetic construct
  source 1..203: mol_type = other DNA
ggcgcgccagtcctgttcgcaataagactggtcgtcacttggctgttctatcgtttcaggctttagcgcgcccttgcgcggcgggccgtcaagcccgtgcgctgtatagcgccaggtaaccggacagcggcgtgctggattttcccggtgccattgctctggatggtgtcaccaagctgacaaatgcgcgactcggaccgatg

SEQ ID NO: 182 - DNA, 203 bp, synthetic construct
  source 1..203: mol_type = other DNA
ggcgcgccagtcctggtaaccggacagcggcgtgctggattttcccggtgccattgctctggatggtgtcaccaagctgacaaatgcggagtgaacctcacaaagcgacacgcctgtggtagcgctgcccaaaagggagcggaactccccgccgaggcggtcctctctggccaaaagcccagcgttgacgactcggaccgatg

SEQ ID NO: 183 - DNA, 203 bp, synthetic construct
  source 1..203: mol_type = other DNA
ggcgcgccagtcctggtgtcaccaagctgacaaatgcggagtgaacctcacaaagcgacacgcctgtggtagcgctgcccaaaagggagcggaactccccgccgaggcggtcctctctggccaaaagcccagcgttgatagcgccttttgggatgcaggaaccccacctgccaggtgtgaagtggagtcgactcggaccgatg

SEQ ID NO: 184 - DNA, 203 bp, synthetic construct
  source 1..203: mol_type = other DNA
ggcgcgccagtcctctctggccaaaagcccagcgttgatagcgccttttgggatgcaggaaccccacctgccaggtgtgaagtggagtgagcggatctccaatttggtctgttctgaactacaccatttactgctgtgaagaatgccctggaggcaagctggttacagccctgaccaggccctgcccgcgactcggaccgatg

SEQ ID NO: 185 - DNA, 203 bp, synthetic construct
  source 1..203: mol_type = other DNA
ggcgcgccagtccttgaactacaccatttactgctgtgaagaatgccctggaggcaagctggttacagccctgaccaggccctgcccgtgactctcgaccggcgcagggtcaaaaattgtctaagcagcagcaggaacgcgggagcgtttcttttccttttgtactgacatgatggcggcgtctaaggcgactcggaccgatg

SEQ ID NO: 186 - DNA, 203 bp, synthetic construct
  source 1..203: mol_type = other DNA
ggcgcgccagtcctacagccctgaccaggccctgcccgtgactctcgaccggcgcagggtcaaaaattgtctaagcagcagcaggaacgcgggagcgtttcttttccttttgtactgacatgatggcggcgtctaaggtgtatagagtttgcgagcagactctgctggcaggtgccgttcgcatgatgcgactcggaccgatg

SEQ ID NO: 187 - DNA, 203 bp, synthetic construct
  source 1..203: mol_type = other DNA
ggcgcgccagtcctcgcagggtcaaaaattgtctaagcagcagcaggaacgcgggagcgtttcttttccttttgtactgacatgatggcggcgtctaaggtgtatagagtttgcgagcagactctgctggcaggtgccgttcgcatgatggacaaattcttgcaaaagagaactgtttttgtcccccacgactcggaccgatg

SEQ ID NO: 188 - DNA, 203 bp, synthetic construct
  source 1..203: mol_type = other DNA
ggcgcgccagtcctattgcttttcttccaactaaacccctattgatgtgttggtcgtttgccaatcggagggcgacaggcacaggtcgctccgagttctagtagtgtgggaacttgttactactgatgaaacgaggtagtgacactcagtacctgcgaacgaggtcggggccctcccttcttccttcacgactcggaccgatg

SEQ ID NO: 189 - DNA, 203 bp, synthetic construct
  source 1..203: mol_type = other DNA
ggcgcgccagtccttcggggccctcccttcttccttcacccaactttcacttttcgttccactttagcaggggtcttctttctatccccctggcggcattggaactagccgtcgcgtcttaacgcgcagccctgaaggccccacaccttgtggatcttgccgtgggtatgtttctggcatgtgtttctcgactcggaccgatg

SEQ ID NO: 190 - DNA, 203 bp, synthetic construct
  source 1..203: mol_type = other DNA
ggcgcgccagtccttagcaggggtcttctttctatccccctggcggcattggaactagccgtcgcgtcttaacgcgcagccctgaaggccccacaccttgtggatcttgccgtgggtatgtttctggcatgtgtttctcaagcctgcaaccgaagccgaacagccacatgaacagtttgagcgtggtacgactcggaccgatg

SEQ ID NO: 191 - DNA, 203 bp, synthetic construct
  source 1..203: mol_type = other DNA
ggcgcgccagtcctccctcgtggtaacacgagcccccgtggccaaaagcccagtgtttacagcacctctcacatccaggacgaccccatcctggcgctcactcttagtagtatggcttagtacgcattaggtggtaagccgagctctccctcggccttgttctgaatgcacacatgtctaggggctaacgactcggaccgatg

SEQ ID NO: 192 - DNA, 203 bp, synthetic construct
  source 1..203: mol_type = other DNA
ggcgcgccagtcctcctctcacatccaggacgaccccatcctggcgctcactcttagtagtatggcttagtacgcattaggtggtaagccgagctctccctcggccttgttctgaatgcacacatgtctaggggctaaggatgtcctacaggtacccgcacgtaaccttcagagagtgcggatctgagcgactcggaccgatg

SEQ ID NO: 193 - DNA, 203 bp, synthetic construct
  source 1..203: mol_type = other DNA
ggcgcgccagtcctgcttagtacgcattaggtggtaagccgagctctccctcggccttgttctgaatgcacacatgtctaggggctaaggatgtcctacaggtacccgcacgtaaccttcagagagtgcggatctgagtaggagaccgtggtgcactgctttacagatgcagcccggtttaaaaagcgcgactcggaccgatg

SEQ ID NO: 194 - DNA, 203 bp, synthetic construct
  source 1..203: mol_type = other DNA
ggcgcgccagtcctaatgcacacatgtctaggggctaaggatgtcctacaggtacccgcacgtaaccttcagagagtgcggatctgagtaggagaccgtggtgcactgctttacagatgcagcccggtttaaaaagcgtctatgcccctacagggtagcggtgggccgcgccctttccttttaaaactcgactcggaccgatg

SEQ ID NO: 195 - DNA, 203 bp, synthetic construct
  source 1..203: mol_type = other DNA
ggcgcgccagtcctaggtacccgcacgtaaccttcagagagtgcggatctgagtaggagaccgtggtgcactgctttacagatgcagcccggtttaaaaagcgtctatgcccctacagggtagcggtgggccgcgccctttccttttaaaactacttgttctatggtgacaatggcaggaaacatgatcgactcggaccgatg

SEQ ID NO: 196 - DNA, 203 bp, synthetic construct
  source 1..203: mol_type = other DNA
ggcgcgccagtcctaccagtgtttcaagaacacggatgcagcagcagctcttctggcctctcacgccatccaggggaccttgtcctaccctcttgtgtccgtcgtcagtgaatctctgactcgaaaaggtactcagcttctctatctacttgctgttgccgttgtcattatcctgtttattatcttgccgactcggaccgatg

SEQ ID NO: 197 - DNA, 203 bp, synthetic construct
  source 1..203: mol_type = other DNA
ggcgcgccagtcctaacacggatgcagcagcagctcttctggcctctcacgccatccaggggaccttgtcctaccctcttgtgtccgtcgtcagtgaatctctgactcgaaaaggtactcagcttctctatctacttgctgttgccgttgtcattatcctgtttattatcttgctgggagttatcatgcgactcggaccgatg

SEQ ID NO: 198 - DNA, 203 bp, synthetic construct
  source 1..203: mol_type = other DNA
ggcgcgccagtcctgcggacggagatcatcccccggttaccccctttcgacgcgggtactgcgatagtgccaccccagtctttcctactcccgactcccgaccctaacccaggttcctcggaacaggaacaccaatttactcatcccctggatgctgactaatcagaggaacgtcagcattttccggccgactcggaccgatg

SEQ ID NO: 199 - DNA, 203 bp, synthetic construct
  source 1..203: mol_type = other DNA
ggcgcgccagtccttcctcggaacaggaacaccaatttactcatcccctggatgctgactaatcagaggaacgtcagcattttccggcccaggctaagagaagtagataagttagaatccaaattgatttatcatccccttgacgaattcgcgttggaaaaacacctctcacttgccgctcttcacaccgactcggaccgatg

SEQ ID NO: 200 - DNA, 203 bp, synthetic construct
  source 1..203: mol_type = other DNA
ggcgcgccagtcctagaggaacgtcagcattttccggcccaggctaagagaagtagataagttagaatccaaattgatttatcatccccttgacgaattcgcgttggaaaaacacctctcacttgccgctcttcacacccattaatttaattcggcctctgtgttgagccccttgttgaagtgtttcccgactcggaccgatg

SEQ ID NO: 201 - DNA, 203 bp, synthetic construct
  source 1..203: mol_type = other DNA
ggcgcgccagtcctaagtcaaccgactccgacgaaactaccatcatgcctccccgattatgtgatgctttctgccctgctgggtggagcaccctcgggttgagaaaaccttcttcctttttccttggactccggtcccccggtctaagccgctcggaatatgacagggttattttcacctcttcttttcgactcggaccgatg

SEQ ID NO: 202 - DNA, 203 bp, synthetic construct
  source 1..203: mol_type = other DNA
ggcgcgccagtccttgctttctgccctgctgggtggagcaccctcgggttgagaaaaccttcttcctttttccttggactccggtcccccggtctaagccgctcggaatatgacagggttattttcacctcttcttttctactccacagtgttctatactgtggaagggtatgtgttgccccttccttcgactcggaccgatg

SEQ ID NO: 203 - DNA, 203 bp, synthetic construct
  source 1..203: mol_type = other DNA
ggcgcgccagtcctcctttttccttggactccggtcccccggtctaagccgctcggaatatgacagggttattttcacctcttcttttctactccacagtgttctatactgtggaagggtatgtgttgccccttccttcttggagaacgtgcgcggcggtctttccgtctctcgacaagcgcgcgtgccgactcggaccgatg

SEQ ID NO: 204 - DNA, 203 bp, synthetic construct
  source 1..203: mol_type = other DNA
ggcgcgccagtcctagggttattttcacctcttcttttctactccacagtgttctatactgtggaagggtatgtgttgccccttccttcttggagaacgtgcgcggcggtctttccgtctctcgacaagcgcgcgtgcaacatacagagtaacgcgaagaaagcagttctcggtctagctctagtgcccgactcggaccgatg

SEQ ID NO: 205 - DNA, 203 bp, synthetic construct
  source 1..203: mol_type = other DNA
ggcgcgccagtcctacaaaggcagcggaacccccctcctggtaacaggagcctctgcggccaaaagccacgtggataagatccacctttgtgtgcggtgcaaccccagcaccctggtttcttggtgacactctagtgaacccctgaatggcaatctcaagcgcctctgtagggaagccaagaatgtcccgactcggaccgatg

SEQ ID NO: 206 - DNA, 203 bp, synthetic construct
  source 1..203: mol_type = other DNA
ggcgcgccagtcctggtttcttggtgacactctagtgaacccctgaatggcaatctcaagcgcctctgtagggaagccaagaatgtccaggaggtaccccttcctctcggaagggatctgacctggagacacatcacacgtgctttacacctgtgcttgtgtttaaaaattgttacagcttccccgaacgactcggaccgatg

SEQ ID NO: 207 - DNA, 203 bp, synthetic construct
  source 1..203: mol_type = other DNA
ggcgcgccagtccttctagtgaacccctgaatggcaatctcaagcgcctctgtagggaagccaagaatgtccaggaggtaccccttcctctcggaagggatctgacctggagacacatcacacgtgctttacacctgtgcttgtgtttaaaaattgttacagcttccccgaaccaagtggtcttggttcgactcggaccgatg

SEQ ID NO: 208 - DNA, 203 bp, synthetic construct
  source 1..203: mol_type = other DNA
ggcgcgccagtcctcctaaagttgatctcgaaacttggtgctaaacacatcaaggattgggaacacttggaggagttcagaaggtctctttgtgatgttgctgtttcgttgaacaattgtgcgtattacacacagttggacgacgctgtatgggaggttcataagaccgcccctccaggttcgtttgtcgactcggaccgatg

SEQ ID NO: 209 - DNA, 203 bp, synthetic construct
  source 1..203: mol_type = other DNA
ggcgcgccagtcctacttggaggagttcagaaggtctctttgtgatgttgctgtttcgttgaacaattgtgcgtattacacacagttggacgacgctgtatgggaggttcataagaccgcccctccaggttcgtttgtttataaaagtctggtgaagtatttgtctgataaagttctttttagaagttcgactcggaccgatg

SEQ ID NO: 210 - DNA, 203 bp, synthetic construct
  source 1..203: mol_type = other DNA
ggcgcgccagtcctggagttcagaaggtctctttgtgatgttgctgtttcgttgaacaattgtgcgtattacacacagttggacgacgctgtatgggaggttcataagaccgcccctccaggttcgtttgtttataaaagtctggtgaagtatttgtctgataaagttctttttagaagtttgtttatcgactcggaccgatg

SEQ ID NO: 211 - DNA, 203 bp, synthetic construct
  source 1..203: mol_type = other DNA
ggcgcgccagtcctaattactaatttgatctttaggttataatgttaggactataaaaattagcttaatgcatttagtaatttaaggcttagttatttaactttacttatcaagatggccgttggcagccccacgaaatctagattagtccgaatgtcctattttgattaggtggtcagataggtcagcgactcggaccgatg

SEQ ID NO: 212 - DNA, 203 bp, synthetic construct
  source 1..203: mol_type = other DNA
ggcgcgccagtcctgcctcagcgccaggcatagctggatcgtcaatcccaagtttggacttagacttgctctatgttacaattgggaggagcgtgacttaccattggtcgttgatgacgttaattccaaacaaaaacaacaacaacaacttagtttaaataattccggtctttaagcatcagggtagacgactcggaccgatg

SEQ ID NO: 213 - DNA, 203 bp, synthetic construct
  source 1..203: mol_type = other DNA
ggcgcgccagtcctattagttagcccttgtggatacgccactgccgctcaggtacagtaggacataccccaaatattgggttccactcgtagagaagaaaattagtggcgaaacgtacggtttatgtcaaaggagaaggtgattttaattgcacctgaagcaaccctaggtcttccctttgatgtgagcgactcggaccgatg

SEQ ID NO: 214 - DNA, 203 bp, synthetic construct
  source 1..203: mol_type = other DNA
ggcgcgccagtcctttaaacatcattgttcttatttacaatcaaatcgctatcgccacaaggctagtgataataactaagggggcgaagtcaagccctccaacctaatctccataaacagtgtctaagacgaacctcagcgaaagaaggaagatctctagacctactggaaataacataactctggaccgactcggaccgatg

SEQ ID NO: 215 - DNA, 203 bp, synthetic construct
  source 1..203: mol_type = other DNA
ggcgcgccagtcctaaacagtgtctaagacgaacctcagcgaaagaaggaagatctctagacctactggaaataacataactctggacctattggaacttatataattggcgcccaaccaacaatctgaacccaccaatctaatttaacacactttgtcaggcgacaaacagggtagttaagttagaacgactcggaccgatg

SEQ ID NO: 216 - DNA, 203 bp, synthetic construct
  source 1..203: mol_type = other DNA
ggcgcgccagtcctgactaagtgtgaacttgcctctctcaacaaaaagccaccgacattaagagagagagtattgctgcttagttaactgcaggccctatttagggttaccgcccaggatctgcaacagcattcctgtatcatccagggcaccggtggacttggtgaggattgagttgacctcatcatcgactcggaccgatg

SEQ ID NO: 217 - DNA, 203 bp, synthetic construct
  source 1..203: mol_type = other DNA
ggcgcgccagtcctcattctatggttacccatcattagaggaaatttccaataaactctggtgtaaggcttagagtgatggtcgaggtgccctatttagggtgaggagcctcggtggcagccccaccaaatcctctattggataggaacagctgtactgggcagttacagcagtcgtatggtaacacacgactcggaccgatg

SEQ ID NO: 218 - DNA, 203 bp, synthetic construct
  source 1..203: mol_type = other DNA
ggcgcgccagtcctattcaaaataaaatcccgtgcggtcggaaacaaaaattaatttaaattttttaattccgaaacttaaaaccaagtttaaagaaaacttaaaatcaagaaaacttaaaaccaagtttaaagaaaacttaaaatcaagaaaacttaaaaccaagtttaaagaaaacttaaaatcaacgactcggaccgatg

SEQ ID NO: 219 - DNA, 203 bp, synthetic construct
  source 1..203: mol_type = other DNA
ggcgcgccagtcctcactgtttcatggttacccatcatttgaggaaatttccaataaacttgaatgtaaggcttgaaacagtggtctaggtgccctatttagggtgaggagcctagctggcagccccagtgaatcctctattggatagaaaccgctatatcgggtagctatagcagtcggatagtaatcgactcggaccgatg

SEQ ID NO: 220 - DNA, 203 bp, synthetic construct
  source 1..203: mol_type = other DNA
ggcgcgccagtcctaaattagtggcaataacatatatatgtcaaccctgctcattggtttaattgagcgcatttagtgttgtgtgatcttgcgcgataaatgctgacgtgaaaacgttgcgtattgctacaacacttggttagctatttagctttactaatcaagacgccgtcgtgcagcccacaaaacgactcggaccgatg

SEQ ID NO: 221 - DNA, 203 bp, synthetic construct
  source 1..203: mol_type = other DNA
ggcgcgccagtcctggaaattgtcgttgaactacatgttgtaaggctttagagaaataagggagtgtcctatttaggatgaggtgctccggtggcagccccaccaaaacctctagcgactaggaacagctatatcgggttgctatagcagtcaggatgtcattctggcgttccgaaatacccaaacctcgactcggaccgatg

SEQ ID NO: 222 - DNA, 203 bp, synthetic construct
  source 1..203: mol_type = other DNA
ggcgcgccagtccttgtgaaaagggtaaagtatgaaagctactctcagaaaagtacttatgtattgatgagagccttaaaatgactttatattcacaaaactgctggaagacaatgatctggggtatcacattccctcttaggttaagtttcgcactactaggaatttttgcgaaaattcttaattcccgactcggaccgatg

SEQ ID NO: 223 - DNA, 203 bp, synthetic construct
  source 1..203: mol_type = other DNA
ggcgcgccagtccttgatgagagccttaaaatgactttatattcacaaaactgctggaagacaatgatctggggtatcacattccctcttaggttaagtttcgcactactaggaatttttgcgaaaattcttaattccattcttatggtgtagtgtttgttcttttcaattggggcgtatctctctttcgactcggaccgatg

SEQ ID NO: 224 - DNA, 203 bp, synthetic construct
  source 1..203: mol_type = other DNA
ggcgcgccagtcctaaactctccgaacactaggtgcagtaaggctttcatggagtggtttgctatttagcgtacgtgtaccataggcagccccaaaaacacgtgtgaggagaaagtcccagtcactttgggcaaagtagacagccgcgcttgcgtggtgggacttaattaatgcctgctaacccagttcgactcggaccgatg

SEQ ID NO: 225 - DNA, 203 bp, synthetic construct
  source 1..203: mol_type = other DNA
ggcgcgccagtcctaggctttcatggagtggtttgctatttagcgtacgtgtaccataggcagccccaaaaacacgtgtgaggagaaagtcccagtcactttgggcaaagtagacagccgcgcttgcgtggtgggacttaattaatgcctgctaacccagttgaaattgataattttgatacaacaaccgactcggaccgatg

SEQ ID NO: 226 - DNA, 203 bp, synthetic construct
  source 1..203: mol_type = other DNA
ggcgcgccagtcctcccgagctgcctgtgggttgcacccacccacagggcccactgggcgctagcactctggtactgaggtacctttgtgcgcctgtttttactccccttcccccgaagtaacttagaagctgtaaatcaacgatcaatagcaggtgtggcacaccagtcataccttgatcaagcactcgactcggaccgatg

SEQ ID NO: 227 - DNA, 203 bp, synthetic construct
  source 1..203: mol_type = other DNA
ggcgcgccagtcctttcatgttggctgcgctggcggcccacctgtggcccaaagccacgggacgctagttgtgaacagggtgtgaagagcctattgagctacatgagagtcctccggcccctgaatgcggctaatcctaaccatggagcaggcagctgcaacccagcagccagcctgtcgtaacgcgccgactcggaccgatg

SEQ ID NO: 228 - DNA, 203 bp, synthetic construct
  source 1..203: mol_type = other DNA
ggcgcgccagtccttgttcgcaggtagtcgtcagtggttcgacgccttggaataaaggtctcgagatgccacgtggacgagggcatgcccaaagcacatcttaacctgagcgggggtcgcccaggtaaaagcagttttaaccgactgttacgaatacagcctgatagggtgctgcagaggcccactgtcgactcggaccgatg

SEQ ID NO: 229 - DNA, 203 bp, synthetic construct
  source 1..203: mol_type = other DNA
ggcgcgccagtcctcgcatttccggcgacgcctcggtactgacctctgcagagccgggtggagcccattgacgtccagcgaagcgaggagcagcgatggacggtcgggtgcagctgataaaggccctcctggccttgccgatccggcctgcgacgcgtcgctggaggaacccgattccctttcccgagcgactcggaccgatg

SEQ ID NO: 230 - DNA, 203 bp, synthetic construct
  source 1..203: mol_type = other DNA
ggcgcgccagtccttcttctgcgacggcgcggacctggagcttccgcgcggtggcttcactctcctgtaaaacgctagagcggcgagttgttacctgcgtcctctgacctgagagcgaaggggaaagcggcgagatgactgaccgctacaccatccatagccagctggagcacctgcagtccaagtaccgactcggaccgatg

SEQ ID NO: 231 - DNA, 203 bp, synthetic construct
  source 1..203: mol_type = other DNA
ggcgcgccagtcctcatccagctcctctccacagcccaacccacaccagcctcagacaccaccatgaccggctcctgctgcggctccaccttctcctccctgagctacgggggaggctgctgccagccctgctgctgccgcgacccctgctgctgccgccccgtgacctgccagaccaccgtgtgccgcgactcggaccgatg

SEQ ID NO: 232 - DNA, 203 bp, synthetic construct
  source 1..203: mol_type = other DNA
ggcgcgccagtccttggcggtgggcgggagcggtcggcggcctcagccccttcagagagcgactttcaaactcgcgcccgcgtcgcggcagcacctgggcagccccgcacgccgtgcgcgtcccgagcccgcggggcagctaccgctcgaatctccctggggtgccctccccaggcagcaatgccaggcgactcggaccgatg

SEQ ID NO: 233 - DNA, 203 bp, synthetic construct
  source 1..203: mol_type = other DNA
ggcgcgccagtccttgtgtcacttccggcctccctttagctgccatcttgcgtccccgcgtgtgtgcgcctaatctcaggtggtccacccgagaccccttgagcaccaaccctagtcccccgcgcggccccttattcgctccgacaagatgaaagaaacaatcatgaaccaggaaaaactcgccaaaccgactcggaccgatg

SEQ ID NO: 234 - DNA, 203 bp, synthetic construct
  source 1..203: mol_type = other DNA
ggcgcgccagtcctggagaaacagtagttaggatggctgaaggggatactcaccggctgaaggccgactgtgattccccctacccccacaaggcgattttgaccccctgagggctgctctagaggactcaggccccgaagctgtcccagggaggtccccgctgcatcccaccacccaagctgtgcctccgactcggaccgatg

SEQ ID NO: 235 - DNA, 203 bp, synthetic construct
  source 1..203: mol_type = other DNA
ggcgcgccagtcctcggggctcgcggacaaaacaagttgagcgcgagcgcgttgattggttggcggacggtgcgaggtggacgctgattggctgagggcagcgcgaggcgggcgctgattggctgcgacgcgccgacgccggtgttttgcagtcctgggcagctcggcagtccagcccggcccgggtccgactcggaccgatg

SEQ ID NO: 236 - DNA, 203 bp, synthetic construct
  source 1..203: mol_type = other DNA
ggcgcgccagtccttccggccccgcccgcgtcagctctgcgcggtgattcactccctccttcgccccggggcccccttcccggccagacggcgggcaagacagctgggtgtacagcgtcctcgaaaccacgagcaagtgagcagatcctccgaggcaccagggactccagcccatgccatggcggattcgactcggaccgatg

SEQ ID NO: 237 - DNA, 203 bp, synthetic construct
  source 1..203: mol_type = other DNA
ggcgcgccagtcctctcctagtcgcagcaagcgcggaactggggttgcggcgtctaagtgtttccggtggattcccagggactgtcggaggtgtggactctgcctgcctacctggtctgggaagatgttctaccatatctccctagagcacgaaatcctgctgcacccgcgctacttcggccccaactcgactcggaccgatg

SEQ ID NO: 238 - DNA, 203 bp, synthetic construct
  source 1..203: mol_type = other DNA
ggcgcgccagtcctgctgtcgtatcgacagaaggctgaggccggggtgctagagaaccttgccgtgctggaattcacgttgacgcccccacggagctctgctgcagagccctcgagtcccgcacttccggccgccaggtggcgctggttctgttgccaactcggagagactgagctgggccacgcaagcgactcggaccgatg

SEQ ID NO: 239 - DNA, 203 bp, synthetic construct
  source 1..203: mol_type = other DNA
ggcgcgccagtcctgactacaaggagacagaaggctgaggccggggtgctagagaaccttgccgtgctggaattcacgttgacgcccccacggagctctgctgcagagccctcgagtcccgcacttccggccgccaggtggcgctggttctgttgccaactcggagagactgagctgggccacgcaagcgactcggaccgatg

SEQ ID NO: 240 - DNA, 203 bp, synthetic construct
  source 1..203: mol_type = other DNA
ggcgcgccagtcctagaggagtcaaccctgaggaggaaaaagtagtatgatttgctggcgtcacccctctgctccgtgcgggcgcggcgaatggcaggtcccgaggtcgcagcttccactggcgcgggttgagttccctgttgcccttggtctcggggtcgctgtaggcgctgaggctgcagctatcacgactcggaccgatg

SEQ ID NO: 241 - DNA, 203 bp, synthetic construct
  source 1..203: mol_type = other DNA
ggcgcgccagtcctcgacttcacgcagggtccgtggggtccccgcggcgcgcagcggctgaaggaggccccagggccttggcgaccgcagcggcggctttagcgtcagtgactaggcagcagggggtcaggatgcggcgaagctcccgcccgggctcggcctcgtcctcgcgcaagcacacgcccaaccgactcggaccgatg

SEQ ID NO: 242 - DNA, 203 bp, synthetic construct
  source 1..203: mol_type = other DNA
ggcgcgccagtcctgattcacgcccccttccggcgcctagagcaccgctgccgccatgttgagggggggaccgcgaccagctgggcccctggctcagggaggggccacgtcagtgctgccagagacgtcacaatgccggcccagccgttcggcagagaagaggcgatggcggcgatggcatctctcggcgactcggaccgatg

SEQ ID NO: 243 - DNA, 203 bp, synthetic construct
  source 1..203: mol_type = other DNA
ggcgcgccagtcctgggaggtgaaaggtcatagtcctgtttggcggccatttctcttgaaactgcggctcgggacctgcggtacctgctgtagtcacgagggacgggcggcggcctggtcggcagagagtagcctgcaacattcggccgtggttacgatgagtttacccctcaatcccaaacctttcccgactcggaccgatg

SEQ ID NO: 244 - DNA, 203 bp, synthetic construct
  source 1..203: mol_type = other DNA
ggcgcgccagtcctaatcacggaatcccggcggccggcggcccgggaggcagtcgcgcgctcgcatccccaagatggcggccgttaaggacagttgtggcaaaggagaaatggccacagggaatgggcggcggctccacctggggattcctgaggccgtgtttgtggaagatgtagattccttcatgacgactcggaccgatg

SEQ ID NO: 245 - DNA, 203 bp, synthetic construct
  source 1..203: mol_type = other DNA
ggcgcgccagtcctcccttgcgcgccaccgtcccttctctcttcctcggcgctgcctacggaggtggcagccatctccttctcgctggcgattggaagacactctgcgacagtgttcagtccctgggcaggaaagcctccttccaggattcttcctcacctggggccgcttcttccccaaaaggcatccgactcggaccgatg

SEQ ID NO: 246 - DNA, 203 bp, synthetic construct
  source 1..203: mol_type = other DNA
ggcgcgccagtcctcagcaaaagaccagctggtcccagattcgctgctggagtgctggatggagcctttctctgccctctgtgacatttccaattttagataatgcctcacatctctgtccccccgggaccccctggagcccccatgatccctaagaagacagcttgaacctagatctcacccccaggcgactcggaccgatg

SEQ ID NO: 247 - DNA, 203 bp, synthetic construct
  source 1..203: mol_type = other DNA
ggcgcgccagtcctgtgacaacgggggcgaagcgcaggcgcaaggagcaagcgcagattgtgggcggctgtgtcagctgacccaaggggccttcgaggtgccttaggccgcttgccttgctctcagaatcgctgccgccatggctagtcagtctcaggggattcagcagctgctgcaggccgagaagccgactcggaccgatg

SEQ ID NO: 248 - DNA, 203 bp, synthetic construct
  source 1..203: mol_type = other DNA
ggcgcgccagtcctgctacgcagagttagagaagccagagtccaagccaagaactctgactccacatccagtcccttctctcctttataactcaagtttccttgcgccacactgccctccacgttatgctgtacatgacaacttgggtgaggcaacagggaagctgaaaagagatcatacggtgctgacgactcggaccgatg

SEQ ID NO: 249 - DNA, 203 bp, synthetic construct
  source 1..203: mol_type = other DNA
ggcgcgccagtcctagacacgggcgaggggaggaagaaggcgcctcgggctccggtctcctgcgctcctgctgggcgccagcggctggaccttggcagccgtctgaggcttcggggagcccaaggccaccggcagcgcttgttagaatgcagattcccggggttcgactggaatgagaccccggggagcgactcggaccgatg

SEQ ID NO: 250 - DNA, 203 bp, synthetic construct
  source 1..203: mol_type = other DNA
ggcgcgccagtcctttgtcctcagccaattagcggcccaacgccccttccgcgcctcatccgggttcccgggacgggaaagtggcgtggtaaccaggcaactactgatcaatcccctccccggctgatttgcgcatcaggaggaggactgagcttatctgactccagagctttcaggagggaagaaagcgactcggaccgatg

SEQ ID NO: 251 - DNA, 203 bp, synthetic construct
  source 1..203: mol_type = other DNA
ggcgcgccagtccttccctagcaaggcgtttctctgggcgcgctctgtggccaccctcacactcggtgcccggaaatcgagccctttgcccacggctacttcacgggaccaccctcccgggttaggcataggccctcccggatcttccgcggtgcggtaaccagcgtgagctcgcccgccagaagaatcgactcggaccgatg

SEQ ID NO: 252 - DNA, 203 bp, synthetic construct
  source 1..203: mol_type = other DNA
ggcgcgccagtcctgcagtctccgcctaagactttccaagtcctgtagtttcgagcccgctgccctttgcctcctgggcggagaagctgcttcctcctgggaacaaccgcctcccgctcctagcaggttgctactgccccgaacccgcgctgcagggaacagcggggcaaacaaaaccaatagagccacgactcggaccgatg

SEQ ID NO: 253 - DNA, 203 bp, synthetic construct
  source 1..203: mol_type = other DNA
ggcgcgccagtcctagaaacagcctatagacgccacgagtcggcggcgctaccgaggggctgtgggcgcgcagctggaacctccggctgtcagtgcgcttacagttcctaaccccgaccctgcgcgcagcccgcactatggcagccccgccgcagctaagggctctgctcgtagtcgtcaacgcactgcgactcggaccgatg

SEQ ID NO: 254 - DNA, 203 bp, synthetic construct
  source 1..203: mol_type = other DNA
ggcgcgccagtcctcggggcgccgctgagccaagtgggccacccgggcacggccacgctcccgggtcacgtgacacggagggggccgaattctgctggaggcagcgccatatcctggaggtgaaggtaccacctcatggagacccccgcggccgccgcccccgctgggagcttattcccctccttcctcgactcggaccgatg

SEQ ID NO: 255 - DNA, 203 bp, synthetic construct
  source 1..203: mol_type = other DNA
ggcgcgccagtccttatggtttgaagtggtgaacatggatttttctcggcttcacatgtacagtcctccccagtgtgtgccggagaacacgggctacacgtatgcgctcagttccagctattcttcagatgctctggattttgagacggagcacaaattggaccctgtatttgattctccacggatgtcgactcggaccgatg

SEQ ID NO: 256 - DNA, 203 bp, synthetic construct
  source 1..203: mol_type = other DNA
ggcgcgccagtcctagagcgtcttctcgggcctgggcggcgcagacgaggcctgaggcggcggcgcgaggcagttccagctattcttcagatgctctggattttgagacggagcacaaattggaccctgtatttgattctccacggatgtcccgccgtagtttgcgcctggccacgacagcatgcacccgactcggaccgatg

SEQ ID NO: 257 - DNA, 203 bp, synthetic construct
  source 1..203: mol_type = other DNA
ggcgcgccagtccttgtggtctctccatgctgcccaggtcggactcctaggctcaagcgatcccctcgccccagcctgcctggaggcgcgcgcgtggtctccgcgccctgttgcgccttcaaagtgcccagaatggtgtctggtgcaaaataagcagcggcggggaacaccttgccactgtcaccgtccgactcggaccgatg

SEQ ID NO: 258 - DNA, 203 bp, synthetic construct
  source 1..203: mol_type = other DNA
ggcgcgccagtcctgggcaaaggaggaagagccagaggatccagacgccttggaggacttggaacacctgtaacaggacaaggagttctgctcaggcacgtggccacagaaaactacttaggaagcctgtggtgagaacaacaacagtgcctgagaatcccacggctctggggaagtgagccccgaggcgactcggaccgatg

SEQ ID NO: 259 - DNA, 203 bp, synthetic construct
  source 1..203: mol_type = other DNA
ggcgcgccagtcctgccttccatccctgctcctgcaccggtctgcatctcccagcagaaggcgcagccatgaatccgttattcggccccaacctcttcctcctgcagcaggagcagcagggcctggccgggccactgggggactcactgggaggcgaccacttcgccgggggaggagacttgcccccgcgactcggaccgatg

SEQ ID NO: 260 - DNA, 203 bp, synthetic construct
  source 1..203: mol_type = other DNA
ggcgcgccagtccttagtcccagagccaggaatcaggggcagccgggcgagtcccagggcaggggtcctccgccgccttgcacctgccctgctgggcggcaccgggtcagtgccctgccccctcctgcgggtcccaactctctctttcccatcgtgcgtcctctggagaagtgcgcgcgtgagctgaccgactcggaccgatg

SEQ ID NO: 261 - DNA, 203 bp, synthetic construct
  source 1..203: mol_type = other DNA
ggcgcgccagtcctatcgtgcgtcctctggagaagtgcgcgcgtgtaagtgtggcgagtgtggccaagggtgccggaggcagggttcgggagctgacatggacccaaatcctcgggccgccctggagcgccagcagctccgccttcgggagcggcaaaaattcttcgaggacattttacagccagagacgactcggaccgatg

SEQ ID NO: 262 - DNA, 203 bp, synthetic construct
  source 1..203: mol_type = other DNA
ggcgcgccagtcctccttcactgctcagttaaaggttccagggattccactttgtctggacccatccagctgagtgaacccagggtggtggtgtatctggggagagtgaggagtgggttgtccaaacaccagggaaagagccctttggggcctcagacagcggagtgaagctggaaccatcagggaaccgactcggaccgatg

SEQ ID NO: 263 - DNA, 203 bp, synthetic construct
  source 1..203: mol_type = other DNA
ggcgcgccagtcctcccttcccaccccgcgtcgctcggcgttagccaaggcccgggcggcgccaccctccgggggcactaggtctggggccgcagtgcccagcacagagcagcgtttatcgggacgaagatgaatggaaagaattggagcaaaaagaggttgattacagcggcctcagggttcaggcacgactcggaccgatg

SEQ ID NO: 264 - DNA, 203 bp, synthetic construct
  source 1..203: mol_type = other DNA
ggcgcgccagtcctcgttgccgcgtccgagtccggccatcagtggctgcagatccggaggccaggagctcaaccacccttcttcggaacagggccggcctgctgctgtgccctcgacgctcggtgcctgtatctactccggggcctaggtcggctccgggggcggcttaggagaaggccgccggcgagcgactcggaccgatg

SEQ ID NO: 265 - DNA, 203 bp, synthetic construct
  source 1..203: mol_type = other DNA
ggcgcgccagtcctgcaggccgctgtgagcgcatcctcaccgggcacacccagtcggtcacctgtctccggtggggaggggacgggcttctctactctgcctcccaggaccgcaccatcaaagtctggagagctcatgacggtgtgctgtgccggactctgcaaggccacggccactgggtgaacacccgactcggaccgatg

SEQ ID NO: 266 - DNA, 203 bp, synthetic construct
  source 1..203: mol_type = other DNA
ggcgcgccagtcctgctccgcaggctgccggctccacccctcagggactggctggcttcgagcagggcatcggaaccaggcctcctggcactggcctgggtagagccagggcgagcaccagctgacccccagtggaaccctgtgacagtcctgccagggcccaggccatcccaaccgacttccatctccgactcggaccgatg

SEQ ID NO: 267 - DNA, 203 bp, synthetic construct
  source 1..203: mol_type = other DNA
ggcgcgccagtcctgcaggggtttcagtttctggcgcgaacttccgccgttccgaagttgcacggtgaattggcgctatgtctggggacagcagcggccgcgggccagagggccggggccggggccgcgacccgcatcgggatcgcacccgctcccgctcccgctcgcggtcccctttgtcgcccaggcgactcggaccgatg

SEQ ID NO: 268 - DNA, 203 bp, synthetic construct
  source 1..203: mol_type = other DNA
ggcgcgccagtcctagttccggtggctggcggaaacgggaacgtgcagccgcgggtgcaggagtcctggggcatggcgggggcggggcagggggaggcgcgcacagaacaggctggggcatccctcgccctggctctttgagcccggaccagacagagatgtgataatggatcatcatgtttctaccacgactcggaccgatg

SEQ ID NO: 269 - DNA, 203 bp, synthetic construct
  source 1..203: mol_type = other DNA
ggcgcgccagtccttacaccatacagctcaaacttcagaagattttgggttaagcagttatcattagtctgcaaatgatcgtgttttcacctgatcattagaaactaatgaaacaccttttaagtcttatgaattcaggttacactgttttccagatgccttggcagctggtacagggcctctgaaaacgactcggaccgatg

SEQ ID NO: 270 - DNA, 203 bp, synthetic construct
  source 1..203: mol_type = other DNA
ggcgcgccagtcctctcaggtgcttgcgaggtgatcagaaggcaaagatgtcggagcgaaaagtattaaacaaatactacccgccggactttgacccatcaaagatccccaaactcaagctccccaaagaccggcagtacgtggtgcggctgatggcccccttcaacatgaggtgtaagacgtgcggacgactcggaccgatg

SEQ ID NO: 271 - DNA, 203 bp, synthetic construct
  source 1..203: mol_type = other DNA
ggcgcgccagtcctacacaccctgacccgcatcgccctgggtctctcgagcctgctgcctgctcccccgccccaccagccatggtggtttctggagcgcccccagccctgggtgggggctgtctcggcaccttcacctccctgctgctgctggcgtcgacagccatcctcaatgcggccaggatacctcgactcggaccgatg

SEQ ID NO: 272 - DNA, 203 bp, synthetic construct
  source 1..203: mol_type = other DNA
ggcgcgccagtcctagccagctgctgcgggagaatgccaaggctgggcaccccccagcgctgcgtcggcagtacctgaggcttcgggggcagctgctgggccagcgctacgggcccctctccgagccaggcagtgctcgtgcctatagcaacagcatcgtccgcagtagccgcactactcttgaccgccgactcggaccgatg

SEQ ID NO: 273 - DNA, 203 bp, synthetic construct
  source 1..203: mol_type = other DNA
ggcgcgccagtcctcacttccctctgtggctctgctcagaactggcggtttttcccagctccttgcccagaccaatacttccatgctgtcttcaagccctgcttcctgcacatctcccagcccagatggggagaacccatgtaagaaggtccactgggcttctgggaggagaaggacatcatccacagcgactcggaccgatg

SEQ ID NO: 274 - DNA, 203 bp, synthetic construct
  source 1..203: mol_type = other DNA
ggcgcgccagtcctattcctatagccgttatcactgccatcaccactgccaccagcatcttcttgcagattccacccctgctccccagagacttcctgctttgaaagtgagcagaaaggaagctctcagaaaaatctctagtggtggctgccgtcgctccagacaatcggaatcctgccttcaccacccgactcggaccgatg

SEQ ID NO: 275 - DNA, 203 bp, synthetic construct
  source 1..203: mol_type = other DNA
ggcgcgccagtcctgaagccggaagagaccggaccctgaacagaatcgcagattgccagcccttttcccgacccctacggaaagacgagtccaggggccgtcctggcgaggtcaaaacatttagtctggtcttttcagcgtggaccctgccagcagccaggccatggagctctctgatgtcaccctcacgactcggaccgatg

SEQ ID NO: 276 - DNA, 203 bp, synthetic construct
  source 1..203: mol_type = other DNA
ggcgcgccagtcctcttccgcctgcgcctgcgcaggcccgctccccgagccctgccaaccatggtgaacttgggtctgtcccgggtggacgacgccgtggctgccaagcacccgggactcggggagtatgccgcatgccagtcacacgccttcatgaagggcgttttcaccttcgtcacaggcaccggcgactcggaccgatg

SEQ ID NO: 277 - DNA, 203 bp, synthetic construct
  source 1..203: mol_type = other DNA
ggcgcgccagtcctacaccccaagaacgctgtcatttcctgggccaagttgggacccggacggcctcaccatgatgaaacgggcagctgctgctgcagtgggaggagccctggcagtgggggctgtgcccgtggtgctcagtgccatgggcttcactggggcaggaatcgccgcgtcctccatagcagcgactcggaccgatg

SEQ ID NO: 278 - DNA, 203 bp, synthetic construct
  source 1..203: mol_type = other DNA
ggcgcgccagtcctgggtcacatggcggtggcgcggtagcgcgcgatgcagcacaggctagaggctgcgcaagcgcggggcccgcccctgggaccctccgggccgggcggtttggccccttagcgcccgggcgtcggggcggtaaaaggccggcagaagggaggcacttgagaaatgtctttcctccacgactcggaccgatg

SEQ ID NO: 279 - DNA, 203 bp, synthetic construct
  source 1..203: mol_type = other DNA
ggcgcgccagtcctttgccaagggttggctgcgcgtgcggcgggagtagaggcgccttgcgcaccaggaagtgactgtttccccgccgcagcaaaccaggccatccgctggccttttagtttgccgcctcaggtttgtaagaggatttattggttacgaaggaaggtggatttcagtgtgttctttggcgactcggaccgatg

SEQ ID NO: 280 - DNA, 203 bp, synthetic construct
  source 1..203: mol_type = other DNA
ggcgcgccagtcctgcggggtcaggggccgagcggagagggtagagacggggtttcaccgtgttagccaagatggtctcgatctcctgacctcgtgatccgcccgcctcggcctcccaaagtgctgggattacaggcgtgagccactgcgcccggcctgttgtacagttattaaagttatcatttaaccgactcggaccgatg

SEQ ID NO: 281 - DNA, 203 bp, synthetic construct
  source 1..203: mol_type = other DNA
ggcgcgccagtcctgagcccgtcttccgacgtgcagcctggcagtgcagtgagctgtctggccttttgtccttgatccttggttaaggaaatgaccaaccagtacggtattctcttcaaacaagagcaagcccatgatgatgccatttggtcagttgcttgggggacgaacaagaaggaaaactctgacgactcggaccgatg

SEQ ID NO: 282 - DNA, 203 bp, synthetic construct
  source 1..203: mol_type = other DNA
ggcgcgccagtccttggctggtgtctggccctcaggacatcctctccaatccaccacacaccaccttacccctctgctggcaagaggggacctgattcatcctcacgctaaacactcattctacccaactgattgagacagaacagaagataaactgaaacttctctgccttcccgctgcaagagtgacgactcggaccgatg

SEQ ID NO: 283 - DNA, 203 bp, synthetic construct
  source 1..203: mol_type = other DNA
ggcgcgccagtcctgtggcgcctgcgggattccgtaccggcgtctccatggcgaccgcgttggctgggtggcctccattgtcgggctgctgctctcagcggcggggctcgccagcgcttcagtgggcggggacgcggcaggtgactccagaccaaggaggatgagctgctgtccctggaagagaacggcgactcggaccgatg

SEQ ID NO: 284 - DNA, 203 bp, synthetic construct
  source 1..203: mol_type = other DNA
ggcgcgccagtcctatgcgccgcccgtggccatcttgtaggcggggacacgccgaggtaacttccagggtgcgccttcgttgtcttctccaagctgtagttctacgtcccgacctccctatcataccacactcttcagcgaccacgcaggcactttcccggtccccagtataccataattgaagaaaacgactcggaccgatg

SEQ ID NO: 285 - DNA, 203 bp, synthetic construct
  source 1..203: mol_type = other DNA
ggcgcgccagtcctcacactttcagtgccagggcattgtgggaagcagccatggtctaagccgggcgcctcacctgtcagccgcaccggctccagcgctcgcctctcgccctcgcttctccagcgctccttgctcgcaaggcgggggaggcggcggcccagccacgatgatacatttcatattgctctcgactcggaccgatg

SEQ ID NO: 286 - DNA, 203 bp, synthetic construct
  source 1..203: mol_type = other DNA
ggcgcgccagtcctaccgagcttggctgtgtttatctcgttggggactaaggcgtcggttggcgcgcaacgggttctaggctgcaggcagctcgaggacccgcggccccgccccggctcggcctggcagatagcagaggcagcaggccgtgccgggggggcatgttgctgtaaccagtggcccaggggcgactcggaccgatg

SEQ ID NO: 287 - DNA, 203 bp, synthetic construct
  source 1..203: mol_type = other DNA
ggcgcgccagtcctgtggggctggcggccggcgggagaggcggccggcctggactggcccgagagggatcccggttcccagaacagacctaggaggcggcctcgagggcggacggcagggagggccagcatgccccgactgctgcaccccgccctgccgctgctcctgggcgccacgctgaccttccgcgactcggaccgatg

SEQ ID NO: 288 - DNA, 203 bp, synthetic construct
  source 1..203: mol_type = other DNA
ggcgcgccagtcctacggtgggatccacaacatctccacatcgctgtccccacccagccagggcagcgccagcactagctcagacgcaaggacggaaccgctggactccaggttccttgcctgggagtaggagaaatccacctgctgggggctgagtgtggcctgagggacaggccctgggtcccgggcgactcggaccgatg

SEQ ID NO: 289 - DNA, 203 bp, synthetic construct
  source 1..203: mol_type = other DNA
ggcgcgccagtcctgggataaacggagctggacgactcagtctcttggtctgtggctgctgcggttacctggatgggcgagcacctctgaggctggctttgttacctgggcaataagggactagcagttcagccgttttctatgcctgctggatttgtttgtatttgttcccagccactgctcatgtacgactcggaccgatg

SEQ ID NO: 290 - DNA, 203 bp, synthetic construct
  source 1..203: mol_type = other DNA
ggcgcgccagtcctctccaggccccgctcctgcgccctatttggtcattcggggggcaagcggcgggaggggaaacgtgcgcggccgaaggggaagcggagccggcgccggctgcgcagaggagccgctctcgccgccgccacctcggctgggagcccacgaggctgccgcatcctgccctcggaacacgactcggaccgatg

SEQ ID NO: 291 - DNA, 203 bp, synthetic construct
  source 1..203: mol_type = other DNA
ggcgcgccagtcctctcgctacgcaatgccaacccgaggctgaagaactacttcaaggagaactacattcctcaggtctgcgaggcactgttatgtggtatacttgttacatgtcctgaggatccgctgaggtatttagagggaatgatcatggttataatcaaaagtggtcttcagaatcttctttgcgactcggaccgatg

SEQ ID NO: 292 - DNA, 203 bp, synthetic construct
  source 1..203: mol_type = other DNA
ggcgcgccagtcctgcctctgtcatttcctagagctgtggcctcggatccctccctggtgccacagcagctgagtgcgcatcaaatctgaagaaaatctacacagtacagacagtacagatattttggagtgtatacaataatatccctcctgtgactagcctgcctttgagatgtagttatcatttacgactcggaccgatg

SEQ ID NO: 293 - DNA, 203 bp, synthetic construct
  source 1..203: mol_type = other DNA
ggcgcgccagtcctgctcggtctctcggtgctcgctccatcgggtctggcggggctggcagcggcgaggacccgggtctggcgctgtgggccgggagccgtggggcggcatggaggggctggttgtcgccgccggcggggacgtctccctgcacaacttcagcgcgaggctgtgggagcagctggtcccgactcggaccgatg

SEQ ID NO: 294 - DNA, 203 bp, synthetic construct
  source 1..203: mol_type = other DNA
ggcgcgccagtcctgccgccggatggcgtaggatcggccgctggtggtggtgataccgggtacccgggctatggcgccggcgcagcgctgccctctgtgccgccagaccttcttctgtggtcgcgggcacgtttacagccgcaagcaccagcggcagctgaaggaggctttggagaggctcctgcccccgactcggaccgatg

SEQ ID NO: 295 - DNA, 203 bp, synthetic construct
  source 1..203: mol_type = other DNA
ggcgcgccagtcctatggtcgatgatgctggtgccgctgagtcccagcggggcaaacagactccggcccactccctggagcagctgcgtaggttaccacttccgccgccacagattcgcatccggccctggtggtttccggtgcaggaactgagagaccctttggtgttctacctagaggcatggctgcgactcggaccgatg

SEQ ID NO: 296 - DNA, 203 bp, synthetic construct
  source 1..203: mol_type = other DNA
ggcgcgccagtcctaccatagtctgtgtccgcgttcttttttccgggactgcagagttcggggaagctgtacgccgcctttcgctacgcggaatttgcagatcttcccctggacctcaggcctctccggctggagtagggtggacgcttcacataagcttctctggtcgaacttacccgaatctccagcgactcggaccgatg

SEQ ID NO: 297 - DNA, 203 bp, synthetic construct
  source 1..203: mol_type = other DNA
ggcgcgccagtcctgtcgggttaccagcgcgggggctacagttagcctcgagaacctttgctttcagccggactccggactcctccggggacagcgcagcgcccgccagagccctcggcgctccctcccgctggcggcttccgcagccttcaaggatggcgctggcggctttgatgatcgccctcggccgactcggaccgatg

SEQ ID NO: 298 - DNA, 203 bp, synthetic construct
  source 1..203: mol_type = other DNA
ggcgcgccagtcctgggggtccgcgggcgacactctcgggctcgcgcacctccccaagatggcggcgcccgaggcctcgcgcgcccggagttgctggttctgtgaggtagcggcggcaacgaccatggaggccacgtcccgggaggcggcgccagcgaagagctcggcctcgggccccaacgctcccccgactcggaccgatg

SEQ ID NO: 299 - DNA, 203 bp, synthetic construct
  source 1..203: mol_type = other DNA
ggcgcgccagtccttctggaagacggcagagctgccgccattttgcgggaagaggaggctctgtacctgcagtgctgcttttcttgcctagactctaggaactatccgagctccactccccacaacatactcaaaggaacggagagaaccgggacccccctgcggggacccggaactgatctgacaggcgactcggaccgatg

SEQ ID NO: 300 - DNA, 203 bp, synthetic construct
  source 1..203: mol_type = other DNA
ggcgcgccagtccttttttctcactgataaagaaaggaaaagctaccaccattacatcagtcttaccgaagccagcactagttgcatctcgggttgaggtttccaaagtccttattctaggatcaggaggtctgtccattggtcaggctggagaatttgattactcaggatctcaagctgtaaaagcccgactcggaccgatg

SEQ ID NO: 301 - DNA, 203 bp, synthetic construct
  source 1..203: mol_type = other DNA
ggcgcgccagtcctcccgcgcgctgcccttcgcttgaggcaaaaggactcttgtggaagatggaactcattgtccattttccagaatgtatttccaagcccatcaatgggacctgatactgctgttctgtgttgaaatgcttgaagaactcctgcatctctgcttgcatcttccatcctactgaaacccgactcggaccgatg

SEQ ID NO: 302 - DNA, 203 bp, synthetic construct
  source 1..203: mol_type = other DNA
ggcgcgccagtcctcacaggcagtgccactgcgcaggttgatcagcgaaacagcatccattttaatctgcggggagcccctgccttaccagggcgttctctccgcccgccggtggatgctccgcgcctgccctccgcagcctcgctcagcagtcctgcgttggggtctgcgccctaggatgcactgagcgactcggaccgatg

SEQ ID NO: 303 - DNA, 203 bp, synthetic construct
  source 1..203: mol_type = other DNA
ggcgcgccagtcctcgtctgccccgccagcgcgtcgagggaggggccagcgacacatggcctagtaactgtccggccgcggcgctggcttaagccatggctgagggtagccggattcctcaggcccgggcgctcctacagcagtgcctgcacgcccggctgcaaattcgcccagccgatggggacgtccgactcggaccgatg

SEQ ID NO: 304 - DNA, 203 bp, synthetic construct
  source 1..203: mol_type = other DNA
ggcgcgccagtcctctccgctccaatcccggaagtgcgcgcggccccgcccccgccggttcgcgtctctctgctgcggcgcggggaccgctgtgctctcggaaacggggtctctgggggatccagtgacgtgcccaaccacagagaccagacccctcctcctgtagagagtggtgctgccctctcgggcgactcggaccgatg

SEQ ID NO: 305 - DNA, 203 bp, synthetic construct
  source 1..203: mol_type = other DNA
ggcgcgccagtcctccaatcccggaagcgcgcgcggccccgcccccgaaagtcggctcggctccgctccaatcccggaagtgcgcgcggccccgcccccgccggttcgcgtctctctgctgcggcgcggggaccgctgtgctctcgacccctcctcctgtagagagtggtgctgccctctcgggatgtcgactcggaccgatg

SEQ ID NO: 306 - DNA, 203 bp, synthetic construct
  source 1..203: mol_type = other DNA
ggcgcgccagtcctgcgctgaggagagttcgccgccgtcgccgcccgtgaggatctgagagccatgtcggccagcagcctcttggagcagtacaaaatggatctgtacatcaaaaggatggattaaacgatgatgattttgaaccttacttgagtccacaggcaaggcccaataatgcatatactgcccgactcggaccgatg

SEQ ID NO: 307 - DNA, 203 bp, synthetic construct
  source 1..203: mol_type = other DNA
ggcgcgccagtccttgccgttatcgcccggctagtcagtcgtccaactcaccacagagaagtccggatcgtggtagagcgccgcgtcgcacccatgtgacgtcacggcggcgccactcgcttgaggctttccccgcccaccccagcccgttctctctttccggacctggccgagcaggaggcgccatccgactcggaccgatg

SEQ ID NO: 308 - DNA, 203 bp, synthetic construct
  source 1..203: mol_type = other DNA
ggcgcgccagtcctgctcacccctggatatacttctttgtcaagagaagcagaggtgtggacgctgtgtatgaaatgtctttcctccaggacccaagtttcttcaccatggggatgtggtccattggtgcaggagccctgggggctgctgccttggcattgctgcttgccaacacagacgtgtttctgcgactcggaccgatg

SEQ ID NO: 309 - DNA, 203 bp, synthetic construct
  source 1..203: mol_type = other DNA
ggcgcgccagtccttgcccagactggtcttgaactcctgggctcaagcgatcctcccaaagccctgagattacaggcgtgagccagcgcgccggacacaacctcctactttcatgaaagagtgggcacttccaacaggaggaaaatgtctttcctccaggacccaagtttcttcaccatggggatgtgcgactcggaccgatg

SEQ ID NO: 310 - DNA, 203 bp, synthetic construct
  source 1..203: mol_type = other DNA
ggcgcgccagtccttggtggcagcaggtgcttagcagcccttgtccagtctcgcctgtgacactgctgctcccttcccctgtcctgacctcctggttggctgtcctgccagagccttgcctggaagatgaaattccagctaccctgtgggagcagtaacgccttcttccttcttctcaatctccagaacgactcggaccgatg

SEQ ID NO: 311 - DNA, 203 bp, synthetic construct
  source 1..203: mol_type = other DNA
ggcgcgccagtcctaaagtctatacgcaataagtaagcccaaagaggcatgtttgcttggcgatgcccagcagataagccaggcaaacctcggtgtgatcgaagaagccaatttgagactcagcctagtccaggcaagctactggcacctgctgctctcaactaacctccacacaatggtgttcgcatcgactcggaccgatg

SEQ ID NO: 312 - DNA, 203 bp, synthetic construct
  source 1..203: mol_type = other DNA
ggcgcgccagtcctgtacccgggcccaaggctgagggacccggtggagcggaagtcactccctgaggcagtggcgacagcggcggcgagaggatgaacaacaagttcgacgctttgaaagatgatgacagtggggaccatgatcagaatgaagaaaacagcacacagaaagatggtgagaaggaaaaacgactcggaccgatg

SEQ ID NO: 313 - DNA, 203 bp, synthetic construct
  source 1..203: mol_type = other DNA
ggcgcgccagtcctaccgagtccttggctgcctgtggagctcctgtgccagcagctgcgccccggctgcgctccggatacccccatccccgccaccgccgacctcccgctccaccgactgctgctcacgcccgacgggttcacgccgcccctgccccgtgaaggaccgcgctgcggtgcggaggcaggcgactcggaccgatg

SEQ ID NO: 314 - DNA, 203 bp, synthetic construct
  source 1..203: mol_type = other DNA
ggcgcgccagtccttgccgggcccccgggccgcagctggtttcgggaaaccgcgcagcctgggcggggccgcagcccccacccgtgcatctgccgtctccgccctcccgtcgctcccctgctcggggtcagctagtgtccgctctgctcggccgcgggctcccggaggactgcaggaggccaggcaggcgactcggaccgatg

SEQ ID NO: 315 - DNA, 203 bp, synthetic construct
  source 1..203: mol_type = other DNA
ggcgcgccagtccttcactgggggtataaaagggcctgggtggcgggcgcctgggcagagcgtcctagcagtgtcactgcgtgggttggtttgtgtagagaggcgtgagcgagcccgttgtccggagtgcacctgctgcctgttctgtccctcccgggagcccccgccgctgtcgccgtcgagtcgcccgactcggaccgatg

SEQ ID NO: 316 - DNA, 203 bp, synthetic construct
  source 1..203: mol_type = other DNA
ggcgcgccagtcctgcgtgctgtgggcggtgccgcgcggacccccgggaagtgtctctgtgggcggccgccgggttgagctgcggcacacgtgcgacggccgtgatgaagttcgcttaccggttttcaaatttgctgggtacggtgtaccggcgtgggaacctaaattttacctgcgatggaaattcacgactcggaccgatg

SEQ ID NO: 317 - DNA, 203 bp, synthetic construct
  source 1..203: mol_type = other DNA
ggcgcgccagtcctaatcagagctggttccgcgccgcggccgccgcgacaggtgcagcagagccgagccggccgcgctccgaacggcgcctcccgccccaccatgggcaacagcgcgagccgcagcgacttcgagtgggtctacaccgaccagccgcacacgcagcggcgcaaggagatactggccaacgactcggaccgatg

SEQ ID NO: 318 - DNA, 203 bp, synthetic construct
  source 1..203: mol_type = other DNA
ggcgcgccagtcctgcgcggcgtgactgagctacggttctggctgcgtcctagaggcatccggggcagtaaaaccgctgcgatcgcggaggcggcggccaggccgagaggcaggccgggcaggggtgtcggacgcagggcgctgggccgggtttcggcttcggccacagctttttttctcaaggtgcacgactcggaccgatg

SEQ ID NO: 319 - DNA, 203 bp, synthetic construct
  source 1..203: mol_type = other DNA
ggcgcgccagtcctggggcggggctgggctcccggggtaggtccgcggctgctgctgcgtccgacccccggccggcgcgggtatggagcttgggggtcactgggacatgaactcggccccgaggctggtctcggagaccgcagagcggaaacaggagcagaagacaggaaccgaggcggaggctgccgcgactcggaccgatg

SEQ ID NO: 320 - DNA, 203 bp, synthetic construct
  source 1..203: mol_type = other DNA
ggcgcgccagtcctttttccttccctctatccatccagagccccgccaaagggcgcacctgatctttctcatccttccctgctcttcccttcctctccacctcctcctcctccttggggaaaggggcccggagaagggcatgtgggggcccctctgacagtggcccgattggggtgacaggcgcccaacgactcggaccgatg

SEQ ID NO: 321 - DNA, 203 bp, synthetic construct
  source 1..203: mol_type = other DNA
ggcgcgccagtcctcgcgcaagtactgtcaaggacagttttcgggacgggggacgcggctccaggcacccaacagcactgacggcgaacacttcacgggcgcgcgatgcctcgacaaggcggccgccaccaccacctcagctgccctcgcgggcagcacggcgcggcaaaagcgcacgtcgcctagcgcgactcggaccgatg

SEQ ID NO: 322 - DNA, 203 bp, synthetic construct
  source 1..203: mol_type = other DNA
ggcgcgccagtccttgtcctggggtcgcggagacccgcgcgcctgccctgcacgccgggcggcaacctttgcagtcgcgttggctgctgcgatcggccggcgggtccctgccgaaggctcggctgcttctgtccacctcttacacttcttcatttatcggtggatcatttcgagagtccgtcttgtaacgactcggaccgatg

SEQ ID NO: 323 - DNA, 203 bp, synthetic construct
  source 1..203: mol_type = other DNA
ggcgcgccagtcctggccgcctccttgaggtagtatccgcacatggaattctagggccgcaggtgtatttacggtaactgtcgccactagatttcagcgcctttggactctcctgttttcactttcttttgttgactcccgtgtggccctcgtgggagcctgttttggctgcagcggtgtctggggtgcgactcggaccgatg

SEQ ID NO: 324 - DNA, 203 bp, synthetic construct
  source 1..203: mol_type = other DNA
ggcgcgccagtcctcagccgcgtctgggccaggagaaaaggtacaggaagaaggaatggaatcggaaggaagaaaattcattccagagacaaaatagctcccctcctctgttgtagctgttcctctggcaatacaaactttctgctttcaggttctgcagcattccagaccttgagcactgaatcaggcgactcggaccgatg

SEQ ID NO: 325 - DNA, 203 bp, synthetic construct
  source 1..203: mol_type = other DNA
ggcgcgccagtcctggcatagcaagatggcctgccctcaggtacaggaagaaggaatggaatcggaaggaagaaaattcattccagagacaaaatagctcccctcctctgttgtagctgttcctctggcaatacaaactttctgctttcaggttctgcagcattccagaccttgagcactgaatcaggcgactcggaccgatg

SEQ ID NO: 326 - DNA, 203 bp, synthetic construct
  source 1..203: mol_type = other DNA
ggcgcgccagtcctcaacaggctccttactcaagctcgggttcttctcctaggcggaagccagaccagagagcgtgcgtgtttttcccagggtgccccgcgctgctgttatggccgcctccttgagagagtggatctttcctacaattgctgctggaagggaactatgaagccatattcttaaattcacgactcggaccgatg

SEQ ID NO: 327 - DNA, 203 bp, synthetic construct
  source 1..203: mol_type = other DNA
ggcgcgccagtccttcggcggggcagtcgcgggatgcgcccgggagccacagcctgaggccctcaggtctctgcaggtgtcgtggaggaacctagcacctgccatcctcttccccaatttgccacttccagcagctttagcccatgaggaggatgtgaccgggactgagtcaggagccctctggaagccgactcggaccgatg

SEQ ID NO: 328 - DNA, 203 bp, synthetic construct
  source 1..203: mol_type = other DNA
ggcgcgccagtccttccgcttcggtttctgttgcgggacccggggtgtctcctagcgcaaccggaactagccttctgggggccggcttcctttatctctggcggccttgtagtcgtctccgagactccccacccctccttccctcttgaccccctaggtttgattgccctttccccgaaacaactatccgactcggaccgatg

SEQ ID NO: 329 - DNA, 203 bp, synthetic construct
  source 1..203: mol_type = other DNA
ggcgcgccagtcctagaaggctatttccgtttccgtacggaagcaaaggagccaagaccatggcgaaagccggggataagagcagcagcagcgggaagaaaagtctaaaacggaaagccgctgccgaagaacttcaggaggctgcaggcgctggggatggggcgacggaaaacggggtccaacccccgcgactcggaccgatg

SEQ ID NO: 330 - DNA, 203 bp, synthetic construct
  source 1..203: mol_type = other DNA
ggcgcgccagtcctatccggaggcagcctgcaggaagccgtagcgccggtacgtgcccctctcctgtctggaggcgggtgtagaagtccgaccgcggaagccagactgctgtccagtcggcgagcgcgtaccattcagcatcggctccgcccgagtcccaccttcctcaggctctgattggctgacaccgactcggaccgatg

SEQ ID NO: 331 - DNA, 203 bp, synthetic construct
  source 1..203: mol_type = other DNA
ggcgcgccagtcctccccggcgcgggcagggcgcccacgagctggctggctgcttgcacccacatccttctttctctgggacctggggtcgcggttacttgggctggccggcgaacccttgagtggcctggcggggagcgggcctcgcgcgcctggagggccctgtggaacgaagagaggcacacagccgactcggaccgatg

SEQ ID NO: 332 - DNA, 203 bp, synthetic construct
  source 1..203: mol_type = other DNA
ggcgcgccagtcctgggaactacttccgggggagcggcgcggcggcgcgggagttggttctaaagagtggtgagtcagaagagacgtcaggcagcaagcgacttgggccatggcctctgacctagacttctcacctccggaggtgcccgagcccactttcctggagaacctgctacggtacggactctcgactcggaccgatg

SEQ ID NO: 333 - DNA, 203 bp, synthetic construct
  source 1..203: mol_type = other DNA
ggcgcgccagtcctgattcctgtgcaaagagagagtgtcaatgaagacctcaaagtctggagaaaaatgacctttcatggaataagaagtatacctccttctacatgtttttgtcttactgacctctgataactggaacacatgactctgggtctgtagaaagtcaactgatcaaactcatcctcacccgactcggaccgatg

SEQ ID NO: 334 - DNA, 203 bp, synthetic construct
  source 1..203: mol_type = other DNA
ggcgcgccagtcctattgggctgagtcggagacttcctttcctgattggccgtgttgtacggcggcttctcgcgcagctgatgacctggaagtgatgcctaaagctgtggaccgcgtgggctcgcctccctgggactaggtttcagcggccgctgcgatgaccaaaataaaggcagatcccgacgggccgactcggaccgatg

SEQ ID NO: 335 - DNA, 203 bp, synthetic construct
  source 1..203: mol_type = other DNA
ggcgcgccagtcctcgaaggggcgcggggggcggggaccgtgcccgaccgtgccagctcccgccccggaagcggaagtgcaagcactgcggggtcctgtccagtgtgagcccgacccgagctccagtagttccgcccgctggtcatcgcgccctttcccctgccggtgtcctgctcgccgtccccgcccgactcggaccgatg

SEQ ID NO: 336 - DNA, 203 bp, synthetic construct
  source 1..203: mol_type = other DNA
ggcgcgccagtcctggggcaggcccgctttctgtcaaaatggcagcgcccagcgtgcgcgggtatctctgaagttggggtttaagattcttgcccgtgagagcgaacgagcctgccgtacttctgattttgaaacacctgggtctgggcttcccgggcgagcggtggaacctgtgagaagtttctacacgactcggaccgatg

SEQ ID NO: 337 - DNA, 203 bp, synthetic construct
  source 1..203: mol_type = other DNA
ggcgcgccagtcctatctttaggcgtgcgaggagggggcatggcggatactgtgttgtttgagtttcttcacacggagatggtggctgagctgtgggctcacgaccccgaccccggcccgggggtgagcgccgggctccgtggggaggaagcgggggccaccaagggacagaagatgagcctgtcggtcgactcggaccgatg

SEQ ID NO: 338 - DNA, 203 bp, synthetic construct
  source 1..203: mol_type = other DNA
ggcgcgccagtcctccaagatgcaccggggagtaggtccggcctttcgggtggtcaggaagatggcggcctctggggcggagccgcaggtcctggtacaatacttggtgttacgaaaggatctatcacaagctccgttctcctggccggcgggcgcactggtagcgcaggcttgtcacgcggccaccgcgactcggaccgatg

SEQ ID NO: 339 - DNA, 203 bp, synthetic construct
  source 1..203: mol_type = other DNA
ggcgcgccagtccttccctggctcgcctcgcgcctgccggcggatccgtggtcatgccaacccagcagccggctgcgccgagtactcgtgcccccaaaccctcccggagtctctctggctcactttgtgccctgttttctgatgcagactcgggatccgggatgaaggcggagcttccccctgggcctcgactcggaccgatg

SEQ ID NO: 340 - DNA, 203 bp, synthetic construct
  source 1..203: mol_type = other DNA
ggcgcgccagtcctccttaactccatatattcatccacatccaaaagattgggttggtatattcaaggttggatggagtactgctcgtgattattacacgtttttatggtcccctatgcctgaacattatgtggaaggatcaacagtcaattgtgtactagcattccaagttgaaaattgagaaaacccgactcggaccgatg

SEQ ID NO: 341 - DNA, 203 bp, synthetic construct
  source 1..203: mol_type = other DNA
ggcgcgccagtcctacggctcagcgacgccacggccagcagcgctcgcgtcctccccagcaacagttactcaaagctaatcagatagcgaaagaagcaggagagcaagtcaagaaatacggtgaaggagtccttcccaaagttgtctaggtccttccgcgccggtgcctggtcttcgtcgtcaacacccgactcggaccgatg

SEQ ID NO: 342 - DNA, 203 bp, synthetic construct
  source 1..203: mol_type = other DNA
ggcgcgccagtcctttattcacttcacacttattgaaaagtgtgtatgtgagagggtggggtgtgtgtgtcaaagagagtgaggaagagaaggagagagagatcaattgattctgcagcctcagctccagcatccctcagttgggagcttccaaagccgggtgatcacttggggtgcatagctcggagcgactcggaccgatg

SEQ ID NO: 343 - DNA, 203 bp, synthetic construct
  source 1..203: mol_type = other DNA
ggcgcgccagtcctgcagcctcaaaccccagctgttggggccaggacacccagtgagcccatacttgctctttttgtcttcttcagactgcgccatggggctcagcgacggggaatggcagttggtgctgaacgtctgggggaaggtggaggctgacatcccaggccatgggcaggaagtcctcatcacgactcggaccgatg

SEQ ID NO: 344 - DNA, 203 bp, synthetic construct
  source 1..203: mol_type = other DNA
ggcgcgccagtcctgagcatgttggcctggtcctttgctaggtactgtagagcaggtgagagagtgagggggaaggactccaaattagaccagttcttagccatgaagcagagactctgaagccagactacctgggtcccaatcttgggcttggtatttcctcgctgtgtgactctggactgcgccatcgactcggaccgatg

SEQ ID NO: 345 - DNA, 203 bp, synthetic construct
  source 1..203: mol_type = other DNA
ggcgcgccagtcctcaggcctccatctccaggtccctctccgaggcttcctcgctgccagctgagtcgtgggcacctgagggactacctaccactgctcccggctgtgccatcgccaccagctcccagcctcctgctcagacccgggacagcccctccatggcccccgagatggaccagttttacaggcgactcggaccgatg

SEQ ID NO: 346 - DNA, 203 bp, synthetic construct
  source 1..203: mol_type = other DNA
ggcgcgccagtcctagactatgatgaattcgaatgggacacatttgcttctgtggagttacgattcaaactgaatgtccaatataggaaggcaacatatacaacaagcaaaagtgattttagaaataacagaacgcgggagaaaattcacacacggaaaatgatacggataacaaaagcagattcacacgactcggaccgatg

SEQ ID NO: 347 - DNA, 203 bp, synthetic construct
  source 1..203: mol_type = other DNA
ggcgcgccagtcctccaaggaattgaaagggctgtagggggaggcagtgcgagccagccccgactgctcctcctcttcctcctcctcctccaaactcgcgagccccagagctcgctcagccgccgggagcacccagagggacgggaggcagccgcgcagccccgagctgggcagtgtccccagccgcccgactcggaccgatg

SEQ ID NO: 348 - DNA, 203 bp, synthetic construct
  source 1..203: mol_type = other DNA
ggcgcgccagtcctagttgtgactttcattttacctttcgaattcctgggtatatcttgggggctggaggacgtgtctggttattatataggtgcacagctggaggtgagatccacacagctcagaccagctggatcttgctcagtctctgtcagaggaagatcccttggaggaggccccgcagcgaccgactcggaccgatg

SEQ ID NO: 349 - DNA, 203 bp, synthetic construct
  source 1..203: mol_type = other DNA
ggcgcgccagtcctgaggagcctgaggaagagggcggcgacggtggtggtgactgagcggagcccggtgacaggatggctgggcacagattggtgttggtattaggagatctgcacatcccacaccggtgcaacagtttgccagctaaattcaaaaaactcctggtgccaggaaaaattcagcacattcgactcggaccgatg

SEQ ID NO: 350 - DNA, 203 bp, synthetic construct
  source 1..203: mol_type = other DNA
ggcgcgccagtcctgacggcaaatggcggacttcgacacctacgacgatcgggcctacagcagcttcggcggcggcagagggtcccgcggcagtgctggtggccatggttcccgtagccagaaggagttgcccacagagcccccctacacagcatacgtaggaaatctacctttcaatacggttcaggcgactcggaccgatg

SEQ ID NO: 351 - DNA, 203 bp, synthetic construct
  source 1..203: mol_type = other DNA
ggcgcgccagtcctcggagacccgccccggcccggtccacattctccccaggaagccggactctatggggcgggaccctgggggagcctgagccgagcccggagccagccccgaacccctgaacctccagccaggggcgccccgggagcagccagcccgtgggcgagccgcccgcccgccgagcagcccgactcggaccgatg

SEQ ID NO: 352 - DNA, 203 bp, synthetic construct
  source 1..203: mol_type = other DNA
ggcgcgccagtcctcgaaagacaaaagcatcttttttcagaagggaaactgaaagaaagaggggaagagtattaaagaccatttctggctgggcagggcactctcagcagctcaactgcccagcgtgaccagtggccacctctgcagtgtcttccacaacctgggatgaaattgattctgcagtaaagcgactcggaccgatg

SEQ ID NO: 353 - DNA, 203 bp, synthetic construct
  source 1..203: mol_type = other DNA
ggcgcgccagtcctaatgcgcacgccgtgggcgggccccgagccggaattgggggtgaagcgatagcgttttgcccgcattcggggcgcgcggagctggggggtccctgtggggctcccggagttaagatggcgtcctcagcggagggggacgaggggactgtggtggcgctggcgggggttctgcagcgactcggaccgatg

SEQ ID NO: 354 - DNA, 203 bp, synthetic construct
  source 1..203: mol_type = other DNA
ggcgcgccagtccttcgctttgtgattcttgatccggaacttgtcacccaggaaccccggaagaggtagctcacgcgatagaaacgtgttcgctgcccagaagaagggaaggcgcgagtgaggaaaggaggtactgtagatgccctccaaatccttggttatggaatatttggctcatcccagtacaccgactcggaccgatg

SEQ ID NO: 355 - DNA, 203 bp, synthetic construct
  source 1..203: mol_type = other DNA
ggcgcgccagtcctcgtcacttcctgttgccttaggggaacgtggctttccctgcagagccggtgtctccgcctgcgtccctgctgcagcaaccggagctggagtcggatcccgaacgcaccctcgccatggactcggccctcagcgatccgcataacggcagtgccgaggcaggcggccccaccaaccgactcggaccgatg

SEQ ID NO: 356 - DNA, 203 bp, synthetic construct
  source 1..203: mol_type = other DNA
ggcgcgccagtcctccaatgaggaagcctggcaggatggagggcgaggcctggcagctgtagtgcttctgggcagtagaggcgcggggtgcggagctagggcggccgagagccatggcggcgctattggcggcggcggcagtgcgagcccggatcctgcaggtttcttccaaggtgaaatccagtccccgactcggaccgatg

SEQ ID NO: 357 - DNA, 203 bp, synthetic construct
  source 1..203: mol_type = other DNA
ggcgcgccagtcctagccgccacgccccgggagaggaccgaccgcccagaccgccggtcccggggccccctgggccacgccgatcacggggagcccctcgactgcctcccagaacaaagtgggaaagggaagcttagcccgccgctgccgcctccgagcagcccgccaggactctggctactggagatcgactcggaccgatg

SEQ ID NO: 358 - DNA, 203 bp, synthetic construct
  source 1..203: mol_type = other DNA
ggcgcgccagtcctctgctctcgcaactcaagatggcggacgagagtgagacagcagtgaagccgccggcacctccgctgccgcagatgatggaagggaacgggaacggccatgagcactgcagcgattgcgagaatgaggaggacaacagctacaaccggggtggtttgagtccagccaatgacactcgactcggaccgatg

SEQ ID NO: 359 - DNA, 203 bp, synthetic construct
  source 1..203: mol_type = other DNA
ggcgcgccagtcctgtgctgccctaggctgcatgagtcgaagcaagcgtgtttccttcccgccaggcaagtgcccttagaaaccgggccccgcccccttcctggcctgcattcccatcccctctcccggggcggaggtgaggacctccttggttcctttggttctgtcagtgagccccttccttggcccgactcggaccgatg

SEQ ID NO: 360 - DNA, 203 bp, synthetic construct
  source 1..203: mol_type = other DNA
ggcgcgccagtcctgtggccggcatgtcgggggcggggggcgcctttgcctcgccgagggaggtcttgctggagcggccgtgctggctggacgggggctgcgagccggcccgcaggggctacctctaccagcagctgtgctgcgtagatgagcgggatcgtgtgcagaagaaaaccttcaccaagtggcgactcggaccgatg

SEQ ID NO: 361 - DNA, 203 bp, synthetic construct
  source 1..203: mol_type = other DNA
ggcgcgccagtccttgagctgagcctgtgccgagtgagcgtctcgtggggccgccagccttcagctgcctgtgtgccacacggggctgcccagagcaccgtgcctgaggccgagggtccgggcgacgaaggtgtgggggcagcatgtctcagcaccagctccgcgtgccgcagcccgagggcctgggccgactcggaccgatg

SEQ ID NO: 362 - DNA, 203 bp, synthetic construct
  source 1..203: mol_type = other DNA
ggcgcgccagtcctggccagcgcagccattttggcttcctgaccttgggctacggctgaccgttttttgtggtgtactccgtgccatcatgtccgtcctgacgccgctgctgctgcggggcttgacaggctcggcccggcggctcccagtgccgcgcgccaagatccattcgttgccgccggaggggacgactcggaccgatg

SEQ ID NO: 363 - DNA, 203 bp, synthetic construct
  source 1..203: mol_type = other DNA
ggcgcgccagtcctccagccatgggctcggggcgcgtacccgggctctgcctgcttgtcctgctggtccacgcccgcgccgcccagtacagcaaagccgcgcaagatgtggatgagtgtgtggaggggactgacaactgccacatcgatgctatctgccagaacaccccgaggtcatacaagtgcatccgactcggaccgatg

SEQ ID NO: 364 - DNA, 203 bp, synthetic construct
  source 1..203: mol_type = other DNA
ggcgcgccagtcctcaggccacaggagtaaaatctctctgcccgtcttctgggaagggagaatggcggcgcccgggctgcggctgggagcgggaagactctttgaaatgcctgcggtgctagagcgactgagccgctataatagcacgtcccaagcttttgctgaggtgctgcggctgccgaagcagccgactcggaccgatg

SEQ ID NO: 365 - DNA, 203 bp, synthetic construct
  source 1..203: mol_type = other DNA
ggcgcgccagtcctggggctttcagtagaaacaagcaaaccgcaggtccctgtggggggactctccaggaagaagggtaatttcctgcctccttaaattggctgctactgtcagttattttgctcccaaccccagagcttcacttgctccttcacttcccagttccgcaagaaccgtgggcgacagttcgactcggaccgatg

SEQ ID NO: 366 - DNA, 203 bp, synthetic construct
  source 1..203: mol_type = other DNA
ggcgcgccagtcctcgccgctctgggagccgctgctggtcccggccttgcggcctgcgggggaggctgcccggaggaggcagcggcggcggcagcgcgtcctcggtccccaggaccacggcttctttcctgccagatctatccatctggccatccatccgtgggggtctgcaatggccacctttagcccgactcggaccgatg

SEQ ID NO: 367 - DNA, 203 bp, synthetic construct
  source 1..203: mol_type = other DNA
ggcgcgccagtcctatctatccatctggccatccatccgtgggggtctgcaatggccacctttagccgccaggaatttttccagcagctactgcaaggctgtctcctgcctactgcccagcagggccttgaccagatctggctgctccttgccatctgcctcgcctgccgcctcctctggaggctcggcgactcggaccgatg

SEQ ID NO: 368 - DNA, 203 bp, synthetic construct
  source 1..203: mol_type = other DNA
ggcgcgccagtcctgcttctgtactgccaggtccgggtcggcggctgcactgcggatgagaccggtgcgactcatgaaggtgttcgtcacccgcaggatacccgccgagggtagggtcgcgctcgcccgggcggcagactgtgaggtggagcagtgggactcggatgagcccatccctgccaaggagccgactcggaccgatg

SEQ ID NO: 369 - DNA, 203 bp, synthetic construct
  source 1..203: mol_type = other DNA
ggcgcgccagtccttgtgtggtggctgggttctgccaatccccgtgcccaccgggtgggcgcggccgggaagctcctgcccctccctgctggtcggcgtcacgcgtgacgtcccgcgtgatggctgggagggcccggcggcgacagcggaggcagagaggaaggcggttctgagagcttcagagagcgcgactcggaccgatg

SEQ ID NO: 370 - DNA, 203 bp, synthetic construct
  source 1..203: mol_type = other DNA
ggcgcgccagtcctacctgcagctcccgcgactagaagtgtgaggtcccagggcccttcccgcggaatcggcgctgagaagccccaacccccctcccgcctcccaggcaccttcgggtccaggactacaactcccggcagggtgcgcaaaacgaccgcccaaggcaacggaggctcacgagaatcagccgactcggaccgatg

SEQ ID NO: 371 - DNA, 203 bp, synthetic construct
  source 1..203: mol_type = other DNA
ggcgcgccagtcctgtgggggaaaaggccccggaacgaggccggcccgcgagggcccgcgctcccctcctccccggcggccgcactcacccactccggaatcggccctgtcgcccccgcccgcactccagagccggctgagaacggcagcggcgagggctccacgtgcagcgtctctccggaatcagccgactcggaccgatg

SEQ ID NO: 372 - DNA, 203 bp, synthetic construct
  source 1..203: mol_type = other DNA
ggcgcgccagtcctgctgggtctctgactcacttctgactttagggtgaagatggagggaatctgataaagacatcttataaattcaacagacacaaaagaatttgatctcccataagcaactgtgaaattacaataacagatcctgggaagttctacaattctaattcagttttttcaagggggaaccgactcggaccgatg

SEQ ID NO: 373 - DNA, 203 bp, synthetic construct
  source 1..203: mol_type = other DNA
ggcgcgccagtcctctcttacaacattggctgccggcgtgactttgaccgcttcccggtgcgttaccggcagctgaacccacccggcgccacgggactttgacgcgtgctctgcgcttgccatgagactcctgggagctgcagccgtcgcggctctggggcgcggaagggcccccgcctccctaggctcgactcggaccgatg

SEQ ID NO: 374 - DNA, 203 bp, synthetic construct
  source 1..203: mol_type = other DNA
ggcgcgccagtcctggtattctcatcgcggtcacctctaccggtgtggacaagtaaagtttgaatcagcttctccatggcctgggcaccagttcccggctgagccattttccttttggctaaaagtccccgcccagaggccaattcgtcgcggcggcggtggagatcgcaggtcgctcaggcttgcagcgactcggaccgatg

SEQ ID NO: 375 - DNA, 203 bp, synthetic construct
  source 1..203: mol_type = other DNA
ggcgcgccagtcctgtgtaggatgcatctgcggtggccattcttctctccagaggtccttcctaggactgactttgtggagattctgtgctggtaggtggcggggcaagacacgcctgtctctccccctggaaggagtcagtccagcaagaaacctgatgaaaccagtgactcccagctctggatgagcgactcggaccgatg

SEQ ID NO: 376 - DNA, 203 bp, synthetic construct
  source 1..203: mol_type = other DNA
ggcgcgccagtccttgccccaccaccgctgctcctcagcaggcgcctcaccagcctccacaccccttgcgcccgcagaaacgcgcctggccctgagctgtcaccaccgacactctccaggctccggacacgatgcaggccatcaagtgtgtggtggtgggagatggggccgtgggcaagacctgccttcgactcggaccgatg

SEQ ID NO: 377 - DNA, 203 bp, synthetic construct
  source 1..203: mol_type = other DNA
ggcgcgccagtcctatttctgggaagcagtcgatattatctgtacgcctagaacagtgccctctgcagctgaataacccttttaacgagtattccaaatttgatggcaagggtcatgtaggtacaacagcaaccaagaagatcgatgtctacctccctctgcactcgagccaggacagactgctgccacgactcggaccgatg

SEQ ID NO: 378 - DNA, 203 bp, synthetic construct
  source 1..203: mol_type = other DNA
ggcgcgccagtcctcggggcgccgagacagggcgtgttcgctgttcagtgccggtgttgcagggagtgagggcagctggagtgcgttctgccgaagcttgtggttgcacgcccatcgtcttaggggctaccttccgtgttaccttatcccatatcacacaactggtcctcagccataacaagctaacacgactcggaccgatg

SEQ ID NO: 379 - DNA, 203 bp, synthetic construct
  source 1..203: mol_type = other DNA
ggcgcgccagtcctgctgtgtgcgcctgcgcggggcgccgagacagggcgtgttcgctgttcagtgccggtgttgcagggagtgagggcagctggagtgcgttctgccgaagcttgtggttgcacgcccatcgtcttaggggctaccttccgtgaccatgtccaagtctctgaagaagttggtggaggcgactcggaccgatg

SEQ ID NO: 380 - DNA, 203 bp, synthetic construct
  source 1..203: mol_type = other DNA
ggcgcgccagtcctagtgcagagctcggggcaggggccgggaggcgtgggggagccgggccctcccctcaggaacgtgtcccggggccgacccggcccgtagtgtggaagcagcttcaggtaggtgagctcgtgaaacaatatgaagaggagaaaatagccttttaaggaaattggcccacagaaaggcgactcggaccgatg

SEQ ID NO: 381 - DNA, 203 bp, synthetic construct
  source 1..203: mol_type = other DNA
ggcgcgccagtcctaactactcctctcctcctcctcctcctcttcctcctcctcctccccaccaccaccatctccatcacccaccaacaacaccacaataatccacagccaaggccacttggtcattctggcattttatggtagagaatacgttgagtttggctctggaaggaatatgagagaccatccgactcggaccgatg

SEQ ID NO: 382 - DNA, 203 bp, synthetic construct
  source 1..203: mol_type = other DNA
ggcgcgccagtcctggtggtttgaactttgagccttttgtagtcctgatgaataatttcattttcctcaagtttatgacactcggaacgtcaagaactggaggtttgtgcaatttgagaccggtcggcactgtgcagagatcagagtactaagagacagagattaaaatggcttccagaggaaagacacgactcggaccgatg

SEQ ID NO: 383 - DNA, 203 bp, synthetic construct
  source 1..203: mol_type = other DNA
ggcgcgccagtcctcatccgtgcgtctgtggaaggctgcgtttccggcctgagaaaccgtcatgtttctggggagtcacctcagctggcagttaccaccgtgttagaaagcagcctcaggaccggccacctccatcactggcgtcaccatgggggctgtgctgggtgtcttctccctcgccagctgggcgactcggaccgatg

SEQ ID NO: 384 - DNA, 203 bp, synthetic construct
  source 1..203: mol_type = other DNA
ggcgcgccagtcctccagaagacgtcaggtgacttcagtcctgctgcagttgtgcagcagaggagactgcagacttcggttgaggaaacgggtatttcatgtctcagggagtaggtttgtgcagttacagcttttctgttggtatgcataattaataattggagctgcaaagcagatcgtgacaagagcgactcggaccgatg

SEQ ID NO: 385 - DNA, 203 bp, synthetic construct
  source 1..203: mol_type = other DNA
ggcgcgccagtcctgtgctcgtggggagctggccgagtggaaaacgtccacattgacccaaccgcagtgaagggagagcgcctccagtggtgtggtgcgtggagaaatgggaaggagagagttctgatgagaccctttttgctcttcctgctgcatctgagcctgtgatacgctcctctgcagaaaatcgactcggaccgatg

SEQ ID NO: 386 - DNA, 203 bp, synthetic construct
  source 1..203: mol_type = other DNA
ggcgcgccagtcctaccccgtgtctccatgccctgcctctgctccccacacccctcacctcaagctgtcccctcacctcacgcttggctgtctcctgatcctcagcctctcccaggtacccctggtcctgctgccctcaccccatccccagactctgtaggagagtgcccgagggcggagggccagcccgactcggaccgatg

SEQ ID NO: 387 - DNA, 203 bp, synthetic construct
  source 1..203: mol_type = other DNA
ggcgcgccagtcctgtcaaggcccgccccctgccaacggtcctcacccattagccgaaggccccgcccctcacagattgccgcagggcaggggcggagacagcccgggccgtcccaggctccgcccccggaagcctcacttccgggcgcgagcacgccccgcctcgccccggcggcagagaggagactcgactcggaccgatg

SEQ ID NO: 388 - DNA, 203 bp, synthetic construct
  source 1..203: mol_type = other DNA
ggcgcgccagtcctgtctttaaagggcaattgtcgacactctgcaaacataccgatttgttgtctgcccactttggagtcttcaatctgggcagtaactatttaccctttttcctgctagcctgtccccctctctggattgaagtcacctgctaagacaatggactaccgaccagactcccggaaatccgactcggaccgatg

SEQ ID NO: 389 - DNA, 203 bp, synthetic construct
  source 1..203: mol_type = other DNA
ggcgcgccagtcctttagccagccacgaagttctcgcgagagtcgtctcctcgataccaagcgcctgtgtctggcagagctggtgtgagacgagacaatcctgccccgccgccgggataatcaagagttttggccggacctttgagcatacaccgagagagtgaggagccagacgacaagcacacactcgactcggaccgatg

SEQ ID NO: 390 - DNA, 203 bp, synthetic construct
  source 1..203: mol_type = other DNA
ggcgcgccagtcctcagctcgtcgacacgtctcgtctcctgtcccaattcagggcttggtgaggtgactcgcggtcgcgggtgactcgccggcaggacactgcctggaacgcctggagcgcctcccactgcagacgtctgtccgcctccagccgctctcctctgacgggtcctgcctcagttggcggacgactcggaccgatg

SEQ ID NO: 391 - DNA, 203 bp, synthetic construct
  source 1..203: mol_type = other DNA
ggcgcgccagtcctcactcagggcaagggtgtccgacggctggagcgttctgttttgaacccaaagtggatgatgctgtcagagctgaactactgaaaggaggctgtgaaaatttcccatcttctcattggccatcagttgagataagatggaagactcttacaaggataggacttcactgatgaaggcgactcggaccgatg

SEQ ID NO: 392 - DNA, 203 bp, synthetic construct
  source 1..203: mol_type = other DNA
ggcgcgccagtcctgtctgacttgagtccctgctgctgcagtgcacgccccttcggcagccagggtggggcccagacccaacctggcccctcctgcccccaccccgcctttgggtcgctgacccccaggctgtggtgagggtctgagagctggtaccacggagcctgggcaacctcctccgcccaccccgactcggaccgatg

SEQ ID NO: 393 - DNA, 203 bp, synthetic construct
  source 1..203: mol_type = other DNA
ggcgcgccagtcctaccgcctccgtctctcgctgggctcgctagggctgcgcgttgggccagcgggggcgccgcagctgaagccgccccggagccggtgaaccgaattacctcgagggaggggcgtggggaaggcggcgggaggaggagcgcacgggccggctgccgtgcccaccacggctgaggaaccgactcggaccgatg

SEQ ID NO: 394 - DNA, 203 bp, synthetic construct
  source 1..203: mol_type = other DNA
ggcgcgccagtcctgaaaagcggccagggtggcccctagctttccttttccggttgcggcgccgcgcggtgaggttgtctagtccacgctcggagccatgccgtccaagggcccgctgcagtctgtgcaggtcttcggacgcaagaagacagcgacagctgtggcgcactgcaaacgcggcaatggtccgactcggaccgatg

SEQ ID NO: 395 - DNA, 203 bp, synthetic construct
  source 1..203: mol_type = other DNA
ggcgcgccagtcctgggggcaacggtcacctgatctgcggctgtcgaggccgctgaggcagtggaggctgaggctatgatggcggccatggcgacggctcgagtgcggatggggccgcgatgcgcccaggcgctctggcgcatgccgtggctgccggtgtttttgtcgttggcggcggcggcggcggccgactcggaccgatg

SEQ ID NO: 396 - DNA, 203 bp, synthetic construct
  source 1..203: mol_type = other DNA
ggcgcgccagtccttgtcgtaagattttttcttttcattttctccagggagggtaaatcaatataacctcttctctagagaggaggtggttaggttggtcttaagcagtgttagaagatctattttttttcaaaccaggtgtctgagctgggtgaattccagcctggggagaggactttgatcaccagcgactcggaccgatg

SEQ ID NO: 397 - DNA, 203 bp, synthetic construct
  source 1..203: mol_type = other DNA
ggcgcgccagtcctgcaactcttttaccatccctttgtatttttgcagttcctccctataccagcttccttacagctgttctgatttcctgtcgtgtctgagctgggtgaattccagcctggggagaggactttgatcaccagatgtttttttggtgtgcgtgctgtcttatggttgcgtggcgagttcgactcggaccgatg

SEQ ID NO: 398 - DNA, 203 bp, synthetic construct
  source 1..203: mol_type = other DNA
ggcgcgccagtcctatgagctgagggcacggtcgcgggcggtcagccctgttcgcagctacggcgaggaggggcgcgattgttccttgttgccgctccgcttagtggccgcgtccattccgcgcggtgtcccgattttaggggtagggagaagtgtcagcttcaggcatcgcgaggcgtggcggcccccgactcggaccgatg

SEQ ID NO: 399 - DNA, 203 bp, synthetic construct
  source 1..203: mol_type = other DNA
ggcgcgccagtcctgaggatcatagagctgtctggcgcagcgaggcctcccggcgccaccgagacgcgcagaggacggctagagcgttgctcgccgagagacttcctcttcgttaagtcggccttcccaacatggcgcagtctattaacatcacggagctgaatctgccgcagctagaaatgctcaagcgactcggaccgatg

SEQ ID NO: 400 - DNA, 203 bp, synthetic construct
  source 1..203: mol_type = other DNA
ggcgcgccagtcctattggccgagcgcggccgttgggggtgaggccgcgtcgggggaggacaacaaagggccgcgggcggcgggcagtggtgtcccagtctcccggtgcttccctgaggctgaggcgcccggcctcccgcccgccgcgctccagatgaagtgtgagcactgcacgcgcaaggaatgtacgactcggaccgatg

SEQ ID NO: 401 - DNA, 203 bp, synthetic construct
  source 1..203: mol_type = other DNA
ggcgcgccagtcctcaggaactgggccagctccggtcccttccttttggggctctcactctggaggatggggtggatgggagaaaaaaccgggaagatcctgacggagttcctccagttctatgaagaccagtatggcgtggctctcttcaacagcatgcgccatgagattgagggcacggggctgcccgactcggaccgatg

SEQ ID NO: 402 - DNA, 203 bp, synthetic construct
  source 1..203: mol_type = other DNA
ggcgcgccagtcctacgaggctagatggcttcacaagatggcggcgcgctgggagcgtatcatctgcgtttctaggagcttcgctatgcggctgctttaagattctagggttgtacaggcccacgccagacacgacgtctggcaggaacctcggcctcagagatggctctgagtaaatcaatgcatgccgactcggaccgatg

SEQ ID NO: 403 - DNA, 203 bp, synthetic construct
  source 1..203: mol_type = other DNA
ggcgcgccagtcctggcggagcggcgggcggggcgtcgccgtactaggcctgccccctgtccggccagcccctcgaagcacctactccacaggtccagccggccggtgagcgcctggggaccgcagaggtgagagtcgcgcccgggagtccgccgcctgcgccaggatggagttcgtgaaatgccttgcgactcggaccgatg

SEQ ID NO: 404 - DNA, 203 bp, synthetic construct
  source 1..203: mol_type = other DNA
ggcgcgccagtcctgggcttgggcgccagaggcggagtcggggaggaggtggctccagagatggcagtgagcgagaggagggggctcggccgcgggagccccgcggagtgggggcagcggctacttctggtgctgctgctgggtggctgctccgggcgcatccaccagctggcgctgacgggggagaacgactcggaccgatg

SEQ ID NO: 405 - DNA, 203 bp, synthetic construct
  source 1..203: mol_type = other DNA
ggcgcgccagtcctgagtaggatggagtctccctcccgagctgggggtgtgggcctaggaaaggctgcttcgccgctgtgttcggagagctctggatactgcggggcttttccgcggaggagcgcccgccggcatctgcatctgggaccgacctcctgggctggctgatcaaagaggaagcagcagcacgactcggaccgatg

SEQ ID NO: 406 - DNA, 203 bp, synthetic construct
  source 1..203: mol_type = other DNA
ggcgcgccagtcctacaaagcccagcccagcggaaggaacggtttcggagttgtttttctttgatacgggagttcctccttgctctcgcccctactctttctggtgttagatcgagctaccctctaaaagcagtttagagtggtaaaaaaaaaaaaaaacacaccaaacgctcgcagccacaaaagggcgactcggaccgatg

SEQ ID NO: 407 - DNA, 203 bp, synthetic construct
  source 1..203: mol_type = other DNA
ggcgcgccagtcctctctgggctgctcgggcgccaccactactgtccccatcccgccccgccagctgggccaaagggtgacttgactcacgacgctgccaccagcccacggcttgcccgaggcgtataaaggctgccagggccgcaggctgccaagccctgccctgcccaaggcgcatagagcatggccgactcggaccgatg

SEQ ID NO: 408 - DNA, 203 bp, synthetic construct
  source 1..203: mol_type = other DNA
ggcgcgccagtcctagatcgctgtgaaggaaaaagcacacctttgagttttcacctgtgaacactatagcgctgagagagacagtctgaaagcagaggaagacatcgatcagtaacaccaagagacaccaaagttgaaagttttgttttctttccctctgttttatttttcccccgtgtgtccctactcgactcggaccgatg

SEQ ID NO: 409 - DNA, 203 bp, synthetic construct
  source 1..203: mol_type = other DNA
ggcgcgccagtccttccagagccaagcgccccgcccctgcccgggcgcgctccctccttagccctgcccctctctgaccccacctccgacgcaagagtggggcggggcagctgccggtggcgtcccgaacccagactcgccccgccccagagactgcgcctgcgcgggcacgagacaacctctccgcgcgactcggaccgatg

SEQ ID NO: 410 - DNA, 203 bp, synthetic construct
  source 1..203: mol_type = other DNA
ggcgcgccagtcctgcggaagttcctaggccagcctgtcacgtgggagggaggctcggcgctcaggaagcatggcactctggcgggcataccagcgggccctggccgctcacccgtggaaagtacaggtcctgacagctgggtccctgatgggcctgggtgacattatctcacagcagctggtggagacgactcggaccgatg

SEQ ID NO: 411 - DNA, 203 bp, synthetic construct
  source 1..203: mol_type = other DNA
ggcgcgccagtcctgtgtgtagctgggacggtgctggtctgagctggaccttgtctgatggcttcctccaaccctcctccacagcctgccataggagatcagctggttccaggagtcccaggcccctcctctgaggcagaggacgacccaggagaggcgtttgagtttgatgacagtgatgatgaagacgactcggaccgatg

SEQ ID NO: 412 - DNA, 203 bp, synthetic construct
  source 1..203: mol_type = other DNA
ggcgcgccagtcctgagtcacgtgggtccccccggttccggcgcggttgaggccttcggtggtgaacgagtctccagcaccatgtctggtttgtctggcccaccagcccggcgcggcccttttccgttagcgttgctgcttttgttcctgctcggccccagattggtccttgccatctccttccatctcgactcggaccgatg

SEQ ID NO: 413 - DNA, 203 bp, synthetic construct
  source 1..203: mol_type = other DNA
ggcgcgccagtcctacagaacgggagcaacctcggcgcaaacactcccgccggagcctgcaccggtcaggcagtggcagtgaccacaaggaggagaaagccagcctgtcccttgagacctctgagagctcacaggaggcaaagagtccgaaggtggagctgcacagccactcagaggtccctttccagcgactcggaccgatg

SEQ ID NO: 414 - DNA, 203 bp, synthetic construct
  source 1..203: mol_type = other DNA
ggcgcgccagtcctcgttgcggccgctccctgccttagaggccagccttggacacttgctgcccctttccagcccggattctgggatccttccctctgagccaacatctgggtcctgccttcgacaccaccccaaggcttcctaccttgcgtgcctggagtctgccccaggggcccttgtcctgggcccgactcggaccgatg

SEQ ID NO: 415 - DNA, 203 bp, synthetic construct
  source 1..203: mol_type = other DNA
ggcgcgccagtcctgacatttcttaacagcagggccaccaggcagagcgggacagccaggaggaagggcagcttggcagagcctcaggatggacccccttggggacacgctgcggcgactgcgggaggccttccacgcggggcgcacgcggccagctgagttccgggctgcgcagctccaaggcctggcgactcggaccgatg

SEQ ID NO: 416 - DNA, 203 bp, synthetic construct
  source 1..203: mol_type = other DNA
ggcgcgccagtcctagaacccccctccctgccctatcctccgccaccccttctgttgcggggcgcgcgccagcctgggtgtctgtatgcgctcgaggcgggggcgcgggttgcggacggaggcgcgggaggcggttctgcgcggcgggggccgtacccgcggcggagcgaggaggcgagaatggatcacgactcggaccgatg

SEQ ID NO: 417 - DNA, 203 bp, synthetic construct
  source 1..203: mol_type = other DNA
ggcgcgccagtcctcttcctctttccctcggagcgggcggcggcgttggcggcttgtgcagcaatggccaagatcaaggctcgagatcttcgcgggaagaagaaggaggagctgctgaaacagctggacgacctgaaggtggagctgtcccagctgcgcgtcgccaaagtgacaggcggtgcggcctccgactcggaccgatg

SEQ ID NO: 418 - DNA, 203 bp, synthetic construct
  source 1..203: mol_type = other DNA
ggcgcgccagtcctggcctcgctgactgacttccggtgttggcggtggcgccgcgcagtcaccgcggagcagacgcggaggctggtggcccctgggcgagatgccgtacgccaaccagcctaccgtgcggatcacggagctcactgacgagaatgtcaagttcatcatcgagaacaccgacctggcggcgactcggaccgatg

SEQ ID NO: 419 - DNA, 203 bp, synthetic construct
  source 1..203: mol_type = other DNA
ggcgcgccagtcctcacagaaagcctggaaaaggtttccaggggtgtcaatacgccctgtcaactgagaattaagaggatccggctggtcacttgcctggagaggatcctgcatgctgatagtgctgaggcacctgccagctaagaaccaccgggaggaactgggccattctaacacccgttgctacccgactcggaccgatg

SEQ ID NO: 420 - DNA, 203 bp, synthetic construct
  source 1..203: mol_type = other DNA
ggcgcgccagtcctgtgactgggtggggctgcctcacttctgcctgatttgggaagcgctgcaaggacaaccggctggggtccttgcgcgccgcggctcagggaggagcaccgactgcgccgcaccctgagagatggttggtgccatgtggaaggtgattgtttcgctggtcctgttgatgcctggcccgactcggaccgatg

SEQ ID NO: 421 - DNA, 203 bp, synthetic construct
  source 1..203: mol_type = other DNA
ggcgcgccagtcctccgctgttatacgtcacttccacggctcagcgtcagggaggagagagaatgtcttttcgaggcggaggtcgtggaggctttaatcgaggtggtggaggtggcggcttcaaccgaggtggcagcagcaaccacttccgaggtggaggcggcggtggaggcggcggcaatttcagacgactcggaccgatg

SEQ ID NO: 422 - DNA, 203 bp, synthetic construct
  source 1..203: mol_type = other DNA
ggcgcgccagtcctgcttgggtaggggccaggctagcctgagtgcacccagatgcgcttctgtcagctctccctagtgcttcaaccactgctctccctgctctactttttttgctccagctcagggatgggggtgggcagggaaatcctgccaccctcacttctccccttcccatctccaggggggcccgactcggaccgatg

SEQ ID NO: 423 - DNA, 203 bp, synthetic construct
  source 1..203: mol_type = other DNA
ggcgcgccagtccttcgacgggcgtggcgggggaggggacgctgagggcccatgtgctgaaaatccgaagtgccgcggaaagtggaggtgagggccgcccgccctagaggtgcccgtccgagaggcagagctgacaaggaaggtttcgagcgttttgctggcaaagggatttcttacaacctccaggccgactcggaccgatg

SEQ ID NO: 424 - DNA, 203 bp, synthetic construct
  source 1..203: mol_type = other DNA
ggcgcgccagtcctagaaagtcgacgggcgtggcgggggaggggacgctgagggcccatgtgctgaaaatccgaagtgccgcggaaagtggagagctgacaaggaaggtttcgagcgttttgctggcaaagggatttcttacaacctccaggcatgcgtctttctgccctgctggccttggcatccaacgactcggaccgatg

SEQ ID NO: 425 - DNA, 203 bp, synthetic construct
  source 1..203: mol_type = other DNA
ggcgcgccagtcctagaactgagctcatctttgcggggttagctagccgttgagtccaagtctccttggcaagacagtagcttagagaaacgagatcgaatgcacccggaaggtggccaatttgtgcctcaactccttggccatctcctggctaccaaactcaagcgtttcctccttagcaaaggcggcgactcggaccgatg

SEQ ID NO: 426 - DNA, 203 bp, synthetic construct
  source 1..203: mol_type = other DNA
ggcgcgccagtcctcgcggaggtgattccacactgaggcgagcgcggcggccggggtggtagtggcagtgttcgtgtgctcaggtctgaatcgccgagggaggaggcggtggaggaagaggtggcggcggtggcggtggtcgtagcggtggcggaggaggcgggtacgaatcagctgcgggcggagaccgactcggaccgatg

SEQ ID NO: 427 - DNA, 203 bp, synthetic construct
  source 1..203: mol_type = other DNA
ggcgcgccagtcctcgccggcctgcagtctagccgtagtgcgcctgcgcgcggctaggaggggccgtcaggcggggatacagcctggaaggtaatgcatgtccatggtacacaaattcacaagtttggagaccctgacacacccaccttctcacctgggctctgcgtatcccccagccttgagggaagcgactcggaccgatg

SEQ ID NO: 428 - DNA, 203 bp, synthetic construct
  source 1..203: mol_type = other DNA
ggcgcgccagtccttgaaatccggttctaacgggtccggggctcccagcgctataaaaactttataaaccccccggagcccgagcagtgtgaagaagaggcgagaacgaccccgggaccgaccaaagcccgcgcgccgctgcatcccgcgtccagcacctacgtcccgctgccgtcgccgccgccacccgactcggaccgatg

SEQ ID NO: 429 - DNA, 203 bp, synthetic construct
  source 1..203: mol_type = other DNA
ggcgcgccagtcctgatcctgccacagctgctgcccacaccgcgctcagcgccttcactgccatccccgctgtccttgccgcccccgccatgggcctagagctgtttcttgacctggtgtcccagcccagccgcgccgtctacatcttcgccaagaagaatggcatccccttagagctgcgcaccgtgcgactcggaccgatg

SEQ ID NO: 430 - DNA, 203 bp, synthetic construct
  source 1..203: mol_type = other DNA
ggcgcgccagtcctcccgcagtctcatttgccgcttccgacgcgtgaccccggcgcgctagcgtccgggaccggtgacaggcgcggggtgcgccaagcagtcccatgtgtcccctccctctcgcagccgccgcagtcgctgcgccccgagcccctctccggctcctcaacagagggctcgccgccgcccgactcggaccgatg

SEQ ID NO: 431 - DNA, 203 bp, synthetic construct
  source 1..203: mol_type = other DNA
ggcgcgccagtcctgtgttgacagcggcggcggtggaaccgggcgggcggcgggagtcggcgcctcgggttcctacctcgcgtccctaggcggcggcggccgggcgtcccgggatggccttcatggagaagccgccagccggcaaggtgctgctggacgacacggtgccgctgacagcagccatcgagcgactcggaccgatg

SEQ ID NO: 432 - DNA, 203 bp, synthetic construct
  source 1..203: mol_type = other DNA
ggcgcgccagtcctcggggcggtgcgctgggctgcacctccctccccgcgccccgtcctctcccgccctacaggccctagcagggcaggcgggaggtgagcgcggccatcccgctcccggagttccgggatcctggagtccgtagttcgtggtccttcgccggtgtccccggagcccagcggctgtggcgactcggaccgatg

SEQ ID NO: 433 - DNA, 203 bp, synthetic construct
  source 1..203: mol_type = other DNA
ggcgcgccagtcctctggccacgccctctccgcgagtccagtcccacgcgggatgaagagggcaccctccgccaagaggctgctgcgggacccgggtttcccctttccggcgccttccagcctcccaatcctcgggtctcgcctccctccgtctcctccctttcccctgtctgtctttccattggtcccgactcggaccgatg

SEQ ID NO: 434 - DNA, 203 bp, synthetic construct
  source 1..203: mol_type = other DNA
ggcgcgccagtcctccgggccagcccgcgtgcctgcgcagtcccctccccgagaaccatccccttgccccgcccagcgtcaggggtgcgcggccgccgagagaccccggaggcgtagccggctgcggaggcgaagaggtggcagcgcgagctgggaccagcgtctcggaggcgccgcagaattcacagcgactcggaccgatg

SEQ ID NO: 435 - DNA, 203 bp, synthetic construct
  source 1..203: mol_type = other DNA
ggcgcgccagtcctagggcgatgttgacagacagacagaggggcggatgcagcctacctcctgggcagtgagctgcggtctgaggcccctgcccagctggaaaccacagggaggggaagggaggggaggagaggagaggagaggaaccgtcatggggccttggagtcgagtcagggttgccaaatgcccgactcggaccgatg

SEQ ID NO: 436 - DNA, 203 bp, synthetic construct
  source 1..203: mol_type = other DNA
ggcgcgccagtcctgcacgcgcaaacctcctgtgatgcctgcgcctcctggccccgccttccgctcgtgggagttccggatgtttagcgttaccatggatcctggaggtgcccgcgaacactgcttgtcgcctgggcaaccggagaggacgaagcaggacctaggtggcggcggtggtaccggctgcacgactcggaccgatg

SEQ ID NO: 437 - DNA, 203 bp, synthetic construct
  source 1..203: mol_type = other DNA
ggcgcgccagtcctttcgcttgggtagaggaagccgtgaggccggagcttaggtcgggaagggatggatcgctgagccgatagcgtccgctaggctgtctgcctcggtacctgttactgctgctacttcctcgtttgacaccttcctggaatctctcttgatttttgaggaaatacctagtaacaaaccgactcggaccgatg

SEQ ID NO: 438 - DNA, 203 bp, synthetic construct
  source 1..203: mol_type = other DNA
ggcgcgccagtcctttggtccaagcaagaaggcagtggtctactccatcggcaacatgctggtcctttatggacacagcacccaggaccttccggaaaccaatgcccgcgtagtcggagggactgaggccgggaggaattcctggccctctcagatttccctccagtaccggtctggaggttcccggtcgactcggaccgatg

SEQ ID NO: 439 - DNA, 203 bp, synthetic construct
  source 1..203: mol_type = other DNA
ggcgcgccagtcctcagtgcctgggccgctgggagccgttattggctgccgttaaggaccgttacgtttcccgggtccttctggcactcctctggtggaccgcccccatcggccacacttgccctgctctccagtgattctgtagctcctggctccgtagtctcgcggacagctctctttcctggaagcgactcggaccgatg

SEQ ID NO: 440 - DNA, 203 bp, synthetic construct
  source 1..203: mol_type = other DNA
ggcgcgccagtcctgtaagcgctgcggagattgggctagaggcggaggcctgggccacggcggaggcgctgggtccttctggcactcctctggtggaccgcccccatcggccacacttgccctgctctccagtgattctgtagctcctggctccgtagtctcgcggacagctctctttcctggaagatcgactcggaccgatg

SEQ ID NO: 441 - DNA, 203 bp, synthetic construct
  source 1..203: mol_type = other DNA
ggcgcgccagtcctgcaatgctaggcgatggggaatccgaagacgcacaggagtccaagggttggctgactgcagaccctcatcataagtctagagccggagaagatggggagacgccggcctgcgccctttcgtgccctcgtgaggctggcatgcaggatggcaggacagcccggccacatgccccacgactcggaccgatg

SEQ ID NO: 442 - DNA, 203 bp, synthetic construct
  source 1..203: mol_type = other DNA
ggcgcgccagtcctatagagtagcggaagtggtccgttctcttcctctcccggcccaagcttctgggtatttctattgcgcgaggcattgtgggttgctgggcggcccggtctcggagaagaggggagagtggcgggccgctgaataagcttccaaaatgatgcccacaccagttatcctattgaaagcgactcggaccgatg

SEQ ID NO: 443 - DNA, 203 bp, synthetic construct
  source 1..203: mol_type = other DNA
ggcgcgccagtcctggcgcttccgcaggaagaaggaagcggcgccgccatcgcctcccggcgctccctccccgactcctaagtccttcggccgccaccatgtccgcctcggctgtcttcattctggacgttaagggcaagccattgatcagccgcaactacaagggcgatgtggccatgagcaagattcgactcggaccgatg

SEQ ID NO: 444 - DNA, 203 bp, synthetic construct
  source 1..203: mol_type = other DNA
ggcgcgccagtcctagtacagcagttgagagtaaggcctctggagctacactgaatgcctagcccacaccagttatcctattgaaagaggggactgatagctcccaaggcatcccccagcttgtgagtaacatcagtgcctgccaggtgattgctgaggctgtaagaactaccctgggtccccgtggccgactcggaccgatg

SEQ ID NO: 445 - DNA, 203 bp, synthetic construct
  source 1..203: mol_type = other DNA
ggcgcgccagtcctggggagggccgcgcagtgggaccggctgctgagacgaacgcttcactggggcagtctctgcatatcatggggagatagacgctgctgcctttaattggccttggtcctcacagctccaaaaagaaacaggatctcgataagctctatgagctgaagtccaaagctcggcagattcgactcggaccgatg

SEQ ID NO: 446 - DNA, 203 bp, synthetic construct
  source 1..203: mol_type = other DNA
ggcgcgccagtccttttcctgcgcggccgagcctgtcgccgccggatccggcctgcgggggtagttacggtgtttgctaggccggccgccctcttggagcttctgccctccgctgaggaagcggcgccgcctgacgcgggacggtcgggcgggcgccatgttgtgaaccgcctcggcggagctgtaagcgactcggaccgatg

SEQ ID NO: 447 - DNA, 203 bp, synthetic construct
  source 1..203: mol_type = other DNA
ggcgcgccagtcctgtgtgcgtcacgccgacgacgcgcgaagggcacacatcttaggacccggaggacgtccggcctctgtgagccgcaacctttccaagggagtggttgtgtgatcgccatcttagggaaaagatgttctcgtccgtggcgcacctggcgcgggcgaaccccttcaacacgccacatcgactcggaccgatg

SEQ ID NO: 448 - DNA, 203 bp, synthetic construct
  source 1..203: mol_type = other DNA
ggcgcgccagtcctataaggccctctcctccaccctgccaggctcactctgccccacagccacagcccctgactgccgcagcccccacagagcccgccgcgcaccccacgtcccccacgccagcgcccagccatggaggccatcaagaagaaaatgcagatgctgaagttggacaaggagaatgccatcgactcggaccgatg

SEQ ID NO: 449 - DNA, 203 bp, synthetic construct
  source 1..203: mol_type = other DNA
ggcgcgccagtcctattatgcattttccacatagggaaactgaggctcaggggtgttaagtgactcacccaaggtcacacggctaggaagttgctgcacgctcctatgctccatttcctctgggagcctatcaacccagataaagcgggacctcctctctggtagaggtgcagggggcagtactcaaccgactcggaccgatg

SEQ ID NO: 450 - DNA, 203 bp, synthetic construct
  source 1..203: mol_type = other DNA
ggcgcgccagtcctgtcacagggacagaccaacgtgttaacacaaagggagaacacgggagcatcctgcaccgtgcatttcagccacagatcacatggcccctccgcgggcccagcccacgccctgaccgcccggcctggccaggtctccgtatctctctgccccgccgccccttcccaactggggaccgactcggaccgatg

SEQ ID NO: 451 - DNA, 203 bp, synthetic construct
  source 1..203: mol_type = other DNA
ggcgcgccagtccttcacacctgccaagcatcacacctgcgatgcctgcacgagctgggtggggtccgcgcagctgcagtaagggggcgacccggcgtctgttagtcggcggttcatctccttcgtgcctcgatgagctttaacgccattttcctccattctctttcttcacctcttgagtttccaagcgactcggaccgatg

SEQ ID NO: 452 - DNA, 203 bp, synthetic construct
  source 1..203: mol_type = other DNA
ggcgcgccagtcctagtctggctgcggcggcagagctgaagtgagcggagccaccaggaggccatgtcgggtgaggacgctgaggtccgggcagtctctgaagatgtctccaatggaagcagtggctcgcccagccctggggacacactgccctggaaccttgggaaaacgcagcggagccggcgcagcgactcggaccgatg

SEQ ID NO: 453 - DNA, 203 bp, synthetic construct
  source 1..203: mol_type = other DNA
ggcgcgccagtcctcgcggccgactggaggcccggagcaggggcggagtttccggcggcagcgccactcgggcgtcgggtgacgctaggcggacggaccatcatgtgacacggaagtagctccgaacaggaagaggacgaaaaaaataaccgtccgcgacgccgagacaaaccggacccgcaaccacccgactcggaccgatg

SEQ ID NO: 454 - DNA, 203 bp, synthetic construct
  source 1..203: mol_type = other DNA
ggcgcgccagtcctattgcggaagtttctctacccatgcggtgtctctatggtcgggtgggtggggccaggaggaagatggcggcgtccgcagctgccgctgagctccaggcttctgggggtccgcggcacccagtgtgtctgttggtgttgggaatggcgggatccgggaaaaccacttttgtacagcgactcggaccgatg

SEQ ID NO: 455 - DNA, 203 bp, synthetic construct
  source 1..203: mol_type = other DNA
ggcgcgccagtcctgtcctccagtggctccgctccccgttctctgtgggctcaaaatgacagaggctcacaggacacctgcatgcccaaggcactccaccgtatgtgatcaacctggatccagcagtacatgaagttccctttcctgccaatattgatattcgtgatactgtaaagtataaagaagtacgactcggaccgatg

SEQ ID NO: 456 - DNA, 203 bp, synthetic construct
  source 1..203: mol_type = other DNA
ggcgcgccagtcctgattatttttctcctcttccttttttaatctatcctcttttcaccacattttagtgagaaagcaattttttttttacaaatggagcttatattgatttttatttcataaataattgaaagagggtagaaaaatctgcccttcatttaaaaattgaatgtttcactatgtatttacgactcggaccgatg

SEQ ID NO: 457 - DNA, 203 bp, synthetic construct
  source 1..203: mol_type = other DNA
ggcgcgccagtcctgcggaacggcgggctgtctgctcgcgctccccgcgcacaacacttcaccctctcgcctcgggtctcgggggccgctctgggatcccggccaccagcaattgtccggaaataatgcaaaaggtgtcccaaggctcctgaccagtgaacaaagatttgagaaagacagccaagctccgactcggaccgatg

SEQ ID NO: 458 - DNA, 203 bp, synthetic construct
  source 1..203: mol_type = other DNA
ggcgcgccagtcctcgcagaagaaccacaaaccccagaagccctcgcgcccactcttctccctcccctccagaagtcggagtgctgtttttgttgttggtgaaaggtgaggggaacagctgatccgtctgttgggaggacagatatctcaaggccaggatggaagaatcaccactaagccgggcaccacgactcggaccgatg

SEQ ID NO: 459 - DNA, 203 bp, synthetic construct
  source 1..203: mol_type = other DNA
ggcgcgccagtccttcaggccaaatcgcaactcagacccagtgaacccaaggcctgaagagaatttggattcatttaccttgttttgtggggactggagagacaagtaaactctcagagtaactgtcccctctgactaccatttctaaggatgccccggaggcccagctagccccagacttcggcccccgactcggaccgatg

SEQ ID NO: 460 - DNA, 203 bp, synthetic construct
  source 1..203: mol_type = other DNA
ggcgcgccagtccttccccggcccaccggccgaggagaggcctgcgctgcacacgcgcagaccgagcatccgcgtcaagaggcgaagagagcgcgcgctccccacgtcctgcgctcctggctgccgggcattcgtctcagccgtgactctcgccaggccggggctcgcgcgcccacgtctgaagagcgcgactcggaccgatg

SEQ ID NO: 461 - DNA, 203 bp, synthetic construct
  source 1..203: mol_type = other DNA
ggcgcgccagtcctggattcatttaccttgttttgtggggactggagagacaagtaaactctcagagtaactgtcccctctgactaccatttctaaggcaagccccctgtttctactcttgcgccccctgctggtttcctgccctgtctgatgccccggaggcccagctagccccagacttcggcccccgactcggaccgatg

SEQ ID NO: 462 - DNA, 203 bp, synthetic construct
  source 1..203: mol_type = other DNA
ggcgcgccagtccttccgcagctctgagtctccacttttttggtggagaaaggctgcaaaaagaaaaagagacgcagtgagtgggaaaagtatgcatcctattcaaacctaattgaatcgaggagcccagggacacacgccttcaggtttgctcaggggttcatatttggtgcttagacaaattcaaacgactcggaccgatg

SEQ ID NO: 463 - DNA, 203 bp, synthetic construct
  source 1..203: mol_type = other DNA
ggcgcgccagtcctaaggtttaaagggcgcctccatggggggcgctcagctggagctaccgagcggtgccaggccaggtgtgtgcgtccgtcggtctttccgtgcccacgccggagaccagccccggaggccgcctgggcctatccctgtgccaggcaccatgaagcaggagtctgcagccccgaacacgactcggaccgatg

SEQ ID NO: 464 - DNA, 203 bp, synthetic construct
  source 1..203: mol_type = other DNA
ggcgcgccagtcctacagtgcattcatgcagctgggccccaccccatctccagaggcaccttccactagcaacagtctccccaggcacaacacagctaacacaaggccccgcaggcaggactctgggacagacgcaggccagctgcccagagcccagaccaagcatggacgccgtggatgccaccatgcgactcggaccgatg

SEQ ID NO: 465 - DNA, 203 bp, synthetic construct
  source 1..203: mol_type = other DNA
ggcgcgccagtcctcggcgaccgcgggctgacgtggcggggctggcgtgtgggtctcgcagcgttgctcacagaacagagtagaggcggcggcggcggcggccggacccagactggtagtgaggctttggaccccgagccgctgcaatgccgctggagctggagctgtgtcccgggcgctgggtgggccgactcggaccgatg

SEQ ID NO: 466 - DNA, 203 bp, synthetic construct
  source 1..203: mol_type = other DNA
ggcgcgccagtcctccgcggtggttacaaagggggtcaagagtgccggacccagccgcgcggagcccaccattgcggcccgagggggacccgacgggggcccgacggtgtggcgtggcgcaaggagcgcgcctgccttctctcgccgccgggaacgggctgcaccaatggccagattccagcaagattcgactcggaccgatg

SEQ ID NO: 467 - DNA, 203 bp, synthetic construct
  source 1..203: mol_type = other DNA
ggcgcgccagtcctgcgacgtcacgctcggctataaaaggcgcggctcggggcccttgcggcgctggaggagctcgaggctgaggctgccggggggctgtgggctaccgggccgccggcgcctcagcgatgttttactcagggctcctcactgagggcggccgcaaggagaccgacatgcgggaggcgcgactcggaccgatg

SEQ ID NO: 468 - DNA, 203 bp, synthetic construct
  source 1..203: mol_type = other DNA
ggcgcgccagtcctgccccctcccctgactatcaaagcagcggccggctgttggggtccaccacgccttccacctgccccactgcttcttcgcttctctcttggaaagtccagtctctcctcggcttgcaatggaccccaactgctcctgcgccgctggtgtctcctgcacctgcgctggttcctgcacgactcggaccgatg

SEQ ID NO: 469 - DNA, 203 bp, synthetic construct
  source 1..203: mol_type = other DNA
ggcgcgccagtcctggacccggatgcaagcgtgctatataagcgttgctcaagtcccacccctttctttttgaggaagacgcggtcgtaagggctgaggatttttggtccgcacgctcctgctcctgactcaccgctgttcgctctcgccgaggaacaagtcggtcaggaagcccgcgcgcaacagcccgactcggaccgatg

SEQ ID NO: 470 - DNA, 203 bp, synthetic construct
  source 1..203: mol_type = other DNA
ggcgcgccagtcctatcgtcgtgatccacctccccaggaccttggagccacgtttacaaataggaatagggtacgtgggagggatagaacgtacagccaataaaatcatgtggcgccgatgggcgtgttgaggccgctgcctggcttagggcggaaacagattctctgcataagaaggggaacgaaagcgactcggaccgatg

SEQ ID NO: 471 - DNA, 203 bp, synthetic construct
  source 1..203: mol_type = other DNA
ggcgcgccagtcctccacctctggacagtcccactcagccccttcttcactctctgggcctcccaaaagacagtcagccttgtcctcaggcccgcacccagttgtcagcctctgactcctctcccctcaaaggattcttaccttggctcctcctcttagccctaacctgcctcctttgcctgtgagtccgactcggaccgatg

SEQ ID NO: 472 - DNA, 203 bp, synthetic construct
  source 1..203: mol_type = other DNA
ggcgcgccagtcctaaagcaggatgccctcccagttcctcctgcctctaggttcctctttccctgctgattccaggagcctatcaacccagataaagcgggacctcctctctggtagaggtgcagggggcagtactcaacatgatcacagagggagcgcaggcccctcgattgttgctgccgccgctgcgactcggaccgatg

SEQ ID NO: 473 - DNA, 203 bp, synthetic construct
  source 1..203: mol_type = other DNA
ggcgcgccagtcctcgcatgcgctggcggcctgcgccgccttaagtgccgcgccagcccggggcggcccagtcggcctgtcagccggcttcgagataagtcccggcgcttgcgcggcggcggctatggcggcggaggaggaggaggtggactctgccgacaccggagagaggtcaggatggctaactgcgactcggaccgatg

SEQ ID NO: 474 - DNA, 203 bp, synthetic construct
  source 1..203: mol_type = other DNA
ggcgcgccagtcctcccggcgtccctgcccctgggcggggacaggcggcggccaagcggggagtcgaggcggcgagcgcgcagctggcctagtctgcggtccccaactcctggagtcccctgggagctgccgctgcaggcccccgagccgctaggccccgccgccaggccaccgctgctgcggcagcccgactcggaccgatg

SEQ ID NO: 475 - DNA, 203 bp, synthetic construct
  source 1..203: mol_type = other DNA
ggcgcgccagtcctgttaagatggcggcgcccagcagagtcaggtgcggacgactttgtctgtaggagcagcggcggcttgaggacccggggagaccctcaagaatcgacccatcaggacgccagagctgcttcagcggtgaccaccttctccctctaacacattcttcccttcttcacaaacggccccgactcggaccgatg

SEQ ID NO: 476 - DNA, 203 bp, synthetic construct
  source 1..203: mol_type = other DNA
ggcgcgccagtcctgagaaggaaagaacggccgctatagccctatcggctgctacaacaccaaaacgcatccacctaactggctgacgctacaccttggtctttccgggtccttgcacgcttcgctccaactcctgcagagctgagccggaggggaatccggaagggacacgctgaacaggaacagaacgactcggaccgatg

SEQ ID NO: 477 - DNA, 203 bp, synthetic construct
  source 1..203: mol_type = other DNA
ggcgcgccagtccttccggccacggtgatgacgagtctccgtcaacctcgtctggcacagctgggacctcctctgtgccagagctacctgggttttactttgaccctgaaaagaaacgctacttccgcttgctccctggacataacaactgcaaccccctgacgaaagagagcatccggcagaaggagcgactcggaccgatg

SEQ ID NO: 478 - DNA, 203 bp, synthetic construct
  source 1..203: mol_type = other DNA
ggcgcgccagtccttcgcctaacctcgcgcccgggccgcgcctcctcctcctcctgctccccgccgcttccgtttctcgagggaaaggctgctgcctcctgctctgtcctcatccccggcttagctgacggcccagagggtgggtgccaattccaccagcagctgcaactgaaaagcaaggttcagaacgactcggaccgatg

SEQ ID NO: 479 - DNA, 203 bp, synthetic construct
  source 1..203: mol_type = other DNA
ggcgcgccagtcctcagagccgctcccctctcctcgccccgccaccgggacggagagcgcccgccgctgcatttccggcgacacctcgcagtcattcctgcggcttgcgcgcccttgtagacagccggggccttcgtgagaccggtgcaggcctggggtagtctcctgtctggacagagaagagaaaacgactcggaccgatg

SEQ ID NO: 480 - DNA, 203 bp, synthetic construct
  source 1..203: mol_type = other DNA
ggcgcgccagtcctccccacgcgctgtgaccccatttgttgcacgtgcatgttcaggtcgagagagggatgcgacgtgttcggggagcagcccaccttgtgggtggccaatccgggacgggaatcttaaacttttaactcttggtgcaaagactgatccactggcggctttacgggagcgggaaaaaacgactcggaccgatg

SEQ ID NO: 481 - DNA, 203 bp, synthetic construct
  source 1..203: mol_type = other DNA
ggcgcgccagtcctagtcggagccgggcttgcccgggcatgtgggagctgccggctttccggacgccacgtgcagaccggaagagacacgcggggcttcaggctgctgccccattggaagattactccccaggcttcccttgccccaagcagtgagctgactggaatggtaccccgggaggcccctgacgactcggaccgatg

SEQ ID NO: 482 - DNA, 203 bp, synthetic construct
  source 1..203: mol_type = other DNA
ggcgcgccagtcctgtcgtcgggctcgttgccggtgcaaacagggaggaaacagccggcgttgctgtagcgcgtctgggaattacaccgggggactggccggcccgcttcgtgcctgcgggaagtcgggccgggggactcttcggaaactccgagcctcagagaaatatggcgctcccgacgctgccgcgactcggaccgatg

SEQ ID NO: 483 - DNA, 203 bp, synthetic construct
  source 1..203: mol_type = other DNA
ggcgcgccagtcctctgtgcccgctgtgcctgctgtgcccgcgctgtcgccgctgctaccgcgtctgctggacgcgggagacgccagcgagctggtgattggagccctgcggagagctcaagcgcccagctctgcccgaggagcccaggctgccccgtgagtcccatagttgctgcaggagtggagcccgactcggaccgatg

SEQ ID NO: 484 - DNA, 203 bp, synthetic construct
  source 1..203: mol_type = other DNA
ggcgcgccagtcctgagccccacctccctcctcttcgcccccgcacgccgaaaacaggggcctctcacgtgacccctgcgcgctcccgcgggggagcgtagtctcggaggcggcgccgcaggggattgaggggttgactgagcgttgcgagccttagctttctcccgaacgccagcgctgaggacacgcgactcggaccgatg

SEQ ID NO: 485 - DNA, 203 bp, synthetic construct
  source 1..203: mol_type = other DNA
ggcgcgccagtcctcgcgggcaatccctcaacctgattggtcccctcgcccgtcactccagtgcgcccccaacctaccacgcagtaaaagccacccccgcctcggcccggacggtttccaagctggttttgaagtcgcggcagctgttcctgggacgtccggttgaccgcgcgtctgctgcagagacccgactcggaccgatg

SEQ ID NO: 486 - DNA, 203 bp, synthetic construct
  source 1..203: mol_type = other DNA
ggcgcgccagtcctctgcgccgggttccgtgtgtctatgtcaatgtgtctgtccttcactcctccattgtctgccgccactgctgctgctgctgctgctgccgctgctgctgcacgaatcgccgcagcccccagccttgcgcgtcgtcgctacctcctcggacaggtgagaagcagcccagaaattttcgactcggaccgatg

SEQ ID NO: 487 - DNA, 203 bp, synthetic construct
  source 1..203: mol_type = other DNA
ggcgcgccagtcctggggctgcgccgggttccgtgtgtctatgtcaatgtgtctgtccttcactcctccattgtctgccgccactgctgctgctgctgctgctgccgctgctgctgcacgaatcgccgcagcccccagccttgcgcgtcgtcgctacctcctcggacagaaattttatgaataagcatcgactcggaccgatg

SEQ ID NO: 488 - DNA, 203 bp, synthetic construct
  source 1..203: mol_type = other DNA
ggcgcgccagtcctggcgtcgcgggggcggggctcgggaaagacccgtgccagcgggcgtgtggccgcgggtttcgcacggtccaataagggagggcggcgtggcccggcctggtagcgacgaggacgcgcctgcgcagaggcggcagcaccaccggggttgactccgggggcgcggcgaggagagaccgactcggaccgatg

SEQ ID NO: 489 - DNA, 203 bp, synthetic construct
  source 1..203: mol_type = other DNA
ggcgcgccagtcctgggtgagcaaaggggcgggtccctggctgctgtggcctcccctgaccccctccccccgctgctggggtcctcggccaagcccccttctcactggactgagacatgaggctgagctggttccgggtcctgacagtactgtccatctgcctgagcgccgtggccacggccacggggcgactcggaccgatg

SEQ ID NO: 490 - DNA, 203 bp, synthetic construct
  source 1..203: mol_type = other DNA
ggcgcgccagtcctgtcggtaggctccacgacaaaagtcaacccttctgtaaatcacctgctgtggttatgatgctctgagttcaatacgtctgaacctttgctgtctatggatctgctctaaaccttatagcctgcttatgggggaaggtgacgccttctgggccccatctgtccttcctcacagcacgactcggaccgatg

SEQ ID NO: 491 - DNA, 203 bp, synthetic construct
  source 1..203: mol_type = other DNA
ggcgcgccagtcctggccttgttctccagctgagaggacgatcgtccttataggagaggccgagtctccgagggcaatttcagaggtctggtgcgagggaagcagagactttcaaggaacaaggaaatgcatactatgccaagaaagattacaatgaagcttataattattatacaaaagccatagatcgactcggaccgatg

SEQ ID NO: 492 - DNA, 203 bp, synthetic construct
  source 1..203: mol_type = other DNA
ggcgcgccagtcctaccccgggggcggggcttccggcgcgctgccttgtgggcacggtagttccgccgggtctggcttccgcctgccgagcggcccgggaccgcaggccggactacacttcccgtcggcccgcctgctctcccgatgccgccttggcgcgagacgttggcaagcagagtgtctccaagcgactcggaccgatg

SEQ ID NO: 493 - DNA, 203 bp, synthetic construct
  source 1..203: mol_type = other DNA
ggcgcgccagtcctacgtgagggggcgaggggcgggatgcccctccgcgggccccgccaatgatgagctggattgcgtgggacgaagggtcgtcattggacaaccgccgcgggcgccctggtctctgctacctgtagctgagggcgctgttgatgggcagcgcggcgcgctgggaaggctcgttctcgcgactcggaccgatg

SEQ ID NO: 494 - DNA, 203 bp, synthetic construct
  source 1..203: mol_type = other DNA
ggcgcgccagtcctgtcattttccctctactgctggaaaagaaggctcaagaggaagaatccaggttttgaggttttgctgaagatattcctgaagaatcatcccaggtgccacactaaaaaaatgatccagttgacagctacccctgtgagtgcacttgttgatgagccagtgcatatccgagctaccgactcggaccgatg

SEQ ID NO: 495 - DNA, 203 bp, synthetic construct
  source 1..203: mol_type = other DNA
ggcgcgccagtccttgtcacccaggctggagtgcagtggcgcgatctcagctcactgccacctttgcctcctgggttcaagcgattcttctgcctcagcctcccgagtagctgggattacagggtgaagagggaacagaaatctttgccccctgactttggaaatctcgtttaaccttcaaactggcgcgactcggaccgatg

SEQ ID NO: 496 - DNA, 203 bp, synthetic construct
  source 1..203: mol_type = other DNA
ggcgcgccagtcctgggttcctgcattctctgctctaaatcccagcctgcccttggggctgcccacgcccccttcagatcctttgctccggagagagacctgtccgagcagaggcctggactacatctcccggcgtgcctggcagtgtggtggcctctgtgcgccgtctgcactcgttgcaggcgacgcgactcggaccgatg

SEQ ID NO: 497 - DNA, 203 bp, synthetic construct
  source 1..203: mol_type = other DNA
ggcgcgccagtcctcgcgcctgcgcagtggaggcggcccaggcccgccttccgcagggtgtcgccgctgtgccgctagcggtgccccgcctgctgcggtggcaccagccaggaggcggagtggaagtggccgtggggcgggtatgggactagctggcgtgtgcgccctgagacgctcagcgggctatacgactcggaccgatg

SEQ ID NO: 498 - DNA, 203 bp, synthetic construct
  source 1..203: mol_type = other DNA
ggcgcgccagtcctagggacgggaagtgggcggggccggccggcagcagcttgcgggacacggagccgcgaggagacagctgaggcccgcggagaccagggggtgaagcctggagaccctcttgccctggcctagctgcaggcccccgggatgctttgggcatgtcctctggagccccacagaagagccgactcggaccgatg

SEQ ID NO: 499 - DNA, 203 bp, synthetic construct
  source 1..203: mol_type = other DNA
ggcgcgccagtcctggagatctgatcctgattgcagaaccttccctgattacagaatcttgggttgtatctcccacttcacccttctagaccatcccagaagatctataagatttcatctgggaaatcactaggagttcttggaagggaaagaaggaagattgttggttggaataaaaacagggttgacgactcggaccgatg

SEQ ID NO: 500 - DNA, 203 bp, synthetic construct
  source 1..203: mol_type = other DNA
ggcgcgccagtcctgatttgctacctccctggagctccctgacccggacgctctctgggccaatatggcagcgcccagcaacaagacagagctggcctggagtccgcggctggccgcgtgagtaggtgattgtctgacaagcagaggcatgagctgggtccaggccaccctactggcccgaggcctctcgactcggaccgatg

SEQ ID NO: 501 - DNA, 203 bp, synthetic construct
  source 1..203: mol_type = other DNA
ggcgcgccagtcctttttgtctgccccttcctgcctgtgggaaggagagaaaattaggggaggccacgggcttgaaagctttccctgcatggaggccactggatgggattctagatgctcgcctgggacccaggttcgtgccctcgtgaggctggcatgcaggatggcaggacagcccggccacatgccgactcggaccgatg

SEQ ID NO: 502 - DNA, 203 bp, synthetic construct
  source 1..203: mol_type = other DNA
ggcgcgccagtcctggctcttgtcaccccttctcgcggctgaacctttggagccatggtgaattcgggcctctccgaagccgccgccgccgccaccgccactactgcctttaccgtctcctaagagtgaggagcgcggacgaggtaagcgaggaggcggcggctagagcggtggagacagcagccacccgactcggaccgatg

SEQ ID NO: 503 - DNA, 203 bp, synthetic construct
  source 1..203: mol_type = other DNA
ggcgcgccagtcctcttcagggctgggggccgcgctatgccccgccccctccccagccccagacacggaccccgcaggccaactggctccctgcccctgcccccgccccttgacatcccagactccctggctatttaaacagagatgggtgcccccatccgcacactgtcctttggccaccggacatccgactcggaccgatg

SEQ ID NO: 504 - DNA, 203 bp, synthetic construct
  source 1..203: mol_type = other DNA
ggcgcgccagtcctggaggcccaggcacctcatgtctgccctcaacccagagtggagcagaccttccctggagcttctcaggagccacttcaaaaggagaagaagacacatgaattagagacagcacgggggagcaggctgtggagctgggagtgacggggtgagtccaggaaggctgcctggaggagcgactcggaccgatg

SEQ ID NO: 505 - DNA, 203 bp, synthetic construct
  source 1..203: mol_type = other DNA
ggcgcgccagtcctcgccgggtgactgacgttgaggcccaaccagggagaggcggggccaaggccagggcctgactaaacctggagactcgggtggccgaggggcttcataccagctgaagagcgacaagccgctggcagccgcggatctcaccgccgctcagggtttttagaacttcagccataaaacgactcggaccgatg

SEQ ID NO: 506 - DNA, 203 bp, synthetic construct
  source 1..203: mol_type = other DNA
ggcgcgccagtccttccatttcctgttttgtatgtatatcgattccgctcctcttctttccgccagtttttgtagagacagcatcttgttgcccaggctggtctcgaactctggggctgaagtgattctccctcttcagcctcccagagttctgggattataggcacgagccaccatgcccagccttacgactcggaccgatg

SEQ ID NO: 507 - DNA, 203 bp, synthetic construct
  source 1..203: mol_type = other DNA
ggcgcgccagtcctacgccccgcctcttccgcttctgtggtctgatcttcctgcggctgaaccgcccggctgagccgacattgccggcgtcttggcgattcggcccgacgagctccgctttcgctacagcatggtggcctactggagacaggctggactcagctacatccgatactcccagatctgtgcgactcggaccgatg

SEQ ID NO: 508 - DNA, 203 bp, synthetic construct
  source 1..203: mol_type = other DNA
ggcgcgccagtcctactcggcttccgtccattcttccggtggagatggctgcggccgtggcggggatgctgcgagggggtctcctgccccaggcgggccggctgcctaccctccagactgtccgctatggctccaaggctgttacccgccaccgtcgtgtgatgcactttcagcggcagaagctgatgcgactcggaccgatg

SEQ ID NO: 509 - DNA, 203 bp, synthetic construct
  source 1..203: mol_type = other DNA
ggcgcgccagtcctctgactgaggggtcagtggttccgggtaggagctaggtgaccctcggctgctgcagggatctgcagcgactgcagccatgggggcccacctggtccggcgctacctgggcgatgcctcggtggagcccgaccccctgcagatgccaaccttcccgccagactacggcttccccgcgactcggaccgatg

SEQ ID NO: 510 - DNA, 203 bp, synthetic construct
  source 1..203: mol_type = other DNA
ggcgcgccagtcctcggaaatgcgtgttctagctttctgtgtgcttaggtgcccgagctactgagggtctaagtccgggcagccgaagagtgtggtaggtaacggtcctcagcgcaagggtcatttcgtcgctgggaagggacggccctcgcccgcggtgatggtggttagcaagatgaacaaagatgcgactcggaccgatg

SEQ ID NO: 511 - DNA, 203 bp, synthetic construct
  source 1..203: mol_type = other DNA
ggcgcgccagtcctagctctcgcgaggtttcgtcgggggctggcggctgcggctcggcggagagtgcggcatgcgctcggaaaaggagggggccggaggccttcgggcggccgttgccgcgcggggcccgagcgggagggagaagctgtcggccctagaagtgcagttccaccgcgactcgcagcagccgactcggaccgatg

SEQ ID NO: 512 - DNA, 203 bp, synthetic construct
  source 1..203: mol_type = other DNA
ggcgcgccagtcctgacttctccagacaggttatgttacctgcagaggctgccctgaagctccctgtggcctggagactatgtacaagaggaatggtctgatggctagcgtgttggtcacctctgccactccacagggcagcagcagctcggactctctggagggccagagctgcgactatgccagcacgactcggaccgatg

SEQ ID NO: 513 - DNA, 203 bp, synthetic construct
  source 1..203: mol_type = other DNA
ggcgcgccagtcctgagaggaagcgcacctgagggagcacagcgaaggccgggacgcagggagctggatggagagcgagcctgggcggcgaaaggttgccgaggcgggggctgggcgcctgggaacaaaggaaagcaatagaagaactgcttaaggaggcaaaacgtgggaaaactagagctgaaacacgactcggaccgatg

SEQ ID NO: 514 - DNA, 203 bp, synthetic construct
  source 1..203: mol_type = other DNA
ggcgcgccagtcctcccggctgacagagttagccgaggccgccatattgaataagcgacccggcctcctagggggtcgtcgtggtccagacagtttagcagaacagcctccgcggctccggggagaagcaatatgttaaggatacctgtaagaaaggccttagtaggcctttctaagtctcctaaaggcgactcggaccgatg

SEQ ID NO: 515 - DNA, 203 bp, synthetic construct
  source 1..203: mol_type = other DNA
ggcgcgccagtcctgccgccatattgaataagcgacccggcctcctagggggtcgtcgtggtccagacagtttagcagaacagcctccgcggctccggggagaagcaatatgttaaggatacctgtaagaaaggccttagtaggcctttctaagtctcctaaaggatgtggcttgtgagaaggttggccgactcggaccgatg

SEQ ID NO: 516 - DNA, 203 bp, synthetic construct
  source 1..203: mol_type = other DNA
ggcgcgccagtcctcgcgcgtccggatctcaaaagcggcagaggccaccgaagggacaggaagcactttggtccagaccacactcccggcacagtgcggaaagagccggcgggagccactctgatcccggacgcctcagcgcccccttgggcttgggcttgccctcgggccggggaaggctgaccgcgcgactcggaccgatg

SEQ ID NO: 517 - DNA, 203 bp, synthetic construct
  source 1..203: mol_type = other DNA
ggcgcgccagtcctgggatgtgtgtgccagccctcggtccagtgcccgctcctgagctgactcctgctgggccccgacagcttgccgtgtttcctgtgcctgtagctccctggttggatagctgccgcccgggagaggtgacccgggcgccctgctagggtgaaggcccctgccctcggcccgggatccgactcggaccgatg

SEQ ID NO: 518 - DNA, 203 bp, synthetic construct
  source 1..203: mol_type = other DNA
ggcgcgccagtcctgggtgccggtggagtcgtgttggtcctcagaatccccgcgtagccgctgcctcctcctaccctcgccatgtttcttacccggtctgagtacgacagcttggttctacagccattgggatccagacatcagagggtgtgtgcctagctgtggagaagagaattacttccccactgcgactcggaccgatg

SEQ ID NO: 519 - DNA, 203 bp, synthetic construct
  source 1..203: mol_type = other DNA
ggcgcgccagtcctctgcggccgtgtgggtgagttggctgccggggcgtgaatactttttctcccgaaggaagattatttcaagtggaatatgccattgaggctatcaagcttggttctacagccattgggatccagacatcagagggtgtgtgcctagctgtggagaagagaattacttccccactgcgactcggaccgatg

SEQ ID NO: 520 - DNA, 203 bp, synthetic construct
  source 1..203: mol_type = other DNA
ggcgcgccagtcctagaaaggggcgggaggggtactgacccgaggagcggtcccgcgactctgtactccctgctgcccagtcccggccaggacgctgcccggcttagctggggcgcccctcgagaccaggatggagggttcagccgactcctacaccagccgcccatctctggactcagacgtctccccgactcggaccgatg

SEQ ID NO: 521 - DNA, 203 bp, synthetic construct
  source 1..203: mol_type = other DNA
ggcgcgccagtcctagttggtccttagtactgcggccgtgtgggggcgtgaatactttttctcccgaaggaagattatttcaagtggaatatgccattgaggctatcaagcttggttctacagccattgggatccagacatcagagggtgtgtgcctagctgtggagaagagaattacttccccactgcgactcggaccgatg

SEQ ID NO: 522 - DNA, 203 bp, synthetic construct
  source 1..203: mol_type = other DNA
ggcgcgccagtcctaccagctctgagtcccaccccgaggccgcccccaaaaggaaactgtcatcgataggaatacaagttgactgcattcagccagtgccaaaagaggagcccagtcccgctaccaaattccagtccatcggggttcaggtagaggacgactggcgaagcagcgtcccctctcacagtcgactcggaccgatg

SEQ ID NO: 523 - DNA, 203 bp, synthetic construct
  source 1..203: mol_type = other DNA
ggcgcgccagtcctaggaagggcgggtcagcgcgccggcgcagtgcggcggtcacaggctgagtgctgcggcgcgatccttgcttccctgagcgttggcccgggaggaaagaagatggtgctggatctggatttgtttcgggtggataaaggaggggacccagccctcatccgagagacgcaggagaacgactcggaccgatg

SEQ ID NO: 524 - DNA, 203 bp, synthetic construct
  source 1..203: mol_type = other DNA
ggcgcgccagtcctacctttcagggagatttgagagaaagactccagaagcccgcggggagagcaggggttctggggaagataaagcccttcatccaggatccctctgtgaccataagatgagatggaccaaacgcccccggcgcgtcctgaatatctggtctcagggattcgaactccccctgtgagcgactcggaccgatg

SEQ ID NO: 525 - DNA, 203 bp, synthetic construct
  source 1..203: mol_type = other DNA
ggcgcgccagtcctaaaatccaccccaacaatcgctgtgtgccgctttagtgcgctcgccgtcggctctacctgcgtgctttagctccttctcgcctgatccttctgtctctcccaaccccggacacccggcttcgactggttatatcttcggtgttcttttcctctcttcttctttcgcggttcagccgactcggaccgatg

SEQ ID NO: 526 - DNA, 203 bp, synthetic construct
  source 1..203: mol_type = other DNA
ggcgcgccagtcctgaggtgggactgggcgggtcaggccgcagcggctgacggcaggggaggagccgggtccactgccgggtggaggggcaaggcgagtgtgtgtccttatcctagcaattggggcgcgggcctgtgagccagttggagttgcggcggcgggaacgattgggctgagcagaggacgaccgactcggaccgatg

SEQ ID NO: 527 - DNA, 203 bp, synthetic construct
  source 1..203: mol_type = other DNA
ggcgcgccagtcctcagcagggaggcgagcagagggcccccagagggagccgcggaggtgcaggtcgaagaggccgggctacgtcgtgccctgcgcgtgagcagctgcagaggcagaggcagcatccagcggcggcgccagcagttccagtccgttgctttactttttgcttcaccgacatagtcattcgactcggaccgatg

SEQ ID NO: 528 - DNA, 203 bp, synthetic construct
  source 1..203: mol_type = other DNA
ggcgcgccagtcctatagaaactacggcactctggccgtggccgacgttgctcctccgaagcatggcgccggcgggagttgtaacccgggctgtccggagcggggagctgcccctcacaagcatggcgtcagctgaaaatgaagcctgtgctgtgcggagcgtcgcctgcccctcacaagcatggcgtcgactcggaccgatg

SEQ ID NO: 529 - DNA, 203 bp, synthetic construct
  source 1..203: mol_type = other DNA
ggcgcgccagtcctgccttccgctccgccccttcaggcaggaagtgtcggcgccgccactgtccggccacagcctaacgctcttcgctgtcgtttgtggtctcgcgcagggcggccccggttctggtgtttggcgtcggaattaaacaaccaccatgtcgagcaaaaaggcaaagaccaagaccaccacgactcggaccgatg

SEQ ID NO: 530 - DNA, 203 bp, synthetic construct
  source 1..203: mol_type = other DNA
ggcgcgccagtcctggaggacggagtcccagagaactacaactcccatcaagcacttgggggatcgccgcggctgagggagagactatggcttaggaaccaccattcgcgtgaggctctgctccccgcgcctgcgcagagtgcagggccacgtcgcttttgctgtaccggggaccacgcgtctcatcccgactcggaccgatg

SEQ ID NO: 531 - DNA, 203 bp, synthetic construct
  source 1..203: mol_type = other DNA
ggcgcgccagtccttggatgtttccaaggattgtcttcagtcatggccttgggattaaagtgcttccgcatggtccaccctacctttcgcaattatcttgcagcctctatcagacccgtttcagaagttacactgaagacagtgcatgaaagacaacatggccataggcaatacatggcctattcagccgactcggaccgatg

SEQ ID NO: 532 - DNA, 203 bp, synthetic construct
  source 1..203: mol_type = other DNA
ggcgcgccagtcctagccaattctgaccgtgtcaacgaatcatccacgcacctgcagctctgctgagagagtgcaagccgtgggggttttgagctcatcttcatcattcatatgaggaaataagtggtaaaatccttggaaatacaatgagactcatcagaaacatttacatattttgtagtattgttcgactcggaccgatg

SEQ ID NO: 533 - DNA, 203 bp, synthetic construct
  source 1..203: mol_type = other DNA
ggcgcgccagtcctccaggtgacaatccccaattccttgggaaacctggacgcatccagctccagggacctgtccggcaagtggtgacatgcaccgtccagggagaaactctgctggccgtccgctctgactaccactgtgccgtgtggaagtttggtaaacagtggcagccaacccttctgcaggcacgactcggaccgatg

SEQ ID NO: 534 - DNA, 203 bp, synthetic construct
  source 1..203: mol_type = other DNA
ggcgcgccagtcctgtcacttccggtcgacggcggaaggcggaaggcggagcggtccctgcaacccggccggcgggaactgccttctagtttttagtctcagaccagaccaccgggcgcaccccgatgccgagcccgcagcttctggtgctcttcggcagccagacaggcacggctcaggatgtgtcgcgactcggaccgatg

SEQ ID NO: 535 - DNA, 203 bp, synthetic construct
  source 1..203: mol_type = other DNA
ggcgcgccagtcctcttcagtggcctcctcctgggagggagctgaagccgctcgcaagactcccgtagtccccacctctctcagcttccggctggtagtagttccgcttcctgtccgactgtggtgtctttgctgagggtcacattgagctgcaggttgaatccggggtgcctttaggattcagcacccgactcggaccgatg

SEQ ID NO: 536 - DNA, 203 bp, synthetic construct
  source 1..203: mol_type = other DNA
ggcgcgccagtcctgaactggattgcgattggtcagcacgtgcctcggtcggcggtacaattggctgaggcgctgggccttgggaagcattccccgacgggattggtcgtcgctctcgcagagcccgcctcccgcagtacaagcggcccccgggtcgggtgggaggaggggactccgggaggaggaaccgactcggaccgatg

SEQ ID NO: 537 - DNA, 203 bp, synthetic construct
  source 1..203: mol_type = other DNA
ggcgcgccagtccttgcgcagggggtagcagaggcgcggacaaaccgcggggtgaccagggcgcatgcgtaacagggcttgacagcgcgcggaagaaaaaccagcaagaaggcggcgggggaagatggcggtcctggggtagagtttgcaagctttctgactaggctagtcgagtaactattcgggtccgactcggaccgatg

SEQ ID NO: 538 - DNA, 203 bp, synthetic construct
  source 1..203: mol_type = other DNA
ggcgcgccagtcctctattgatgggcccaagcgtaaccaggctcttctgattggccggtgtacttcagtttccgtccaaggtccgcctcctacctccttctgcttcggtccttaggataagaccatggccttgagagcatgtggcttgatcatcttccgaagatgcctcattcccaaagtggacaacacgactcggaccgatg

SEQ ID NO: 539 - DNA, 203 bp, synthetic construct
  source 1..203: mol_type = other DNA
ggcgcgccagtcctctgggcttccgtcctccgcccgcgcccgacggagcctgttcgcgtcgactgcccagagtccgcgaatcctccgctccgagcccgtccggactcccccgatcccagctttctctcctttgaaaacactaagaataatgtcactgcatcagtttttactagagccaatcacctgtccgactcggaccgatg

SEQ ID NO: 540 - DNA, 203 bp, synthetic construct
  source 1..203: mol_type = other DNA
ggcgcgccagtcctacagggtataaaagctgtccgcgcgggagcccaggccagctttggggttgtccctggacttgtcttggttccagaacctgacgacccggcgacggcgacgtctcttttgactaaaagacagtgtccagtgctccagcctaggagtctacggggaccgcctcccgcgccgccacccgactcggaccgatg

SEQ ID NO: 541 - DNA, 203 bp, synthetic construct
  source 1..203: mol_type = other DNA
ggcgcgccagtccttggttgcgtcgggtcacgtgggcgcgcaggcgcagcgcggtgcagcccgttcgctcacacaaagcccagacgcggagaaaatggcggcaggggtcgaagcggcggcggaggtggcggcgacggagatcaaaatggaggaagagagccgcgcgcccggcgtgccgagcggcaacgcgactcggaccgatg

SEQ ID NO: 542 - DNA, 203 bp, synthetic construct
  source 1..203: mol_type = other DNA
ggcgcgccagtcctggttggaattttggcgggttcagctgtgaacgaagaaggcgtcccggcatcggccaagattctacattgctcatctgggcatctgagcctccttcgaagtttcctgtcacaactgtcctcttgacagcatggatgaggaggaagacaatctgtctctgctgaccgcactgctggcgactcggaccgatg

SEQ ID NO: 543 - DNA, 203 bp, synthetic construct
  source 1..203: mol_type = other DNA
ggcgcgccagtcctagtcccgacgagcaacgcgtttgtagaggggtgggtgcgcacgctctgtccctgcgtgaccttccgaccccgctgtcctcaccgcaatggcggctgtgagggccctggtggcctcgaggctcgctgcggcatctgcattcacgtccctgtcccccggcggtcggacgccttccccgactcggaccgatg

SEQ ID NO: 544 - DNA, 203 bp, synthetic construct
  source 1..203: mol_type = other DNA
ggcgcgccagtccttgtggcaaaggaaggagctgactgggggagttcgaggcggcgggcggcggtgaccccggcctggaactgccccggtacggaagtgttccggggtccgtggggagcaggagagggaggcgggggaccgtcccgcgcggggcacgatgttgaacatgtggaagcaccaatgttgttcgactcggaccgatg

SEQ ID NO: 545 - DNA, 203 bp, synthetic construct
  source 1..203: mol_type = other DNA
ggcgcgccagtcctcgccctcccgccgcgcgctcgggatcccgaccagtcctgaccgcacgggggccgcggccacggggcgcaggggccatggtgcgcggcaggatctcccggctctgggtccgggacgtgcgcttccccacgtcgcttgggggccacggcgcggacgccatgcacacggaccctgaccgactcggaccgatg

SEQ ID NO: 546 - DNA, 203 bp, synthetic construct
  source 1..203: mol_type = other DNA
ggcgcgccagtccttaaaagggttagatttcagtctatagacgatcagtgggaaggcctttcctaggaggtaaccagaacagagagctgtaaactccgtgaatgcaagaggctgcttctgttacctgagtggttctcactcatctttgccttccttacctcgtgatctcaccattccagattgaaatccgactcggaccgatg

SEQ ID NO: 547 - DNA, 203 bp, synthetic construct
  source 1..203: mol_type = other DNA
ggcgcgccagtcctgcgcggacgccatggtaagcgcggacgccatggtaagcgcggacgccatggtaagcgcggacgccatggtaagcgcggacgccatggtaagcgcggacgccatggtaagcgcggacgccatggtaagcgcggacgccatggtaagcgcggacgccatgcacacggaccctgactcgactcggaccgatg

SEQ ID NO: 548 - DNA, 203 bp, synthetic construct
  source 1..203: mol_type = other DNA
ggcgcgccagtcctgagccgaaaggaaccggcgctttgtgacgtcacgtccgccttaccggcggattaagctcgctttcttctaggcgcgtttcctgaaggtcgatggccaggtggtcttcataaactatactgccttgtgatgcctccctagaaatgagaggtctcaataccagctcagaccatgtgcgactcggaccgatg

SEQ ID NO: 549 - DNA, 203 bp, synthetic construct
  source 1..203: mol_type = other DNA
ggcgcgccagtcctttccgcccgcgacccccttccagacccgctcccgaaaccttgtcgaaggaccaaaggcgaccggtgcaggtgcacgacgccagctcccttctggggggccggggcctgggggttgccatggcccccagccacctgtcagtgcgggagatgagggaagatgagaagcccctggtgcgactcggaccgatg

SEQ ID NO: 550 - DNA, 203 bp, synthetic construct
  source 1..203: mol_type = other DNA
ggcgcgccagtcctagcgccgccgccacctttccattcagtcgcccaacatggctggagcgcggcggaggtgagccggccgcccgcccgcagacgccccagcctactgcgcccgagtcccgcggccccagtggcgcctcagctctgcggtgccgaggcccaacggctcgatcgctgcccgccgccagccgactcggaccgatg

SEQ ID NO: 551 - DNA, 203 bp, synthetic construct
  source 1..203: mol_type = other DNA
ggcgcgccagtccttcccctctgggggcggcgatcctccctccggagccccccttcaaccctcccggaagtgagcatttgcaggaccagggatgctgtgctgctctcccatgagccagtcaccgagtcggtctgctgcagccctttctgaacctctggccgtctggatgctccactgtgcttgccaagcgactcggaccgatg

SEQ ID NO: 552 - DNA, 203 bp, synthetic construct
  source 1..203: mol_type = other DNA
ggcgcgccagtcctgacattctttgaagtgaagcattctatgaatgtgagctgaagaaatgaatgaaatgaaataatgcaggtcattttacctgggacaaatacctaaaagaaacatgttcagtcccagcgcctgtccattgcttcaagcagtcctacacacctccaagcaacgagttcaagatcagtcgactcggaccgatg

SEQ ID NO: 553 - DNA, 203 bp, synthetic construct
  source 1..203: mol_type = other DNA
ggcgcgccagtcctcacaaatatggtcacctatcagagtctgcatcccaatatcaagaagctgctgacatcctggatctaggtcattttacctgggacaaatacctaaaagaaacatgttcagtcccagcgcctgtccattgcttcaagcagtcctacacacctccaagcaacgagttcaagatcagtcgactcggaccgatg

SEQ ID NO: 554 - DNA, 203 bp, synthetic construct
  source 1..203: mol_type = other DNA
ggcgcgccagtccttcgcgccctttggcaagctcggactcatcttctggggattgccgcagtgacccagtaatgggaagggattgatttccaccttgcggggtatggggcgctcttaggaggactctggagaagtagttgtcctgggagaggagcgatcttaatcctgctgcatgacgggaggacaaacgactcggaccgatg

SEQ ID NO: 555 - DNA, 203 bp, synthetic construct
  source 1..203: mol_type = other DNA
ggcgcgccagtcctgcgcatgagcagtgctgctcccaacccgccagtcgcggtctccggcgccagctacgccgctgccgctgtcactatggcccattacaaagccgccgactcgaagcgtgagcagttccggaggtacttggagaagtcgggggtgctggacacgctgaccaaggtgttggtagccttcgactcggaccgatg

SEQ ID NO: 556 - DNA, 203 bp, synthetic construct
  source 1..203: mol_type = other DNA
ggcgcgccagtcctttgcgctccccaagtctctctcgtgcgcagagcccaggctgcgcttccctggtcaggcacggcacgtctggccggccgccaggatgcaggccccgcacaaggagcacctgtacaagttgctggtgattggcgacctgggcgtggggaagaccagtatcatcaagcgctacgtgccgactcggaccgatg

SEQ ID NO: 557 - DNA, 203 bp, synthetic construct
  source 1..203: mol_type = other DNA
ggcgcgccagtcctgttattggttggcagttcagccaatgagcgggcctgttactagtttgcggcatcctgtggtataggggaagcgctccgggcctggaatccctacgcgtccctttgggtttagcacgatgagctcaatcggcactgggtatgacctgtcagcctctacattctctcctgacggaacgactcggaccgatg

SEQ ID NO: 558 - DNA, 203 bp, synthetic construct
  source 1..203: mol_type = other DNA
ggcgcgccagtcctgtcccttccctgggcaccaagagatgggctccccttgcctggcagagaaacagctggaaactggctccctgagacaagaagactggtaaacccagcgcttcctacctggtggtcttcagcaatgcccatgccttccagagacgggggcctgcatcccagacaccaccactatggcgactcggaccgatg

SEQ ID NO: 559 - DNA, 203 bp, synthetic construct
  source 1..203: mol_type = other DNA
ggcgcgccagtcctagccagcggacgtccaggaaccgggatgcctccagcagtgaggcggtcagcctgcagcatgggatggctgtggatctttggggcagccctggggcagtgtctgggctacagttcacagcagcaaagggtgccatttcttcagcctcccggtcaaagtcaactgcaagcgagttacgactcggaccgatg

SEQ ID NO: 560 - DNA, 203 bp, synthetic construct
  source 1..203: mol_type = other DNA
ggcgcgccagtcctacgagcctttccggtgctatgccccggaagcggaagtgcgatcttcgggctgtcagagttggtctgttactcggtggtggcggagtctacggaagccgttttcgcttcacttttcctggctgtagagcgctttccccctggcgggtgagagtgcagagacgaaggtgcgagatgcgactcggaccgatg

SEQ ID NO: 561 - DNA, 203 bp, synthetic construct
  source 1..203: mol_type = other DNA
ggcgcgccagtcctagagggcgagggcgagggcagagggcgctggcggcagcggccgcggaagatgagcagcagctgctcagggctgagcagggtcctggtggccgtggctacagccctggtgtctgcctcctccccctgcccccaggcctggggccccccaggggtccagtatgggcagccaggcagcgactcggaccgatg

SEQ ID NO: 562 - DNA, 203 bp, synthetic construct
  source 1..203: mol_type = other DNA
ggcgcgccagtcctgacgtcgcggtgacgtcacggagttgccatggcgtcgctgagcggcctggcgtcggcgctggagtcgtacaggggccgggaccgcctgatccgagtgctggggtactgctgccagctggttggtggagttctggttgaacagtgtcccgccaggtccgaagtggggacacgtctcgactcggaccgatg

SEQ ID NO: 563 - DNA, 203 bp, synthetic construct
  source 1..203: mol_type = other DNA
ggcgcgccagtcctgcggaggaaggagactagagcaggaagagcagcggcgaggcggcggtggtggctgagtccgtggtggcagaggcgaaggcgacagctctaggggttggcaccggccccgagaggaggatgcgggtccggatagggctgacgctgctgctgtgtgcggtgctgctgagcttggcccgactcggaccgatg

SEQ ID NO: 564 - DNA, 203 bp, synthetic construct
  source 1..203: mol_type = other DNA
ggcgcgccagtcctcggcctcgggacgccgtgacgttgcgttcctccagtcccttgccacctccctctttcttcccctctggggaagctcagtgctggacttccgaagaccttttacgacattgagtctcggagttggtctcagcgccggatccacttttcggcaaagtgacgtggacgtcaacagcacgactcggaccgatg

SEQ ID NO: 565 - DNA, 203 bp, synthetic construct
  source 1..203: mol_type = other DNA
ggcgcgccagtcctacgggaaagttggtccgagttcccagagtttccctctgtggtgccctaggctcggccggccggtgccccggctcctttcctcctttcggccttcgccgtccaccaggtccctctctctgtccccggccgccatggagcagccgccggcgcctaagagtaaactaaaaaagctgacgactcggaccgatg

SEQ ID NO: 566 - DNA, 203 bp, synthetic construct
  source 1..203: mol_type = other DNA
ggcgcgccagtcctcagacttgggtttgaaatccacgtatgaccctggcccgttggcctctctgagcccggcttcctcctctacaaaatggagatcgcaaccgtccccacccgatagcgagagggcgcacacccgcattccaggctggacgggtctctgggcagcgggctcctccccgcccagggcgccgactcggaccgatg

SEQ ID NO: 567 - DNA, 203 bp, synthetic construct
  source 1..203: mol_type = other DNA
ggcgcgccagtcctgaatgaatgacttccgtctgggacttggttgcaaataaagccgagctgcatcttagggaggggtggagactttgcccctgtttgtgccttgaagccagcagggccttgccctaggatacctccacccaccctcctgcccagcaagtggaggcccgcagcccgagtgtcgccgcccgactcggaccgatg

SEQ ID NO: 568 - DNA, 203 bp, synthetic construct
  source 1..203: mol_type = other DNA
ggcgcgccagtcctatctccccaccctctcttctccaccagccaacgtccgggaaaaacgagtttttcacgactgaaaacaacatagcaaaataagccaagatgtctgtggatccaatgacctacgaggcccagttctttggcttcacgccacaaacgtgcatgcttcggatctacattgcatttcaacgactcggaccgatg

SEQ ID NO: 569 - DNA, 203 bp, synthetic construct
  source 1..203: mol_type = other DNA
ggcgcgccagtcctcactgacagcgtgagcccgcggcggctgctgccatggtggctggcggccgggtaagggtctgagtggatctcctgccaggccagagcgccttcgggggccgcggcggaaggccaggagtttgcagccagggcgccgggtttgtggtctgcagtgtcgtgaggctgaggtgcagccgactcggaccgatg

SEQ ID NO: 570 - DNA, 203 bp, synthetic construct
  source 1..203: mol_type = other DNA
ggcgcgccagtccttttggaaaaatgactcagtaagttcagcgcgcccgctccggccggccctgcgcctcccgccgcgcccgggatgtattcgtccccgctctgcctcacccaggatgagttccacccgttcatcgaggccctgctgcctcacgtccgcgccttcgcctacacctggttcaacctgcacgactcggaccgatg

SEQ ID NO: 571 - DNA, 203 bp, synthetic construct
  source 1..203: mol_type = other DNA
ggcgcgccagtcctgacgaaggggaaggaggagaagcgcttaaagcggcgggagcggtgcgggagaggggttggacccagggctgaggcaggcccccccctccctcccgcctcagtggatcatgcccagggcggcagcggcggcggttgcgggggggaagtgactgggcggtgccggcgccggagacgcgactcggaccgatg

SEQ ID NO: 572 - DNA, 203 bp, synthetic construct
  source 1..203: mol_type = other DNA
ggcgcgccagtcctgccccgcgcggatggcgacggaaggggaggccgctcggcctggcctggagggagacctcgctctgccccgcgtcccagccatggcgacatcctcggccgcgctgccccgaatactcggcgcgggtgcccgggccccgtcgcgctggttgggctttctcgggaaggcgacccccccgactcggaccgatg

SEQ ID NO: 573 - DNA, 203 bp, synthetic construct
  source 1..203: mol_type = other DNA
ggcgcgccagtcctcaacatggcggcggcggtagattagggccgcgggtcggagcactcaccgccgctgggggaccctgtcggaagcaactgccgccgccgcctctttcatctcttctggggcaggggccagggccaggttttacacatccataagtagacctttttggagcctcaccagccaattcacgactcggaccgatg

SEQ ID NO: 574 - DNA, 203 bp, synthetic construct
  source 1..203: mol_type = other DNA
ggcgcgccagtcctctcgaccctgaaacttggagcagggtgggggttcagtatgaagccccgggaccgccccgcccctggccgcactgaccggatactgggggtcatggggggcatgctgcgcgcatgcgccctccctgggcaggaggggcccccaaggagaagccctctagggttggtgggtaccgacgactcggaccgatg

SEQ ID NO: 575 - DNA, 203 bp, synthetic construct
  source 1..203: mol_type = other DNA
ggcgcgccagtcctgcagtcagccggggacctcgtccgagcccacccgcctttggaggctccatctccattctgggttctgatgatgccactacttgtcacattgtggtcctgaggcacacaggtaatggggccacctgcttgacacattgtgacggaaccgacaccaaagctgaggtccccttgatccgactcggaccgatg

SEQ ID NO: 576 - DNA, 203 bp, synthetic construct
  source 1..203: mol_type = other DNA
ggcgcgccagtcctgacatttacatcctgcccagcgacaactctggacaagtcagtcccccagagtctccaactgtgaccacttcctggcagtctgagagcttacctgtgtcactgtcagctagccagagttggcacacagaaagcctgccagtgtcactaggccctgagtcctggcagcagattgcacgactcggaccgatg

SEQ ID NO: 577 - DNA, 203 bp, synthetic construct
  source 1..203: mol_type = other DNA
ggcgcgccagtcctcagaagattgtgggtgtagtggccacagccttacaggcaggcaggggtggttggtgtcaacaggggggccaacagggtaccagagccaagaccctcggcctcctcccccgccgccttcctgcagatctgcttggctttgaggaagagtggcagtactgcctcactgcataagggcgactcggaccgatg

SEQ ID NO: 578 - DNA, 203 bp, synthetic construct
  source 1..203: mol_type = other DNA
ggcgcgccagtcctaaaccatgggggcggaagaggtgctgggcaggaggcggaagaggtgctgtgcaggaggcgggcgggcgcggttctttccggaaggattgaatctcctttagccccgcccgcctccgtagctgcctgaagtagtgcagggtcagcccgcaagttgcaggtcatggcgctggctgccgactcggaccgatg

SEQ ID NO: 579 - DNA, 203 bp, synthetic construct
  source 1..203: mol_type = other DNA
ggcgcgccagtcctcctcctttccctttcggattcccgacgctgtggttgctgtaaggggtcctccctgcgccacacggccgtcgccatggtgaagctgagcaaagaggccaagcagagactacagcagctcttcaaggggagccagtttgccattcgctggggctttatccctcttgtgatttacctcgactcggaccgatg

SEQ ID NO: 580 - DNA, 203 bp, synthetic construct
  source 1..203: mol_type = other DNA
ggcgcgccagtcctcggccttccgtccgctgcctccgtccgattctgcgtctgcttgctgaggaggcggattaggggggcgcggagtctcttcccttgagtgcataggtcccggttggtagagggtttgagtccgcatcgccacagctgaaggctgcgagggactaagagcagaatatatctttagaacgactcggaccgatg

SEQ ID NO: 581 - DNA, 203 bp, synthetic construct
  source 1..203: mol_type = other DNA
ggcgcgccagtcctctcctcctcgtatttccccctcggtcctttacgccgcctttccccctcatttgcagatgctgcatcccctttttggaattgctcaaccaggtggtaaccggcgccgcttcctggccttgggaggtggttcctttcttaacccacaagaacctctcccaagagaacttggtcctgcgactcggaccgatg

SEQ ID NO: 582 - DNA, 203 bp, synthetic construct
  source 1..203: mol_type = other DNA
ggcgcgccagtcctgcgtcctggtgtacgggctggccctggacgtcacttccgctggcggcagtggcgtcacttcctgctcttgggggcggggcatccgtgtccttgcggtgctgggcagcagaccgtccaaaccgacacgcgtggtatcctcgcggtgtccggcaagagactaccaagacagacgctcgactcggaccgatg

SEQ ID NO: 583 - DNA, 203 bp, synthetic construct
  source 1..203: mol_type = other DNA
ggcgcgccagtcctccctgagttcagggaatttccccagcatcccaaagcttgagtttcctgccagtcgggagggatgaatgcagataaagggagtgcagaaggcacgaggaaaccaaagtgctctgtatcctccagtctccgcgcctccacccagctcaggaacccgcgaaccctctcttgaccactcgactcggaccgatg

SEQ ID NO: 584 - DNA, 203 bp, synthetic construct
  source 1..203: mol_type = other DNA
ggcgcgccagtcctagttcacccactagaggcaaagacgtaagagagctaccagcgtattgagaggagatacacaggcactacgagaatggagtttagaagaaggtcagagccctgggcagtgttgggccaggctttagggcctcaggagtgcaagtagctgatgaagtatgtcgcattttttatgaccgactcggaccgatg

SEQ ID NO: 585 - DNA, 203 bp, synthetic construct
  source 1..203: mol_type = other DNA
ggcgcgccagtcctcaacggggacgtcctgatagatcctctgctccaataggcaactccggccttccctgccctgacctggaacctctgggagggctgcagagtaagtgccgcctctgcgctccgacggaggcacgaggcctgtggagtaggtccctctgttccgacaggtgcgacacttggcgctcccgactcggaccgatg

SEQ ID NO: 586 - DNA, 203 bp, synthetic construct
  source 1..203: mol_type = other DNA
ggcgcgccagtcctaaacgcaagtgaagccgagtcacaggacccggatgttgtcagttcgacggtaaacgaccctgccagcttccaagagggcggcttcactgtgcgaataggtgagaagccaagaaggaggcgcgctggagttacttccgcccggttctccttcccgcagtctgcagccggagtaagcgactcggaccgatg

SEQ ID NO: 587 - DNA, 203 bp, synthetic construct
  source 1..203: mol_type = other DNA
ggcgcgccagtcctgcaaggcgggtggctccaccctgcgtcgggcctcagtcagcccccgggggaggccatgaacgccacggggaccccggtggcccccgagtcctgccaacagctggcggccggcgggcacagccggctcattgttctgcactacaaccactcgggccggctggccgggcgcgggggcgactcggaccgatg

SEQ ID NO: 588 - DNA, 203 bp, synthetic construct
  source 1..203: mol_type = other DNA
ggcgcgccagtccttgtgacttcacctcagttttgtgatccgtaaaatggacaaattcgaagctacttcacagtgctgttgagaggattaaatgaaacaatgcttgtaaagctctttgcaggagggagcctcggaagcagggcctggccggcagagcacacctgctgtcaccagggaccacaggcagccgactcggaccgatg

SEQ ID NO: 589 - DNA, 203 bp, synthetic construct
  source 1..203: mol_type = other DNA
ggcgcgccagtcctagcctcccttgccgcctccctcctctgcccggccgcagcagtgcacatggggtgttggaggtagatgggctcccggcccgggaggcggcggtggatgcggcgctgggcagaagcagccgccgattccagctgccccgcgcgccccgggcgcccctgcgagtccccggttcagcccgactcggaccgatg

SEQ ID NO: 590 - DNA, 203 bp, synthetic construct
  source 1..203: mol_type = other DNA
ggcgcgccagtcctccgggagcccgcgcaccctctctgggctccacccaggctgagagctggggtcgtggcggcgggggtggagagcgcgcccctagaggacctggggacacgggtgactcagacgtgactcaggaaggctcaggtcctgctggcatccgcggaggtgagacggtgatcagagctgggcgactcggaccgatg

SEQ ID NO: 591 - DNA, 203 bp, synthetic construct
  source 1..203: mol_type = other DNA
ggcgcgccagtccttccggttcctagcgttaactgcgaccggggttcagcgctcgggtgaggagctggtggcgtcggcaggttcgaggcgattcgaggtgagggggtcaagcggagaggctcggagtcggagaaagctgtcgcgacccagccacccagggtctggggtcggtgggagctccagctaggcgactcggaccgatg

SEQ ID NO: 592 - DNA, 203 bp, synthetic construct
  source 1..203: mol_type = other DNA
ggcgcgccagtccttcgcaacgtcacgggcaagggccgccattttgactgagcaaccctagtgacaggagccgaagcagcagcgcaggttgtccccgtttcccctcccccttcccttctccggttgccttcccgggccccttacactccacagtcccggtcccgccatgtcccagaaacaagaagaagcgactcggaccgatg

SEQ ID NO: 593 - DNA, 203 bp, synthetic construct
  source 1..203: mol_type = other DNA
ggcgcgccagtcctgattgtgggaaggcagctgaactcggcgcctggaaagatggaggcagcggagacagaggcggaagctgcagccctagaggtcctggctgaggtggcaggcatcttggaacctgtaggcctgcaggaggaggcagaactgccagccaagatcctggttgagtttgtggtggactccgactcggaccgatg

SEQ ID NO: 594 - DNA, 203 bp, synthetic construct
  source 1..203: mol_type = other DNA
ggcgcgccagtcctatgccgaacttctgcgctgcccccaactgcacgcggaagagcacgcagtccgacttggccttcttcaggttcccgcgggaccctgccagatgccagaagtgggtggagaactgtaggagagcagacttagaagataaaacacctgatcagctaaataaacattatcgattatgtcgactcggaccgatg

SEQ ID NO: 595 - DNA, 203 bp, synthetic construct
  source 1..203: mol_type = other DNA
ggcgcgccagtccttgtccctagagaacgaggactctgaaggcgggacatttgggcgacccccgggcggggccagccattaaacagtcccacttctgtgccagacactgaactgggctcttgacgggcatcatctcttaatcctcagaacatcccagggagctccacaggatccccatatcctgggcccgactcggaccgatg

SEQ ID NO: 596 - DNA, 203 bp, synthetic construct
  source 1..203: mol_type = other DNA
ggcgcgccagtcctaaccggaaggggggctgtgaggacgtgttccgaggaagccagagccggagccgtggcctgcggggccggcgacatggatcccctgttccagcaaacgcacaagcaggtccacgagatccagtcttgcatgggacgcctggagacggcagacaagcagtctgtgcacatagtagacgactcggaccgatg

SEQ ID NO: 597 - DNA, 203 bp, synthetic construct
  source 1..203: mol_type = other DNA
ggcgcgccagtcctggtcggtgcgcgcttctcccgaggtggaacgggcggcagtcaagcgccggcgttctctgccgtcaccctttccttgccggccggcacttcggctgcagagttttgcccacgcttcgagacttagggagcagtgcctttcagaatttgcccactcatctggtataactggttctgcgactcggaccgatg

SEQ ID NO: 598 - DNA, 203 bp, synthetic construct
  source 1..203: mol_type = other DNA
ggcgcgccagtcctgccccagccacgcctctgagtcgcgctgcgcaggcgccattgggcagagggattggcaagcttgcgtgccccagcgacacaggcctcgaggctgtctctgacaagtgttcacaggaggtggggacgcctctgcgcgaggaacgaggagctacgggcctgggcccggttattgcccgactcggaccgatg

SEQ ID NO: 599 - DNA, 203 bp, synthetic construct
  source 1..203: mol_type = other DNA
ggcgcgccagtcctgggcgtgcacgcgggcgcggctgcgtgagaggcgcgcggcggcgcagtaaacagtctccttccacaaaaccatggcgtcgctcaaatgtagcaccgtcgtctgcgtgatctgcttggagaagcccaaataccgctgtccagcctgccgcgtgccctactgctcggtagtctgctcgactcggaccgatg

SEQ ID NO: 600 - DNA, 203 bp, synthetic construct
  source 1..203: mol_type = other DNA
ggcgcgccagtcctccagcaggcatgcctccttggtctcatgttgaccttagagtttgggattctggaattcgatccttcatggataggcagctggacacagaggtcgtgggtgagctggaggagcaggcccggatgtgagctgttctccatagtggtgttcggctccatcgtgaacgagggctacctcgactcggaccgatg

SEQ ID NO: 601 - DNA, 203 bp, synthetic construct
  source 1..203: mol_type = other DNA
ggcgcgccagtcctaggaccctcgtgacttggccgagacaggggaagggagaagttgagtcgggcaaggaagagatgctaaagcctggggaattaagaacatgccagaatcatcccgagggagtctggaattagggagggtgaggactcgctaggatcgtcctgtggatctggctacagcaggagctgcgactcggaccgatg

SEQ ID NO: 602 - DNA, 203 bp, synthetic construct
  source 1..203: mol_type = other DNA
ggcgcgccagtcctaaacaatgcctgatatgtggagtaaagtcctcctccttggcctttgtcaagtcatcccctcttctcctcaggaactgctcaaacctgtgccccaaagatgagggcccaggaggacctcgagggccggacacagcatgaaaccaccagggacccctcgaccccgctacccacagacgactcggaccgatg

SEQ ID NO: 603 - DNA, 203 bp, synthetic construct
  source 1..203: mol_type = other DNA
ggcgcgccagtcctccgttcccctttcccctcccttccctatccccgacgaccggatcctgaggaggcagctgcggtggcagctgctgagttctcggtgaaggtatttcatttctcctgtcccctcccctccccaccccatctattaatattattcttttgaagattcttcgttgtcaagccgccaaacgactcggaccgatg

SEQ ID NO: 604 - DNA, 203 bp, synthetic construct
  source 1..203: mol_type = other DNA
ggcgcgccagtcctcggcggcggcggtgcttacagcctgagaagagcgtctcgcccgggagcggcggcggccatcgagacccacccaaggcgcgtccccctcggcctcccagcgctcccaagccgcagcggccgcgccccttcagctagctcgctcgctcgctctgcttccctgctgccggctgcgcccgactcggaccgatg

SEQ ID NO: 605 - DNA, 203 bp, synthetic construct
  source 1..203: mol_type = other DNA
ggcgcgccagtcctgcatttgtctggccttcccttttactgctggctgggaaggaggagcatcagaccacagatcctggaaggcacttctctccctgactgctgctcacactgccgtgagaacctgcttatatccaggaccaaggaggcaatgccaggaagctggtgaagggtttcctctcctccacccgactcggaccgatg

SEQ ID NO: 606 - DNA, 203 bp, synthetic construct
  source 1..203: mol_type = other DNA
ggcgcgccagtcctacgcagaagagtccaccaccggacagccaggtagccgccgcgtccctcgcacacgcagagtcgggcggcgcggggtctcccttgcgcccggcctccgccctctcctcctctcctttccccttcttctcgctgtcctctcctctctcgctgcccgcgtttgcgcagccccgggcccgactcggaccgatg

SEQ ID NO: 607 - DNA, 203 bp, synthetic construct
  source 1..203: mol_type = other DNA
ggcgcgccagtcctagtgcgctgtgctcgaggggtgccggccaggcctgagcgagcgagctagccagcaggcatcgagggggcgcggctgccgtccggacgagacaggcgaacccgacgcagaagagtccaccaccggacagccagcacatccacgatggagcgtcttgtcgcccgtgggaccttccccgactcggaccgatg

SEQ ID NO: 608 - DNA, 203 bp, synthetic construct
  source 1..203: mol_type = other DNA
ggcgcgccagtcctcggaggctcggccacaacgccactggattggtggtagggcggggcgggccacagtctccagcctgaagcggaagtggaggaaagatggaggaccatcagcacgtgcccatcgacatccagaccagcaagctgctcgattggctggtggacagaaggcactgcagcctgaaatggcgactcggaccgatg

SEQ ID NO: 609 - DNA, 203 bp, synthetic construct
  source 1..203: mol_type = other DNA
ggcgcgccagtcctgggtcggccggcagggggcggggccgggcatggtaacggctcggaagcctaggaggctgggccggagggaggcggaggaaccggtgttcgccgccgccgctgcttcagcttattccttgtggcctctgcgggtcctgcctcagccatgatgatccacggcttccagagcagccacgactcggaccgatg

SEQ ID NO: 610 - DNA, 203 bp, synthetic construct
  source 1..203: mol_type = other DNA
ggcgcgccagtccttggctagttcaggcggaaggagcagtcctctgaagcttgaggagcctctagaactatgagcccgaggccttcccctctcccagagcgcagaggctttgaaggctacctctgggaagccgctcaccgtcggaagctgcgggagctgaaactgcgccatcgtcactgtcggcggcccgactcggaccgatg

SEQ ID NO: 611 - DNA, 203 bp, synthetic construct
  source 1..203: mol_type = other DNA
ggcgcgccagtccttcccgggtccggcgcggggaaggcagcctggcgcgcgctaattgcctattggcctgtgctgccggctcgcagcccgggtggacccgagccacgccccctggagtgcgccggaaagccgggcgcgctagagctcgcgggaggccatcatgaggaagccacgagcagccgtgggaacgactcggaccgatg

SEQ ID NO: 612 - DNA, 203 bp, synthetic construct
  source 1..203: mol_type = other DNA
ggcgcgccagtcctatcttgtagaaaatttcagctgtagcccttggactagaagctgaaataacagaagctgtgtacgatgcattagggtattgaagaaaattaacttttgaattaaatatttggaatataaggaaataaggaaagttgactgaaaatggggcggaagaaaatacaaatcacacgcatcgactcggaccgatg

SEQ ID NO: 613 - DNA, 203 bp, synthetic construct
  source 1..203: mol_type = other DNA
ggcgcgccagtcctcttcccgccagtcccctaaccctgaggctgccgcgcggcggtcactgcgccggggtagtgggccccagtgttgcgctctctggccgttccttacactctgcttcaggctccagtgcaggggcgtagtgggatatggccaactcgggctgcaaggacgtcacgggtccagatgagcgactcggaccgatg

SEQ ID NO: 614 - DNA, 203 bp, synthetic construct
  source 1..203: mol_type = other DNA
ggcgcgccagtccttctctccacgaggctgccggcttaggacccccagctccgacgtaagtccctctcgtgcgccacctccatccgctgcccctctgcccacgggccgggctcagatgtcgccctctggtcgcctgtgtcttctcaccatcgttggcctgattctccccaccagaggacagacgttgacgactcggaccgatg

SEQ ID NO: 615 - DNA, 203 bp, synthetic construct
  source 1..203: mol_type = other DNA
ggcgcgccagtcctccctggccacaccctccgcctggacgcagcagccaccgccgcgtccctctctccacgaggctgccggcttaggacccccagctccgacatgtcgccctctggtcgcctgtgtcttctcaccatcgttggcctgattctccccaccagaggacagacgttgaaagataccacgtccgactcggaccgatg

SEQ ID NO: 616 - DNA, 203 bp, synthetic construct
  source 1..203: mol_type = other DNA
ggcgcgccagtcctttgggaaggggccagattgcatcagacagggcctgatgggctggagccagactgtggtctgaggaggagacacagccttataagctgagggagtggagaggcccggggccaggaaagcagagacagacaaagcgttaggagaagaagagaggcagggaagacaagccaggcacgcgactcggaccgatg

SEQ ID NO: 617 - DNA, 203 bp, synthetic construct
  source 1..203: mol_type = other DNA
ggcgcgccagtccttgggctacagtgggccgctctgcctcgctcccgcccgcctgcctcagtctccccagctctctgccacccccctcggaccagtgcctcttagatgtcgccctctggtcgcctgtgtcttctcaccatcgttggcctgattctccccaccagaggacagacgttgaaagataccaccgactcggaccgatg

SEQ ID NO: 618 - DNA, 203 bp, synthetic construct
  source 1..203: mol_type = other DNA
ggcgcgccagtcctagggaggggcagctctgcatggcctgattcctgcaccccacctttgccccctcacacctcctctcatctcccgtttttgaagaggaggaccctgtcacatctggacaattctgcaagaactctgtagaactgacttcactgtgaaccaggctccagaagtcaacagaaacaaaacgactcggaccgatg

SEQ ID NO: 619 - DNA, 203 bp, synthetic construct
  source 1..203: mol_type = other DNA
ggcgcgccagtcctcccactgcggaagagggcagcccggcaagcccgggccctgagcctggacccttagcggtgccgggcagcactgccggcgcttcgcctcgccggacgtccgctcctcctacactctcagcctccgctggagagacccccagccccaccattcagcgcgcaagataccctccagatcgactcggaccgatg

SEQ ID NO: 620 - DNA, 203 bp, synthetic construct
  source 1..203: mol_type = other DNA
ggcgcgccagtccttcaaatcaaatcagaaagacatccttcggaatgtgttcagaaccaattagtgacaacactgaagaccagaaaggcaagctgaagacaccagacttcgcttgaagggcaaacaagaaatccaaacatcatgtcaatggcaacagaacagtcgaacctttcccagagggaacacagcgactcggaccgatg

SEQ ID NO: 621 - DNA, 203 bp, synthetic construct
  source 1..203: mol_type = other DNA
ggcgcgccagtccttggagcagcgcgcgcaagcgaggccaggggaaggtgggcgcaggactttagccggttgagaaggatcaagcaggcatttggagcacaggtgtctagaaacttttaaggggccggttcaagaaggaaaagttcccttctgctgtgaaactatttggcaagaggctggagggcccacgactcggaccgatg

SEQ ID NO: 622 - DNA, 203 bp, synthetic construct
  source 1..203: mol_type = other DNA
ggcgcgccagtccttggactctcttgcagccaacttcccatcagatcaccctgctggacttgcagaccggaatggggctcgcctaaggagccgagcgctgcggaggctgctgcgtgttggatgggagtgggagggggctggagcgagatttccagggcgcagtcctccggggcgttacgccgggcatacgactcggaccgatg

SEQ ID NO: 623 - DNA, 203 bp, synthetic construct
  source 1..203: mol_type = other DNA
ggcgcgccagtccttgagtctcgctggagctcttctcgcccgcccacctcatctcaacccactttccgcggggagcggcgccaagctgggccttcctcggatcaggcgtcccctgaagtcggcacgcccctctgcgtcccccttcggtcccgctaggaccccgtccgggctgccgtcgcctcgtcgctcgactcggaccgatg

SEQ ID NO: 624 - DNA, 203 bp, synthetic construct
  source 1..203: mol_type = other DNA
ggcgcgccagtcctcgcactcactgctcgcgccgggcgcgctccgccagctccgtgctccccgcgccaccctcctccgggccgcgctccctaagggatggtactgaatttcgccgccacaggagaccggctggagcgcccgccccgcggcctcgcctctcctccgagcagccagcgcctcgggacgcgcgactcggaccgatg

SEQ ID NO: 625 - DNA, 203 bp, synthetic construct
  source 1..203: mol_type = other DNA
ggcgcgccagtcctgtgcagaactgccagtcccctgacacgctgtgccccacccactgcagcccagtgctgaatgaaccctgcccagaggtgtctgtagtgagcttctgccctagtgacttttgagccggccaggttgcagcgcggacacactcgcaggtcgctgtggccccagcctcgcctgacagacgactcggaccgatg

SEQ ID NO: 626 - DNA, 203 bp, synthetic construct
  source 1..203: mol_type = other DNA
ggcgcgccagtcctacctctgcggcgtcactgggagcccgacggaaaactgcgctaaaggcttgtctttcccctgcccgaccgaaggagccgaccttgcctgcgctacagcttccttattttcgtcgcctgttctcctgatcctgcgtgttctaaaaaccccttaggctttccatgggttcccagacccgactcggaccgatg

SEQ ID NO: 627 - DNA, 203 bp, synthetic construct
  source 1..203: mol_type = other DNA
ggcgcgccagtcctccctcggatggcacaaagggactgttttcttactcttagtctgagtgactgccaaggaaggcaaaggtagagcaactggatctctggctctccacatagcttctgatctcagaccttactaaaatgctttctgggcccaaggacaaagctcacatgaacaaatgattttgagtccgactcggaccgatg

SEQ ID NO: 628 - DNA, 203 bp, synthetic construct
  source 1..203: mol_type = other DNA
ggcgcgccagtcctaaggcagcctgcaaggcgctcatcccgcggaggaggcacgctctcggcgctcactgctctccacgccggggacatttccaccgaatgtagcatgaaagggctctgctctacgtgccagccttgggtgagagctgatgctgaagacaccgcggtgggattccagctgtctgattacgactcggaccgatg

SEQ ID NO: 629 - DNA, 203 bp, synthetic construct
  source 1..203: mol_type = other DNA
ggcgcgccagtccttggcccgacgccgacggcctctcagtggctcccggaggacccggcgggcccagtgttggagagctgaaggtcaggccaggacagtgagacctgactccttgctcctaccagcctactatggcttaagacccagggccagggtcccgttgatgtaacagagcagaggaccagcagcgactcggaccgatg

SEQ ID NO: 630 - DNA, 203 bp, synthetic construct
  source 1..203: mol_type = other DNA
ggcgcgccagtcctgacagcagcgcaccttcccccatcccttccccttatcccccagcccaaaagggcccggtctgcgccccacccccgcccgtccgcccgctacgccgccgccatgtcggcgcaggcccagatgcgcgcgatgctggaccagttgatgggcacctcccgggacggttcaatgtatctcgactcggaccgatg

SEQ ID NO: 631 - DNA, 203 bp, synthetic construct
  source 1..203: mol_type = other DNA
ggcgcgccagtcctggcttgttcgggcctgagctggcgctacgaagttccggtccaggtctctgacttcgggcttgttcgctggtggcgtcggagccgagccggactggtcaggatgatcacggacgtgcagctcgccatcttcgccaacatgctgggcgtgtcgctcttcttgcttgtcgttctctacgactcggaccgatg

SEQ ID NO: 632 - DNA, 203 bp, synthetic construct
  source 1..203: mol_type = other DNA
ggcgcgccagtcctaactcttttgagtccagaatctcagaatcgggcgttgggctttgccgggtgcttcagatcaatggatgagttccacccgttcatcgaggcactgctgcctcacgtccgcgctttctcctacacctggttcaacctgcaggcgcggaagcgcaagtacttcaagaagcatgaaaacgactcggaccgatg

SEQ ID NO: 633 - DNA, 203 bp, synthetic construct
  source 1..203: mol_type = other DNA
ggcgcgccagtcctaagccccgccccgcgccctgcgtcgggttaagagggggttcctcgccagccaggtgctcgtcatgcgcaatgtggcgctgcggcgggcggcagggcctgtgtgtgctgaggcggctgagcggcggacatgcacaccacagagcgtggcgatggaacagtaaccgggcttgtgagcgactcggaccgatg

SEQ ID NO: 634 - DNA, 203 bp, synthetic construct
  source 1..203: mol_type = other DNA
ggcgcgccagtcctcactgtctgaaacagtcgcgtaaggggtcgccactgggacactgtgaaccaggagtgagtcggagctgccgcgctgcccaggccatggactgtgaggtcaacaacggttccagcctcagggatgagtgcatcacaaacctactggtgtttggcttcctccaaagctgttctgaccgactcggaccgatg

SEQ ID NO: 635 - DNA, 203 bp, synthetic construct
  source 1..203: mol_type = other DNA
ggcgcgccagtcctgaaggaggaagcgcgcggggcgccataaggaggaagcgggtagtcgaccgtgtccgcgcgcctgggagacgctgcctcggcccggacgcgcccgcgcccccgcggctggagggtggtcgccactgggacactgtgaaccaggagtgagtcggagctgccgcgctgcccaggccacgactcggaccgatg

SEQ ID NO: 636 - DNA, 203 bp, synthetic construct
  source 1..203: mol_type = other DNA
ggcgcgccagtcctggggcagtacttccgggtcaggtgggccggctgtcttgaccttctttgcggctcggccattttgtcccagtcagtccggaggctgcggctgcagaagtaccgcctgcggagtaactgcaaagatgctgtccgtgcgcgttgctgcggccgtggtccgcgcccttcctcggcgggcgactcggaccgatg

SEQ ID NO: 637 - DNA, 203 bp, synthetic construct
  source 1..203: mol_type = other DNA
ggcgcgccagtcctaccaatcccgggctcagcaagttctcgcgataccgtgagatctccagtcctgacgacaccgccgctgaaatgttagtgagactgtagggtgggcggtgcgagcggcggttagctcccagttcggcctctgaggaaaacgggcgttcgcctgcggttggtccgactgttagcaaccgactcggaccgatg

SEQ ID NO: 638 - DNA, 203 bp, synthetic construct
  source 1..203: mol_type = other DNA
ggcgcgccagtcctctaaacgaaagagccacgacgctctgcgcatgtgcgctcttcgcaagctgaaaatcttgcggggagctctttagcaagttccgccttccagcctgaagcgcatgcgcagcctcggttccgttgcgtagcgtgtccctcagtgggacactgcagggtgcggggacaactacgaagcgactcggaccgatg

SEQ ID NO: 639 - DNA, 203 bp, synthetic construct
  source 1..203: mol_type = other DNA
ggcgcgccagtcctaacgccaagtaggggattgcgttccctccagtcgcagagtttccctcttgtcgcccaggctggagtgaagtggcacgatctcggcttactgcaagctccgcctcccgggttcacgccattctcctgcctcagcctcccgagtagctgggactacagaccctatcagatttggatcgactcggaccgatg

SEQ ID NO: 640 - DNA, 203 bp, synthetic construct
  source 1..203: mol_type = other DNA
ggcgcgccagtcctgtcccgtcggtctcggcgccgggaagaggcggtggcgctgcccgcggtggcgggggttggcgacggagcgcgttggtgccaggaccggggtccgaggcgcgctctccgcccacagaaatgagccgtcagactgctacagcattacctaccggtacctcgaagtgtccaccatcccgactcggaccgatg

SEQ ID NO: 641 - DNA, 203 bp, synthetic construct
  source 1..203: mol_type = other DNA
ggcgcgccagtcctaaaacaattaaaaagacactgaacccaaaatggaatgaagaattttatttcagggtaaacccatctaatcacagactcctatttgaagtatttgacgaaaatagactgacacgagacgacttcctgggccaggtggacgtgccccttagtcaccttccgacagaagatccaacccgactcggaccgatg

SEQ ID NO: 642 - DNA, 203 bp, synthetic construct
  source 1..203: mol_type = other DNA
ggcgcgccagtcctcgggcgtggcatgcatgaaaagtaaacatcagagacctgaagaagcttataaaatagcttgggagaggccagtcaccaagacaggcatctcaaatcggctgattctgcatctggaaactgccttcatcttgaaagaaaagctccaggtcccttctccagccacccagccccaagcgactcggaccgatg

SEQ ID NO: 643 - DNA, 203 bp, synthetic construct
  source 1..203: mol_type = other DNA
ggcgcgccagtcctgacgcactcgcgctgcggccagcgcccgggcctgcgggcccgggcggcggctgtgttgcgcagtcttcatgggttcccgacgaggaggtctctgtggctgcggcggcggctgctaactgcgccacctgctgcagcctgtccccgccgctctgaagcggccgcgtcgaagccgaacgactcggaccgatg

SEQ ID NO: 644 - DNA, 203 bp, synthetic construct
  source 1..203: mol_type = other DNA
ggcgcgccagtcctggaggggcaggaggaaggggtgcggtcgcgatccggacccggagccagcgcggagcacctgcgcccgcggctgacaccttcgctcgcagtttgttcgcagtttactcgcacaccagtttcccccaccgcgctttggattagtgtgatctcagctcaaggcaaaggtgggatatccgactcggaccgatg

SEQ ID NO: 645 - DNA, 203 bp, synthetic construct
  source 1..203: mol_type = other DNA
ggcgcgccagtcctgctgctaactgccctggtgtgtgtgagggagagagagggagggagggagagagagcgcgctagcgcgagagagcgagtgagcaagcgagcagaaaagaggtggagagggggggaataagaaagagagagaaggaaaggagagaaggcaggaagaaggcaagggacgagacaacccgactcggaccgatg

SEQ ID NO: 646 - DNA, 203 bp, synthetic construct
  source 1..203: mol_type = other DNA
ggcgcgccagtcctgtcacagcatcacctgggtgacgaggtcataacacctcagcccttgcttaaaaaattttatttctacttttctattgtaaagagatctcaaaacaggaagataaaattggactgacagctctacagcctagtcttttagacagtgaactaggccagcattggcagacactggcgcgactcggaccgatg

SEQ ID NO: 647 - DNA, 203 bp, synthetic construct
  source 1..203: mol_type = other DNA
ggcgcgccagtcctgctgcaatccctgctgggcagatggagagaggagcaagggagatggcagccccgggggactgtgcatagggagggactcatgaagtggcagctaagccctgtccagtggccacccgtcagccaagggccagagaccaggaaaggaagaaaggcagcttcacttcctctttgaggcgactcggaccgatg

SEQ ID NO: 648 - DNA, 203 bp, synthetic construct
  source 1..203: mol_type = other DNA
ggcgcgccagtcctctccactcgcgccggacacagggagcagcgagcacgcgtttcccgcaacccgataccatcggacaggatttctccgcctcagcccaacggggagatctctggaaacatggctacagaacatgttaatggaaatggtactgaagagcccatggatactacttctgcagttatccacgactcggaccgatg

SEQ ID NO: 649 - DNA, 203 bp, synthetic construct
  source 1..203: mol_type = other DNA
ggcgcgccagtccttgccagtctgtggagagtcctgctgccctccagccgggctcctccaccgggccttgcaggggccgagagagctcggtgcccgcccttccgctcgcctttttcgtcagctggctggagcagcatgggtccgggaggtctctaggctgaggcggcggccgctcctctagttccacacgactcggaccgatg

SEQ ID NO: 650 - DNA, 203 bp, synthetic construct
  source 1..203: mol_type = other DNA
ggcgcgccagtcctcagttggctgttaagtgacactgattctccccgccccgcctgacccccgagaaggaggcttgtcccccgctgcgtgagggggtggggaagtgggtagtgaattcggatctacctgggaggggggagtggaagttcccgccccggagagcggcgaggcggcagccacagttgattcgactcggaccgatg

SEQ ID NO: 651 - DNA, 203 bp, synthetic construct
  source 1..203: mol_type = other DNA
ggcgcgccagtcctacggaggaatccttgcttcagggactcgggaccctgctggaccccttcctcgggtttaggggatgtggggaccaggagaaagtcaggatccctaagagtcttccctgcctggatggatgagtggcttcttctccacctagattctttccacaggagccagcatacttcctgaaccgactcggaccgatg

SEQ ID NO: 652 - DNA, 203 bp, synthetic construct
  source 1..203: mol_type = other DNA
ggcgcgccagtcctagcggtcactcccgctgtatattaaggcgccggcgatcgcggcctgaggctgctcccggacaagggcaacgagcgtttcgtttggacttctcgacttgagtgcccgcctccttcgccgccgcctctgcagtcctcagcgcagtctttccacaggagccagcatacttcctgaaccgactcggaccgatg

SEQ ID NO: 653 - DNA, 203 bp, synthetic construct
  source 1..203: mol_type = other DNA
ggcgcgccagtcctaactccagggctagtgagctggaccggaagtaggtttctacccgaccgcattttacgtggtgctgcatttccggtagcggcggcgggaaatcggctgtgggagagaggctaggcctctgaggaggcgaatccggcgggtatcagagccatcagaaccgccaccatgacggtgggcgactcggaccgatg

SEQ ID NO: 654 - DNA, 203 bp, synthetic construct
  source 1..203: mol_type = other DNA
ggcgcgccagtccttgtgctttctctctgtttcagctgttttccttttaagatactcctctcagatttgtgtgcttcttcccttcccacattctatactgcccagcgcctgggattccagatctgcgtttgaatccaggaaagggaggtggacacctgcgcaggtgtgtgccctccggcccctgaagccgactcggaccgatg

SEQ ID NO: 655 - DNA, 203 bp, synthetic construct
  source 1..203: mol_type = other DNA
ggcgcgccagtcctgactttctggtaaggagaggaggttacggggaacgacgcgctgctttcatgccctttcttgttctaccttcatcggccgaggtggacacctgcgcaggtgtgtgccctccggcccctgaagcatggccagcagcggcatggctgacagcgccaaccacctgcccttctttttcgcgactcggaccgatg

SEQ ID NO: 656 - DNA, 203 bp, synthetic construct
  source 1..203: mol_type = other DNA
ggcgcgccagtcctgctgctcctctgtcgagctgatcacacccacagttgagctgcgctggccagagatgcctgcccacagcctggtgatgagcagcccggccctcccggccttcctgctctgcagcacgctgctggtcatcaagatgtacgtggtggccatcatcacgggccaagtgaggctgcggacgactcggaccgatg

SEQ ID NO: 657 - DNA, 203 bp, synthetic construct
  source 1..203: mol_type = other DNA
ggcgcgccagtcctatggatggaaccaatggcagcacccaaacccatttcatcctactgggattctctgaccgaccccatctggagaggatcctctttgtggtcatcctgatcgcgtacctcctgaccctcgtaggcaacaccaccatcatcctggtgtcccggctggacccccacctccacaccccccgactcggaccgatg

SEQ ID NO: 658 - DNA, 203 bp, synthetic construct
  source 1..203: mol_type = other DNA
ggcgcgccagtcctatccgggcaggataaaggcctgggtgaggcggctcacctaccctgctttctgcattcttctctccacatccctctctgtacttacagcccccaatggcccccaaaaagccagagcccaagaaggatgatgccaaggcagcccccaaggcagctccagctcccgcacctccccctcgactcggaccgatg

SEQ ID NO: 659 - DNA, 203 bp, synthetic construct
  source 1..203: mol_type = other DNA
ggcgcgccagtcctggaaccgccctgctgccgccgcctgcttcctctgctcgcggttagcccgtcagtccctgctctgtgcgcgcctccatctgggccatggatggcggggatctgatgagcttctttcttctggcatcattaacggaccttttaccatgaatagttctactccttctacaggtgtgtcgactcggaccgatg

SEQ ID NO: 660 - DNA, 203 bp, synthetic construct
  source 1..203: mol_type = other DNA
ggcgcgccagtcctgacgccatcccggccagaaaagccctggccagtggcgggcgcgacactatccgtgcggccaggcggagacccggaggaccgaagcttccggacgacgaggaaccgcccaacatggcctcggagagtgggaagctttggggtggccggtttgtgggtgcagtggaccccatcatgcgactcggaccgatg

SEQ ID NO: 661 - DNA, 203 bp, synthetic construct
  source 1..203: mol_type = other DNA
ggcgcgccagtcctcgagcggccgacggcgggtgcacgcgtcggtacacgtctgggcggcgacctggtcgcaagccatggtcccacgcggggtcccagggccgccgcgggacttggccgaggtctcccgacttgtgctgtgagatacgttaacgctttctcgacaccaggggtctggacttagtgacccgactcggaccgatg

SEQ ID NO: 662 - DNA, 203 bp, synthetic construct
  source 1..203: mol_type = other DNA
ggcgcgccagtcctatctgcctcagcctctttgtcactgcctggaccattgtccctgctgtttctcagacagcatagaggctgaggctggggccaggacccagacagagacacacggtcactgcagctgaagccgctgcccctgctacaggcaccaccaggaccagctgatcattccagcccacagcacgactcggaccgatg

SEQ ID NO: 663 - DNA, 203 bp, synthetic construct
  source 1..203: mol_type = other DNA
ggcgcgccagtcctggaggtgcggctggcccggtttcctggcgacgcggccctgcaggcggttgcgttccccgtcgttaccctctttctcttcccgacgcgtgagttaggccgtaatgccttggctgctctcagcccccaagctggttcccgctgtagcaaacgtccgcggcctctcaggatgtatgtcgactcggaccgatg

SEQ ID NO: 664 - DNA, 203 bp, synthetic construct
  source 1..203: mol_type = other DNA
ggcgcgccagtcctgcagaagggaagcaactccgggcgcctttcttttgcgcaggcgtcgcgccctggggccggggccgggcggcaccgcggtgcgcaagcgcaaccgtcggtgggtcggggatcggtcgcctgagaggtatcacctcttctgggctcaagatggacaacaagaagcgcctggcctaccgactcggaccgatg

SEQ ID NO: 665 - DNA, 203 bp, synthetic construct
  source 1..203: mol_type = other DNA
ggcgcgccagtcctgcaccggggaattcgaatgggagaggcgggcccaaggagggagtggaatggccgcgggcggctcgacgcagcagaggcgacgcgagatggcggcagcttcagcggcggcgatctcaggagctggtcgctgtcggctaagcaagattggagctactcgtcgtccacctccagctccgactcggaccgatg

SEQ ID NO: 666 - DNA, 203 bp, synthetic construct
  source 1..203: mol_type = other DNA
ggcgcgccagtcctgcgctgggtcaaagttcagccccgcccccgcttccccctcgctgtctccctcggcctgtgccgccgccgacgccgcttgtgggcccgactccgctctgtctgcttcgccaccttctccccgagcactgcccggccggccgccatggctaacgtggctgacacgaagctgtacgacgactcggaccgatg

SEQ ID NO: 667 - DNA, 203 bp, synthetic construct
  source 1..203: mol_type = other DNA
ggcgcgccagtcctcgaatgatttaaccaacgccttttccctccaaagaaacttggaggatatacctttttttccttaaatggcatctttctacccccaaaaagaaagtgtgtggttttgagggcggggacattttgggttttaaacagcgcgtttaagaacacctcagatctgccttctctatcccacgactcggaccgatg

SEQ ID NO: 668 - DNA, 203 bp, synthetic construct
  source 1..203: mol_type = other DNA
ggcgcgccagtcctagttccgagaccggttgccatggcgttctggacagcctcgcgagtccgaccccgcccttcaggagtgacgagcggcctgaccaatgggagcagggggcgggctctctgacgaaggactggaaggtggcggtggtgaaggtgcaggccgttggggcggctcagaggcaggtgactcgactcggaccgatg

SEQ ID NO: 669 - DNA, 203 bp, synthetic construct
  source 1..203: mol_type = other DNA
ggcgcgccagtcctggaggcaggcggtgccgcggcgccgggacccgactcatccggtgcttgcgtgtggtggtgagcgcagcgccgaggatgaggaggtgcaacagcggctccgggccgccgccgtcgctgctgctgctgctgctgtggctgctcgcggttcccggcgctaacgcggccccgcggtcgcgactcggaccgatg

SEQ ID NO: 670 - DNA, 203 bp, synthetic construct
  source 1..203: mol_type = other DNA
ggcgcgccagtcctctcatgttcagaacaaaagtgcctttttatgtggagtcatgaagacttacaggcagagagaaaaacaagggaccaaagtagcagattctagtaaaggaccagatgaggcaaaaattaaggcactcttggaaagaacaggctacacacttgatgtgaccactggacagaggaagtcgactcggaccgatg

SEQ ID NO: 671 - DNA, 203 bp, synthetic construct
  source 1..203: mol_type = other DNA
ggcgcgccagtcctagaggaagagaacgatttaaggagcgaatactactggtaaactaatggaagaaatctgctgcaccactggatattgggagtgtgtggcatgcatcctcatcatcaggaaactctaaaaaagaaccgagtggtgctagccaaacagctgttgttgagcgaattgttagaacatctcgactcggaccgatg

SEQ ID NO: 672 - DNA, 203 bp, synthetic construct
  source 1..203: mol_type = other DNA
ggcgcgccagtccttacctgcttcctgagctccccgagaagtcatccaggacctccccgagaagccgtccaggaaacatgctctcaggggacccccatctgcctcagcctctttgtcactgcctggaccattgtccctgctgtttctcaggcaccaccaggaccagctgatcattccagcccacagcacgactcggaccgatg

SEQ ID NO: 673 - DNA, 203 bp, synthetic construct
  source 1..203: mol_type = other DNA
ggcgcgccagtcctatggaaaggcttcctttctccacctctgtaactggtgcttctgagaagtaaatggtatttggatcctgacctcagacgcgaatttgggtcttctgtgcttaggagcagaaagagcccaggaggggcctgttcctttacttcttgggggaaacgcaatgcgtggcctgacttctccgactcggaccgatg

SEQ ID NO: 674 - DNA, 203 bp, synthetic construct
  source 1..203: mol_type = other DNA
ggcgcgccagtcctgctagttcctggtgcgtcacgggggagttccttaaaggggaagcgagccgggctacggggcgagcgcggggtgcggtggtcggcggggaggcccccgcgctttaaaataatgcccgcggcgcccgcgcgaccatgcaatggcgagcgctcgtcctggggctggtgctcctccggcgactcggaccgatg

SEQ ID NO: 675 - DNA, 203 bp, synthetic construct
  source 1..203: mol_type = other DNA
ggcgcgccagtcctcctttctccctcgcgttaggcaggtgacagcagggacatgtctcgggagatgcaggatgtagacctcgctgaggtgaagcctttggtggagaaaggggagaccatcaccggcctcctgcaagagtttgatgtccagacaaaacctgctacaaccccctcttcaactacgaggaccgactcggaccgatg

SEQ ID NO: 676 - DNA, 203 bp, synthetic construct
  source 1..203: mol_type = other DNA
ggcgcgccagtcctcaggccagccctggggcgccttaaaaaccggagctggcgcttggcatcgccactctgggcaggatccaacgtcgctccagctgctcttgacgactccacagataccccgaagccatggcaagcaagggcttgcaggacctgaagcaacaggtggaggggaccgcccaggaagcccgactcggaccgatg

SEQ ID NO: 677 - DNA, 203 bp, synthetic construct
  source 1..203: mol_type = other DNA
ggcgcgccagtcctaggagttgctgcatcgagttgtgaggattaaaagttggatgtaacggcttggtaattatgagctcttctagtgtcccttcctcttccctgtgcccaaggggttttaggaaagcattttatctccacagcaatcctatgaggttgatactactatcctcatagaaggggaaactgcgactcggaccgatg

SEQ ID NO: 678 - DNA, 203 bp, synthetic construct
  source 1..203: mol_type = other DNA
ggcgcgccagtccttaattatgagctcttctagtgtcccttcctcttccctgtgcccaaggggttttaggaaagcattttatctccacagcaatcctatgaggttgatactactatcctcatagaaggggaaactgatgccaggagaggttcaagcgtcttacctgaagtcacaaagcaaactgagtgcgactcggaccgatg

SEQ ID NO: 679 - DNA, 203 bp, synthetic construct
  source 1..203: mol_type = other DNA
ggcgcgccagtcctgcatcagggccgggggacgggtaaggggggggtgaagaaggggccggccttcaagcaagagcgacgcaagatggcagccaccacgggctcggtccctcgcaatttccgactgttggaagaactcgaagaaggccagaaaggagtaggagatggcacagttagctggggtctagacgactcggaccgatg

SEQ ID NO: 680 - DNA, 203 bp, synthetic construct
  source 1..203: mol_type = other DNA
ggcgcgccagtccttttcagagaaagttacgtggagcgtgggcgtttcgcagactcctaagcttctggcaagtatgaggcaaggatttcacagaagaacttggagcaaaaattcccactgtcatagctataggctgtccagtcttgagggagctgcaggaacaggaaaaagagaccttcagagaagaccgactcggaccgatg

SEQ ID NO: 681 - DNA, 203 bp, synthetic construct
  source 1..203: mol_type = other DNA
ggcgcgccagtcctcatgtcactgcctgccacttccggctcctgcgtcgctccggaagcctgcgagttccggaagccttggtaatccagattcggctaggaaaagacaagctttccagagaatgtttcagagaaagttacgtggagcgtgggcgtttcgcagactcctaagagaccttcagagaagaccgactcggaccgatg

SEQ ID NO: 682 - DNA, 203 bp, synthetic construct
  source 1..203: mol_type = other DNA
ggcgcgccagtcctgcggcagggaggggctcttcacccagtccggcagttgaagctcggcgctcgggttacccctgcagcgacgccccctggtcccacagataccactgctgctcccgccctttcgctcctcggccgcgcaatgggcacccgcgacgacgagtacgactacctctttaaagttgtcctcgactcggaccgatg

SEQ ID NO: 683 - DNA, 203 bp, synthetic construct
  source 1..203: mol_type = other DNA
ggcgcgccagtcctgtgggatttacttccggcagcaggtggtggggccatggctgcccttctccgagctgtgcgtaggtttcggggaaaagctgtgtgggaaaggcctctccatgggctgtggtgctgcagtgggcaggaggatcctaagaggtgggtgggcagcagttcacccatctcgaaggagaacgactcggaccgatg

SEQ ID NO: 684 - DNA, 203 bp, synthetic construct
  source 1..203: mol_type = other DNA
ggcgcgccagtccttttgcggctccaacatggctccgcggctgtgcagcatctctgtgacggcgcgtttctattccaaggacaatgaaggcagctggttccgctccctctttgttcacaaagtggatccccggaaggatgcccactccaccctgctgtccaagaaggaaaccagcaacctctataagacgactcggaccgatg

SEQ ID NO: 685 - DNA, 203 bp, synthetic construct
  source 1..203: mol_type = other DNA
ggcgcgccagtcctgcgaggaagcgcggtcacgtgactgctgcgggccagccaagatggcggcctcatgcttggtcctgctggcgctgtgtctgctgctgccgctgctgctgctgggaggatggaagcgctggcgccgggggcgggcggcccggcatgtagtagcggtggtgctgggcgacgtgggcccgactcggaccgatg

SEQ ID NO: 686 - DNA, 203 bp, synthetic construct
  source 1..203: mol_type = other DNA
ggcgcgccagtcctctcggccccgcccccgcgccccggatatgctgggacagcccgcgcccctagaacgctttgcgtcccgacgcccgcaggtcctcgcggtgcgcaccgtttgcgacttggtacttggaaaaatggacaaggattgtgaaatgaaacgcaccacactggacagccctttggggaagccgactcggaccgatg

SEQ ID NO: 687 - DNA, 203 bp, synthetic construct
  source 1..203: mol_type = other DNA
ggcgcgccagtcctcacgaaagtgactaggaggaaggatattataaagtgatgcaaacagaaattccaccagcctccatgtatcatcatgtgtcataactcagtcaagctcagtgagcattctcagcacattgcctcaacagcttcaaggtgagccagctcaagactttgctctccaccaggcagaagcgactcggaccgatg

SEQ ID NO: 688 - DNA, 203 bp, synthetic construct
  source 1..203: mol_type = other DNA
ggcgcgccagtcctcccaaaccaaggcccccagagaggtcccccaggcccctttgggtccctgagcctcagctggaggtggggggtgcctgcagtgcgctggctcagtctccttctgaaaagctggatccagcttgtttgaagcccttgagctgatcttagatccggcgcaggagaccaacgcctgcccgactcggaccgatg

SEQ ID NO: 689 - DNA, 203 bp, synthetic construct
  source 1..203: mol_type = other DNA
ggcgcgccagtcctggcggttggtgcggcctccattgttcgtgttttaaggcgccatgaggggtgacagaggccgtggtcgtggtgggcgctttggttccagaggaggcccaggaggagggttcaggccctttgtaccacatatcccatttgacttctatttgttgtttacttctggtttagtgtgaacgactcggaccgatg

SEQ ID NO: 690 - DNA, 203 bp, synthetic construct
  source 1..203: mol_type = other DNA
ggcgcgccagtcctgcggcggacacttccctgggcgggactgtctcgtggcacccggtggaaccgaggagaacgtggagcgccgggagcggcgaatatggacgactacagcctggatgagttccgtcggcgctggcaggaggagctggcgcaggcccaggcgccgaagaagcggcgacggcccgaggccgactcggaccgatg

SEQ ID NO: 691 - DNA, 203 bp, synthetic construct
  source 1..203: mol_type = other DNA
ggcgcgccagtcctgggagacccgccgcctccctccctccctagctgacttgctccctcccgggctgcggctgctgcaaaagccagcagcggcagcgggagctgtccggaggccggcgtcgagggtttgccgctgtctctgctattccatcctccccataggggctctctcccctctcccatctcaagcgactcggaccgatg

SEQ ID NO: 692 - DNA, 203 bp, synthetic construct
  source 1..203: mol_type = other DNA
ggcgcgccagtcctagctgacttgctccctcccgggctgcggctgctgcaaaagccagcagcggcagcgggagctgtccggaggccggcgtcgaggtgagacccgggcagactgaggctgcggggtttgccgctgtctctgctattccatcctccccataggggctctctcccctctcccatctcaagcgactcggaccgatg

SEQ ID NO: 693 - DNA, 203 bp, synthetic construct
  source 1..203: mol_type = other DNA
ggcgcgccagtcctgggattggttctccaggatcttgtttgtgactgttttctccccttagtgagctgtattttcaaggccctagcagcaacaagcctcgtgtgatccgggaagtgcgggctgactctgtggggaagttggtaactgtgcgtggaatcgtcactcgtgtctctgaagtcaaacccaagcgactcggaccgatg

SEQ ID NO: 694 - DNA, 203 bp, synthetic construct
  source 1..203: mol_type = other DNA
ggcgcgccagtccttaggaaaaagttttggatgggattatgtggaaactaccctgcgattctctgctgccagagcaggctcggcgcttccaccccagtgcagccttcccctggcggtggtgaaagagactcgggagtcgctgcttccaaagtgcccgccgtgagtgagctctcaccccagtcagccaacgactcggaccgatg

SEQ ID NO: 695 - DNA, 203 bp, synthetic construct
  source 1..203: mol_type = other DNA
ggcgcgccagtcctttccccggtgtcccgacggcggctcaagtcagagttgctgggttttgctcagattggtgtgggaagagcctgcctgtggggagcggccactccatactgctgaggcctcaggactgctgctcagcttgcccgttacctgaagaggcggcggagccgggcccctgaccggtcacccgactcggaccgatg

SEQ ID NO: 696 - DNA, 203 bp, synthetic construct
  source 1..203: mol_type = other DNA
ggcgcgccagtcctagagcggggaaggctgagtccacactgcaagtccagagagcagggaactaccttgagtattctactcaaacttatgtctcagagttccccaatttcccaagaagggagagatagaggccacaatccagggggccatctcttaaggtaccaataattttgcaggatcaaaccaaacgactcggaccgatg

SEQ ID NO: 697 - DNA, 203 bp, synthetic construct
  source 1..203: mol_type = other DNA
ggcgcgccagtccttcagctctctcctccgccccccttcgccctccccctttccctccctttctcctcctcctcctgccgccgcggccgctgccggacttcgccagatcagacccacggggctgccctcccctgcgcactcccctcgctgcccgggcccggagcgcagcgcggccgcacagattcacacgactcggaccgatg

SEQ ID NO: 698 - DNA, 203 bp, synthetic construct
  source 1..203: mol_type = other DNA
ggcgcgccagtccttttcctgctgggggtgccgaccctgtcccacgctagctgggtgacttcccccaaccgcagagacagcggcgacccggggcctcagacctgcccccgcatctcgccggcgccaggcagtgggaagtcaggttcttccgccacctcccagccaggactctgccaccctccctcaggcgactcggaccgatg

SEQ ID NO: 699 - DNA, 203 bp, synthetic construct
  source 1..203: mol_type = other DNA
ggcgcgccagtcctgccatataaatcagatttttgacatgttataaaatgcaagtcacagctgctgttgtctgcggtattcaaaaacttttgaaacactgcatgtccaacaaaatttattttttgtgtgaatgtactgtttttcaaccctactctcttgaccaagaatgaaactatttacaaattaagcgactcggaccgatg

SEQ ID NO: 700 - DNA, 203 bp, synthetic construct
  source 1..203: mol_type = other DNA
ggcgcgccagtcctgggaggcagcaggttaggcagtgagaagttagtggcgctgctgggacgggggaaaggagacgcttcttcctcttgctgctcttctcgttcccgagatcagcggcggcggtgaccgcgagtgggtcggcaccgtctccggctccgggtgcgaacaatgctgactgatagcggaggcgactcggaccgatg

SEQ ID NO: 701 - DNA, 203 bp, synthetic construct
  source 1..203: mol_type = other DNA
ggcgcgccagtcctcggcagctccgagggcacctccggttctcccccatcctccgggagtgtctgggcgctcagtccgctctgatcccgccgaaaccacctgcggttggcaggcaggagactaggcgtctgccggggagggcagggacccgctaagctgatctcctgtacagtagtgctacttaaaatcgactcggaccgatg

SEQ ID NO: 702 - DNA, 203 bp, synthetic construct
  source 1..203: mol_type = other DNA
ggcgcgccagtcctatttccggcatgagccggaagaccgtcccggatggcctcggggactgccagtgtgtggaggtgagctccgggattgccggcattcccgcttctgctggttgcttcatgctgcaggctgcggccgtcagccctcgctcgcattggtggcgctgaggtgccggggcagcaagtgaccgactcggaccgatg

SEQ ID NO: 703 - DNA, 203 bp, synthetic construct
  source 1..203: mol_type = other DNA
ggcgcgccagtcctcacgacggtgacacgcttccctggattggcagccagactgccttccgggtcactgccatggaggagccgcagtcagatcctagcgtcgagccccctctgagtcaggaaacattttcagacctatggaaactacttcctgaaaacaacgttctgtcccccttgccgtcccaagcacgactcggaccgatg

SEQ ID NO: 704 - DNA, 203 bp, synthetic construct
  source 1..203: mol_type = other DNA
ggcgcgccagtcctagatgcgagcactgcggctgggcgctgaggatcagccgcttcctgcctggattccacagcttcgcgccgtgtactgtcgccccatccctgcgcgcccagcctgccaagcagcgtgccccggttgcaggcgtcatgcagcgggcgcgacccacgctctgggccgctgcgctgactcgactcggaccgatg

SEQ ID NO: 705 - DNA, 203 bp, synthetic construct
  source 1..203: mol_type = other DNA
ggcgcgccagtcctgctttatctggtagcactgttacataaaattaacatttattggtgatcactaggtgccaacattatgcgaagaactttacgtggacatcccatttaattctcagaagccgatcacaaggtggccagcatcgaaatgttcagccttttagtgatgaagatgcatcaattgaaacacgactcggaccgatg

SEQ ID NO: 706 - DNA, 203 bp, synthetic construct
  source 1..203: mol_type = other DNA
ggcgcgccagtcctggcagccccatagccatctcagggacaaggaggctgtgatcagatctcgcgaggttcaggaaagcgccccgggaactgggccgctgggccagcccctgcgtcggggggcaagatggcagcccaggctttggcgctgctgagagaggtagcgaggctggaagcgccgctggaggacgactcggaccgatg

SEQ ID NO: 707 - DNA, 203 bp, synthetic construct
  source 1..203: mol_type = other DNA
ggcgcgccagtcctattctttccccaagtctctatggtagcgtcagcgtcggaggcggtagtgacggtggcgtttccttgaggaagagtgagggttccaacttttctgcttatctgggaggtgttgggcgcggacagtcgagatgtcagagaaaaagcagccggtagacttaggtctgttagaggaagcgactcggaccgatg

SEQ ID NO: 708 - DNA, 203 bp, synthetic construct
  source 1..203: mol_type = other DNA
ggcgcgccagtccttcctgcgccgccccttccgaggctaaatcggctgcgttcctctcggaacgcgccgcagaaggggtcctggtgacgagtcccgcgttctctccttgaatccactcgccagcccgccgccctctgccgccgcaccctgcacacccgcccctctcctgtgccaggcaaggtgacccccgactcggaccgatg

SEQ ID NO: 709 - DNA, 203 bp, synthetic construct
  source 1..203: mol_type = other DNA
ggcgcgccagtcctgagtctgtaccctcgtgatgtccccgccccggttcccaggcaagtttagggaagtgaaaggcgccaggtgccagtcctggcctctgatgtaacccagcgccccgcagtcccgacacagattcctggatctcagccccatagcagctatgatcccgctgctgctggcagcgctgccgactcggaccgatg

SEQ ID NO: 710 - DNA, 203 bp, synthetic construct
  source 1..203: mol_type = other DNA
ggcgcgccagtcctgtgcagaaggcacgaggaagccacagtgctccggatcctccaatcttcgctcctccaatctccgctcctccacccagttcaggaacccgcgaccgctcgcagcgctctcttgaccactatgagcctcctgtccagccgcgcggcccgtgtccccggtccttcgagctccttgtgcgactcggaccgatg

SEQ ID NO: 711 - DNA, 203 bp, synthetic construct
  source 1..203: mol_type = other DNA
ggcgcgccagtcctaaggccctcggccggaagctccgctttctcttcctgctctccatcatggcggatcaaggtgaaaaggagaaccccatgcgggaacttcgcatccgcaaactctgtctcaacatctgtgttggggagagtggagacagactgacgcgagcagccaaggtgttggagcagctcacacgactcggaccgatg

SEQ ID NO: 712 - DNA, 203 bp, synthetic construct
  source 1..203: mol_type = other DNA
ggcgcgccagtcctagtggaggagctgctgctggtgctggggccggaggagggacgcgccggagcgggaccgacgggaccgagcgagcgaccgacgcgccacccgccgacgcctcagccgcttggggcccgcacggaccctctacttcagtgtagaatgagccaaggagactcaaacccagcagctatcgactcggaccgatg

SEQ ID NO: 713 - DNA, 203 bp, synthetic construct
  source 1..203: mol_type = other DNA
ggcgcgccagtcctgggttgcgtttagcagaggaccggagcaaggaccctcacgacccacataaaatctacgagtttgtgaactcaggagttggggacttttcccagccagacacctctccggacaccaatggtggaggcagtacttctgatacccaggaagacattctggatgagttactgggtaaccgactcggaccgatg

SEQ ID NO: 714 - DNA, 203 bp, synthetic construct
  source 1..203: mol_type = other DNA
ggcgcgccagtcctctgcgcccgagctggcctgcgagttcagggctcctgtcgctctccaggagcaacctctactccggacgcacaggcattccccgcgcccctccagccctcgccgccctcgccaccgctcccggccgccgcgctccggtacacacaggatccctgctgggcaccaacagctccacccgactcggaccgatg

SEQ ID NO: 715 - DNA, 203 bp, synthetic construct
  source 1..203: mol_type = other DNA
ggcgcgccagtccttcccgcctccctgggagctccgcacgggatttgcagatttacagaatggctgcacattaatggaaagagaagcataaacctatcttctttcattatggagggaggtttggcagatggagaacctgatcgaacttcgcaaacagtgacgaatctcagcttctgacaccaggaaagcgactcggaccgatg

SEQ ID NO: 716 - DNA, 203 bp, synthetic construct
  source 1..203: mol_type = other DNA
ggcgcgccagtcctctcctggaccggggggcgcggaggttggagagaggagctacccgggtctcggacaggcggcactgggaccacgaggcagggagccaggcttgaagcaggtgacatgtagacgtcccctggtccagcctcggaacctgagcgcccttctgcctggaaagtttgtggctaggcgcccgactcggaccgatg

SEQ ID NO: 717 - DNA, 203 bp, synthetic construct
  source 1..203: mol_type = other DNA
ggcgcgccagtcctcttaggaaaactcgacaggatattgaggggaggctccagccctcgggagtaaatatcttcccttccaacctggtgtcagcagcctttcgctcatactctaccacctatgaagagaggaatatcaccggaaccagggtgaaggtgcccgtggggcaggaggtggaggggatgaaccgactcggaccgatg

SEQ ID NO: 718 - DNA, 203 bp, synthetic construct
  source 1..203: mol_type = other DNA
ggcgcgccagtcctggggctgaaggaggctgactccccaagtcctgcaaaggggtgcaagcctagttccaaccctgccgggctgaggcatgagtaggggctgtatttgcgtgcaggcgggcccccaaagcttccactcgctgccttaaaacgccaacccagcctctcagacaatgctgccctcccactcgactcggaccgatg

SEQ ID NO: 719 - DNA, 203 bp, synthetic construct
  source 1..203: mol_type = other DNA
ggcgcgccagtcctgggctggggcgctccgctgagccactcctgcgcccccctggccttgtctacctcttgccccccgaggggttagtgtcgagctcaccccagcatcctatcacctcctggtggccttgccgcccccacaaccccgaggtataaagccaggtacacgaggcaggggacgcaccaaggcgactcggaccgatg

SEQ ID NO: 720 - DNA, 203 bp, synthetic construct
  source 1..203: mol_type = other DNA
ggcgcgccagtcctgcggtctcgttattcgtgttttctctccgccctacgattattcccttccgcccccttctctaagctgcacagcctgaatagaagggctggtccagcggcggcggaggctggcgctgtcctgagagggagggctctgtgcggaagagatgaatcggacaaagggtgatgaggaggcgactcggaccgatg

SEQ ID NO: 721 - DNA, 203 bp, synthetic construct
  source 1..203: mol_type = other DNA
ggcgcgccagtcctggcggctgctgctgcctgtggcccgggcggctgggagaagcggagtgttggtgagtgacgcggcggaggtgtagtttgacgcggtgtgttacgtgggggagagaataaaactccagcgagatccgggccgtgaacgaaagcagtgacggaggagcttgtaccaccggtaactaacgactcggaccgatg

SEQ ID NO: 722 - DNA, 203 bp, synthetic construct
  source 1..203: mol_type = other DNA
ggcgcgccagtcctagcatgagtcagacagcctctggctttctggaagggcaaggactctatatatacagagggagcttcctagctgggatattggagcagcaagaggctgggaagccatcacttaccttgcactgagaaagaagacaaaggccagtatgcacagctttcctccactgctgctgctgccgactcggaccgatg

SEQ ID NO: 723 - DNA, 203 bp, synthetic construct
  source 1..203: mol_type = other DNA
ggcgcgccagtcctgcctctggctttctggaagggcaaggactctatatatacagagggagcttcctagctgggatattggagcagcaagaggctgggaagccatcacttaccttgcactgagaaagaagacaaaggcaagttgaaaagcggagaaatagtggcccagtggttgaaaaattgaagcaacgactcggaccgatg

SEQ ID NO: 724 - DNA, 203 bp, synthetic construct
  source 1..203: mol_type = other DNA
ggcgcgccagtcctaaatgaactccctccagcttagctttcacccggtggtgttcccgggaggagagggcggagggcggagggaacttgcaccgaagcatcactcgagaccccaaacctccaggcctgaggcccagccagcgcccaatggatgacaaaaagaagaaacggagtcccaagccctgcctgcgactcggaccgatg

SEQ ID NO: 725 - DNA, 203 bp, synthetic construct
  source 1..203: mol_type = other DNA
ggcgcgccagtccttgcgtgggtactggaacaagcaaacgaggcagcgagcgaaggacgggagccggaccctgggccccgtggaactccagcctgcgccaccacgtcacgcacacgctcggcgctgcgatccgcgcatataacgatatttggatttgacctgcattttggaatttatctacacttaaacgactcggaccgatg

SEQ ID NO: 726 - DNA, 203 bp, synthetic construct
  source 1..203: mol_type = other DNA
ggcgcgccagtcctatgtgcacacacatacactcacacgtgtgtgcaggtgcacacctcccccagaggctgcagccaagacgggcatcccacatcagagggatgaatggcaggtctgtcccgccagctgtgtgctctctcccacccgaagaaagcagcagagactcagacggcggagcctggaggagccgactcggaccgatg

SEQ ID NO: 727 - DNA, 203 bp, synthetic construct
  source 1..203: mol_type = other DNA
ggcgcgccagtcctggctgaaaagcatgacgtaccaaacaggcacgagataagtcccggacatgatggcacatggaatgacaatcagctacaagaaatggcccaactgaggattaagcaccaagaggaactgactgaattacacaagaaacgtggggagctcaactggtgattgacctgaataaccaacgactcggaccgatg

SEQ ID NO: 728 - DNA, 203 bp, synthetic construct
  source 1..203: mol_type = other DNA
ggcgcgccagtcctacttccggctccccccaggtccccaagctttacttttgtggggcacgacgagaaagtccgcagccccaaacattcccagaggtccacttgggccagtggtactttatcgcaggggcagctcccaccaaggaggagttggcaacttttgaccctgtggacaacattgtcttcaatcgactcggaccgatg

SEQ ID NO: 729 - DNA, 203 bp, synthetic construct
  source 1..203: mol_type = other DNA
ggcgcgccagtcctagagtggactgagcagccagtaggggagagagcagttaaggcacacagagcaccagctccctcctgcctgaagatgttccaccaaatttgggcagctctgctctacttctatggtattatccttaactccatctaccagtgccctgagcacagtcaactgacaactctgggcgtcgactcggaccgatg

SEQ ID NO: 730 - DNA, 203 bp, synthetic construct
  source 1..203: mol_type = other DNA
ggcgcgccagtcctgcggctggattctcttccctggccaagtctctgagatcttctcccagggcgatgcaaagctactcgctaccagcttggacctgtctgcagtatctcctctgggacctgccatgctgaggacccattctcacctctgagggactcctgtcctaggactaaggtggagcctgggcccgactcggaccgatg

SEQ ID NO: 731 - DNA, 203 bp, synthetic construct
  source 1..203: mol_type = other DNA
ggcgcgccagtcctggtggtgttgacgattgaactgggcagtactggggccgtgagcggagagcaaagtgggctggactgggtcaggccctccttcctcgctgccgggatctccactccgccaatcccctgtgcctggcgttgggcggtttcccgaggagcttgggccgccgcagcttacagttgaaccgactcggaccgatg

SEQ ID NO: 732 - DNA, 203 bp, synthetic construct
  source 1..203: mol_type = other DNA
ggcgcgccagtcctctgaaggggcgttccacatacgttgtcccgacacagcagtaccctgtgcagccaggagccccaggcttctatccaggtgcaagccctacagaatttgggacctacgctggcgcctactatccagcccaaggggtgcagcagtttcccactggcgtggcccccgccccagttttgcgactcggaccgatg

SEQ ID NO: 733 - DNA, 203 bp, synthetic construct
  source 1..203: mol_type = other DNA
ggcgcgccagtccttccgctgcgctgtagcctggaggctccgggcgcggggaagtcatgctcgcttcacggaggcaatagctagccggtgtctgtgggaggttatgtttatttgagacttctccatcgggatcgcctggtgtcaccaagtgtccactggtactgaggtttgctgcctgccttcttgcccgactcggaccgatg

SEQ ID NO: 734 - DNA, 203 bp, synthetic construct
  source 1..203: mol_type = other DNA
ggcgcgccagtcctaggccgcggcccagctgaccctcggggctcccccggcagcggacagggaagggttaaaggcccccggctccctgccccctgccctggggaacccctggccctgtggggacatgaactagggacaaattcccagctgacggggaccacaacctggattccctgcccaccctggcccgactcggaccgatg

SEQ ID NO: 735 - DNA, 203 bp, synthetic construct
  source 1..203: mol_type = other DNA
ggcgcgccagtcctagaataattttgctgccaagtgaatcagagagacttgcagttctcggagagcacggaacttattcctgcccagagttcagacacagccagaaattaccatttcatacttcacagaatggaggtttcagcagccaaagccccaagtgccgcagacttgtctgagattgaaataaacgactcggaccgatg

SEQ ID NO: 736 - DNA, 203 bp, synthetic construct
  source 1..203: mol_type = other DNA
ggcgcgccagtcctacccagatcccgaggtccgacagcgcccggcccagatccccacgcctgccaggagcaagccgagagccagccggccggcgcactccgactccgagcagtctctgtccttcgacccgagccccgcgccctttccgggacccctgccccgcgggcagcgctgccaacctgccggcccgactcggaccgatg

SEQ ID NO: 737 - DNA, 203 bp, synthetic construct
  source 1..203: mol_type = other DNA
ggcgcgccagtcctgagaccctctgctcttctgctcccttcctgtgtgctgcctggcaatggggaactctgagggctgcaataccaagaaggagggtgacctgatagctgctcaggctcggctgaaggacctggaggctctgctgaactccaaggaggccgcactgagcactgctctcagtgagaagccgactcggaccgatg

SEQ ID NO: 738 - DNA, 203 bp, synthetic construct
  source 1..203: mol_type = other DNA
ggcgcgccagtcctcacaattgacagcctcaaggttcctggctttttgaaccaccacagacatctcctttcccggctaccccaccctgagcgccagacaccatgaaccttccttccacaaaggtctcctgggccgccgtgacgctactgctgctgctgctgctgctgccgcccgcgctgttgtcgtcccgactcggaccgatg

SEQ ID NO: 739 - DNA, 203 bp, synthetic construct
  source 1..203: mol_type = other DNA
ggcgcgccagtcctccggaagtgacgcgaggctctgcggagaccaggagtcagactgtaggacgacctcgggtcccacgtgtccccggtactcgccggccggagcccccggcttcccggggccgggggaccttagcggcacccacacacagcctactttccaagcggagccatgtctggtaacggcaacgactcggaccgatg

SEQ ID NO: 740 - DNA, 203 bp, synthetic construct
  source 1..203: mol_type = other DNA
ggcgcgccagtcctacccacacacagcctactttccaagcggagccatgtctggtaacggcaatgcggctgcaacggcggtgagtgctgagccggtgaccagcacactttgggcttctggacgagccgtgcagcgattggccccaggttgccatcctcagtcgtctattggaagaaaacagcccaaagcgactcggaccgatg

SEQ ID NO: 741 - DNA, 203 bp, synthetic construct
  source 1..203: mol_type = other DNA
ggcgcgccagtcctactgatttttagaactccacatttgaggtggagtcgaccgccagcatcttggcctctgtgaaggaacaagaggcccagtttgagaagctgacccgggcgctggaggaggaacggcgccacgtctcggcgcagctggaacgcgtccgggtctcaccacaagatgccaacccactccgactcggaccgatg

SEQ ID NO: 742 - DNA, 203 bp, synthetic construct
  source 1..203: mol_type = other DNA
ggcgcgccagtcctggctgggtccagatacctgtgttttgactctgttcctgtggatagctgcttggtctgaagttccagaaaggatcctgttcccagacaggtccctgagtactgacggtcacaggctgccgcgtctttcctgttgactcatgtttggttcctccagtgaaaattttacttagagaacgactcggaccgatg

SEQ ID NO: 743 - DNA, 203 bp, synthetic construct
  source 1..203: mol_type = other DNA
ggcgcgccagtcctcaatcagttgcgaccttctcttaacaggtggagtcgaccgccagcatcttggcctctgtgaaggaacaagaggcccagtttgagaagctgacccgggcgctggaggaggaacggcgccacgtctcggcgcagctggaacgcgtccgggtctcaccacaagatgccaacccactccgactcggaccgatg

SEQ ID NO: 744 - DNA, 203 bp, synthetic construct
  source 1..203: mol_type = other DNA
ggcgcgccagtcctcaaacgctaggtggctgggtccagccggagacccgcaccaaggaggagatcatcgagctcttggtccttgagcagtacctgaccatcatccctgaaaagctcaagccttgggtgcgagcaaaaaagccggagaactgtgagaagctcgtcactctgctggagaattacaaggagcgactcggaccgatg

SEQ ID NO: 745 - DNA, 203 bp, synthetic construct
  source 1..203: mol_type = other DNA
ggcgcgccagtccttcccttctgaggaaacgaaaccaacagcagtccaagctcagtcagcagaagagataaaagcaaacaggtctgggaggcagttctgttgccactctctctcctgtcaatgatggatctcagaaataccccagccaaatctctggacaagttcattgaagactatctcttgccagacgactcggaccgatg

SEQ ID NO: 746 - DNA, 203 bp, synthetic construct
  source 1..203: mol_type = other DNA
ggcgcgccagtccttcatttggtcccaagtatgactcagggttaggctgggtcctcaggctccgtgctgttggaaggaagtgggaggattccaggggagttctgggaccttttcaaactgaagagaggaggctggctgcatcatgggagaagagactattgggaagaagttacctgcaactacagcaacgactcggaccgatg

SEQ ID NO: 747 - DNA, 203 bp, synthetic construct
  source 1..203: mol_type = other DNA
ggcgcgccagtcctaaaagctccagaaacgttgactgggaccactggagacactgaagaaggcaggggcccttagagtcttggttgccaaacagatttgcagatcaaggagaacccaggagtttcaaagaagcgctagtaaggtctctgagatccttgcactagctacatcctcagggtaggaggaagcgactcggaccgatg

SEQ ID NO: 748 - DNA, 203 bp, synthetic construct
  source 1..203: mol_type = other DNA
ggcgcgccagtcctctggttttccagtcaggcggccggagggcagccctcaagaacggccctgaccgcccgcggggtgaggggccctttctgggcaggacccgccccttggtcccgcagagccttggtacttggacctgaaccttgctccgagagggagtcctcgcggacgtcagccaagattccagacgactcggaccgatg

SEQ ID NO: 749 - DNA, 203 bp, synthetic construct
  source 1..203: mol_type = other DNA
ggcgcgccagtcctaacggctccgaatctgccccagcggccgctgcgagacctcggcgccgacatcgcgacagcgaagcgctttgcacgccaggaaggtcccctctatgtgctgctgagccggtcctggacgcgacgagcccgccctcggtcttcggagcagaaatcgcaaaaacggaaggactggaacgactcggaccgatg

SEQ ID NO: 750 - DNA, 203 bp, synthetic construct
  source 1..203: mol_type = other DNA
ggcgcgccagtcctgggcagctccaccctgggagggactgtggcccaggtactgcccgggtgctactttatgggcagcagctcagttgagttagagtctggaagacctcagaagacctcctgtcctatgaggccctccccatggctttagagacgatctgccgaccctctgggagaaaatccagcaagcgactcggaccgatg

SEQ ID NO: 751 - DNA, 203 bp, synthetic construct
  source 1..203: mol_type = other DNA
ggcgcgccagtcctcaagagcaagcatgtaccgctgaaaacacaagataactgcataagtaatgactttcagtgcagattcatagctaacccataaactgctggggcaaaaatcatcttggaaggctctgaacctcagaaaggattcacaagacgatctgccgaccctctgggagaaaatccagcaagcgactcggaccgatg

SEQ ID NO: 752 - DNA, 203 bp, synthetic construct
  source 1..203: mol_type = other DNA
ggcgcgccagtcctggagctgccgggggaggggagttgtaagcagagcgctgagcctcgcagctcgcattcggagggaagctgacatccacaccaagtcgagacttccagggatgtggccggggagcagtcacatgctgtagctttcatgagcacaggcatcagtcaggcagatgtttgtcgactggacgactcggaccgatg

SEQ ID NO: 753 - DNA, 203 bp, synthetic construct
  source 1..203: mol_type = other DNA
ggcgcgccagtccttgtgacatttcctctggtggtttccacgaacccaggcgtcacccctcggtggagataaagtggagccacccagctccaccgtgtctcagcctggggtcggcctctgctgcttctggactcagtgaccctgggctgtcagggagcttctgagccttggttttcctgtctagtaagcgactcggaccgatg

SEQ ID NO: 754 - DNA, 203 bp, synthetic construct
  source 1..203: mol_type = other DNA
ggcgcgccagtcctggcggccaagatgtccgtgccttgccgctctcctaccccatgtcgctgaagcagatgagttggagcaggactcaggagggtactaggcccaggttttaggctgaacctaggaatgagtaatgagaggaggcagatcagctggaggaccagcccgagtccccagatgtcggcacacgactcggaccgatg

SEQ ID NO: 755 - DNA, 203 bp, synthetic construct
  source 1..203: mol_type = other DNA
ggcgcgccagtcctggggcgcggggagtcgaggcatttgcgcctgggcttcggagcgtagcgccagggcctgagcctttgaagcaggaggaggggaggagagagtggggctcctctatcgggaccccctccccatgtggatctgcccaggcggcggcggcggcggcggaggaggaggcgaccgagaagcgactcggaccgatg

SEQ ID NO: 756 - DNA, 203 bp, synthetic construct
  source 1..203: mol_type = other DNA
ggcgcgccagtcctccccggactctgcctgctcctgccatggtgccgtggccctgctgggcggatggagcaggatcccaagccgccccgtctgcggctctgggccctgatcccctggcttcccaggaagcagcggcccaggatcagccagacctctctgcctgtccctggccctggctctggcccccacgactcggaccgatg

SEQ ID NO: 757 - DNA, 203 bp, synthetic construct
  source 1..203: mol_type = other DNA
ggcgcgccagtcctaaattaacgtactatcctccttacttttgggtcgggccctccgggaagatggcggccgtgcaggcggccgaggtgaaagtggatggcagcgagccgaaactgagcaagaagtggtggtaatcattagttccagggtgctctgccatgttgacgcaagctgctgtaaggcttgttcgactcggaccgatg

SEQ ID NO: 758 - DNA, 203 bp, synthetic construct
  source 1..203: mol_type = other DNA
ggcgcgccagtcctgagctcacaatcttaaaatgtatctcctgtaatgctgggagtggggtacgagcttcctgctgtgggagggagggggacaggaagcctcgtaaggtctcaccaggtggcaagcacactggattagaagatgcaggaaagcaccttccagtctgaagatcatttaaagactcagtccgactcggaccgatg

SEQ ID NO: 759 - DNA, 203 bp, synthetic construct
  source 1..203: mol_type = other DNA
ggcgcgccagtcctgggactaacccctgcctggcgttccgggcggcagtgcctggtccagagtccagggactcggctgcctgcacgccccgaggcggaccccggctctgactgctcccctggccgcgggcttctcgactgggacgcggcgcgaggagggagcgcggcggccccgagtctccctgagcccgactcggaccgatg

SEQ ID NO: 760 - DNA, 203 bp, synthetic construct
  source 1..203: mol_type = other DNA
ggcgcgccagtcctgtcggccctggggctgttcaggcactcagggcaggggagaggagagactaccgtcctggagataacggttccacggaggcccaaggcgaaacggaaggatcctcatgtacaaaactgagcggaatggagctgtgagcacgcatcaggtcctcagccagcagagccacgttccttcgactcggaccgatg

SEQ ID NO: 761 - DNA, 203 bp, synthetic construct
  source 1..203: mol_type = other DNA
ggcgcgccagtcctaatcactgctgtgcagggcaggaaagctccatgcacatagcccagcaaagagcaacacagagctgaaaggaagactcagaggagagagataagtaaggaaagtagtgatggctctcatcccagacttggccatggaaacctggcttctcctggctgtcagcctggtgctcctctcgactcggaccgatg

SEQ ID NO: 762 - DNA, 203 bp, synthetic construct
  source 1..203: mol_type = other DNA
ggcgcgccagtccttcagcaccttggcgaagccttgggtttctttcttaaaggactgatttttagaactccacatttgagaacggccggtttgtgggcgatgctgaccttgaaagacagaaattttcagatttgaaactcaacggaccccaggatcacagtcaccttctatatagcaccatccccaggcgactcggaccgatg

SEQ ID NO: 763 - DNA, 203 bp, synthetic construct
  source 1..203: mol_type = other DNA
ggcgcgccagtcctagaagagcaggaaagatcccgaaaggaggaagaggtggcgaaaaatcaactgccctgctggatttgtctttctcagcaccttggcgaagccttgggtttctttcttaaaggactgatttttagaactccacatttgaggatcacagtcaccttctatatagcaccatccccaggcgactcggaccgatg

SEQ ID NO: 764 - DNA, 203 bp, synthetic construct
  source 1..203: mol_type = other DNA
ggcgcgccagtcctagtgtcctggttactgcagcggcagcaacagcaggtcctactatcgcctccctctagtctctgcttctctggatccctgaggagggcagaaggaagaaaacagcccaaagatgagagtgattcgcgtgggtacccgcaagagccagcttgctcgcatacagacggacagtgtggcgactcggaccgatg

SEQ ID NO: 765 - DNA, 203 bp, synthetic construct
  source 1..203: mol_type = other DNA
ggcgcgccagtcctgggcacttggagttgtcttaggactgatgtctgaattaactaaatgaacttgtctggtttgcagagtgctgatggcagagattggtgaggatttggataaatctgatgtgtcctcattaattttcctcatgaaggattacatgggccgaggcaagataagcaaggagaagagttcgactcggaccgatg

SEQ ID NO: 766 - DNA, 203 bp, synthetic construct
  source 1..203: mol_type = other DNA
ggcgcgccagtcctagccagtggacttagcccctgtttgctcctccgataactggggtgaccttggttaatattcaccagcagcctcccccgttgcccctctggatccactgcttaaatacggacgaggacagggccctgtctcctcagcttcaggcaccaccactgacctgggacagtgaatcgacacgactcggaccgatg

SEQ ID NO: 767 - DNA, 203 bp, synthetic construct
  source 1..203: mol_type = other DNA
ggcgcgccagtcctagcgcgcaggcgcggccggattccgggcagtgacgcgacggcgggccgcgcggcgcatttccgcctctggcgaatggctcgtctgtagtgcacgccgcgggcccagctgcgaccccggccccgcccccgggaccccggccatggacgaactgttccccctcatcttcccggcagcgactcggaccgatg

SEQ ID NO: 768 - DNA, 203 bp, synthetic construct
  source 1..203: mol_type = other DNA
ggcgcgccagtcctggaaggcctagccgctgctgctgccaggaattccaggttggaggggcggcaacctcctgccagccttcaggccactctcctgtgcctgccagaagagacagagcttgaggagagcttgaggagagcaggaaaggtgggacattgctgctgctgctcactcagttccacaggacacgactcggaccgatg

SEQ ID NO: 769 - DNA, 203 bp, synthetic construct
  source 1..203: mol_type = other DNA
ggcgcgccagtcctttgaggagagcttgaggagagcaggaaaggtgggacattgctgctgctgctcactcagttccacagcagcctcccccgttgcccctctggatccactgcttaaatacggacgaggacagggccctgtctcctcagcttcaggcaccaccactgacctgggacagtgaatcgacacgactcggaccgatg

SEQ ID NO: 770 - DNA, 203 bp, synthetic construct
  source 1..203: mol_type = other DNA
ggcgcgccagtccttcacgccaccccctccaccttggacacaggacgctgtggtttctgagccaggtacaatgactcctttcgcctcccccgttgcccctctggatccactgcttaaatacggacgaggacagggccctgtctcctcagcttcaggcaccaccactgacctgggacagtgaatcgacacgactcggaccgatg

SEQ ID NO: 771 - DNA, 203 bp, synthetic construct
  source 1..203: mol_type = other DNA
ggcgcgccagtcctcttcaggccactctcctgtgcctgccagaagagacagagcttgaggagagcttgaggagagcaggaaagcctcccccgttgcccctctggatccactgcttaaatacggacgaggacagggccctgtctcctcagcttcaggcaccaccactgacctgggacagtgaatcgacacgactcggaccgatg

SEQ ID NO: 772 - DNA, 203 bp, synthetic construct
  source 1..203: mol_type = other DNA
ggcgcgccagtcctccccccccaaaaaaaagccatccccccgctctgccccgtcgcacattcggcccccgcgactcggccagagcggcgctggcagaggagtgtccggcaggagggccaacgcccgctgttcggtttgcgacacgcagcagggaggtgggcggcagcgtcgccggcttccagacaccacgactcggaccgatg

SEQ ID NO: 773 - DNA, 203 bp, synthetic construct
  source 1..203: mol_type = other DNA
ggcgcgccagtcctagagcccgacctggttttcagccccagccccgccactgagtggctttgtgagtgcgggcaagtcactcagcctccctaggcctcagtgacttccctgaaagcaagaattccactttcttgctgttgtgatggtggtaagggaacgggcctggctctggcccctgacgcaggaaccgactcggaccgatg

SEQ ID NO: 774 - DNA, 203 bp, synthetic construct
  source 1..203: mol_type = other DNA
ggcgcgccagtcctacagtggacctaggaaaccctcagctcagagaacaaccctgcattccccacacaacacccacaatcagccactgcgggcgaggagggcacgaggccaggttcccaagagctcaggaacatggagctgatccaggacacctcccgcccgccactggagtacgtgaagggggtccccgactcggaccgatg

SEQ ID NO: 775 - DNA, 203 bp, synthetic construct
  source 1..203: mol_type = other DNA
ggcgcgccagtcctcttgtcgcctaggtccacccgagccccctcccccgggccgcccccgagcacgaagttggcgggagcctataaaagctggtgccggcgcgacccgcggacacacagtgcaggcgcccaagccgccgccgccagatcggtgccgattcctgccctgccccgaccgccagcgcgacccgactcggaccgatg

SEQ ID NO: 776 - DNA, 203 bp, synthetic construct
  source 1..203: mol_type = other DNA
ggcgcgccagtccttacatccagatgccgggaatgcactgacgcccattcctggaaactgggctcccactcagcccctgggagcagcagccgccagcccctcgggacctccatctccaccctgctgagccacccgggttgggccaggatcccggcaggctgatcccgtcctccactgagacctgaaaacgactcggaccgatg

SEQ ID NO: 777 - DNA, 203 bp, synthetic construct
  source 1..203: mol_type = other DNA
ggcgcgccagtcctatccacgaccaagctcttccacctgcggagctcgcttagtctgcacctcaaccgtgcggaaagtgactgccctgtttactgaggaaaaactggggctcagaaagataccatggagtagtttgaaacaggaacaaaatcttctgaaagctcggagcagaagcctttttggtcaaccgactcggaccgatg

SEQ ID NO: 778 - DNA, 203 bp, synthetic construct
  source 1..203: mol_type = other DNA
ggcgcgccagtcctcgcatctcccaggttagctgcgtgtccgggtgctaggctgcagacccgccgccatgacgctgcgcgcggccgtcttcgaccttgacggggtgctggcgctgccagcggtgttcggcgtcctcggccgcacggaggaggccctggcgctgcccagagggtgccactacccggcttcgactcggaccgatg

SEQ ID NO: 779 - DNA, 203 bp, synthetic construct
  source 1..203: mol_type = other DNA
ggcgcgccagtcctgagtaggcgcgagctaagcaggaggcggaggcggaggcggagggcgaggggcggggagcgccgcctggagcgcggcaggtcatattgaacattccagatacctatcattactcgatgctgttgataacagcaagatggctttgaactcagggtcaccaccagctattggaccttcgactcggaccgatg

SEQ ID NO: 780 - DNA, 203 bp, synthetic construct
  source 1..203: mol_type = other DNA
ggcgcgccagtcctagagagtgttcaagaaggaagtgtatcttcatacatcaccacacctgaaagcagcaccaaagcagccataaacaatatgtaaataaacagatgtggctgtattccagtacaactttacctacaaaaacaggcatcagaccagcttgccaacttgtggcatagactgtttgctaccgactcggaccgatg

SEQ ID NO: 781 - DNA, 203 bp, synthetic construct
  source 1..203: mol_type = other DNA
ggcgcgccagtcctctaaggcactgagcgtatcatgttaaagatgagcgggtggcagcgacagagccaaaatcagagctggaacctgaggagagagtgttcaagaaggaagtgtatcttcatacatcaccacacctgaaagcaggcatcagaccagcttgccaacttgtggcatagactgtttgctaccgactcggaccgatg

SEQ ID NO: 782 - DNA, 203 bp, synthetic construct
  source 1..203: mol_type = other DNA
ggcgcgccagtcctgggggaacgcgggagtcgggcccgacctgagccacgcgggcttggtgcccacctgtgcgcgccgcctgcgaagaaggaacggtctggggagaaggcgccgccggccgcccccgtccccaccgcggccgtcgctggagagttcgagccgcctagcgcccctggagctccccaacccgactcggaccgatg

SEQ ID NO: 783 - DNA, 203 bp, synthetic construct
  source 1..203: mol_type = other DNA
ggcgcgccagtcctactgccgcggccctgctgctcagggcacatgcctcccctccccaggccgcggcccagctgaccctcggggctcccccggcagcggacagggaagggttaaaggcccccggctccctgccccctgccctggggaacccctggccctgtggggacatgaactgtgtttgccgcctgcgactcggaccgatg

SEQ ID NO: 784 - DNA, 203 bp, synthetic construct
  source 1..203: mol_type = other DNA
ggcgcgccagtcctgaccggaggagcggggccgggagctgcgaggagccctccagacgtcgccgagcgcgagggcgggcgtgctcggagtggtcgctcgtcagccgccgcccctcagtctccgcacttgcaggtcccctccctctccgccgggacgcgggagagcccggctcgcggcgggggcggccacgactcggaccgatg

SEQ ID NO: 785 - DNA, 203 bp, synthetic construct
  source 1..203: mol_type = other DNA
ggcgcgccagtcctagggctggtgctggccctgcccacgcctagggctccggcgcgtcacgggcctcagctgggattcccgcgcccctcggacggccacgagactcggacatctttccaggaacagcgtgaggaggacagaagcacccaacaggactgctcaagccacctgcgaacactgctgctacccgactcggaccgatg

SEQ ID NO: 786 - DNA, 203 bp, synthetic construct
  source 1..203: mol_type = other DNA
ggcgcgccagtcctgtttctggacccggccaccccccgcgtccgcaccgccgcccccgagggacgagtgacagcggccgccgcgctcggtccagtcttcccggctggaaggtattgttgcagcatctggcagtgagactgaggatgaggacagcatggacattcccttggacctttcttcatccgctgcgactcggaccgatg

SEQ ID NO: 787 - DNA, 203 bp, synthetic construct
  source 1..203: mol_type = other DNA
ggcgcgccagtcctacatctcccggcaggctgcggaagggggtcgagtagaaggaccgccgctccggcctcccgcgacttctcgaaggtgggcaggtcccaccttgtggaggatggaggtgaccggggacgccggggtaccagaatctggcgagatccggactctaaagccgtgtctgctgcgccgcacgactcggaccgatg

SEQ ID NO: 788 - DNA, 203 bp, synthetic construct
  source 1..203: mol_type = other DNA
ggcgcgccagtcctggctgtttcctggccgaggtgggtcggtagtagcgatggcgggtctgactgacttgcagcggctacaggcccgagtggaagagctggagcgctgggtgtacgggccgggcggggcgcgcggctcacggaaggtggctgacggcctggtcaaggtgcaggtggctttggggaacacgactcggaccgatg

SEQ ID NO: 789 - DNA, 203 bp, synthetic construct
  source 1..203: mol_type = other DNA
ggcgcgccagtccttcgtttacctcttcattctactctaaaggcatcgttattaggaaaatcctgttgtgaataagaaggattccacagatcacataccagagcggttttgcctcagctgctctcaactttgtaatcttgtgaagaagctgacaagcttggctgattgcagtgcactatgaggactgacgactcggaccgatg

SEQ ID NO: 790 - DNA, 203 bp, synthetic construct
  source 1..203: mol_type = other DNA
ggcgcgccagtcctaggtactctgtgtcatttttgatactgtaggtatcttatttcatttatctttattcttaatgtacgaattcataatatttgattcagaacagatttatcactaattaacagagtgtcaattatgctaacatctcatttactgattttaatttaaaacagtttttgttaacatgccgactcggaccgatg

SEQ ID NO: 791 - DNA, 203 bp, synthetic construct
  source 1..203: mol_type = other DNA
ggcgcgccagtcctacaatcctttgcggtggttcaagatggcggcgcccagtggcactgtgagcgattcggaaagtagtaacagcagtagcgatgcggaggagctggagcggtgccgcgaggcggcaatgccggcttggggcttggagcaacgcccgcacgtggcagggaagccaagagccggtgctgcgactcggaccgatg

SEQ ID NO: 792 - DNA, 203 bp, synthetic construct
  source 1..203: mol_type = other DNA
ggcgcgccagtcctggctgctatagagccgggtgagagagcgagcgcccgtcggcgggtgtcgagggcgggttgcctcgcgctgacccttcccgccctccttctcgtcacacaccaggtccccgcggaagccgcggtgtcggcgccatggcggagctgacggctcttgagagtctcatcgagatgggccgactcggaccgatg

SEQ ID NO: 793 - DNA, 203 bp, synthetic construct
  source 1..203: mol_type = other DNA
ggcgcgccagtcctatttataagcaatagtagcttatttggctcacagttctggaggctgagaagatcgtgaggctgcatctggcaagggccttcttgctgcttcataacatggcagaagacatcatgcgggtgtgtgtctggggaagagacttacagaagtggagttgctgagtcaaagatctaacccgactcggaccgatg

SEQ ID NO: 794 - DNA, 203 bp, synthetic construct
  source 1..203: mol_type = other DNA
ggcgcgccagtcctatgtctggccgtggtaaaggtggaaaaggtttgggtaagggaggagctaagcgtcatcgcaaggttttgcgcgataacatccagggcatcactaagccagctatccggcgccttgctcgtcgcggcggtgtcaagcgaatttctggccttatctatgaggagactcgtggtgttcgactcggaccgatg

SEQ ID NO: 795 - DNA, 203 bp, synthetic construct
  source 1..203: mol_type = other DNA
ggcgcgccagtcctgtttatgaccgccgcagccaactcctggccggagctggagacgcagcgagcgatcggccggcctcgaacccccacagctggagggcgaggccagctgtacccggccccagtgccctttcgcggccacaagcggccgtcctcctggtccggtgctccggcgcctgatctaggttccgactcggaccgatg

SEQ ID NO: 796 - DNA, 203 bp, synthetic construct
  source 1..203: mol_type = other DNA
ggcgcgccagtcctggagaggccgaggcgtagcctaagcgtgggattccgcgcgtgcgctcggctccgcctggtgcggccgcggccgggagggactggattatgtcggccccgtttgaggagcggagtggggtggtaccgtgcgggaccccgtggggccagtggtaccagaccttggaggaggtgttccgactcggaccgatg

SEQ ID NO: 797 - DNA, 203 bp, synthetic construct
  source 1..203: mol_type = other DNA
ggcgcgccagtcctctcatctttgtcagtgcacaaaatggcgccctacagcctactggtgactcggctgcagaaagctctgggtgtgcggcagtaccatgtggcctcagtcctgtgccaacgggccaaggtggcgatgagccactttgagcccaacgagtacatccattatgacctgctagagaagaacgactcggaccgatg

SEQ ID NO: 798 - DNA, 203 bp, synthetic construct
  source 1..203: mol_type = other DNA
ggcgcgccagtcctgagcggtgccgcaccggccgcgggcgcagggagtattatgggctgtgggtgccgctgagcaagatggagctgtctgcagtgggcgagcgggtcttcgcggccgaatccatcatcaaacggcggatccgaaagggacgcatcgagtacctggtgaaatggaaggggtgggcgatccgactcggaccgatg

SEQ ID NO: 799 - DNA, 203 bp, synthetic construct
  source 1..203: mol_type = other DNA
ggcgcgccagtcctcctcttttccgtggcgcctcggaggcgttcagctgcttcaagatgaagctgaacatctccttcccagccactggctgccagaaactcattgaagtggacgatgaacgcaaacttcgtactttctatgagaagcgtatggccacagaagttgctgctgacgctctgggtgaagaacgactcggaccgatg

SEQ ID NO: 800 - DNA, 203 bp, synthetic construct
  source 1..203: mol_type = other DNA
ggcgcgccagtcctgctccgctgaatccgcccgcgcgtcgccgccgtcgtcgccgccccccgtcccggcccccctgggttccctcagcccagccctgtccagcccggttcccgggaggatgaagttcgtgtacaaagaagagcatccgttcgagaagcgccgctctgagggcgagaagatccgaaagacgactcggaccgatg

SEQ ID NO: 801 - DNA, 203 bp, synthetic construct
  source 1..203: mol_type = other DNA
ggcgcgccagtcctgagcgcagagcggtttggtcgttcgttgggcggtgctggtttttcgctcgtcgactgcggctcttcctcgggcagcggaagcggcgcggcggtcggagaagtggcctaaaacttcggcgttgggtgaaagaaaatggcccgaaccaagcagactgctcgtaagtccaccggtggcgactcggaccgatg

SEQ ID NO: 802 - DNA, 203 bp, synthetic construct
  source 1..203: mol_type = other DNA
ggcgcgccagtccttccggttccggcctggcgagagtttgtgcggcgacatgaaactgcttacccacaatctgctgagctcgcatgtgcggggggtggggtcccgtggcttccccctgcgcctccaggccaccgaggtccgtatctgccctgtggaattcaaccccaacttcgtggcgcgtatgataccgactcggaccgatg

SEQ ID NO: 803 - DNA, 203 bp, synthetic construct
  source 1..203: mol_type = other DNA
ggcgcgccagtcctataagctgggtcccgatgccgcgagcggaatctcggcgctcccggaagtggcctgaaggccgcgcgccagtcccgagcagtgctcgctcctgctcggggcgctgcggccccgggcgtcgccatgaccagtgagctggacatcttcgtggggaacacgacccttatcgacgaggacgactcggaccgatg

SEQ ID NO: 804 - DNA, 203 bp, synthetic construct
  source 1..203: mol_type = other DNA
ggcgcgccagtcctagtgaaacagaaggggaggtgcagtttcagaacccagccagcctctctcttgctgcctagcctcctgccggcctcatcttcgcccagccaaccccgcctggagccctatggccaactgcgagttcagcccggtgtccggggacaaaccctgctgccggctctctaggagagccccgactcggaccgatg

SEQ ID NO: 805 - DNA, 203 bp, synthetic construct
  source 1..203: mol_type = other DNA
ggcgcgccagtcctgggcacgagggcagagccagttcctagcgcagagccgcgcccgccatgagggagatcgtgcacatccaggcgggccagtgcgggaaccagatcggcaccaagttttgggaagtgatcagcgatgagcacggcatcgacccggccggaggctacgtgggagactcggcgctgcagcgactcggaccgatg

SEQ ID NO: 806 - DNA, 203 bp, synthetic construct
  source 1..203: mol_type = other DNA
ggcgcgccagtcctggtggcgggaagaggaggcgcgagaatggaggtggaggccgtctgtggtggcgcgggcgaggtggaggcccaggactctgaccctgcccctgccttcagcaaggcccccggcagcgccggccactacgaactgccgtgggttgaaaaatataggccagtaaagctgaatgaaatcgactcggaccgatg

SEQ ID NO: 807 - DNA, 203 bp, synthetic construct
  source 1..203: mol_type = other DNA
ggcgcgccagtcctgggcgcagagctggcgctctagcccacggagttggttaactcctctcaccggcccctggaaagggttccaagtcctttagtacccgacgctgtctgggaattccgggcgtttcggctccttggtcgcagaggcaggaggcacccgaccgcatgtctgtcatggacctcgccaatcgactcggaccgatg

SEQ ID NO: 808 - DNA, 203 bp, synthetic construct
  source 1..203: mol_type = other DNA
ggcgcgccagtcctgccacttctcttcccttcattcttcgccaggctctctgctgactcaagttcttcagttcacgatcttctagttgcagcgatgagtgcacgagtgagatcaagatccagaggaagaggagatggtcaggaggctcccgatgtggttgcattcgtggctcccggtgaatctcagcacgactcggaccgatg

SEQ ID NO: 809 - DNA, 203 bp, synthetic construct
  source 1..203: mol_type = other DNA
ggcgcgccagtcctctgctccttccgcgggtttccgactccctgccctagattttctgcttagcgacttggggtcccctctcgtttgcttctggtaggagtcgcaatcccagcagcaatagcccagaagaggacacggttcccgtaccgaagggttcagtaccagcagcccgaccatcacgcggcgggcgactcggaccgatg

SEQ ID NO: 810 - DNA, 203 bp, synthetic construct
  source 1..203: mol_type = other DNA
ggcgcgccagtcctgcctggcgggagtcttgtctgagctggcaccaccacacggcccacgacatcttcgcagggaagcctgtggaccctctgccaggctccacaagaggtcaggacagtgcagtgtgttcacaaggccagtttctgatcgtccgccccgaggctgaggaccagtaggcagctcccaagcgactcggaccgatg

SEQ ID NO: 811 - DNA, 203 bp, synthetic construct
  source 1..203: mol_type = other DNA
ggcgcgccagtcctcgttgctgcccggaggctcctacgccacggcccgtcgggcccggcgccggaagtgagctgttccgaggcgccgccgggagctgccacgtccgagacctggagcagccaccgccgcaatcatggtgtcagtaattaacactgtggatacctcccatgaggacatgattcacgacgcgactcggaccgatg

SEQ ID NO: 812 - DNA, 203 bp, synthetic construct
  source 1..203: mol_type = other DNA
ggcgcgccagtccttgagccggccgcacgcggaggatcctaaggagcagctctgttgcgacataggccgagcagcgaggcccagctccctgaaacaacagtaacctacccctgtgggtcatcatcatgccctccgacctggccaagaagaaggcagccaaaaagaaggaggctgccaaagctcgacagcgactcggaccgatg

SEQ ID NO: 813 - DNA, 203 bp, synthetic construct
  source 1..203: mol_type = other DNA
ggcgcgccagtcctcacgaagcgccgctgggtctgggtgcccggaggcagcagcgttcgcggagttcgcccgctggcccccgatcaccatgtcggctttcgacaccaaccccttcgcggacccagtggatgtaaaccccttccaggatccctctgtgacccagctgaccaacgccccgcagggcggcccgactcggaccgatg

SEQ ID NO: 814 - DNA, 203 bp, synthetic construct
  source 1..203: mol_type = other DNA
ggcgcgccagtcctgcatttggggctgaagttccctgtgggaggctgttttctgagggagctgagtgtttacagccactcagccctgctctgctcagctgaagcagaaaacagagaccttttgcattactttggttcaagagcaagacaggaggcgactgcatgagaccatggctgagacacctagtccgactcggaccgatg

SEQ ID NO: 815 - DNA, 203 bp, synthetic construct
  source 1..203: mol_type = other DNA
ggcgcgccagtcctcgcggagggagggccctgtcccctgtccctttaaggaggagggccaaacgccggcctagagtgcggcgtagcccccacccgccgtgccctcaccccagagcagctgcagcctcagccggccgcccctccgccagccaagtccgccgctctgacccccggcagcaagtcgccacccgactcggaccgatg

SEQ ID NO: 816 - DNA, 203 bp, synthetic construct
  source 1..203: mol_type = other DNA
ggcgcgccagtcctggacgctgaggcccgggagaggcagctggagaagggcctggtctttctcaacggcaaattggggaggatcatttaggatcctccaagggaaagaggacaaaggtgccttctgtagacactcctgctctcttccatccccatcttacagatgtattaagaagcctcagatgagcacgactcggaccgatg

SEQ ID NO: 817 - DNA, 203 bp, synthetic construct
  source 1..203: mol_type = other DNA
ggcgcgccagtcctgcggcatgggcagtatccgccgccatcctcttccgtgaggcgcgctgagaccgggaccggccctcctgagaggatgccggtgcgggcgcccgcggagagggacccgtcgccatgggccgtgtgatccgtggacagaggaagggcgccgggtctgtgttccgcgcgcacgtgaagcgactcggaccgatg

SEQ ID NO: 818 - DNA, 203 bp, synthetic construct
  source 1..203: mol_type = other DNA
ggcgcgccagtcctcctttcctcagctgccgccaaggtgctcggtccttccgaggaagctaaggctgcgttggggtgaggccctcacttcatccggcgactagcaccgcgtccggcagcgccagccctacactcgcccgcgccatggcctctgtctccgagctcgcctgcatctactcggccctcattcgactcggaccgatg

SEQ ID NO: 819 - DNA, 203 bp, synthetic construct
  source 1..203: mol_type = other DNA
ggcgcgccagtcctccggccccaggcggtgcttctccccaccaccgcccagctcagctcagcccagcccagcccactctgcccttagaggcccttctccccaaagacgcactccagaagtctcgccctcgtgcggctgaggagcctgggatcccagacctgaacaagtgaaacccccgcccctgaagacgactcggaccgatg

SEQ ID NO: 820 - DNA, 203 bp, synthetic construct
  source 1..203: mol_type = other DNA
ggcgcgccagtcctcgaaaaagaagcagtcctgggctgtacccggcgcagctgggagcggctgcttcctccggggtcgtatctccgcccggcatggggctgctggacctttgcgaggaagtgttcggcaccgccgacctttaccgggtgctgggcgtgcgacgcgaggcctccgacggcgaggtccgacgactcggaccgatg

SEQ ID NO: 821 - DNA, 203 bp, synthetic construct
  source 1..203: mol_type = other DNA
ggcgcgccagtcctgatccctgagcgtgtggcagcagtgcggtcgtggtccctccctatgcagcctggtttctagcgtgacacgcccttgacttgaggaccatgaaccgcagccgccaggtgacgtgcgtggcctgggtccgctgcggcgtggccaaagagacaccagacaaggtagagctgagtaaacgactcggaccgatg

SEQ ID NO: 822 - DNA, 203 bp, synthetic construct
  source 1..203: mol_type = other DNA
ggcgcgccagtcctcgccgccgtggtagcagcctcagccgtttctggagtctcgggcccacagtcaccgccgcttacctgcgcctcctcgagcctccggagtccccgtccgcccgcacaggccggttcgccgtctgcgtctcccccacgccgcctcgcctgccgccgcgctcgtccctccgggccgaccgactcggaccgatg

SEQ ID NO: 823 - DNA, 203 bp, synthetic construct
  source 1..203: mol_type = other DNA
ggcgcgccagtccttccaggttcacacaactggaacccatctccaggaacaaacagctggaacccatctcccgttgaagggaaactgccagatttttgtaagattcttcctcctgggcacctctaagatactgatggctctgcagaggacccattcattgcttctgcttttgctgctgaccctgctggcgactcggaccgatg

SEQ ID NO: 824 - DNA, 203 bp, synthetic construct
  source 1..203: mol_type = other DNA
ggcgcgccagtcctacagagctccctcccaggcccgcgaacttggccattcagccgccgctgtccccgctgcgcgccctcgcgcctctgcctgagaagccaggcgctgttcccccaccccagaagaggatggcaaaggtggctaaggacctcaacccaggagttaaaaagatgtccctgggccagctgcgactcggaccgatg

SEQ ID NO: 825 - DNA, 203 bp, synthetic construct
  source 1..203: mol_type = other DNA
ggcgcgccagtcctcgacgctgagatgggggcggcggcggcggaagcggatcgcactctctttgtgggcaaccttgaaacgaaagtgaccgaggagctccttttcgagcttttccaccaggctgggccagtaataaaggtgaaaattccaaaagataaggatggtaaaccaaagcagtttgcgtttgtcgactcggaccgatg

SEQ ID NO: 826 - DNA, 203 bp, synthetic construct
  source 1..203: mol_type = other DNA
ggcgcgccagtccttcgcgaggtggcgatcgctgagaggcaggagggccgaggcgggcctgggaggcggcccggaggtggggcgccgctggggccggcccgcacgggcttcatctgagggcgcacggcccgcgaccgagcgtgcggactggcctcccaagcgtggggcgacaagctgccggagctgcacgactcggaccgatg

SEQ ID NO: 827 - DNA, 203 bp, synthetic construct
  source 1..203: mol_type = other DNA
ggcgcgccagtcctccctctaggcagcggaagtgcagcttgctttacatccgtcctccccgcctcgcagagttgggagaaggcagggtggggggtgtggaaaaataaaaggaaaagtccttgcaccatgtagatcagcgtcccccactttggcatcccggccggccggggacctcccagtctgcggcccgactcggaccgatg

SEQ ID NO: 828 - DNA, 203 bp, synthetic construct
  source 1..203: mol_type = other DNA
ggcgcgccagtcctgggcaaggctgggccgggaagggcgtgggttgaggagaggctccagacccgcacgccgcgcgcacagagctctcagcgccgctcccagccacagcctcccgcgcctcgctcagctccaacatggcaaaaatctccagccctacagagactgagcggtgcatcgagtccctgattcgactcggaccgatg

SEQ ID NO: 829 - DNA, 203 bp, synthetic construct
  source 1..203: mol_type = other DNA
ggcgcgccagtcctggagcgaaggtaggaggcagggcttgcctcactggccaccctcccaaccccaagagcccagccccatggtccccgccgccggcgcgctgctgtgggtcctgctgctgaatctgggtccccgggcggcgggggcccaaggcctgacccagactccgaccgaaatgcagcgggtcacgactcggaccgatg

SEQ ID NO: 830 - DNA, 203 bp, synthetic construct
  source 1..203: mol_type = other DNA
ggcgcgccagtcctaggagctgagtgggccccggccctcagcccgtcccgccggacccgctttcctcaactctccatcttctcctgccgaccgagatcgccgaggcggcctcaggctccctagccccttccccgtcccttccccgcccccgtccccgccccgggggccgccgccacccgcctcccacccgactcggaccgatg

SEQ ID NO: 831 - DNA, 203 bp, synthetic construct
  source 1..203: mol_type = other DNA
ggcgcgccagtcctgcgccgagacccgctcctgcagtattagttcttgcagctggtggtggcggctgaggcggcatggatctcagcgagctggagagagacaatacaggccgctgtcgcctgagttcgcctgtgcccgcggtgtgccgcaaggagccttgcgtcctgggcgtcgatgaggcgggcaggcgactcggaccgatg

SEQ ID NO: 832 - DNA, 203 bp, synthetic construct
  source 1..203: mol_type = other DNA
ggcgcgccagtcctgtgatgcgtagttccggctgccggttgacatgaagaagcagcagcggctagggcggcggtagctgcaggggtcggggattgcagcgggcctcggggctaagagcgcgacgcggcctagagcggcagacggcgcagtgggccgagaaggaggcgcagcagccgccctggcccgtccgactcggaccgatg

SEQ ID NO: 833 - DNA, 203 bp, synthetic construct
  source 1..203: mol_type = other DNA
ggcgcgccagtccttcccacccccagcctggggcctctgggagccttggtcctgagcagccaacacaccagcccagacagctgcaagtcaccatggacgctgaaggcctggcgctgctgctgccgcccgtcaccctggcagccctggtggacagctggctccgagaggactgcccagggctcaactaccgactcggaccgatg

SEQ ID NO: 834 - DNA, 203 bp, synthetic construct
  source 1..203: mol_type = other DNA
ggcgcgccagtcctcgcgtcgggctgcaggagaagatggcggtctccacaggagttaaagttcctcgtaattttcgcttgttggaagaacttgaagaaggacaaaaaggagtaggcgacggtacagttagctggggccttgaagatgatgaagatatgacacttacaaggtggacaggcatgattattcgactcggaccgatg

SEQ ID NO: 835 - DNA, 203 bp, synthetic construct
  source 1..203: mol_type = other DNA
ggcgcgccagtcctgatccacaagtatatcctgagttcacttacctcttgggtggcagcacacatcggtccaccctgcttgtccagaaactgttaagagttggaagttcagaagaaaaaaaaaaggaattgaatgatctggcacgggaccctccagcacagtgttcagcaggtcctgttggagatgatcgactcggaccgatg

SEQ ID NO: 836 - DNA, 203 bp, synthetic construct
  source 1..203: mol_type = other DNA
ggcgcgccagtcctgactgtctacattagtaattcccaacttgggtccgaaagtgaacttttgctgaagcgaagtagctaaccgcttccatgtgcaaggcaggttccagacttcggggtgaggaggattaactgaaggaccccaggggaaccggtgtgctcactgatccgcctccagggccaccgccacgactcggaccgatg

SEQ ID NO: 837 - DNA, 203 bp, synthetic construct
  source 1..203: mol_type = other DNA
ggcgcgccagtcctacgcggtgccgcggggcgggagtagaggcggagggaggggacacgggctcattgcggtgtgcgccctgcactctgtccctcactcgccgccgacgacctgtctcgccgagcgcacgccttgccgccgccccgcagaaatgcttcggttacccacagtctttcgccagatgagaccgactcggaccgatg

SEQ ID NO: 838 - DNA, 203 bp, synthetic construct
  source 1..203: mol_type = other DNA
ggcgcgccagtcctcatgcctgaaccagctaagtcagctcctgctccgaagaagggttccaagaaggctgtgaccaaggcgcagaagaaggatggcaagaagcgcaagcgcagtcgtaaggagagctactccgtgtatgtgtacaaggtgctaaaacaggttcaccccgatactggcatctcatccaacgactcggaccgatg

SEQ ID NO: 839 - DNA, 203 bp, synthetic construct
  source 1..203: mol_type = other DNA
ggcgcgccagtcctgacgtgtctttcaggaagaggagctggtgagaagacagcgaaatggcgcctccggcccccggcccggcctccggcggctccggggaggtagacgagctgttcgacgtaaagaacgccttctacatcggcagctaccagcagtgcataaacgaggcgcagcgggtgaagctatcacgactcggaccgatg

SEQ ID NO: 840 - DNA, 203 bp, synthetic construct
  source 1..203: mol_type = other DNA
ggcgcgccagtcctggggcggtgcagaggcggcaggaagatggagttggggagttgcctggagggcgggagggaggcggcggaggaagagggcgagcctgaggtgaaaaagcggcgacttctgtgtgtggagtttgcctcggtcgcaagctgcgatgccgcagtggctcagtgcttcctggccgagaacgactcggaccgatg

SEQ ID NO: 841 - DNA, 203 bp, synthetic construct
  source 1..203: mol_type = other DNA
ggcgcgccagtcctgccctggatccggcgtcagggcgaccgggcggacgaggtggagccagagtctgtcaggcgggttggtgaagggcgcggggccgggcacggcgttgggagtgcgcggcagggaccggccaggcgggctgcaggcacctcagagcccgggacaccccctcaacgtccgcaggcgcgcgactcggaccgatg

SEQ ID NO: 842 - DNA, 203 bp, synthetic construct
  source 1..203: mol_type = other DNA
ggcgcgccagtcctaggcggagctgggtgcgagcgccctaccgctttcgctttcccttcgcggtgcccactccactccttgtgcggcgctaggccccccgtcccggtcatggccatgctcagggtccagcccgaggcccaagccaaggtggatgtgtttcgtgaagacctctgtaccaagacagagaacgactcggaccgatg

SEQ ID NO: 843 - DNA, 203 bp, synthetic construct
  source 1..203: mol_type = other DNA
ggcgcgccagtcctagcaacggggtgcggcagggtggggaacgcgggagcggggccagctcccaggaaagctggtctgcgagcggcccctgcccggctcccaggtccctgcgcgaccccgcccttcccgagaccccagccgggctgccgcccgcgtcccggaagctccagcctgaaccatgtttttcacgactcggaccgatg

SEQ ID NO: 844 - DNA, 203 bp, synthetic construct
  source 1..203: mol_type = other DNA
ggcgcgccagtcctctctttccagccagcgccgagcgatgggcatctctcgggacaactggcacaagcgccgcaaaaccgggggcaagagaaagccctaccacaagaagcggaagtatgagttggggcgcccagctgccaacaccaagattggcccccgccgcatccacacagtccgtgtgcggggagcgactcggaccgatg

SEQ ID NO: 845 - DNA, 203 bp, synthetic construct
  source 1..203: mol_type = other DNA
ggcgcgccagtcctcgggcgggtgtggccaggggtgtgggtctgtgagggaccggtcggaagggcgtcgcgcggcctcgggtgacatgcggggggcggcgagcgcgagtgtccgcgagccgacgccgctcccgggtagaggcgccccccgcacaaagccccgggcgggccgaggcccgactgtagggacgactcggaccgatg

SEQ ID NO: 846 - DNA, 203 bp, synthetic construct
  source 1..203: mol_type = other DNA
ggcgcgccagtccttccgcttccgtccacttggcgagtgagacgctgatgggaggatggacgtactggtgtctgagtgctccgcgcggctgctgcagcaggaagaagagattaaatctctgactgctgaaattgaccggttgaaaaactgtggctgtttaggagcttctccaaatttggagcagttaccgactcggaccgatg

SEQ ID NO: 847 - DNA, 203 bp, synthetic construct
  source 1..203: mol_type = other DNA
ggcgcgccagtcctgggtagccgactggggtctcctggcgacgaccatggcgggggatgtgggcggtcgcagctgcacggactcggaactgctgctgcacccggagctgctgtcccaggagttccttctcctcactctggagcagaagaacatagctgttgaaactgatgtaagagtaaacaaagacacgactcggaccgatg

SEQ ID NO: 848 - DNA, 203 bp, synthetic construct
  source 1..203: mol_type = other DNA
ggcgcgccagtcctgcagaggccgagtccgtcactggaagccgagaggagaggacagctggttgtgggagagttcccccgcctcagactcctggttttttccaggagacacactgagctgagactcacttttctcttcctgaatttgaaccaccgtttccatcgtctcgtagtccgacgcctggggcgcgactcggaccgatg

SEQ ID NO: 849 - DNA, 203 bp, synthetic construct
  source 1..203: mol_type = other DNA
ggcgcgccagtcctgcagaagcgttccgtgcgtgcaagtgctgcgaaccacgtgggtcccgggcgcgtttcgggtgctggcggctgcagccggagttcaaacctaagcagctggaaggaaccatggccaactgtgagcgtaccttcattgcgatcaaaccagatggggtccagcggggtcttgtgggacgactcggaccgatg

SEQ ID NO: 850 - DNA, 203 bp, synthetic construct
  source 1..203: mol_type = other DNA
ggcgcgccagtcctgcggaggcaggaggagcagtctcattgttccgggagccgtcaccacagtaggtccctcggctcagtcggcccagcccctctcagtcctccccaacccccacaaccgcccgcggctctgagacgcggccccggcggcggcggcagcagctgcagcatcatctccaccctccagcccgactcggaccgatg

SEQ ID NO: 851 - DNA, 203 bp, synthetic construct
  source 1..203: mol_type = other DNA
ggcgcgccagtcctcgctctcctttcgttgcctgatcgccgccatcatgggtcgcatgcatgctcccgggaagggcctgtcccagtcggctttaccctatcgacgcagcgtccccacttggttgaagttgacatctgacgacgtgaaggagcagatttacaaactggccaagaagggccttactccttcgactcggaccgatg

SEQ ID NO: 852 - DNA, 203 bp, synthetic construct
  source 1..203: mol_type = other DNA
ggcgcgccagtcctgagaggcgcccaggcggcggcggcggcggcccagcttcttctttcctcgcacagccaggcggcccctgctcgagtcccgcgtcgccatggccgcggttcccgagttgctgcagcagcaggaggaggaccgcagcaagctgagatctgtatctgtggacctgaatgttgatccctcgactcggaccgatg

SEQ ID NO: 853 - DNA, 203 bp, synthetic construct
  source 1..203: mol_type = other DNA
ggcgcgccagtcctgacggagggaggactcgggacagggaattggccctgggagaaaacgcgcggggggcgtccgagacgccccgtgaaagccgtgccgacccttgggaggactgacaggtctagagacacgcgctgtctgttgtggtgggcctcccgggaataagtgaggggctctgtgtttcgaggcgactcggaccgatg

SEQ ID NO: 854 - DNA, 203 bp, synthetic construct
  source 1..203: mol_type = other DNA
ggcgcgccagtcctccgtgagtctgaccttaggtgtctcgtgtctggggttgatccgagctgtcgccgccgccgccgcaatgggcaaaacggccaactctccgggttcgggagcccgacccgacccggtgcggagcttcaatcgctggaagaaaaaacacagccataggcagaacaaaaagaagcagtcgactcggaccgatg

SEQ ID NO: 855 - DNA, 203 bp, synthetic construct
  source 1..203: mol_type = other DNA
ggcgcgccagtcctagctgaacagaggccatgccggggcactccgaggcctgagacgaccacgcctgtgccgctgaggaccttcatcagggctccgtccacttggcccgcttggctgtccaatcacactccagtgtcaaccactggcacccagcagccaagagaggtgtggcgtggccctggggacgccgactcggaccgatg

SEQ ID NO: 856 - DNA, 203 bp, synthetic construct
  source 1..203: mol_type = other DNA
ggcgcgccagtcctcagaggtcagacggtctagcgctgcgtgggccatggtgcagctccgaccgcgagcgtctcgcgccccggcgtcggcggaggcgatggtggacgagggccagctggcctcggaggaggaggaggcggagcacgggctgttgctcgggcagcccagcagcggcgcggccgccgagccgactcggaccgatg

SEQ ID NO: 857 - DNA, 203 bp, synthetic construct
  source 1..203: mol_type = other DNA
ggcgcgccagtcctgggctgcttggcagccaccggcctgcaactcaggaacccctccagaggccatggacaggctgccccgctgacggccagggtgaagcatgtgaggagccgccccggagccaagcaggagggaagaggctttcatagattctattcacaaagaataaccaccattttgcaaggacccgactcggaccgatg

SEQ ID NO: 858 - DNA, 203 bp, synthetic construct
  source 1..203: mol_type = other DNA
ggcgcgccagtcctggagcctggaggactagcgaggaggagttgagagaacggagcggacgccatggcgaccaacatcgagcagatttttaggtctttcgtggtcagtaaattccgggaaattcaacaggagctttccagtggaaggaatgaaggccagctgaatggtgaaacaaatacacccattgacgactcggaccgatg

SEQ ID NO: 859 - DNA, 203 bp, synthetic construct
  source 1..203: mol_type = other DNA
ggcgcgccagtcctaaacgacgctagctgcccacccctcttagttttccgcctccgacttccctaagggcatttccggttccggctgcgggccggtgaagatatggcggcgtctgcgtctgcagctgcaggggaggaggactgggtccttccctctgaagttgaagtattggagtccatctatctagacgactcggaccgatg

SEQ ID NO: 860 - DNA, 203 bp, synthetic construct
  source 1..203: mol_type = other DNA
ggcgcgccagtcctgcgcactcagggtctgaggcagctagtagccggagggtcaccatgaagttcaatcccttcgttacctgggaccgcagtaaaaaccgcaaacgtcacttcaatgccccctcacacgtgcgcaggaagatcatgtcatccccgctctccaaggagctgcggcagaagtacaatgtccgactcggaccgatg

SEQ ID NO: 861 - DNA, 203 bp, synthetic construct
  source 1..203: mol_type = other DNA
ggcgcgccagtcctctctcttccacaggaggcctacacgccgccgcttgtgctgcagccatgtctctagtgatccctgaaaagttccagcatattttgcgagtactcaacaccaacatcgatgggcggcggaaaatagcctttgccatcactgccattaagggtgtgggccgaagatatgctcatgtgcgactcggaccgatg

SEQ ID NO: 862 - DNA, 203 bp, synthetic construct
  source 1..203: mol_type = other DNA
ggcgcgccagtcctggactttagattcctggaacgggacgtcaggccgtattccggatccctagatcccgtgggagattctccgattccgaacggattccagatcccaagattcctgatctgccggcccaggctcctgccccgcccccggttcccagtgcgcggcgccccgcgcctgagcgcccccgccgactcggaccgatg

SEQ ID NO: 863 - DNA, 203 bp, synthetic construct
  source 1..203: mol_type = other DNA
ggcgcgccagtcctaatccagaggcaggggagggacggtgcaggcgcagagtattgggtttggctggcctcgatttaaagagacagaagctgtcggggtcctggaagacggtccccaataccctccccccaagtccttgggaccacttgggtccccagagctggggagatggtttgtggcggctttgccgactcggaccgatg

SEQ ID NO: 864 - DNA, 203 bp, synthetic construct
  source 1..203: mol_type = other DNA
ggcgcgccagtcctcccctcccttagcgggggcgcgcggcgctgaggaccgcacggaaacggggaagtcaggtggccgctgccgccgccgccgccgcggtttgtcgccagaaggaagatggcggatctggaggagcagttgtctgatgaagagaaggtgcgtatagcagcaaaattcatcattcatgccgactcggaccgatg

SEQ ID NO: 865 - DNA, 203 bp, synthetic construct
  source 1..203: mol_type = other DNA
ggcgcgccagtcctatgtctggtcgtggcaaacaaggaggcaaggcccgcgccaaggccaagtcgcgctcgtcccgcgctggcctccagttcccggtagggcgagtgcaccgcttgctgcgcaaaggcaactacgcggagcgggtgggggcccgcgcgcccgtctacatggcggcggtcctcgagtaccgactcggaccgatg

SEQ ID NO: 866 - DNA, 203 bp, synthetic construct
  source 1..203: mol_type = other DNA
ggcgcgccagtccttctcttgcttcaacagtgtttggacggaacagatccggggactctcttccagcctccgaccgccctccgatttcctctccgcttgcaacctccgggaccatcttctcggccatctcctgcttctgggacctgccagcaccgtttttgtggttagctccttcttgccaaccaacccgactcggaccgatg

SEQ ID NO: 867 - DNA, 203 bp, synthetic construct
  source 1..203: mol_type = other DNA
ggcgcgccagtccttcagcggaagtgagggcggttgaggctgggcggcccaaggtggaaggaggggccgtgaggtgagagagtccgggagcccgagcttgagatggcctgatatgaaggagtcacgcctcccgcctcccggagctgcccagtggctgccttgtccttcaagtgcaggagctggttcaacgactcggaccgatg

SEQ ID NO: 868 - DNA, 203 bp, synthetic construct
  source 1..203: mol_type = other DNA
ggcgcgccagtcctgcccggaaacggaagtctcgttctttttcgtccttttccccggttgctgcttgctgtgagtgtctctagggtgatacgtgggtgagaaaggtcctggtccgcgccagagcccagcgcgcctcgtcgccatgcctcggaaaattgaggaaatcaaggacttcctgctcacagccccgactcggaccgatg

SEQ ID NO: 869 - DNA, 203 bp, synthetic construct
  source 1..203: mol_type = other DNA
ggcgcgccagtcctcagaggcagcggttggaggcgcggtgggtgtctgcgggggtctcgcggggcggctgcggtgtttcaccgggaaaggctcgaggagagcgcggctcacgagagataacccagctgtgctccctggaaccttcaatttcaaggcctccctgcctctactaggcgccttagctcactcgactcggaccgatg

SEQ ID NO: 870 - DNA, 203 bp, synthetic construct
  source 1..203: mol_type = other DNA
ggcgcgccagtcctgcggaaaccggaagcggcggctgtccgcggtgccggctgggggcggagaggcggcggtgggctccctggggtgtgtgagcccggtgatggagccgggcccgacagccgcgcagcggaggtgttcgttgccgccgtggctgccgctggggctgctgctgtggtcggggctggccccgactcggaccgatg

SEQ ID NO: 871 - DNA, 203 bp, synthetic construct
  source 1..203: mol_type = other DNA
ggcgcgccagtccttacatcttttagtgcgtatgttctgtccacccagctactggttcatttgagtagatcggagtcagatgagtacatgtttacgggaggcgcttggttacgggatccagataggaatctttatctgagctgcttgtcagtttgttcgtctgtccctaggtctgtctgctatcagctcgactcggaccgatg

SEQ ID NO: 872 - DNA, 203 bp, synthetic construct
  source 1..203: mol_type = other DNA
ggcgcgccagtcctaagaatcgcgggcctgtctgcaagacttgagttcaggactcccaatccttcgccatccgaacctggagggcatccagtcgacacctacaggggtcggacatgtccaaggctaactgagaggccttccagacgcttcatttttgttgtttgggtttgcggcagggcacaaagaggcgactcggaccgatg

SEQ ID NO: 873 - DNA, 203 bp, synthetic construct
  source 1..203: mol_type = other DNA
ggcgcgccagtcctagaggaacagggccctggagcacctggtttcggggacagtagggttggtgggagttgcgatgatattgccacctacctcttacatcttttagtctgtctgctatcagctatgccgctgcccgttgcgctgcagacccgcttggccaagagaggcatcctcaaacatctggagcccgactcggaccgatg

SEQ ID NO: 874 - DNA, 203 bp, synthetic construct
  source 1..203: mol_type = other DNA
ggcgcgccagtcctctcattgacttccttcctgttctaactgccagtactcagaagtcagagttgagagacagaggcaccccggacagagacgtgaagcactgaataaatagatcagaatgactgaaaaagccccagagccacatgtggaggaggatgatgatgatgagctggacagcaagctcaattcgactcggaccgatg

SEQ ID NO: 875 - DNA, 203 bp, synthetic construct
  source 1..203: mol_type = other DNA
ggcgcgccagtccttctgattggcaccggctcccattccggctccagcctccaatccgacccccatttcggctgcagcctcggacctagctccggccctcggtctatccggttgcatcctccctccctgttccggatcttatcttgcgccagcgcctactccaggatcccgtagccagacctcaagcccgactcggaccgatg

SEQ ID NO: 876 - DNA, 203 bp, synthetic construct
  source 1..203: mol_type = other DNA
ggcgcgccagtcctggtttaaccccgcctcttgcgtcggcgccttccttttcctccctgtcgccaccgaggtcgcacgcgtgagacttctccgccgcctccgccgcagacgccgccgcgatgcgctacgtcgcctcctacctgctggctgccctagggggcaactcctcccccagcgccaaggacatccgactcggaccgatg

SEQ ID NO: 877 - DNA, 203 bp, synthetic construct
  source 1..203: mol_type = other DNA
ggcgcgccagtcctactaagaccgcaaggcattcatttcctcctacggtggatgcggacgccgggaggaggagagccccagagagaggagctgggagcggaggcgcagagaacacgtagcgactccgaagatcagccccaatgaacatgtcagtgttgactttacaagaatatgaattcgaaaagcagcgactcggaccgatg

SEQ ID NO: 878 - DNA, 203 bp, synthetic construct
  source 1..203: mol_type = other DNA
ggcgcgccagtcctaagggggctgctacgtcagcgcgtctcagcgtaagacggcgctattccgctgtaacagcttccggcgggtcctggatgttgatgtcctgcatctaacgcggtgtaacccccgaagccgagcgagctccggaggaatttcagtatctgctacggtaacttcatcagcccgccaagcgactcggaccgatg

SEQ ID NO: 879 - DNA, 203 bp, synthetic construct
  source 1..203: mol_type = other DNA
ggcgcgccagtcctccttaatggcgcccgcccagactcctggaagtgagcggcctagcgagcgagctcccaggcgcaaagcacgccggaagctgtagttccgccatcggacggaagccgaccggggcgtgcggagggatgtggcccggaatattggtagggggggcccgggtggcgtcatgcaggtaccgactcggaccgatg

SEQ ID NO: 880 - DNA, 203 bp, synthetic construct
  source 1..203: mol_type = other DNA
ggcgcgccagtcctgcgctcgcagcggcctcgggagggcccaggtagcgagcagcgacctcgcgagccttccgcactcccgcccggttccccggccgtccgcctatccttggccccctccgctttctccgcgccggcccgcctcgcttatgcctcggcgctgagccgctctcccgattgcccgccgaccgactcggaccgatg

SEQ ID NO: 881 - DNA, 203 bp, synthetic construct
  source 1..203: mol_type = other DNA
ggcgcgccagtcctagctgtcgcgtctggtcgtggtctggcggagctgcggttggcttgtggcgtctccgccgccgccgccctcccttcctcttccccatcttcttctctcggtcccgggagcccccgcccggagagagtcgcggttgctgatcgtggtgcttgagtagagccgtggttggtgacagccgactcggaccgatg

SEQ ID NO: 882 - DNA, 203 bp, synthetic construct
  source 1..203: mol_type = other DNA
ggcgcgccagtcctgtttcctcggcggcctcggagcgcgggtgcagcagttgtgtcccgacccctgggagcgccatggcagagctgtgccccctggccgaggagctgtcgtgctccatctgcctggagcccttcaaggagccggtcaccactccgtgcggccacaacttctgcgggtcgtgcctgaatcgactcggaccgatg

SEQ ID NO: 883 - DNA, 203 bp, synthetic construct
  source 1..203: mol_type = other DNA
ggcgcgccagtcctaacgagacatctagtacggggctcacaggtaacagaactctgatcagatccgccccggctcccacacagctataaggttgcctgcctgcctgcacagaaatgacgaaggacaaaaacagcccagggctgaagaaaaagtcccagtcggtggatattaatgctccagggttcaaccgactcggaccgatg

SEQ ID NO: 884 - DNA, 203 bp, synthetic construct
  source 1..203: mol_type = other DNA
ggcgcgccagtcctcgccgctcaccgcagccccctcctggcgacccgcaagtcctctcaaactgtgagtaactaagtggtttgtgcatcattccagaagcaaagctaaaatttttagcggtgttgtcgacttgacctgctaatttcctgttctggaatcgagagaagactcctcaacaagttgctgcacgactcggaccgatg

SEQ ID NO: 885 - DNA, 203 bp, synthetic construct
  source 1..203: mol_type = other DNA
ggcgcgccagtcctgtggcattgggaggcccggcctgggggaggagacggcgttccgttagcggcgttggggtttggctgcagtggcagtgctttctcttctgctcacggggacccgctcaggctggaggccagccagctcttgccgccacctcggtcgcgatgggggcgcaggaccggccgcagtgccgactcggaccgatg

SEQ ID NO: 886 - DNA, 203 bp, synthetic construct
  source 1..203: mol_type = other DNA
ggcgcgccagtcctttccggtgcgtcgtttacgccagtttgaaccaaagacgcccaaggttgaggccgagttccagagcatggggtctcggttgtcccagccttttgagtcctatatcactgcgcctcccggtaccgccgccgcgcccgccaaacctgcgcccccagctacacccggagcgccgacctcgactcggaccgatg

SEQ ID NO: 887 - DNA, 203 bp, synthetic construct
  source 1..203: mol_type = other DNA
ggcgcgccagtcctgaggcggccccacgctgctttcccagaaggctgtgcgtgctcctcgcttcctccgcggtcttccgagcggtcgcgtgaactgcttcctgcaggctggccatggcgcttcacgttcccaaggctccgggctttgcccagatgctcaaggagggagcgaaacacttttcaggattacgactcggaccgatg

SEQ ID NO: 888 - DNA, 203 bp, synthetic construct
  source 1..203: mol_type = other DNA
ggcgcgccagtcctgcagggagctgggacagtcctgggtcaggcaaggactctgtgatgcttccctgctccctcgcctttctctgcatctgatcctgggatgtcctagccaccatggctttccagctgagcaggatcatgcggccagatgatgccaacgtggccggcaatgtccacggggggaccatccgactcggaccgatg

SEQ ID NO: 889 - DNA, 203 bp, synthetic construct
  source 1..203: mol_type = other DNA
ggcgcgccagtcctgggaacaaacttcagaaggaggagagacaccgggcccagggcaccctcgcgggcggacccaagcagtgagggcctgcagccggccggccagggcagcggcaggcgcggcccggacctacgggaggaagccccgagccctcggcgggctgcgagcgactccccggcgatgcctcacgactcggaccgatg

SEQ ID NO: 890 - DNA, 203 bp, synthetic construct
  source 1..203: mol_type = other DNA
ggcgcgccagtccttctgcgccgccatgtcgcggaggctgctgccccgggcggagaagcggcgtcggcggctggagcagaggcagcagccggacgagcagcggaggcggtcgggagcgatggtgaagatggcggcggcgggcggcggaggcggcggtggccgctactacggcggcggcagtgagggcgcgactcggaccgatg

SEQ ID NO: 891 - DNA, 203 bp, synthetic construct
  source 1..203: mol_type = other DNA
ggcgcgccagtcctctcacgtgacaaagctcccggaggtgggagccctgggccaaaatggcggcctacctgcagtggcggcgcttcgttttcttcgacaaggagctggtgaaggagccgctgagcaatgatggggccgctcccggggccacacctgcttctggatccgctgcttccaagttcctttgccgactcggaccgatg

SEQ ID NO: 892 - DNA, 203 bp, synthetic construct
  source 1..203: mol_type = other DNA
ggcgcgccagtcctagtccgacgccgactgaggcacgagcgggtgacgctgggcctgcagcgcggagcagaaagcagaacccgcagagtcctccctgctgctgtgtggacgacacgtgggcacaggcagaagtgggccctgtgaccagctgcactggtttcgtggaaggaagctccaggactggcgggcgactcggaccgatg

SEQ ID NO: 893 - DNA, 203 bp, synthetic construct
  source 1..203: mol_type = other DNA
ggcgcgccagtcctccgtcgcgtgcgggaggcgggccgcgatcttgcgcagggtcggtgtgggcgcaggctgcagcgccgcgactcgtgcgggtaggcgtctgcgctcggtttgagggctcggcgcggggtttcctgttcctccttctgcgcggctgcagctcgggacttcggcctgacccagccccccgactcggaccgatg

SEQ ID NO: 894 - DNA, 203 bp, synthetic construct
  source 1..203: mol_type = other DNA
ggcgcgccagtcctccgcctcctccacggccactccgcctcttccctcccttcgtcccttcttcctctcccttttttccttcttccttcccctcctcgccgccaccgcccaggaccgccggccgggggacgagctcggagcagcagccagaaagcataacccctactgtagaactaaatgcactgtgccgactcggaccgatg

SEQ ID NO: 895 - DNA, 203 bp, synthetic construct
  source 1..203: mol_type = other DNA
ggcgcgccagtcctgcctgtgctgtgcctgcctcctagagctcattccctacgccccgactctgtcctggacagcgtgcccaccagccatggcggggccccggggcctcctcccactctgcctcctggccttctgcctggcaggcttcagcttcgtcagggggcaggtgctgttcaaaggctgtgatgcgactcggaccgatg

SEQ ID NO: 896 - DNA, 203 bp, synthetic construct
  source 1..203: mol_type = other DNA
ggcgcgccagtcctaagggaggaggcgccgagctgaccgggcgacgccgcgggaggttctggaaacgccgggagctgcgagtgtccagacacttccctctgtgaccatgaaactctgggtgtctgcattgctgatggcctggtttggtgtcctgagctgtgtgcaggccgaattcttcacctctattgcgactcggaccgatg

SEQ ID NO: 897 - DNA, 203 bp, synthetic construct
  source 1..203: mol_type = other DNA
ggcgcgccagtcctatatgatccgctcggcttcctgggtctggctgctgccgcccgccggtgtccgcccgtgtcgcgccggggcaccaaggagccgttggagggtccgggcggaggcccgctcgtgtggaagtcgtcgacgccgccgctcgtccgtcctcccgtccgttctcgctcccggccgccatccgactcggaccgatg

SEQ ID NO: 898 - DNA, 203 bp, synthetic construct
  source 1..203: mol_type = other DNA
ggcgcgccagtcctgacgagacaccgaagcagaggatacaggaggattaaaggattcaggaaagcaagcagccctccggagaagctgtcgaaattcaagactggcaagagaagcaaattcaacctctcacaccgatcatttctcattccctgaaaagaagagattgtttccccagggaagtgaaaatacgactcggaccgatg

SEQ ID NO: 899 - DNA, 203 bp, synthetic construct
  source 1..203: mol_type = other DNA
ggcgcgccagtcctgttttgcctgcacgatgtccagcaaagctgagaagaagcagcgattgagtggccgaggaagctcccaggcaagctggtcagggcgggccactcgggctgctgtggccacacaggagcaggggaatgccccggctgtcagtgagccagagctgcaggctgagctccccaaggaggcgactcggaccgatg

SEQ ID NO: 900 - DNA, 203 bp, synthetic construct
  source 1..203: mol_type = other DNA
ggcgcgccagtccttttcctttcggccggaaccgccatcttccagtaattcgccaaaatgacgaacacaaagggaaagaggagaggcacccgatatatgttctctaggccttttagaaaacatggagttgttcctttggccacatatatgcgaatctataagaaaggtgatattgtagacatcaagggcgactcggaccgatg

SEQ ID NO: 901 - DNA, 203 bp, synthetic construct
  source 1..203: mol_type = other DNA
ggcgcgccagtcctgttcgctgcagcatcctcaggcttcacgttggagcctcttgattgtggtgttcagcattatttaagatcacctatgcatcatctgaagccacagtcccaggtcatcttcatcaccttccccagtggaatgcctcctgtgttaaagcccacaacaacccctgtggaggaacaacccgactcggaccgatg

SEQ ID NO: 902 - DNA, 203 bp, synthetic construct
  source 1..203: mol_type = other DNA
ggcgcgccagtcctgagaactcacaccatatgtgtcctgttccagtgcgcgggtctgtggagagccgggtgcgagcggcggcagcacgaggggaaaagagctgagcggagaccaaagtcagccgggagacagtgggtctgtgagagaccgaatagaggggctggggccacgagcgccattgacaagcacgactcggaccgatg

SEQ ID NO: 903 - DNA, 203 bp, synthetic construct
  source 1..203: mol_type = other DNA
ggcgcgccagtcctgggcgcggagccccagccgagcctagccctgcccggccccggaggacttgcaacactccgaggccaggaacgctccgtctggaacggcgcaggtcccagcagctggggttccccctcagcccgtgagcagccatgtccaaccccagcgccccaccaccatatgaagaccgcaaccgactcggaccgatg

SEQ ID NO: 904 - DNA, 203 bp, synthetic construct
  source 1..203: mol_type = other DNA
ggcgcgccagtcctctccccccgctaccctaactttgccaggcaccttttcccttccatccatcttaaaggaaggaagggacgggctgagttccccgacgagagacacacccagattttcctgcagcttggggagaggtcctcccaggagccttggtccctcctggcctgccggagtccttagccaggcgactcggaccgatg

SEQ ID NO: 905 - DNA, 203 bp, synthetic construct
  source 1..203: mol_type = other DNA
ggcgcgccagtccttgcgcctccagacatgcgcagtagcctcccccgcggtggcggcggcggcggcggtggctgccgtggcggctgagagtccagagccggacgttccggccgcttcgggctggcggctggagagcgctcgggtcatgtctgcccagggggactgcgagttcctggtgcagcgagccccgactcggaccgatg

SEQ ID NO: 906 - DNA, 203 bp, synthetic construct
  source 1..203: mol_type = other DNA
ggcgcgccagtcctgcgctcgccacgcccatgcctccgtcgctgcgcggcccaccccggatgtcagccccccgcgccgaccagaatccgtgaacatggcgaacgaggttatcaagtgcaaggctgcagttgcttgggaggctggaaagcctctctccatagaggagatagaggtggcacccccaaaggcgactcggaccgatg

SEQ ID NO: 907 - DNA, 203 bp, synthetic construct
  source 1..203: mol_type = other DNA
ggcgcgccagtcctgcggcagtatagagagtacctcacgaaggggacgtgggaaagtgttagcggggaacgctgggaaactcccggcctccgccaccatcttgctttcctttaatccggcagtgaccgtgtgtcagaacaatcttgaatcatgaagctactaaccagagccggctctttctcgagattcgactcggaccgatg

SEQ ID NO: 908 - DNA, 203 bp, synthetic construct
  source 1..203: mol_type = other DNA
ggcgcgccagtcctccccacccgcttccggccgcggctcggttctcccgcctccgcctccgccgcggctcgtggttgtcccgccatggcactgtcgcgggggctgccccgggagctggctgaggcggtggccgggggccgggtgctggtggtgggggcgggcggcatcggctgcgagctcctcaagaacgactcggaccgatg

SEQ ID NO: 909 - DNA, 203 bp, synthetic construct
  source 1..203: mol_type = other DNA
ggcgcgccagtcctcaagagttggtaagctcgctgcagtgggtggagagaggcctctagacttcagtttcagtttcctggctctgggcagcagcaagaattcctctgcctcccatcctaccattcactgtcttgccggcagccagctgagagcaatgggaaatggggagtcccagctgtcctcggtgccgactcggaccgatg

SEQ ID NO: 910 - DNA, 203 bp, synthetic construct
  source 1..203: mol_type = other DNA
ggcgcgccagtcctgccggcctttggtctccaggacttgtcccagcagcccctcgaactgagaattacaccatcggacccctggctctgaggccttcagacttggactgtgtcacactgccaggcttccagggctccaacttgcagacggcctgttgtgggacagtctctgtaatcgcgaaagcaacccgactcggaccgatg

SEQ ID NO: 911 - DNA, 203 bp, synthetic construct
  source 1..203: mol_type = other DNA
ggcgcgccagtcctctggggcccgctgtcggtctcccgtcctccgacatcttgtctggaacttccgcctggcagtctccagtaggagtggagctctgtgcggcgtagtttggtggaaaaacgggccttgcgtcggcctcacccccagtgtttgtgtttcagaatgaagactattctcagcaatcagaccgactcggaccgatg

SEQ ID NO: 912 - DNA, 203 bp, synthetic construct
  source 1..203: mol_type = other DNA
ggcgcgccagtcctccgtccccgggcagagagagggacgccccctcctcctccccgcctcttgtgaggcgcgcggagccgcctcccctgggtcaggtctgatgggccggtgggcgcgctagtggtggccgccaccgccgaaaccgtcgacctcctgggccccagttccgcgtccagccccgcggcagccgactcggaccgatg

SEQ ID NO: 913 - DNA, 203 bp, synthetic construct
  source 1..203: mol_type = other DNA
ggcgcgccagtcctgccgcggccgacggtagttcgcttccccgagagtgcgcggaggcccgggtgcgaggagggcctgtttctcttcagccctggttcattcacctcggggaccgagggccccgccgtcaggagccggcgaccgtgccctggtgcgagctgtgatggtcattgtcctccagagcagtgcgactcggaccgatg

SEQ ID NO: 914 - DNA, 203 bp, synthetic construct
  source 1..203: mol_type = other DNA
ggcgcgccagtcctcgcttgacttgcttccagacaaaggttgtctcaagtttgttgctcaaaccgagttctggagaacgccatcagctcgctgcttaaaattaaaccacaggttccattatgggtcgacttgatgggaaagtcatcatcctgacggccgctgctcaggggattggccaagcagctgcccgactcggaccgatg

SEQ ID NO: 915 - DNA, 203 bp, synthetic construct
  source 1..203: mol_type = other DNA
ggcgcgccagtcctctcctgggcccctcctcccttcaaggattgcgaagaactggtcgcaaatcctcctaagccaccagcatctcggtcttcagctcacaccagccttgagcccagcctgcggccaggggaccacgcacgtcccacccacccagcgactccccagccgctgcccactcttcctcactccgactcggaccgatg

SEQ ID NO: 916 - DNA, 203 bp, synthetic construct
  source 1..203: mol_type = other DNA
ggcgcgccagtcctctgaactgggttaggtgccgctgttgctgctcgtgttgaatctagaaccgtagccagacatgggactggaggacgagcaaaagatgcttaccgaatccggagatcctgaggaggaggaagaggaagaggaggaattagtggatcccctaacaacagtgagagagcaatgcgagccgactcggaccgatg

SEQ ID NO: 917 - DNA, 203 bp, synthetic construct
  source 1..203: mol_type = other DNA
ggcgcgccagtcctggggtccttggctgggcggggcttgctcgcggtggcttgtggctccttcctgcggtgcttctctctttcgctcaggcccgtggcgccgacaggatgggcaagtgtcgtggacttcgtactgctaggaagctccgtagtcaccgacgagaccagaagtggcatgataaacagtatcgactcggaccgatg

SEQ ID NO: 918 - DNA, 203 bp, synthetic construct
  source 1..203: mol_type = other DNA
ggcgcgccagtcctgtttcctcttttaccaaggacccgccaacatgggccgcgttcgcaccaaaaccgtgaagaaggcggcccgggtcatcatagaaaagtactacacgcgcctgggcaacgacttccacacgaacaagcgcgtgtgcgaggagatcgccattatccccagcaaaaagctccgcaacacgactcggaccgatg

SEQ ID NO: 919 - DNA, 203 bp, synthetic construct
  source 1..203: mol_type = other DNA
ggcgcgccagtccttcccggctcggggacctccacgcaccgcggctagcgccgacaaccagctagcgtgcaaggcgccgcggctcagcgcgtaccggcgggcttcgaaaccgcagtcctccggcgaccccgaactccgctccggagcctcagccccctggaaagtgatcccggcatccgagagccaagcgactcggaccgatg

SEQ ID NO: 920 - DNA, 203 bp, synthetic construct
  source 1..203: mol_type = other DNA
ggcgcgccagtcctcaaacagtcgggaagaagcaccgtggctgctattatctgctctccgcgcctgacccctcccaggactcgtgatgccaaggccgctgcgagcggctacgaagagtcggggttgagccccagctgagccgagggctcgcactcttctggtctcccaggcccaacccacctgaagaacgactcggaccgatg

SEQ ID NO: 921 - DNA, 203 bp, synthetic construct
  source 1..203: mol_type = other DNA
ggcgcgccagtcctgcgctgtttccgcctcttgccttcggacgccggattttgacgtgctctcgcgagatttgggtctcttcctaagccggcgctcggcaagttctcccaggagaaagccatgttcagttcgagcgccaagatcgtgaagcccaatggcgagaagccggacgagttcgagtccggcatcgactcggaccgatg

SEQ ID NO: 922 - DNA, 203 bp, synthetic construct
  source 1..203: mol_type = other DNA
ggcgcgccagtccttcctgcgctggctgtggcacacccaccggtggcacacccctccctcgggtccagttcagcccacagactcctgggaggagagccagggccccagcctctcctttgaggagtgttgcagcctttctgtgtgccagatgcctagtgaagaaaagctgaaaccctggagctttgtgccgactcggaccgatg

SEQ ID NO: 923 - DNA, 203 bp, synthetic construct
  source 1..203: mol_type = other DNA
ggcgcgccagtcctgccggggcagccgggaagcgggtggggtggtgtgttacccagtagctcctgggacatcgctcgggtacgctccacgccgtcgcagccactgctgtggtcgccggtcggccgaggggccgcgatactggttgcccgcggtgtaagcagaattcgacgtgtatcgctgccgtcaagcgactcggaccgatg

SEQ ID NO: 924 - DNA, 203 bp, synthetic construct
  source 1..203: mol_type = other DNA
ggcgcgccagtcctttctttttctcacccggtgctttgcatttgggaagaggtgatttcaagagtggccaggtgggacgcctctctcctccttattcggtttactatttattgttcggggtgttttttaattcctgtattgctcggcccggggagtttcgccccctgcccggctccgcggcgcggaggcgactcggaccgatg

SEQ ID NO: 925 - DNA, 203 bp, synthetic construct
  source 1..203: mol_type = other DNA
ggcgcgccagtcctgacgtcatcgccgcggggcggaggcgacagtgtctagcgggagctccgcgtgtagctacgccggccgcctggctttgagacaacgtgattctccgcagctggtcgcctacccgtgatgttctgcccacgtcgagacctgagctgaaatggcagacgatctcggagacgagtggtcgactcggaccgatg

SEQ ID NO: 926 - DNA, 203 bp, synthetic construct
  source 1..203: mol_type = other DNA
ggcgcgccagtcctgattccagaagatactgtctggcgtgaaattagtctcagtagaaacataagtcccgcgcgtcttgtgctgcgcgtgcgcaagcttttgggccctcccgagaaagggaagtgcattctcgcttccgtagcggtctccgccggttggggggaagtaattccggttgttgcaccatgcgactcggaccgatg

SEQ ID NO: 927 - DNA, 203 bp, synthetic construct
  source 1..203: mol_type = other DNA
ggcgcgccagtcctttgccagggccggctaacagcggctcccggaagtcctttgatgctttgttaacagtgaagctactggaccaatgaggtgcttcttccggttttgtccgcgctcgcctaattcttctttatcaaggttgcctttgaccccggaaaagagatcttccgggttcctctctccccaagcgactcggaccgatg

SEQ ID NO: 928 - DNA, 203 bp, synthetic construct
  source 1..203: mol_type = other DNA
ggcgcgccagtcctcccagcttccgggttggtcgcgcgccttcctgcggctaagatggcgacggagcatcccgagcctcccaaagcagaattgcagctgccgccgccgccacctccaggccactatggcgcctgggctgcccaggagcttcaggccaagttggcagagatcggagctccgatccagggcgactcggaccgatg

SEQ ID NO: 929 - DNA, 203 bp, synthetic construct
  source 1..203: mol_type = other DNA
ggcgcgccagtcctagagccggcgccgtcaccgcccgcattgccgctcccagtcccgcgctcggcacgacatgaaatcccccgacgaggtgctacgcgagggcgagttggagaagcgcagcgacagcctcttccagctatggaagaagaagcgcggggtgctcacctccgaccgcctgagcctgttcccgactcggaccgatg

SEQ ID NO: 930 - DNA, 203 bp, synthetic construct
  source 1..203: mol_type = other DNA
ggcgcgccagtcctggggaagcaactcggcagcggaccaagatggcggcgccctgtgagggacaagcgtttgccgtaggggttgaaaagaattggggtgcagtagttcgctccccagaagggaccccccagaaaatccggcagctgatagatgaggggattgccccggaagagggaggcgtggacgcgcgactcggaccgatg

SEQ ID NO: 931 - DNA, 203 bp, synthetic construct
  source 1..203: mol_type = other DNA
ggcgcgccagtccttccttcctttccgtctctggccggctgggcgcgggcgactgctggcgaggcgcgtgggaccttacgctggttccccttcgtctcctctcccggcccgggccactagagagttcgctgacgccgggtgagctgagcctgccgccaagatgccggcctattttcagaggccggaaacgactcggaccgatg

SEQ ID NO: 932 - DNA, 203 bp, synthetic construct
  source 1..203: mol_type = other DNA
ggcgcgccagtccttgaagggcggatctcagtccctggctgctttggcatttggggaactgggactccctgtggggaggagaggaaagctggaagtcctggagggacagggtcccagaaggaggggacagaggagctgagagaggggggcagggcgttgggcaggggtccctcggaggcctcctggggcgactcggaccgatg

SEQ ID NO: 933 - DNA, 203 bp, synthetic construct
  source 1..203: mol_type = other DNA
ggcgcgccagtcctttgttcgcattataaaaggcacgcgcgggcgcgaggcccttctctcgccaggcgtcctcgtggaaggcccgggaccgcgggatgggtgtcggcgtgaccaggcctgagctccctgtctctcctcagtgacatcgtctttaaaccctgcgtggcaatccctgacgcaccgccgtgcgactcggaccgatg

SEQ ID NO: 934 - DNA, 203 bp, synthetic construct
  source 1..203: mol_type = other DNA
ggcgcgccagtcctggcggggccgaggctggcgggcgcggggaaaatggcggcggcggcggcggcggctgcagctacgaacgggaccggaggaagcagcgggatggaggtggatgcagcagtagtccccagcgtgatggcctgcggagtgactgggagtgtttccgtcgctctccatccccttgtcatcgactcggaccgatg

SEQ ID NO: 935 - DNA, 203 bp, synthetic construct
  source 1..203: mol_type = other DNA
ggcgcgccagtcctaccacagggtcttgcctccgcgcgccccgccctcgtcctcttgtgtagcctgaggcggcggtagcatggagggggagagtacgtcggcggtgctctcgggctttgtgctcggcgcactcgctttccagcacctcaacacggactcggacacggaaggttttcttcttggggaagcgactcggaccgatg

SEQ ID NO: 936 - DNA, 203 bp, synthetic construct
  source 1..203: mol_type = other DNA
ggcgcgccagtcctaggaaagtggagggggaggcggtggcgacgtccagcctgagaacctcaagagagggaggtgacgggacgctgagaggaagagacctgggaaattaagtttcttgcggagtacggtggggattgcagctgctgagcagggattctggaaagcattgcgtacctgagcccccagcacgactcggaccgatg

SEQ ID NO: 937 - DNA, 203 bp, synthetic construct
  source 1..203: mol_type = other DNA
ggcgcgccagtcctggtggcgctgttacatagcccgtagtcagaggcctttcagcccaggggccggcgcacgaaacctgtttggaggttatggatgataaacccaatcctgaagccctaagtgacagttcagagcgtcttttctcctttggcgtcatcgcagatgttcaatttgcagacttagaagatcgactcggaccgatg

SEQ ID NO: 938 - DNA, 203 bp, synthetic construct
  source 1..203: mol_type = other DNA
ggcgcgccagtcctgtccagttactttcaggctcggggagtgaaggcctcgttgagagaaggtctcattcggtgttttgggaagagagtcgtgtgggcccaggtatcgtagcggcgacacgagagagacgggcggtgtgacagccttccactacctgcacgagtgtattggtctgtctgctatcagctcgactcggaccgatg

SEQ ID NO: 939 - DNA, 203 bp, synthetic construct
  source 1..203: mol_type = other DNA
ggcgcgccagtcctggactcggcctaggcggaggacggggcggagcgcggccggcaccatcgagccgggaagatggcaccgcccacggagctgctggccaggccggagcgaggcagcgcgcccggctcccgcgccatggggcggctggtggctgtgggcttgctggggatcgcgctggcgctcctgggcgactcggaccgatg

SEQ ID NO: 940 - DNA, 203 bp, synthetic construct
  source 1..203: mol_type = other DNA
ggcgcgccagtcctcccagccctcgtcgccgccgccattttagctgttggttccggccgcaccgtgtgggctgtagtagcgggaggggtgggggtcctccagagttaagtggctgtcctcgactgtgcccatacagcagccagctttcttccttaataactgcccgttcgaagagtgcgaggatgtcccgactcggaccgatg

SEQ ID NO: 941 - DNA, 203 bp, synthetic construct
  source 1..203: mol_type = other DNA
ggcgcgccagtcctcggccactcggcatctgggttttagtcaggcagtgctccaggcgcctggctgccaggctacgggagaaaagtcctccgctcggccgcacccgttagaggcgctctccactgctgtcctcttcagctcaagatggtggcctgccgggcgattggcatcctcagccgcttttctgccgactcggaccgatg

SEQ ID NO: 942 - DNA, 203 bp, synthetic construct
  source 1..203: mol_type = other DNA
ggcgcgccagtcctcggcggtggcgggagctgctgtctgagcagcggttggggaccgagcgaacttggcccaggagcccgggcctagggagaggcgcggcggcggcgggagcgcgaacggctggagctggccttcttcgccttctcctcggctgtggagccctggtggggggtctgcgcccggtcacccgactcggaccgatg

SEQ ID NO: 943 - DNA, 203 bp, synthetic construct
  source 1..203: mol_type = other DNA
ggcgcgccagtcctctagaagaactcgaccagtgagcaggcgaggaaggggcgggagccggggtcccggtagcttctagtaggttccagaaggcggcgcgtgcggttgggaacgcggagcggacggattcgattcaacggggttcgggaccgcgctgcgctatggagcaggtcaatgagctgaaggagcgactcggaccgatg

SEQ ID NO: 944 - DNA, 203 bp, synthetic construct
  source 1..203: mol_type = other DNA
ggcgcgccagtcctgagcgtggacctgggacgggtctgggcggctctcggtggttggcacgggttcgcacacccattcaagcggcaggacgcacttgtcttagcagttctcgctgaccgcgctagctgcggcttctacgctccggcactctgagttcatcagcaaacgccctggcgtctgtcctcacccgactcggaccgatg

SEQ ID NO: 945 - DNA, 203 bp, synthetic construct
  source 1..203: mol_type = other DNA
ggcgcgccagtccttcactcaccctggcacattcagcccccctaacccaccttgaacattgaccaccacacactccctggcacgctcttctcaccctcaacttctgccacctctccctgggcaatactgccagcctttccctaatctcagagctgcagccctgccctgtcactcacctcaaacctgcccgactcggaccgatg

SEQ ID NO: 946 - DNA, 203 bp, synthetic construct
  source 1..203: mol_type = other DNA
ggcgcgccagtcctggggaggaggagccgccgaggagaccccgggcgaggagctgcgagccggaggaggccgcgcggactccgggctttccgccgtcgcggggatctcggggggcaaagggatcgccggggagggggaccagagagccgcgcccgccgcgcggagcgccccttcgcgtcccctgcacccgactcggaccgatg

SEQ ID NO: 947 - DNA, 203 bp, synthetic construct
  source 1..203: mol_type = other DNA
ggcgcgccagtcctcgtttgtcgaggcctccggaacccccgccgcctcccggagcccctcgcccttggcagcctgtcaccgccccctgggcgggctcgaatgcgcgtccggtgaaggtgcaggcccggcgccgccactgccgcagccaggagatggttcgggcctagcggagccgggactggagcaaccgactcggaccgatg

SEQ ID NO: 948 - DNA, 203 bp, synthetic construct
  source 1..203: mol_type = other DNA
ggcgcgccagtcctcccgagccggggaggaaaagcagcgactcctcgctcgcatccccgggagccgcactccagactggcccggtagtcaggggctcaggagcagatcccgaggcaggctttgctcagcctccgacgagggctggccctttggaaggcgccttcaacagccggaccagacaggccacccgactcggaccgatg

SEQ ID NO: 949 - DNA, 203 bp, synthetic construct
  source 1..203: mol_type = other DNA
ggcgcgccagtcctccatctgtaagagctccttggtcactgccatggttccggcctgacggattcgtactacaactcccaagagtctaagcgcgcgtgaggactgcaggctccgagcggcgcctagccctctgggaattgtgttctgggtcaggcttgactgactctgagggaggccggcagtcgtgacgactcggaccgatg

SEQ ID NO: 950 - DNA, 203 bp, synthetic construct
  source 1..203: mol_type = other DNA
ggcgcgccagtcctgcgcactctcggaagcgcagccgaacccgccctccgaatccagagaggcgctgctgacaccgccgccacaccgccgccacaccgccgctgcctcagtcatgccgaagcacgagttctctgtggacatgacctgtggaggctgtgctgaagctgtctctcgggtcctcaataagccgactcggaccgatg

SEQ ID NO: 951 - DNA, 203 bp, synthetic construct
  source 1..203: mol_type = other DNA
ggcgcgccagtcctgcagaagggaaacgtgaagaaggtgaagatggcggtggccagggccggggtcttgggagtccagtggctgcaaagggcatcccggaacgtgatgccgctgggcgcacggacagcctcccacatgaccaaggacatgttcccggggccctatcctaggaccccagaagaacgggccgactcggaccgatg

SEQ ID NO: 952 - DNA, 203 bp, synthetic construct
  source 1..203: mol_type = other DNA
ggcgcgccagtcctagcacacacacatctgcacctcaaccacagactacacttgctgaactggctcctggggccatgaggctgtcactgccactgctgctgctgctgctgggagcctgggccatcccagggggcctcggggacagggcgccactcacagccacagccccacaactggatgatgaggagcgactcggaccgatg

SEQ ID NO: 953 - DNA, 203 bp, synthetic construct
  source 1..203: mol_type = other DNA
ggcgcgccagtcctaagagtcccggacagtgcaaagcaaatgcaagaagaccccctccctagccgatgggaaatgccccagccgttgaaggcggaaataacggcctgtaggcaacggaactcccagcgttcgcaaaggagggaggagccggaaactcagggcgcgaggcctgtgggcccagcgggaagcgactcggaccgatg

SEQ ID NO: 954 - DNA, 203 bp, synthetic construct
  source 1..203: mol_type = other DNA
ggcgcgccagtcctcaccctacagcagttcaggctgtgtggttcgcaggaagcatacactggctttttgattcttgctagttcccagctcacagtttgggaggatccaacaccaacctttacgtgaagtggaggcccaaggacagtgaggagctgggtggtcccagcctggagctgtgccagcctgaccgactcggaccgatg

SEQ ID NO: 955 - DNA, 203 bp, synthetic construct
  source 1..203: mol_type = other DNA
ggcgcgccagtcctgagagggaggagggaagaagaaaagacggagggaggtgaggaggaagggagggggagagacagagacctagaggggctgaagacccagacagagctggcagagctactgagaagaggactggagcgctctgagagcctctcaagatcttttgggggagcccaataaatgtgaaccgactcggaccgatg

SEQ ID NO: 956 - DNA, 203 bp, synthetic construct
  source 1..203: mol_type = other DNA
ggcgcgccagtcctgcgcgctcgcagcttctcgctctcgcctgcctgcccgctcccttgcttgctcgcgctttcgctcgccctctcctcgaggatcgaggggactctgaccacagcctgtggctgggaagggagacagaggcggcggcggctcaggggaaacgaggctgcagtggtggtagtaggaagcgactcggaccgatg

SEQ ID NO: 957 - DNA, 203 bp, synthetic construct
  source 1..203: mol_type = other DNA
ggcgcgccagtcctatccatttgttctcaagaggtagcaagaaacagtatccacagtggactccggggctcctacagacttggcacagcttcctacagtcttgaaacagccctgttgttctgtcatggccagtgggcagtttgtgaacaaactgcaagaggaagtgatctgccccatctgcctggacacgactcggaccgatg

SEQ ID NO: 958 - DNA, 203 bp, synthetic construct
  source 1..203: mol_type = other DNA
ggcgcgccagtcctcagaggtgaggctgttgtttaaaaacctggagccgggaggggagacccccacattcaagaggagctttcaggcgatctggagaaagaacggcagaacacacagcaaggaaaggtcctttctggggatcaccccattggctgaagatgagaccattcttcctcttgtgttttgcccgactcggaccgatg

SEQ ID NO: 959 - DNA, 203 bp, synthetic construct
  source 1..203: mol_type = other DNA
ggcgcgccagtcctcctccggcagtggcttactcccggtgccaggttcttggagctgtgaggtgttcagcattatttaagatcacctatgcatcatctgaagccacagtcccaggtcatcttcatcaccttccccagtggaatgcctcctgtgttaaagcccacaacaacccctgtggaggaacaacccgactcggaccgatg

SEQ ID NO: 960 - DNA, 203 bp, synthetic construct
  source 1..203: mol_type = other DNA
ggcgcgccagtcctcgaccacggaaatttgacacctccgggcttggaagcagctctctcctccttccccgctgcttataaacctcagccctgaggctccagctcactctaccccatctccttgccgggtcagccctgacaaaggtcagctagccccttgaggacatcagctttggcctcagggtcctacgactcggaccgatg

SEQ ID NO: 961 - DNA, 203 bp, synthetic construct
  source 1..203: mol_type = other DNA
ggcgcgccagtcctacgccagggagctgtgaggcagtgctgtgtggttcctgccgtccggactctttttcctctactgagattcatctgtgtgaaatatgagttggcgaggaagatcgacctatcggcctagaccaagacgctacgtagagcctcctgaaatgattgggcctatgcggcccgagcagtcgactcggaccgatg

SEQ ID NO: 962 - DNA, 203 bp, synthetic construct
  source 1..203: mol_type = other DNA
ggcgcgccagtcctctctggtggagagagtgttgtctaaaacaagttccggaagggaggctgcccttcggggtccgagaaccaccggcctccccagtttgagggctgttaccccgtgcgcgcttcgacgttgctgctgttggctctcctcgcccctcgttcccttgggaaccgcctgggaactccgcccgactcggaccgatg

SEQ ID NO: 963 - DNA, 203 bp, synthetic construct
  source 1..203: mol_type = other DNA
ggcgcgccagtcctttccaccctagatttcagcagaaatgctgaatgtaaaggaatatttgagtaaagtgagttgccgttcttgaagcccgtctcctaaggattctcccggtgtccgcgtagggatctcatgctatataggagggccctgccaggcaccgtctcctctctcgggtccgtgcctccaagcgactcggaccgatg

SEQ ID NO: 964 - DNA, 203 bp, synthetic construct
  source 1..203: mol_type = other DNA
ggcgcgccagtcctacccaaagaaaggcaaagagtcctgcccggcaccggcgccgcgtgggccaaacctgcgcccgtggaggggcgcgcagagggcaccgggcgccgggagcaggcggcgcagcaccagcattgtgttagtgccgggaggccactgtgtcagcaagctgagagggaaactgaagcaagcgactcggaccgatg

SEQ ID NO: 965 - DNA, 203 bp, synthetic construct
  source 1..203: mol_type = other DNA
ggcgcgccagtcctatcggatggctgttacctcctcctaaaatgtctgcatttacccagataatcttccaatggaaatccatggttcaagtgccacctcttcaggaaagccatctgacttcaatcaggtcagccctgacaaaggtcagctagccccttgaggacatcagctttggcctcagggtcctacgactcggaccgatg

SEQ ID NO: 966 - DNA, 203 bp, synthetic construct
  source 1..203: mol_type = other DNA
ggcgcgccagtcctgagcagggagtcagagacgccccgttccaggacccttgtcaccgggagacaggagcggggaggatctgtggggtcctgggttcagcactctgccctgctgccgctgaggagaggtcagccctgacaaaggtcagctagccccttgaggacatcagctttggcctcagggtcctacgactcggaccgatg

SEQ ID NO: 967 - DNA, 203 bp, synthetic construct
  source 1..203: mol_type = other DNA
ggcgcgccagtcctcactgttggtaaagcccagcccttcccaacctgcaagctcaccttccaggactgggcccagcccatgctctccatatataagctgctgccccgagcctgattcctagtcctgcttctcttccctctctcctccagcctctcacactctcctcagctctctcatctcctggaacccgactcggaccgatg

SEQ ID NO: 968 - DNA, 203 bp, synthetic construct
  source 1..203: mol_type = other DNA
ggcgcgccagtcctgggcggggcgtgtgcggactgagcgctctgcttccggggcgcgggtgacgcgacgacggcgacactttgctacggagtgcatcggacgtcgaagcctagagtctctgcgtctttccctcttccgctgcctcattcctttccttcctagccttggtcgtcgccgccaccatgaaccgactcggaccgatg

SEQ ID NO: 969 - DNA, 203 bp, synthetic construct
  source 1..203: mol_type = other DNA
ggcgcgccagtcctgtgagcgggcggccggccggacagactgacgtgtgagctgcatcgcgggaggcgcatggcggggatggcgctggcgcgggcctggaagcagatgtcctggttctactaccagtacctgctggtcacggcgctctacatgctggagccctgggagcggacggtgttcaattccatcgactcggaccgatg

SEQ ID NO: 970 - DNA, 203 bp, synthetic construct
  source 1..203: mol_type = other DNA
ggcgcgccagtcctaaagccgaccgagacggagccgctgtcaactctccaactcagctcagctgatcggttgccgccgccgccgccgccagattctggaggcgaagaacgcaaagctgagaacatggacgttaatatcgccccactccgcgcctgggacgatttcttcccgggttccgatcgctttgccgactcggaccgatg

SEQ ID NO: 971 - DNA, 203 bp, synthetic construct
  source 1..203: mol_type = other DNA
ggcgcgccagtcctttacaggaacagtgtggcctctctggaactctgcagaccaactgccgtgatgctgaagttccgaacagtccatgggggcctgaggctcctgggaatccgccgaacctccaccgcccccgctgcctccccaaatgtccggcgcctggagtataagcccatcaagaaagtcatggtcgactcggaccgatg

SEQ ID NO: 972 - DNA, 203 bp, synthetic construct
  source 1..203: mol_type = other DNA
ggcgcgccagtcctgtcagtggaggcagcagcggtagaggcggcggcgaggactggcgacggcgaggagatagtgtctgccttctggagagctgaccaaacactaaggatgctgaagttccgaacagtccatgggggcctgaggctcctgggaatccgccgaacctccaccgcccccgctgcctcccccgactcggaccgatg

SEQ ID NO: 973 - DNA, 203 bp, synthetic construct
  source 1..203: mol_type = other DNA
ggcgcgccagtcctggcttgggctcgcgccgctgaagtcggcttacccgctggccgcctcctgacaagcgggagggatccgcggtggacccagggaagcggaggagcctggcggccaccccctcttcctcacttccctgtactctcatcgctctcggcctccgacacgaaaaggaagcaaatgagctgcgactcggaccgatg

SEQ ID NO: 974 - DNA, 203 bp, synthetic construct
  source 1..203: mol_type = other DNA
ggcgcgccagtcctgttcgcgttcgccccgcctcaaaggaagaagagtccaccttgcgaccgtatccgctagcgcggcctgggatgcgcttgggctccctgttcgttcccacatgcagggcagcacaaggagaatgggcgtcatgactgatgtccaccggcgcttcctccagttgctgatgacccatgcgactcggaccgatg

SEQ ID NO: 975 - DNA, 203 bp, synthetic construct
  source 1..203: mol_type = other DNA
ggcgcgccagtcctgggggctggaatactgtaccttgatcttagggcctggaaaaatcaggtaggtaactctctggtcctaggtggaggtgtaggggaggttgggccagggatgccttcactgtgtctctctggtcttgccaccccagaccgagggacacacaggcactgctgtctgcaacacaagcacgactcggaccgatg

SEQ ID NO: 976 - DNA, 203 bp, synthetic construct
  source 1..203: mol_type = other DNA
ggcgcgccagtcctctggcggcgccggcgccattttgctggagcctgcgaccgagtgggagtggagtggagcggctgtggttgccgactctttcctcttccccacggtccagtcagcgggttaattaggccatcggccctcgagccgagacttgtctcttatttagttctggggagcgcctcgtcgaccgactcggaccgatg

SEQ ID NO: 977 - DNA, 203 bp, synthetic construct
  source 1..203: mol_type = other DNA
ggcgcgccagtcctccctcgctcgttccctccctccggcgagggccgcctttataacaactgctcagagtgcgagggcgggatagctgtccaaggtctcccccagcactgaggagctcgcctgctgccctcttgcgcgcgggaagcagcaccaagttcacggccaacgccttggcactagggtccagacgactcggaccgatg

SEQ ID NO: 978 - DNA, 203 bp, synthetic construct
  source 1..203: mol_type = other DNA
ggcgcgccagtcctaaagtggctgaatgagaaatgtagattgcagagggcaactggtgtgtttatatgcctgacattatttgggttttcccccctcaggcagaagctgaggaagattgtcattctgatactgtcagagcagatgatgatgaagaaaatgaaagtcctgctgaaacagatctgcaggcacgactcggaccgatg

SEQ ID NO: 979 - DNA, 203 bp, synthetic construct
  source 1..203: mol_type = other DNA
ggcgcgccagtccttggcgggactggcttcacttcctccgcggttcctcggagccgcctcgctcctcttcagggactttgctgagaagggctctcgggcgtccagaccccaccgcaaaggtgtttggcgatccgccgagaagttgttggccccaggagcatccctcggggccgaatgcgcagtggacgcgactcggaccgatg

SEQ ID NO: 980 - DNA, 203 bp, synthetic construct
  source 1..203: mol_type = other DNA
ggcgcgccagtcctcgctcgccggccgggcgccccaagcaactacaacttccatcacgctctgcgaggccttgatctgcaggcttttgcaggggaaggagtggggcgaacatggctgaaggaagccgaggtggccctacgtgtagcggggtgggtggcaggcaggacccagtctccggcagtggcggccgactcggaccgatg

SEQ ID NO: 981 - DNA, 203 bp, synthetic construct
  source 1..203: mol_type = other DNA
ggcgcgccagtcctctggtaggagagcgccgcgggcggatggaggcgactcttcgccccgcctgagctcaggaggggctagcgcggagcgcgggtcccgcctccagccgcgggagcggccgcgcgagccaccactggaggaggaggaggaggagcggacgtcggcttctccccgcgggagcccccagccgactcggaccgatg

SEQ ID NO: 982 - DNA, 203 bp, synthetic construct
  source 1..203: mol_type = other DNA
ggcgcgccagtcctcgggcgtgtaacccacgggtgcgcgcccacgaccgccagactcgagcagtctctggaacacgctgcggggctcccgggcctgagccaggtctgttctccacgcaggtgttccgcgcgccccgttcagccatgtcgtccggcatccatgtagcgctggtgactggaggcaacaagcgactcggaccgatg

SEQ ID NO: 983 - DNA, 203 bp, synthetic construct
  source 1..203: mol_type = other DNA
ggcgcgccagtcctggggaggaggaagagggggagcaggaagaggggcagaaggaagaagaagagggggaggagaaagagatagaagagtaagaggagggggaagaaagacaaggggaaggggaggaggaggaggacggggaggagcttcgccgcggcctgctccgcccagccggggtcggtggccgccgactcggaccgatg

SEQ ID NO: 984 - DNA, 203 bp, synthetic construct
  source 1..203: mol_type = other DNA
ggcgcgccagtcctttccgggttttgtgtcgaatctgcggcggcgacccggcgccgcgtcacgcggtggtgaatgtgcggcagcacgcgcgccgcgtcgtttacgcggcgatttcatcatgctccgagccgggcggcgcgcgccgcttccgtcgccaccctctctggacagcccagggccgcaggctccgactcggaccgatg

SEQ ID NO: 985 - DNA, 203 bp, synthetic construct
  source 1..203: mol_type = other DNA
ggcgcgccagtccttggagggaagggggcgggcagacggcataggaaggcgccggaagtggtcccgcagaggcggggtgggagtggggctcccgaggcagtgcagttggctgtagctgggcgcctcggttaggtgcgctgtcagtcctttccgagtgcctggcccagtctctcccgcctcggcccaaccgactcggaccgatg

SEQ ID NO: 986 - DNA, 203 bp, synthetic construct
  source 1..203: mol_type = other DNA
ggcgcgccagtcctggcccaccgccgcccaggcaaggccgccctgccttgggcgcagcgctgccatggctgggggccgtggggcccccgggcgcggccgggacgagcctccggagagctacccgcaacgacaggaccacgagctacaggccctggaggccatctacggcgcggacttccaagacctgccgactcggaccgatg

SEQ ID NO: 987 - DNA, 203 bp, synthetic construct
  source 1..203: mol_type = other DNA
ggcgcgccagtcctctgcgactcgaccccgccatcctcaggtcccctccgcctgccagatcttttctcggatccccgctctcccaccacctgctcacgagatcccgcggatctagaacccagggtcccccggggccccccggccgggtcccgggtgggctccaggcggccggtccccggcctcccccccgactcggaccgatg

SEQ ID NO: 988 - DNA, 203 bp, synthetic construct
  source 1..203: mol_type = other DNA
ggcgcgccagtcctcccacgtcggccaacctcctgcagctggtgcgctcgtccggagacatccaggagggcgacctggtggaggtggtgctgtcggcctcggccaccttcgaggacttccagatccgcccgcacgccctcacggtgcactcctatcgggcgcctgccttctgtgatcactgcggggagcgactcggaccgatg

SEQ ID NO: 989 - DNA, 203 bp, synthetic construct
  source 1..203: mol_type = other DNA
ggcgcgccagtcctgcggcagctcttttccttcttcctccacttcccctaccctccaccgtccgggagccgccgccaccgccgccgaggagtcaggaagttcaagatggccgccgcggagacccagtcgctacgggagcagccagagatggaagatgctaattctgaaaagagtataaatgaagaaaacgactcggaccgatg

SEQ ID NO: 990 - DNA, 203 bp, synthetic construct
  source 1..203: mol_type = other DNA
ggcgcgccagtcctctggagccgctggagttcggacttctgcaactgttggcactttgggggcttggcttagcgctctgctgtttacccgtctctcctcgctgcctcggaaccaaagctcccggccccctccgccctcgcgcgcccacccaccgccgccggggagcggcccggcccgcactcagcacccgactcggaccgatg

SEQ ID NO: 991 - DNA, 203 bp, synthetic construct
  source 1..203: mol_type = other DNA
ggcgcgccagtcctccggcttccccgccccgccccgtccccgggcgtctccattttggtctcaggtgtggactcggcaagaaccagcgcaagagggaagcagagttatagctaccccggccgcggagccggctcactgcactacccccgcccccttctttcctccagacgccgaagtcgcgggcgctccgactcggaccgatg

SEQ ID NO: 992 - DNA, 203 bp, synthetic construct
  source 1..203: mol_type = other DNA
ggcgcgccagtcctgccgccccgccccgccccgcgcgctccagacccccggggcggctgccgggagagatgctggaagaaacttcttaaatgaccgcgtctggctggccgtggagcctttctgggttggggagaggaaaggaaagtggaaaaaacctgagaacttcctgatctctctcgctgtgagaccgactcggaccgatg

SEQ ID NO: 993 - DNA, 203 bp, synthetic construct
  source 1..203: mol_type = other DNA
ggcgcgccagtcctatgcaggccttcccacaagggcccggcagcatgacaaggtgaaggcagagtatgtgcatctcaaccatccgctcaccctcgtgaccagagagcgcgatttggccgtgaaggagaaacaccagctccaagccaagctggagaacctagaacaggtcctgaagcatatgcgagaggcgactcggaccgatg

SEQ ID NO: 994 - DNA, 203 bp, synthetic construct
  source 1..203: mol_type = other DNA
ggcgcgccagtcctaggcccagtggccgagcggcgtcgtggggttaccccgcccgcgccagcgctgcatccctggccgctacccggggagagccggaggatgaattgaacctcgcagccgctgctatctccagtgctcatcacagggtgtggtgtctatctgaagaatattttactttcaaaggaaagcgactcggaccgatg

SEQ ID NO: 995 - DNA, 203 bp, synthetic construct
  source 1..203: mol_type = other DNA
ggcgcgccagtcctactacttctcccccggactccttggtagtctgttagtgggagatccttgttgccgtcccttcgcctccttcaccgccgcagaccccttcaagttctagtcatgcgtgagtgcatctccatccacgttggccaggctggtgtccagattggcaatgcctgctgggagctctactgcgactcggaccgatg

SEQ ID NO: 996 - DNA, 203 bp, synthetic construct
  source 1..203: mol_type = other DNA
ggcgcgccagtcctagtggagccagcgccacgcgtctccagggtctccatacccagccttcgtccctgcggtgcccagaggccttgcgcgcattttgcatttgggaagacaggtcctgagtgcgaccgtcacccagcggaagtgtgagggttcggcccagcggcagggctagccctgggcctcctgttcgactcggaccgatg

SEQ ID NO: 997 - DNA, 203 bp, synthetic construct
  source 1..203: mol_type = other DNA
ggcgcgccagtcctcggagcccacggagcccacggaggagcccacggaggagccccagcgtccgaacgggcagaccccctcgagccgcgaaggagcccgagaagcagccacgatgtgcggaatctttgcctacatgaactacagagtcccccggacgaggaaggagatcttcgaaaccctcatcaaggcgactcggaccgatg

SEQ ID NO: 998 - DNA, 203 bp, synthetic construct
  source 1..203: mol_type = other DNA
ggcgcgccagtcctatatggaggtgaagggtgagatcgggaaacaaagggtatggccccctagttcccaaagggagcagggagatgggaatagaattgaaggtaggttttaggctacttgggaggaggaatatttaggtaattgtggagactttctcctgtgtgatgaaggcggcagacactgtgatccgactcggaccgatg

SEQ ID NO: 999 - DNA, 203 bp, synthetic construct
  source 1..203: mol_type = other DNA
ggcgcgccagtcctattttctttttttttttctttctttcattcattccttcctctgtttctttctttcttcctttcatttttttttcttttttaagagcgagcggctctgcggtggcggtttggggtgggcgccgccgaggtgaggtcgtctcgcctcccgcgcgccggtagattggttgtttcattcgactcggaccgatg

SEQ ID NO: 1000 - DNA, 203 bp, synthetic construct
  source 1..203: mol_type = other DNA
ggcgcgccagtcctgcccgtccccgtcccctgcggccgccaacgccgcccggactggagccctgacattgctgcgctcggggggctccaggcagcccgtatcggggcctttatttctcgtcggcggcgccctgcaccgcgcctcgcaaagccaaacaccagagcaccctagaaggtttaactaaaagacgactcggaccgatg

SEQ ID NO: 1001 - DNA, 203 bp, synthetic construct
  source 1..203: mol_type = other DNA
ggcgcgccagtcctgagtattgcctttggcccccacccccacgggtccccgcgctccgtcttccttctgactgggggactccgcgggacggcgttcccggcgcgcactgtaccccttgccgccccttccccttcatgttggacctgacctcccgcggacaagtggggacgtcccggaggatggccgagcgactcggaccgatg

SEQ ID NO: 1002 - DNA, 203 bp, synthetic construct
  source 1..203: mol_type = other DNA
ggcgcgccagtcctggaccggtgtgctaggagatgatcggggaaagcatagtcccctgtctgtggcaccagacactcccgactgtgcgctgactctccccgcccagccagcagccttttccagagaggctgtggtccatagcctctgttcgttttcactgcaggaccaggcacgaaagttaaaacaaacgactcggaccgatg

SEQ ID NO: 1003 - DNA, 203 bp, synthetic construct
  source 1..203: mol_type = other DNA
ggcgcgccagtcctgggcatacctcggaactggtcctcaggcagagggttgtcctcccgggcagaaaggcgacagcggcgtctgcggggtccttcctggcggcgggcgcaggcgtttcctcggcgtggggcggaagcacgatctccggcagcggcctgggaactcttagctgagcaggcgagagcatccgactcggaccgatg

SEQ ID NO: 1004 - DNA, 203 bp, synthetic construct
  source 1..203: mol_type = other DNA
ggcgcgccagtcctcagccctaggccctgcgcgagctgccccgccctaccccctccagcgtcctgtcgcctcctcgcccgacttcggcctgtccctctctcacgcgctcagtcctcgctcttcgccccccgcagctatcggcactcggtctcccgcgcctggcgggctccgcccgagcctctgggccccgactcggaccgatg

SEQ ID NO: 1005 - DNA, 203 bp, synthetic construct
  source 1..203: mol_type = other DNA
ggcgcgccagtcctacctgttgtctctcacctctacattggatcacatggtcacctgcctcatggaaatgccttttttaaaacttcgatttgcagaactccactatttttatacctagctacagttttgagaaagaagaatcagaaccctgacccacttacggttgctgggacaattccccctcccgccgactcggaccgatg

SEQ ID NO: 1006 - DNA, 203 bp, synthetic construct
  source 1..203: mol_type = other DNA
ggcgcgccagtcctagatatccgcccctgacaccattcctcccttcccccctccaccggccgcgggcataaaaggcgccaggtgagggcctcgccgctcctcccgcgaatcgcagcttctgagaccagggttgctccgtccgtgctccgcctcgccatgacttcctacagctatcgccagtcgtcggccgactcggaccgatg

SEQ ID NO: 1007 - DNA, 203 bp, synthetic construct
  source 1..203: mol_type = other DNA
ggcgcgccagtcctccgcctcctggcctcctggctgaggggaagctgagtgggccacggcccatgtgtcgcactcgcctcggctcccacacagccgcctctgctccagcaaggatgtggctcttccacactctgctctgcatagccagcctggccctgctggccgctttcaatgtggatgtggcccggcgactcggaccgatg

SEQ ID NO: 1008 - DNA, 203 bp, synthetic construct
  source 1..203: mol_type = other DNA
ggcgcgccagtcctctccgactctcggcacctggcctccagctttcggaactatggaggccgcgcccgggacccccccgccgccgccatcagagtcgccgccgccgccatcgccgccgccgccatcaacgccttcgcctcctccgtgttcccccgacgcccgcccggccaccccgcacctcctccacccgactcggaccgatg

SEQ ID NO: 1009 - DNA, 203 bp, synthetic construct
  source 1..203: mol_type = other DNA
ggcgcgccagtcctcttacttcgaaggctgtgctccgctcaccatccagagcggaggtgcggaccttaaactcactcctggagaaagatctgcaagtgcgcagagagaagactggcagtggagcatgcatctggagggcagagacggcaggcggtacccccgcgcgccggcggtggagctcctgcagacgactcggaccgatg

SEQ ID NO: 1010 - DNA, 203 bp, synthetic construct
  source 1..203: mol_type = other DNA
ggcgcgccagtcctcggcctggccggcccgaacgcctgcgtctcagtagctgggagccacgggcccacgcccgcccaccggccgcagtgatgttctagccacagaggagccaagacctcaggtttccagagacttgggatttgcacggcagcagagtcaccgtggagaggccagggtatcacaaacttcgactcggaccgatg

SEQ ID NO: 1011 - DNA, 203 bp, synthetic construct
  source 1..203: mol_type = other DNA
ggcgcgccagtcctcagccctcggcagacggccaatggcggcggtgctcggggcgctcggggcgacgcggcgcttgttggcggcgctgcgaggccagagcctagggctagcggccatgtcatcaggtactcacaggttgactgcagaggagaggaaccaagctatacttgaccttaaagcagcaggatcgactcggaccgatg

SEQ ID NO: 1012 - DNA, 203 bp, synthetic construct
  source 1..203: mol_type = other DNA
ggcgcgccagtccttggatttgtctttctcagcaccttggcgaagccttgggtttctttcttaaaggactgatttttagaactccacatttgagtgtgaagtgagggggtctctctccctccttctccttcctctgtgattcaccttcctttttaccctgccctgcggcggctccgccccttaccttccgactcggaccgatg

SEQ ID NO: 1013 - DNA, 203 bp, synthetic construct
  source 1..203: mol_type = other DNA
ggcgcgccagtcctcacctctcgtaaccaatggaaccgcggcgctcggccgattctcgcaggcgccctcagatctacgctctctgatgcaacgccggaatcgcggaaaccgccggtgcacgttggagtcataagacggcgtcggtgttgcagtctgtgtccttggaggtgaccagggccactgcaggccgactcggaccgatg

SEQ ID NO: 1014 - DNA, 203 bp, synthetic construct
  source 1..203: mol_type = other DNA
ggcgcgccagtccttggattgttgcgcctctgctctgaagaaagtgctgtctggctccaactccagttctttcccctgagcagcgcctggaacctaacccttcccactctgtcaccttctcgatcccgccggcgctttagagccgcagtccagtcttggatccttcagagcctcagccactagctgcgcgactcggaccgatg

SEQ ID NO: 1015 - DNA, 203 bp, synthetic construct
  source 1..203: mol_type = other DNA
ggcgcgccagtcctcccacacccaagtgagcggcctgctcactcctcagctgcaggagccagacgtgtggagtcccagcagaggccaacctgtgtctcttcatctccctgggaaaggtgcccccgaggtgaaagagatggcctggtggaaatcctggattgaacaggagggtgtcacagtgaagagcacgactcggaccgatg

SEQ ID NO: 1016 - DNA, 203 bp, synthetic construct
  source 1..203: mol_type = other DNA
ggcgcgccagtccttgcccgagtgagcggggggcctgggcctctgcccttaggaggcaactcccacgcaggccgcaaaggcgctctcgcggccgagaggcttcgtttcggtttcgcggcggcggcggcgttgttggctgaggggacccgggacacctgaatgcccccggccccggctcctccgacgcgcgactcggaccgatg

SEQ ID NO: 1017 - DNA, 203 bp, synthetic construct
  source 1..203: mol_type = other DNA
ggcgcgccagtcctggcgtgccacctcgccgcgcagctttacgaacctagagcagcgccgccccgcctcctgtctccgtcctcacctccccgccccctcccagcttcgcgtctcctagctcgacgcgcccgctataatcacgtgattgcctcatccgggtcttttgcgttctctttccctctcccaaccgactcggaccgatg

SEQ ID NO: 1018 - DNA, 203 bp, synthetic construct
  source 1..203: mol_type = other DNA
ggcgcgccagtcctgcgtgctgactgagctagtcttggggtcctggagaagggggctggaggcatgcccacagcctcccccccatgagcttggggctggcgagggcacaggaggtggagctgacactagagacggttatccagacactggagagcagcgtcctgtgccaggagaaaggcttgggcgcgcgactcggaccgatg

SEQ ID NO: 1019 - DNA, 203 bp, synthetic construct
  source 1..203: mol_type = other DNA
ggcgcgccagtcctgagccgctggcgccactagagaagggcgagcggcgcggcagagtgcggcgcagcgcagctcctgaggttttggttatgaacaggattcggattcacgtcttgccaaccaatcgggggaggatcactccagtgcccaggtctcaggaacctctgtcttgtgcattcactcatcgtcgactcggaccgatg

SEQ ID NO: 1020 - DNA, 203 bp, synthetic construct
  source 1..203: mol_type = other DNA
ggcgcgccagtcctggccccttggcctagcttcgatcgttcgaattcagagcacgtccttccgaggtgaaggaacgcgaaactccacccatccgattgctgttcggctgcgggcgggtcctttggtcgggctgaccctgggtgagcggcccggagccaagactcgaggtagggcctggcgggcgggtgcgactcggaccgatg

SEQ ID NO: 1021 - DNA, 203 bp, synthetic construct
  source 1..203: mol_type = other DNA
ggcgcgccagtcctcgattcaggggagggagcaactggagcctcaggccctccagagtagtctgcctgaccaccctggagcccacagaagcccaggacgtctcccgcgaagcctccccgtgtgtggctgaggatggctgagcagcagggccgggagcttgaggctgagtgccccgtctgctggaaccccgactcggaccgatg

SEQ ID NO: 1022 - DNA, 203 bp, synthetic construct
  source 1..203: mol_type = other DNA
ggcgcgccagtcctttgctgttagaggctctttcccagaagttggacgaagaggctcaggcgttgctgtttcttgtcttccaagtcaagtggttactctggtaatggattgcctctctccgagctttcaccctggtgagactgtccagatctagtctgtaaacccagcttagaagcactgttgtaaaacgactcggaccgatg

SEQ ID NO: 1023 - DNA, 203 bp, synthetic construct
  source 1..203: mol_type = other DNA
ggcgcgccagtcctgcggcagtagcagcagcgccgggtcccgtgcggaggtgctcctcgcagagttgtttctcgagcagcggcagttctcactacagcgccaggacgagtccggttcgtgttcgtccgcggagatctctctcatctcgctcggctgcgggaaatcgggctgaagcgactgagtccgcgcgactcggaccgatg

SEQ ID NO: 1024 - DNA, 203 bp, synthetic construct
  source 1..203: mol_type = other DNA
ggcgcgccagtcctctgggcgtgagggaccaaggcctgccctgcactcgggcctcctccagccagtgctgaccagggacttctgacctgctggccagccaggacctgtgtggggaggccctcctgctgccttggggtgacaatctcagctccaggctacagggagaccgggaggatcacagagccagccgactcggaccgatg

SEQ ID NO: 1025 - DNA, 203 bp, synthetic construct
  source 1..203: mol_type = other DNA
ggcgcgccagtcctcggcgccggaggaggaagtggtgaggttgttgctccttcagcgcctatcgctggctcttggggcgcagagaggggccgcagtctccgcggctgcgtcgagctcccttgcagtcccctccatgttccccggcgccactactccccttcctaaggccgccgcttaccccggggtctcgactcggaccgatg

SEQ ID NO: 1026 - DNA, 203 bp, synthetic construct
  source 1..203: mol_type = other DNA
ggcgcgccagtcctaagcagttccgggaaaccccgcgtgctgccgggatcgcgtctcagtccatcaggggggggagggggtggcgcgcgcgccatttctagtcgttttcaaagcgcctcgcgctgattctcacgggcccggctgccggcccccgctctgccctgcataataaaatggctaatcaggtgcgactcggaccgatg

SEQ ID NO: 1027 - DNA, 203 bp, synthetic construct
  source 1..203: mol_type = other DNA
ggcgcgccagtcctgcgcctacgcattttcctgggcgggaacagcaaaatggcgccagaactagtggcgggctgaggacgccgtacccctcggaaggcagccctgcggtccctttgccgcccgttccctcccggacatggaggacgtggaggcgcgcttcgcccacctcttgcagcccatccgcgacccgactcggaccgatg

SEQ ID NO: 1028 - DNA, 203 bp, synthetic construct
  source 1..203: mol_type = other DNA
ggcgcgccagtcctcgaaggaacctgacccaggctctgtgaggaggcaaggttttcaggggacaggccaacccagaggacaggattccctggaggccacagaggagcaccaaggagaagatctgcctgtgggtcttcattgcccagctcctgcccacactcctgcctgctgccctgacgagagtcatccgactcggaccgatg

SEQ ID NO: 1029 - DNA, 203 bp, synthetic construct
  source 1..203: mol_type = other DNA
ggcgcgccagtcctgttggtgacgtcaccgcgttcaccagcccggaagtgcgcgtggcggcggtggcggctgcggcaacagcggggccgatgtgtagttggtgactgcctctccagatgctgaggtgcctgtatcattggcacaggccagtgctgaaccgtaggtggagtaggctgtgccttctgaagcgactcggaccgatg

SEQ ID NO: 1030 - DNA, 203 bp, synthetic construct
  source 1..203: mol_type = other DNA
ggcgcgccagtcctcggcgggcatacctcggaactggtcctcaggcagagggttgtcctcccgggcagaaaggcgacagcggcgtctgcggggtccttcctggcggcgggcgcaggcgtttcctcggcgtggggcggaagcacgatctccggcagcggcctgggaactcttagctgagcaggcgagagcgactcggaccgatg

SEQ ID NO: 1031 - DNA, 203 bp, synthetic construct
  source 1..203: mol_type = other DNA
ggcgcgccagtcctgcttttgctgcttcctcattttctcttgcagccgccatgattctgaggccttcccagctatgtggaactatgactgtgatgatcctcttgtgtctgccttgcctcaggcatccttcagcagttcttccgagctctccagcagtcatggtcctggatttgcaaggctgaatagaacgactcggaccgatg

SEQ ID NO: 1032 - DNA, 203 bp, synthetic construct
  source 1..203: mol_type = other DNA
ggcgcgccagtcctgtccaccttgccgacgtcgctagccgtggggctgtcctgggaaggcggacggcgagcgcccggtgtccgcactcggccgcctgccgtgcccgtctgcgcccgtgtcatcctcactcgggacgcagggaccgtttttaaatcacaggggcgtgtgtcagcctgccctaggacttccgactcggaccgatg

SEQ ID NO: 1033 - DNA, 203 bp, synthetic construct
  source 1..203: mol_type = other DNA
ggcgcgccagtcctcggccccagaaaacccgagcgagtagggggcggcgcgcaggagggaggagaactgggggcgcgggaggctggtgggtgtggggggtggagatgtagaagatgtgacgccgcggcccggcgggtgccagattagcggacgcggtgcccgcggttgcaacgggatcccgggcgctgcgactcggaccgatg

SEQ ID NO: 1034 - DNA, 203 bp, synthetic construct
  source 1..203: mol_type = other DNA
ggcgcgccagtcctgtggtgggactcgcgtcgcggccgcggagacgtgaagctctcgaggctcctcccgctgcgggtcggcgctcgccctcgctctcctcgccctccgccccggccccggccccgcgcccgccatggagaagactgagctgatccagaaggccaagctggccgagcaggccgagcgctcgactcggaccgatg

SEQ ID NO: 1035 - DNA, 203 bp, synthetic construct
  source 1..203: mol_type = other DNA
ggcgcgccagtcctgagtgctcgcagctcatacctgtggctgtgtatccgtggccacagctggttggcgtcgccttgaaatcccaggccgtgaggagttagcgagccctgctcacactcggcgctctggttttcggtgggtgtgccctgcacctgcctcttcccccattctcattaataaaggtatcccgactcggaccgatg

SEQ ID NO: 1036 - DNA, 203 bp, synthetic construct
  source 1..203: mol_type = other DNA
ggcgcgccagtcctctgccggctgagcgggcctggaggaagtgagcagcggggctcctgcctcccggcctggtccccgaagaccccagaagaacccggaacttgcttccattcggaatccagggaccaccctttgcactcagtaggcctttgttttcctgcgtggaaagcggttgggcttgggaggcgcgactcggaccgatg

SEQ ID NO: 1037 - DNA, 203 bp, synthetic construct
  source 1..203: mol_type = other DNA
ggcgcgccagtcctgctgtcagcctccctggctgttagtaccttctttcccggagtcctggtccacgagttggatttactgctgtcgcgggtgggcctcacgccattccctgtccctcggccccctgagtgagtccggtctcccggcgaaagtgagcgaggtttgcccggagcgcgcacgaggggaaacgactcggaccgatg

SEQ ID NO: 1038 - DNA, 203 bp, synthetic construct
  source 1..203: mol_type = other DNA
ggcgcgccagtccttccttgcgggccctcctccccttccctcccctccgcccccttccccgtaggcagcccgcccgccagtccgcccgcaccgcctccttcccagcccctagcgctccggctgggtctctcccccgccccccaggctcccccggtcgctctcctccggcggtcgcccgcgctcggtggcgactcggaccgatg

SEQ ID NO: 1039 - DNA, 203 bp, synthetic construct
  source 1..203: mol_type = other DNA
ggcgcgccagtcctgcgcaactcattggcgccaagatggcgatggagatgaggcttccagtggctcgcaagcctcttagcgagagactgggccgcgacactaagaaacatctagtggtgccgggggatacaatcactacggacacaggattcatgcggggccatggaacgtatatgggagaagagaagcgactcggaccgatg

SEQ ID NO: 1040 - DNA, 203 bp, synthetic construct
  source 1..203: mol_type = other DNA
ggcgcgccagtcctggcggggcctgcttctcctcagcttcaggcggctgcgacgagccctcaggcgaacctctcggctttcccgcgcggcgccgcctcttgctgcgcctccgcctcctcctctgctccgccaccggcttcctcctcctgagcagtcagcccgcgcgccggccggctccgttatggcgacgactcggaccgatg

SEQ ID NO: 1041 - DNA, 203 bp, synthetic construct
  source 1..203: mol_type = other DNA
ggcgcgccagtcctgggctcgggtaaccggagtgctggtatctaatcgtcgctcaaaagctcctaggtgcgcgggtggatataattcccggcttctcgagaagacactacagcctcaaggaggtatatcccgtgccttacctgactgggggctctgagtccagttgtgttgtcttcaacttagacacccgactcggaccgatg

SEQ ID NO: 1042 - DNA, 203 bp, synthetic construct
  source 1..203: mol_type = other DNA
ggcgcgccagtcctaagtttgaaactggtaacttcgggagttgagccacgagctgttgtgcatccagaggtggaattggggcccggcattccctcctcgtcccgggctggcccttgcccccaccctgcaactcctggttgagatgggctcagccaagagcgtcccagtcacaccagcgcggcctccgccgactcggaccgatg

SEQ ID NO: 1043 - DNA, 203 bp, synthetic construct
  source 1..203: mol_type = other DNA
ggcgcgccagtccttggcgtggagagtttggggatctacagcagccaaaggcttgtccctgactttatatggctgctcctggcgagcgactgagtcgtccgtgaggaaaaagaggcgaggcttttccgagatcgtctcagcgatggcgcttcggtcgcggttttgggggttgttctcggtttgcaggacgactcggaccgatg

SEQ ID NO: 1044 - DNA, 203 bp, synthetic construct
  source 1..203: mol_type = other DNA
ggcgcgccagtcctcccgttagtcttttcttcacttccgttgagttccgcctcgccgtttgtcccttgcggtacccgtccgcatacgaatctagcccgggaaccgagttgcgggagtgcggtctgtgccgttccggccaggagtttgccgactgcagacgtcctgcgaaccggcaagatgtgctctctcgactcggaccgatg

SEQ ID NO: 1045 - DNA, 203 bp, synthetic construct
  source 1..203: mol_type = other DNA
ggcgcgccagtcctaagcagagcacctcagaactcaggcgtactgcccgccgcccgagccctgcgagggccgatagcgagggtgtggcccttatctgcacccagcagagcgccggcggggtacggtcttaggacctcgatctccttctccctcattttctctcatccctacctattgtgggtttccgccgactcggaccgatg

SEQ ID NO: 1046 - DNA, 203 bp, synthetic construct
  source 1..203: mol_type = other DNA
ggcgcgccagtccttcctggaagtcctgaagctctcgcagtgcagtgagttcatgcaccttcttgccaagcctcagtctttgggatctggggaggccgcctggttttcctccctccttctgcacgtctgctggggtctcttcctctccaggccttgccgtccccctggcctctcttcccagctcacaccgactcggaccgatg

SEQ ID NO: 1047 - DNA, 203 bp, synthetic construct
  source 1..203: mol_type = other DNA
ggcgcgccagtcctgcatacctgcctgggtgtccaaatgtaactagatgctttcacaaaccccacccacaaagcagcacatgtttttaagacttcagttttctattcacatcggcctcataatacccaccctgacctgctgtaaaagacctggaacaaacaaaaatgattacacctacagtgaagatgcgactcggaccgatg

SEQ ID NO: 1048 - DNA, 203 bp, synthetic construct
  source 1..203: mol_type = other DNA
ggcgcgccagtcctaatttgaattggggcgtgtctagaaagagaagccatagtcggcgagcaacgctggagcatcccgctctggtgccgctgcagccggcagagatggttgagctcatgttcccgctgttgctcctccttctgcccttccttctgtatatggctgcgccccaaatcaggaaaatgctgcgactcggaccgatg

SEQ ID NO: 1049 - DNA, 203 bp, synthetic construct
  source 1..203: mol_type = other DNA
ggcgcgccagtcctcgtgggaacggcctgacagtcactcgtcaaaggaagtggctgccggcagctcttgacccggaatcggatcctagtcccaccccctccgctccaggcttccttctgcaacaggcgtgggtcacgctctcgctcggtctttctgccgccatcttggttccgcgttccctgcacaaacgactcggaccgatg

SEQ ID NO: 1050 - DNA, 203 bp, synthetic construct
  source 1..203: mol_type = other DNA
ggcgcgccagtcctgcctccgcgcgccaaagtcaaaccccgacacccgccggcgggccggtgagctcactagctgacccggcaggtcaggatctggcttagcggcgccgcgagctccagtgcgcgcacccgtggccgcctcccagccctctttgccggacgagctctgggccgccacaagactaaggacgactcggaccgatg

SEQ ID NO: 1051 - DNA, 203 bp, synthetic construct
  source 1..203: mol_type = other DNA
ggcgcgccagtcctcttcctcactggggaattgccggaaagagcaaacaaaaaaggcgctggtgtaggctccaaaataaacacatctgaattcatgatggcatcgacagaggctcttattggattaaaagtttcaaaacaaacaataacgctttggaaaaagggttgaatgcaccctcaggcacgacccgactcggaccgatg

SEQ ID NO: 1052 - DNA, 203 bp, synthetic construct
  source 1..203: mol_type = other DNA
ggcgcgccagtcctccacgctcgtgccgctccccccccgcgctcccagttgacgctctgggccgccacctccgcggaccctgagcgcaagagccaagccgccagcgctgcgatgtgggccacgctgccgctgctctgcgccggggcctggctcctgggagtccccgtctgcggtgccgccgaactgtgcgactcggaccgatg

SEQ ID NO: 1053 - DNA, 203 bp, synthetic construct
  source 1..203: mol_type = other DNA
ggcgcgccagtcctgaaaacctgaatacggaactgaagcagcagctcagtttctcactccgaagtggcagcagccagagagggagtcggtgtggacgcgaggagccgggcgcttagaacagaggcttgcacaggtggagatgtggaagtctgtagtgggccatgatgtgtctgtttccgtggagaccccgactcggaccgatg

SEQ ID NO: 1054 - DNA, 203 bp, synthetic construct
  source 1..203: mol_type = other DNA
ggcgcgccagtcctaacgctcagcgaaattgactgccccactgtcatctgcctctcaatttggtactctgtaactctgtgaccaccaagaagcctttttccgtcccccacaaagctctttttggaaaattccctacgggagctgaattttaagcccatttactttataggaagaaacagaaaggcagccgactcggaccgatg

SEQ ID NO: 1055 - DNA, 203 bp, synthetic construct
  source 1..203: mol_type = other DNA
ggcgcgccagtcctgcgcgcgcgcgaggcttcccctcgtttggcggcggcggcggcttctttgtttcgtgaagagaagcgagacgcccattctgcccccggccccgcgcggaggggcgggggaggcgccgggaagtcgacggcgccggcggctcctgcaggaggccactgtctgcagctcccgtgaagcgactcggaccgatg

SEQ ID NO: 1056 - DNA, 203 bp, synthetic construct
  source 1..203: mol_type = other DNA
ggcgcgccagtcctgtgttcctcttttcctcggttcccagtgttctggcaggtaaggaacgccggctcttcgcctctcagcgcggcttgtcctttgttccggacgcccgctcctcagccctgcggctcctggggtcgctgctgcatcccgcacgcctccaccggctgcagacccatggccgagcgcggcgactcggaccgatg

SEQ ID NO: 1057 - DNA, 203 bp, synthetic construct
  source 1..203: mol_type = other DNA
ggcgcgccagtcctggaagaagaaagaaaaaggaccagaaccgtgaactgaagggacagggaacagccagacgagagcttcagccatcacgaggatgatttcggaacctggagaaaatgtaagttaaatatatctacactctgatcctatctcaagagagagatattttactcatttcctggttgtgacgactcggaccgatg

SEQ ID NO: 1058 - DNA, 203 bp, synthetic construct
  source 1..203: mol_type = other DNA
ggcgcgccagtcctcagttcctgcgcgtgcgcgcttggcctccctagtgcgggctggcagtgcgggcagagcccggctgagaggggcggccctggaggagacggaggccgcgggtgggcccgaggcgcaagaggaagatgaggacgaagaagaggcgctgccgcactccgaggccatggacgtgttcccgactcggaccgatg

SEQ ID NO: 1059 - DNA, 203 bp, synthetic construct
  source 1..203: mol_type = other DNA
ggcgcgccagtccttcaaaggaagaggccccttaatatcctggaataatgggacccatccccgtaatcagtgaatctcatccacccgcttgccagcttctacccgcagcaagtagaagctaagtcctggctcaaatctcttccctccctccctctcccagctgtcagtgcttttggacttgtgctcagcgactcggaccgatg

SEQ ID NO: 1060 - DNA, 203 bp, synthetic construct
  source 1..203: mol_type = other DNA
ggcgcgccagtcctaaccgagattgcgacgaacaaccaggaagcggctgggttgagagctgtccccggttctccgttctgctctcgggggcaccttccggggttcctaagccgcggggcccctcgctgcccctcgaggccctttccctgacctaggctttggcctgggctactcgttccggagccgcccgactcggaccgatg

SEQ ID NO: 1061 - DNA, 203 bp, synthetic construct
  source 1..203: mol_type = other DNA
ggcgcgccagtcctagggactgttctcttcagtgagtggcaggtgtccggaggctgcactgcagcgtagccgcttgggcgggcggccagtggcgactacagcagggactggctgccaacccctccggctacgggccccttaccgagctcccagactggtcatatgcggatggccgccctgctcccccacgactcggaccgatg

SEQ ID NO: 1062 - DNA, 203 bp, synthetic construct
  source 1..203: mol_type = other DNA
ggcgcgccagtcctggagggccctgagggaggggtcagacgctttaggaaagagttaatgcgaagagggggaggggataggacgaagaaaccgaagggaaagctcagggccgccaacttccagctgcagcggcgactttcagtttcatttccacggaccctcctgcctgggccgcagccgccgccgcgcgactcggaccgatg

SEQ ID NO: 1063 - DNA, 203 bp, synthetic construct
  source 1..203: mol_type = other DNA
ggcgcgccagtccttttacttctccctagagcaggggtgtttgccagcagcctgcactctcagaaatcagacttgagtggccggaacccttgagaccagaggcttaccatgctgctccctaggagggccaggaactgctgacgtgaccactggacagttattcgtgtctcttacaattaccaaacagacgactcggaccgatg

SEQ ID NO: 1064 - DNA, 203 bp, synthetic construct
  source 1..203: mol_type = other DNA
ggcgcgccagtccttgtggagtcgggactggagctgctgccgcggcgacgccggggatctttgtcgctagctcccggcccttctgccccgccgccttccctcagtcagcgttgcccactcctctccggccgggcgcccctgcctccatttcccgctctctgtccaccacacacacggcccccccgatccgactcggaccgatg

SEQ ID NO: 1065 - DNA, 203 bp, synthetic construct
  source 1..203: mol_type = other DNA
ggcgcgccagtcctggaaaaccgcagcggggtagcgcgggcgctgccggaacttgtagttccacctcccgccgcgctaaatagccggaaacgggggcggccagaacagagaactaccgaggcgaagcacctgtggaatcctctcaagaggaacagtcattgtgtgaaggttcaaattcagctgttagccgactcggaccgatg

SEQ ID NO: 1066 - DNA, 203 bp, synthetic construct
  source 1..203: mol_type = other DNA
ggcgcgccagtcctggcaccctgtcagtccggaaataactgcagcatttgttccggaggggaaggcgcgaggtttccgggaaagcagcaccgccccttggcccccaggtggctagcgctataaaggatcacgcgccccagtcgacgctgagctcctctgctactcagagttgcaacctcagcctcgctcgactcggaccgatg

SEQ ID NO: 1067 - DNA, 203 bp, synthetic construct
  source 1..203: mol_type = other DNA
ggcgcgccagtcctcttgacctctggcccaagatggtggcgcccagagcttcgctcttgctgctcccctgaggtgaactgaagccagcagccccgcatcatgtcaaagctcggccgggccgcccggggcctcaggaagcccgaggtcggcggtgtgatccgggcgatcgtgcgggcaggcctggccatcgactcggaccgatg

SEQ ID NO: 1068 - DNA, 203 bp, synthetic construct
  source 1..203: mol_type = other DNA
ggcgcgccagtcctcgccgtcatttcggagcgactcagcgcctgcccgccctctcgccgcgtcgccggtgcctgcgcctcccgctccacctcgcttcttctctcccggccgaggcccgggggaccagagcgagaagcggggaccatgttccgacgcaagttgacggctctcgactaccacaaccccgccgactcggaccgatg

SEQ ID NO: 1069 - DNA, 203 bp, synthetic construct
  source 1..203: mol_type = other DNA
ggcgcgccagtcctgcagcccagctgacgacagaccacagcggcatccggcagcccccagtcgtcgtcacacacggtgccccacaggccactgtgcaggatctccactcggccctgacacagggtggagccagccatcctgagacgtccgtacagcccgtactggtggagtgtcaggaggccactctgcgactcggaccgatg

SEQ ID NO: 1070 - DNA, 203 bp, synthetic construct
  source 1..203: mol_type = other DNA
ggcgcgccagtccttgcaggtaccatggagctgagctataggctcttcatctgcctcctgctctggggtagtactgagctgtgctacccccaacccctctggctcttgcagggtggagccagccatcctgagacgtccgtacagcccgtactggtggagtgtcaggaggccactctgatggtcatggtcgactcggaccgatg

SEQ ID NO: 1071 - DNA, 203 bp, synthetic construct
  source 1..203: mol_type = other DNA
ggcgcgccagtcctagttggacccagtcgcccaggcaccgcccgcgccccgcggccgtctcctgcgcctcccagaggagggagttcgagcatcccccgcggcggccactcctcggggccaggagcggggaagcgaagtgcgagagaccccggaccccagcgctgtctcttcccgccgcccgaaccacccgactcggaccgatg

SEQ ID NO: 1072 - DNA, 203 bp, synthetic construct
  source 1..203: mol_type = other DNA
ggcgcgccagtcctgtcctcagttccttagtgactctaaataaagtaacagcagacatcgggctggggagtgactccgtgtgtgcccggccctcgtctcaccgcataaagtcttttgactcccttggatcacagtctttgcacactcggacttcaaaactgttccagggccagtatcggagtttggaccgactcggaccgatg

SEQ ID NO: 1073 - DNA, 203 bp, synthetic construct
  source 1..203: mol_type = other DNA
ggcgcgccagtcctagcttctcccccatgccttccctttcacgcttccgtcctgacgcaaacgtggggccgccttccgcactgcgggcttgtccttggccctgccctactcagtttcctgaagcatgcgcagttgcctttccgtcaattcctgtcctgggcgtacgtcaagatggcggcgtctgtattcgactcggaccgatg

SEQ ID NO: 1074 - DNA, 203 bp, synthetic construct
  source 1..203: mol_type = other DNA
ggcgcgccagtcctccagctcgggccttagaacttctgaacgggcagtgcgggtaggccctgcttagcccttcccggaggacacctgaccaaaagaggaagatagtcttgggacccttgcatggtgtttcaaagggtggtgaagaactaaggtagaagaatacatgttcacttccagtgaacaagagccgactcggaccgatg

SEQ ID NO: 1075 - DNA, 203 bp, synthetic construct
  source 1..203: mol_type = other DNA
ggcgcgccagtcctaggtttccgcttccgctcttccctggtccagtccaccctggcggggtcgcagggttgggatggcggctggaggcgatcatggttcgcccgacagctaccgctcacctcttgcctcccgctatgccagcccggagatgtgcttcgtgtttagcgacaggtataaattccggacatcgactcggaccgatg

SEQ ID NO: 1076 - DNA, 203 bp, synthetic construct
  source 1..203: mol_type = other DNA
ggcgcgccagtcctgattgccacccaggacgatgagcggctgagatggagacgtctgcctcagccactgcctccgagaagcaagaagccaaaagtgggatcctggaggccgctggcttccccgacccgggtaaaaaggcctctcctttggtggtggctgcagcggcagcagcagcggtagctgcccaacgactcggaccgatg

SEQ ID NO: 1077 - DNA, 203 bp, synthetic construct
  source 1..203: mol_type = other DNA
ggcgcgccagtcctccgaacggtcgccgcggccaactgcctcgcccgcctggcagcctaaccctccttctcttcttctcctctccggcttcgcgcggccctgcctccctctcgcccggcggcatccgcttgctgctgccaccgcctcctcatcttctgcccggccaaccggcctgccccgctgcagtgcgactcggaccgatg

SEQ ID NO: 1078 - DNA, 203 bp, synthetic construct
  source 1..203: mol_type = other DNA
ggcgcgccagtcctgacaccccctgggatcacactgagcttgccacatccccaaggcggccgaaccctccgcaaccaccagcccaggttaatccccagaggctccatggagttccctggcctggggtccctggggacctcagagcccctcccccagtttgtggatcctgctctggtgtcctccacacccgactcggaccgatg

SEQ ID NO: 1079 - DNA, 203 bp, synthetic construct
  source 1..203: mol_type = other DNA
ggcgcgccagtcctgggtgcgagctggagactccgcgggagcgcggccgggaggcttcgccccggagctggcccgacgcctcccgagctggcagggctctcggcggaggtcggagcgtgggcttcctcctcccgccagggaaaacagagaggatgaaggcctatctaaagagcgcagaaggcttttttcgactcggaccgatg

SEQ ID NO: 1080 - DNA, 203 bp, synthetic construct
  source 1..203: mol_type = other DNA
ggcgcgccagtcctgccccgcacgcactggcgagctgggagcgccaccacggctttcaaaaaacccgcacacaccaagataataatgtgtcgttcgctcgtttcgcgcaagcggagtcgcgtccgccttcccgagctccggcacacagacctcaggccgctctcgcgctctccggggccccgagaacacgactcggaccgatg

SEQ ID NO: 1081 - DNA, 203 bp, synthetic construct
  source 1..203: mol_type = other DNA
ggcgcgccagtcctggcaggtggtagccttcccgcccttctggcctctccatcccctgctgcgggggaccgcgcaagcgcagtgagtactgcacgttgtcgcgggccagtaacgtcatcagacgtgtgtgtgtccctgcggcgctaagaaggggagactgaggctgaggctggggaacatcgggcagccgactcggaccgatg

SEQ ID NO: 1082 - DNA, 203 bp, synthetic construct
  source 1..203: mol_type = other DNA
ggcgcgccagtcctaggatgtgtagggggcggggcccggcggaagcgtatataaggccgggctcggggacgcccccccctcactcgcgcgttaggaggctcgggtcgttgtggtgcgctgtcttcccgcttgcgtcagggacctgcccgactcagtggccgccatggcatcagatgaaggcaaactttcgactcggaccgatg

SEQ ID NO: 1083 - DNA, 203 bp, synthetic construct
  source 1..203: mol_type = other DNA
ggcgcgccagtccttcccagacccggggctctccaaggccccgcgcttccgagctccgcgcaaactctggcttctcttgtacgacagaggtggtttgctcttccgttgccccgtggcttcagctcatctttggcaggaaggcgaggcttccgcccggcacaggggatgtccagctcgccgctgtccaacgactcggaccgatg

SEQ ID NO: 1084 - DNA, 203 bp, synthetic construct
  source 1..203: mol_type = other DNA
ggcgcgccagtccttgcggctcacagagctagcgcctctctgggtgtccgtgccagtgctgcgcgggaaggcaccaccaccacagccgccgccgctggccagggtgctggacaagacgggcccgtcggccacctcgccagctcaggcacccgctgcagccgtcgctgtctcctcccagaccggtcccccgactcggaccgatg

SEQ ID NO: 1085 - DNA, 203 bp, synthetic construct
  source 1..203: mol_type = other DNA
ggcgcgccagtcctagtttcgtccgagctcagtagagttttgctgttaagactgcgcgaggagctagagagagcggagagcgctgagccgggccgcacccgccgagccgtcttgatactgatggacattgtgtgggccagaggcagggatggttggctatgaccccaaaccagatggcaggaataacacgactcggaccgatg

SEQ ID NO: 1086 - DNA, 203 bp, synthetic construct
  source 1..203: mol_type = other DNA
ggcgcgccagtcctggtctgagctggggagcggaagccacttgtccctctccctccccaggacttctgtgactcctgggccacagaggtccaaccaggctaagggcctggggataccccctgcctggcccccttgcccaaactggcaggggggccaggctgggcagcagcccctctttcacctcaactcgactcggaccgatg

SEQ ID NO: 1087 - DNA, 203 bp, synthetic construct
  source 1..203: mol_type = other DNA
ggcgcgccagtcctgacagcggcgtggcggcggcggtggcggtagcgacggcacgccgtagggcggtcagaaggtttccggttccggtgtaacgttcgggctccgtctcaggggctgaagtttgtgaggtgtagtattgagtcctgtttgagctattgttctctttttcctgaaaaatggcactgtcacgactcggaccgatg

SEQ ID NO: 1088 - DNA, 203 bp, synthetic construct
  source 1..203: mol_type = other DNA
ggcgcgccagtcctaagggttctggattggaggggagagcaagggagggaggaaggcggtgagagaggcgggggcctcgggagggtgaaaggagggaggagaagggcggggcacggaggcccgagcgagggacaagactccgactccagctctgacttttttcgcggctctcggcttccactgcagcccgactcggaccgatg

SEQ ID NO: 1089 - DNA, 203 bp, synthetic construct
  source 1..203: mol_type = other DNA
ggcgcgccagtcctaacgcaggggcggaaccgcatgactggcagtggcatcagcgatggcggctgcgtcggggtcggttctgcagcgctgtatcgtgtcgccggcagggaggcatagcgcctctctgatcttcctgcatggctcaggtgattctggacaaggattaagaatgtggatcaagcaggtttcgactcggaccgatg

SEQ ID NO: 1090 - DNA, 203 bp, synthetic construct
  source 1..203: mol_type = other DNA
ggcgcgccagtcctcctcccgccggcccgcgccgctgcactcgccctctcctctcgccccccggcaaactttcggcccctccccgcccctcgcccgttattcgtcgtggctcaagcccggccacgccgccccaagggctcctcccgacctcccggcctgccgctccggccactgcgggatccagaaaccgactcggaccgatg

SEQ ID NO: 1091 - DNA, 203 bp, synthetic construct
  source 1..203: mol_type = other DNA
ggcgcgccagtcctctcaacctccgtggctagtcttgacgtggcgggttgctttccaaaatggcgcgggtgctgaaggctgcagccgcgaatgccgtagggcttttttccagacttcaagctcccattccaacagtaagagcttcttccacatcacagcccttggatcaagtgacaggttctgtgtggcgactcggaccgatg

SEQ ID NO: 1092 - DNA, 203 bp, synthetic construct
  source 1..203: mol_type = other DNA
ggcgcgccagtcctaaaggaaccgggttgtcttgggccgggcagggcgggtggtgactctcaaaaggaaataggatcatggcagcagatgatgacaatggtgatggaacaagtttatttgatgtcttttctgcttctcctcttaagaacaatgatgaaggctcactggacatatacgctgggttggaccgactcggaccgatg

SEQ ID NO: 1093 - DNA, 203 bp, synthetic construct
  source 1..203: mol_type = other DNA
ggcgcgccagtcctgcttttcaccctctaccctcccctcagcctggccttttcttccgccctcacagccaccgcgacccaacgctgaggaaagaccccgacttgtggtgtccttccccttgcccaaactggccacgaaaggacatatagcgagagagaaagaggattttctgccgtctcttggcaaaacgactcggaccgatg

SEQ ID NO: 1094 - DNA, 203 bp, synthetic construct
  source 1..203: mol_type = other DNA
ggcgcgccagtcctcggaagacaacggaggggccgagcgtccgagccactccgcggggaccgaacgagcagcccgaagcggcggcggccgaggacggggacagcgacgacgcggaggcagagaagggaacgcccggcccagccccgtagcacaggcggagtgcagcggaggcccctgccgctgccgtccgactcggaccgatg

SEQ ID NO: 1095 - DNA, 203 bp, synthetic construct
  source 1..203: mol_type = other DNA
ggcgcgccagtcctagttacctctcccctttcacgtagttttcatttgtggtgagattctctcccaggccacaagacatttcctgctcggaaccttgtttactaatttccactgcttttaaggccctgcactgaaaatgcaagctcaggcgccggtggtcgttgtgacccaacctggagtcggtcccgcgactcggaccgatg

SEQ ID NO: 1096 - DNA, 203 bp, synthetic construct
  source 1..203: mol_type = other DNA
ggcgcgccagtcctctgtctctgcagccagatccaggctcctggaagaaccatgtccggcagctactggtcatgccaggcacacactgctgcccaagaggagctgctgtttgaattatctgtgaatgttgggaagaggaatgccagagctgccggctgaaaattacccaaccaagagaaatctgcaggcgactcggaccgatg

SEQ ID NO: 1097 - DNA, 203 bp, synthetic construct
  source 1..203: mol_type = other DNA
ggcgcgccagtcctgactgggaggtgctggtcctagggaagctcaagtgggacctggctgctgtgattgcacatgatttcctggccttcattctgcaccggctctctctgccccgtgaccgacaggccttggtcaaaaagcatgcccagacctttttggccctctgtgctacagattatacctttgcccgactcggaccgatg

SEQ ID NO: 1098 - DNA, 203 bp, synthetic construct
  source 1..203: mol_type = other DNA
ggcgcgccagtcctataacacccggccccgccgggcggccgcgggtgggtagaggtgcgcgcctgggacctgaacatggacttcccgtgcctctggctagggctgttgctgcctttggtagctgcgctggatttcaactaccaccgccaggaagggatggaagcgtttttgaagactgttgcccaaaacgactcggaccgatg

SEQ ID NO: 1099 - DNA, 203 bp, synthetic construct
  source 1..203: mol_type = other DNA
ggcgcgccagtcctgatgatgtcagcactgcttccggtcggtggcgcttctctctggcccgagccagcatgatccgctgggcccccagcgcatctcctggaagagcccactcaccctggacgagctcttcggtagcctcagaccgtccttgaagaggatgactgagacattatgggccacgcgctgtgcgactcggaccgatg

SEQ ID NO: 1100 - DNA, 203 bp, synthetic construct
  source 1..203: mol_type = other DNA
ggcgcgccagtcctgcgtcacgcagcgcacgtcgccgcgcgcctgcgctcttttccacgtgcgaaagccccggactcgtggagttgtgaacgccgcggactccggagccgcacaaaccagggctcgccatgaagccaggattcagtccccgtgggggtggctttggcggccgagggggctttggtgaccgactcggaccgatg

SEQ ID NO: 1101 - DNA, 203 bp, synthetic construct
  source 1..203: mol_type = other DNA
ggcgcgccagtcctaggaaggaagtggggccctgcggcgcccagccaccccctgacggcttccccacgggaggacgcgaggccccggcccagccatggccccctggcgcaaagctgacaaggagcggcacggcgtggccatatacaacttccaaggcagcggagccccccagctctccctgcagatcgcgactcggaccgatg

SEQ ID NO: 1102 - DNA, 203 bp, synthetic construct
  source 1..203: mol_type = other DNA
ggcgcgccagtcctacagcatggagtggggttacctgttggaagtgacctcgctgctggccgccttggcgctgctgcagcgctctagcggcgctgcggccgcctcggccaaggagctggcatgccaagagatcaccgtgccgctgtgtaagggcatcggctacaactacacctacatgcccaatcagtcgactcggaccgatg

SEQ ID NO: 1103 - DNA, 203 bp, synthetic construct
  source 1..203: mol_type = other DNA
ggcgcgccagtcctcagtgctgtccgggctggtttgcccggtccctgactaacggctttctgccccttctctcgccacccctgcccaaggtcgcccctctgccttcgcccctgtcccgggagggtgggaagctttgaccccgccctgcccactcgcgtctccgcagccgtagccgcgcctgtcccaatcgactcggaccgatg

SEQ ID NO: 1104 - DNA, 203 bp, synthetic construct
  source 1..203: mol_type = other DNA
ggcgcgccagtcctcgaagtcgctgcgctcagtgcgcaggcgcgaagaagctggcaggggcacgagccgggggcgggtttgaagacgcgtcgttgggttttggaggccgtgaaacagccgtttgagtttggctgcgggtggagaacgtttgtcaggggcccggccaagaaggaggcccgcctgttacgcgactcggaccgatg

SEQ ID NO: 1105 - DNA, 203 bp, synthetic construct
  source 1..203: mol_type = other DNA
ggcgcgccagtcctgatccgggatgcggcggcccaatcggaaggtggaccgaaatcccgcgacagcaagaggcccgtagcgacccgcggtgctaaggaacacagtgctttcaaaagaattggcgtccgctgttcgcctctcctcccgggagtcttctgcctactcccagaagaggagggaagcacagtcgactcggaccgatg

SEQ ID NO: 1106 - DNA, 203 bp, synthetic construct
  source 1..203: mol_type = other DNA
ggcgcgccagtcctgccaggttactggccactgctcacctaggcgctagcaaacttctgccaagatcggaactgagtactaaacagcctccacagttctccctggtgccgtctccggcttggcgccgcatcctcctctgggctcgcgatggccgcgtcccctcccgctgcggacgggtcctttggtaccgactcggaccgatg

SEQ ID NO: 1107 - DNA, 203 bp, synthetic construct
  source 1..203: mol_type = other DNA
ggcgcgccagtcctagtgctaagcaaatacaggaaccaaaaaggtttatagaggctgccttatgctgtctcatccagttcctttgcggtcctcttcttcagcacatgccaaagctgttcctcacggcctgtgagacaagagcatcttggatgtaggacaatggaagagttagatgccttattggaggacgactcggaccgatg

SEQ ID NO: 1108 - DNA, 203 bp, synthetic construct
  source 1..203: mol_type = other DNA
ggcgcgccagtcctcggcgcctataaagtcgccctccgcccggacgtaaacaaacctcgcctggctcccagctggtgctgaagctcgtcagttcaccatccgccctcggcttccgcggggcgctgggccgccagcctcggcaccgtcctttcctttctccctcgcgttaggcaggtgacagcagggaccgactcggaccgatg

SEQ ID NO: 1109 - DNA, 203 bp, synthetic construct
  source 1..203: mol_type = other DNA
ggcgcgccagtcctgagtcctgctagatccccgcaagctaggccagctcctcccactgcctcccttcctctttctcctcctcttactcctttccagccagaccttggctgtctacaggatgggggacaccctgagccccggacatggcaaccacagagagagcagcccttttctttcccccttggaggcgactcggaccgatg

SEQ ID NO: 1110 - DNA, 203 bp, synthetic construct
  source 1..203: mol_type = other DNA
ggcgcgccagtcctagcacccgtaggtcggattatctggtaaggcaccggaagtgaccgcctcgcggctgcttcctctcctggagtccagagtcccgttgctccgccgcgatattcagtaaaccactgggagtccggcagcatggaggcagcgcgccctcccccgacggcagggaagttcgtggtggtcgactcggaccgatg

SEQ ID NO: 1111 - DNA, 203 bp, synthetic construct
  source 1..203: mol_type = other DNA
ggcgcgccagtcctcgaaggggcgtggccaagcgcaccgcctcggggcggggccggcgttctagcgcatcgcggccgggtgcgtcactcgcgaagtggaatttgcccagacaagcaacatggctcggaaacgcgcggccggcggggagccgcggggacgcgaactgcgcagccagaaatccaaggccacgactcggaccgatg

SEQ ID NO: 1112 - DNA, 203 bp, synthetic construct
  source 1..203: mol_type = other DNA
ggcgcgccagtcctaagtgtgcagcagatcttcttccgggcggacgtggagccggaagcggaggttccgggctccgggatgaaaggagggaacgcagacagctggcagagagagaagttggctagcatggaatcaccagaggagcctggagcatccatggatgagaactactttgtgaactacactttcgactcggaccgatg

SEQ ID NO: 1113 - DNA, 203 bp, synthetic construct
  source 1..203: mol_type = other DNA
ggcgcgccagtcctccgccgcggtcgaggatcctggaggtttgtccccgccgccccgacgcttccgccgggtccgtcggcacgtcggccctgcctcccggaccaccctgcggggcgcaccagcgatctggggtgcggggctcggcctccctgcgctcctggctgacggtgtgaccttgggtcttaacccgactcggaccgatg

SEQ ID NO: 1114 - DNA, 203 bp, synthetic construct
  source 1..203: mol_type = other DNA
ggcgcgccagtcctaggcatcggcgcggtcagcctcgtcgcgcgcccacgcccccacgccggctcttcccggggtccttccgtgcgcgttgatatgattggccggcgaatcgtggttctcttttcctccttggctgtctgaagatagatcgccatcatgaacgacaccgtaactatccgcactagaaacgactcggaccgatg

SEQ ID NO: 1115 - DNA, 203 bp, synthetic construct
  source 1..203: mol_type = other DNA
ggcgcgccagtcctcaacagaagccaagaaggaagccgtctatcttgtggcgatcatgtataagctggcctcctgctgtttgcttttcataggattcttaaatcctctcttatctcttcctctccttgactccagggaaatatcctttcaactctcagcacctcatgaagacgcgcgcttaactccggcgactcggaccgatg

SEQ ID NO: 1116 - DNA, 203 bp, synthetic construct
  source 1..203: mol_type = other DNA
ggcgcgccagtccttgcattttgctccggagcgtccagagtcctggccctgagcgggaatcgcagtggccgaggctgagcggcaggcggatcgccccgaccctcactcctggcgtctgagtctctggcgtagcccatgctgagtgggcggctggtcctgggtctggtctccatggctggccgcgtttgcgactcggaccgatg

SEQ ID NO: 1117 - DNA, 203 bp, synthetic construct
  source 1..203: mol_type = other DNA
ggcgcgccagtcctgtcttaaccatgaacttctctggaggagggaggcaggaagcagcagggtccaggggtagaagggctcccagaccccgagaacaggaccgagacgtgcagctgtccaaggctctgtcctatgccctgcgccatggggccttgaagctggggcttcccatgggagctgatggcttccgactcggaccgatg

SEQ ID NO: 1118 - DNA, 203 bp, synthetic construct
  source 1..203: mol_type = other DNA
ggcgcgccagtcctagtcatccccaaaacgaggggatatcagcttaccgaggccgcaggttttcctagtccctacctcatagatatgtaggacatccccgggcccggaatgcggctctctgaccctctctgtgccctcccccgccccccgaaccaggcttggcgggcggaggcgccagcggatgtctccgactcggaccgatg

SEQ ID NO: 1119 - DNA, 203 bp, synthetic construct
  source 1..203: mol_type = other DNA
ggcgcgccagtcctcttgccgcgctgcactccaccacgcctcctccaagtcccagcgaacccgcgtgcaacctgtcccgactctagccgcctcttcagctcgccatggatcccaactgctcctgcgccgccggtgactcctgcacctgcgccggctcctgcaaatgcaaagagtgcaaatgcacctcccgactcggaccgatg

SEQ ID NO: 1120 - DNA, 203 bp, synthetic construct
  source 1..203: mol_type = other DNA
ggcgcgccagtcctcccccacacaccccagccgaggcccggaaggggccaggcgcgcttccgtctccgccggggatgcacggagggcggagctgcggcccgaggacgcgacgcgagcccagttccggcgaggaggccgcgccagtgacagcgatggcggcggagtcggcgctccaagttgtggagaagcgactcggaccgatg

SEQ ID NO: 1121 - DNA, 203 bp, synthetic construct
  source 1..203: mol_type = other DNA
ggcgcgccagtcctatgcgcagaagcactccgggcgtgctgccggcggcggtaggtggcgcgcgggtccggcgggcggttggcttgagcgggaccggagctgaggcaggaagagccggcgccatggtggagaaggaggaggctggcggcggcattagcgaggaggaggcggcacagtatgaccggcagcgactcggaccgatg

SEQ ID NO: 1122 - DNA, 203 bp, synthetic construct
  source 1..203: mol_type = other DNA
ggcgcgccagtcctactggtgggaactggattttgcggctgcagaggacttccccaaattttgccacattaacagctgactgcacatctgagccccgaggtgaagcagggcctcaggtagccagggaactggttgagcagaggaaatcggagagacctttttttttgtcatgaacaggctcagtgtgacgactcggaccgatg

SEQ ID NO: 1123 - DNA, 203 bp, synthetic construct
  source 1..203: mol_type = other DNA
ggcgcgccagtcctggccgcccactgaggatctgctggctgcagcgagtggaaggacctgctcggctggaacgttttttttttttttccctcccaggcgacgtccgatgggtgtgtcgggcaggaggtgatatttgacaggctgcgcgcgggcgagctgccgcggagcacccggcaggggctgacagccgactcggaccgatg

SEQ ID NO: 1124 - DNA, 203 bp, synthetic construct
  source 1..203: mol_type = other DNA
ggcgcgccagtcctgcttctgccctcaaccaaaatggcgctagctcggaagctgccgaggtgctaggagttgccgaagcaagtccggaagctaccgagcgagtccggaagttgccgaaagggagcagcggggaaggaggatggcggatatcatcgcaagactccgggaggacgggatccaaaaacgtgcgactcggaccgatg

SEQ ID NO: 1125 - DNA, 203 bp, synthetic construct
  source 1..203: mol_type = other DNA
ggcgcgccagtcctagtctgggacgcgccgccgccatgatcatccctgtacgctgcttcacttgtggcaagatcgtcggcaacaagtgggaggcttacctggggctgctgcaggccgagtacaccgagggggatgcgctggatgccctgggcctgaagcgctactgctgccgccggatgctgctggcccgactcggaccgatg

SEQ ID NO: 1126 - DNA, 203 bp, synthetic construct
  source 1..203: mol_type = other DNA
ggcgcgccagtcctctcgtttgcgatgttccgttatctggatgcggcggagggatctggcggagggaggtgtttatgaggcgctgggggcggaggaggcgaattagtccgagtggagagagcgagctgagtggttgtgtggtcgcgtctcggaaaccggtagcgcttgcagcatggctgaccaactgacgactcggaccgatg

SEQ ID NO: 1127 - DNA, 203 bp, synthetic construct
  source 1..203: mol_type = other DNA
ggcgcgccagtcctgattcgcccacccactgtgccaacatggcggcgcccaggtcctaattcgggaaacgtgcaccttgactaattcggttttctgtggctacgagagcaggcttggcgggcggaggcgccagcggatgtctcatgcaaggatcgtctctgtggctaagcctcactttccgctccgcccgactcggaccgatg

SEQ ID NO: 1128 - DNA, 203 bp, synthetic construct
  source 1..203: mol_type = other DNA
ggcgcgccagtccttgacaggcatgagccaccgcgcctggccccttcttttgaatgggcctccttgcgtttccgtttcaatgccccgtgctacttttttgggagccccaaggctgtactgtttgattgactcctttttttcccctttctttttaacctaaattaaagctgccactgcagagccccgcccgactcggaccgatg

SEQ ID NO: 1129 - DNA, 203 bp, synthetic construct
  source 1..203: mol_type = other DNA
ggcgcgccagtcctacttccgggcgcggcgccggcttgctgccactgcagagccccgccatggaagacacgccgttggtgatatcgaagcagaagacggaggtggtgtgcggggtccccacccaggtggtgtgtacggccttcagcagtcacatcctggtggtggtgacccagtttgggaagatgggccgactcggaccgatg

SEQ ID NO: 1130 - DNA, 203 bp, synthetic construct
  source 1..203: mol_type = other DNA
ggcgcgccagtccttccccgcgcgggttcgcgtcgcgtctgcagtggccgaggctgctgcctgccgggcagatgggtccgccttgttccggctgcagctttcgccgccggggcttgctggctgtcgggaactagtcaactggagtttttgttgacttcccacggaaacatgccctgaactgtcacagacgactcggaccgatg

SEQ ID NO: 1131 - DNA, 203 bp, synthetic construct
  source 1..203: mol_type = other DNA
ggcgcgccagtcctaaatcagcatgtttattatttttaaaaaattagggcctggattttgacaatgtcaagatttaccgtatatccctgtttgtttggatacaccagtgacgtccacttctagaagacaaagttatattacttaaacaaccaaagatggagtctcgctcttcgcccaggctggagtgccgactcggaccgatg

SEQ ID NO: 1132 - DNA, 203 bp, synthetic construct
  source 1..203: mol_type = other DNA
ggcgcgccagtcctacgcgcgcttggccgcccgacgacgcgggagccgcacgcgccggacgaggctcgctgcgctccctgttgcccagcgcgggcccgttgaggcggagccctcagttcccggccaggacacggtctgggccgccgaatctccggccgaagagcggcggcggcagcggcgggaaaaaacgactcggaccgatg

SEQ ID NO: 1133 - DNA, 203 bp, synthetic construct
  source 1..203: mol_type = other DNA
ggcgcgccagtcctttcctcgcgttaccctccttccggacagcaccccctcccttctccggtagctcctacccctgcctgtgcgggcctcgtccccgcgcccagccctcggtgctgcctccgacagcgccgcgctctctcagccgcccccctgcccctcgggcccccctctctgctgcccctggcgcccgactcggaccgatg

SEQ ID NO: 1134 - DNA, 203 bp, synthetic construct
  source 1..203: mol_type = other DNA
ggcgcgccagtcctagagcgcgcgtcgtggaacgtcttggttgccacggcaagcgcgcgcgcgaggccttgggaacctcgggaccggcccccggcgagcgcagcggcgcccagtagtcatcttagtgggatttggggaagcaacagggctgtgtggggtaacctgccacctttaagtggaaatcagaacgactcggaccgatg

SEQ ID NO: 1135 - DNA, 203 bp, synthetic construct
  source 1..203: mol_type = other DNA
ggcgcgccagtccttggctgagttcttcctttgacaagatggcggcaggaggcagtggcgttggtgggaagcgcagctcgaaaagcgatgccgattctggtttcctggggctgcggcccacttcggtggacccagcgctgaggcggcggcggcgaggcccaagaaataagaagcggggctggcggcggcgactcggaccgatg

SEQ ID NO: 1136 - DNA, 203 bp, synthetic construct
  source 1..203: mol_type = other DNA
ggcgcgccagtccttgtcccctcgcgcagtcaccgagcgcagatcccgcgctctcgattggaacgcctccccatcactcagccacactcaggggctggacgcctcactcccgtttccgagccataaaaggtctaggaccgcttcccccgagccagcagaacatccagtcatggataaaaatgagctggcgactcggaccgatg

SEQ ID NO: 1137 - DNA, 203 bp, synthetic construct
  source 1..203: mol_type = other DNA
ggcgcgccagtcctggcggggaggggccgggggcctcggggacccaagcgcgagggaaaggcctggccgagagcgggccggagcccaggcctggcgcggcggcgcccgccagaacatccagtcatggataaaaatgagctggttcagaaggccaaactggccgagcaggctgagcgatatgatgacatcgactcggaccgatg

SEQ ID NO: 1138 - DNA, 203 bp, synthetic construct
  source 1..203: mol_type = other DNA
ggcgcgccagtcctacagatccgccatgacaaaggaggagagtcggggacttgagccgtggctccgacttgggcggagcctggaggggggtggttgcgatacggggaccggagaatttgcactttaaagtccgggtctgcccgttttcgtttcacagtaaccgacgtctcaagtcagaacatccagtccgactcggaccgatg

SEQ ID NO: 1139 - DNA, 203 bp, synthetic construct
  source 1..203: mol_type = other DNA
ggcgcgccagtccttgtgtgtgagtgcaggcaggctgacaatgatttcctcagtgattacgtacagagcgagtccctgcgggttaggggccccctctggagccatcctgatggctttgggggccttgcttccattttccattattatgtggactaccggagcgacagcgcagtccaagaccttgcaggcgactcggaccgatg

SEQ ID NO: 1140 - DNA, 203 bp, synthetic construct
  source 1..203: mol_type = other DNA
ggcgcgccagtcctcggcggcggcggcaccccgggcgcggcaatactgaacactgcgcagcttgcagaggtctcctggcagccctcattaggaattctgtctggccccgatcagaatactggagacgagaccacgagattgatgagtttgccttgggagtcggtaagaaggtgaagccaggggcgaaccgactcggaccgatg

SEQ ID NO: 1141 - DNA, 203 bp, synthetic construct
  source 1..203: mol_type = other DNA
ggcgcgccagtcctagtaagccagcgtggctacgccatcacgaccggcggtggcacatgcgcaatagcgagacgctggagcgcggcgtaggtggctgccgagtcttttcctgtttagggtcttatcctggcattgagggcgccggactggcgcttttggccgacttggcattgggtgggcggcttcttcgactcggaccgatg

SEQ ID NO: 1142 - DNA, 203 bp, synthetic construct
  source 1..203: mol_type = other DNA
ggcgcgccagtccttaagtgcactttttgctgatacttcatttctaatcttgtagaaaatttcagctgtagcccttggactagaagctgaaataacagaagctgtgtacgatgcattagggtattgaagaaaattaacttttgaattaaatatttggaatataaggaaataaggaaagttgactgaaacgactcggaccgatg

SEQ ID NO: 1143 - DNA, 203 bp, synthetic construct
  source 1..203: mol_type = other DNA
ggcgcgccagtccttcaagaggcgacgaggaagcggccgcctccctgcgccccgcccctccggctagctcgctggctcccggctcctcccgacgtctcctacctcctcacggctcttcccggcgctctcctggctcccttctgccccagctccgtctcggcggcggcgggcagttgcagtggtgcagacgactcggaccgatg

SEQ ID NO: 1144 - DNA, 203 bp, synthetic construct
  source 1..203: mol_type = other DNA
ggcgcgccagtcctgatatctctggaatagactgcgctaccctgcgccgccgccgtcaaactcccgcagacttctctgtagatcgctgagcgatactttcggcagcacctccttgattctcagttttgctggaggccgcaaccaggcccgcgccgccaccatgtttcgaaatcagtatgacaatgatgcgactcggaccgatg

SEQ ID NO: 1145 - DNA, 203 bp, synthetic construct
  source 1..203: mol_type = other DNA
ggcgcgccagtcctaccttcccggccagcggtagcaactgcagaactgcaggagactatctttctagacaaggcagttgaggaggagggagcgcttgagggggactggcctggcgtgcactccgcacctcggggacattattgcgcgtggaacggctgcttttggaagactattgcccagaagaaaagcgactcggaccgatg

SEQ ID NO: 1146 - DNA, 203 bp, synthetic construct
  source 1..203: mol_type = other DNA
ggcgcgccagtcctcctcccacctcccgggaaccctggctgagtgtgcgtgtgtgggagcgcgagagccccccgacagccaccccttggggcgcgcggctgcagttagggccttggcccctccaccagaggaaggtgctgccacgtgtctgctccttctgaacctccaggtttctgctacgttgcccccgactcggaccgatg

SEQ ID NO: 1147 - DNA, 203 bp, synthetic construct
  source 1..203: mol_type = other DNA
ggcgcgccagtccttcagctccctgccaggccagacccggcagacagatgagggcccaggaggcctggcgggcctgggggcgctacggtgggagaggaagccaggggtacctgcctctgccttccagggccaccgttggccccagctgtgccttgactacgtaacatcttgtcctcacagcccagagccgactcggaccgatg

SEQ ID NO: 1148 - DNA, 203 bp, synthetic construct
  source 1..203: mol_type = other DNA
ggcgcgccagtcctccgctccctggcgtgactcggcactgagagtcccgggagaagactcggcggtcgccacctcttctgtccaggcctcggccttcctgagcatctctccttcctctcccagatcgtcttctccttcagtttcaaagccagtggcgtcgcggccaccctgccgggctctctgtgaggcgactcggaccgatg

SEQ ID NO: 1149 - DNA, 203 bp, synthetic construct
  source 1..203: mol_type = other DNA
ggcgcgccagtcctccaactgaagctgcatctcaaagccgaagattccagcagcccaggggatttcaaagagctcagactcagaggaacatctgcggagagacccccgaagccctctccagggcagtcctcatccagacgctccgctagtgcagacaggagcgcgcagtggccccggctcgccgcgcccgactcggaccgatg

SEQ ID NO: 1150 - DNA, 203 bp, synthetic construct
  source 1..203: mol_type = other DNA
ggcgcgccagtccttcataaaaggaaaaaaaagcgtgtgcggttctcgacgtgccgccaatcttcgaacgcaggtctgtgatcatccgcagactccgaaaaagggttcgaggaacgcgcctgctcccctcgtcgcagtttccagcccgacgagcttgttttgtcccggactcggtgcccctgtagacacgactcggaccgatg

SEQ ID NO: 1151 - DNA, 203 bp, synthetic construct
  source 1..203: mol_type = other DNA
ggcgcgccagtcctatggagactgaaagtgagagtagcactttaggggatgacagtgtcttctggttggagtctgaagttataatccaggtgactgactgtgaagaggaagaaagggaagagaagttcaggaagatgaagtcctcagtacattctgaagaagatgattttgttccagagctacatagacgactcggaccgatg

SEQ ID NO: 1152 - DNA, 203 bp, synthetic construct
  source 1..203: mol_type = other DNA
ggcgcgccagtcctttgagtatttccgtccaatcaaaaggagactgtaagaggaggaggaggaggagatgactggggagcgggagctggagaatactgcccagttactctagcgcgccaggccgaaccgcagcttcttggcttaggtacttctactcacagcggccgattccgaggccaactccagcacgactcggaccgatg

SEQ ID NO: 1153 - DNA, 203 bp, synthetic construct
  source 1..203: mol_type = other DNA
ggcgcgccagtcctgcgcgcgcttgggcgcgcgccagggactccagggtcccttgccccgcgccgcttctccctcctccctctttcttcgggcagcctccccaccaccccacttcagcctcccccactcttgccgcctccatatcatcaagctctggtggcgcctggggggcttttcggatcggcaggcgactcggaccgatg

SEQ ID NO: 1154 - DNA, 203 bp, synthetic construct
  source 1..203: mol_type = other DNA
ggcgcgccagtcctagggctgaggcataaaactgccagagggtctcaaggcaggcaaagaagaaccatgaggctcatcctgcctgtgggtttgattgctaccactcttgcaattgctcctgtccgctttgacagggagaaggtgttccgcgtgaagccccaggatgaaaaacaagcagacatcataaacgactcggaccgatg

SEQ ID NO: 1155 - DNA, 203 bp, synthetic construct
  source 1..203: mol_type = other DNA
ggcgcgccagtcctcgggagctgcgagtgtccagctgcggagacccgtgataattcgttaactaattcaacaaacgggacccttctgtgtgccagaaaccgcaagcagttgctaacccagtgggacaggcggattggaagagcgggaaggtcctggcccagagcagtgtgacacttccctctgtgacccgactcggaccgatg

SEQ ID NO: 1156 - DNA, 203 bp, synthetic construct
  source 1..203: mol_type = other DNA
ggcgcgccagtccttgccgcgagcgcgtctccttcattcgcaggctgggcgcgttcgcagtcggctggcggcgaaggaaggcgctctcgggacctcgcgggcgcgcgtcttttggctcttgcccctgtccctgcggcttggggaaggcgtaacccggcggctaggcgcgggagaagtgcggaggagcccgactcggaccgatg

SEQ ID NO: 1157 - DNA, 203 bp, synthetic construct
  source 1..203: mol_type = other DNA
ggcgcgccagtccttgagggactgctaaggaagaggctgcatggcgcggtagtcccccgagtggaggtcggctgcccctgggaaaccagagagtcggagggagtccatctggagcggccaagtaggtcggggaagggccgcgcctgacgtctggccgcaggtggtgactctcaaaaggaaataggatccgactcggaccgatg

SEQ ID NO: 1158 - DNA, 203 bp, synthetic construct
  source 1..203: mol_type = other DNA
ggcgcgccagtcctgctccgcccccgcgccgccggccctagtctgcctgttttcgactcgcgctccggctgctgtcacttggctctctggctggagcttgaggacgcaaggagggtttgtcactggcagactcgagactgtaggcactgccatggcccctgtgctcagtaaggactcggcggacatcgcgactcggaccgatg

SEQ ID NO: 1159 - DNA, 203 bp, synthetic construct
  source 1..203: mol_type = other DNA
ggcgcgccagtcctgagcaacgtctccgagcaggcgctgggctagaggcgggtctcaaccagctactcattggaggcgggcttgagagcggcggccagggaggtgcggagcagcctcggcggcggcggccgaaccaaccgagtcggatcctgaccctaaaacctagtattttccacttgttcatcaatcgactcggaccgatg

SEQ ID NO: 1160 - DNA, 203 bp, synthetic construct
  source 1..203: mol_type = other DNA
ggcgcgccagtcctgccgacttggaaatgtgaacgcaagaagcaggcttgatttttttttctccccccttctctctctctctctctctctctcttcctctctccctctttctcctctctcacccacactcacgcacacctccaaaccgcacacccagacgcacacgcataccccagcgcccggcagttcgactcggaccgatg

SEQ ID NO: 1161 - DNA, 203 bp, synthetic construct
  source 1..203: mol_type = other DNA
ggcgcgccagtcctgggacggtagaagcctggaggaggagcttgagtccagccactgtctgggtactgccagccatcgggcccaggtctctggggttgtcttaccgcagtgagtaccacgcggtactacagagaccggctgcccgtgtgcccggcaggtggagccgcccgcatcagcggcctcggggacgactcggaccgatg

SEQ ID NO: 1162 - DNA, 203 bp, synthetic construct
  source 1..203: mol_type = other DNA
ggcgcgccagtcctgctgcctgagaaggattggcacgggcacagaccactgcccccacctgccctgcgccatctacccaagaaggctcggcacgggcaccaaccactgcctccaactgccccatgctgcctgagaaggcactgcacggccacccccaactgccccgcactgtccctacccgggcagcccgactcggaccgatg

SEQ ID NO: 1163 - DNA, 203 bp, synthetic construct
  source 1..203: mol_type = other DNA
ggcgcgccagtcctaagtccgtcctccccgttaggtggcgagcgcccgaggggaggggacagccgggcaagcaggaagctgcggcttaaaagggcaacccgcgcgggacccttcctccctagtcgcggggagtctgagaaagcgcgcctgtttcgcgaccatcacgcacctcccctccgcttgtggcccgactcggaccgatg

SEQ ID NO: 1164 - DNA, 203 bp, synthetic construct
  source 1..203: mol_type = other DNA
ggcgcgccagtcctcaccctcgcgatctgtcaagtctgtccccaggggaggtccccctttcgggaggaagtttttaaggggatttctcaaaatcacccccgcgcttccttcactccttccttagagccggaggtcggtgagggcccgcggaatcatctatctcgcccccgtcgcagcgcgcagggacccgactcggaccgatg

SEQ ID NO: 1165 - DNA, 203 bp, synthetic construct
  source 1..203: mol_type = other DNA
ggcgcgccagtcctctgcgtcagccagcccagctatttaagcaggctggcatcagcaaacacagcttccaaacccagggcttgcgcttgcctttgcctcttccacactaatgacagactgccccactgagaagggtctagcggagcacaggtcaccagctgggcaacattcagaaagttagtcttcctcgactcggaccgatg

SEQ ID NO: 1166 - DNA, 203 bp, synthetic construct
  source 1..203: mol_type = other DNA
ggcgcgccagtcctaaaaactgcgggaagcaggaaagagcacaacaggtttctctctatttccggtgtattgtatcctcacgtttccggagattgacgttgctcttgtgttctcgcgagaggcgggaaagggcgcagggtttgaaacatggcggacgacgtagaccagcaacaaactaccaacactgtcgactcggaccgatg

SEQ ID NO: 1167 - DNA, 203 bp, synthetic construct
  source 1..203: mol_type = other DNA
ggcgcgccagtcctaattgtatatgagcgcgagcggcgggctcttgggtcttttttagcgccatctgctcgcggcgccgcctcctgctcctcccgctgctgctgccgctgccgccctgagtcactgcctgcgcagctccggccgcctggctccccatactagtcgccgatatttggagttcttacaaccgactcggaccgatg

SEQ ID NO: 1168 - DNA, 203 bp, synthetic construct
  source 1..203: mol_type = other DNA
ggcgcgccagtcctgcggcgcagcttcagggcagcgcgggctgcagcggcggcggcggttagggctgtgtagggcgaggcctcccccttcctcctcgccatcctactcctccctcctcgtcatcctcccccttcgtcctcctcgccttcctcctcctcgtcaggctcgacccagctgtgagcggcaagcgactcggaccgatg

SEQ ID NO: 1169 - DNA, 203 bp, synthetic construct
  source 1..203: mol_type = other DNA
ggcgcgccagtcctcttgatgagcttgacaaagacgatagtacccatgagtctctgtctcaagaatcagagtcggaagaagatgggattcatgtagattcacaaaaggctcttgttttaaaagaaaagggcaataaatacttcaaacaaggaaaatatgatgaagcaattgactgctacacaaaaggccgactcggaccgatg

SEQ ID NO: 1170 - DNA, 203 bp, synthetic construct
  source 1..203: mol_type = other DNA
ggcgcgccagtcctatcgctacgcccacttggtggcctataaaggaagcgggcgaaccccggcagccctacacaacttggggcccctctcctctccagcccttctcctgtgtgcctgcctcctgccgccgccaccatgaccacctccatccgccagttcacctcctccagctccatcaagggctcctccgactcggaccgatg

SEQ ID NO: 1171 - DNA, 203 bp, synthetic construct
  source 1..203: mol_type = other DNA
ggcgcgccagtcctcgtctcggtgccagtgtcgaggttctttctgcttagctacccggagccgactacggaggaggacacctgagtttacgtctcttccatctgctgctcacctcagctgcctgggtccccgacgagagccaggtgacacttaactccgccatctgcgttttgagcactgttctcatacgactcggaccgatg

SEQ ID NO: 1172 - DNA, 203 bp, synthetic construct
  source 1..203: mol_type = other DNA
ggcgcgccagtcctggagaataaaataatcaggaggctgggtttgtgcttggctccaagcatgccctgctctctgacctggagactaccacctcgcacatgccaaggtcaggggctcccaaagagcgccctgcggagcctctcacccctcccccatcctatggccaccagccacagacagggtctgggcgactcggaccgatg

SEQ ID NO: 1173 - DNA, 203 bp, synthetic construct
  source 1..203: mol_type = other DNA
ggcgcgccagtcctctgttcgccccgcgccaccggcccgcgccccgccatggaggacctggatgccctgctctctgacctggagactaccacctcgcacatgccaaggtcaggggctcccaaagagcgccctgcggagcctctcacccctcccccatcctatggccaccagccacagacagggtctggcgactcggaccgatg

SEQ ID NO: 1174 - DNA, 203 bp, synthetic construct
  source 1..203: mol_type = other DNA
ggcgcgccagtcctgcggagcagtggaaccgagactgccccgcggagccgccgctagacttcgggctccttgaggatattcagttttgtatgtttgaatatcctctcaccatgttcagcataaagtaccattcttaatgattatcctcaacaagacaggtgtgagagggttgctgttgtattgcaatccgactcggaccgatg

SEQ ID NO: 1175 - DNA, 203 bp, synthetic construct
  source 1..203: mol_type = other DNA
ggcgcgccagtcctggggccggatccccggatgccctgctctctgacctggagactaccacctcgcacatgccaaggtcaggggctcccaaagagcgccctgcggagcctctcacccctcccccatcctatggccaccagccacagacagggtctggggagtcttcaggagcctcgggggacaaggaccgactcggaccgatg

SEQ ID NO: 1176 - DNA, 203 bp, synthetic construct
  source 1..203: mol_type = other DNA
ggcgcgccagtcctcttcctctccaggatccccaaggctaggaggccaacctactaacagcagcctgcctgcagctgtcctggtagaacagtgtggacattgcagaagctgtcactgccccagaaagaaagcaccccagagccaaggcaaagagtcttgaaagcgccacaagcagcagctgctgagcccgactcggaccgatg

SEQ ID NO: 1177 - DNA, 203 bp, synthetic construct
  source 1..203: mol_type = other DNA
ggcgcgccagtcctagctccgcgggcccggctgggcgagtgtctggccctttaagggccgcccccgaggaggtgccaggcccgggtggcgccgtccgtccttcctggtcctgcgggtccaggactgtccgcggggttgagggaaggggccgtgcccggtgccagcccaggtgctcgcggcctggctcccgactcggaccgatg

SEQ ID NO: 1178 - DNA, 203 bp, synthetic construct
  source 1..203: mol_type = other DNA
ggcgcgccagtcctggggcaagacagctccaccaggagtcaggagtgaatcccctctgggaacgaggcactaggaagaagaacttccagcccaggagaaataacatctgctttgctgccgagctcagaggagaccccagacccctcccgcagccagagggctggagcctgctcagaggtgctttgaagcgactcggaccgatg

SEQ ID NO: 1179 - DNA, 203 bp, synthetic construct
  source 1..203: mol_type = other DNA
ggcgcgccagtcctgctgttggcagctgtgttgctgggcctggtgctgctggtggtgctgctgctgcttctgaggcactggggctggggcctgtgccttatcggctggaacgagttcatcctgcagcccatccacaacctgctcatgggtgacaccaaggagcagcgcatcctgaaccacgtgctgcacgactcggaccgatg

SEQ ID NO: 1180 - DNA, 203 bp, synthetic construct
  source 1..203: mol_type = other DNA
ggcgcgccagtcctgggagtgaacggagagcgtagtgaccatcatgttttagcacaaccccctcagaccactctgtggagaacagactgtcagggaacgtgggtggaggcagagagaccagaaagattccaggacagagatgacagaggcttaggccatggagcctcctcaacaagcccaagagtgagcgactcggaccgatg

SEQ ID NO: 1181 - DNA, 203 bp, synthetic construct
  source 1..203: mol_type = other DNA
ggcgcgccagtcctttccttacaccaatcggaacgtgcaggggtggggagctggccaatcaggcgcggagggcggggccgggcggggttccacctggcggctggctctcagtcccctcgctgtagtcgcggagctgtgtctgttcccaggagtccttcggcggctgttgtgtcgggagcctgatcgcgcgactcggaccgatg

SEQ ID NO: 1182 - DNA, 203 bp, synthetic construct
  source 1..203: mol_type = other DNA
ggcgcgccagtcctctgtgcggtcacttccggcccgggagcgcgcgggttgattcgtccttcctcagccgcgggtgatcgtagctcggaaatggcgggatttggtgctatggagaaatttttggtagaatataagagtgcagtggagaagaaactggcagagtacaaatgtaacaccaacacagcaatcgactcggaccgatg

SEQ ID NO: 1183 - DNA, 203 bp, synthetic construct
  source 1..203: mol_type = other DNA
ggcgcgccagtcctgtttggggccagagtgggcgaggcgcggaggtctggcctataaagtagtcgcggagacggggtgctggtttgcgtcgtagtctcctgcagcgtctggggtttccgttgcagtcctcggaaccaggacctcggcgtggcctagcgagttatggcgacgaaggccgtgtgcgtgctcgactcggaccgatg

SEQ ID NO: 1184 - DNA, 203 bp, synthetic construct
  source 1..203: mol_type = other DNA
ggcgcgccagtcctaagtcgagaggcggtgcacacccgtcgcgcatgcgcaaacacagctgtcggaaggtggcgagcctgaggcgaacaatggcggagctgggcgaagccgatgaagcggagttgcagcgcctggtggccgccgagcagcagaaggcgcagtttactgcacaggtgcatcacttcatgcgactcggaccgatg

SEQ ID NO: 1185 - DNA, 203 bp, synthetic construct
  source 1..203: mol_type = other DNA
ggcgcgccagtcctacggaaacagaaattgctttgcggcccgcacggaaattgctttccttcggcttccgttcttggtccatgtgagagaagctggctgctgaaatgactgcgaaccggcttgcagagagccttctggctttgagccaacaggaagaactagcggatttgccaaaagactacctcttgcgactcggaccgatg

SEQ ID NO: 1186 - DNA, 203 bp, synthetic construct
  source 1..203: mol_type = other DNA
ggcgcgccagtccttggtggtccggttatgggaaaagaagcctcgtgggagagcagagcctgaaaaaggactgcgcggactgacttcttggctactgaaagcaaagctccactgttccaggcacgattctgccttctctcaaatggcataactcaggactctgcaaattcccagaaacaggaggaaaacgactcggaccgatg

SEQ ID NO: 1187 - DNA, 203 bp, synthetic construct
  source 1..203: mol_type = other DNA
ggcgcgccagtcctccgccgcccctctccccgcccagaggcgccccgggggcaccatgcaggcgcagcagctgccctacgagtttttcagcgaagagaacgcgcccaagtggcggggactactggtgcctgcgctgaaaaaggtccaggggcaagttcatcctactctcgagtctaatgatgatgctccgactcggaccgatg

SEQ ID NO: 1188 - DNA, 203 bp, synthetic construct
  source 1..203: mol_type = other DNA
ggcgcgccagtcctgtctctttcttagtttgatttgctagctggtttaatctgttttgtgtagtgccttggagcttacgcatttttttttttttccctccattcgaattcactaagagcaagcatgagggatatgagagtgaacatggctgcagtttttcctgcttaagcttgctttgatccttttaacgactcggaccgatg

SEQ ID NO: 1189 - DNA, 203 bp, synthetic construct
  source 1..203: mol_type = other DNA
ggcgcgccagtcctatgagagaagaggagcggcgctcaggttattccaggatctttggagacccgaggaaagccgtgttgaccaaaagcaagacaaatgactcacagagaaaaaagatggcagaaccaagggcaactaaagccgtcaggttctgaacagctggtagatgggctggcttactgaaggaccgactcggaccgatg

SEQ ID NO: 1190 - DNA, 203 bp, synthetic construct
  source 1..203: mol_type = other DNA
ggcgcgccagtcctttgaaacccgagccatctcaccgctcgcccccaaccctgggctctggctgtttaaaagctggagaggaagtgaaagcgtcaagtacagttgatagaagtccagatcctgaggaaatctccagctaaatgctcaaaatataaaatactgagctgagatttgcgaagagcagcagccgactcggaccgatg

SEQ ID NO: 1191 - DNA, 203 bp, synthetic construct
  source 1..203: mol_type = other DNA
ggcgcgccagtcctgtcttacctcgttgtggcgtcagaaccgccgtcgctcgctcccttctcggcagtggtacctgttcccggtgtccctgaggacgtgcgggccaggtttgcggggccaagtgttgcggcgacgcacctcacgtcgagaatcgggaggaggagactgcaaggataggcccaggagtacgactcggaccgatg

SEQ ID NO: 1192 - DNA, 203 bp, synthetic construct
  source 1..203: mol_type = other DNA
ggcgcgccagtcctcagattttaattgcaattgatcaggtttatattattgtacctccagagacctcctagagccagaacccggctggcttgctgtttcctttagagcagcgcatatcattatttggtgttctggtggaggacttttctgatggcagaaattagtttctctgggttcatcaggacgggcgactcggaccgatg

SEQ ID NO: 1193 - DNA, 203 bp, synthetic construct
  source 1..203: mol_type = other DNA
ggcgcgccagtcctgaagtcggcgtcttgagtcataggagtgagccacgcccgggctgtgggaataagatggcggggaagaagaatgttctgtcgtctctcgcagtttacgcggaagattcagagcccgagtctgatggcgaggctggaatcgaggcggtgggcagcgcggctgaggagaaaggcggacgactcggaccgatg

SEQ ID NO: 1194 - DNA, 203 bp, synthetic construct
  source 1..203: mol_type = other DNA
ggcgcgccagtcctcggcacctcattcatttctaccggtctctagtagtgcagcttcggctggtgtcatcggtgtccttcctccgctgccgcccccgcaaggcttcgccgtcatcgaggccatttccagcgacttgtcgcacgcttttctatatacttcgttccccgccaaccgcaaccattgacgcccgactcggaccgatg

SEQ ID NO: 1195 - DNA, 203 bp, synthetic construct
  source 1..203: mol_type = other DNA
ggcgcgccagtcctcggttcttaagcggcagcgcgctgcgggcgccgagtgtcgggcgcggcaggaggacgaggcagggcgggcgggcgctctaagggttctgctctgactccaggttgggacagcgtcttcgctgctgctggatagtcgtgttttcggggatcgaggatactcaccagaaaccgaaacgactcggaccgatg

SEQ ID NO: 1196 - DNA, 203 bp, synthetic construct
  source 1..203: mol_type = other DNA
ggcgcgccagtcctggagcagccgacgtggccgcaggggaccgtgcctgggggggtctgcgcggggccgctgactcgcgaggttctctgtcgcctgccgccctcgctccttttctccccttctagagtgttacggtgactcttgggtccgaaggggacggacgtcctcccacgtaccatttagaagaacgactcggaccgatg

SEQ ID NO: 1197 - DNA, 203 bp, synthetic construct
  source 1..203: mol_type = other DNA
ggcgcgccagtcctgcctggtgatatgcagctgtacctgtgacatcataattgcaccctccgacatgatatctcttccaaatgcttgatgaaaaaggtgggaggatcacttgagccagggagttgaaggctgcagtgagccctgtttttgccaccacactccagcttgggattgattcctaaagactccgactcggaccgatg

SEQ ID NO: 1198 - DNA, 203 bp, synthetic construct
  source 1..203: mol_type = other DNA
ggcgcgccagtcctagctccggctccccctatataaatcggccatttgcttcgctccgccccgcagcgccggagtcaaagccggttcccggcccagtcccgtcctgcagcagtctgcctcctctttcaacatgacagatgccgctgtgtccttcgccaaggacttcctggcaggtggagtggccgcagcgactcggaccgatg

SEQ ID NO: 1199 - DNA, 203 bp, synthetic construct
  source 1..203: mol_type = other DNA
ggcgcgccagtcctggccgcagctccccggcggaggcaagaggtggttgggggggaccatggctgacgttttcccgggcaacgactccacggcgtctcaggacgtggccaaccgcttcgcccgcaaaggggcgctgaggcagaagaacgtgcacgaggtgaaggaccacaaattcatcgcgcgcttctcgactcggaccgatg

SEQ ID NO: 1200 - DNA, 203 bp, synthetic construct
  source 1..203: mol_type = other DNA
ggcgcgccagtcctatttgcacaatatttgtgcggggtatgggggtgggtttttaaatctcgtttctcttggacaagcacagggatctcgttctcctcattttttgggggtgtgtggggacttctcaggtcgtgtccccagccttctctgcagtcccttctgccctgccgggcccgtcgggaggcgcccgactcggaccgatg

SEQ ID NO: 1201 - DNA, 203 bp, synthetic construct
  source 1..203: mol_type = other DNA
ggcgcgccagtcctgcggcggcatcggcccgagccgccggccgccctcccaccctcccgccccgcggcagccctagctccctccacttggctcccctggtcccgctcgctcggccgggagctgctctgtgcttttctctctgattctccagcgacaggacccggcgccgggcactgagcaccgccacccgactcggaccgatg

SEQ ID NO: 1202 - DNA, 203 bp, synthetic construct
  source 1..203: mol_type = other DNA
ggcgcgccagtcctctccgaggccgtgagcgcaaagcctcaggccccggctccctcctgagctgcgccgtgccaggccgcccgccgggatgcagtgggccgtgggccggcggtgggcgtgggccgcgctgctcctggctgtcgcagcggtgctgacccaggtcgtctggctctggctgggtacgcagacgactcggaccgatg

SEQ ID NO: 1203 - DNA, 203 bp, synthetic construct
  source 1..203: mol_type = other DNA
ggcgcgccagtccttcgagaaaggggctcagcggcggcggaagcggagggggaccaccgtggagagcgcggtcccagcccggccactgcggatccctgaaaccaaaaagctcctgctgcttctgtaccccgcctgtccctcccagctgcgcagggccccttcgtgggatcatcagcccgaagacagggcgactcggaccgatg

SEQ ID NO: 1204 - DNA, 203 bp, synthetic construct
  source 1..203: mol_type = other DNA
ggcgcgccagtcctatgagtcttctagctaaacctatgagctttgaaaccacagcaatcactttcttcatcatccttctaatttgcctcatttgcatcctcctcttattggtggtttttttatataaatgtttccaaggcaggaaaggtaaagagacaaagaaagtgccttgtacagatgcaaacggacgactcggaccgatg

SEQ ID NO: 1205 - DNA, 203 bp, synthetic construct
  source 1..203: mol_type = other DNA
ggcgcgccagtcctagagtcttaaaatcctgctctggccggattccagactcgtgggggaaaggctgtttccaaggcaggaaaggtaaagagacaaagaaagtgccttgtacagatgcaaacggaggtgtagactgtgcagctgccaaagtggtgacaagcaatccagaggaccatgaaaggatcttacgactcggaccgatg

SEQ ID NO: 1206 - DNA, 203 bp, synthetic construct
  source 1..203: mol_type = other DNA
ggcgcgccagtcctcttgcccggcgcgacctgatgatgccgagcccaggccggttccggcgaagttaaaccctcggagctggcctcggactgctggggcgttaccccttcggccacccccgctgaccatggcagtgtttcatgacgaggtggaaatcgaggacttccaatatgacgaggactcggagacgactcggaccgatg

SEQ ID NO: 1207 - DNA, 203 bp, synthetic construct
  source 1..203: mol_type = other DNA
ggcgcgccagtcctaattcccaaaaggccacaaaggggccaccactacgcatgcgtagatccctcccgttagctttggcgcctcagcgagctcttctcgcgcatgcgttctccgaacggtcttcttccgacagcttgctgccctagaccagagttggtggctggacctcctgcgacttccgagttgcgcgactcggaccgatg

SEQ ID NO: 1208 - DNA, 203 bp, synthetic construct
  source 1..203: mol_type = other DNA
ggcgcgccagtcctggccgcggcgtcgcgtcggaacgtgactggatggtagtgtgctggccggtctgcctccgggagaaccgagcgcttccggtggtttggctttgaatgacagcaagaactctgtctttaatggcttcattggtagcgtatgatgattcggactcggaggctgagacagagcatgcacgactcggaccgatg

SEQ ID NO: 1209 - DNA, 203 bp, synthetic construct
  source 1..203: mol_type = other DNA
ggcgcgccagtcctgcgcctaaagcgccccgtgccgcttaacgcggtctctcatagccgctcgccttcctttcacttcctgttccttcagaaagcgctgtgccttggaccaaccttacttcttactattgacagctcagctaactcctattcatccttcaaaacccatctctggtggtttggctttgacgactcggaccgatg

SEQ ID NO: 1210 - DNA, 203 bp, synthetic construct
  source 1..203: mol_type = other DNA
ggcgcgccagtcctcgggaccggaagtgtgggatactgcgagtatggcggcgtcaaaggtgaagcaggacatgcctccgccggggggctatgggcccatcgactacaaacggaacttgccgcgtcgaggactgtcgggctacagcatgctggccatagggattggaaccctgatctacgggcactggacgactcggaccgatg

SEQ ID NO: 1211 - DNA, 203 bp, synthetic construct
  source 1..203: mol_type = other DNA
ggcgcgccagtcctcagttactttcaggctcggggagtgaaggcctcgttgagagaaggtctcattcggtgttttgggaagagagtcgtgtgggcccaggtctgtctgctatcagctatgccgctgcccgttgcgctgcagacccgcttggccaagagaggcatcctcaaacatctggagcctgaacccgactcggaccgatg

SEQ ID NO: 1212 - DNA, 203 bp, synthetic construct
  source 1..203: mol_type = other DNA
ggcgcgccagtccttgagccccggggctgcgtttcctgagacctggccgcagcctccgcgggtggcaagcgggctggggagagccgagggccaaaggaagagaaaatcgcggggagtctctggccgggagagtccaggtagcgctcggcgggcagcagtgcgcaggcccctcggcttcaaccgccacacgactcggaccgatg

SEQ ID NO: 1213 - DNA, 203 bp, synthetic construct
  source 1..203: mol_type = other DNA
ggcgcgccagtcctctctctttcactgcaaggcggcggcaggagaggttgtggtgctagtttctctaagccatccagtgccatcctcgtcgctgcagcgacacacgctctcgccgccgccatgactgagcagatgacccttcgtggcaccctcaagggccacaacggctgggtaacccagatcgctaccgactcggaccgatg

SEQ ID NO: 1214 - DNA, 203 bp, synthetic construct
  source 1..203: mol_type = other DNA
ggcgcgccagtcctgaaaggccccaggggctattttttgcaggaacggtcactccctaaatccaggcagggaaagggaggagtctgagccgagtcacgccccttctcctgtaaacttgggtcgcctctagcttagcgagcgctggagtttgaagagcgggcagtggctgcacacgccaaactttccctcgactcggaccgatg

SEQ ID NO: 1215 - DNA, 203 bp, synthetic construct
  source 1..203: mol_type = other DNA
ggcgcgccagtcctcgggcaggctcacgtgatgcgggccccgcggcccgccatataaacccgcgcgcccgccaggcgctgcggccgtcccgggccgtgactcctcctttcccccgccccgcctccgttcggagagccggcgggcgggcgcctctcggccaggaagcgcctcttggacgcgtgtgaccgcgactcggaccgatg

SEQ ID NO: 1216 - DNA, 203 bp, synthetic construct
  source 1..203: mol_type = other DNA
ggcgcgccagtcctcctcaatcggcgggacagcagggcgcgtcctctgccactctcgctccgaggtccccgcgccagagacgcagccgcgctcccaccacccacacccaccgcgccctcgttcgcctcttctccgggagccagtccgcgccaccgccgccgcccaggccatcgccaccctccgcagcccgactcggaccgatg

SEQ ID NO: 1217 - DNA, 203 bp, synthetic construct
  source 1..203: mol_type = other DNA
ggcgcgccagtcctagcggtctcccgcccgcggcgccatcgcgccattcctagttaaggcggcacagggccgaggcgtagtgtgggtgactcctccgttccttgggtcccgtcgtctgtgatactgcagcgcagccatggcagaaccgcagcccccgtccggcggcctcacggacgaggccgccctcacgactcggaccgatg

SEQ ID NO: 1218 - DNA, 203 bp, synthetic construct
  source 1..203: mol_type = other DNA
ggcgcgccagtccttcgtgcgcctgcagcccttggttcttggaaacgccggcgccttgttcagggctggtggggctggggcgcaaggtgcagctgacaatgcccgagaggagccgcagcctctggtggagttcggtcgggtgtgggggtagtcaaggaaagaagcaaagggaatacctcctctgaaaacgactcggaccgatg

SEQ ID NO: 1219 - DNA, 203 bp, synthetic construct
  source 1..203: mol_type = other DNA
ggcgcgccagtccttttctcccaggccccgcccctccgtccctcaccgcaccacccctaaagacgctagcgctgcgatggcggaggccgtggagcgcactgacgagctggtccgggagtacctgctcttccgcgggttcacgcacacactgcggcagctggacgccgagatcaaggcggacaaggagacgactcggaccgatg

SEQ ID NO: 1220 - DNA, 203 bp, synthetic construct
  source 1..203: mol_type = other DNA
ggcgcgccagtcctttgtgggagtcgtagtccgcggtgaggcccagtgcgcaggcgcagtttgccggccgccatcgcgcactggggctccgggcggctgggaccggcctggggtagctgcgcagcaggtgggtcggtcccggggatgcagcgcgggggtcagagagcgaccccaacagggtagacgggcgactcggaccgatg

SEQ ID NO: 1221 - DNA, 203 bp, synthetic construct
  source 1..203: mol_type = other DNA
ggcgcgccagtcctgccttctgcccggccccttcgcccacgtgaagaacgccagggagctgtgaggcagtgctgtgtggttcctgccgtccggactctttttcctctactgagattcatctgtgtgaaatatgagttggcgaggaagatcgacctatcggcctagaccaagacgctacgtagagcctccgactcggaccgatg

SEQ ID NO: 1222 - DNA, 203 bp, synthetic construct
  source 1..203: mol_type = other DNA
ggcgcgccagtccttagagctgagcagttgtccgcgtgcgcaggcggaagtcccggattgaggcgccgccatttttgctgcccggacgcggagcgagaggctgagagagtcggagacactatccgcttccatccgtcgcgcagaccctgccggagccgctgccgctatggatgatcgagaggatctggcgactcggaccgatg

SEQ ID NO: 1223 - DNA, 203 bp, synthetic construct
  source 1..203: mol_type = other DNA
ggcgcgccagtccttattttaagcccagtcttccctgggccacctttagcagatcctcgtgcgcccccgccccctggccgtgaaactcagcctctatccagcagcgacgacaagtaaagtggcccgccggtttctgagccttctgccctgcggggacacggtctgcaccctgcccgcggccacggacccgactcggaccgatg

SEQ ID NO: 1224 - DNA, 203 bp, synthetic construct
  source 1..203: mol_type = other DNA
ggcgcgccagtcctactcgcacatgcgagcacattccttccttccttctcactctctcggcccttgacttctacaagcccatggaacatttctggaaagacgttcttgatccagcagggtggcccgccggtttctgagccttctgccctgcggggacacggtctgcaccctgcccgcggccacggacccgactcggaccgatg

SEQ ID NO: 1225 - DNA, 203 bp, synthetic construct
  source 1..203: mol_type = other DNA
ggcgcgccagtcctacaaagatctcttcacattctccgggactgcggtaccaaatatcagcacagcacttcttgaaaaaggatgtagattttaatctgaactttgaaccatcactgaggtggcccgccggtttctgagccttctgccctgcggggacacggtctgcaccctgcccgcggccacggacccgactcggaccgatg

SEQ ID NO: 1226 - DNA, 203 bp, synthetic construct
  source 1..203: mol_type = other DNA
ggcgcgccagtcctacggactgctaaaggtctcccctcccacctgcattgctctacaatctgtggcctcagcccttgccaactctgcctcttcccccgctgactgggcctctgcagagatgtgggcagctggtcaggatggccattcgggctcagcacagcaacgcagcccagactcagactggggaacgactcggaccgatg

SEQ ID NO: 1227 - DNA, 203 bp, synthetic construct
  source 1..203: mol_type = other DNA
ggcgcgccagtcctaagaaaggtaagggccctgggcgaggaaagcgcggccctttccgagtttggtgttttgcagcgaaaggaaatctcgctcttccgaaagtcctccagggcgagagaggaaagggcctagaatacctcctctgaaaaatggcagaagcagttttccatgccccaaagaggaaaagacgactcggaccgatg

SEQ ID NO: 1228 - DNA, 203 bp, synthetic construct
  source 1..203: mol_type = other DNA
ggcgcgccagtcctatctgaaactgagcagagcagggcgccgggcagggccggcgggccacgtgataagcccggaaacagctccgccccctcgcttcctgagccgccacatcccggcagccctcctacctgcgcacgtggtgccgccgctgctgcctcccgctcgccctgaacccagtgcctgcagcccgactcggaccgatg

SEQ ID NO: 1229 - DNA, 203 bp, synthetic construct
  source 1..203: mol_type = other DNA
ggcgcgccagtcctagacgcgacggtgctgggatcccgggagggagcggagcggacctgggcttggtcgcctccaagccggcgggaccgagtgctttaggccgcttgaaagaaagttgctccgacccgggaaaaggagaagatgaaggaagccaaggatgcccgctataccaatgggcacctcttcaccgactcggaccgatg

SEQ ID NO: 1230 - DNA, 203 bp, synthetic construct
  source 1..203: mol_type = other DNA
ggcgcgccagtcctgtcagacttcctgtccccgagaccaacgcgtgcgggccgaacccctccccccgccttcccccaacaatacaggacgccggggtccgcgccgcgtcctccctggtccccccgtccgattatgtctcggatcgaatccctcacgcgggcgcggatcgaccggagcagagagctggccgactcggaccgatg

SEQ ID NO: 1231 - DNA, 203 bp, synthetic construct
  source 1..203: mol_type = other DNA
ggcgcgccagtcctaaacctggggcgtctcgcgcaaacgtccataactgaaagtagctaaggcaccccagccggaggaagtgagctctcctggggcgtggttgttcgtgatccttgcatctgttacttagggtcaaggcttgggtcttgccccgcagacccttgggacgacccggccccagcgcagctcgactcggaccgatg

SEQ ID NO: 1232 - DNA, 203 bp, synthetic construct
  source 1..203: mol_type = other DNA
ggcgcgccagtcctgtaaggaggaaaactgaggcctgggagcaggaacctgtaggcagcgcttgagggtagcgggatagcagctgcaagcgcgcgtgggaggcgggggctctgggcggaacaaaaatcacaggatgtcagaggatgtttcccgggaagaactgggataaaggaagggtcccagcaccacgactcggaccgatg

SEQ ID NO: 1233 - DNA, 203 bp, synthetic construct
  source 1..203: mol_type = other DNA
ggcgcgccagtcctgcttggctttggcgcgacccgggagcggctcccacgagcgccgcgcgcgtcgcaacggagcggggccctgagaagcgcgcgccgcggctcccaccgctctggagctccgggcaggggacacggcaacctggatggctggggcagggatcctctcccagaacttcgtgcccagcacgactcggaccgatg

SEQ ID NO: 1234 - DNA, 203 bp, synthetic construct
  source 1..203: mol_type = other DNA
ggcgcgccagtcctgccggctgccccaggccagtggagtggcagccccagaactgggaccaccgggggtggtgaggcggcccggcactgggagctgcatctgaggcttagtccctgagctctctgcctgcccagactagctgcacctcctcattccctgcgcccccttcctctccggaagcccccaggcgactcggaccgatg

SEQ ID NO: 1235 - DNA, 203 bp, synthetic construct
  source 1..203: mol_type = other DNA
ggcgcgccagtccttctgggaattccgggcgtttcggctccttggtcgcagaggcaggaggcgtgcgtggcaggagggttcgggttatatactcctaggtcctgggacagaatagttacgacctctgggacaggaactcttctctcttttgttaataaacttccaactccctcctcagacccgaccgccgactcggaccgatg

SEQ ID NO: 1236 - DNA, 203 bp, synthetic construct
  source 1..203: mol_type = other DNA
ggcgcgccagtcctgcttcatttccgggtgaaactggcattgagggtactggggcgtgcgtgaggcgtttactgatgcttcctggtccggtggcctcggtcccggtaagccaggcatgaagatcacaaggcagaaacatgccaagaagcatcttggcttcttccgcaacaacttcggagtccgcgagccgactcggaccgatg

SEQ ID NO: 1237 - DNA, 203 bp, synthetic construct
  source 1..203: mol_type = other DNA
ggcgcgccagtcctagcccaagatttctagggcattggccgcgctgctgggtgatccctccgggctcaagttgcaagggggcgggccgggccggaggtggagtctcccgccaattgaagcctccgctataaattgaactccctgcactgctgaagcccagatgcctcgccaggccacgtcgcggttggcgactcggaccgatg

SEQ ID NO: 1238 - DNA, 203 bp, synthetic construct
  source 1..203: mol_type = other DNA
ggcgcgccagtcctgctctccacaccagccaagggggcccccacactcccgcgctgctctgcggctcagggagcagcccacctgctggatgaggaacttgaggcaagtcaccagcccctgatcatttcgcctaaaagagcaaggactagagttcctgacctccaggccagtccctgatccctgacctacgactcggaccgatg

SEQ ID NO: 1239 - DNA, 203 bp, synthetic construct
  source 1..203: mol_type = other DNA
ggcgcgccagtcctatgaatatgcaagtgcgaggaagatatttaaaggcgtcggcgccacgcgcatatccctgctcggcgctgcccgcccagttcctgttcccagactgaggcccagcccccttcgcccgtttccatcacgagtgccgccagcatgtctgacaaactgccctacaaagtcgccgacatcgactcggaccgatg

SEQ ID NO: 1240 - DNA, 203 bp, synthetic construct
  source 1..203: mol_type = other DNA
ggcgcgccagtcctcctgcctcctcagatctcgtttcttcggctacgaatctcgcgagaagtcaagttctcatgagttctcccaaaatccaccgctcttcctctttccctaagcagcctgaggtgatctgtgaaaatggttcgctattcacttgacccggagaaccccacgaaatcatgcaaatcaagcgactcggaccgatg

SEQ ID NO: 1241 - DNA, 203 bp, synthetic construct
  source 1..203: mol_type = other DNA
ggcgcgccagtcctagtcaagttctcatgagttctcccaaaatccaccgctcttcctctttccctaagcagcctgagggttgactggattggtgaggcccgtgtggctacttctgtggaagcagtgctgtagttactggaagataaaagggaaagcaagcccttggtgggggaaagtgatctgtgaaacgactcggaccgatg

SEQ ID NO: 1242 - DNA, 203 bp, synthetic construct
  source 1..203: mol_type = other DNA
ggcgcgccagtcctcgctggaggcggtggcttcttatgcgggaggacgtggcggagggcctgactttgggagccgggggttgactggattggtgaggcccgtgtggctacttctgtggaagcagtgctgtagttactggaagataaaagggaaagcaagcccttggtgggggaaagtgatctgtgaaacgactcggaccgatg

SEQ ID NO: 1243 - DNA, 203 bp, synthetic construct
  source 1..203: mol_type = other DNA
ggcgcgccagtcctgagaagcccaggcagttgaggacaggagagagaaggctgcagacccagagggagggaggacagggagtcggaaggaggaggacagaggagggcacagagacgcagagcaagggcggcaaggaggagaccctggtgggaggaagacactctggagagagagggggctgggcagagcgactcggaccgatg

SEQ ID NO: 1244 - DNA, 203 bp, synthetic construct
  source 1..203: mol_type = other DNA
ggcgcgccagtcctttcttcggctacgaatctcgcgagaagtcaagttctcatgagttctcccaaaatccaccgctcttcctctttccctaagcagcctgaggtgatctgtgaaaatggttcgctattcacttgacccggagaaccccacgaaataacactcgtgaaactgctcaggccatcaagggtcgactcggaccgatg

SEQ ID NO: 1245 - DNA, 203 bp, synthetic construct
  source 1..203: mol_type = other DNA
ggcgcgccagtccttttttctcccagcaagctgtgcgacgcgccgggcctcctcgcctttgtgccatccgggtctctcgcgcgagcgatttagtctgaggcgaagcttcggagcggccggtactgttgaaagcgacaagtggaggcgccgctctagcggccgggactctgaactatggcggctagtgacgactcggaccgatg

SEQ ID NO: 1246 - DNA, 203 bp, synthetic construct
  source 1..203: mol_type = other DNA
ggcgcgccagtcctgacaaccggcgtggaggcgtggccacagccgcccagaaattctacccaagctccctcagcaccatgtaccgagcacttcggctcctcgcgcgctcgcgtcccctcgtgcgggctccagccgcagccttagcttcggctcccggcttgggtggcgcggccgtgccctcgttttggcgactcggaccgatg

SEQ ID NO: 1247 - DNA, 203 bp, synthetic construct
  source 1..203: mol_type = other DNA
ggcgcgccagtcctgtctcaggacgggcgctttggagccggccccaggcagcgtgtgtcggtcgcctagtctggagaactagtcctcgactcacgtgcaaggatgatgctgaaaggaataacaaggcttatctctaggatccataagttggaccctgggcgttttttacacatggggacccaggctcgcgactcggaccgatg

SEQ ID NO: 1248 - DNA, 203 bp, synthetic construct
  source 1..203: mol_type = other DNA
ggcgcgccagtcctgacgggcgctttggagccggccccaggcagcgtgtgtcggtcgcctagtctggagaactagtcctcgactcacgagatgaagttttaccatgttggccaggctggtctcgaattcctgacctcaagtgatctgcccaccttgacctcccaaagtgctgggattacagtgcaaggcgactcggaccgatg

SEQ ID NO: 1249 - DNA, 203 bp, synthetic construct
  source 1..203: mol_type = other DNA
ggcgcgccagtcctgcccgcggtgcggtgcggagactccatgaggccctggacatgaacaagctgagtggaggcggcgggcgcaggactcgggtggaagggggccagcttgggggcgaggagtggacccgccacgggagctttgtcaataagcccacgcggggctggctgcatcccaacgacaaagtccgactcggaccgatg

SEQ ID NO: 1250 - DNA, 203 bp, synthetic construct
  source 1..203: mol_type = other DNA
ggcgcgccagtcctctgagtcgctgtcgcggaggctggagcgctgccccggaagtcctcccccctgttccccgcccgcggcaaacatggcggtggactcggcgatggagctgttatttttagatacttttaaacacccgagcgctgagcaaagttctcatatagatgtggttcgttttccatgtgtggcgactcggaccgatg

SEQ ID NO: 1251 - DNA, 203 bp, synthetic construct
  source 1..203: mol_type = other DNA
ggcgcgccagtcctgtcatttattattattgctattagtgttacctattattttctttttgaacccacttattgcctaattagtcatagtttgacaattgcccttgtattccaccatgtcaaatataaatttacatagatgaagctcctgaaattattcttgggttaccattttgtgaagctattgatcgactcggaccgatg

SEQ ID NO: 1252 - DNA, 203 bp, synthetic construct
  source 1..203: mol_type = other DNA
ggcgcgccagtcctagattgtttcacatcaccagtgtatcctcagctcctaacactgtgtctggtacacattgtttgatggttttgatgtttcagattcgttatatttcacaaacacaaggcttgccagctgaatatcttctcagtgccggaacaaaaacaaccaggtttttcaacagagatcctaatcgactcggaccgatg

SEQ ID NO: 1253 - DNA, 203 bp, synthetic construct
  source 1..203: mol_type = other DNA
ggcgcgccagtcctcggggatttctgctgccgccaccgcccactcttacccccgccgcttctcgactctgttgttagccgaagactcgcctctcagccgcccgccgcacagacgcacgagtaaaaagtgcagctccatcggctgatcctcgctaagctccgactctgggcggcaccgggcgtcccacgcgactcggaccgatg

SEQ ID NO: 1254 - DNA, 203 bp, synthetic construct
  source 1..203: mol_type = other DNA
ggcgcgccagtcctgcgcggtcgctcagcagtgacgtgacacgcagcccacggtctgtactgacgcgccctcgcttcttcctctttctcgactccatcttcgcggtagctgggaccgccgttcagtcgccaatatgcagctctttgtccgcgcccaggagctacacaccttcgaggtgaccggccaggcgactcggaccgatg

SEQ ID NO: 1255 - DNA, 203 bp, synthetic construct
  source 1..203: mol_type = other DNA
ggcgcgccagtcctgcgaagggaccgtctctgccaagcgcctgttggtaggaacctgcttggtcgcgtctgagggggcttgtaggtggctctggctgaaacaggcgcctgcgagagtctgtaggagggaaaccgccatggacgatcagggttgccctcggtgtaagaccaccaaatatcggaacccctcgactcggaccgatg

SEQ ID NO: 1256 - DNA, 203 bp, synthetic construct
  source 1..203: mol_type = other DNA
ggcgcgccagtccttttttcaaaagattcgttctgagccgtttaaaatgctcttgtgttctacgaagtctctttgcatccttgaacaccggggaatttccaggtatttcatttctcctgtcccctcccctccccaccccatctattaatattattcttttgaagattcttcgttgtcaagccgccaaacgactcggaccgatg

SEQ ID NO: 1257 - DNA, 203 bp, synthetic construct
  source 1..203: mol_type = other DNA
ggcgcgccagtccttcgccccgcgggccggccgagacgacgggaagttttatttgcagctcggagcctgtggcggatggtgggactctccggccctgtgcagtaaaagattgatctctgggctggtgaacataatctctgtcccagtcagaaaaggagagaggaaattagcagagcgattggtggagacgactcggaccgatg

SEQ ID NO: 1258 - DNA, 203 bp, synthetic construct
  source 1..203: mol_type = other DNA
ggcgcgccagtcctctcttagctggcggagagaatttacatttaaagattagcagagtgagaaagagaaatctgccttttgttgtgtggggtgaggaggaggcatctacccctggccttgacgctatctcccatcacctctgctatccagacaggactcaccgagatcgtactgagaagcactccacacgactcggaccgatg

SEQ ID NO: 1259 - DNA, 203 bp, synthetic construct
  source 1..203: mol_type = other DNA
ggcgcgccagtcctgcgcgggaatggccggcccacgggtcgcaggagacgggacgccagtcctttggctccgttccgctggctccttcgtcagtactgacacctcgggcttgtagagcacttcacgcagtgcaaagcgccccccgtctatatcatatcgcctctcggtcctcctaaaagtcgtatgagcgactcggaccgatg

SEQ ID NO: 1260 - DNA, 203 bp, synthetic construct
  source 1..203: mol_type = other DNA
ggcgcgccagtcctccctttctgtcttctctctctctctcccacttttcctccctctcccgctccgtctcacacgcaccctctgtttattttcctgcctccatctgggccctgctgatattgtaatcaccctgatgcacgttggcttctctcctctccctcctgcgctcacacactcactcacacacacgactcggaccgatg

SEQ ID NO: 1261 - DNA, 203 bp, synthetic construct
  source 1..203: mol_type = other DNA
ggcgcgccagtcctttctggggtggctctagtctcatggccacaaagctctagcccaggcgccgcgaggcactggcattgagagcccaatgcatctcagcctcacgctgcagaagccagtggggctggggagccgcagcagcgtcgattttcttcacaagaagatgggaactgtgggctacaagtaggcgactcggaccgatg

SEQ ID NO: 1262 - DNA, 203 bp, synthetic construct
  source 1..203: mol_type = other DNA
ggcgcgccagtcctcccagaactttggtctcgtcccacccacccccgcccgcgccatggtctcgccctagggagccatcgataactctacgctcggcctcgatcgactcgctccggctcccctcgccgtcctggacacggcggagtgcggagccgcccgtaagctctagggcccgtgcaggccacacccgactcggaccgatg

SEQ ID NO: 1263 - DNA, 203 bp, synthetic construct
  source 1..203: mol_type = other DNA
ggcgcgccagtcctccgcccgcgccatggtctcgccctagggagccatcgataactctacgctcggcctcgatcgactcgctccggctcccctcgccgtcctggacacggcggagtgcggagccgcccgtaagatgctctgacctttgacccctgccgttcagctctagggcccgtgcaggccacacccgactcggaccgatg

SEQ ID NO: 1264 - DNA, 203 bp, synthetic construct
  source 1..203: mol_type = other DNA
ggcgcgccagtcctaggcggcgcgggcggcgcctcagcggaagagcgggcctctgggccgcagtgaccaacccccgcccctcaccccacgtggttggaggtttccagaagcgctgccgccaccgcatcgcgcagctctttgccgtcggagcgcttgtttgctgcctcgtactcctccatttatccgcccgactcggaccgatg

SEQ ID NO: 1265 - DNA, 203 bp, synthetic construct
  source 1..203: mol_type = other DNA
ggcgcgccagtcctatggcccataacgcgggcgccgcggccgccgccggcacccacagcgccaagagcggcggctccgaggcggctctcaaggagggtggaagcgccgccgcgctgtcctcctcctcctcctcctccgcggcggcagcggcggcatcctcttcctcctcgtcgggcccgggctcggcccgactcggaccgatg

SEQ ID NO: 1266 - DNA, 203 bp, synthetic construct
  source 1..203: mol_type = other DNA
ggcgcgccagtcctgcggctaggcgcggacgccggaggaggtgtccccgggtttaggggtgttcggccaggggcggggctgccgggcccgggcgactgccggagctgcggaagtcgtggaagcgtcggcgacgcatcgcgcgatggcgcgggcgggacagtgcttgtgaaactgaacacaacaaaagtcgactcggaccgatg

SEQ ID NO: 1267 - DNA, 203 bp, synthetic construct
  source 1..203: mol_type = other DNA
ggcgcgccagtcctgtgcagcggctgccacggagctcgcagctgcggcttctgaggagtaagcggcgcggtagcgaaggccgccgaacctgcctggctagccggcgacttgagtgacgactcttttgaaacagatggtcaccatgtttagatattagcagtcccatatatgcatgtctgcatttgaaacgactcggaccgatg

SEQ ID NO: 1268 - DNA, 203 bp, synthetic construct
  source 1..203: mol_type = other DNA
ggcgcgccagtccttgccccgctcagacctagtcgggaggggtgcgaggcatgcagctgggggcccagctccggtgccgcaccccgtaaagggctgatcttccacctcgccacctcagccacgggacgccaagaccgcatccaattcagacttcttttggtgcttgtgaaactgaacacaacaaaagtcgactcggaccgatg

SEQ ID NO: 1269 - DNA, 203 bp, synthetic construct
  source 1..203: mol_type = other DNA
ggcgcgccagtccttctgaagagaggcgggacgcggggtgataacagctggctctggtgggcgggcgggagctggggaggaggagcaggagaggcccacaggcttcatttggagtcaggcctggctgttgctcaggtgaccagcttgtgtctctgggagggcgctgctttccccggccacccggcgcgcgactcggaccgatg

SEQ ID NO: 1270 - DNA, 203 bp, synthetic construct
  source 1..203: mol_type = other DNA
ggcgcgccagtcctgtccaggttccgccccggagccgacttcctcctggtcggcggctgcagcggggtgagcggcggcagcggccggggatcctggagccatggggcgcgcgcgcgacgccatcctggatgcgctggagaacctgaccgccgaggagctcaagaagttcaagctgaagctgctgtcggcgactcggaccgatg

SEQ ID NO: 1271 - DNA, 203 bp, synthetic construct
  source 1..203: mol_type = other DNA
ggcgcgccagtcctaactcccaagccccacccctgggcttggcctgccttgccctgccgggaagtgatccccaaggcagggtgagagttccccatctgaggcgtttgttgcagctacctgcacttctagattcatcttcttgtgagccctgggcttaggagtcaccatggcaactgaagagttcatcacgactcggaccgatg

SEQ ID NO: 1272 - DNA, 203 bp, synthetic construct
  source 1..203: mol_type = other DNA
ggcgcgccagtccttgggcttggcctgccttgccctgccgggaagtgatccccaaggcagggtgagagttccccatctgaggcgtttgttgcagctacctgcacttctagatgctccccaggttcatcctgtgtcgtctcccccacctaccagtcatcttcttgtgagccctgggcttaggagtcacccgactcggaccgatg

SEQ ID NO: 1273 - DNA, 203 bp, synthetic construct
  source 1..203: mol_type = other DNA
ggcgcgccagtcctgtgcgctgctgcgcaggcgcggtggtcggacgacagaccgtgtgtttccaaaatggcggcagcgatggatgtggataccccgagcggcaccaacagcggcgcgggcaagaagcgctttgaagtgaaaaagtggaatgcagtagccctctgggcctgggatattgtggttgataacgactcggaccgatg

SEQ ID NO: 1274 - DNA, 203 bp, synthetic construct
  source 1..203: mol_type = other DNA
ggcgcgccagtccttagcaccacccgagccaatggcggcggccgaggggcggagggggctggcaggaggggagggagcgctggctttagagccacagctgcaaagattccgaggtgcagaagttgtctgagtgcgttggtcggcggcagtcgggccagacccaggactctgcgactttacatctttaacgactcggaccgatg

SEQ ID NO: 1275 - DNA, 203 bp, synthetic construct
  source 1..203: mol_type = other DNA
ggcgcgccagtccttagataatctgagttgttgaaaatacgaagcctgttactcgtgaacagtggctgacaacagtgttgttgtgagcctggctgtctgcttggacccagaggtttcgtctgccagggtttttggttgtatttaggatttcagggaaaagtgtccaagctttcagtgttggagcaggtcgactcggaccgatg

SEQ ID NO: 1276 - DNA, 203 bp, synthetic construct
  source 1..203: mol_type = other DNA
ggcgcgccagtcctcgccacgcactcctctttctgcctggccggccactcccgtctgctgtgacgcgcggacagagagctaccggtggacccacggtgcctccctccctgggatctacacagaccatggccttgccaacggctcgacccctgttggggtcctgtgggacccccgccctcggcagcctccgactcggaccgatg

SEQ ID NO: 1277 - DNA, 203 bp, synthetic construct
  source 1..203: mol_type = other DNA
ggcgcgccagtcctgcgcatggtgagtaggttggtccgaagtttgaaccggacagaagcgctggtcggcgtctggcggttattgttcaaaactacaactccattttgacactttctcacttgtaccgatcttcagacgccctccttcttcatgagaatgatgccatccataagatctgtgcaaaactgcgactcggaccgatg

SEQ ID NO: 1278 - DNA, 203 bp, synthetic construct
  source 1..203: mol_type = other DNA
ggcgcgccagtcctagagcgcagggagcagccggtggctcggcggcggcggcggcggcggcggcggcgtcggcgtcgtctacctccagcttctcctccctcctcctccgtctcctcctctctctctccatctgctgtggttatggcctgtcgctggagcacaaaagagtctccgcggtggaggtctgccgactcggaccgatg

SEQ ID NO: 1279 - DNA, 203 bp, synthetic construct
  source 1..203: mol_type = other DNA
ggcgcgccagtccttggagccggcttgacagggtctgagggggagtggagaactgggcgaggaggttcccgtgggtgagcgcgtacgggatggctggctcgcaggacggccgaaggtggtggttggtgggagcagccagcgacgagcccgtagacactcgtacgcgtgcgggctgacgtgcgcgctaccgactcggaccgatg

SEQ ID NO: 1280 - DNA, 203 bp, synthetic construct
  source 1..203: mol_type = other DNA
ggcgcgccagtcctgtgatttggcgggagtcttgaccgccgccgggctcttggtacctcagcgcgagcgccaggcgtccggccgccgtggctatgttcgtgtccgatttccgcaaagagttctacgaggtggtccagagccagagggtccttctcttcgtggcctcggacgtggatgctctgtgtgcgcgactcggaccgatg

SEQ ID NO: 1281 - DNA, 203 bp, synthetic construct
  source 1..203: mol_type = other DNA
ggcgcgccagtcctcggcttcagcactccgggctgcagtaagaagtgcccttatcgctctgagccctgccaccatcccgtgaaccaccgaaaccctggtccagcgcgacagccttggacctgggactggacggatccaaaacgctcagcctcggccccccacagacggggctctgcatcgtctctgatcgactcggaccgatg

SEQ ID NO: 1282 - DNA, 203 bp, synthetic construct
  source 1..203: mol_type = other DNA
ggcgcgccagtcctcagcggcgaacctctcccttcgagtatttctcctcttgctgagatgaaatgcgaccgggtctctttaagggccaggcgccgggatccaggcggcgcccaacggctggactagcagtcgtccgcgccgactcgcacaagaaggaaccccgggcctctggatccgctcgcccggctcgactcggaccgatg

SEQ ID NO: 1283 - DNA, 203 bp, synthetic construct
  source 1..203: mol_type = other DNA
ggcgcgccagtcctacgccgtggcgtgccgcaggacgcgacggctgcagaacatccgccgcaccgctgggggccaacgttgtgggaccgaggagtccgaggtggcgactgagtgagatacccagctgtgcggagctaggacgcggaacatcccagaggccagcatcaacatgtttccatccttggggacgactcggaccgatg

SEQ ID NO: 1284 - DNA, 203 bp, synthetic construct
  source 1..203: mol_type = other DNA
ggcgcgccagtcctgcctgcgcacgcaccgggccggggactgggtggcctggtgtgtgggcgcggcagggcgcaggcgcaggcgcagtgtgcgtccgcgtctgaggggagggatgtgggggaagcgacggcccccggtttgtttgggctgtgggcggtgcgcagcggagagcccgggaaaagcgggaacgactcggaccgatg

SEQ ID NO: 1285 - DNA, 203 bp, synthetic construct
  source 1..203: mol_type = other DNA
ggcgcgccagtcctccacccctacccgtgtaggccaccgagtgaggcccatggactggggagggctgtgcctgacgactcctgtgtccctctatgagggcccagcgccctgaccctcctgcctaggtttctaccttttctctctgtctttggccagctgggggagggggtagaggccgggtgagcaaccgactcggaccgatg

SEQ ID NO: 1286 - DNA, 203 bp, synthetic construct
  source 1..203: mol_type = other DNA
ggcgcgccagtcctatagaggcggggctgcggcggctgcggtgttcctccgacttccggacatctccctgggagtcgcgcagagtggagtcaaaggcaaccagtgctcgctgcggtctctggggatcgggaccgcggcggcggcccgcgagcgggatgttccggggcttgagcagttggttgggcttgcgactcggaccgatg

SEQ ID NO: 1287 - DNA, 203 bp, synthetic construct
  source 1..203: mol_type = other DNA
ggcgcgccagtcctagtgcccgccgggaaaatgcgaccgtccacaaagtgaaatggccgcccgggacgagctcggcctcggcggggattctcttgaggccatgcccgtgccggccgccagaggtcgcccgaggatcacgaatgggcccgaggagctggctgccccttcccccgcggccttggctgattcgactcggaccgatg

SEQ ID NO: 1288 - DNA, 203 bp, synthetic construct
  source 1..203: mol_type = other DNA
ggcgcgccagtcctctggagggccgcactcccgttccagccaggctgagccttctgtcccctgcctctggggcctgggaaccccccttcttctttctcctgaatggcacccccgccctagaatccagacaccgagtttcccactgtggctggttcaaggagctccctggtgacagtctgtggctgagccgactcggaccgatg

SEQ ID NO: 1289 - DNA, 203 bp, synthetic construct
  source 1..203: mol_type = other DNA
ggcgcgccagtcctggagccgtccgcctacgggggccgggacgtcgcctgcgcgtctctcgttttcggacggctgcagcatcgcggtggggatcgaaagcgggggcttctgggacgcagctctggagacgcggcctcggaccagccatttcggtgtagaagtggcagcacggcagactggtcaaacaacgactcggaccgatg

SEQ ID NO: 1290 - DNA, 203 bp, synthetic construct
  source 1..203: mol_type = other DNA
ggcgcgccagtcctggtgctgggaggccttagaacgccgtggcgtgccgcaggacgcgacggctgcagaacatccgccgcaccgctgggggccaacgttgtgggaccgaggagtccgaggtggcgactgagtgagatacccagctgtgcggagctaggacgcggaacatcccagaggccagcatcaaccgactcggaccgatg

SEQ ID NO: 1291 - DNA, 203 bp, synthetic construct
  source 1..203: mol_type = other DNA
ggcgcgccagtcctccgggaggctgagactgcattgttgggatttgatgcactaatctcctgtctccgccgcctttccctctgttcggtctcttgccctccctcccttcgtctgtccttcctccgtgtgtttgtctatcctcctctgtccctcctctttcctctccttgctttctttggttttctgcacgactcggaccgatg

SEQ ID NO: 1292 - DNA, 203 bp, synthetic construct
  source 1..203: mol_type = other DNA
ggcgcgccagtcctcccagttgttactcaggtgcgctagcctgcggagcccgtccgtgctgttctgcggcaaggcctttcccagtgtccccacgcggaaggcaactgcctgagaggcgcggcgtcgcaccgcccagagctgaggaagccggcgccagttcgcggggctccgggccgccactcagagctcgactcggaccgatg

SEQ ID NO: 1293 - DNA, 203 bp, synthetic construct
  source 1..203: mol_type = other DNA
ggcgcgccagtcctaggggcagcgggagccggccgggtagggtgcagcctgaggcttgttcagcagaacaggtgcaagccacattgttgccaagacctgcctgaagccggattctccccactgcctccttcaaccccgcctcttcctcctcctgtgggactgctcccccctcctgtgaggctagatagcgactcggaccgatg

SEQ ID NO: 1294 - DNA, 203 bp, synthetic construct
  source 1..203: mol_type = other DNA
ggcgcgccagtcctcttggggcgcagggcatggtgtgaaaggccaagtgctgaggcgggtatcatgggtgctgtgccctagggcctgggtggcagggggtgggtggcctgtgggtgtgccgggggggccagtgtgcccaccccagtctcttggcgtgctggagggcatcctggatggaattgaagtgacgactcggaccgatg

SEQ ID NO: 1295 - DNA, 203 bp, synthetic construct
  source 1..203: mol_type = other DNA
ggcgcgccagtcctccggattcccctgcggcttcgatccctttccactgggtattgagattggcgaggggagaggcgcagaaacggcgtactctagtgcagtggttcaatctcggctcactgcaacctccgcctccccgattcaagcgattctcctgcgtcagcctccccagtagctgagactacaggcgactcggaccgatg

SEQ ID NO: 1296 - DNA, 203 bp, synthetic construct
  source 1..203: mol_type = other DNA
ggcgcgccagtcctggaccaaagaaacgcgagcttagccctgggtagcgcggccaatggccgtggagcagcccctgtaaactggctcgggcgcccccacgcccgcccttccttcttctcccagcattgccccccccacgtttcagcacagcgctggccgcagtctgacaggaaagggacggagccaagcgactcggaccgatg

SEQ ID NO: 1297 - DNA, 203 bp, synthetic construct
  source 1..203: mol_type = other DNA
ggcgcgccagtccttctctcccgctgttggctggcaggatcttttggcagtcctgtggcctcgctccccgcccggatcctcctgaccctgagattcgcgggtctcacgtcccgtgcacgccttgcttcggcctcagttaagcctttgtggactccaggtccctggtgagattagaaacgtttgcaaaccgactcggaccgatg

SEQ ID NO: 1298 - DNA, 203 bp, synthetic construct
  source 1..203: mol_type = other DNA
ggcgcgccagtcctggaggcctgcgtccggaaagtcagtagaattcatcacaagagagctacaagagcctggaagaagctgaagactgctaccctccatccttactcaccctggacctgagagacctcttcaatcaggtggagcaaggccctctcctgtcctgccccaaggctggcacagacttgagccgactcggaccgatg

SEQ ID NO: 1299 - DNA, 203 bp, synthetic construct
  source 1..203: mol_type = other DNA
ggcgcgccagtcctagtgggtgggaagagcccccaagagctctgtgcgggattctaggctcccctgtgacagccgcggcaggaagcaggcgggcgctccccggccacaggcctgttgttctcggaagggagaaagctggacatttccccacgtaactcccagctctgggcctagagtgcgtgcatggccgactcggaccgatg

SEQ ID NO: 1300 - DNA, 203 bp, synthetic construct
  source 1..203: mol_type = other DNA
ggcgcgccagtcctctgccatccctccccggactccggctccggctccgattgcaatttgcaacctccgctgccgtcgccgcagcagccaccaattcgccagcggttcaggtggctcttgcctcgatgtcctagcctaggggcccccgggccggacttggctgggctcccttcaccctctgcggagtccgactcggaccgatg

SEQ ID NO: 1301 - DNA, 203 bp, synthetic construct
  source 1..203: mol_type = other DNA
ggcgcgccagtcctatttaactctgccagggatccgctgggctctgacgactgcggtagatccatggcttcctggacgttcacccgtagagtcatcctagcttaactcttgttccctggtctcagttcacaagcctcacctgtatcttcctggctcggaagataattgaaaccaagtctgacttctcacgactcggaccgatg

SEQ ID NO: 1302 - DNA, 203 bp, synthetic construct
  source 1..203: mol_type = other DNA
ggcgcgccagtcctttgcgccacaaccagggcagcgtaaactacagttcccagagagcgccgcgtcgggagcggagccttttctcgctaacaccgctcgccctctccgagtcagttccgcggtagaggtgacctgactctctgaggctcattttgcagttgttgaaattgtccccgcagttttcaatccgactcggaccgatg

SEQ ID NO: 1303 - DNA, 203 bp, synthetic construct
  source 1..203: mol_type = other DNA
ggcgcgccagtcctacttctgctttctgacttgattacaggcatctttcctttttcatgctgtgcaaaaacttgagctcagcctctcaccccaacacaattcaagacgcagccttgtcccagcatgagcgcagataacagcagcaccatctgtgtttgtagaagcgtgagacaggagcttggaattgccgactcggaccgatg

SEQ ID NO: 1304 - DNA, 203 bp, synthetic construct
  source 1..203: mol_type = other DNA
ggcgcgccagtcctcggtcacgtgggggcgccggctgcgcctgcggagaagcggtggccgccgagcgggatctgtgcggggagccggaaatggttgtggactacgtctgtgcggctgcgtggggctcggccgcgcggactgaaggagactgaaggtgctggggggaccctgatgtggcaccaaatgaacgactcggaccgatg

SEQ ID NO: 1305 - DNA, 203 bp, synthetic construct
  source 1..203: mol_type = other DNA
ggcgcgccagtcctccatccctgctgtgactcagctgtgacgttgaaccacacaagccagagagaagaagataaagtcatcagagctcctactcaccagagagtgaggcccaggccaggactccacaaggctggtcccctgccctggagcaacttaaacaggccctctggccagcctggaaccctgagcgactcggaccgatg

SEQ ID NO: 1306 - DNA, 203 bp, synthetic construct
  source 1..203: mol_type = other DNA
ggcgcgccagtcctttcaacctcgaataaaaactgcagccaacttccgaggcagcctcattgcccagcggaccccagcctctgccaggttgggtccgccatcctcgtcccgtcctccgccggcccctgccccgcgcccagggatcctccagctcctttcgcccgcgccctccgttcgctccggacacccgactcggaccgatg

SEQ ID NO: 1307 - DNA, 203 bp, synthetic construct
  source 1..203: mol_type = other DNA
ggcgcgccagtcctctgacaggagaaatagcagtgctgcccaggatcacagctcaccccgaggtggctgaggctggaattgggtgcccctttgcaggtgtcggctgctccttcaagggaagcccacagtctgtgcaagagcatgaggtcacctcccagacctcccacctaaacctgctgttggggttccgactcggaccgatg

SEQ ID NO: 1308 - DNA, 203 bp, synthetic construct
  source 1..203: mol_type = other DNA
ggcgcgccagtcctgtgcgaggggtggggctgcgggaggccctggagcgcggcggtgatggcggggccggtgaaggaccgcgaggccttccagaggctcaacttcctgtaccaggccgcccattgtgtccttgcccaggaccccgagaaccaggcgctggcgaggttttactgctacactgagaggaccgactcggaccgatg

SEQ ID NO: 1309 - DNA, 203 bp, synthetic construct
  source 1..203: mol_type = other DNA
ggcgcgccagtccttacgacccctcctttcgaggccccatcaagaacagaagctgcacagatgtcatctgctgcgtcctcttcctgctcttcattctaggttacatcgtggtggggattgtggcctggttgtatggagacccccggcaagtcctctaccccaggaactctactggggcctactgtggccgactcggaccgatg

SEQ ID NO: 1310 - DNA, 203 bp, synthetic construct
  source 1..203: mol_type = other DNA
ggcgcgccagtcctgtggggttgacccgcacgtcccgccccgcctctcccttcgcgctccggacgggcgacggtagctcgagacccgggactccgcccgcctccccgcgagtatttgaggtccggggcggctccggcgcctctgcccgccgttctgctcgctcgctccccgctctggagtctgccatccgactcggaccgatg

SEQ ID NO: 1311 - DNA, 203 bp, synthetic construct
  source 1..203: mol_type = other DNA
ggcgcgccagtcctactctcattccacgttcttaactgttccattttccgtatctgcttcgggcttccacctcatttttttcgctttgcccattctgtttcagccagtcgccaagaatcatgaaagtcgccagtggcagcaccgccaccgccgccgcgggccccagctgcgcgctgaaggccggcaagcgactcggaccgatg

SEQ ID NO: 1312 - DNA, 203 bp, synthetic construct
  source 1..203: mol_type = other DNA
ggcgcgccagtcctttcatccaccagcagcctcagtcctcatcacctgtgtacggctccagtgccaaaacttccagtgtctccaaccctcaggacagtgttggctctccgtgctcccgagtgggtgaggaggagcacgtctacagcttccccaacaagcagaaatcagctgagccttcacccaccgtacgactcggaccgatg

SEQ ID NO: 1313 - DNA, 203 bp, synthetic construct
  source 1..203: mol_type = other DNA
ggcgcgccagtcctgaccagattgggtgcttggccgtccctgccattagcgcgtaacgagagactgcttgctgcggcagagacgccagaggtgcagctccagcagcaatggcagtgacggcgttggcggcgcggacgtggcttggcgtgtggggcgtgaggaccatgcaagcccgaggcttcggctcgcgactcggaccgatg

SEQ ID NO: 1314 - DNA, 203 bp, synthetic construct
  source 1..203: mol_type = other DNA
ggcgcgccagtccttggtgtgacttagtttttgattgctggatttcactggagtgaagtggtcgtttattggctggccctctgatatgaggtggtggtgaattggtgggcgtcagtgcagtaagtgagcgagccggacgtcgattgactggtcttcagaagcagaaggactccatgaaagatgacagacgactcggaccgatg

SEQ ID NO: 1315 - DNA, 203 bp, synthetic construct
  source 1..203: mol_type = other DNA
ggcgcgccagtcctacttaagcttcgacgcaggaggcggggctgctcagtcctccaggcgtcggtactcagcggtgttggaacttcgttgcttgcttgcctgtgcgcgcgtgcgcggacatggcctcaaacgattatacccaacaagcaacccaaagctatggggcctaccccacccagcccgggcagcgactcggaccgatg

SEQ ID NO: 1316 - DNA, 203 bp, synthetic construct
  source 1..203: mol_type = other DNA
ggcgcgccagtcctccttctggaaggttctaagatagggtataagaggcagggtggcgggcggaaaccggtctcattgaactcgcctgcagctcttgggttttttgtggcttccttcgttattggagccaggcctacaccccagcaaccatgtccaagggacctgcagttggtattgatcttggcacccgactcggaccgatg

SEQ ID NO: 1317 - DNA, 203 bp, synthetic construct
  source 1..203: mol_type = other DNA
ggcgcgccagtcctatttccggctcgaatgcccggcagccgtggcggctagagcgttcctccccagctcgaatgcccggcggccgaggcggctagagcgtcgcctcctcccggggaaccgcgtgtgaccttccagcccggggaccgatgctgccggcggccgctcgccccctgtgggggccttgccttcgactcggaccgatg

SEQ ID NO: 1318 - DNA, 203 bp, synthetic construct
  source 1..203: mol_type = other DNA
ggcgcgccagtcctctgtatgttccctgggttcctgagagaggacattgaggagtaggagtcggcgattaaggagatcggtacaattgggaagcctcctgtcagagcttccagcaatttcctcatcagaggtggacaagccctatgggctaagacagagggtcctcagaaaggagtgcggacgccgtccgactcggaccgatg

SEQ ID NO: 1319 - DNA, 203 bp, synthetic construct
  source 1..203: mol_type = other DNA
ggcgcgccagtcctgcggcaggtctctgcgcagcccagcccgccggtccacgccgcgcaccgctccgagggccagcgccacccgctccgcagccggcaccatgcgcgagatcgtgcacatccaggcgggccagtgcggcaaccagatcggcgccaagttttgggaggtcatcagcgatgagcatgggacgactcggaccgatg

SEQ ID NO: 1320 - DNA, 203 bp, synthetic construct
  source 1..203: mol_type = other DNA
ggcgcgccagtcctccagctcagagggagcaggggcccagccagggacggaccctcattcctcccagggaccccagacctctgtctctctcggctgagtatttgtgccaggaagactgcgtgcagaaggtgactgtctcagtggagctgggtcatctcaggccttggctccttgaacttttggccgcccgactcggaccgatg

SEQ ID NO: 1321 - DNA, 203 bp, synthetic construct
  source 1..203: mol_type = other DNA
ggcgcgccagtcctggctccacccagaggccagtcctgtgtgtctggggacaaggcgaaagagcagcagaagtgccccttctccaggatcaaggaactggggcggggggtgtttcctggaccccagtcctccgaatcagctcctagagtggaaccaggaaggattctggagccacagaagatagacagcgactcggaccgatg

SEQ ID NO: 1322 - DNA, 203 bp, synthetic construct
  source 1..203: mol_type = other DNA
ggcgcgccagtcctgctgctgccttaagacgtgcagcctgggccgtggctgtcactgcgttcggacccagacccgctgcaggcagcagcagcccccgcccgcgcagcagcatggagctctggggggcctacctcctcctctgcctcttctccctcctgacccaggtcaccaccgagccaccaacccagcgactcggaccgatg

SEQ ID NO: 1323 - DNA, 203 bp, synthetic construct
  source 1..203: mol_type = other DNA
ggcgcgccagtcctaagccgtccggaaaatggccgccgccgccgccgccgcgccgagcggaggaggaggaggaggcgaggaggagagactgctccataaaaatacagactcaccagttcctgctttgatgtgacatgtgactccccagaatacaccttgcttctgtagaccagctccaacaggattcccgactcggaccgatg

SEQ ID NO: 1324 - DNA, 203 bp, synthetic construct
  source 1..203: mol_type = other DNA
ggcgcgccagtcctcaggtcacgtgacgggagcgcgggctttggaaggcggctgaacgtcaggccacccgccgctaagctgagaagggagagcgagcttaggaccgcctgcccggggcaaccccgaaccaagctttagccgccgaggccgcgtgtcccaaaggccagtcatccctcctctgtgttgcccgactcggaccgatg

SEQ ID NO: 1325 - DNA, 203 bp, synthetic construct
  source 1..203: mol_type = other DNA
ggcgcgccagtcctagaacaaatcattgtgggaagctgggaggagagagagagagaggaagtcggacgtgggcgaggggcggggtgtctggactggaacctctgggcccacatgccatggacaatattaccaggcagaaccaattctacgatacccaagtcatcaaacaagaaaacgagtcaggctaccgactcggaccgatg

SEQ ID NO: 1326 - DNA, 203 bp, synthetic construct
  source 1..203: mol_type = other DNA
ggcgcgccagtcctccggccggcttcccggaactggaaggttacattgattacccacctagtacaacatcttacgggaagagcatagtatttcctagaggaatatgaacataacaggaaggtatcattggctctgaattaaatttgaacttgtcccctgaatagctacaggttttggaagctgaatcacgactcggaccgatg

SEQ ID NO: 1327 - DNA, 203 bp, synthetic construct
  source 1..203: mol_type = other DNA
ggcgcgccagtcctcaggtctgggctcttcagctgagcacttagtgtttgtacaggatgaggcagaagattcagggaatgatttcctctccagtgagagcacagacagtagcattccatggttcctccgggttcaggagttggcccatgacagtttgattgctgctactcgtgcacaactggcaaagacgactcggaccgatg

SEQ ID NO: 1328 - DNA, 203 bp, synthetic construct
  source 1..203: mol_type = other DNA
ggcgcgccagtcctagagcagggctgcatttccagcaggagctgcgagcacagtgctggctcacaacaagatgctcaaggtgtcagccgtactgtgtgtgtgtgcagccgcttggtgcagtcagtctctcgcagctgccgcggcggtggctgcagccggggggcggtcggacggcggtaattttctggcgactcggaccgatg

SEQ ID NO: 1329 - DNA, 203 bp, synthetic construct
  source 1..203: mol_type = other DNA
ggcgcgccagtcctgatcccccgcccagcagttctggccgctgtcccggtgcgcacggacgtggctcgagtttcctctgctctccgctctcgcccgctagctctcctcccttccgctcctgcttctctccgggtctcccgctccagctccagccccacccggccggtcccgcacggctccgggtagcccgactcggaccgatg

SEQ ID NO: 1330 - DNA, 203 bp, synthetic construct
  source 1..203: mol_type = other DNA
ggcgcgccagtcctaaagcctcggctacttccgagggggtgagtggcttcaccgccggtcccttgcagcgctgcctttcgatctctccacatctcggtggcgcgggatctcaagatgcgcctccacctgctcctgctgctcgcgctgtgcggtgcaggcaccaccgccgcggagctcagttacagcttcgactcggaccgatg

SEQ ID NO: 1331 - DNA, 203 bp, synthetic construct
  source 1..203: mol_type = other DNA
ggcgcgccagtcctaagcaccgataggctctgcctcccgaagaaaagggagccgcgcagcgcctacgggagtccggcggcagcagccggtaccggcaaccacgggcagctctcagggaatctccgtcgtgaggccagaggctccagtccccgcgagtccagatgcctgtccagcctccaagcaaagaccgactcggaccgatg

SEQ ID NO: 1332 - DNA, 203 bp, synthetic construct
  source 1..203: mol_type = other DNA
ggcgcgccagtcctttgaagcaaggttgtggagaaaagcaaaggagacaaaaagtaaccttcctgaagaggacatgtgattggaagttgtcaattgttgaagcattggtaactccagtctctaacgttttagaaaatcataacaagcggttctctaccctgtaaaggtgaactactgagttcttcattcgactcggaccgatg

SEQ ID NO: 1333 - DNA, 203 bp, synthetic construct
  source 1..203: mol_type = other DNA
ggcgcgccagtcctttgttcccagggtggcgcctgctctccatccaggccccattccggctcccacccgacgctgcttttgttcccacgtttcggggggcagctggcactgtgattcctgccccatgagtgcctagaggcacggagccaccagggatcaccccacgtgggacacagggcttggggaggcgactcggaccgatg

SEQ ID NO: 1334 - DNA, 203 bp, synthetic construct
  source 1..203: mol_type = other DNA
ggcgcgccagtcctgactttaacatttctctttgtcttaacattagacaaaaagtaaccttcctgaagaggacatgtgattggaagttgtcaattgttgaagcattggtaactccagtctctaacgttttagaaaatcataacaagcggttctctaccctgtaaaggtgaactactgagttcttcattcgactcggaccgatg

SEQ ID NO: 1335 - DNA, 203 bp, synthetic construct
  source 1..203: mol_type = other DNA
ggcgcgccagtcctcaattgataatcaaaggctaaatctcttctgggatccactgaatgccactagagggtctgctcgagagaattcctgattgaatgacaacggcgctaagaacaatccctgcccaagacgggtctggagcctgacttccgggtgtccatgaccctggcggctgcttcgggtccgcccgactcggaccgatg

SEQ ID NO: 1336 - DNA, 203 bp, synthetic construct
  source 1..203: mol_type = other DNA
ggcgcgccagtcctgctgtttagaactattgtaccgctgccagtgactgtctgtattagggttgggagcaggaacatggatttgaagacattaaaactgtttaattctcagttgagatgtggttggctcttatacatttggaataaagcatttatggcacatctcagggttccacaagatgaatggaccgactcggaccgatg

SEQ ID NO: 1337 - DNA, 203 bp, synthetic construct
  source 1..203: mol_type = other DNA
ggcgcgccagtcctctgtgcggggagccggaaatggttgtggactacgtctgtgcggctgcgtggggctcggccgcgcggactgaaggagactgaaggccctcggatgcccagaacctgtaggccgcaccgtggacttgttcttaatcgagggggtgctggggggaccctgatgtggcaccaaatgaacgactcggaccgatg

SEQ ID NO: 1338 - DNA, 203 bp, synthetic construct
  source 1..203: mol_type = other DNA
ggcgcgccagtcctataaaaccagctgagtatttgtgccaggaagactgcgtgcagaaggccttggctccttgaacttttggccgccatgtgcttcccgaaggtcctctctgatgacatgaagaagctgaaggcccgaatggtgatgtcgagcctggcagagctggaggacgacttcaaagagggctacgactcggaccgatg

SEQ ID NO: 1339 - DNA, 203 bp, synthetic construct
  source 1..203: mol_type = other DNA
ggcgcgccagtcctacctgggaaaaggaagcacaaaaaggagaagcagcaacggctgctctgcttccttcccatctcgctcttgggtcatgcctggccagcagaaagcagctccataggggaggagagccacgcaggatctcacagctgcagtctaatagtaacacagaggattcagcagtggccacccgactcggaccgatg

SEQ ID NO: 1340 - DNA, 203 bp, synthetic construct
  source 1..203: mol_type = other DNA
ggcgcgccagtcctgccttggctccttgaacttttggccgccatgtgcttcccgaaggtcctctctgatgacatgaagaagctgaaggcccgaatgcaccaggccatagaaagattttatgataaaatgcaaaatgcagaatcaggacgtggacaggacgacttcaaagagggctacctggagacagtcgactcggaccgatg

SEQ ID NO: 1341 - DNA, 203 bp, synthetic construct
  source 1..203: mol_type = other DNA
ggcgcgccagtcctaacttgcgcctggccgccaagccggcctccaggctgaagaaggacccgccccggccttgacccgggccccgcccctccagccggggcaccgagccccggccctagctgctcgcccctactcgccggcactcgcccggctcgcccgctttcgcacccagttcacgcgccacagctcgactcggaccgatg

SEQ ID NO: 1342 - DNA, 203 bp, synthetic construct
  source 1..203: mol_type = other DNA
ggcgcgccagtcctggggtcgttgtgtcgtgacaaccgctgcggtagccgtttccgaggcagcagttgcggccgctttagccctgagcgggatctgcggctgcctgcgagtctctgctgtgccgacccttctcttcgcggaccccacgccaagcagcgaccctgagccgacagccggagcgcccggcacgactcggaccgatg

SEQ ID NO: 1343 - DNA, 203 bp, synthetic construct
  source 1..203: mol_type = other DNA
ggcgcgccagtcctgtcttcaggtcccaatcctccgcttccgcgcttgcgcgccaagacggctcggatgccggcggtctctgctgaagagagaagatggcgcttgacggaccagagcagatggagctggaggaggggaaggcaggcagcggactccgccaatattatctgtccaagattgaagaactccgactcggaccgatg

SEQ ID NO: 1344 - DNA, 203 bp, synthetic construct
  source 1..203: mol_type = other DNA
ggcgcgccagtcctacaacgctgccgccgcgctccgtgggcaactcctactactgctgggctgggctgggctgggctgggctgcgccggagctcgcctgcacagatcagctccggagaggggaaaaccacgctcctcggaccaagcctcgggagctaagtgtttctgaaagatctatccagcactccgcgactcggaccgatg

SEQ ID NO: 1345 - DNA, 203 bp, synthetic construct
  source 1..203: mol_type = other DNA
ggcgcgccagtcctcgggagcgtgcccggtccccgcccctgttcccactctccttccacctgggaccggccggggctccgcagagccaaagctcgcttgtccccggaaccgccctgctgccgccgcctgcttcctctgctcgcggttagcccgtcagtccctgctctgtgcgcgcctccatctgggcccgactcggaccgatg

SEQ ID NO: 1346 - DNA, 203 bp, synthetic construct
  source 1..203: mol_type = other DNA
ggcgcgccagtcctttgatgtaacagagcagaggaccagcagatgaatggacaccttgaagcagaggagcagcaggaccagagatcacccctgacctgctacctcggccgccccggttgcttctattggtcaatccctttgggggtcggggcctggcctggcagtggtgtaagaaccacgtgcttccccgactcggaccgatg

SEQ ID NO: 1347 - DNA, 203 bp, synthetic construct
  source 1..203: mol_type = other DNA
ggcgcgccagtcctagctaggcgcgaggctcggagtgcggccagcgggcggaggcggtctcgcatcggcggcgacggagggctcaggcgtcgtcgtttgggtggggggccgctgaactgacaagcgacatttcagctcctttcacccgccggaaccccggagccggggcccgctcagccggcgttacccgactcggaccgatg

SEQ ID NO: 1348 - DNA, 203 bp, synthetic construct
  source 1..203: mol_type = other DNA
ggcgcgccagtcctcctagacggcggtgttgctccggcagcgttcctgggagccgagggccagagactaagttaaaaggcccctccccatcttcagaacagtcctgggttctgagcctgccatccaaggaactcaggaggaggagttgacagtctcttcgttcctaaccagtgtgggacgacttcagccgactcggaccgatg

SEQ ID NO: 1349 - DNA, 203 bp, synthetic construct
  source 1..203: mol_type = other DNA
ggcgcgccagtcctggacgatcctctctcagcgtccagcctagacggcggtgttgctccggcagcgttcctgggagccgagggccagagactaagtaacagtcctgggttctgagcctgccatccaaggaactcaggaggaggagttgacagtctcttcgttcctaaccagtgtgggacgacttcagccgactcggaccgatg

SEQ ID NO: 1350 - DNA, 203 bp, synthetic construct
  source 1..203: mol_type = other DNA
ggcgcgccagtcctgtcgtggacgatcctctctcagcgtccagcctagacggcggtgttgctccggcagcgttcctgggagccgagggccagagactaagttcctgggttctgagcctgccatccaaggaactcaggaggaggagttgacagtctcttcgttcctaaccagtgtgggacgacttcagccgactcggaccgatg

SEQ ID NO: 1351 - DNA, 203 bp, synthetic construct
  source 1..203: mol_type = other DNA
ggcgcgccagtcctggaacaggcgaggaaaagtagtcccttctcggcgattctgcggagggatctccgtggggcggtgaacgccgatgattatataaggacgcgccgggtgtggcacagctagttccgtcgcagccgggatttgggtcgcagttcttgtttgtggatcgctgtgatcgtcacttgacacgactcggaccgatg

SEQ ID NO: 1352 - DNA, 203 bp, synthetic construct
  source 1..203: mol_type = other DNA
ggcgcgccagtccttaactgacgctaccgtcgcggccgccggcaagttcctttactgtgttttcttggttcagccttgaagtgagtcgtggacgatcctctctcagcgtccagcctagacggcggtgttgctccggcagcgttcctgggagccgagggccagagactaagttgtgggacgacttcagccgactcggaccgatg

SEQ ID NO: 1353 - DNA, 203 bp, synthetic construct
  source 1..203: mol_type = other DNA
ggcgcgccagtcctaacatgttgagctctggcatagaagaggctggtggctattttgtccttgggctgcctgttttcaggcgccatgtcagaaccggctggggatgtccgtcagaacccatgcggcagcaaggcctgccgccgcctcttcggcccagtggacagcgagcagctgagccgcgactgtgacgactcggaccgatg

SEQ ID NO: 1354 - DNA, 203 bp, synthetic construct
  source 1..203: mol_type = other DNA
ggcgcgccagtccttgggaactgggaacactggagacctgatttctaactgacgctaccgtcgcggccgccgtaaaaggcccctccccatcttcagaacagtcctgggttctgagcctgccatccaaggaactcaggaggaggagttgacagtctcttcgttcctaaccagtgtgggacgacttcagccgactcggaccgatg

SEQ ID NO: 1355 - DNA, 203 bp, synthetic construct
  source 1..203: mol_type = other DNA
ggcgcgccagtcctcgccgaggcaccgaggcactcagaggaggtgagagagcggcggcagacaacaggggaccccgggccggcggcccagagccgagccaagcgtgcccgcgtgtgtccctgcgtgtccgcgaggatgcgtgttcgcgggtgtgtgctgcgttcacaggtgtttctgcggcaggcgcccgactcggaccgatg

SEQ ID NO: 1356 - DNA, 203 bp, synthetic construct
  source 1..203: mol_type = other DNA
ggcgcgccagtccttcgcactcctcgcagttggactggtgggaactgggaacactggagacctgatttctaactgacgctaccgtcgcggccgccgaacagtcctgggttctgagcctgccatccaaggaactcaggaggaggagttgacagtctcttcgttcctaaccagtgtgggacgacttcagccgactcggaccgatg

SEQ ID NO: 1357 - DNA, 203 bp, synthetic construct
  source 1..203: mol_type = other DNA
ggcgcgccagtcctagcgccggaagtacggttttcggagggatcagactcagactcacgtcgcactcctcgcagttggactggtgggaactgggaacactggagacctgatttctaactgacgctaccgtcgcggccgccgtgtgggacgacttcagcatgtctcaggccaccaagaggaagcatgtgcgactcggaccgatg

SEQ ID NO: 1358 - DNA, 203 bp, synthetic construct
  source 1..203: mol_type = other DNA
ggcgcgccagtcctgaagcggctccgcgctctgcccgtttgggcctcccccgactcggactcgcgcccgtgggctcccgccgcgcccgcccggccccgcgccggccccgcgccccctcccccgtctcggcgccccctcctcaggagccgcgggtccccgccactttcgcacggccccggcccccgccgcgactcggaccgatg

SEQ ID NO: 1359 - DNA, 203 bp, synthetic construct
  source 1..203: mol_type = other DNA
ggcgcgccagtcctccggctgccgcctaggatgaatatcatggacttcaacgtgaagaagctggcggccgacgcaggcaccttcctcagtcgcgccgtgcagatgccaggatagaagaatttgtttatgagaaactggatagaaaagctccaagtcgtataaacaacccagaacttttgggacaatatcgactcggaccgatg

SEQ ID NO: 1360 - DNA, 203 bp, synthetic construct
  source 1..203: mol_type = other DNA
ggcgcgccagtcctcctccgcgaggtctccctgagtctttgaggacacagcctcgctggaggcagtttctggtgccagtgacggggtggcccgtgagctgatgacgaggactggcttttaatccttggtggtgattaagagaaagcttattggggcctgggagcagctccccgccgacccccaccacccgactcggaccgatg

SEQ ID NO: 1361 - DNA, 203 bp, synthetic construct
  source 1..203: mol_type = other DNA
ggcgcgccagtcctgaaacacagagcaccagctctgaggaactcgtcccaagccccccatctccacttcctccccctcgagtgtacaaaccctgcttcgtctgccaggacaaatcatcagggtaccactatggggtcagcgcctgtgagggatgtaagggctttttccgcagaagtattcagaagaatcgactcggaccgatg

SEQ ID NO: 1362 - DNA, 203 bp, synthetic construct
  source 1..203: mol_type = other DNA
ggcgcgccagtcctgaacacgtggctgcagcggggccagagcagcaatggcggcgggcggcggcggtagctgcgaccccctggcccctgctggggtcccttgcgccttctccccgcacagccaggcctacttcgctttggcctctaccgacggtcacttacgagtatgggagacggccaacaaccggccgactcggaccgatg

SEQ ID NO: 1363 - DNA, 203 bp, synthetic construct
  source 1..203: mol_type = other DNA
ggcgcgccagtccttaacctcggtgcccccttcaacctcccgccccaagcacctccagggtcgtcaggggtgtagttttgagtcgcgctcctaagcatccagacaggcaggacaccgtaacgacatctctgccgggagtcccttcagactgcggtctccagacaaaaatctacgtaccatcagaaactcgactcggaccgatg

SEQ ID NO: 1364 - DNA, 203 bp, synthetic construct
  source 1..203: mol_type = other DNA
ggcgcgccagtcctggcttttagctggcttgtctgtcataattcatgattcggggctgggaaaaagaccaacagcctacgtgccaaaaaaggggcagagtttgatggagttgggtggacttttctatgccatttgcctccacacctagaggataagcacttttgcagacattcagtgcaagggagatccgactcggaccgatg

SEQ ID NO: 1365 - DNA, 203 bp, synthetic construct
  source 1..203: mol_type = other DNA
ggcgcgccagtcctttgtcttgcgcctgccttcctaacagccttcagttccccttctcccgtcagaccttcctgacctcccacctggttctctaggggcagggtggacaggaagcagctcagcccagcctgggagaggccaagggctgcctcctatcagagagcgcctgctcgctgtgcccccgggttcgactcggaccgatg

SEQ ID NO: 1366 - DNA, 203 bp, synthetic construct
  source 1..203: mol_type = other DNA
ggcgcgccagtcctaaaaagcttttccaaaaaagtattggctgtcttgaggaatgcggtcgcccccttgggaaagtacatatctgggagaagcaggcggctccgcgctcgcactcccgctcctccgcccgaccgcgcgctcgccccgccgctcctgctgcagccccagggcccctcgccgccgccacccgactcggaccgatg

SEQ ID NO: 1367 - DNA, 203 bp, synthetic construct
  source 1..203: mol_type = other DNA
ggcgcgccagtcctgaaagggcgggaaaggcagttggagaagaggtaagcggttactcactccatggctgcagcaaggagaggcggcggcggcctcggctgaagaaagaagaaatcttcccaaggctgcagacaccgacggatttgctttgggagccagagtagctgccgccaccagagtccggagcccgactcggaccgatg

SEQ ID NO: 1368 - DNA, 203 bp, synthetic construct
  source 1..203: mol_type = other DNA
ggcgcgccagtcctccccgacggcggcgctaacctctcggttattccaggatctttggagacccgaggaaagccgtgttgaccaaaagcaagacaaatgactcacagagaaaaaagatggcagaaccaagggcaactaaagccgtcaggttctgaacagctggtagatgggctggcttactgaaggaccgactcggaccgatg

SEQ ID NO: 1369 - DNA, 203 bp, synthetic construct
  source 1..203: mol_type = other DNA
ggcgcgccagtcctcggttctctctggactggtggcagcgcgcggccccgaaccgcgccccaggccggcaggcggggaaggagccggtgggggtagggggtgcggtggggggtggggaccctccggctcttgggggtcccagtccccgccggctgctgagcgggtggggtggtggaggagctgcagagcgactcggaccgatg

SEQ ID NO: 1370 - DNA, 203 bp, synthetic construct
  source 1..203: mol_type = other DNA
ggcgcgccagtcctatttcctctgggttacggcgcaggcgcaagataagctaggagccgcgcgagtcgtagtgtcgctgtttgcgggtctccgcgcgggaccggggcgcagcggggtcgctgaggcgagggtgtcatgtcagacaacgaggacaattttgatggcgacgactttgatgatgtggaggacgactcggaccgatg

SEQ ID NO: 1371 - DNA, 203 bp, synthetic construct
  source 1..203: mol_type = other DNA
ggcgcgccagtcctgcccttcccgcctctggggaagggaacttccgcttgggaccgagggcagtaggctctcggctcctggtcccactgctgctcagcccagtggcctcacaggacaccagcttcccaggaggcgtctgacacagtatgatgatgaagatcccatggggcagcatcccagtactgatgcgactcggaccgatg

SEQ ID NO: 1372 - DNA, 203 bp, synthetic construct
  source 1..203: mol_type = other DNA
ggcgcgccagtcctgcactgggccacgagctgccagtgctggctccccagtgggagggctacgatgagctgcagactgatggcaaccgcagcagccactcccgcttgggaagaatagaggcagattctgaaagtcaagaagacatcatccggaatattgccaggcacctcgcccaggtcggggacagccgactcggaccgatg

SEQ ID NO: 1373 - DNA, 203 bp, synthetic construct
  source 1..203: mol_type = other DNA
ggcgcgccagtcctggcggggagaagccgagctgagcggatcctcacacgactgtgatccgattctttccagcggcttctgcaaccaagcgggtcttacccccggtcctccgcgtctccagtcctcgcacctggaaccccaacgtccccgagagtccccgaatccccgctcccaggctacctaagaggcgactcggaccgatg

SEQ ID NO: 1374 - DNA, 203 bp, synthetic construct
  source 1..203: mol_type = other DNA
ggcgcgccagtccttggcgcgggcgggcccgtcccccctgcccctgggtcgctctttttaagctcccctgagccggtgctgcgctcctctaattgggactccgagccggggctatttctggcgctggcgcggctccaagaaggccatcccagccatcactcttccacctgctccttagagaagggaagcgactcggaccgatg

SEQ ID NO: 1375 - DNA, 203 bp, synthetic construct
  source 1..203: mol_type = other DNA
ggcgcgccagtcctacgtcaccggctgcgcccttcagtatcgcggacggaagatggcgtccgccacccgtctcatccagcggctgcggaactgggcgtccgggcatgacctgcaggggaagctgcagctacgctaccaggagatctccaagcgaactcagcctcctcccaagctccctgtgggtcctacgactcggaccgatg

SEQ ID NO: 1376 - DNA, 203 bp, synthetic construct
  source 1..203: mol_type = other DNA
ggcgcgccagtcctctcctacggcaagtcggaggtagcaagatggccgccgctgaggaaggctgtagtgtcggggccgaagcggacagggaattggaggagcttctggaaagtgctcttgatgatttcgataaagccaaaccctccccagcacccccttctaccaccacggcccctgatgcttcggggcgactcggaccgatg

SEQ ID NO: 1377 - DNA, 203 bp, synthetic construct
  source 1..203: mol_type = other DNA
ggcgcgccagtcctctggggctcgcccgctccttagagcactggcaatgatgtgcggatcctcgctgctgctgctgggaaactgttgagtggctgaatgaccccaggggaccctgggagagctctgaagccctcagccaccaagtggctgggctggcaagggttcattcattcattcaacaaatacgacgactcggaccgatg

SEQ ID NO: 1378 - DNA, 203 bp, synthetic construct
  source 1..203: mol_type = other DNA
ggcgcgccagtcctgaaattgtagtccgattggggctgcgcgcttcgcttctgcggctcagcctccagcccaggtggcgctgtggaccctgcagccgcggagcgaggcagcggggcggctccgtgaccacggcgggcggagcctaggactgagggcgatggctgctgtggccgtggctgttcgcgaggcgactcggaccgatg

SEQ ID NO: 1379 - DNA, 203 bp, synthetic construct
  source 1..203: mol_type = other DNA
ggcgcgccagtccttgccaggctctccacccccacttcccaattgaggaaaccgaggcagaggaggctcagcgccacgcactcctctttctgcctggccggccactcccgtctgctgtgacgcgcggacagagagctaccggtggacccacggtgcctccctccctgggatctacacagaccatggcccgactcggaccgatg

SEQ ID NO: 1380 - DNA, 203 bp, synthetic construct
  source 1..203: mol_type = other DNA
ggcgcgccagtcctcggcttctgctgctagcgccggagctgagttagttctgagaaggtttccctgggcgttccttgtccggcggcctctgctgccgcctccggagacgcttcccgatagatggctacaggccgcggaggaggaggaggtggagttgctgcccttccggagtccgccccgtgaggagacgactcggaccgatg

SEQ ID NO: 1381 - DNA, 203 bp, synthetic construct
  source 1..203: mol_type = other DNA
ggcgcgccagtcctgattattttctcaggtgtttgcaacagtgttctaactattaacgctacgatgcctgaacctaccaagtctgctcctgccccaaagaagggctccaagaaggcggtgactaaggctcagaagaaggacgggaagaagcgcaagcgcagccgcaaggagagctattcagtgtatgtcgactcggaccgatg

SEQ ID NO: 1382 - DNA, 203 bp, synthetic construct
  source 1..203: mol_type = other DNA
ggcgcgccagtccttcacttccctgtactctcatcgctctcggcctccgacacgaaaaggaagcaaatgagctgatggaagatctgtttgaaactagacagggtcttgccatgttctggaactcataggctcaagtaatcttcctgcctcaacctcccaaagtgctggaattacagttccaagatgagcgactcggaccgatg

SEQ ID NO: 1383 - DNA, 203 bp, synthetic construct
  source 1..203: mol_type = other DNA
ggcgcgccagtcctcaccctgacccaagccgagacaggttccaaacctcaacctgcagccggaagggggaagtgaaactcggctgggggtgggggctcagaagccgccccagaaagcactgaaagccacagcacgtacacccactccagggatctgccagcaccctgtggggcccagactacaggctgcgactcggaccgatg

SEQ ID NO: 1384 - DNA, 203 bp, synthetic construct
  source 1..203: mol_type = other DNA
ggcgcgccagtcctgtggagaaggcttgggctcgcgccgctgaagtcggcttacccgctggccgcctcctgacaagcgggagggatccgcggtggacccagggaagcggaggagcctggcggccaccccctcttcctcacttccctgtactctcatcgctctcggcctccgacacgttccaagatgagcgactcggaccgatg

SEQ ID NO: 1385 - DNA, 203 bp, synthetic construct
  source 1..203: mol_type = other DNA
ggcgcgccagtcctagtcagttaggtaacaggccacgggccccgggctcaggccactgcacggacccagggaacgggctgacagtccagcagaggcctcagcgaggcggcggcgctgcgcacaaacctgaggacctaggcgggtgaggcggaaccaaccctcctggccatgggaggggccgtggtggacgactcggaccgatg

SEQ ID NO: 1386 - DNA, 203 bp, synthetic construct
  source 1..203: mol_type = other DNA
ggcgcgccagtcctctgctgctgcctcccagggcgctggttcacagcacggtcccagcagggagaggctgagccggttggactagaccacccaaggtctcaggttgcagctccctggtgaggcggaaccaaccctcctggccatgggaggggccgtggtggacgagggccccacaggcgtcaaggccccgactcggaccgatg

SEQ ID NO: 1387 - DNA, 203 bp, synthetic construct
  source 1..203: mol_type = other DNA
ggcgcgccagtcctagtgcagagggagtgggacccacagctgctagcctccctccaaaccctcctgcctccaccagacaccaggtgaggcggaaccaaccctcctggccatgggaggggccgtggtggacgagggccccacaggcgtcaaggcccctgacggcggctggggctgggccgtgctcttcgcgactcggaccgatg

SEQ ID NO: 1388 - DNA, 203 bp, synthetic construct
  source 1..203: mol_type = other DNA
ggcgcgccagtcctccagggcagcgaggcgctggccggcagggggcgctgcggtgccagcctgaggctgggctgctccgcgaggatacagcggcccctgccctgtcctgtcctgccctgccctgtcctgtcctgccctgccctgccctgtcctgtcctgccctgccctgccctgtgtcctcagacaatcgactcggaccgatg

SEQ ID NO: 1389 - DNA, 203 bp, synthetic construct
  source 1..203: mol_type = other DNA
ggcgcgccagtcctccccggggactgagcatccggctcagagcggcttggcagaggcccactgctcagtggagcgtggaggacgaggaggaggccgtccacgagcaatgccagcatgagagagacaggcagcttcaggcccaggacgaggagggaggcggccatgtccccgagcggccgaagcaggagcgactcggaccgatg

SEQ ID NO: 1390 - DNA, 203 bp, synthetic construct
  source 1..203: mol_type = other DNA
ggcgcgccagtcctagctgggctttgtggagcgctgcggagggtgcgtgcgggccgcggcagccgaacaaaggagcaggggcgccgccgcagggacccgccacccacctcccggggccgcgcagcggcctctcgtctactgccaccatgaccgccaacggcacagccgaggcggtgcagatccagttccgactcggaccgatg

SEQ ID NO: 1391 - DNA, 203 bp, synthetic construct
  source 1..203: mol_type = other DNA
ggcgcgccagtcctgaactgagctcgcatactaccgcttacgcatctaaccaaccgcccatctagctaacccgagcccctccaccgtcaactcaggttcggccggtccccggcccgcctgccggagccgtggtggcagccccgggaggagcactggcgtctgtttccttcgattctcgggattcgaagcgactcggaccgatg

SEQ ID NO: 1392 - DNA, 203 bp, synthetic construct
  source 1..203: mol_type = other DNA
ggcgcgccagtcctcggagggactttctgttagcagcatgagggcctgtggttagacctatagaggtatttcctttgatttaagccagaaagtcctgagagcggatcggggagcatttgcggatcggtcactttttcctcctttctgagtctcttatcccctaccacagggacggcccaggtggcaggcgactcggaccgatg

SEQ ID NO: 1393 - DNA, 203 bp, synthetic construct
  source 1..203: mol_type = other DNA
ggcgcgccagtcctggcagagtggcgcccgcgcgtgactcccccctgccggctgcggaggtgggggggggacggcgcccccgccgtgtgcgtggggcggggatggagcacgcgccctggagccccggagccagatgctctgacctttgacccctgccgttcagctctagggcccgtgcaggccacacccgactcggaccgatg

SEQ ID NO: 1394 - DNA, 203 bp, synthetic construct
  source 1..203: mol_type = other DNA
ggcgcgccagtccttctctcccggtttcagatccgcatttgctaccagcggcggccgcggcggagccaggccggtcctcagcgcccagcaccgccgctcccggcaacccggagcgcgcaccgcaggccggcggccgagctcgcgcatcccagccatcactcttccacctgctccttagagaagggaagcgactcggaccgatg

SEQ ID NO: 1395 - DNA, 203 bp, synthetic construct
  source 1..203: mol_type = other DNA
ggcgcgccagtcctccagcggaagtaattctttcgactgccccggaacccaccggagcaggcagctgggggtgggggggcggccctgggataggggctgtggcagtacgcggggacccggctgcggtggctgcgggactgacgaatggagaggagaaaacctatggtggctgtgaaggacctgatgcccgactcggaccgatg

SEQ ID NO: 1396 - DNA, 203 bp, synthetic construct
  source 1..203: mol_type = other DNA
ggcgcgccagtcctagcgagagccacaagccacagcgctgagctgcaggcgcggcgaaacttccctctacccgcccggcccgcggcgcgcaccgttggcgctggacgcttcctccttggaagcgcctctccctcagttatggagaaaacttgtatagatgcacttcctcttactatgaattcttcagacgactcggaccgatg

SEQ ID NO: 1397 - DNA, 203 bp, synthetic construct
  source 1..203: mol_type = other DNA
ggcgcgccagtcctccagagtgcattgcggggccgcttcctttccgctcggctgttttcctgcgcaggagccgcagggccgtaggcagccatggcgcccagccggaatggcatggtcttgaagccccacttccacaaggactggcagcggcgcgtggccacgtggttcaaccagccggcccgtaagatcgactcggaccgatg

SEQ ID NO: 1398 - DNA, 203 bp, synthetic construct
  source 1..203: mol_type = other DNA
ggcgcgccagtcctcaggaaagaaggacgcggcgtctggggagcacccaggcagcaagacggggcccgggctttcgacagtggggagtgtgacgcgcttgggaaaggcaggagcgccagcggtcgggctgctcttggctaacgagaggagtccgaggcggcggcgaggggcgaacgacccgacgcaagcgactcggaccgatg

SEQ ID NO: 1399 - DNA, 203 bp, synthetic construct
  source 1..203: mol_type = other DNA
ggcgcgccagtcctgcgcactctggggaaagcggagctgcaccccgccccgtattgctgctcagctcctcagctgtgcgtgcgagggacgtcgggggtggcgccgcagcagttgcccctggtaacgggggaggcagcaggaggaggaggaggaggagggactcggcgggaggatgggcttgctctcaacgactcggaccgatg

SEQ ID NO: 1400 - DNA, 203 bp, synthetic construct
  source 1..203: mol_type = other DNA
ggcgcgccagtcctgggagcggccagccttggccaatcaggaagcgggggagagcggcgcgagaagcggcggccgcgtcctcaagccggcacctgagcggcggagacggctgtagcacaaggatctgcatctccaatggatactgaggggtttggtgagctccttcagcaagctgaacagcttgctgccgactcggaccgatg

SEQ ID NO: 1401 - DNA, 203 bp, synthetic construct
  source 1..203: mol_type = other DNA
ggcgcgccagtcctgtttcccggcaggcctcgcgtcaagacggccggcgggacgggagctgcggcgctggctacgagagtgacccagtcagcgttggttcccgtcttggccatggcctcgttcgtgacagaagttttggcacactccgggaggctggaaaaggaggatctggggacccggatcagccgcgactcggaccgatg

SEQ ID NO: 1402 - DNA, 203 bp, synthetic construct
  source 1..203: mol_type = other DNA
ggcgcgccagtcctggtatgagagcttccagggagacccgccaagatctccaggcaggccgggccaggctctctgggattccggactggcttcgcccaactggaaccccctcgatgagggggccccaggcagaccttatatgagcatcccagccatcactcttccacctgctccttagagaagggaagcgactcggaccgatg

SEQ ID NO: 1403 - DNA, 203 bp, synthetic construct
  source 1..203: mol_type = other DNA
ggcgcgccagtcctgctcccaggcagctcctggtccacctctcatgtgtccactgggctgtgtggccaaatctggaggcaggagggagcctgcaggtagacacatggaaccttctcctctctagtgctgccagtctggtgagaacagctaacgctggtcctccccgcccctcctcctctggctacaagcgactcggaccgatg

SEQ ID NO: 1404 - DNA, 203 bp, synthetic construct
  source 1..203: mol_type = other DNA
ggcgcgccagtcctttttaaaagcttcagcttctccagcatctttgcattgtgaatatcttcctgcttctagtcaaagctttctctctagtgattggaatgctgctgtaagcctgattagaggtgcctgaggatatcaccttttacaaggaagccgtgtgtgcttgagaggatctttttaaatgcattcgactcggaccgatg

SEQ ID NO: 1405 - DNA, 203 bp, synthetic construct
  source 1..203: mol_type = other DNA
ggcgcgccagtcctcagctgtctctcccctgtccccacatgtcttctaagctgttggagccggccggcgctcacttgtcttcaggaagctcggagcctttggtggagccggggagaggaagggtgggtgcaagagtgaaaggcgagaggggactgcaagcatccgggtcggctcctggccggagcaagcgactcggaccgatg

SEQ ID NO: 1406 - DNA, 203 bp, synthetic construct
  source 1..203: mol_type = other DNA
ggcgcgccagtcctccgccatctccccgtaggtgaataccgcaagcctccgaatttggcgtggtgggcgactctcgtggaatgggcagctagacatcacaaccctacatttttaccctccatctctagattgaagtgttggggtgttgttttatcaaggaagctgattcatctgaaaactacattaagcgactcggaccgatg

SEQ ID NO: 1407 - DNA, 203 bp, synthetic construct
  source 1..203: mol_type = other DNA
ggcgcgccagtccttgcgccgcgccggccgctctagcaacccctggctgtcacgctttggtttccgggtcggttctggcaggtctgagcgctccgacttccagaggagcgctgtgcacgtggagaagagcggggactcggcgaccctgccctcccgaccctcatgttcgaagagcctgagtgggccgacgactcggaccgatg

SEQ ID NO: 1408 - DNA, 203 bp, synthetic construct
  source 1..203: mol_type = other DNA
ggcgcgccagtcctcgggaagtgggtggggctcgccttagctaggcaggaagtcggcgcgggcggcgcggacagtatctgtgggtacccggagcacggagatctcgccggctttacgttcacctcggtgtctgcagcaccctccgcttcctctcctaggcgacgagacccagtggctagaagttcacccgactcggaccgatg

SEQ ID NO: 1409 - DNA, 203 bp, synthetic construct
  source 1..203: mol_type = other DNA
ggcgcgccagtcctcgcctctacgcgcgcccgccgttcccgcgaggcccacctagagccgggcggcgcaggcgcagagtccccgggccaagatggctgcgcggtgctccacacgctggttgctggtggttgtggggaccccgcggctgccggctatatcgggtagaggggcccggccgcccagggaggcgactcggaccgatg

SEQ ID NO: 1410 - DNA, 203 bp, synthetic construct
  source 1..203: mol_type = other DNA
ggcgcgccagtcctggaggcggtgcggcgcggcgggtgcggttcagtcggtcggcggcggcagcggaggaggaggaggaggaggaggaggaggaggatgaggaggatgtgggccacgcaggggctggcggtggcgctggctctgagcgtgctgccgggcagccgggcgctgcggccgggcgactgcgacgactcggaccgatg

SEQ ID NO: 1411 - DNA, 203 bp, synthetic construct
  source 1..203: mol_type = other DNA
ggcgcgccagtcctctccttatttccccgcctccttccctcccccaccttcccctcctccggctttttcctcccaactcggggaggtccttcccggtggccgccctgacgaggtctgagcacctaggcggaggcggcgcaggctttttgtagtgaggtttgcgcctgcgcagcgcgcctgcctccgcccgactcggaccgatg

SEQ ID NO: 1412 - DNA, 203 bp, synthetic construct
  source 1..203: mol_type = other DNA
ggcgcgccagtcctgctccctcgccgccctgaaccggcggctagactgcgcatgcgtgtcagtggcgctagcggcggacccggctgggcagttccttccccagaaggagagattcctctgccatggagtcctacgatgtgatcgccaaccagcctgtcgtgatcgacaacggatccggtgtgattaaacgactcggaccgatg

SEQ ID NO: 1413 - DNA, 203 bp, synthetic construct
  source 1..203: mol_type = other DNA
ggcgcgccagtcctcgcaggcgccgccgccgccgcacttccgggtgccattgcaggatgcagaaagcctcagtgttgctcttcctggcctgggtctgcttcctcttctacgctggcattgccctcttcaccagtggcttcctgctcacccgtttggagctcaccaaccatagcagctgccaagagccccgactcggaccgatg

SEQ ID NO: 1414 - DNA, 203 bp, synthetic construct
  source 1..203: mol_type = other DNA
ggcgcgccagtcctctcccagcgttcgcaaaggagggaggagccggaaactcagggcgcgaggcctgtgggcccagcggtgaggcagcagctgggggcggggggagggcggacctagcttcccagggcaggtgattcgtcggccccggtggcggcggcgcgtgcgacggtcacctcggtttggggaagcgactcggaccgatg

SEQ ID NO: 1415 - DNA, 203 bp, synthetic construct
  source 1..203: mol_type = other DNA
ggcgcgccagtcctaaggaacaaagcaccctccccactgggctcctggttgcagagctccaagtcctcacacagatacgcctgtttgagaagcagcgggcaagaaagacgcaagcccagaggccctgccatttctgtgggctcaggtccctactggctcaggcccctgcctccctcggcaaggccacacgactcggaccgatg

SEQ ID NO: 1416 - DNA, 203 bp, synthetic construct
  source 1..203: mol_type = other DNA
ggcgcgccagtcctaaaggcgaaagcgaaagcaggaagtacagacgtgaagcctagcagaggactttttagctgctcactggccccgcttgtctggccgactcatccgcccgcgacccctaatcccctctgcctgccccaagatgctgaagccagccctggagccccgagggggcttctccttcgagacgactcggaccgatg

SEQ ID NO: 1417 - DNA, 203 bp, synthetic construct
  source 1..203: mol_type = other DNA
ggcgcgccagtcctggatttgggcgggaagcggagccccgccagcgcccgccctggcagctgcgggctccgcgccgaccctccggcttcccctctcccccctcggccccgtcaggtggacgcggatctgtcaacatgggtaaaggagaccccaacaagccgcggggcaaaatgtcctcgtacgccttccgactcggaccgatg

SEQ ID NO: 1418 - DNA, 203 bp, synthetic construct
  source 1..203: mol_type = other DNA
ggcgcgccagtccttctgcaactggacttctgctgtgagcacagactatattctggcctatgtcttgactccgtattcctgggaaagtgctcgactgagaccttgggagtcttgggaagtccaatgggtagggtagccgaatctgagggctgatccctgagggcactgggcagtaattggggcatgggcgactcggaccgatg

SEQ ID NO: 1419 - DNA, 203 bp, synthetic construct
  source 1..203: mol_type = other DNA
ggcgcgccagtccttcccttgacgaccctcctctctgggccccgcccctcccgcttcggggtcaagccccagagagcgccgcgaaaaccacatttcccagagtgcaccgcgacggcaggggtcctcagaccggcgctcgctcgccggcgccatccctatagagaagaacggaggtacggcctgtggtccgactcggaccgatg

SEQ ID NO: 1420 - DNA, 203 bp, synthetic construct
  source 1..203: mol_type = other DNA
ggcgcgccagtcctggctgggctgctctgtgatggcttccgggaggagggaggtggcctgctgtaggaaaatgctgggtggaagaagggagagaaggctggagaggtaggaaggaactgaagtatctgaagtgacaaggtgggtgtctggactcgtcgggtccccttccatctccctgctgcctccaccgactcggaccgatg

SEQ ID NO: 1421 - DNA, 203 bp, synthetic construct
  source 1..203: mol_type = other DNA
ggcgcgccagtcctgggaggctcaggagggcgagagtcatgacacggaggaactggaggggcaaaagctgaggggccccgaggagggactgagttgaatggccttaggggagagattcttcagaggaggcccctccagccactcagaacttcatcattccaaaaaaggagatccacacagttccagaccgactcggaccgatg

SEQ ID NO: 1422 - DNA, 203 bp, synthetic construct
  source 1..203: mol_type = other DNA
ggcgcgccagtcctcacagccatcttgggatctgggcaagtgagcgagctccttcctcaccgggctgactagcctctcctttccctgtccccctccatcgctgctctgcaggaagccagcccccagggccagtcccggaggggctgatccgcatctacagcatgaggttctgcccctattctcacaggcgactcggaccgatg

SEQ ID NO: 1423 - DNA, 203 bp, synthetic construct
  source 1..203: mol_type = other DNA
ggcgcgccagtcctgttccggcgccggctttggcggaggggtgggacttgcaccggcgtctcttcttctaactgcagtttgtggcagcgccattttgaatgtgcagctgcagcgggcgcctgtatccggtgtccgaggcgaactcagtaagatgatgttaagaggaaacctgaagcaagtgcgcattgcgactcggaccgatg

SEQ ID NO: 1424 - DNA, 203 bp, synthetic construct
  source 1..203: mol_type = other DNA
ggcgcgccagtcctcagcatgttcgagctcattcctctccagcttctctgcagttgggagctgtttctcctgggacactgacccccactggagtagtctctggcccagcagctacacccacagctcagcatcttcgacagtcttcttttgagatacctgatgatgtacctctgccagcaggttgggagcgactcggaccgatg

SEQ ID NO: 1425 - DNA, 203 bp, synthetic construct
  source 1..203: mol_type = other DNA
ggcgcgccagtcctatgtaaatccttgtttttcctggtgaggcaggggaggccatagccacaatgcttaactgcatgcatctaacatggggctggttttaaccccagcgctctgacctaaactgctcagctcccggaaattccaagggacctggtggccttagtctttcaggtggaacggtgtgcgaccgactcggaccgatg

SEQ ID NO: 1426 - DNA, 203 bp, synthetic construct
  source 1..203: mol_type = other DNA
ggcgcgccagtcctaaacgtcaggtatcttttaaatcgcgatagttttcgctgtgtcaggctttcttcggtggagctccgagggtagctaggttctaggtttgaaacagatgcagaatccaaaggcagcgcaaaaaacagccaccgattttgctatgtctctgagctgcgagataatcagacagctaacgactcggaccgatg

SEQ ID NO: 1427 - DNA, 203 bp, synthetic construct
  source 1..203: mol_type = other DNA
ggcgcgccagtcctcctttccagtcacccttggtgccctgtacttcactgtggtcctgaactgaagagctgtgtttttcaggaagacttggccaggccgtgttccgtgtctctggattcaagtcccaggagtcctgaccagagagcaggcatcagtgtttttctgaccgaagttctcatttcctgacacgactcggaccgatg

SEQ ID NO: 1428 - DNA, 203 bp, synthetic construct
  source 1..203: mol_type = other DNA
ggcgcgccagtccttttggctacgctgcagccgcggtgtcggcgagtcctcccgggttgcccccgcgggcgtcagagggagggcgggcgcccgcgtggtgacggcgacgcctgcagcccaaggagcgctccactcgctgccgccggaggggccggtgacctcttggctaccccgcgtcggaggcttagcgactcggaccgatg

SEQ ID NO: 1429 - DNA, 203 bp, synthetic construct
  source 1..203: mol_type = other DNA
ggcgcgccagtcctacatacacatacacatgcacacacacactcatatacacatgcagaagctgtgacacgtgcggaagctgtggtaagtgcatcctccttcagtctcagttctgaaaatagatcatcatggtggcaccaaagagtcacacagatgactgggctcctgggcctttctccagtaagccacgactcggaccgatg

SEQ ID NO: 1430 - DNA, 203 bp, synthetic construct
  source 1..203: mol_type = other DNA
ggcgcgccagtcctctgcgtggaacgattctgtggcgagtgccggccgaaagctaggtccggattgcacgtggagggccgcccgaagggcactctcggacattaacccgcattctggtgggtctagaggaaattgggggacgaagagtggcagcactgacctggtctgggacgtggggagaaggtacccgactcggaccgatg

SEQ ID NO: 1431 - DNA, 203 bp, synthetic construct
  source 1..203: mol_type = other DNA
ggcgcgccagtcctctccggacgggcgacggtagctcgagacccgggactccgcccgcctccccgcgagtatttgaggtccggggcggctccggcgcctctgcccgccgttctgctcgctcgctccccgctctggagtacgtgtctggcttgggagccgctcggacacgctggcttgggtctgccatccgactcggaccgatg

SEQ ID NO: 1432 - DNA, 203 bp, synthetic construct
  source 1..203: mol_type = other DNA
ggcgcgccagtcctggagctggagtccggctgggccgcagccgctgggagaccggcggttgccgtggggaccggtcgggcccctccctcctccggtcccccgccccaggtccttccccaccgagacgcgccgggggaccgcgggcgagtgcagccggtgacccggcgagaggcggcgccgctcccaagcgactcggaccgatg

SEQ ID NO: 1433 - DNA, 203 bp, synthetic construct
  source 1..203: mol_type = other DNA
ggcgcgccagtcctccattggctgctcgttccgccgcaagttgggggcggggttagggcgcctttcgattgcatcagctggtccagccgaggccaagtcccgggcgctagcccacctcccacccgcctcttggctcctctcctctaggccgtcgctttcgggttctctcatcgcttcgtcgttcgccacgactcggaccgatg

SEQ ID NO: 1434 - DNA, 203 bp, synthetic construct
  source 1..203: mol_type = other DNA
ggcgcgccagtcctaggtggacatttccatttgaattaaaagtcctttaggctgggcgtggtgcatggctgtaatctcagcaccttgggaggctgaggcaggaagatcacttgaggccaggcgttggagagcagcctgggcaaggtggcaagaaccttgtctctacaaaaaaaaaagcgtctgccatccgactcggaccgatg

SEQ ID NO: 1435 - DNA, 203 bp, synthetic construct
  source 1..203: mol_type = other DNA
ggcgcgccagtcctggagttcggggaggcacagggtagatggaacgcagctgagaggtctgacaagatgtaccaggtcccactaccactggatcgggatgggaccctggtacggctccgcttcaccatggtggccctggtcacggtctgctgtccacttgtcgccttcctcttctgcatcctctggtccgactcggaccgatg

SEQ ID NO: 1436 - DNA, 203 bp, synthetic construct
  source 1..203: mol_type = other DNA
ggcgcgccagtccttgccagagggcggggccgcaggagggcggggcgcgagcgagagctgggagaaggcagtgagcgagcaggcggcaggcagggtccgtgcggagcaggcgagcgagcgggaagacgcagccaccttcctcaccagccagcccacagcggtttgttccccttctcgggagtgcgccacgactcggaccgatg

SEQ ID NO: 1437 - DNA, 203 bp, synthetic construct
  source 1..203: mol_type = other DNA
ggcgcgccagtcctatgattgttccacataaagtcagaagggaggaaaggcgcacgcgcattggggacttgactctggaaagcgtccagaccaaggtcagcggagagtaggccgtcgctttcgggttctctcatcgcttcgtcgttcgccaatgtttgaggagaaggccagcagtccttcagggaagacgactcggaccgatg

SEQ ID NO: 1438 - DNA, 203 bp, synthetic construct
  source 1..203: mol_type = other DNA
ggcgcgccagtcctgcttggccccccccacagctggcgtccctcggccatgccccaggggacccagccagggggtgggctctagagcgagtggggtggagaggagaaaggacggggccttgggcgcctctgagatgctcccaagtgccagggagggccgagcgaggcgcaggcaaccgggcagcaggccgactcggaccgatg

SEQ ID NO: 1439 - DNA, 203 bp, synthetic construct
  source 1..203: mol_type = other DNA
ggcgcgccagtcctcggaagaacttccttgattagcatagtatcgaccctggggccgcgctgcgaggcggaggttcggtcccagctggggtgaagtgtgcagaccggttgcgattgtggtcagacgcagcacctacttctaatctgaggacccgcgatttacacttttgctgaataggacactgtggacgactcggaccgatg

SEQ ID NO: 1440 - DNA, 203 bp, synthetic construct
  source 1..203: mol_type = other DNA
ggcgcgccagtcctctctcctgaacaaaggcgggaacagctctaggccagagtttctgggatgtgcctcaccgggtctcactgcctgcaaaggtagatggaacgcagctgagaggtctgacaagatgtaccaggtcccactaccactggatcgggatgggaccctggtacggctccgcttcaccatggcgactcggaccgatg

SEQ ID NO: 1441 - DNA, 203 bp, synthetic construct
  source 1..203: mol_type = other DNA
ggcgcgccagtcctccctgctaacaaagggagccacttccttcctctctgcacataccccatgtctcaccacgatgatggagctacagtgggacttggaatccagatgtgtgaaggatggagggttgaagccgcactcagcttcctgccccaccagaggaagtggggagagacggcaggtgcagtgatcgactcggaccgatg

SEQ ID NO: 1442 - DNA, 203 bp, synthetic construct
  source 1..203: mol_type = other DNA
ggcgcgccagtcctttgagcgtctccacccagtaagtgggcaagaggcggcaggaagtgggtacgcaggggcgcaaggcgcacagcctctagacgactcgctttccctccggccaacctctgaagccgcgtcctactttgacagctgcagggccgcggcctggtcttctgtgcttcaccatctacatacgactcggaccgatg

SEQ ID NO: 1443 - DNA, 203 bp, synthetic construct
  source 1..203: mol_type = other DNA
ggcgcgccagtcctggagatatccgccgggggagaatagggttgcaccatcccagaagctgctgttagctcgccggtcctcggcacgccgcccgttcgcccctgcgctgtccgcccttcccctagcgttacttccggtccctcgctgagggggttcgtgcggctcccaggaggcgtgaaccgcggacccgactcggaccgatg

SEQ ID NO: 1444 - DNA, 203 bp, synthetic construct
  source 1..203: mol_type = other DNA
ggcgcgccagtcctcgggcgagcggagttagcagggctttactgcagagcgcgccgggcactccagcgaccgtggggatcagcgtaggtgagctgtggccttttgcgaggtgctgcagccatagctacgtgcgttcgctacgaggattgagcgtctccacccatcttctgtgcttcaccatctacatacgactcggaccgatg

SEQ ID NO: 1445 - DNA, 203 bp, synthetic construct
  source 1..203: mol_type = other DNA
ggcgcgccagtcctccgtctaccaggccccgtcccctcccccggctcctgtcggtcagcactgaaaccccgtccctgctccaggcctccttctctggggtccaaggtcccatacaggcctctgcctcggccgcaggcccttcagtcaccgtcgcctcgtctccctgactgtccgcaggcctgggcagccgactcggaccgatg

SEQ ID NO: 1446 - DNA, 203 bp, synthetic construct
  source 1..203: mol_type = other DNA
ggcgcgccagtcctgacgcgcggggccacactgcccgccccctagcctggcgctgggcctccgggacaagttggctgggtccgggcttggggactgcaacgcggtcttctgtgcttcaccatctacataatgaatcccagtatgaagcagaaacaagaagaaatcaaagagaatataaagaatagttccgactcggaccgatg

SEQ ID NO: 1447 - DNA, 203 bp, synthetic construct
  source 1..203: mol_type = other DNA
ggcgcgccagtcctggtttcattgtgttggccaggctggtctcgaactcctgacctcgtgatccgcccgccttggcctcccaaagtgctaggattacaagtgtgagccaccgcgtccggcctttcaaatggtatttttgattttcctcttccagtccttaaagcagctgatttagaagaatacaaatccgactcggaccgatg

SEQ ID NO: 1448 - DNA, 203 bp, synthetic construct
  source 1..203: mol_type = other DNA
ggcgcgccagtcctcgctgacgtcatcgtgcgtcagagtgagcccggatggggcggcgggcttcgggagcgcccgggctgatccgagccgagcgggccgtatctccttgtcggcgccgctgattcccggctctgcggaggcctctaggcagccgcgcagcttccgtgtttgctgcgcccgcactgcgacgactcggaccgatg

SEQ ID NO: 1449 - DNA, 203 bp, synthetic construct
  source 1..203: mol_type = other DNA
ggcgcgccagtcctcggcgcccccgccttctccggtcccctcctcggagtcattttttcctgttccccctctgccgccctttcctcacgccccgggtgaggcaattctcttggaagcgaaggtgtcggctatgagccggagcctccttccttgaatttctccgtggaggacccgccgcgccccccggccgactcggaccgatg

SEQ ID NO: 1450 - DNA, 203 bp, synthetic construct
  source 1..203: mol_type = other DNA
ggcgcgccagtcctagagggaccgagggccggaagtgacgccagctggcccgcttgaggcgtagggggtggcgctctccgttcggcggcgctcccatggcgcacattaccattaaccagtacctgcagcaggtgtacgaagccatcgacagcagagatggagcatcttgtgcagagttggtgtcttttcgactcggaccgatg

SEQ ID NO: 1451 - DNA, 203 bp, synthetic construct
  source 1..203: mol_type = other DNA
ggcgcgccagtcctcacttctgccgcccctgtttcaagggataagaaaccctgcgacaaaacctcctccttttccaagcggctgccgaagatggcggaggtgcaggtcctggtgcttgatggtcgaggccatctcctgggccgcctggcggccatcgtggctaaacaggtactgctgggccggaaggtcgactcggaccgatg

SEQ ID NO: 1452 - DNA, 203 bp, synthetic construct
  source 1..203: mol_type = other DNA
ggcgcgccagtcctgtgtgaggggaacctgggagggcctcatgggggtccgagcttcgttcgagaacaactgtgagatcggctgctttgccaagctcaccaacacctactgtctggtagcgatcggaggctcagagaacttctacagtgtgttcgagggcgagctctccgataccatccccgtggtgccgactcggaccgatg

SEQ ID NO: 1453 - DNA, 203 bp, synthetic construct
  source 1..203: mol_type = other DNA
ggcgcgccagtcctcgcccctgtttcaagggataagaaaccctgcgacaaaacctcctccttttccaagcggctgccgaagatggcggaggtgcaggtcctggtgcttgatggtcgaggccatctcctgggccgcctggcggccatcgtggctaaacagtgaagtacctggctttcctccgcaagcggcgactcggaccgatg

SEQ ID NO: 1454 - DNA, 203 bp, synthetic construct
  source 1..203: mol_type = other DNA
ggcgcgccagtcctagcagcagcacccgcatccgctgcgggagtccgagccggaaccacacccaagtagctgccctttcctcttctgtcatctcaccgccccaccacagaccgcgttccccgaggaaaccggccgcccacgcccggagcatcctcccctgttgagcgggcgctgacggacccggcggccgactcggaccgatg

SEQ ID NO: 1455 - DNA, 203 bp, synthetic construct
  source 1..203: mol_type = other DNA
ggcgcgccagtcctagtagagtccagagcggggaagcgggcgcctgcgcagagacatagtgaccgtccgctcgccgccccgcctctgccaagccgcgccagcgcagtgaataacgagccagcagagacagcgtctgcgcagccgtggctgaggagcctgtggcggcagcggcgatggaaccagcggagcgactcggaccgatg

SEQ ID NO: 1456 - DNA, 203 bp, synthetic construct
  source 1..203: mol_type = other DNA
ggcgcgccagtcctccactcagagctgcagtagcctggaggttcagagagccgggctactctgagaagaagacaccaagtggattctgcttcccctgggacagcactgagcgagtgtggagagaggtacagccctcggcctacaagctctttagtcttgaaagcgccacaagcagcagctgctgagcccgactcggaccgatg

SEQ ID NO: 1457 - DNA, 203 bp, synthetic construct
  source 1..203: mol_type = other DNA
ggcgcgccagtcctgcgggaggccgcgcaggcgcagtgagtcagtgccggtcggtcttgtgggctgaggggcagcggcttaggctccggcgtctgcaggggtcgccgagctaacccgtggctaggcgagtggggcggggcggccggcaccatgtcgaggcaggcgaaccgtggcaccgagagcaagaacgactcggaccgatg

SEQ ID NO: 1458 - DNA, 203 bp, synthetic construct
  source 1..203: mol_type = other DNA
ggcgcgccagtcctcaaatccaggcctgcgggctcctcccccaggacccccactcgcagtccctcaagcctgtgctcccggaaaggcactgggcgaccgcacccgtggctttctctgggcgaccgggtcccagactccccccagcacagcagagcgcttccctgcccacccgcggaaaccgccccaggcgactcggaccgatg

SEQ ID NO: 1459 - DNA, 203 bp, synthetic construct
  source 1..203: mol_type = other DNA
ggcgcgccagtcctcctctgaggaggcgttgtaagtccgcccagctccccacttgctgtgctctcactcaatgcgaagggaaccaaggtaccagggccaagtgggtccagacatccacacggattctgaaagggcaggtcaagcagactttgtccagccatcagccacggcctctcgacagcaccaagcgactcggaccgatg

SEQ ID NO: 1460 - DNA, 203 bp, synthetic construct
  source 1..203: mol_type = other DNA
ggcgcgccagtcctgagggctggcggcttttctggcgcgggccagggggaggaggagaaaggagctcccgggatcccctcgccccctcccccaactgcccggtgcggctggtgatcgccgagaagggcctggtgtgcgaggagcgggacgtgagcctgccacagagcgagcacaaggagccctggttccgactcggaccgatg

SEQ ID NO: 1461 - DNA, 203 bp, synthetic construct
  source 1..203: mol_type = other DNA
ggcgcgccagtcctcaccatgccgccacattatctccattcctccagtgcccgcctgacactggccctgaatcagggctggagggggcaggcatttctcatttactaaagtgctggatgcagcccttgaggttcggcagaagcagaaagctgcgtcttgaaagcgccacaagcagcagctgctgagcccgactcggaccgatg

SEQ ID NO: 1462 - DNA, 203 bp, synthetic construct
  source 1..203: mol_type = other DNA
ggcgcgccagtcctttatctccattcctccagtgcccgcctgacactggccctgaatcagggctggagggggcaggcatttctcatttactaaagtgctggatgcagcccttgaggttcggcagaagcagaaagctgcggtgagtctggctgtgtcttgaaagcgccacaagcagcagctgctgagcccgactcggaccgatg

SEQ ID NO: 1463 - DNA, 203 bp, synthetic construct
  source 1..203: mol_type = other DNA
ggcgcgccagtcctgctgactgccactaccagccggagccagggcctggtcgagacaactatttttgaggtatctgaggctaccccacagcactctctggcattggcaagactcgtggctgtgacccatgggcctctgaggaggcgttgtaagtccgcccagctccccacttgctgtgctctcactcacgactcggaccgatg

SEQ ID NO: 1464 - DNA, 203 bp, synthetic construct
  source 1..203: mol_type = other DNA
ggcgcgccagtccttctttttgtttgcacccgcctccgacccggaactgctttcttgggaagatggcggctgtgtcggtgtatgctccaccagttggaggcttctcttttgataactgccgcaggaatgccgtcttggaagccgattttgcaaagaggggatacaagcttccaaaggtccggaaaactcgactcggaccgatg

SEQ ID NO: 1465 - DNA, 203 bp, synthetic construct
  source 1..203: mol_type = other DNA
ggcgcgccagtcctagcacctaccagggtcgagctcacacacgtgcctacgacccgccgcggcgcctgcgcggtagcatcgcggagtcggtgctttagtacgccgctggcacctttactctcgccggccgcgcgaacccgtttgagctcggtatcctagtgcacacgccttgcaagcgacggcgccatcgactcggaccgatg

SEQ ID NO: 1466 - DNA, 203 bp, synthetic construct
  source 1..203: mol_type = other DNA
ggcgcgccagtcctgagcccggcctcaggccccgggccgcggagggtgcagcgccgggcctggcctcccgataaagaacaggaaaaagagaaaaaatcagtgagacggcgtcttgctgtgttgcccaggctggcctccaactcctgggctcaagtgatcctctggcatcagcctcctgagtagctgtgcgactcggaccgatg

SEQ ID NO: 1467 - DNA, 203 bp, synthetic construct
  source 1..203: mol_type = other DNA
ggcgcgccagtcctatcggcttccgtaggaaggcgccggccgtggaggcgccacgtcccttgcggcggcgggagagaaatcgcttggacttcggggcggcctcggacggccatggcctttaccctgtactcactgctgcaggcagccctgctctgcgtcaacgccatcgcagtgctgcacgaggagcgcgactcggaccgatg

SEQ ID NO: 1468 - DNA, 203 bp, synthetic construct
  source 1..203: mol_type = other DNA
ggcgcgccagtcctggcagagctggagctggagtaatgtgggtgggggcggcttgggaagaggctgagcccggccaagggagcagagggctgggactggctgggggttgggaggggaggaacgaagcaggaaggctgtcggatcgggggcccagggtgtccgagtgaactgggtgattcagagacacgcgactcggaccgatg

SEQ ID NO: 1469 - DNA, 203 bp, synthetic construct
  source 1..203: mol_type = other DNA
ggcgcgccagtcctacgcagagagaaagttacgaggttcgtggccgcggtttccccaggcagctggcgctggaggcttcggcgtcacgtgctgaaactcgttttcatcttcttggtttcatcttaataccaacgtcatgtctggttctaatggttccaaagaaaattctcacaataaggctcggacgtcgactcggaccgatg

SEQ ID NO: 1470 - DNA, 203 bp, synthetic construct
  source 1..203: mol_type = other DNA
ggcgcgccagtcctgagttcagtgcggctgcgcagtagcgggggtgggcgggagcgcccttccaggagatgggttggctgcagtagtgagaggctgggggtgcggctctttccctgcagtcctgccgaggaagcgtgcgtccctggcgcttccttcttctcttccggcggagagcttgggatgtggtacgactcggaccgatg

SEQ ID NO: 1471 - DNA, 203 bp, synthetic construct
  source 1..203: mol_type = other DNA
ggcgcgccagtcctcctacggtaggatggggaaacctcacagaccacattgtcacccggcctcagctctccgccccggcgctcagagggtaactctcacccacctcgtccgcttctctgaaccagagtgacccaggctgcgctccgccccgctctcctaccccgagttggcacggaggcccggcagcccgactcggaccgatg

SEQ ID NO: 1472 - DNA, 203 bp, synthetic construct
  source 1..203: mol_type = other DNA
ggcgcgccagtcctagcggaagtcacttctcacacgcctttcttattggataccggcttttcatggggccgagcgccgctgggtaggcggaagtagccgcaggcatggcggcggctatgccgcttgctctgctcgtcctgttgctcctggggcccggcggctggtgccttgcagaacccccacgcgaccgactcggaccgatg

SEQ ID NO: 1473 - DNA, 203 bp, synthetic construct
  source 1..203: mol_type = other DNA
ggcgcgccagtcctggaccagagttcagtgcggctgcgcagtagcgggggtgggcgggagcgcccttccaggagatgggttggctgcagtagtgagaggctgggggtgcggctctttccctgcagtcctgccgaggaagcgtgcgtccctggcgcttccttcttctcttccggcggagaggacctaatcgactcggaccgatg

SEQ ID NO: 1474 - DNA, 203 bp, synthetic construct
  source 1..203: mol_type = other DNA
ggcgcgccagtcctgcgggtttccgggtgggaggggccgggaatcggggccgtgaagggaagccctcgagggccggccgggagcccggaaaccgaggtcccccttcggccagttttaatccccccgccctcccctctgccccaggcccggcagccatggcggtggaaggaggaatgaaatgtgtgaagcgactcggaccgatg

SEQ ID NO: 1475 - DNA, 203 bp, synthetic construct
  source 1..203: mol_type = other DNA
ggcgcgccagtcctcgccgaccgagcctgctgctttcttgctactgcttcggcttcccggctaccccccggacggtgaaggcggcccagctgtggatggtcagatagcccttgtctcccgccgccaatctctggcccctagcagcacggagcagacggcggcagcagcagcagcaggcgaggaggaagcgactcggaccgatg

SEQ ID NO: 1476 - DNA, 203 bp, synthetic construct
  source 1..203: mol_type = other DNA
ggcgcgccagtcctgccggtggctggctgcgcacgcgcgccgcctcatttccggtgctctctctcgctgggtcgctcgggtcggcttcggtcgctaccgctcccgctctgccacccccgccaaccgccgctcgggcctccgtcgctgccgcgtcgctttctcgctccttggatcgcacatcctcccagcgactcggaccgatg

SEQ ID NO: 1477 - DNA, 203 bp, synthetic construct
  source 1..203: mol_type = other DNA
ggcgcgccagtcctgccgtcgcggagccgcgcagccctcggagcacgaatatatacagccctgctctgggacacacctccattggatttaaaagacagtcctcgtcagcactgactttcagctatggaatcgacggttgatgatgaagcgccggccgtgtaaatgaagatcgggtgaggagcaggacgcgactcggaccgatg

SEQ ID NO: 1478 - DNA, 203 bp, synthetic construct
  source 1..203: mol_type = other DNA
ggcgcgccagtcctgcagtgggactgattgccgtgggtgtcggggcacagcttgtcctgagtcagaccataatccagggggctacccctggctctctgttgccagtggtcatcatcgcagtgggtgtcttcctcttcctggtggcttttgtgggctgctgcggggcctgcaaggagaactattgtcttcgactcggaccgatg

SEQ ID NO: 1479 - DNA, 203 bp, synthetic construct
  source 1..203: mol_type = other DNA
ggcgcgccagtcctctgcaccaatagctgaggcgttcagggttgtccagggacgctaccctcacgtgtctggttccgagtgctgcgttcggctgtgctgggaagttgcgtagacagtggcctcgagaccctgcctgcctgaggaggcctcggttggatgcgaaggagctgcagcatccaggggacaagcgactcggaccgatg

SEQ ID NO: 1480 - DNA, 203 bp, synthetic construct
  source 1..203: mol_type = other DNA
ggcgcgccagtcctcaggcgggacgggctctcccttgggtgcttagccccgcccccgtcccactctgccctgttgctgtcgcgccgctgctggttgctgtccctggacccctaccatggaggagaccatcaaagatccccccacatcagctgtcttgctggatcactgtcatttctctcaggtcatctcgactcggaccgatg

SEQ ID NO: 1481 - DNA, 203 bp, synthetic construct
  source 1..203: mol_type = other DNA
ggcgcgccagtccttgccagtcccactgcctgcgcgcccacctgggccagtctccgcttgccgcgtcctcccatcccctagtctgcaggcctggtgcccttgaattcacccgcttctgttgcgttggggaccgcgagctgcactgcttcctgcccaagcccaagctcctcgcagcagtaggggacaagcgactcggaccgatg

SEQ ID NO: 1482 - DNA, 203 bp, synthetic construct
  source 1..203: mol_type = other DNA
ggcgcgccagtcctgctcagaggagcagggctgggagcgaggtgctgctggggcagtgtctgggcgggaagccgggccccagggcctgatgtgcctgtgggggcactccacagcccctgcccacaccctctcctccccgcctctgctgttctgctccctgccctgtgccctccacttgcagccagggacgactcggaccgatg

SEQ ID NO: 1483 - DNA, 203 bp, synthetic construct
  source 1..203: mol_type = other DNA
ggcgcgccagtcctactccactagggcacgcaggcgacgagcacactggcagagggcctcccgcagggcccactccccacctggctctcgccccaccatggcccgggaagcaggccaggtttgtgccaggcctgccgtgcccagggggaggaagggctctgtgttctttgcctgtgtctctgtggtgacgactcggaccgatg

SEQ ID NO: 1484 - DNA, 203 bp, synthetic construct
  source 1..203: mol_type = other DNA
ggcgcgccagtcctcccgggtccgcaaagccggtggcgcccggaggctgcacggagagcggtgcccgcgtcagagcctcgccctgtcaccaggctggagtacagtggcgcgatctcggctcactgcaacttccacctgctgggttcaagcaattcttctgacctcagtgaccgaaggaagagaccaagcgactcggaccgatg

SEQ ID NO: 1485 - DNA, 203 bp, synthetic construct
  source 1..203: mol_type = other DNA
ggcgcgccagtcctaaaaatacaaggaaccttgacccgctggtgtacctgttgtcaaagctcacggaagacaaagagactctgcagtacttacaacagaatgcaaaagaaagagctgagcttgcagccgctgctgtgggcagcagtaccaccagcatcaacgtccctgccgcggcctccaagatctcccgactcggaccgatg

SEQ ID NO: 1486 - DNA, 203 bp, synthetic construct
  source 1..203: mol_type = other DNA
ggcgcgccagtcctctggctcgcagtgcctgccgggagccacgtctccgaagaccgatagctgcttcgggattggcgtccgggcggctatctaggggctgctgggaagatggcggactcggtggctagccgatgaggaggccgcggggggaacccggcccccgggccccgagaccgactgagggagcgcgactcggaccgatg

SEQ ID NO: 1487 - DNA, 203 bp, synthetic construct
  source 1..203: mol_type = other DNA
ggcgcgccagtcctgagaggcgcatctgcgcaggcgcccggctcctaagtctacccaggaactgaccctgctctctcctttccctgttagacatgggcactccacagaaggatgttattatcaagtcagatgcaccggacactttgttattggagaaacatgcagattatatcgcatcctatggctcacgactcggaccgatg

SEQ ID NO: 1488 - DNA, 203 bp, synthetic construct
  source 1..203: mol_type = other DNA
ggcgcgccagtcctagatggcgtgcttgttggagaccccaatccgcatgagcgtcctttcgtttttttaaagaaaaagacgactttcacctttcactatgttgctcttgaaccaggaccaggaatgaaagttactgggagataacttcgaaggattttgcaacaaattcgagctgtccgactctgagacgactcggaccgatg

SEQ ID NO: 1489 - DNA, 203 bp, synthetic construct
  source 1..203: mol_type = other DNA
ggcgcgccagtcctcctttgccccggacccgccaccccagagtcaagctgagggcatcggcatgccgcagggaagacgatcaggactgtttttaatcgggcagtcgcgcggatggccttttccctctcgcctccttccgccccgcccccactctcagcccggccgcgctgattgtcctgggtcacatacgactcggaccgatg

SEQ ID NO: 1490 - DNA, 203 bp, synthetic construct
  source 1..203: mol_type = other DNA
ggcgcgccagtcctaagacgggagaaaaggaggggcgtacgcgggcaagatggaggcgactacggctggtgtgggccggctagaggaagaggcgttgcggcgaaaggaacggctgaaggccctacgggagaaaaccgggcgcaaggacaaggaagatggggagccaaagaccaagcatctcagagaagcgactcggaccgatg

SEQ ID NO: 1491 - DNA, 203 bp, synthetic construct
  source 1..203: mol_type = other DNA
ggcgcgccagtcctcccaggccgggtgaggcgttcccggaggtgtccagcagaggacgctgccggcggagacgggaccggaagccgggccgcaggcggccgggcgtattcgccgactcctcccgcttccgctgccgcagccggtcgtaaccaagttgtgtcctgtcagccgctgtccccttcgccgcgcgactcggaccgatg

SEQ ID NO: 1492 - DNA, 203 bp, synthetic construct
  source 1..203: mol_type = other DNA
ggcgcgccagtcctatcacaacttggttcaatgggtagcctcaccatgaaatcacagcttcagatcactgtatcgttacccctgtgagtaaattacattttcgtgtgtggagtcaccagacactgaaatctgatgttttgttgggaactgctgcattagatatttatgaaacattaaagtcaaacaatcgactcggaccgatg

SEQ ID NO: 1493 - DNA, 203 bp, synthetic construct
  source 1..203: mol_type = other DNA
ggcgcgccagtcctatggtaacgaggaggccagtcacaaatagctgggactggcttcctgccggggcggccccagaggctgtcccttgcagacacatgcccctttcacggctccctctcagggttggccagaaggaatttttttttccgctccccctcctggtccctcccatttcctggctcctcctgcgactcggaccgatg

SEQ ID NO: 1494 - DNA, 203 bp, synthetic construct
  source 1..203: mol_type = other DNA
ggcgcgccagtccttgacacctctcctactccttctctttaatgtacagctgagactgggatacccttagactgaaaggaaggacacggctatgtagaaaagaattgactgaaggggaggagtactcgtgaaccccttgcttcagcctcccaatgttctgagagaggaggagccaggcgcagtggctccgactcggaccgatg

SEQ ID NO: 1495 - DNA, 203 bp, synthetic construct
  source 1..203: mol_type = other DNA
ggcgcgccagtcctgcgtgtgtggctgcagcctgcaccgttgctgcccgctgcccaggacgcggggtgggggacaggagccagagtggtgcctcctacagaccaatctgcggccccaaggtggggggccctacagagatgctccgagagccaaggacatgaagaacaagctggggatcttcagacggccgactcggaccgatg

SEQ ID NO: 1496 - DNA, 203 bp, synthetic construct
  source 1..203: mol_type = other DNA
ggcgcgccagtccttctggaggcccttcctgagaagccgtcgccagagttacgtcgcggttttcttaactttagagcctgggggccggagaccctgattgcactcgacctggctctgccctactctctgcgtgacttccactgttcatcaaagaaaaagggttcttttggtcacccaccactggcccccgactcggaccgatg

SEQ ID NO: 1497 - DNA, 203 bp, synthetic construct
  source 1..203: mol_type = other DNA
ggcgcgccagtcctggccccgcggcccgcgcgctcctgggcgggggatgttgtgatggagaagccgcggcggagcccgaaccccgcagcctgagccacctccgtcatctgggcccggggcctcaccgcgcaggagctgccaaggccatgtctgttccatcatcactgagccagtcggccattaatgcccgactcggaccgatg

SEQ ID NO: 1498 - DNA, 203 bp, synthetic construct
  source 1..203: mol_type = other DNA
ggcgcgccagtcctagacgctctgccctggtgagaagggggcgggatgagcttttctctgcagcccagcaccaggctgtgagcccagctggctgggctggaggggctgtgaggagggagggtggaggcaggaggggccgggaatgagcgccatgttctcccaggactttttcctggccattatcctgccgactcggaccgatg

SEQ ID NO: 1499 - DNA, 203 bp, synthetic construct
  source 1..203: mol_type = other DNA
ggcgcgccagtcctggccccaggcagctggggtattccttaggggctgagtctcctggtatccctaagactgggcttggcttaggcactgaggactttttcctggccattatcctgcaggacagcagcgcagattccttctggaaccccaacgccttcgagacggattccgacctgccggctggatggcgactcggaccgatg

SEQ ID NO: 1500 - DNA, 203 bp, synthetic construct
  source 1..203: mol_type = other DNA
ggcgcgccagtcctggtctcagaatatctgggagacctcgggctcttgatctccgagacaccccgtttcgtagtggagaacagtccagatcggggaagtttattttgcccaaagccggttagaggccccctggccctcgattcccagtgcggggctcagagctcccctgaacagcagctgcagcagcccgactcggaccgatg

SEQ ID NO: 1501 - DNA, 203 bp, synthetic construct
  source 1..203: mol_type = other DNA
ggcgcgccagtcctacgctgaactttaggagccagtctaaggcctaggcgcagacgcactgagcctaagcagccggtgatggcggcagcggctgtggtggctgcggcgggtccgggcccatgaggcgacgaaggaggcgggacggcttttacccagccccggacttccgagacagggaagctgaggaccgactcggaccgatg

SEQ ID NO: 1502 - DNA, 203 bp, synthetic construct
  source 1..203: mol_type = other DNA
ggcgcgccagtcctccacgcgcctgccaagccaatcggctaggagcagcgagcggcgcggctgaggcgcggcggccccgtggagcagcgcagtatggcgggcggggcccgggaggtgctcacactgcagttgggacattttgccggtttcgtgggcgcgcactggtggaaccagcaggatgctgcgctcgactcggaccgatg

SEQ ID NO: 1503 - DNA, 203 bp, synthetic construct
  source 1..203: mol_type = other DNA
ggcgcgccagtcctagcacccaaacttaccctgtccaggtggcccacgaagctacccaagacatctctgcacagccctagcctttttggcttcacccactccgttcgggagttggggacccggcctctacattccttaggggaactccagctccaggtctgagagtcactggagctaccagaagcatccgactcggaccgatg

SEQ ID NO: 1504 - DNA, 203 bp, synthetic construct
  source 1..203: mol_type = other DNA
ggcgcgccagtcctaactacagctcccagcatgccccggggcccgcaaccgtccgccgcccggtgcactgtggacgatgagtcagggttaggggcgccaggacgtgggcgtgcaggacgccagagctgggtcagagctcgagccagcggcgcccggagagattcggagatgcaggcggctcggatggccgactcggaccgatg

SEQ ID NO: 1505 - DNA, 203 bp, synthetic construct
  source 1..203: mol_type = other DNA
ggcgcgccagtcctgcatggtaagcaacaggacatatcccagcctcggacatgtctgtatgatccaaggtacccaaagtcagacagagtaaactcaagcctggcactggctttctgccgcttcatgtgctttggaaaaagcaggagaagcaatagcagcaggagtccccagcagctggagccgcaagacgactcggaccgatg

SEQ ID NO: 1506 - DNA, 203 bp, synthetic construct
  source 1..203: mol_type = other DNA
ggcgcgccagtcctgtcactatacagagacagtccatgttggggggcctggccgcggcggcgggaacccggataatgggaaaggagatagaagcagaagcacagaggcccctgaggcaaacatggagacctggccagccaccagcgatgacagcaaagacgatgagctcgcggctcacggcgctcctgcgactcggaccgatg

SEQ ID NO: 1507 - DNA, 203 bp, synthetic construct
  source 1..203: mol_type = other DNA
ggcgcgccagtcctcagccgccgccggcgccgaacttgggctcgggaagccgggggaccgcgtcctgcgccggagcaggggcatggtctagtggcccagtcaggacgcggaaacactccctggaggttctgacccactccctctcagcctccgcctggtctctggtgtagtcgccgccgccagccgcccgactcggaccgatg

SEQ ID NO: 1508 - DNA, 203 bp, synthetic construct
  source 1..203: mol_type = other DNA
ggcgcgccagtcctagaaggaggaaccttttccttctgcagcccctccccaccagcctcattccttagctggggtcagacctggggtcctcactgcagctggcctctggcagcgttctcaggctagccctccctgctgaaaagagaaccgtgtgggactcacaggtgtagtcgccgccgccagccgcccgactcggaccgatg

SEQ ID NO: 1509 - DNA, 203 bp, synthetic construct
  source 1..203: mol_type = other DNA
ggcgcgccagtcctgacataaaaaccgggtgccggcaggcgccagtcgcaggtgtgctgctgaggcgtgagaatggcgtcccgcggccggcgtccggagcatggcggacccccagagctgttttatgacgagacagaagcccggaaatacgttcgcaactcacggatgattgatatccagaccaggatcgactcggaccgatg

SEQ ID NO: 1510 - DNA, 203 bp, synthetic construct
  source 1..203: mol_type = other DNA
ggcgcgccagtccttatgctgtgttcggggctgtctgtcggcgccacagggaatgggggctggggcatggtctagtggcccagtcaggacgcggaaacactccctggaggttctgacccactccctctcagcctccgcctggtctctggtgtagtcgccgccgccagccgccatgggcaaacagaacacgactcggaccgatg

SEQ ID NO: 1511 - DNA, 203 bp, synthetic construct
  source 1..203: mol_type = other DNA
ggcgcgccagtcctggggtcccccccgcaggtactccactctcagtctgcaaaagtgtacgcccgcagagccgccccaggtgcctgggtgttgtgtgattgacgcggggaaggaggggtcagccgatccctccccaaccctccatcccatccctgaggattgggctggtacccgcgtctctcggacagcgactcggaccgatg

SEQ ID NO: 1512 - DNA, 203 bp, synthetic construct
  source 1..203: mol_type = other DNA
ggcgcgccagtcctccactgcgccagcgctgagcctgccagggctggggctggggatcaccttgggatgatggtgtcagtcccagggggcaggagatcgagtgtcctctgagctggcgactgggcctgtagaagggaaccggcatttgtggagtgtctactgagtgccaagcacgtggtgaggtgtgtcgactcggaccgatg

SEQ ID NO: 1513 - DNA, 203 bp, synthetic construct
  source 1..203: mol_type = other DNA
ggcgcgccagtcctgtcaactacagctgttctccttcttttcccagtatcctttgggtgcagtgagacaccaggagagctgctgctttgggggatggacaggggcagcaggaatgcctttgtgttttcgcagtgaacctccttggcctgggcgaagctgtgtggaccaagcaagtcaggagtgtggcccgactcggaccgatg

SEQ ID NO: 1514 - DNA, 203 bp, synthetic construct
  source 1..203: mol_type = other DNA
ggcgcgccagtcctagcggcctttctctgttcgcgatgtgacgtaacgcgcctgcggactgggcccagcttgtcctctatgacttacccagaaggcaacgcttctctttctggtcaaaatggctggtaagcaggccgtttcagcatcaggcaagtggctggatggtattcgaaaatggtattacaatgcgactcggaccgatg

SEQ ID NO: 1515 - DNA, 203 bp, synthetic construct
  source 1..203: mol_type = other DNA
ggcgcgccagtcctcaactcgggaatccccggtgactttgtcgcagcctccgttaccctgtgatctgcaagtcctgggagacgcacagctaagatgcccggacatcctggaagctgggaaatggtattgctgtctctaagccagacctgatcacctgtctggagcaagaaaaagagccttgggagcctcgactcggaccgatg

SEQ ID NO: 1516 - DNA, 203 bp, synthetic construct
  source 1..203: mol_type = other DNA
ggcgcgccagtcctggcttccgggatgtggcggggcctttgtctctggctgcagttggagctctgcgtctcgtcttcgttcttctgtgtcctctgctgctagaggtccagcctctgtggctctgtgacctgcgggtattgggggatccacagctaagacgccaggaccccccggaagcctagaaatggcgactcggaccgatg

SEQ ID NO: 1517 - DNA, 203 bp, synthetic construct
  source 1..203: mol_type = other DNA
ggcgcgccagtccttttgtctccagctcccgctagaccttgggacccgcctctgcttttccgcgttctccaactcgggaatccccggtgactttgtcgcagcctccgttaccctgtgatctgcaagtcctgggagacgcacagctaagatgcccggacatcctggaagctgggaaatgggaccattgacgactcggaccgatg

SEQ ID NO: 1518 - DNA, 203 bp, synthetic construct
  source 1..203: mol_type = other DNA
ggcgcgccagtcctcgagccaggggcggtgcaagccccgcccggccctacccagggcggctcctccctccgcagcgccgagacttttagtttcgctttcgctaaaggggccccagacccttgctgcggagcgacggagagagactgtgccagtcccagccgccctaccgccgtgggaacgatgctgtacgactcggaccgatg

SEQ ID NO: 1519 - DNA, 203 bp, synthetic construct
  source 1..203: mol_type = other DNA
ggcgcgccagtcctttcttctgtgtcctctgctgctagaggtccagcctctgtggctctgtgacctgcgggtattgggggatccacagctaagacgccaggaccccccggaagcctagaaatggtattgctgtctctaagccagacctgatcacctgtctggagcaagaaaaagagccttgggagcctcgactcggaccgatg

SEQ ID NO: 1520 - DNA, 203 bp, synthetic construct
  source 1..203: mol_type = other DNA
ggcgcgccagtcctacccagcctccctccacccccagaaaattgcttccatggaaatgcctctctaaaacatgaacttttcctagagactacgccagtctctcttcccacttgctgaccctttgctacctatgtgcccggttttactctcatttgggtaaggtcgaggctggctctggaagcagcacccgactcggaccgatg

SEQ ID NO: 1521 - DNA, 203 bp, synthetic construct
  source 1..203: mol_type = other DNA
ggcgcgccagtccttcccccgccccaggtccttccccaccgagacgcgccgggggaccgcgggcgagtgcagccggtgacccggcgagaggcggcgccgctcccaagatgtcgcagacggccatgtccgaaacctagggtccgtgacgagaagttattaccgaggcgcggccggggctctcctcgtctcgactcggaccgatg

SEQ ID NO: 1522 - DNA, 203 bp, synthetic construct
  source 1..203: mol_type = other DNA
ggcgcgccagtcctcgtcccgggaccgcagactcttagggcccctctctttggccatctgcctctaggtcccatcctggggcctgaagcgcttgttctctgcgctgggaaaaggggaacgatggagcgatccagcacccaaacttaccctgtccaggtctgagagtcactggagctaccagaagcatccgactcggaccgatg

SEQ ID NO: 1523 - DNA, 203 bp, synthetic construct
  source 1..203: mol_type = other DNA
ggcgcgccagtccttcccttgcttgttctcactctgtgcccccggcaacgaccccgcgcgcctacactcccgtgccgcctcagctactagtccgcaacttctagccccaaaacgctggagctcagaacccagctcaggcaagactaactcggtgttgctcctcccggcgctgacttcgaggcccggctcgactcggaccgatg

SEQ ID NO: 1524 - DNA, 203 bp, synthetic construct
  source 1..203: mol_type = other DNA
ggcgcgccagtcctgagtttttattattacagagaagaaggaaactcacttcctgtcgtcgcagagcacagcctagttctgatgcagaggggactgttttcagatggagacactagtaagaagaagaaaaatgtcaccatgcgatccatcaagaccacccgggaccgagtgcctacatatcagtacaacgactcggaccgatg

SEQ ID NO: 1525 - DNA, 203 bp, synthetic construct
  source 1..203: mol_type = other DNA
ggcgcgccagtcctcctcgcggctcgcggcggccgacggttcctgggacacctgcttgcttggcccgtccggcggctcagggcttctctgctgcgctcccggttcgctggacgggaagaagggctgggccgtcccgtcccgtccccatcggaaccccaagtcgcgccgctgacccgtcgcagggcgagcgactcggaccgatg

SEQ ID NO: 1526 - DNA, 203 bp, synthetic construct
  source 1..203: mol_type = other DNA
ggcgcgccagtcctcatttggggagaatgagggagaaaagaacgggcattccgagccaagagcactgcatgagcaaggagttgggaggttgcttacttgttgaacatatttgttgcgtatttgcatatttgctaaacaggttttcgtaacaccccagggcctgtaaggtttggtgtttccctttcaagcgactcggaccgatg

SEQ ID NO: 1527 - DNA, 203 bp, synthetic construct
  source 1..203: mol_type = other DNA
ggcgcgccagtcctcgcgacttttgctttacccttctgctgtgctactgctgtcgcgagacttcctgctcatctgccgctccctttgccgccgccttagcccgggacccgaacccagcctctcccctacccgaacaccggccccggctccaccgaggcccgggtcccccagcccgtctcgccgccgcccgactcggaccgatg

SEQ ID NO: 1528 - DNA, 203 bp, synthetic construct
  source 1..203: mol_type = other DNA
ggcgcgccagtcctcgaacgcagcttccccaaggtgcaggcgcggtgaaaccatcgagacggagggccagagagtcacggcggtgagagggctgagtgacgggttaccccaaaccatgtggctggaggcgcgagctggggttttcgtaacaccccagggcctgtaaggtttggtgtttccctttcaagcgactcggaccgatg

SEQ ID NO: 1529 - DNA, 203 bp, synthetic construct
  source 1..203: mol_type = other DNA
ggcgcgccagtcctagttctcaggctcacattcccaccacccacctctgagcccagccctccctagcatcaccacttccatcccattcctcagccaagagccaggaatcctgattccagatcccacgcttccctgcctccctcaggtcccagctcttgctcctgcctgtttgcctggaaatggccacgcgactcggaccgatg

SEQ ID NO: 1530 - DNA, 203 bp, synthetic construct
  source 1..203: mol_type = other DNA
ggcgcgccagtcctcctttccccttggggccctgtccttcccagtcttgccccagcctcgggaggtggtggagtgacctggccccagtgctgcgtccttatcagccgagccggtcccagctcttgctcctgcctgtttgcctggaaatggccacgcttctccttctccttggggtgctggtggtaagccgactcggaccgatg

SEQ ID NO: 1531 - DNA, 203 bp, synthetic construct
  source 1..203: mol_type = other DNA
ggcgcgccagtcctacctaggcaagaagctgcttctctgccaacagctcctcttcggcctccgtcacagccacctggaccctaccctttcgcgactgctgctgctgctgcccggacgtggaagcagcaagaggcgcttggtcaagacacactgacggtgcatatcttttaccatatttaatactacttcgactcggaccgatg

SEQ ID NO: 1532 - DNA, 203 bp, synthetic construct
  source 1..203: mol_type = other DNA
ggcgcgccagtcctattttttgataattggcctcgaccctcctcacctactccttccttagccaaatctactgagaaaagacttggagggggactctccctccacccctccgtgggcaaactcctgacggactgtaagaccttggccgccctctcgcctggcctgggtccctcgaatgaatgtacatccgactcggaccgatg

SEQ ID NO: 1533 - DNA, 203 bp, synthetic construct
  source 1..203: mol_type = other DNA
ggcgcgccagtcctccggcatgccctgggcttccggtgacctctggcccttttctgtcgtccgctctctctgcctagcgtgctcgctcgctcattgctttccttccctccctcggtcttccttcgcacgctgtttggtgattgtggcgctcgcgacagacagggaggcggtggcagaggacacttgtccgactcggaccgatg

SEQ ID NO: 1534 - DNA, 203 bp, synthetic construct
  source 1..203: mol_type = other DNA
ggcgcgccagtcctgcggggccggcagctgaactatgtgctcttcagggcgggcaccgtgttgcattcatctttgtacccccagcatctagcagtgttggcatgtagtaggcactcaagaaatgtgtgttgaatgaacgatgcctgtgacaagcaagcggactttattctttcctgacccttgctcctcgactcggaccgatg

SEQ ID NO: 1535 - DNA, 203 bp, synthetic construct
  source 1..203: mol_type = other DNA
ggcgcgccagtcctgctccacctcgtccgtggccctgcccacccaggccgcaagagctgccgggacggtccccatcttcttggagcgctttaggctggccggcggcgctgggaggtggagtcgttgctgttgctgtttgtgagcctgtggcgcggcttctgtgggccggaaccttaaagatagccgcacgactcggaccgatg

SEQ ID NO: 1536 - DNA, 203 bp, synthetic construct
  source 1..203: mol_type = other DNA
ggcgcgccagtcctaggaaggtagtgacgtcataggtaaacaggctctgtatccgtggcagcggccgtggcaggctggctgggtaccggctgtcgctgacccaggagaagctgcctgtctacatcagcctgggctgcagcgcgctgccgccgcggggccggcagccatggccaaggacatcctgggtgcgactcggaccgatg

SEQ ID NO: 1537 - DNA, 203 bp, synthetic construct
  source 1..203: mol_type = other DNA
ggcgcgccagtccttaatatggaggagcttccggcagcccccggcggctgaaagccggggcagaagtgctggtctcggtcgggattccgggcttggtcccaccgaggcggcgactgcggtaggagggaagaggttttggacgcgctggcctcccgccgctgtgcattgcagcattatttcagttcaaacgactcggaccgatg

SEQ ID NO: 1538 - DNA, 203 bp, synthetic construct
  source 1..203: mol_type = other DNA
ggcgcgccagtcctggctgggactggctgagcctggcgggaggcggggtccgagtcaccgcctgccgccgcgcccccggtttctataaattgagcccgcagcctcccgcttcgctctctgctcctcctgttcgacagtcagccgcatcttcttttgcgtcgccagccgagccacatcgctcagacacccgactcggaccgatg

SEQ ID NO: 1539 - DNA, 203 bp, synthetic construct
  source 1..203: mol_type = other DNA
ggcgcgccagtcctagcctcgccccgttcgcctcagctacaacaaatcatcgtcaacctgttccaccttctccagtctggtagcaaaaaggggtgtctcagaatctccggcctgtgaaactgtgaggggattcggccaagacgtcctcttccctctgcctcccacccaggccactcttcacctccacccgactcggaccgatg

SEQ ID NO: 1540 - DNA, 203 bp, synthetic construct
  source 1..203: mol_type = other DNA
ggcgcgccagtccttgacagaaacggagggtgtgtccaaagttttgaggacggccgagcggcgctccaaaacccgtcctcacagcctcgccccgttcgcctcagctacaacaaatcatcgtcaacctgttccaccttctccagtctggtagcaaaaaggggtgtctcaggccactcttcacctccacccgactcggaccgatg

SEQ ID NO: 1541 - DNA, 203 bp, synthetic construct
  source 1..203: mol_type = other DNA
ggcgcgccagtcctccagcgagctacgcaagcaatcctggcccagccgagcttgcttccccaaatcccgtaatccttgaccttattcccccaaagaagcggcctcccgggaaggagcgccctggcggagaagactcgaacggctcccacagccgggcgttgggggaaaggccactcttcacctccacccgactcggaccgatg

SEQ ID NO: 1542 - DNA, 203 bp, synthetic construct
  source 1..203: mol_type = other DNA
ggcgcgccagtcctgagttgcggcgatgggcggggcaggcgcgcggggattggcgggatgccgcgcgccgcgcgtgaacctccttggcctgggcgaagctgtgtggaccaagcaagtcaggagtgtggccatgttttctgagcaggctgcccagagggcccacactctactgtccccaccatcagccacgactcggaccgatg

SEQ ID NO: 1543 - DNA, 203 bp, synthetic construct
  source 1..203: mol_type = other DNA
ggcgcgccagtcctttccttttctctttttggatgaccgctacaggtatcctttgggtgcagtgagacaccaggagagctgctgctttgggggatggacaggggcagcaggaatgcctttgtgttttcgcagtgaacctccttggcctgggcgaagctgtgtggaccaagcaagtcaggagtgtggcccgactcggaccgatg

SEQ ID NO: 1544 - DNA, 203 bp, synthetic construct
  source 1..203: mol_type = other DNA
ggcgcgccagtccttattcccccaaagaagcggcctcccgggaaggagcgccctggcggagaagactcgaacggctcccacagccgggcgttgggggaaagaatctccggcctgtgaaactgtgaggggattcggccaagacgtcctcttccctctgcctcccacccaggccactcttcacctccacccgactcggaccgatg

SEQ ID NO: 1545 - DNA, 203 bp, synthetic construct
  source 1..203: mol_type = other DNA
ggcgcgccagtcctcaggacccgggctttctgctgtacagacttctcgtgggcagcctcccctcggaactcgggcatcatggcctcaggcccagccaccatcagtcacgtcactcctgggactgaggaggcaggggagggataaggggcagagatggaggccccactccccgaggttgcctagacaaccgactcggaccgatg

SEQ ID NO: 1546 - DNA, 203 bp, synthetic construct
  source 1..203: mol_type = other DNA
ggcgcgccagtcctcctgaccacgcccacgagccggctcgaacacgcccgcgccgctgactggcgggtggggttgtcgacacgttcaacccgttctgctggctcgagaacgaagtaggccgtctcgctctgggtctccaggcccgcgaccgtccgccagtcgtcccgaggccactcttcacctccacccgactcggaccgatg

SEQ ID NO: 1547 - DNA, 203 bp, synthetic construct
  source 1..203: mol_type = other DNA
ggcgcgccagtcctccaccccgaccccagtagcgctgggcctaggagcactcgggagttgctcagtggctctgcaccgctggcgcgggaaggggagaaaggggctgccagaggcgggaatttggtccccacgcgctgctccagggacgagaagccagggaccggcggttctgggagcagctgtgctggcgactcggaccgatg

SEQ ID NO: 1548 - DNA, 203 bp, synthetic construct
  source 1..203: mol_type = other DNA
ggcgcgccagtcctccgtcctcttccgcttggccccagaaagtttcggttctgcccggcggtggacccacgagcgcgtgccaccatggagtctgaccactgctgagcagacagccaccgagggccgaaattctgagccttcctctggacccaggcaggagacatacagacaagaaaggcaaactcacccgactcggaccgatg

SEQ ID NO: 1549 - DNA, 203 bp, synthetic construct
  source 1..203: mol_type = other DNA
ggcgcgccagtcctgattccgtagagacactcctccgctgcctgagtcctcggcgaacatggcggcccccgagtcagggccggctttgagtccaggcactgcagagggtgaggaggagacgattctctatgacttgttggtcaacaccgagtggccaccggagactgaagtacagcctagaggcaacccgactcggaccgatg

SEQ ID NO: 1550 - DNA, 203 bp, synthetic construct
  source 1..203: mol_type = other DNA
ggcgcgccagtcctgaacggaatgacgtcatcgcttgggagctgctgcaggatggagtggaaagctgctgctgatggcattgtttttgtggcagcaagctgaatgacagatcctcactacaaagatacccctttggcccccgtgtaggcctccttggttcgggtgtttcaccatgccagcacagcgcccgactcggaccgatg

SEQ ID NO: 1551 - DNA, 203 bp, synthetic construct
  source 1..203: mol_type = other DNA
ggcgcgccagtcctagtatgcaggtcgctgcagggacccgaggcgacacgcgcctgcaggaggtggcactcctgccgcagctcttcgatctgcttgtccttggccagcggcgcgctcgcctgctccgacaggtcccgagcgcgctggcgggcaaagacttggcacagctccaggccggcgcaactctccgactcggaccgatg

SEQ ID NO: 1552 - DNA, 203 bp, synthetic construct
  source 1..203: mol_type = other DNA
ggcgcgccagtcctcggtgatcaggttcccctctgctgattctgggccccgaaccccggtaaaggcctccgtgttccgtttcctgccgccctcctccgtagccttgcctagtgtaggagccccgaggcctccgtcctcttcccagaggtgtcggggcttggccccagcctccatcttcgtctctcaggcgactcggaccgatg

SEQ ID NO: 1553 - DNA, 203 bp, synthetic construct
  source 1..203: mol_type = other DNA
ggcgcgccagtccttttgtccgccctgtgttgtttaaaggggatagacgaccttggagcgccccgccccctcccgccaaggaaggaccccattggctctccccggaggcttcactctcattggtcagcgagtgaatgccgacctgcagactggggcctaagtttcttttagtttccggtgtctctgcacgactcggaccgatg

SEQ ID NO: 1554 - DNA, 203 bp, synthetic construct
  source 1..203: mol_type = other DNA
ggcgcgccagtcctctgcctcgctggtccgaattcggtggcgccacgtccgcccgtctccgccttctgcatcgcggcttcggcggcttccacctagacacctaacagtcgcggagccggccgcgtcgtgagggggtcggcacggggagtcgggcggtcttgtgcatcttggctacctgtgggtcgaagcgactcggaccgatg

SEQ ID NO: 1555 - DNA, 203 bp, synthetic construct
  source 1..203: mol_type = other DNA
ggcgcgccagtcctcatcctactaaagccctgggaaaagagacaaatggtgaagaggagaatgaaaggttgcaggagggagctcctgttttagccctgccacctacctgggggccctctggctaccagtgtccttggaggggcttccttgctgcttctcccactaaggagctctggagccttaggacccgactcggaccgatg

SEQ ID NO: 1556 - DNA, 203 bp, synthetic construct
  source 1..203: mol_type = other DNA
ggcgcgccagtccttgatgccatcatcccctctttcccctgcaggaagtggcagtgaagctagaatctcagaaggccaggcatccccagttgctgtacgagagcaagctctataagattcttcaaggtggggttggcatcccccacatacggtggtatggtcaggaaaaagactacaatgtactagtccgactcggaccgatg

SEQ ID NO: 1557 - DNA, 203 bp, synthetic construct
  source 1..203: mol_type = other DNA
ggcgcgccagtcctggtgacagtggggtccaggagagtctcaaaatcctaagctttcagtatttgttattgtgaaagaagttaattcacctgaaacagaggaggggcaacctgagttatcagaaagtgacttcctggccttcccttctttactgatcagaggcacacaaagcgtagtttctaagctgacgactcggaccgatg

SEQ ID NO: 1558 - DNA, 203 bp, synthetic construct
  source 1..203: mol_type = other DNA
ggcgcgccagtcctacacccagtgcgcatgcgcagcaccccggcccggaaacagcgcggggtccgctatggcggcggcagccgagggcgtactggcgacccggagtgatgagcccgcccgagacgatgccgccgtggagacagctgaggaagcaaaggagcctgctgaagctgacatcactgagctctcgactcggaccgatg

SEQ ID NO: 1559 - DNA, 203 bp, synthetic construct
  source 1..203: mol_type = other DNA
ggcgcgccagtccttttcacgacaacttccggaagaggtcgccatggcttcccgggaggaggtactcgccttacaagctgaagttgcccaacgtgaggaggaattgaattcgctgaagcagaagctggcgtcggctcttttggctgagcaggaaccgcagccagaacggctggttccggtgtcgccgccgactcggaccgatg

SEQ ID NO: 1560 - DNA, 203 bp, synthetic construct
  source 1..203: mol_type = other DNA
ggcgcgccagtcctctctgacttgacataacttcccatccagccaggagtctgcactcttcagtctttgcaggcagtagcagaatcccatggtagccaggtgggtgaaggggagcgaggacgttctacctgccttgaagaagacacctgacctgcggagtgagtgaccagtgtttccagagcctggcacgactcggaccgatg

SEQ ID NO: 1561 - DNA, 203 bp, synthetic construct
  source 1..203: mol_type = other DNA
ggcgcgccagtcctgcggagtgagtgaccaggaatgtgggggaaatttatgtcagtcatcaggcaggtactagaagatgctaggggcctcacagacagcttgttcccggctgttaacatggagcagagcgttccctggggctgagcatgggagcccagcacttcttatagtgtttccagagcctggcacgactcggaccgatg

SEQ ID NO: 1562 - DNA, 203 bp, synthetic construct
  source 1..203: mol_type = other DNA
ggcgcgccagtcctagaaaacccggcgtccggaagcccgtgctttctttgacgcaagggctcgagacgcagccgccgtcggccgagcgcccggctagaagcgacaccagacggagcctccggagttcctccgcccccacctcgccgggtcctggagccgcagtcctcccagctgccctcctcgtggcccgactcggaccgatg

SEQ ID NO: 1563 - DNA, 203 bp, synthetic construct
  source 1..203: mol_type = other DNA
ggcgcgccagtcctttttggctgttctgaagagtgttactgtgaacattcatgcacaaatttttatgtggaggcagtagcagaatcccatggtagccaggtgggtgaaggggagcgaggacgttctacctgccttgaagaagacacctgacctgcggagtgagtgaccagtgtttccagagcctggcacgactcggaccgatg

SEQ ID NO: 1564 - DNA, 203 bp, synthetic construct
  source 1..203: mol_type = other DNA
ggcgcgccagtcctgaggccgtcccgtgatgccccgcgccccggccgctctggcctgcaacgtgtctctggggcggaggcagcggcagtggagttcgctgcgcgctgttgggggccacctgtcttttcgcttgtgtccctctttctagtgtcgcgctcgagtcccgacgggccgctccaagcctcgaccgactcggaccgatg

SEQ ID NO: 1565 - DNA, 203 bp, synthetic construct
  source 1..203: mol_type = other DNA
ggcgcgccagtccttcggggccgcagagggggcggggcgggacgtccggggagtgcgcacgcatcctgcccgcggcgcgcgcgcaggtcggtgcgtctgtcgggggcgcgctcgggtacctgtaccccacgtagtcgccggttaccgatcggactaagttccagtggtgatttacaagtcaagttaaacgactcggaccgatg

SEQ ID NO: 1566 - DNA, 203 bp, synthetic construct
  source 1..203: mol_type = other DNA
ggcgcgccagtccttctaggagacaggggccacggggagagcacagccacccggcgcgaagagccctctgtaccccgcttcctcttgaggccctgggaccgtccaggaaatgtctgggagcccgcctgcggagggcatagcgccgaccctcgctccccgcccaggacccgaatgaacctggagagcggcgactcggaccgatg

SEQ ID NO: 1567 - DNA, 203 bp, synthetic construct
  source 1..203: mol_type = other DNA
ggcgcgccagtcctatcttccgtcccaactgctagtggctgagtccctggcggggcgcggcggtggaaggtgtcgcgtacgggcttcccgagctgacgtggcttgaattgggaggggggcagctggagcctcaggcggcagcgcttctagaaatgctgagccgattatcaggattagcaaatgttgttcgactcggaccgatg

SEQ ID NO: 1568 - DNA, 203 bp, synthetic construct
  source 1..203: mol_type = other DNA
ggcgcgccagtccttacgagttggcccggagcaaggcggcccaggacaggcaggggctgcacgcggtgaagaaaccaagacgcagagaggccaagccccttgccttgggtcacacagccaaaggaggcagagccagaactcacaaccaggcagtcacccgcagggccaaggtggctcccgctgagaggcgactcggaccgatg

SEQ ID NO: 1569 - DNA, 203 bp, synthetic construct
  source 1..203: mol_type = other DNA
ggcgcgccagtcctgtctcctccgcgctccgccacagccggccgacaccacaccagccggggagccgccgccgccgccgccacctctgagcagccggctgggagcgagagccgacagctagtctgcaagccaccgctgtcgccatggggagccgcgtctcgcgggaagacttcgagtgggtctacacccgactcggaccgatg

SEQ ID NO: 1570 - DNA, 203 bp, synthetic construct
  source 1..203: mol_type = other DNA
ggcgcgccagtcctgtcattcacccgcgccacccggaagccgcggttcctaccaaccgttcttattgctggcggcctgaggagcccatcatggcgacgccccctaagcggcgggcggtggaggccacgggggagaaagtgctgcgctacgagaccttcatcagtgacgtgctgcagcgggacttgcgacgactcggaccgatg

SEQ ID NO: 1571 - DNA, 203 bp, synthetic construct
  source 1..203: mol_type = other DNA
ggcgcgccagtcctcgcggggcggggctccagagccgcaggtctgggctgcagtaggtcccggcaaccgcaggctcgcggcgggcgctgggcgcgggatccgactctagtcgtaatggaggcgggcggctttctggactcgctcatttacggagcatgcgtggtcttcacccttggcatgttctccgccgactcggaccgatg

SEQ ID NO: 1572 - DNA, 203 bp, synthetic construct
  source 1..203: mol_type = other DNA
ggcgcgccagtcctggaggcgtcggggctgcgccgtacaacttccggctgtaaagatggcggcttcctagtgagtcggcggctgatttagaaggaggttcaggctacggtgagccgaagccacacaggagccatggaagtggcagagcccagcagccccactgaagaggaggaggaggaagaggagcacgactcggaccgatg

SEQ ID NO: 1573 - DNA, 203 bp, synthetic construct
  source 1..203: mol_type = other DNA
ggcgcgccagtccttcccgcagcttccctagattaggcttgggaggcaagaggaggcctcctgacctttcacactgcctttttaatattaagatgaagtcacactccacaactttcttccagccaggcccagacatgtccgtccttgtaagttaaaagcttccatgggagccttccttcctaatcaagcgactcggaccgatg

SEQ ID NO: 1574 - DNA, 203 bp, synthetic construct
  source 1..203: mol_type = other DNA
ggcgcgccagtcctaacgcagctgagattactcccagccactaaggacgaagaggtggggcggtggcgtcccacgcctcgtgcgacagtgggcggggctttgttgcctgagtaaccgtatgatggtggtggtggtggtgtcttcctgtctcaacgatacctattttctagtgctgagatcctgagacacgactcggaccgatg

SEQ ID NO: 1575 - DNA, 203 bp, synthetic construct
  source 1..203: mol_type = other DNA
ggcgcgccagtcctgagccaaccgagggcgttcctgtcggggctgcagcggcgggagggagcccagtggaggcgccctcccgaagcgccactgcccatgctgaccacccagccctccggctgctgatgtcatgagtaacaccactgtgcccaatgccccccaggccaacagcgactccatggtaatgtcgactcggaccgatg

SEQ ID NO: 1576 - DNA, 203 bp, synthetic construct
  source 1..203: mol_type = other DNA
ggcgcgccagtcctgtgaccccaggccctggtcactccatgctttggagggtgcttttgtcaaagaggcctcctttccctcacccagagctggatttccaagaggctcccatacctagctgccctggcagactcccagggaggaaaaacagcgtggccttggcagctgccccgaggaaggagcccacacgactcggaccgatg

SEQ ID NO: 1577 - DNA, 203 bp, synthetic construct
  source 1..203: mol_type = other DNA
ggcgcgccagtcctcctctcggcgccgccgcagtgcgcagaacagctctggtcctcacagccagtgcaccggaggggcgcgctcccgagctggcgcagtttcccagcgcggtgcccgcccctcatcctcctccagtctccctcccctcgccgactgccgccccaggctccgccatggggaatgtgccacgactcggaccgatg

SEQ ID NO: 1578 - DNA, 203 bp, synthetic construct
  source 1..203: mol_type = other DNA
ggcgcgccagtcctcggctagcggccccacagcccctgctgactcaaaacaactgagttgtaagacgttcatcgccgtgttatccttgagtaaagaatgaactctggaagcccagccagggacaatgcaccttcacagagattctgcactaatctgagtgaaggtctaaggtttggaatctccccctccgactcggaccgatg

SEQ ID NO: 1579 - DNA, 203 bp, synthetic construct
  source 1..203: mol_type = other DNA
ggcgcgccagtcctagtgtgctctacgtggggcggggctcaggtgcggacgccgccggttgtcctcttcgctgctccgtagtgacggggattgttgtgttgcagaaatccggcaatcgacctgaggacttgcgagccgctcagctcccgggacgtttggagctgctgctaaataatttctgctcagcccgactcggaccgatg

SEQ ID NO: 1580 - DNA, 203 bp, synthetic construct
  source 1..203: mol_type = other DNA
ggcgcgccagtcctcccgggacgtttggtgcgtcttctaagggcgtgggcgagtttacgcgggccagttgttgctggtcgcatgggagctgctgctaaataatttctgctcagccatgtcgccggctccagatgcagccccggctcctgcgtcgatctccctgtttgacctcagcgcggatgctccggcgactcggaccgatg

SEQ ID NO: 1581 - DNA, 203 bp, synthetic construct
  source 1..203: mol_type = other DNA
ggcgcgccagtcctagttaagcaagccgggtctggctttgggccctgggccttccagccggggactctgcgcctgcgcccgcctggccgccgcccgctctcccggcgcggcagctgtctgggctgctgcgcgccgcctaggtgtctgggcgatctatgggcaagagcaagggccacgatgacagattacgactcggaccgatg

SEQ ID NO: 1582 - DNA, 203 bp, synthetic construct
  source 1..203: mol_type = other DNA
ggcgcgccagtcctccctcccctcccgctctgtgccccgccgggcggggaccgtgggagccgcggacaagcccaaggccggagcggttccaggaggaccctggtctgcacctgtggttgccaggtaggtggatgtgagagaccctacccttctggttctctagaagccatcccatcgccgctagcatccgactcggaccgatg

SEQ ID NO: 1583 - DNA, 203 bp, synthetic construct
  source 1..203: mol_type = other DNA
ggcgcgccagtcctcgagtgccggggagttcctggggagccgggcttctcttttggcccccagcgtgttgaccgagcccgcttcgcacagcccttcctagggtgtggagagcgggccccgccctgaaggggcaccgtgggctggggggcctgttttggagcaggcaccggtggccgagctccgtgacccgactcggaccgatg

SEQ ID NO: 1584 - DNA, 203 bp, synthetic construct
  source 1..203: mol_type = other DNA
ggcgcgccagtcctcgcagcaggcggctggggcggcggctggggcagcggctgcagcagcggcggacgctctgcattacccagtcttgcgtcctcggcaggcgcccgaagctgagtgcgcatcctctaccgcacccaagcttcgtctgtctcgtcaagctcttcatgctgcccaactaaaaggaaaaccgactcggaccgatg

SEQ ID NO: 1585 - DNA, 203 bp, synthetic construct
  source 1..203: mol_type = other DNA
ggcgcgccagtcctggggcgtgctcgcggctataaggggcggaggctgggcggcgttgctctgcgctctgcggctgacggcgcttttgtctccgggtccagaggcctttcagaaggagaaggcagctctgtttctctgcagaggagtagggtcctttcagccatgaagcatgtgttgaacctctacctcgactcggaccgatg

SEQ ID NO: 1586 - DNA, 203 bp, synthetic construct
  source 1..203: mol_type = other DNA
ggcgcgccagtcctcagatttgactgagagccgtaaagcgcggctggctctcgttttccggataacgactacagctccgactgtcagtgccggccttcctcgtgtgaggggatctgccggacccctgcaaattcaatttctttcccattccgggcccttccctatcgtcgcccccttcaccttggatccgactcggaccgatg

SEQ ID NO: 1587 - DNA, 203 bp, synthetic construct
  source 1..203: mol_type = other DNA
ggcgcgccagtcctcgttgggaacggttgtaggacgtggctctttattcgtgagttttccatttacctccgctgaacctagagcttcagacgccctatggcgtccgcctcgacccaaccggcggccttgagcgctgagcaagcaaaggtggtcctcgcggaggtgatccaggcgttctccgccccggacgactcggaccgatg

SEQ ID NO: 1588 - DNA, 203 bp, synthetic construct
  source 1..203: mol_type = other DNA
ggcgcgccagtcctctcacaatggcttgggtccagactgcgccacagcctctcgggagacgtgggccctcggaacctttttagtgccggactccgggccgcaggcagtcccgcggcagcaggatcacaggtggcagggactcagctcggaattctgtatagaaaaagcacctggatcccagtctttcacgactcggaccgatg

SEQ ID NO: 1589 - DNA, 203 bp, synthetic construct
  source 1..203: mol_type = other DNA
ggcgcgccagtcctctgctgggtgactcgggtccaggtgcctcaccacctgctgagctctgtgtgatttctggacacttctgctcgttgcctttgggctcagtgaagagtctggagtttatctggagtgaggtggccggttcttggtgggatctgagcaggacagcgtctggctccttccctcggctccgactcggaccgatg

SEQ ID NO: 1590 - DNA, 203 bp, synthetic construct
  source 1..203: mol_type = other DNA
ggcgcgccagtcctatggagaacgttgataattctctggatggcagtgatgtgtcagaaccagcaaaaccagaagccggacttgaagtggctcagtcgatcctgagtaagttctctatgaaatccctatttgggtttacgagtaaattagaatctgtgaatccagaagaggaagatgctgtgctgaaacgactcggaccgatg

SEQ ID NO: 1591 - DNA, 203 bp, synthetic construct
  source 1..203: mol_type = other DNA
ggcgcgccagtcctcgctggcggtggcgcggtttgtgtgggcttggtgagggcggggaggcctggctgtgtggatgtctgacaggtgaggcgggggacgcagaagtgcagccgccctctcccacagcggagtccaaaacaggcctaccagtcagttcttatttctattgggtgtttccatgctccacccgactcggaccgatg

SEQ ID NO: 1592 - DNA, 203 bp, synthetic construct
  source 1..203: mol_type = other DNA
ggcgcgccagtcctcccagactccagccctggaccgcgcatcccgagcccagcgcccagacagagtgtccccacaccctcctctgagacgccatgttcaactcgatgaccccaccaccaatcagtagctatggcgagccctgctgtctccggcccctccccagtcagggggcccccagtgtggggacacgactcggaccgatg

SEQ ID NO: 1593 - DNA, 203 bp, synthetic construct
  source 1..203: mol_type = other DNA
ggcgcgccagtcctcccacttcccccggctccagccggcgcaggcagcggcggcagcagcaggcgagcctcggccccgcaaggccatgaaggtgaagaagggcggcggtggggccgggacggcgacggagtccgctccggggccctcgggccagagcgtggcccccataccacagccgcctgcggaatcgactcggaccgatg

SEQ ID NO: 1594 - DNA, 203 bp, synthetic construct
  source 1..203: mol_type = other DNA
ggcgcgccagtcctccacaactggagcagccgggaacagctctgaccacagtggttccggggagaagcctttccaggacccatgtgtaggcacaactgttttccctgatcaggatacttgcggcactcaacagaggaaagaaattcctaagggaacactgctcagaaagtactgcagcatgtcttcaacgactcggaccgatg

SEQ ID NO: 1595 - DNA, 203 bp, synthetic construct
  source 1..203: mol_type = other DNA
ggcgcgccagtcctgggtacaaatgtattttggatcaaagaaactccagtattcaaagataggaactgacaggattttaggtcactttgtaggtcaccacctagaggggaggaagacctcgctttggagagtgggaataaaacgctcgtggaaaagggtacacgcttttctgggaaagtgaggccacccgactcggaccgatg

SEQ ID NO: 1596 - DNA, 203 bp, synthetic construct
  source 1..203: mol_type = other DNA
ggcgcgccagtcctccccgcgctgcgtgcccacgttgcgccggcctcgcgccagtccgctgggctgcagggactgcggcgcctgagggagtcgctgacgggcacgctgactggaggctggcggacaggcgacagcgacctgcggcaggaccagaggagcgagagcagcaagaaccacacccagcagcacgactcggaccgatg

SEQ ID NO: 1597 - DNA, 203 bp, synthetic construct
  source 1..203: mol_type = other DNA
ggcgcgccagtcctagcgacctgcggcagagtcttgctgcgacacccaggctggagtgcaatggcgctatctcggctcactgcaacctccgcttcccggattcaagcgattctcctgcctcagcctcccgagtaggtgggactacaggaccagaggagcgagagcagcaagaaccacacccagcagcacgactcggaccgatg

SEQ ID NO: 1598 - DNA, 203 bp, synthetic construct
  source 1..203: mol_type = other DNA
ggcgcgccagtcctaggcgcgggcggagggcgggctgaagcagctgaagcggcggtagcggcggcggctcgggcagaggggcgggagctgaggcgggagcggacaggctggtgggcgagcgagaggcggcggaatggtggactaccacgcggcgaaccagtcgtaccagtacggccccagcagcgcggcgactcggaccgatg

SEQ ID NO: 1599 - DNA, 203 bp, synthetic construct
  source 1..203: mol_type = other DNA
ggcgcgccagtcctcttctcagatcctttgcgggtagccctggcgtcccgcggagaccccaccccctggctacctgagtgaagatggagaaaccagtgaccaccagatgaaccacagcatggacgcaggttctccaaacctatccccgaatccgatgtccccagcacataataacttggacctgcagccgactcggaccgatg

SEQ ID NO: 1600 - DNA, 203 bp, synthetic construct
  source 1..203: mol_type = other DNA
ggcgcgccagtcctacaaacatgtcttgcctgcaccctaggcaaacgtggaaaggcgcagctctggtacaccggaaagcatggtggatggggaggtccctggatggccggttgcaggtgtcccatcggaaggggctccctcatgtcatctactgccgcctgtggcgatggccagacctgcacagccaccgactcggaccgatg

SEQ ID NO: 1601 - DNA, 203 bp, synthetic construct
  source 1..203: mol_type = other DNA
ggcgcgccagtccttaagagccgcggagtcggggacggtagaaggggccgcgcgtgcgcagtggcgtccgctgtgcttccggtgcgccgggcgcggacgcgggcacgcacacacgcaagcacgcctccacttaactcgcgccgccgcggcagctcgagtccaccagcagcgccgtccgcttgaccgagcgactcggaccgatg

SEQ ID NO: 1602 - DNA, 203 bp, synthetic construct
  source 1..203: mol_type = other DNA
ggcgcgccagtcctggcgaggcgcctgttgattggccactggggcccgggttcctccggcggagcgcgcctccccccagatttcccgccagcaggagccgcgcggtagatgcggtgcttttaggagctccgtccgacagaacggttgggccttgccggctgtcggtatgtcgcgacagagcaccctgtcgactcggaccgatg

SEQ ID NO: 1603 - DNA, 203 bp, synthetic construct
  source 1..203: mol_type = other DNA
ggcgcgccagtcctaacgccagcaggcgtcagaggcggacgccgcagcagcaaccttccgggcaaacgaccatcagcatatccgctacaacccgctgcaggatgagtgggtgctggtgtcagctcaccgcatgaagcggccctggcagggtcaagtggagccccagcttctgaagacagtgccccgcccgactcggaccgatg

SEQ ID NO: 1604 - DNA, 203 bp, synthetic construct
  source 1..203: mol_type = other DNA
ggcgcgccagtccttagcgtagggttgcgcggcccggaaacgcagagccggccaaagagcggcgcgacgtgagccggggccgtgcgcgaagagacctcgcgggcgcggagcgaaaggccggcgtgagtgagcgcggagacagtggccgccggcggcccaacccgtctatcccttcggccgccgccggccgactcggaccgatg

SEQ ID NO: 1605 - DNA, 203 bp, synthetic construct
  source 1..203: mol_type = other DNA
ggcgcgccagtcctgggccactgctctccaggaagataaggcttttaaagcagcctagcactagaaggtgaggctctgtgtgctccgggatggagcaggtgtgcagagggtgagaacccagctctgggaccaagtcacttgcttccttacttagcaagactatcgacttgagcaaacttggacctgggcgactcggaccgatg

SEQ ID NO: 1606 - DNA, 203 bp, synthetic construct
  source 1..203: mol_type = other DNA
ggcgcgccagtcctcctgctgctgctcgctgttcggcccggggcggggacacggccgcggacgtccttgtgggctctgtgtgctccgggatggagcaggtgtgcagagggtgagaacccagctctgggaccaagtcacttgcttccttacttagcaagactatcgacttgagcaaacttggacctgggcgactcggaccgatg

SEQ ID NO: 1607 - DNA, 203 bp, synthetic construct
  source 1..203: mol_type = other DNA
ggcgcgccagtcctgcggcgtcctggggccaggaggagcgaacacctgccgcggtcctcccgccggcgctgggctctgtgtgctccgggatggagcaggtgtgcagagggtgagaacccagctctgggaccaagtcacttgcttccttacttagcaagactatcgacttgagcaaacttggacctgggcgactcggaccgatg

SEQ ID NO: 1608 - DNA, 203 bp, synthetic construct
  source 1..203: mol_type = other DNA
ggcgcgccagtcctataggccccgcccctgtatcccaagaccctgcctcctcttgcggtggggggaaagcggcctcttactctaggcctttcggtttgcgcgagcgggcaggaaagcgtgcgtgcggctaagagagtgggcgctctcgcggccgctgacgatggaagaactggagcaaggcctgttgacgactcggaccgatg

SEQ ID NO: 1609 - DNA, 203 bp, synthetic construct
  source 1..203: mol_type = other DNA
ggcgcgccagtcctaaaggaagaccaggttcctgaaagggttattctgacttaatctggctataaaaatgctattggctgttatttggcatggccaaagtgcacccagaatgtcttctctctccattcagtgcacgcgttactttggctaaaaggaggtgagcggcactctgcccttccagagcaagccgactcggaccgatg

SEQ ID NO: 1610 - DNA, 203 bp, synthetic construct
  source 1..203: mol_type = other DNA
ggcgcgccagtccttcgggagctcggactcctacgcagtcaccgggaagggccgccgccccgcccgcggctgctggcccgggtgacgcttccgcctgctataagagcagcggccctcggtgcctccttcctgacctcgcacccagctcggagcccggagcgtgcctcggcggcctgtcggttttcacccgactcggaccgatg

SEQ ID NO: 1611 - DNA, 203 bp, synthetic construct
  source 1..203: mol_type = other DNA
ggcgcgccagtcctgctggagctctgcccgggtgtggaaacctcgtcttccaacacgtagctgcccttcagccacccgcccgcagcctgggagtgccctgagggtgggtcgggggagctgcgcagggacatctctacaccgttcccatccgggaacagggcaacatctacaagcccaacaacaaggcccgactcggaccgatg

SEQ ID NO: 1612 - DNA, 203 bp, synthetic construct
  source 1..203: mol_type = other DNA
ggcgcgccagtcctttcccccgccgccaggctgacttctcatcgcttgtttttctttttgcatttttcctcccaccgccgttgccgccctccccgtcctggccgtccgccctccgccctctgcagggacatctctacaccgttcccatccgggaacagggcaacatctacaagcccaacaacaaggcccgactcggaccgatg

SEQ ID NO: 1613 - DNA, 203 bp, synthetic construct
  source 1..203: mol_type = other DNA
ggcgcgccagtcctttagcctcccgcccgccgcctctgtctccctctctccacaaactgcccaggagtgagtagctgctttgggtccgccggacacaccggacagatagacgtgcggacggcccaccaccccagcccgccaactagtcagcctgcgcctggcgcctcccctctccaggtccatccgcccgactcggaccgatg

SEQ ID NO: 1614 - DNA, 203 bp, synthetic construct
  source 1..203: mol_type = other DNA
ggcgcgccagtcctactttactgcaagccttagtcagagtacaaagggttcctgcttggtggttttgctgcagcttcagagtttagcctgaactgtggcaggattttgtaacttgcacattttttgagaagtctgatggaggtataatgtccacggtcgattatttgaacagtgtttctggagatcatcgactcggaccgatg

SEQ ID NO: 1615 - DNA, 203 bp, synthetic construct
  source 1..203: mol_type = other DNA
ggcgcgccagtcctgtataaggtccacaccccgggagctgagtgattgcagaaactggccttccatctctctcagacaccaagctgcagatccaggcttttctgggaaagtgaggccaccatggctctggagaagtctcttgtccggctccttctgcttgtcctgatactgctggtgctgggctgggtcgactcggaccgatg

SEQ ID NO: 1616 - DNA, 203 bp, synthetic construct
  source 1..203: mol_type = other DNA
ggcgcgccagtcctaccctaagaggaggagctactgtgaaggtttctgcgtcttcaccctcactggctgtcgcttctcaatcagactccaagcagcgaagacttttggttgattttccaaaaggctcagtaagcaatgcgcagcagccagatctgtccaaagcagtttcactctcaatgggactgtatcgactcggaccgatg

SEQ ID NO: 1617 - DNA, 203 bp, synthetic construct
  source 1..203: mol_type = other DNA
ggcgcgccagtccttaaggtccacaccccgggagctgagtgattgcagaaactggccttccatctctctcagacaccaagctgcagatccaggtcaccacctagaggggaggaagacctcgctttggagagtgggaataaaacgctcgtggaaaagggtacacgcttttctgggaaagtgaggccacccgactcggaccgatg

SEQ ID NO: 1618 - DNA, 203 bp, synthetic construct
  source 1..203: mol_type = other DNA
ggcgcgccagtcctaaggtttctgcgtcttcaccctcactggctgtcgcttctcaatcagactccaagcagcgaagacttttggttgattttccaaaaggctcagtaagcaatgcgcagcagccagatctgtccaaagcagtttcactctcaatgggactgtatatgggagagacagaaacaaaagtgcgactcggaccgatg

SEQ ID NO: 1619 - DNA, 203 bp, synthetic construct
  source 1..203: mol_type = other DNA
ggcgcgccagtcctcccgggagctgagtgattgcagaaactggccttccatctctctcagacaccaagctgcagatccaggtcactttgtaggtcaccacctagaggggaggaagacctcgctttggagagtgggaataaaacgctcgtggaaaagggtacacgcttttctgggaaagtgaggccacccgactcggaccgatg

SEQ ID NO: 1620 - DNA, 203 bp, synthetic construct
  source 1..203: mol_type = other DNA
ggcgcgccagtcctaaggataatggagatctggttttgtcaagccccagtaatgtaacactgccccaagtgaaaacagaaaaagaagatttcatcgaactctgcacccctggggtaattaagcaagagaaactgggcacagtttactgtcaggcaagctttcctggagcaaatataattggtaataaacgactcggaccgatg

SEQ ID NO: 1621 - DNA, 203 bp, synthetic construct
  source 1..203: mol_type = other DNA
ggcgcgccagtcctacagaaaaagaagatttcatcgaactctgcacccctggggtaattaagcaagagaaactgggcacagtttactgtcaggcaagctttcctggagcaaatataattggtaataaaatgtctgccatttctgttcatggtgtgagtacctctggaggacagatgtaccactatgaccgactcggaccgatg

SEQ ID NO: 1622 - DNA, 203 bp, synthetic construct
  source 1..203: mol_type = other DNA
ggcgcgccagtcctttcaagtctttttcttttaacggattgatcttttgctagatagagacaaaatatcagtgtgaattacagcaaacccctattccatgctgttatgggtgaaactctgggagattctcctattgacccagaaagcgattccttcactgatacactgtctgcaaacatatcacaagacgactcggaccgatg

SEQ ID NO: 1623 - DNA, 203 bp, synthetic construct
  source 1..203: mol_type = other DNA
ggcgcgccagtcctatatatttcgagactaaagaacccaggaacccaagaagactccttgaccacaacaaagatggcgaaatctgcctgttgctcgtgctagattgaggttacgtagattggcgtgctgcaaaccagctctaggcggctctggccccaaaaggagcataaaccagggactttgatatccgactcggaccgatg

SEQ ID NO: 1624 - DNA, 203 bp, synthetic construct
  source 1..203: mol_type = other DNA
ggcgcgccagtcctgatctcagctcactgcagcctccgcctcccgggttcaagcgattcttctgcctcagcctcccgagtagcagattatgagcttacagaaagcctggcctacattttactctttttggatttcttcctcatcaagagactgctgcagtgcctgtcatgtgacagcggcatggacatcgactcggaccgatg

SEQ ID NO: 1625 - DNA, 203 bp, synthetic construct
  source 1..203: mol_type = other DNA
ggcgcgccagtcctgattcacagggcctctgagcattatcccccatactcctccccatcattctccacccagctgttggagccatctgtctgatcaccttggactccatagtacactggggcaaagcacagccccagtttctggaggcagatgggtaaccaggaaaaggcatgaatgagggggccccacgactcggaccgatg

SEQ ID NO: 1626 - DNA, 203 bp, synthetic construct
  source 1..203: mol_type = other DNA
ggcgcgccagtcctgaggtgtttcccttagctatggaaactctataagagagatccagcttgcctcctcttgagcagtcagcaacagggtcccgtccttgacacctcagcctctacaggactgagaagaagtaaaaccgtttgctggggctggcctgactcaccagctgccatgcagcagcccttcaacgactcggaccgatg

SEQ ID NO: 1627 - DNA, 203 bp, synthetic construct
  source 1..203: mol_type = other DNA
ggcgcgccagtccttaggtgcgtgcgacgacctgggacgctggaaacccggagctgcgcgctgggcggaaaggactcctagtgggcccggctgagaaggcggaggtggcgcgcgaggggcgggctcgtgccaacgctggtgggtggggctagaacgggaggggcggggctagccggatccgctgactgcgactcggaccgatg

SEQ ID NO: 1628 - DNA, 203 bp, synthetic construct
  source 1..203: mol_type = other DNA
ggcgcgccagtcctcaccgcaggctcctgtgccttgggcttgagctttgtggcagttaatggcttttctgcacgtatctctggtgtttacttgagaagcctggctgtgtccttgctgtaggagccggagtagctcagagtgatcttgtctgaggaaaggccagccccacttggggttaataaaccgcgcgactcggaccgatg

SEQ ID NO: 1629 - DNA, 203 bp, synthetic construct
  source 1..203: mol_type = other DNA
ggcgcgccagtccttttaaatggcagagagaaggagaaaacttagatcttctgataccaaatcactggaccttagaaggtcagaaatctttcaagccctgcaggaccgtaaaatgcgcatgtgtccaacggaagcactggggcatgagtggggaaggaatagaaacagaaagaggttgatattcactgcgactcggaccgatg

SEQ ID NO: 1630 - DNA, 203 bp, synthetic construct
  source 1..203: mol_type = other DNA
ggcgcgccagtcctgtctcccgcggcccagcgctcgcaccaccgcttctccctccctgtcgcagccgcgccgccgcgcagcgccccagccacacgccggcgggcagaagccgcccgctctccggaaagtgataacagaattcattgaagtggagaatttttaaagaaggtaacaaaaagagaaagaaacgactcggaccgatg

SEQ ID NO: 1631 - DNA, 203 bp, synthetic construct
  source 1..203: mol_type = other DNA
ggcgcgccagtcctcaggacgcacgtttcaagctcatcagtaaaggttccttaaattcccgaagggcaagaagttaaccaagtaaaacagcatcggaacaccaggatcccatgacagattctgttgtcacgtctccttacagagtttgagcggtgctgaactgtcagcaccatctgtccggtcccagccgactcggaccgatg

SEQ ID NO: 1632 - DNA, 203 bp, synthetic construct
  source 1..203: mol_type = other DNA
ggcgcgccagtcctattcagcaaatgtttgcggaatgaatggggtgagctggagccaggacctgcaggaagggatctccgcctggttcggcccgcctgcctccactcctgcctctaccatgtccatcagggtgacccagaagtcctacaaggtgtccacctctggcccccgggccttcagcagccgctcgactcggaccgatg

SEQ ID NO: 1633 - DNA, 203 bp, synthetic construct
  source 1..203: mol_type = other DNA
ggcgcgccagtcctggtggcagcggcaggagagtccggccgcgacaggacgaactcccccactggaaaggattctgaaagaaatgaagtcagccctcagaaatgaagttgactgcctgctggctttctgttgactggcccggagctgtactgcaagacccttgtgagcttccctagtctaagagtaggcgactcggaccgatg

SEQ ID NO: 1634 - DNA, 203 bp, synthetic construct
  source 1..203: mol_type = other DNA
ggcgcgccagtcctttctccagaacaagcctcctggtctttctgggagagctctggcagcatcactgtgcctgtgcagggagagcgggaacccacttcctgcaccggctttctctgagttcttcaggatgaattcgctctggtctagcggagctggagtttgttcagatcatcatcatcgtggtggtgcgactcggaccgatg

SEQ ID NO: 1635 - DNA, 203 bp, synthetic construct
  source 1..203: mol_type = other DNA
ggcgcgccagtcctaaatgatcaagtgttgggtataagccaaggagctgagagagggggagaccagcgcaggtctgaggagctgagaagggaggcttacgtgaagggaatttagataatgggctgtgtgcaatgtaaggataaagaagcaacaaaactgacggaggagagggacggcagcctgaaccacgactcggaccgatg

SEQ ID NO: 1636 - DNA, 203 bp, synthetic construct
  source 1..203: mol_type = other DNA
ggcgcgccagtcctgggcgtgtctacgcgagttcccgtctttcctggtcgtcctccttgggttcgggtgaaagcgcttgggggttcagtgggccatgatccccgagctgctggagaactgaaggcggacagtctcctgcgaaaccagcggagctggagtttgttcagatcatcatcatcgtggtggtgcgactcggaccgatg

SEQ ID NO: 1637 - DNA, 203 bp, synthetic construct
  source 1..203: mol_type = other DNA
ggcgcgccagtcctgcagcaatccaaaagagtctcaaggatccttcaaataacttcaggctccataatgggagaagtaaagaacaaagacttaaggaacagcttggcgctcaacaagaaccagtgaagaaatccattcaggaatcagaagcttttttgcctcagagcatacctgaagagagatacaagcgactcggaccgatg

SEQ ID NO: 1638 - DNA, 203 bp, synthetic construct
  source 1..203: mol_type = other DNA
ggcgcgccagtcctgaatttagataatgggctgtgtgcaatgtaaggataaagaagcaacaaaactgacggaggagagggacggcagcctgaaccagagctctgggtaccgctatggcacagaccccacccctcagcactaccccagcttcggtgtgacctccatccccaactacaacaacttccacgcgactcggaccgatg

SEQ ID NO: 1639 - DNA, 203 bp, synthetic construct
  source 1..203: mol_type = other DNA
ggcgcgccagtcctaccctctacacccgccatagcaatggagaccccgcctcctgctacagttaattaatccttcttttttgcttcacaataaaaatagcatggctcttctgattgtaaaaagtgatatacactccttatttaacgaaaaattcaaagaatttgataaatgacaggcgaaaagtcaaacgactcggaccgatg

SEQ ID NO: 1640 - DNA, 203 bp, synthetic construct
  source 1..203: mol_type = other DNA
ggcgcgccagtcctccccggagtgcagtcaagttgaccaagaagcgggcactgtccatctcacctctgtcggatgccagcctggacctgcagacggttatccgcacctcacccagctccctcgtagctttcatcaactcgcgatgcacatctccaggaggctcctacggtcatctctccattggcacccgactcggaccgatg

SEQ ID NO: 1641 - DNA, 203 bp, synthetic construct
  source 1..203: mol_type = other DNA
ggcgcgccagtcctaagatactcctcacctgctccttgaatgacagcgccacagaggtcacagggcaccgctggctgaaggggggcgtggtgctgaaggaggacgcgctgcccggccagaaaacggagttcaaggtggactccgacgaccagtggggagagtactcctgcgtcttcctccccgagccccgactcggaccgatg

SEQ ID NO: 1642 - DNA, 203 bp, synthetic construct
  source 1..203: mol_type = other DNA
ggcgcgccagtccttccggggcgggggcggggcctcactctgcgatataactcgggtcgcgcggctcgcgcaggccgccaccgtcgtccgcaaagcctgagtcctgtcctttctctctccccggacagcatgagcttcaccactcgctccaccttctccaccaactaccggtccctgggctctgtccacgactcggaccgatg

SEQ ID NO: 1643 - DNA, 203 bp, synthetic construct
  source 1..203: mol_type = other DNA
ggcgcgccagtcctcaatctccgcctctgattggctgagcccccggctccccgctccccctctcctccatccccggtgaaaactgcgggctccgagctgggtgcagcaaccggaggcggcggcgcgtctggaggaggctgcagcagcggaagaccccagtccagatccaggactgagatcccagaacccgactcggaccgatg

SEQ ID NO: 1644 - DNA, 203 bp, synthetic construct
  source 1..203: mol_type = other DNA
ggcgcgccagtcctatgctgtccacttcctctgtaaagctctcaaccctgtccccttccccctctctcctgggaaagagccctcccatgcctagctgctgctcttagggaccctgtggctaggtgcgcggatggaaatccaggatctccgcctggttcggcccgcctgcctccactcctgcctctacccgactcggaccgatg

SEQ ID NO: 1645 - DNA, 203 bp, synthetic construct
  source 1..203: mol_type = other DNA
ggcgcgccagtcctgcagcctcgagggccaacaacacctgctgtccgtgtccatgcccggttggccaccccgtttctgggggcatgagcttcaccactcgctccaccttctccaccaactaccggtccctgggctctgtccaggcgcccagctacggcgcccggccggtcagcagcgcggccagcgtccgactcggaccgatg

SEQ ID NO: 1646 - DNA, 203 bp, synthetic construct
  source 1..203: mol_type = other DNA
ggcgcgccagtcctagtgcttctgcggcaggagcccgtggacaaggcccactgcctgagcctgaactaggagcacctcctagggactgcccaggcttgctctgctctgacccttctgctggccagtctgggcacctggcccctgagggagggagctgtcagccagggaaaaccgagaacaccatcacccgactcggaccgatg

SEQ ID NO: 1647 - DNA, 203 bp, synthetic construct
  source 1..203: mol_type = other DNA
ggcgcgccagtcctctggttcctaggcctcctctccctgctggcagatgggaacaggttcttcttgaggaaactgaggcaaagaggagggcaggtctgagggaccccgcttgggctggcctcacccgcacactgggagggcagccaggtggggactctgacctgggggcttctggaggagaggatgagcgactcggaccgatg

SEQ ID NO: 1648 - DNA, 203 bp, synthetic construct
  source 1..203: mol_type = other DNA
ggcgcgccagtcctgtggcagtgggcgcagggcggggcgagctcagcggagggcgggtttgaatgtgccccggcgggagagggaagctgcagcgagagcgcgcggatctcagcgcgggagcagtgcttctgcggcaggcccctgagggagggagctgtcagccagggaaaaccgagaacaccatcacccgactcggaccgatg

SEQ ID NO: 1649 - DNA, 203 bp, synthetic construct
  source 1..203: mol_type = other DNA
ggcgcgccagtcctcactcctgtgtttgacctgaagtcctctcgagctgcagaagcctgaagaccaaggagtggaaagttctccggcagccctgagatctcaagagtgacatttgtgagaccagctaatttgattaaaattctcttggaatcagctttgctagtatcatacctgtgccagatttcatccgactcggaccgatg

SEQ ID NO: 1650 - DNA, 203 bp, synthetic construct
  source 1..203: mol_type = other DNA
ggcgcgccagtcctgttccatccttctgcacagggtatcgcctctctccgtttggtacatcccctcctcccccacgcccggactggggtggtagacgccgcctccgctcatcgcccctccccatcggtttccgcgcgaaaagccggggcgcctgcgctgccgccgccgcgtctgctgaagcctccgagcgactcggaccgatg

SEQ ID NO: 1651 - DNA, 203 bp, synthetic construct
  source 1..203: mol_type = other DNA
ggcgcgccagtcctagggtttgaaccggaagcgggagtaggtagctgcgtggctaacggagaaaagaagccgtggccgcgggaggaggcgagaggagtcgggatctgcgctgcagccaccgccgcggttgatactactttgaccttccgagtgcagtgacagtgatgtgtgttctgaaattgtgaacccgactcggaccgatg

SEQ ID NO: 1652 - DNA, 203 bp, synthetic construct
  source 1..203: mol_type = other DNA
ggcgcgccagtcctcgaggccagggggcgggagggccgcagctccggcgccgccgcgtcccgccagaacgatcgccgcggccggaagagttggcgctcggggcggactccttggaactggcttagcgcacccatcccaccttcccgcaccctgggaccggtccaacgagcgctcctccaagcggagcccgactcggaccgatg

SEQ ID NO: 1653 - DNA, 203 bp, synthetic construct
  source 1..203: mol_type = other DNA
ggcgcgccagtcctacggggacgagcaggagcgctctcgacttttctagagcctcagcgtcctaggactcacctttccctgatcctgcaccgtccctctcctggccccagactctccctcccactgttcacgaagcccaggtacccactgatggtaatgctggcctgctggctgaaccccagattgcccgactcggaccgatg

SEQ ID NO: 1654 - DNA, 203 bp, synthetic construct
  source 1..203: mol_type = other DNA
ggcgcgccagtcctcctgcttcctggccgagggcgggcgagcggagcctgctttcgcagcgatcgcgagcgtgtggcgattgcttctgtctgttatttagatatggaagctgaggggatgcacagaggcagccagaacctaggtcagggtctcgctcggtgctgaccgcccccggggtcgagtaggcgcgactcggaccgatg

SEQ ID NO: 1655 - DNA, 203 bp, synthetic construct
  source 1..203: mol_type = other DNA
ggcgcgccagtcctgacaactcggtggtggccactgcgcagaccagacttcgctcgtactcgtgcgcctcgcttcgcttttcctccgcaaccatgtctgacaaacccgatatggctgagatcgagaaattcgataagtcgaaactgaagaagacagagacgcaagagaaaaatccactgccttccaaacgactcggaccgatg

SEQ ID NO: 1656 - DNA, 203 bp, synthetic construct
  source 1..203: mol_type = other DNA
ggcgcgccagtccttcaccacggcggcagccctttaaacccctcacccagccagcgccccatcctgtctgtccgaacccagacacaagtcttcactccttcctgcgagccctgaggaagccttctttccccagacatggccaacaagggtccttcctatggcatgagccgcgaagtgcagtccaaaatcgactcggaccgatg

SEQ ID NO: 1657 - DNA, 203 bp, synthetic construct
  source 1..203: mol_type = other DNA
ggcgcgccagtcctgcccgcggtgggccgacttcccctcctcttccctctctccttcctttagcccgctggcgccggacacgctgcgcctcatctcttggggcgttcttccccgttggccaaccgtcgcatcccgtgcaactttggggtagtggccgtttagtgttgaatgttccccaccgagagcgccgactcggaccgatg

SEQ ID NO: 1658 - DNA, 203 bp, synthetic construct
  source 1..203: mol_type = other DNA
ggcgcgccagtccttgacttggctagtgcagaggaattgatggaaaccaccggggtgagagggaggctccccatctcagccagccacatccacaaggtgtgtgtaagggtgcaggcgccggccggttaggccaaggctctactgtctgttgcccctccaggagaacttccaaggagctttccccagaccgactcggaccgatg

SEQ ID NO: 1659 - DNA, 203 bp, synthetic construct
  source 1..203: mol_type = other DNA
ggcgcgccagtcctcaccctgggaccggtcggaacgagctgattgcccgctacatcaagctccggacagggaagacccgcaccaggaagcaggtctccagccacatccaggtgctggctcgtcgcaaagctcgcgagatccaggccaagctaaaggaccaggcagctaaggacaaggccctgcagagccgactcggaccgatg

SEQ ID NO: 1660 - DNA, 203 bp, synthetic construct
  source 1..203: mol_type = other DNA
ggcgcgccagtcctcatcctcctgctgaagtgacaagccacgctgcttctggagccaaagctgaccaagaagaacaaatccaccccagatctagactcaggtcacctcctgaagccctcgttcagggtcgatatccccacatcaaggacggtgaggatcttaaagaccactcaacagaaagtaaaaaacgactcggaccgatg

SEQ ID NO: 1661 - DNA, 203 bp, synthetic construct
  source 1..203: mol_type = other DNA
ggcgcgccagtcctcacgcgggggacggcctgccggcggggacgacagcattgcgcctgggtgcagcagtgtgcgtctcggggaagggaagatattttaaggcgtgtctgagcagacggggaggcttttccaaacccaggcagcttcgtggcgtgtgcggtttcgacccggtcacacaaagcttcagccgactcggaccgatg

SEQ ID NO: 1662 - DNA, 203 bp, synthetic construct
  source 1..203: mol_type = other DNA
ggcgcgccagtcctgtctgagcagacggggaggcttttccaaacccaggcagcttcgtggcgtgtgcggtttcgacccggtcacacaaagcttcagcatgtcatgtggtaggtgaggccggcgcctgtaggctggcggtttccttcctcttggtctttgtagagacagtttgcagaacagcggagaaacgactcggaccgatg

SEQ ID NO: 1663 - DNA, 203 bp, synthetic construct
  source 1..203: mol_type = other DNA
ggcgcgccagtcctgagtatttgaggctcggagccaccgccccgccggcgcccgcagcacctcctcgccagcagccgtccggagccagccaacgagcggaaaatggcagacaatttttcgctccatgatgcgttatctgggtctggaaacccaaaccctcaaggatggcctggcgcatgggggaaccacgactcggaccgatg

SEQ ID NO: 1664 - DNA, 203 bp, synthetic construct
  source 1..203: mol_type = other DNA
ggcgcgccagtcctgactgagagcagggagcagcaggcatggggcatgccgggtgccagttcaaagccctgctgtggaagaattggctctgcagactcaggaacccggtccttttccttgctgaattcttctggccttgtatcctgtttgtaattctgacagttcttcgttttcaagaacctcccagacgactcggaccgatg

SEQ ID NO: 1665 - DNA, 203 bp, synthetic construct
  source 1..203: mol_type = other DNA
ggcgcgccagtcctctatttgagtttgtggcgcgcgaggccctgcagtccgggttggcgcttgggtactggctgggtccgatgctgggtacgctgcgcgccatggagggcgaggacgtggaagacgaccagctgctgcagaagctcagggccagtcgccgccgcttccagaggcgcatgcagcggctgcgactcggaccgatg

SEQ ID NO: 1666 - DNA, 203 bp, synthetic construct
  source 1..203: mol_type = other DNA
ggcgcgccagtcctggagtctcactgtgttgcccaggctggagtgcagtggcgccatcttggctcactgcagtgcgcctctgccccccgagttcaagcgattctcctgcctcaggctcctgagtagctgggactacaggtcatcatcagatttgaaatatttaaagtggatacaaaactatttcagcacgactcggaccgatg

SEQ ID NO: 1667 - DNA, 203 bp, synthetic construct
  source 1..203: mol_type = other DNA
ggcgcgccagtcctgccagaaccggtggagcagcgacccctgagcagtgttctctgtgctgagcggcgggactgagctgttgagttagagccaacatgagtgagcgacaaggtgctggggcaaccaatggaaaagacaagacatctggtgaaaatgatggacagaagaaagttcaagaagaatttgaccgactcggaccgatg

SEQ ID NO: 1668 - DNA, 203 bp, synthetic construct
  source 1..203: mol_type = other DNA
ggcgcgccagtcctccgctgagctgctctgttcccggcttagaggaccaggagaagggggagctggaggctggagcctgtaacaccgtggctcgtctcactctggatggtggtggcaacagagatggcagcgcagctggagtgttaggagggcggcctgagcggtaggagtggggctggagcagtaagcgactcggaccgatg

SEQ ID NO: 1669 - DNA, 203 bp, synthetic construct
  source 1..203: mol_type = other DNA
ggcgcgccagtcctaaagcggccatgttttacatatttcttgattttgtttgttttctcgtgagcttaggccgctggttttggtgatttttgtctgattgcaatgtctggacgtggtaagcaaggaggcaaagctcgcgccaaagcgaaatcccgctcttctcgcgctggtctccagttcccggtgggcgactcggaccgatg

SEQ ID NO: 1670 - DNA, 203 bp, synthetic construct
  source 1..203: mol_type = other DNA
ggcgcgccagtcctctcactctcctggaaacccaccgagaacctccaccctctgacaccatggtcaactcctgttgtggctctgtgtgctctgaccagggctgtggcctggagaactgctgccgccccagctgctgccagaccacctgctgcaggaccacctgctgccgccccagctgctgtgtgtcccgactcggaccgatg

SEQ ID NO: 1671 - DNA, 203 bp, synthetic construct
  source 1..203: mol_type = other DNA
ggcgcgccagtcctggtgcagtccctggagggttctcacgctttggctgtctggacttttaagtttttccgctttttcaggaaggcgaccggcagcctcgggcaggggagacaggactgtatgtcagagaagagacggcgcttggacgccaggaatcctctgaagcaggagactgccctatccagaagcgactcggaccgatg

SEQ ID NO: 1672 - DNA, 203 bp, synthetic construct
  source 1..203: mol_type = other DNA
ggcgcgccagtcctgccaggctccacgtcaaatccagtttgaaacacagaccctaggaccacgcaggaggtggtgggctcgcaggaaggttcctctcccagtggccatgggtagcaacagtgggcaggctggccgccacatctataaatccctagctgatgatggcccctttgactctgtggagccgccgactcggaccgatg

SEQ ID NO: 1673 - DNA, 203 bp, synthetic construct
  source 1..203: mol_type = other DNA
ggcgcgccagtcctgcctgcaacgcgccctggcactcaccggtgggcgaaatttccccgcctccacgtgagagccagctccgccgtgacccggaagtccacttcgagtcgccggcccaccctctcgggttccggcttcttccgggtcgcggccttccggcgaacgcggttaccgtggaaaccgcggcccgactcggaccgatg

SEQ ID NO: 1674 - DNA, 203 bp, synthetic construct
  source 1..203: mol_type = other DNA
ggcgcgccagtcctgaagagtggaacccatacttgctggtctgatccatgcacaaggcggggctgctaggcctctgtgcccgggcttggaattcggtgcggatggccagctccgggatgacccgccgggacccgctcgcaaataaggtggccctggtaacggcctccaccgacgggatcggcttcgcccgactcggaccgatg

SEQ ID NO: 1675 - DNA, 203 bp, synthetic construct
  source 1..203: mol_type = other DNA
ggcgcgccagtcctctttttcgcaacgggtttgccgccagaacacaggtgtcgtgaaaactacccctaaaagccaaaatgggaaaggaaaagactcatatcaacattgtcgtcattggacacgtagattcgggcaagtccaccactactggccatctgatctataaatgcggtggcatcgacaaaagacgactcggaccgatg

SEQ ID NO: 1676 - DNA, 203 bp, synthetic construct
  source 1..203: mol_type = other DNA
ggcgcgccagtcctcaaccctgccgactcagccggaaccggctcccggcccgaggggcgtggtgtcctggtgctccgactccttccgcaggctccttgggacccgcggttccgggagtcccttgctcagggtccctttcctgcagtgaggcgccgtccgccttccctgtgtccccgcagacccccatccgactcggaccgatg

SEQ ID NO: 1677 - DNA, 203 bp, synthetic construct
  source 1..203: mol_type = other DNA
ggcgcgccagtccttgcagaggatccagtccagatcccaggagagcccctctgccccttcggacctcgtctcccatctacaaaacgtgaagattggcccagttagcgtgtctctacaaaaaggtgcatataccactgccccgctgcaggctgatctgagaaagcctctggcccagggcagataccgcccgactcggaccgatg

SEQ ID NO: 1678 - DNA, 203 bp, synthetic construct
  source 1..203: mol_type = other DNA
ggcgcgccagtcctaagtgctggctacctgctgagcgcccccgtaactctgacacagtagtaatttgagcctctgcaattgccgtctgcttcctgtgaaagtcctttccgtgcccactgacccttgagtgggcctttgagctgctgactttcagctggaacttgaagggaccccaaccctgagacactcgactcggaccgatg

SEQ ID NO: 1679 - DNA, 203 bp, synthetic construct
  source 1..203: mol_type = other DNA
ggcgcgccagtcctagcttcatgcctgctgacatcacgaaccagccagttccctccagctgcagagagcttcagtttgtctttttttttttaaactaaaatggaggctggtttcttgccttaaggagcccattgcctttcccgctgaagtctagatgttgacatgtaataaagcgggcagcaggatggcgactcggaccgatg

SEQ ID NO: 1680 - DNA, 203 bp, synthetic construct
  source 1..203: mol_type = other DNA
ggcgcgccagtcctgcactccgctcctttcctgcgtcaccgctacacatgcgccttgcaaggaagggcgagatttcgggggcagggcggggggcgggcctaggccggggtctcacagcgactgcgcggacgggttcctgagtggaacatggcgacttgcgccgaaatcctgcggagcgagttccccgacgactcggaccgatg

SEQ ID NO: 1681 - DNA, 203 bp, synthetic construct
  source 1..203: mol_type = other DNA
ggcgcgccagtcctcaccaggctgagctaagcagggccgccttgggcaggcctacgtggtggtgcaggcgagacccaggctgggcaaggcgcagtttcagtttccatcttgggtctctgagctgagcagagtggcaccaggctgagttaagtgggactgccctgggcagacctacctactagagcagacgactcggaccgatg

SEQ ID NO: 1682 - DNA, 203 bp, synthetic construct
  source 1..203: mol_type = other DNA
ggcgcgccagtcctggagccaaaatgctattgccctgtcttcatcaacatttaatcaagtgttgcggagataggaacatgggagagaaacaatctgggtaacatgaaagtgatgctggttgctaagggaaggcaacttgattctgtgggaagggctgtagctgatccatccgttgtctagatttgagtcgactcggaccgatg

SEQ ID NO: 1683 - DNA, 203 bp, synthetic construct
  source 1..203: mol_type = other DNA
ggcgcgccagtcctccctgcgtctctgcccgccccgtggcgcccgagtgcactgaagatggcggctgctgtaggacggttgctccgagcgtcggttgcccgacatgtgagtgccattccttggggcatttctgccactgcagccctcaggcctgctgcatgtggaagaacgagcttgacaaatttattcgactcggaccgatg

SEQ ID NO: 1684 - DNA, 203 bp, synthetic construct
  source 1..203: mol_type = other DNA
ggcgcgccagtcctgctgcagaggattcctgcagaggatcaagacagcacgtggacctcgcacagcctctcccacaggtaccatgaaggtctccgcggcagccctcgctgtcatcctcattgctactgccctctgcgctcctgcatctgcctccccatattcctcggacaccacaccctgctgctttgcgactcggaccgatg

SEQ ID NO: 1685 - DNA, 203 bp, synthetic construct
  source 1..203: mol_type = other DNA
ggcgcgccagtcctggttgggatctgaggggtcctctctgtgcccatcacagtttgagcttcagggaaaagaagaagaggtctttgcccttcgtttttccacgggaggagaatcaagagtgagccatggagctacgtgtggggaacaagtaccgcctgggacggaagatcgggagcgggtccttcggacgactcggaccgatg

SEQ ID NO: 1686 - DNA, 203 bp, synthetic construct
  source 1..203: mol_type = other DNA
ggcgcgccagtcctccagggctggaatggggccgcccggctccccatggcagtgggtgacgctgctgctggggctgctgctccctcctgccgcccccttctggctcctcaatgtgctcttccccccgcacaccacgcccaaggctgagctcagtaaccacacacggcccgtcatcctcgtgcccggctcgactcggaccgatg

SEQ ID NO: 1687 - DNA, 203 bp, synthetic construct
  source 1..203: mol_type = other DNA
ggcgcgccagtcctgaagtcccgcctcataagtggaaggatgaaattctcagaacagctaacctctaatgggagttggcttctgattctcattcaggcttctcacggcattcagcagcagcgttgctgtaaccgacaaagacaccttcgaattaagcacattcctcgattccagcaaagcaccgcaaccgactcggaccgatg

SEQ ID NO: 1688 - DNA, 203 bp, synthetic construct
  source 1..203: mol_type = other DNA
ggcgcgccagtcctccagcgaccgcggcaccgcctgtgcccgcccgcccctccgcagccgctacttaagaggctccagcgccggccccgccctagtgcgttacttacctcgactcttagcttgtcggggacggtaaccgggacccggtgtctgctcctgtcgccttcgcctcctaatccctagccactcgactcggaccgatg

SEQ ID NO: 1689 - DNA, 203 bp, synthetic construct
  source 1..203: mol_type = other DNA
ggcgcgccagtcctctccgcactgcaccccgacccaccccgcaccctccctttctgcaccctcgcacccacacccctcgcggttccagggggcggcggccccgggcggagcgctttcgcgtgcagccaccactccagaagacttaatgaagtagccagctgcagaagaatctggatcattagataaaacgactcggaccgatg

SEQ ID NO: 1690 - DNA, 203 bp, synthetic construct
  source 1..203: mol_type = other DNA
ggcgcgccagtcctccgccgcccgccctcgctctctcgcgctaccctcccgccgcccgcggtcctccgtcggttctctcgttagtccacggtctggtcttcagctacccgccttcgtctccgagtttgcgactcggggaccggcgtccccggcgcgaagaggctggactcggattcgttgcctgagcacgactcggaccgatg

SEQ ID NO: 1691 - DNA, 203 bp, synthetic construct
  source 1..203: mol_type = other DNA
ggcgcgccagtcctctccccgcctccttttcgggcgtcccgaggccgctccccaaccgacaaccaagaccccgcaggccacgcagccctggagccgaggccccccgacggcggaggcgcccgcgggtcccctacagccaaggtccctgagtgccagaggtggtggtgttgcttatcttctggaacccccgactcggaccgatg

SEQ ID NO: 1692 - DNA, 203 bp, synthetic construct
  source 1..203: mol_type = other DNA
ggcgcgccagtcctgcggcctcagatgaatgcggctgttaagacctgcaataatccagaatggctactctgatctatgttgataaggaaaatggagaaccaggcacccgtgtggttgctaaggatgggctgaagctggggtctggaccttcaatcaaagccttagatgggagatctcaagtttcaacacgactcggaccgatg

SEQ ID NO: 1693 - DNA, 203 bp, synthetic construct
  source 1..203: mol_type = other DNA
ggcgcgccagtcctacgttcctgccgggcaggacaggtgcatagggaactcctcagaggtctgtacctcgagggctcccatggatagccttgacagatcctgccaggactggtgcgacaggaagcaacactggttggagatcggaccaccggacttggtggagcgcaagggctccctgaccctccgctcgactcggaccgatg

SEQ ID NO: 1694 - DNA, 203 bp, synthetic construct
  source 1..203: mol_type = other DNA
ggcgcgccagtccttggggtttgtgaagtcgtggcccgttagcaggaagcctaacagtcgccccgacgctagtgagggacccaatctgagtccccggccagccgaatccaagccgtgtgtactgcgtgctcagcactgcccgacagtcctagctaaacttcgccaactccgctgcctttgccgccacccgactcggaccgatg

SEQ ID NO: 1695 - DNA, 203 bp, synthetic construct
  source 1..203: mol_type = other DNA
ggcgcgccagtcctccggcggcgcctcaggtcgcggggcgcctaggcctgggttgtcctttgcatctgcacgtgttcgcagtcgtttccgcgatgctgcctctgctgcgctgcgtgccccgtgtgctgggctcctccgtcgccggcctccgcgctgccgcgcccgcctcgcctttccggcagctcctgcgactcggaccgatg

SEQ ID NO: 1696 - DNA, 203 bp, synthetic construct
  source 1..203: mol_type = other DNA
ggcgcgccagtcctgcgcacgcagggtggggggagggagcgcacgacgtgcgcgcaccctctcccctcgtccaccgctgccgcctccttcttctgccgctcctggtgctgcttgtgtgctcgtttggtgcggacctggtacctcttttgtgaagcggcagctgaggagactccggcgctcgccatggccgactcggaccgatg

SEQ ID NO: 1697 - DNA, 203 bp, synthetic construct
  source 1..203: mol_type = other DNA
ggcgcgccagtcctggaagttcttgggagcgccagttccgtctgtgtgttcgagtggacaaaatggcgaagatcgccaagactcacgaagatattgaagcacagattcgagaaattcaaggcaagaaggcagctcttgatgaagctcaaggagtgggcctcgattctacaggttattatgaccaggaacgactcggaccgatg

SEQ ID NO: 1698 - DNA, 203 bp, synthetic construct
  source 1..203: mol_type = other DNA
ggcgcgccagtcctctggtctgctcacacttgctggcttgcgcatcaggactggctttatctcctgactcacggtgcaaaggtgcactctgcgaacgttaagtccgtccccagcgcttggaatcctacggcccccacagccggatcccctcagccttccaggtcctcaactcccgtggacgctgaacacgactcggaccgatg

SEQ ID NO: 1699 - DNA, 203 bp, synthetic construct
  source 1..203: mol_type = other DNA
ggcgcgccagtcctgcagggcggggcctgagcactaggcggcggcggctggcgtggggctgcttagatgcgccacggtttcggtagcgacggtatctctagccgggcctgagctgtgctagcacctcccccaggagaccgttgcagtcggccagcccccttctccacggccttgcccactaggtaacccgactcggaccgatg

SEQ ID NO: 1700 - DNA, 203 bp, synthetic construct
  source 1..203: mol_type = other DNA
ggcgcgccagtcctgagcggtcacgtgtgaggggcggcccgaggtcacgtgacggagcgccggagcggagggagccggggctgggagttctcctgagggaagaggagtggagtaggggggacgcggcggcggcgttgacaatgagttttcttggaggcttttttggtccaatttgtgagatcgatattcgactcggaccgatg

SEQ ID NO: 1701 - DNA, 203 bp, synthetic construct
  source 1..203: mol_type = other DNA
ggcgcgccagtcctcgccgcggcgcggagtcccggctgcgggatagaccgagggccatggccgcctctcccggacccgccggcgttggcggcgccggagcagtctacggctccggctcttcgggcttcgccctcgactcgggactggagatcaaaactcgctcggtggagcagacgctactcccgctgcgactcggaccgatg

SEQ ID NO: 1702 - DNA, 203 bp, synthetic construct
  source 1..203: mol_type = other DNA
ggcgcgccagtcctgcgcgctcccaggccgccccgaggcttggggtcttcgaaggataatcggcgcccggggccgaacagcgggggcacacggggcgctgccgaagtgcaaggccacggccagagctcgagcccgacgcgctgtctggagtcgtaggaccctgacgtggctgaagcggccccgggagccgactcggaccgatg

SEQ ID NO: 1703 - DNA, 203 bp, synthetic construct
  source 1..203: mol_type = other DNA
ggcgcgccagtcctctgggtcctctcagtggccagagaacagaaagaaaatctgactgtgcacgagcgaagggtgacaccgggcgtgcagcaccgacctgaaggcacctcttcgggggagcccgaaatttgaagattctctttcctgtcggagactacaaaccaaataaatagaaaaaactatccaagcgactcggaccgatg

SEQ ID NO: 1704 - DNA, 203 bp, synthetic construct
  source 1..203: mol_type = other DNA
ggcgcgccagtcctacggaaacgggcgtgccatttccgcgcacgtctgcagatgcggtagtcgattggtcaagtctcccatggctcctccttcatcaggaggtgggcaaaccgcgccatgatagggtcgggattggctggctctggaggcgcaggtggtccttcttctactgtcacatggtgcgcgctcgactcggaccgatg

SEQ ID NO: 1705 - DNA, 203 bp, synthetic construct
  source 1..203: mol_type = other DNA
ggcgcgccagtcctaccagcgtaggccgcatgagtggggggcgggctcccgcggtcctgctcggcggagtggtgagtgaccggccccgccccgccccttccggtcctcgaagcctcgaccgctacccgcaccctaaatcccagaggttggccccctgaggtgcctctctgctcctgtcttttgtttggcgactcggaccgatg

SEQ ID NO: 1706 - DNA, 203 bp, synthetic construct
  source 1..203: mol_type = other DNA
ggcgcgccagtcctgggattggctggctctggaggcgcaggtggtccttcttctactgtcacatggtgcgcgctgttttctaatcacgtggctgccacccaggtaagaagaggccgctcttcctggggttgtttctccgtgtgacgtgtggcctttgagatcaactctcctgtaccagcgtaggccgccgactcggaccgatg

SEQ ID NO: 1707 - DNA, 203 bp, synthetic construct
  source 1..203: mol_type = other DNA
ggcgcgccagtccttgggctcgcgcttccactccgccgcgccttcctcccagtttccgtccgctcgccgcaccggcttcgttcccccaaatctgggaccgtcccttcgcgccccctccccgtccgcccccagtgctgcgttctccccctcttggctctcctgcggctgggggaggggcgggggtcacccgactcggaccgatg

SEQ ID NO: 1708 - DNA, 203 bp, synthetic construct
  source 1..203: mol_type = other DNA
ggcgcgccagtcctcagccggccctcggcgggacgtgacgcagcgcccggggcgcgggtttgatatttgacaaattgatctaaaatggctgggtttttatctgaataactcactgatgccatcccagaaagtcggcaccaggtgtatttgatatagtgtttgcaacaaattcgacccaggtgatcaaacgactcggaccgatg

SEQ ID NO: 1709 - DNA, 203 bp, synthetic construct
  source 1..203: mol_type = other DNA
ggcgcgccagtcctccgagcgcccgccaggctcctcccgctcccgcgccgcctccctctacccacccgccgcacgtactaaggaaggcgcacagcccgccgcgctcgcctctccgccccgcgtccagctcgcccagctcgcccagcgtccgccgcgcctcggccaaggcttcaacggaccacaccaaacgactcggaccgatg

SEQ ID NO: 1710 - DNA, 203 bp, synthetic construct
  source 1..203: mol_type = other DNA
ggcgcgccagtcctgcgcgttgtgcgctgtcccaggttggaaaccagtgccccaggcggcgaggagagcggtgccttgcagggatgctgcgggcgggagcaccaaccggggacttaccccgggcgggagaagtccacaccgggaccaccatcatggcagtggagtttgacgggggcgttgtgatgggtcgactcggaccgatg

SEQ ID NO: 1711 - DNA, 203 bp, synthetic construct
  source 1..203: mol_type = other DNA
ggcgcgccagtcctcgggaggcagtggtagagggaggtggcggcagcggctagcggactcgagtctcaaccgggctgaggcggacacttctgtggagcgaagcagtgggagcatcgagcactagaggcggcaccgggatccccggctccggggaggggggcgcgggaccgggaggaggggagggggcgcgactcggaccgatg

SEQ ID NO: 1712 - DNA, 203 bp, synthetic construct
  source 1..203: mol_type = other DNA
ggcgcgccagtcctgggggtcacgtggtgcagagcacgcagagtccttctgtcggttggtcctggagcggcgcagccggagtggggccgtgaggagaataaaggcagccccgttgatgactgaaaatgacaaagcatccacctaacagacgaggaatcagctttgaagtgggagcccagttggaagcccgactcggaccgatg

SEQ ID NO: 1713 - DNA, 203 bp, synthetic construct
  source 1..203: mol_type = other DNA
ggcgcgccagtcctaatggactctagcctcctctgatagcctcatgccaggccccgtgcacattgctttgcttgcctccctcaatcctcatagcttctctttgggaagcctttgggtctgaagtgtctgtgagacctcacagaagagcacccctgggctccacttacctgccccctgctccttcagggcgactcggaccgatg

SEQ ID NO: 1714 - DNA, 203 bp, synthetic construct
  source 1..203: mol_type = other DNA
ggcgcgccagtcctgggcttatcccgcctgtcccgccattctcgctagttcgatcggtagcgggagcggagagcggaccccagagagccctgagcagccccaccgccgccgccggcctagttaccatcacaccccgggaggagccgcagctgccgcagccggccccagtcaccatcaccgcaaccatgcgactcggaccgatg

SEQ ID NO: 1715 - DNA, 203 bp, synthetic construct
  source 1..203: mol_type = other DNA
ggcgcgccagtcctctcccgggctggcagcagggccccagcggcaccatgtctgccctcggagtcaccgtggccctgctggtgtgggcggccttcctcctgctggtgtccatgtggaggcaggtgcacagcagctggaatctgcccccaggccctttcccgcttcccatcatcgggaacctcttccagcgactcggaccgatg

SEQ ID NO: 1716 - DNA, 203 bp, synthetic construct
  source 1..203: mol_type = other DNA
ggcgcgccagtcctattggctgagcccggctgtcagtcctttcgcgcctcggcggcgcggcatagcccggctcggcctgtaaagcagtctcaagcctgccgcagggagaagatggcggtcgccgtgagaactttgcaggaacagctggaaaaggccaaagagagtcttaagaacgtggatgagaacatcgactcggaccgatg

SEQ ID NO: 1717 - DNA, 203 bp, synthetic construct
  source 1..203: mol_type = other DNA
ggcgcgccagtcctctcttccgccgtcgtcgccgccatcctcggcgcgactcgcttctttcggttctacctgggagaatccaccgccatccgccaccatggtgaacttcacggtagaccagatccgcgccatcatggacaagaaggccaacatccgcaacatgtctgtcatcgcccacgtggaccatgcgactcggaccgatg

SEQ ID NO: 1718 - DNA, 203 bp, synthetic construct
  source 1..203: mol_type = other DNA
ggcgcgccagtcctgaactcgggttgcgcacttcccggcgctgggaacgcggagcggacgcagtctggccgccattgcgctgcggggaaagcggcctcttgtgtgagggcctgtgggattctccggatatggccggagtgtttccttatcgagggccgggtaacccggtgcctggccctctagccccgcgactcggaccgatg

SEQ ID NO: 1719 - DNA, 203 bp, synthetic construct
  source 1..203: mol_type = other DNA
ggcgcgccagtcctggcaacgccaaccgctccgctgcgcgcaggctgggctgcaggctctcggctgcagcgctgggctggtgtgcagtggtgcgaccacggctcacggcagcctcagccacccagatgtaagcgatctggttcccacctcagcctcccgagtagtggatctaggatccggcttccaaccgactcggaccgatg

SEQ ID NO: 1720 - DNA, 203 bp, synthetic construct
  source 1..203: mol_type = other DNA
ggcgcgccagtcctcgatgtcgcaccgcggcgtgcgcggtgtcggcagtagctgcggcgcaggggcggagcgaaggctgcggcggcgtcgggtacgcgcacacgttgcatcttcttcctttcgcggggtcctccgtagttctggcacgagccaggcgtactgacaggtggaccagcggactggtggagcgactcggaccgatg

SEQ ID NO: 1721 - DNA, 203 bp, synthetic construct
  source 1..203: mol_type = other DNA
ggcgcgccagtcctcagcaggggggaaaaaagagacaaaaacaaaacaaaaaacaacaaaaagcaacaccccccccttttattttcaaaagtagctagaggaaaaaaaaataaaacaacagccaaccaagtgaatcccaacccaaccccctgaagggctgaaaattctcgccttcttcagagcggggccgactcggaccgatg

SEQ ID NO: 1722 - DNA, 203 bp, synthetic construct
  source 1..203: mol_type = other DNA
ggcgcgccagtcctggctgaggcaacctgaaggaggagctctcattaccttctgcccatcacttaataaatagccagccaattcatcaacattctggtacactgttggagagatgagacagtcacaccagctgcccctagtggggctcttactgttttcttttattccaagccaactatgcgagatttcgactcggaccgatg

SEQ ID NO: 1723 - DNA, 203 bp, synthetic construct
  source 1..203: mol_type = other DNA
ggcgcgccagtcctcaccctcaggaccctcaccacccatcagagaagcctgtcattcactgccataaatgtggggagccttgcaagggtgaagtgcttcgggtccagaccaaacatttccacatcaagtgtttcacctgcaaagtgtgtggctgtgacctggcacaagggggcttcttcataaagaaccgactcggaccgatg

SEQ ID NO: 1724 - DNA, 203 bp, synthetic construct
  source 1..203: mol_type = other DNA
ggcgcgccagtcctgcaaaagtagacaatgagatcctggattacaaggatttagcagccattccgaaggtcaaggcaatttatgacattgaacgtccagatcttattacctatgagcctttctacacttcgggctatgatgacaaacaggagagacagagccttggagagtctccgaggactttgtctcgactcggaccgatg

SEQ ID NO: 1725 - DNA, 203 bp, synthetic construct
  source 1..203: mol_type = other DNA
ggcgcgccagtcctcctactccatcagcagaagggtaccaggatgttcgggatcggatgatccatcggtccacgagccagggctccatcaactcccctgtgtacagccgccacagctacactccaaccacgtcccgctctccccagcatttccacagacctggcaatgagccgtccagcggccggaaccgactcggaccgatg

SEQ ID NO: 1726 - DNA, 203 bp, synthetic construct
  source 1..203: mol_type = other DNA
ggcgcgccagtccttccaagttcccagcagcccaggcaccagaccccagcgagacaccaaagattgagacggaccactggcctggtcccccctcatttgctgtcgtaggacctgacatgaaacgcagatctagtggcagagaggaagatgatgaggaacttctgagacgtcggcagcttcaagaagagcgactcggaccgatg

SEQ ID NO: 1727 - DNA, 203 bp, synthetic construct
  source 1..203: mol_type = other DNA
ggcgcgccagtcctcaattaatgaagcttaactcaggcctgggacagttgatcttgaaagaagagatggagaaagagagccgggaaaggtcatctctgttagccagtcgctacgattctcccatcaactcagcttcacatattccatcatctaaaactgcatctctccctggctatggaagaaatgggcgactcggaccgatg

SEQ ID NO: 1728 - DNA, 203 bp, synthetic construct
  source 1..203: mol_type = other DNA
ggcgcgccagtcctgtcccactcgtgaatggcaattagagaaaggactgacagtggcggtgccccataggatgtcatattgaggcccaaacttgattggagaatttgcaaactaccgtcgctcagcaacaccaaaaagagaaagtctggttaaaacaccatgagtcaaatgtcgggccagccaacagtcgactcggaccgatg

SEQ ID NO: 1729 - DNA, 203 bp, synthetic construct
  source 1..203: mol_type = other DNA
ggcgcgccagtcctaacacttgccaagaagcatggcgtagaaatttctatgttccgaaacacagagtagtgtccacatgtgagcttttcacattaccttatgtatacaacaggagctgcgttgttttcttctttttcttttcctttatctgttgtccaacaacagtgctgactgtccggataagagctcgactcggaccgatg

SEQ ID NO: 1730 - DNA, 203 bp, synthetic construct
  source 1..203: mol_type = other DNA
ggcgcgccagtcctccatatcattcatggccaaaaaaaaccaaaaagcaaaaaacaaaaacaagtcccatgtcctactgactctagttcttccagtcgttatcctctgctgtctctctggcatcctatgaatcagatcaagcccatgctgttgttggtttttaaggtttctttcaataataggctaagcgactcggaccgatg

SEQ ID NO: 1731 - DNA, 203 bp, synthetic construct
  source 1..203: mol_type = other DNA
ggcgcgccagtcctgaaagacatgtttttctcttttaaatctctgcaactccaaagtagactccttcgaacgtatttaatttggccttttcagctttcttcttgcccagctctgtcgaattcatgggtgtgtgtgcacatgttggtttcactcacccagagtaattttgtgagcatgcatgtgcttttcgactcggaccgatg

SEQ ID NO: 1732 - DNA, 203 bp, synthetic construct
  source 1..203: mol_type = other DNA
ggcgcgccagtccttaatttctgcttgaatgtttgtcctgctgtgttgcagcttctaaagacattgtcaccgagtgtgtgtgactcaaagatcaagagtgaggctaaactgcgaccccaacatcacttccttcatggaaaggtgttggcgctgatgtagctcatggaaggatcagactgggaaccacacgactcggaccgatg

SEQ ID NO: 1733 - DNA, 203 bp, synthetic construct
  source 1..203: mol_type = other DNA
ggcgcgccagtcctcaggagggtaagccactttattatcatgctttggggctgtgcttaagaatttaagctctgttttaaagccgaagaagaaaacatttgaatttaccttcatatgccactaagaacaaaagctctgaagttcttcctgctggcaccaaatattaggattacaagctgtctctctgacgactcggaccgatg

SEQ ID NO: 1734 - DNA, 203 bp, synthetic construct
  source 1..203: mol_type = other DNA
ggcgcgccagtcctatgaggactactctcgtgtgtgtgtgtgtgtgtgtgtgtgtgtgtgtgtgtgtgtgtgtgtgtgttggatctactaacatgtttagcaaatggctctgacagggtggccatgagcagatgagaccagctcttgcttggttggaagccacactgcagtttgcagtttagcctttgcgactcggaccgatg

SEQ ID NO: 1735 - DNA, 203 bp, synthetic construct
  source 1..203: mol_type = other DNA
ggcgcgccagtcctgtgtctcagtggcttcttgcttattccatgctttttctatcccatcctctctctgtgccctcctgcaatggcagccttggcacaatgcctgggtgtcctcatccttgctttactctggaaagtgtggggatggagaggatggtgcatttccagtgcttccttacctgtcaataacgactcggaccgatg

SEQ ID NO: 1736 - DNA, 203 bp, synthetic construct
  source 1..203: mol_type = other DNA
ggcgcgccagtcctgcatgcttgtcctcaaaatgtccatcctggtcacagcacacaagatggctattggtctgcttttaccctaccctgtactatacatgaaaattccagttattaacacactcaaactggtggagcttgttcaccctaggaaggggattgtatatatggcaggcttccctggtgccgcgactcggaccgatg

SEQ ID NO: 1737 - DNA, 203 bp, synthetic construct
  source 1..203: mol_type = other DNA
ggcgcgccagtcctatgtaaagggctacatttgggaacatttgacttccttgggactcttaagtgcataatgatggcatgaagtaaaaggggcctcaatgatgataggaaaatcagttcttttaaaatttcttcaagaaaatccaggctatcacatagtctttctgtgtgacttattaggagataggacgactcggaccgatg

SEQ ID NO: 1738 - DNA, 203 bp, synthetic construct
  source 1..203: mol_type = other DNA
ggcgcgccagtcctcctcctgtgtatggaagagacaggtgaccgctccaggttgggtgctcacagaacccttttcctgactctcatggaagatggtggaaggaaaatagactgtctcatcaaccctcctgtgtcctctgaagcaatctcagtttttattaaccacctcttctgtgtttctggtagctacgactcggaccgatg

SEQ ID NO: 1739 - DNA, 203 bp, synthetic construct
  source 1..203: mol_type = other DNA
ggcgcgccagtccttgcagtgataccaacttatagcaatgatgtactttaagggaactacccaactatgttgtgatagaagaaagagaaaccttcactttggcatttttttttaatcactgtttatttttctgtttgcggcccaggaagcagtgggaggtggtggcagatatgctttgcatatggattcgactcggaccgatg

SEQ ID NO: 1740 - DNA, 203 bp, synthetic construct
  source 1..203: mol_type = other DNA
ggcgcgccagtcctttttggaaatatgaaagcaaatgtttagaagaattccttttgaaaagctgtgtcgtgttccctgtgaaactgagcaggtgtgtgttggcgcgctaagtgccacatgcttgtgtgtagaggaggaggtggccctgccggctccgcgctgctgtgcctgtgatccctacctgctcccgactcggaccgatg

SEQ ID NO: 1741 - DNA, 203 bp, synthetic construct
  source 1..203: mol_type = other DNA
ggcgcgccagtcctagaggaggaggtggccctgccggctccgcgctgctgtgcctgtgatccctacctgctccccgctcctgttgccagcagcactcactgcactcctttgtcatatactctgcatcactgtcatactcacaacttcgtgaataaagttgtgtgctttattcgtagaaaaaaaaaaaacgactcggaccgatg

SEQ ID NO: 1742 - DNA, 203 bp, synthetic construct
  source 1..203: mol_type = other DNA
ggcgcgccagtcctaagggggcttcttcataaagaacggagagtatctctgcaccctggactaccagcggatgtacgggacacgctgccatggctgtggggagttcgtggagggcgaagtggtgactgctctgggcaagacctaccatcccaattgctttgcttgtactatctgcaagcgcccgtttccgactcggaccgatg

SEQ ID NO: 1743 - DNA, 203 bp, synthetic construct
  source 1..203: mol_type = other DNA
ggcgcgccagtcctgctcaccaggtcatactatctatgcaaaagtagacaatgagatcctggattacaaggatttagcagccattccgaaggtcaaggcaatttatgacattgaacgtccagatcttattacctatgagcctttctacacttcgggctatgatgacaaacaggagagacagagccttgcgactcggaccgatg

SEQ ID NO: 1744 - DNA, 203 bp, synthetic construct
  source 1..203: mol_type = other DNA
ggcgcgccagtcctgagagtctccgaggactttgtctcctactccatcagcagaagggtaccaggatgttcgggatcggatgatccatcggtccacgagccagggctccatcaactcccctgtgtacagccgccacagctacactccaaccacgtcccgctctccccagcatttccacagacctggcacgactcggaccgatg

SEQ ID NO: 1745 - DNA, 203 bp, synthetic construct
  source 1..203: mol_type = other DNA
ggcgcgccagtcctcctcagaagatatcatcaagttttccaagttcccagcagcccaggcaccagaccccagcgagacaccaaagattgagacggaccactggcctggtcccccctcatttgctgtcgtaggacctgacatgaaacgcagatctagtggcagagaggaagatgatgaggaacttctgacgactcggaccgatg

SEQ ID NO: 1746 - DNA, 203 bp, synthetic construct
  source 1..203: mol_type = other DNA
ggcgcgccagtcctcaaatgtcgggccagccaacagtaacacttgccaagaagcatggcgtagaaatttctatgttccgaaacacagagtagtgtccacatgtgagcttttcacattaccttatgtatacaacaggagctgcgttgttttcttctttttcttttcctttatctgttgtccaacaacagcgactcggaccgatg

SEQ ID NO: 1747 - DNA, 203 bp, synthetic construct
  source 1..203: mol_type = other DNA
ggcgcgccagtccttttgtgagcatgcatgtgctttttaatttctgcttgaatgtttgtcctgctgtgttgcagcttctaaagacattgtcaccgagtgtgtgtgactcaaagatcaagagtgaggctaaactgcgaccccaacatcacttccttcatggaaaggtgttggcgctgatgtagctcatgcgactcggaccgatg

SEQ ID NO: 1748 - DNA, 203 bp, synthetic construct
  source 1..203: mol_type = other DNA
ggcgcgccagtcctaggattacaagctgtctctctgacaccagtggtaaaaaagcaagtagaatagtttctgagtctgtgttgcagcctctgacacgtggctcaccgctgtcatttgggggatggaatgaacagtcactgttctatagcatcctcctgtgctcttacctaaggaatctaaattgtcctcgactcggaccgatg

SEQ ID NO: 1749 - DNA, 203 bp, synthetic construct
  source 1..203: mol_type = other DNA
ggcgcgccagtcctagccttccattgctatgcactgaatgaggactactctcgtgtgtgtgtgtgtgtgtgtgtgtgtgtgtgtgtgtgtgtgtgtgtgtgttggatctactaacatgtttagcaaatggctctgacagggtggccatgagcagatgagaccagctcttgcttggttggaagccacaccgactcggaccgatg

SEQ ID NO: 1750 - DNA, 203 bp, synthetic construct
  source 1..203: mol_type = other DNA
ggcgcgccagtcctttgggaaacatgggcataatcaggtagttttgctaaaattcctcttccttggtctacataaagaagacatgggtctgtcatagaatggggacattagactgaaaactgggacaacccccttccttattttatagagactaggagttaaggggcctgcctaagattgcagtgatacgactcggaccgatg

SEQ ID NO: 1751 - DNA, 203 bp, synthetic construct
  source 1..203: mol_type = other DNA
ggcgcgccagtcctcacatttagttaaactgggctcagcatgcttgtcctcaaaatgtccatcctggtcacagcacacaagatggctattggtctgcttttaccctaccctgtactatacatgaaaattccagttattaacacactcaaactggtggagcttgttcaccctaggaaggggattgtatacgactcggaccgatg

SEQ ID NO: 1752 - DNA, 203 bp, synthetic construct
  source 1..203: mol_type = other DNA
ggcgcgccagtccttatggcaggcttccctggtgccgatgtaaagggctacatttgggaacatttgacttccttgggactcttaagtgcataatgatggcatgaagtaaaaggggcctcaatgatgataggaaaatcagttcttttaaaatttcttcaagaaaatccaggctatcacatagtctttctcgactcggaccgatg

SEQ ID NO: 1753 - DNA, 203 bp, synthetic construct
  source 1..203: mol_type = other DNA
ggcgcgccagtcctgtgtgacttattaggagataggaagagcattgggaaacttgcacagctagctatgcatctacattttggtttggggttagttatgaaatgttcttaatatgacgtgttcaataacttcacataaacttcctgttctccaaaacctcaaagagatagagttaatgagttgttgttcgactcggaccgatg

SEQ ID NO: 1754 - DNA, 203 bp, synthetic construct
  source 1..203: mol_type = other DNA
ggcgcgccagtccttaaagctaactgggtcttagcatcctcctgtgtatggaagagacaggtgaccgctccaggttgggtgctcacagaacccttttcctgactctcatggaagatggtggaaggaaaatagactgtctcatcaaccctcctgtgtcctctgaagcaatctcagtttttattaaccaccgactcggaccgatg

SEQ ID NO: 1755 - DNA, 203 bp, synthetic construct
  source 1..203: mol_type = other DNA
ggcgcgccagtcctctcttctgtgtttctggtagctatttaacctgtatttaatctgtacttcctatgccagcctcaattttatttgatttttacaattattctcttctaaccaatgaagtgtttgtcagtatgccccaaagcttgctcttttgtgctcccttttgaataactttctatccagaaaaacgactcggaccgatg

SEQ ID NO: 1756 - DNA, 203 bp, synthetic construct
  source 1..203: mol_type = other DNA
ggcgcgccagtcctagtctgaagagaggcgggacgcggggtgataacagctggctctggtgggcgggcgggagctggggaggaggagcaggagaggcccacaggcttcatttggagtcaggcctggctgttgctcaggtgaccagcttgtgtctctgggagggcgctgctttccccggccacccggcgcgactcggaccgatg

SEQ ID NO: 1757 - DNA, 203 bp, synthetic construct
  source 1..203: mol_type = other DNA
ggcgcgccagtcctccaaccaacgtggtgagctgagcgtcgggcagctgctcaagtggattgacaccacggcttgcctgtccgcggagaggcacgctggctgcccctgtgtcacagcttccatggatgacatctattttgagcacaccattagtgttggacaagtggtgaatatcaaggccaaggtgacgactcggaccgatg

SEQ ID NO: 1758 - DNA, 203 bp, synthetic construct
  source 1..203: mol_type = other DNA
ggcgcgccagtcctacagtgtggcggctgagcgccggcgcatgcgccttgtctatgcagacaccatcaaggacctcctggccaactgcgccattcagggcgatctggagagcagagactgtagccgcatggtgccggctgagaagacccgtgtggagagtgtggagctggtcctgcctccccacgccacgactcggaccgatg

SEQ ID NO: 1759 - DNA, 203 bp, synthetic construct
  source 1..203: mol_type = other DNA
ggcgcgccagtcctacagacgcggagagaccctctgctcaggcttctgcctctggcgcgagggggaccagctgaccaaggtatcctactacaaccaggccaccccaggtgttctcaactatgtgaccaccaacgtggccggcctctcctctgagttctacaccaccttcaaggcttgtgagcagtttccgactcggaccgatg

SEQ ID NO: 1760 - DNA, 203 bp, synthetic construct
  source 1..203: mol_type = other DNA
ggcgcgccagtcctggagggctgcgggctccgctatttgcaaatggatgccccagtgtccgggatgtgtggccagctgctgcaggcaggactccagcgtcaggatgttgccacttggagtatgaacaatgggcacggggttttcagccacagttccctcgaggccagtgttcagcaggatcatgccttcgactcggaccgatg

SEQ ID NO: 1761 - DNA, 203 bp, synthetic construct
  source 1..203: mol_type = other DNA
ggcgcgccagtccttgcctggtgcatgagaaactcttgtttcagctcttggcctttacccatgactcagcctgggggctggtgccggccttgcctgcagcaatgtagctgaggactggtctgaaggccaggagccctgtgctcttgacatcactgtactccctctccctccccgcaaccctgccccaccgactcggaccgatg

SEQ ID NO: 1762 - DNA, 203 bp, synthetic construct
  source 1..203: mol_type = other DNA
ggcgcgccagtcctactcagcctgggggctggtgccggccttgcctgcagcaatgtagctgaggactggtctgaaggccaggagccctgtgctcttgacatcactgtactccctctccctccccgcaaccctgccccaccttgcatccagggtatggtgtaaataaacctgtgttgccatggcaacagcgactcggaccgatg

SEQ ID NO: 1763 - DNA, 203 bp, synthetic construct
  source 1..203: mol_type = other DNA
ggcgcgccagtccttgacttatgctttttactgactttgccactatgggctgtctacacagctatggaataccgctggccctttggcaattacctatgtaagattgcttcagccagcgtcagtttcaacctgtacgctagtgtgtttctactcacgtgtctcagcattgatcgatacctggctattgtcgactcggaccgatg

SEQ ID NO: 1764 - DNA, 203 bp, synthetic construct
  source 1..203: mol_type = other DNA
ggcgcgccagtccttttctttttcttttcctggattccccaccaaatattcacttttctggatgtattgattcaactaggcatcatacgtgactgtagaattgcagatattgtggacacggccatgcctatcaccatttgtatagcttattttaacaattgcctgaatcctcttttttatggctttctcgactcggaccgatg

SEQ ID NO: 1765 - DNA, 203 bp, synthetic construct
  source 1..203: mol_type = other DNA
ggcgcgccagtcctggggaaaaaatttaaaagatattttctccagcttctaaaatatattcccccaaaagccaaatcccactcaaacctttcaacaaaaatgagcacgctttcctaccgcccctcagataatgtaagctcatccaccaagaagcctgcaccatgttttgaggttgagtgacatgttcgcgactcggaccgatg

SEQ ID NO: 1766 - DNA, 203 bp, synthetic construct
  source 1..203: mol_type = other DNA
ggcgcgccagtcctggtagcgccagtgccgattccgttttatccagaattaaccagcgcttagatatggtgccgcatttggagacagacatgatgcaaggaggcgtgtacggctcaggtggagaaaggtatgactcttatgagtcctgcgactcgagggccgtcctgagtgagcgcgacctgtaccggcgactcggaccgatg

SEQ ID NO: 1767 - DNA, 203 bp, synthetic construct
  source 1..203: mol_type = other DNA
ggcgcgccagtcctatgtgggaagaccccatgggggcccggggccagtgcatgtctggtgcctctcggctgccctccctcttctcccagaacatcatccccgagtacggcatgttccagggcatgcgaggtgggggcgccttcccgggcggctcccgctttggtttcgggtttggcaatggcatgaagcgactcggaccgatg

SEQ ID NO: 1768 - DNA, 203 bp, synthetic construct
  source 1..203: mol_type = other DNA
ggcgcgccagtcctttcattcccatgcagtttgggatcatccagaagcatctgaagaccatggatcacaaccggaaccgcaggctcatgatggagcagtccaagaagtcctccctcatggtggcccgcagtattctcaacaacaagctcatcagcaagaagctggagcgctacctgaagggcgagaaccgactcggaccgatg

SEQ ID NO: 1769 - DNA, 203 bp, synthetic construct
  source 1..203: mol_type = other DNA
ggcgcgccagtcctgatccaggggaggcgcctgtgaggcccggacctgccccggggcgaagggtatgtggcgagacagagccctgcacccctaattcccggtggaaaactcctgttgccgtttccctccaccggcctggagtctcccagtcttgtcccggcagtgccgccctccccactaagacctagcgactcggaccgatg

SEQ ID NO: 1770 - DNA, 203 bp, synthetic construct
  source 1..203: mol_type = other DNA
ggcgcgccagtcctaggctgtgggaagtctgtattagctgcagaagctgttagagatcattcccttttagaaggttgtttcccagggggagtgcattgggtttcagttgggaaacaagacaaatctgggcttctgatgaaactgcagaatctttgcacacggttggatcaggatgagagtttttcccacgactcggaccgatg

SEQ ID NO: 1771 - DNA, 203 bp, synthetic construct
  source 1..203: mol_type = other DNA
ggcgcgccagtcctgaaaccctgatatcaactttttataaagctcttaattgttgtgcagtattgcattcattacaaaagtgtttgtggttggatgaataatattaatgtagctttttcccaaatgaacatacctttaatcttgtttttcatgatcatcattaacagtttgtccttaggatgcaaatgcgactcggaccgatg

SEQ ID NO: 1772 - DNA, 203 bp, synthetic construct
  source 1..203: mol_type = other DNA
ggcgcgccagtccttcatacctcattgcagcctcagactcctgggttcaagcaatcctcctgcctcagcctcccaagtagctgagactacaggcacgagccaccacacccagctaatttttaagttttcttgtagagacagggtctcactatgttgtctaggctggtcttgaactcttggcctcaagtcgactcggaccgatg

SEQ ID NO: 1773 - DNA, 203 bp, synthetic construct
  source 1..203: mol_type = other DNA
ggcgcgccagtcctaatcctcctgcctcagcctcccaaagtgttgggattgcagatatgagccactggcctggccttcagcagttctttttgtgaagtaaaacttgtatgttggaaagagtagattttattggtctacccttttctcactgtagctgctggcagccctgtgccatatctggactctagcgactcggaccgatg

SEQ ID NO: 1774 - DNA, 203 bp, synthetic construct
  source 1..203: mol_type = other DNA
ggcgcgccagtcctgactgttataaagtataacaacacacatcaggttttaaaaagccttgaatggcccttgtcttaaaaagaaattaggagccaggtgcggtggcacgtgcctgtaatcccagctccttgggaggctaagacaggaggattccttgagccctggagtttgagtccagcctgggtgaccgactcggaccgatg

SEQ ID NO: 1775 - DNA, 203 bp, synthetic construct
  source 1..203: mol_type = other DNA
ggcgcgccagtcctgtctcgactggtccattcccggcccacccccattaaccggctcgagccactcccaggacgaagtcaaggcctcggaaggcgactacaactcccagcaggtcgagcagctccgcccgcgctgattctccattggccttccgggggtggggattagatgggaggtggccgtggggccgactcggaccgatg

SEQ ID NO: 1776 - DNA, 203 bp, synthetic construct
  source 1..203: mol_type = other DNA
ggcgcgccagtccttgcggccgggatttgtcccctcttcggcttccgtagaggaagtggcgcggaccttcatttggggtttcggttcccccccttccccttccccggggtctgggggtgacattgcaccgcgcccctcgtggggtcgcgttgccaccccacgcggactccccagctcgcgcgcccctccgactcggaccgatg

SEQ ID NO: 1777 - DNA, 203 bp, synthetic construct
  source 1..203: mol_type = other DNA
ggcgcgccagtcctccatttgcctgtcctggtcaggcccccaccccccttcccacctgaccagccatgggggctgcggtgtttttcggctgcactttcgtcgcgttcggcccggccttcgcgcttttcttgatcactgtggctggggacccgcttcgcgttatcatcctggtcgcaggggcatttttccgactcggaccgatg

SEQ ID NO: 1778 - DNA, 203 bp, synthetic construct
  source 1..203: mol_type = other DNA
ggcgcgccagtccttggctggtctccctgctcctggcctctgtggtctggttcatcttggtccatgtgaccgaccggtcagatgcccggctccagtacggcctcctgatttttggtgctgctgtctctgtccttctacaggaggtgttccgctttgcctactacaagctgcttaagaaggcagatgagcgactcggaccgatg

SEQ ID NO: 1779 - DNA, 203 bp, synthetic construct
  source 1..203: mol_type = other DNA
ggcgcgccagtcctctgacttcagcctttctgacagcagccattatcctgctccataccttttggggagttgtgttctttgatgcctgtgagaggagacggtactgggctttgggcctggtggttgggagtcacctactgacatcgggactgacattcctgaacccctggtatgaggccagcctgctgcgactcggaccgatg

SEQ ID NO: 1780 - DNA, 203 bp, synthetic construct
  source 1..203: mol_type = other DNA
ggcgcgccagtccttttctcaggcctgagggggaaccatttttggtgtgataaataccctaaactgcctttttttcttttttgaggtggggggagggaggaggtatattggaactcttctaacctccttgggctatattttctctcctcgagttgctcctcatggctgggctcatttcggtccctttccgactcggaccgatg

SEQ ID NO: 1781 - DNA, 203 bp, synthetic construct
  source 1..203: mol_type = other DNA
ggcgcgccagtccttccttggtcccagaccttgggggaaaggaaggaagtgcatgtttgggaactggcattactggaactaatggttttaacctccttaaccaccagcatccctcctctccccaaggtgaagtggagggtgctgtggtgagctggccactccagagctgcagtgccactggaggagtccgactcggaccgatg

SEQ ID NO: 1782 - DNA, 203 bp, synthetic construct
  source 1..203: mol_type = other DNA
ggcgcgccagtcctgcctttaccggtcgacatggttctcatctccctttgctttggactcagcattgcaaccatggtgcagtgctttggccatatcagcggtggccacatcaaccctgcagtgactgtggccatggtgtgcaccaggaagatcagcatcgccaagtctgtcttctacatcgcagcccacgactcggaccgatg

SEQ ID NO: 1783 - DNA, 203 bp, synthetic construct
  source 1..203: mol_type = other DNA
ggcgcgccagtcctcataggagctgtcctcgctggtggcctttatgagtatgtcttctgtccagatgttgaattcaaacgtcgttttaaagaagccttcagcaaagctgcccagcaaacaaaaggaagctacatggaggtggaggacaacaggagtcaggtagagacggatgacctgattctaaaacccgactcggaccgatg

SEQ ID NO: 1784 - DNA, 203 bp, synthetic construct
  source 1..203: mol_type = other DNA
ggcgcgccagtccttggagtggtgcatgtgattgacgttgaccggggagaggagaagaaggggaaagaccaatctggagaggtattgtcttcagtatgactagaagatcgcactgaaagcagacaagactccttagaactgtcctcagatttccttccacccattaaggaaacagatttgttataaatcgactcggaccgatg

SEQ ID NO: 1785 - DNA, 203 bp, synthetic construct
  source 1..203: mol_type = other DNA
ggcgcgccagtcctaggggcatgaaatgaatgaaagctttagcacttttttgcccctacatatgagacaacatattttgtatttcactcaaggctctgccagtaaaaagtaatgaaattgtacctttctaatgacatctatgcagcaggggtctatcgccttgtggatggcaccaaattatccaagtgcgactcggaccgatg

SEQ ID NO: 1786 - DNA, 203 bp, synthetic construct
  source 1..203: mol_type = other DNA
ggcgcgccagtcctgctgctcagtattgaagactttacaaggagattagaaatctttggaaaacatatgtgatgaaattgagctatatgatttatcagagatctgattccaaagagcacagaatactgttctcagaccatgaaaccagacaacacatgtattggtttaaactcgataatgacaggaaacgactcggaccgatg

SEQ ID NO: 1787 - DNA, 203 bp, synthetic construct
  source 1..203: mol_type = other DNA
ggcgcgccagtccttaacttagacaaagaagtgcaaatgtcaatttcactaaacaaaagctattagaagtaaagcagaaacctatcactgcaaggagtgacttgtaaataactgatgatcaagggctgtcttctctcaagcatggttccaactctgtgtcactttttagcgttaatggcagttgtgtgcgactcggaccgatg

SEQ ID NO: 1788 - DNA, 203 bp, synthetic construct
  source 1..203: mol_type = other DNA
ggcgcgccagtccttctgtggcagtgagataatggaccactattaaacctgattctcttcggtgctaggaaagagtgatgtgtgagattcccagagagtcgtcacaccagtgttatgcctgggagtgccactggcataccgcaggtgcctaaatcccaggcccctttctcagggggcgtggccacacccgactcggaccgatg

SEQ ID NO: 1789 - DNA, 203 bp, synthetic construct
  source 1..203: mol_type = other DNA
ggcgcgccagtcctaagagatcagagaggaaaaactgggaagacataaatgaattatacccagccatgaaacaatgccaactgtctcttccctaaggaagagtacaagtaccctaaaattgaaaggtggtccctacactgaaaacgcacatagtttgtcaaaagtgtacaaaagggaaagagtcttatcgactcggaccgatg

SEQ ID NO: 1790 - DNA, 203 bp, synthetic construct
  source 1..203: mol_type = other DNA
ggcgcgccagtccttttaagctttcaggctttcttaaaaacttggggaccagaatttcaatgtatgtttccattgttgaagataacattttcttcaaagagccttaaccttttgtactggaaggaaatattttctggacttaagtagttgcctaaatttaagattcctacactttatttctgccattgcgactcggaccgatg

SEQ ID NO: 1791 - DNA, 203 bp, synthetic construct
  source 1..203: mol_type = other DNA
ggcgcgccagtcctatgcttttcctaaacccttatactatctttttattatctgagccttttcctaatgcagctcataggtgctagctagagctgctgctcagtattgaagactttacaaggagattagaaatctttggaaaacatatgtgatgaaattgagctatatgatttatcagagatctgattcgactcggaccgatg

SEQ ID NO: 1792 - DNA, 203 bp, synthetic construct
  source 1..203: mol_type = other DNA
ggcgcgccagtcctatccttgcaccctggcaggaagctggtagctcacactttaacgggaggccttcacatattccagaaaagaaaccactttgcagtgccagactggaagaagtaacggtcactctgaaaacagggtgggagagctgcctctctttgaacctctcccaggaccaactctaacccaggcgactcggaccgatg

SEQ ID NO: 1793 - DNA, 203 bp, synthetic construct
  source 1..203: mol_type = other DNA
ggcgcgccagtcctaaatggttcacggctgacacatttggcatagatacctcatcctgtctacctttcatgaccaactacagttttcattgcaacgtctgccatcacagtgggaatacctatttcctccggaagcaagcaaacttgaaggaaatgtgccttagtgctttggccaacctgacatggcagcgactcggaccgatg

SEQ ID NO: 1794 - DNA, 203 bp, synthetic construct
  source 1..203: mol_type = other DNA
ggcgcgccagtcctgaacacccagatccaggcagtaaagatccagaagaagattaccccaaatttggacttttggatcaggaccttagtaacattggtcctgcttatgacaaccaaaaacagagcagtgctgtgtctactagtgggaatttaaatgggggaattgcagcaggaagcagcggaaaaggacgactcggaccgatg

SEQ ID NO: 1795 - DNA, 203 bp, synthetic construct
  source 1..203: mol_type = other DNA
ggcgcgccagtcctcgaggagccaagcgcaaacagcaggatggagggaccacagggaccaccaagaaggcccggagtgaccctttgttttctgctcagcgccttccccctcatggctacccattggaacacccgtttaacaaagatggctatcggtatattctagctgagcctgatccgcacgcccctcgactcggaccgatg

SEQ ID NO: 1796 - DNA, 203 bp, synthetic construct
  source 1..203: mol_type = other DNA
ggcgcgccagtccttgttttccaaggaaatggtaacctgtttctgagaacacctgaaatcaatggctatacattccaaaccaatctaaacgctatttccttttggtgtgggtttggttttgttcattttgaaatacacttttgaacactgagatccgtaaaactactagatctctggaagtgtaattgcgactcggaccgatg

SEQ ID NO: 1797 - DNA, 203 bp, synthetic construct
  source 1..203: mol_type = other DNA
ggcgcgccagtccttgagttgtgttttggctgctttcctattgctcccattcttgccaatcagccaccccctttcctgtgaaaatctgccaccttgaggagaggaacaagagtttaaaagggctaatgatctccctcccggtcttcccttggaacatggatgttgatatatgtgcgggtggtttcctgcgactcggaccgatg

SEQ ID NO: 1798 - DNA, 203 bp, synthetic construct
  source 1..203: mol_type = other DNA
ggcgcgccagtcctgtttaaaagggctaatgatctccctcccggtcttcccttggaacatggatgttgatatatgtgcgggtggtttcctgtcttgcttatcttcctttgccctgagctgatggctaaagggcagttttcggactattaaagactgaaatgtaagaatgagccttctaggctgggcgccgactcggaccgatg

SEQ ID NO: 1799 - DNA, 203 bp, synthetic construct
  source 1..203: mol_type = other DNA
ggcgcgccagtccttcaggcgggctccgtggatgaagagaatggccgacagttgggtgaggtagagctgcaatgtgggatttgtacaaaatggttcacggctgacacatttggcatagatacctcatcctgtctacctttcatgaccaactacagttttcattgcaacgtctgccatcacagtgggaacgactcggaccgatg

SEQ ID NO: 1800 - DNA, 203 bp, synthetic construct
  source 1..203: mol_type = other DNA
ggcgcgccagtcctacctgggaaaatgacttggccaaataacattgttaaaacaatgagtaaagaaagagatgtattcttggtaaaggaacacccagatccaggcagtaaagatccagaagaagattaccccaaatttggacttttggatcaggaccttagtaacattggtcctgcttatgacaaccacgactcggaccgatg

SEQ ID NO: 1801 - DNA, 203 bp, synthetic construct
  source 1..203: mol_type = other DNA
ggcgcgccagtcctttacttcccagccatctcactgtacaagagctgcacggtttccattaactttggaccatgcttcaagtatcctccgaaggatctcacttaccgccctatgagtgacatgggctggggcgccgtggtagagcacaccctggctgacgtcttgtatcacgtggagacagaagtggacgactcggaccgatg

SEQ ID NO: 1802 - DNA, 203 bp, synthetic construct
  source 1..203: mol_type = other DNA
ggcgcgccagtcctgtgaataatattgtccgagtaactaacttatttaaaagacatttccttctgtgggcattgactgtatcccacctgttttccaaggaaatggtaacctgtttctgagaacacctgaaatcaatggctatacattccaaaccaatctaaacgctatttccttttggtgtgggtttgcgactcggaccgatg

SEQ ID NO: 1803 - DNA, 203 bp, synthetic construct
  source 1..203: mol_type = other DNA
ggcgcgccagtccttttcctccgaagctctgtggtccgatctggggtccgcttgctttccctgcccggtcccgagcgctcagcctgaagcgccgctttcgagggcaccctgcatacactggccgcgcctcagggatctcattgcccgcgctttctcattgcctctttccgtgttcgattcggctgatccgactcggaccgatg

SEQ ID NO: 1804 - DNA, 203 bp, synthetic construct
  source 1..203: mol_type = other DNA
ggcgcgccagtccttgaaatggaaaatagtttatctgatcctgagaatgaacagacagttcagaaaagaaaatctaatgttgttatacaggaggaagaattagaattggctgttttggaagctggaagttctgaagctgtgaaaccaaaatgcactctagaagaaagacagcaatttatgaaagcattcgactcggaccgatg

SEQ ID NO: 1805 - DNA, 203 bp, synthetic construct
  source 1..203: mol_type = other DNA
ggcgcgccagtccttgatgaaagcagtcaagatacatctgaaaaatctcaggattgtgatgttcaatgtaaagcaaagcgtgacttcctaatgagtggtttgccagatttgttgaaacggcaaattgcaaagaaagctgctgcgctggatgtgtacaatgcagtgagtaccagtttccagagagtcgtcgactcggaccgatg

SEQ ID NO: 1806 - DNA, 203 bp, synthetic construct
  source 1..203: mol_type = other DNA
ggcgcgccagtcctggaggctgatgtcagccataaagaaaccaaaaggaaactcgtagaagcagaaaattctaagtcaaaaagaaagaaaccaaatgagtattcaaaaaatctggagaagaccaataggaagtcagaagaacttagcaaaagaaacaactcttctgggataaagctagattcttccaacgactcggaccgatg

SEQ ID NO: 1807 - DNA, 203 bp, synthetic construct
  source 1..203: mol_type = other DNA
ggcgcgccagtccttacaagtgacccaacatttagtttaatgtttgatggctgctttgaagaaatcaagttcagtactccttccctgctaaatgttgccagctacctacaaatgatttgcttaactgagaattttagaactgatgtaaaagactttgtaaccttgttaactgcaaatacttgtgatatcgactcggaccgatg

SEQ ID NO: 1808 - DNA, 203 bp, synthetic construct
  source 1..203: mol_type = other DNA
ggcgcgccagtcctgaaaacattggtaatattagatgatagtgatctatttgacactgacttggactttcctgatcaatctattagcctgtcctctgtatcatcttcctcaaatgcagaagaaagcaaaaccggagacgaagaaagcaaagccagagacaaaggaaacaatccagagacaaagaaatccgactcggaccgatg

SEQ ID NO: 1809 - DNA, 203 bp, synthetic construct
  source 1..203: mol_type = other DNA
ggcgcgccagtcctaacccttcgaaacatctgtaagactgagaagctaaaagaacaaggaaaaagtaaaagaagattcctgcactattttgaaggaattcatcttgacattccaaaagagactgtgaatactttggcagctgacttcccttaatgttccatactaacaatgctttgtatagattatcacgactcggaccgatg

SEQ ID NO: 1810 - DNA, 203 bp, synthetic construct
  source 1..203: mol_type = other DNA
ggcgcgccagtccttctcgccgccgcccgagcgcacccttcagcccgcgcgccggccgtgagtcctcggtgctcgcccgccggccagacaaacagcccgcccgaccccgtcccgaccctggccgccccgagcggagcctggagcaaaatgatgcttcaacacccaggccaggtctctgcctcggaagtcgactcggaccgatg

SEQ ID NO: 1811 - DNA, 203 bp, synthetic construct
  source 1..203: mol_type = other DNA
ggcgcgccagtccttgttgactcatgcaaatgaggtatctgaactgcagcttcagtattagcagagccacaggccgcctctgtggcatcaccagggtttctctgaagaagagggtctgcattttcctaaacccagtgctgctctcccatctcccatcttcctctcgcagcttgatgagccccggtgtgcgactcggaccgatg

SEQ ID NO: 1812 - DNA, 203 bp, synthetic construct
  source 1..203: mol_type = other DNA
ggcgcgccagtccttcccaggtacacccctgcatccaggcagcagcccaggccaccccctcctcactggcccttggctcctttcttgatgcctctgttgcttgtcccccaggagtcggagaagctggaaagtgtgaatgctgaactgaaggctcagattgaggagctcaagaacgagaagcagcatttcgactcggaccgatg

SEQ ID NO: 1813 - DNA, 203 bp, synthetic construct
  source 1..203: mol_type = other DNA
ggcgcgccagtcctcccaaaaccctgaagccattggagagctgtcttcctgtgtacctctagaatcccagcagcagagaaccatcaaggcgggagggcctgcagtgattcagcaggcccttcccattctgccccagagtgggtcttggaccagggcaagtgcatctttgcctcaactccaggatttagcgactcggaccgatg

SEQ ID NO: 1814 - DNA, 203 bp, synthetic construct
  source 1..203: mol_type = other DNA
ggcgcgccagtccttctcagatctggtttctaagagttttggggggcggggctgtcaccacgtgcagtatctcaagatattcaggtggccagaagagcttgtcagcaagaggaggacagaattctcccagcgttaacacaaaatccatgggcagtatgatggcaggtcctctgttgcaaactcagttccgactcggaccgatg

SEQ ID NO: 1815 - DNA, 203 bp, synthetic construct
  source 1..203: mol_type = other DNA
ggcgcgccagtcctcaaagtcacaggaagaaagcagaaagttcaacttccaaagggttaggactctccactcaatgtcttaggtcaggagttgtgtctaggctggaagagccaaagaatattccattttcctttccttgtggttgaaaaccacagtcagtggagagatgtttggaaaccacagtcagtcgactcggaccgatg

SEQ ID NO: 1816 - DNA, 203 bp, synthetic construct
  source 1..203: mol_type = other DNA
ggcgcgccagtccttgaaaggaaaaagaggcgacgagaaagaaataagattgcagctgcaaagtgccgaaacaagaagaaggagaagacggagtgcctgcagaaactcccaaggcccttttgggtccagaagacctgcatatgggctgttgactcatgcaaatgaggtatctgaactgcagcttcagtcgactcggaccgatg

SEQ ID NO: 1817 - DNA, 203 bp, synthetic construct
  source 1..203: mol_type = other DNA
ggcgcgccagtcctattagcagagccacaggccgcctctgtggcatcaccagggtttctctgaagaagagggtctgcattttcctaaacccagtgctgctctcccatctcccatcttcctctcgcagcttgatgagccccggtgtgtcccaggtacacccctgcatccaggcagcagcccaggccacccgactcggaccgatg

SEQ ID NO: 1818 - DNA, 203 bp, synthetic construct
  source 1..203: mol_type = other DNA
ggcgcgccagtcctccctcctcactggcccttggctcctttcttgatgcctctgttgcttgtcccccaggagtcggagaagctggaaagtgtgaatgctgaactgaaggctcagattgaggagctcaagaacgagaagcagcatttgatatacatgctcaaccttcatcggcccacgtgtattgtccgcgactcggaccgatg

SEQ ID NO: 1819 - DNA, 203 bp, synthetic construct
  source 1..203: mol_type = other DNA
ggcgcgccagtcctctctagaatcccagcagcagagaaccatcaaggcgggagggcctgcagtgattcagcaggcccttcccattctgccccagagtgggtcttggaccagggcaagtgcatctttgcctcaactccaggatttaggccttaacacactggccattcttatgttccagatggcccccacgactcggaccgatg

SEQ ID NO: 1820 - DNA, 203 bp, synthetic construct
  source 1..203: mol_type = other DNA
ggcgcgccagtcctaccacgtgcagtatctcaagatattcaggtggccagaagagcttgtcagcaagaggaggacagaattctcccagcgttaacacaaaatccatgggcagtatgatggcaggtcctctgttgcaaactcagttccaaagtcacaggaagaaagcagaaagttcaacttccaaagggcgactcggaccgatg

SEQ ID NO: 1821 - DNA, 203 bp, synthetic construct
  source 1..203: mol_type = other DNA
ggcgcgccagtcctttaggactctccactcaatgtcttaggtcaggagttgtgtctaggctggaagagccaaagaatattccattttcctttccttgtggttgaaaaccacagtcagtggagagatgtttggaaaccacagtcagtggagcctgggtggtacccaggctttagcattattggatgtcacgactcggaccgatg

SEQ ID NO: 1822 - DNA, 203 bp, synthetic construct
  source 1..203: mol_type = other DNA
ggcgcgccagtcctgctcagccagtccttgctgttgctgggggagtcacacagctccctaatcacgtggtgaatgtggtaccagccccttcagcgaatagcccagtgaatggaaaactttccgtgactaaacctgtcctacaaagtaccatgagaaatgtcggttcagatattgctgtgctaaggagacgactcggaccgatg

SEQ ID NO: 1823 - DNA, 203 bp, synthetic construct
  source 1..203: mol_type = other DNA
ggcgcgccagtcctctacaagtgtattatgcttcacccagaagttatcaagacttttttgaagccatccgcagaaggggagacacattttatgttgtgtcatttcgaagggatcacctgctgttaccagctaccacccataacaagaccacaagaccaaaaatgtcaattgtgttaccagcaataaaccgactcggaccgatg

SEQ ID NO: 1824 - DNA, 203 bp, synthetic construct
  source 1..203: mol_type = other DNA
ggcgcgccagtcctgatggttttgtgtttaaacagtcatcttcttttaaataatatccacctctcctttttgccatttcacttattgattcataaagtgaattttatttaaagctatgccacacatgcatgttcaaatggtttccactgattcgatttttcattcatttaatgcaaacccattctggacgactcggaccgatg

SEQ ID NO: 1825 - DNA, 203 bp, synthetic construct
  source 1..203: mol_type = other DNA
ggcgcgccagtcctcctgggtgattttcagacaagaaccattttctctggggaccattcttctgctgggtgccaaggaatataaggcaaatgcccagaagaccttcaggtgactgggcagtcttatcatgggatatttcttctggccctgccccttcccattctgtaatgtgaattagccacaccagacgactcggaccgatg

SEQ ID NO: 1826 - DNA, 203 bp, synthetic construct
  source 1..203: mol_type = other DNA
ggcgcgccagtcctagagcaggaaggtggtagcagggccggcagctctgccacagagctaggggtgcctgtaaggtgccgcctagagcagcctgggagctttgccttcttttgtctctcactagcccttctactctttgtcattgcctgttcttgagtggatctttgaaatgaggggacaggattctccgactcggaccgatg

SEQ ID NO: 1827 - DNA, 203 bp, synthetic construct
  source 1..203: mol_type = other DNA
ggcgcgccagtcctgaaaaggaacttgggattcaaattgatttttcaaatcatttttaaagagacatcatcctgactaaatcttagcctgaaccttcctcccctgtgtgtattccccggtagtcaccgcagcgagatgctggtgagactgccgtggtggcatttagcatcgttaaaactggaaaactccgactcggaccgatg

SEQ ID NO: 1828 - DNA, 203 bp, synthetic construct
  source 1..203: mol_type = other DNA
ggcgcgccagtcctgaataaagcctaaaagagaatgaaatataagaaatgttcgttcccacccctaataacatttggaagtgaatattcccattttcttccacccacagggattgggattgatttttaatttcctaggaaacaatactagactacccaaaaagatgttgccagaatccaaaaggaactcgactcggaccgatg

SEQ ID NO: 1829 - DNA, 203 bp, synthetic construct
  source 1..203: mol_type = other DNA
ggcgcgccagtccttaaataaatcataatttatcatttgccaaggccaacaaacaacactattgtgctgtttgctctcaatgaagttgaataaaccaggaggcttggcatatcccctttatgttaatcccagctagagattagtaggttgactttcacagcaattgtatattgatccattttaactcacgactcggaccgatg

SEQ ID NO: 1830 - DNA, 203 bp, synthetic construct
  source 1..203: mol_type = other DNA
ggcgcgccagtcctctgaggggggagtgttagagatgccatttcaccaggatctttttgctcaggttgtacccatgccaattgaagaacgtgttaaagatgaggaggagagatgtaccattctctcccttaataatgatgttggtttgcaaaacctaaagaaataataacaacagactatttcatactcgactcggaccgatg

SEQ ID NO: 1831 - DNA, 203 bp, synthetic construct
  source 1..203: mol_type = other DNA
ggcgcgccagtcctacctgcgcactaagctttgtgaccttgaaagagccaaccagaccctgaaggatgaatatgatgccctgcagatcacttttactgccttggagggaaaactgaggaaaactacggaagagaaccaggagctggtcaccagatggatggctgagaaagcccaggaagccaatcggccgactcggaccgatg

SEQ ID NO: 1832 - DNA, 203 bp, synthetic construct
  source 1..203: mol_type = other DNA
ggcgcgccagtcctcagccacgagacgctctgtctcttccttcccagtcccccaggacaatgtggatactcatcctggttctggtaaagaagtgagggtaccagctactgccttgtgtgtcttcgatgcacatgatggggaagtcaacgctgtgcagttcagtccaggttcccggttactggccactgcgactcggaccgatg

SEQ ID NO: 1833 - DNA, 203 bp, synthetic construct
  source 1..203: mol_type = other DNA
ggcgcgccagtcctatcgattacggcacacactcacgggacacagtgggaaagtgctgtctgctaagttcctgctggacaatgcgcggattgtctcaggaagtcacgaccggactctcaaactctgggatctacgcagcaaagtctgcataaagacagtgtttgcaggatccagttgcaatgatattgcgactcggaccgatg

SEQ ID NO: 1834 - DNA, 203 bp, synthetic construct
  source 1..203: mol_type = other DNA
ggcgcgccagtccttttcaaagcagcacagctcatccatcaatgcggtggcgtggtcgccctctggctcgcacgttgtcagtgtggacaaaggatgcaaagctgtgctgtgggcacagtactgacggggctctcagggctgggaggaccccagtgccctcctcagaagaagcacatgggctcctgcagcgactcggaccgatg

SEQ ID NO: 1835 - DNA, 203 bp, synthetic construct
  source 1..203: mol_type = other DNA
ggcgcgccagtcctcaggttcttgccttgggaaacactactagctctgaccttccatacctcacttgggggagcacagggccccgctgggcctcctcaccaacggcagtgccaaaatcagcccccacatcaaggtggtgttctctgtgctttctctcgtccttccaaagtcggttctggcctaacgcacgactcggaccgatg

SEQ ID NO: 1836 - DNA, 203 bp, synthetic construct
  source 1..203: mol_type = other DNA
ggcgcgccagtccttgtcccaacaccttgggttcatttgcccggtgaactcactttaagcattggattaacggaaactcccgaactacagacccctccctggtgggttgcatgaatgtgtctcattactgctgaaatgtcctcacatctctttcactgttcttcagagctttctggctctctttcccccgactcggaccgatg

SEQ ID NO: 1837 - DNA, 203 bp, synthetic construct
  source 1..203: mol_type = other DNA
ggcgcgccagtccttgcagagaatgaaaaagactccaggaggcggcaagcccggctgcagaaagagcttgcagaagcagcaaaggaacctctaccagtcgaacaggatgatgacattgaggtcattgtggatgaaacttctgatcacacagaagagacctctcctgtgcgagccatcagcagagcagccgactcggaccgatg

SEQ ID NO: 1838 - DNA, 203 bp, synthetic construct
  source 1..203: mol_type = other DNA
ggcgcgccagtcctcactaagcgactctcgcagcctgctggaggccttctggattctatcactaatatctttgggagacgctctgtctcttccttcccagtcccccaggacaatgtggatactcatcctggttctggtaaagaagtgagggtaccagctactgccttgtgtgtcttcgatgcacatgacgactcggaccgatg

SEQ ID NO: 1839 - DNA, 203 bp, synthetic construct
  source 1..203: mol_type = other DNA
ggcgcgccagtccttggggaagtcaacgctgtgcagttcagtccaggttcccggttactggccactggaggcatggaccgcagggttaagctttgggaagtatttggagaaaaatgtgagttcaagggttccctatctggcagtaatgcaggaattacaagcattgaatttgatagtgctggatcttacgactcggaccgatg

SEQ ID NO: 1840 - DNA, 203 bp, synthetic construct
  source 1..203: mol_type = other DNA
ggcgcgccagtcctgggctgggaggaccccagtgccctcctcagaagaagcacatgggctcctgcagccctgtcctggcaggtgatgtgctgggtatagcatggacctcccagagaagctcaagctatgtggcactgtagctttgccgtgaatgggatttctgaagatttgactgaggtctctcttggcgactcggaccgatg

SEQ ID NO: 1841 - DNA, 203 bp, synthetic construct
  source 1..203: mol_type = other DNA
ggcgcgccagtcctcctggaagaataacactgaaaaaacctgacgctgcggtcacttagcagaggctcaggttcttgccttgggaaacactactagctctgaccttccatacctcacttgggggagcacagggccccgctgggcctcctcaccaacggcagtgccaaaatcagcccccacatcaaggtcgactcggaccgatg

SEQ ID NO: 1842 - DNA, 203 bp, synthetic construct
  source 1..203: mol_type = other DNA
ggcgcgccagtcctatgtcctcacatctctttcactgttcttcagagctttctggctctctttcccccacaaaattcgacatatttaaaaatctccgtgtggctttaaaaaatggttttttgtttttttgtttttttgaggtgggagaggatgtgtgaaaatcttttccagggaaatgggttcgctgccgactcggaccgatg

SEQ ID NO: 1843 - DNA, 203 bp, synthetic construct
  source 1..203: mol_type = other DNA
ggcgcgccagtcctcggagcgaggagttgaccctgagtgaggaagcgacctggagtgaagaggcgacccagagtgaggaggcgacccagggcgaagagatgaatcggagccaggaggtgacccgggacgaggagtcgacccggagcgaggaggtgaccagggaggaaatggcggcagctgggctcacccgactcggaccgatg

SEQ ID NO: 1844 - DNA, 203 bp, synthetic construct
  source 1..203: mol_type = other DNA
ggcgcgccagtcctgtgactgtcacccacagcaatgagaagcacgaccttcatgttacctcccagcagggcagcagtgaaccagttgtccaagacctggcccaggttgttgaagaggtcataggggttccacagtcttttcagaaactcatatttaagggaaaatctctgaaggaaatggaaacaccgcgactcggaccgatg

SEQ ID NO: 1845 - DNA, 203 bp, synthetic construct
  source 1..203: mol_type = other DNA
ggcgcgccagtcctagctgtttggacctctgggtgctttctttgggctggtgagagctctaatttgccttgggccagtttcaggtttataggccccctcagtcttcagatacatgagggcttctttgctcttgtgatcgtgtagtcccatagctgtaaaaccagaatcaccaggaggttgcacctagtcgactcggaccgatg

SEQ ID NO: 1846 - DNA, 203 bp, synthetic construct
  source 1..203: mol_type = other DNA
ggcgcgccagtcctcaggaatattgggaatggcctagaacaaggtgtttggcacataagtagaccacttatccctcattgtgacctaattccagagcatctggctgggttgttgggttctagactttgtcctcacctcccagtgaccctgactagccacaggccatgagataccagggggccgttcctcgactcggaccgatg

SEQ ID NO: 1847 - DNA, 203 bp, synthetic construct
  source 1..203: mol_type = other DNA
ggcgcgccagtcctcatttgaacctgggaggtagaggttgctgtgagccgagattacgcccctgcactccagcctgggtcacagagtgagactccatctcagaaaaaaaaaaaattgagtcaggtgcagtagctccttcctgtagtcccagctacttgggaggctgaggctagaggatcacttgagcccgactcggaccgatg

SEQ ID NO: 1848 - DNA, 203 bp, synthetic construct
  source 1..203: mol_type = other DNA
ggcgcgccagtccttagtcataatttatgcttaataacattgatagtagccctttgcgctataactctacctaaagactcacatcatttggcagagagagagtcgttgaagtcccaggaattcaggactgggcaggttaagacctcagacaaggtagtagaggtagacttgtggacaaggctcgggtccgactcggaccgatg

SEQ ID NO: 1849 - DNA, 203 bp, synthetic construct
  source 1..203: mol_type = other DNA
ggcgcgccagtcctcccattctctgatttttttcctcttgtcctctgcctctccctctagctcccacttcctctctgctctagttcattttctttagagcagcccgagtgatcatgaagtgcaaatcttgccatgtcagtcccctgcttagaaccctccaatggctcactttctctttaggcaaaagtcgactcggaccgatg

SEQ ID NO: 1850 - DNA, 203 bp, synthetic construct
  source 1..203: mol_type = other DNA
ggcgcgccagtcctctttaccccatgccttctcccatctcatctcaaccccctcatttgttggctgtctgctgtcagccactcttctttcaggtcctcagatgcactgcaccctctcctgcctgggggtctttgctcctgctactacctctgcttgaacagctcctcaccttccttcctccaaccctacgactcggaccgatg

SEQ ID NO: 1851 - DNA, 203 bp, synthetic construct
  source 1..203: mol_type = other DNA
ggcgcgccagtccttttctgtgaagcagaagtctgggaatcgatctggaaatcctcctaatttttactccctctccccgcgactcctgattcattgggaagtttcaaatcagctataactggagagtgctgaagattgatgggatcgttgccttatgcatttgttttggttttacaaaaaggaaacttcgactcggaccgatg

SEQ ID NO: 1852 - DNA, 203 bp, synthetic construct
  source 1..203: mol_type = other DNA
ggcgcgccagtcctgacctcgccgctgcagaccccggctgcccccggcgccgccgcggggcctgcgctcagcccggtgccacctgtggtccacctgaccctccgccaggccggcgacgacttctcccgccgctaccgccgcgacttcgccgagatgtccagccagctgcacctgacgcccttcaccgccgactcggaccgatg

SEQ ID NO: 1853 - DNA, 203 bp, synthetic construct
  source 1..203: mol_type = other DNA
ggcgcgccagtcctctgaaccggcacctgcacacctggatccaggataacggaggctgggtaggtgcacttggtgatgtgagtctgggctgaggccacaggtccgagatgcgggggttggagtgcgggtgggctcctggggcaatgggaggctgtggagccggcgaaataaaatcagagttgttgctacgactcggaccgatg

SEQ ID NO: 1854 - DNA, 203 bp, synthetic construct
  source 1..203: mol_type = other DNA
ggcgcgccagtcctaacgctggtcctcggccgggcgcgctgacgtcatcgtgcgtcagagtgagcccggatggggcggcgggcttcgggagcgcccgggctgatccgagccgagcgggccgtatctccttgtcggcgccgctgattcccggctctgcggaggcctctaggcagccgcgcagcttccgtcgactcggaccgatg

SEQ ID NO: 1855 - DNA, 203 bp, synthetic construct
  source 1..203: mol_type = other DNA
ggcgcgccagtcctgacagtcctattcaaaagcataaacagctatatcctagctgtagctttattcagaatctggtttcagctagtctgggatccacctctaagaatacgtctccaatgagaaacagttttgcacattcattatctcccaccttggaacatagtagcttgttcagtggttcttactcccgactcggaccgatg

SEQ ID NO: 1856 - DNA, 203 bp, synthetic construct
  source 1..203: mol_type = other DNA
ggcgcgccagtcctaaaccctcttaattctagagcagttgaagacatctcttcatcgaggactaacccctacagttatgcaatgagtactgaagaagccagatttcttacctaccatatgtggccattaacttttttgtcaccatcagaattggcaagagctggtttttattatataggacctggagacgactcggaccgatg

SEQ ID NO: 1857 - DNA, 203 bp, synthetic construct
  source 1..203: mol_type = other DNA
ggcgcgccagtccttagggtagcctgctttgcctgtggtgggaagctcagtaactgggaaccaaaggatgatgctatgtcagaacaccggaggcattttcccaactgtccatttttggaaaattctctagaaactctgaggtttagcatttcaaatctgagcatgcagacacatgcagctcgaatgagcgactcggaccgatg

SEQ ID NO: 1858 - DNA, 203 bp, synthetic construct
  source 1..203: mol_type = other DNA
ggcgcgccagtcctagtctatattttaacctgcataaaaaggtctttaaaatattgttgaacacttgaagccatctaaagtaaaaagggaattatgagtttttcaattagtaacattcatgttctagtctgctttggtactaataatcttgtttctgaaaagatggtatcatatatttaatcttaatccgactcggaccgatg

SEQ ID NO: 1859 - DNA, 203 bp, synthetic construct
  source 1..203: mol_type = other DNA
ggcgcgccagtcctcatctctacattcaagaactggcccttcttggagggctgcgcctgcaccccggagcggatggccgaggctggcttcatccactgccccactgagaacgagccagacttggcccagtgtttcttctgcttcaaggagctggaaggctgggagccagatgacgaccccatagaggacgactcggaccgatg

SEQ ID NO: 1860 - DNA, 203 bp, synthetic construct
  source 1..203: mol_type = other DNA
ggcgcgccagtcctctagagctgacagctttgttcgcgtgggcagagccttccacagtgaatgtgtctggacctcatgttgttgaggctgtcacagtcctgagtgtggacttggcaggtgcctgttgaatctgagctgcaggttccttatctgtcacacctgtgcctcctcagaggacagtttttttgcgactcggaccgatg

SEQ ID NO: 1861 - DNA, 203 bp, synthetic construct
  source 1..203: mol_type = other DNA
ggcgcgccagtcctgtaagatgatggatttgattcgccctcctccctgtcatagagctgcagggtggattgttacagcttcgctggaaacctctggaggtcatctcggctgttcctgagaaataaaaagcctgtcatttcaaacactgctgtggaccctactgggtttttaaaatattgtcagtttttcgactcggaccgatg

SEQ ID NO: 1862 - DNA, 203 bp, synthetic construct
  source 1..203: mol_type = other DNA
ggcgcgccagtcctaccaacgacaccactgaagacaactccagttgcctctcaacagaatgcttcaagtgtttgtgaagaaaaacctatacctgctgaacgccaccgagggtcaagtcacagacaagaagctgtgcagtcaccagtgtttcctcctgcccagaaacaaatccaccaaaaacccatacccgactcggaccgatg

SEQ ID NO: 1863 - DNA, 203 bp, synthetic construct
  source 1..203: mol_type = other DNA
ggcgcgccagtcctgagaaaaagtcccaaaacttcatattttggattatgaatcatccagtaataaaatggaagatggagtcagctattgaagtggtcatccatttctttttaagaagctcatgtggacttgttctattgcctgacctgatgaactgttaatatctggtgaggttgagttatcatgctcgactcggaccgatg

SEQ ID NO: 1864 - DNA, 203 bp, synthetic construct
  source 1..203: mol_type = other DNA
ggcgcgccagtcctaagttttacttctccctagagcaggggtgtttgccagcagcctgcactctcagaaatcagacttgagtggccggaacccttgagaccagaggcttaccatgctgctccctaggagggccaggaactgctgacgtgaccactggacagttattcgtgtctcttacaattaccaaacgactcggaccgatg

SEQ ID NO: 1865 - DNA, 203 bp, synthetic construct
  source 1..203: mol_type = other DNA
ggcgcgccagtccttgctgacgaagaggagcagtggtccgatgactttgacagcgactatgaaaatccagatgagcactcggactcagagatgtacgtgatgcccgccgaggagaacgctgatgacagctacgagccgcctccagtagagcaggaaaccaggccggttcacccagccctgcccttcgccgactcggaccgatg

SEQ ID NO: 1866 - DNA, 203 bp, synthetic construct
  source 1..203: mol_type = other DNA
ggcgcgccagtcctcagaggcgagtatatagacaatcgatcaagccagaggcattccccacccttcagcaagacacttcccagtaagcccagctggccttcagagaaagcaaggctcacctccaccctgccggccctgactgctttgcagaaacctcaagtcccacccaaacccaaaggcctccttgacgactcggaccgatg

SEQ ID NO: 1867 - DNA, 203 bp, synthetic construct
  source 1..203: mol_type = other DNA
ggcgcgccagtcctggatgaggctgattatgtggtccccgtggaagataatgatgaaaactatattcatcccacagaaagcagttcacctccacctgaaaaagctcccatggtgaatagatcaaccaagccaaattcctcaacgcccgcctctcctccaggaacagcttcaggtcgaaacagtggggccgactcggaccgatg

SEQ ID NO: 1868 - DNA, 203 bp, synthetic construct
  source 1..203: mol_type = other DNA
ggcgcgccagtcctctgggaaaccaagtcacctccaccagctgcaccatccccgttgccacgggccgggaaaaaaccaacgacaccactgaagacaactccagttgcctctcaacagaatgcttcaagtgtttgtgaagaaaaacctatacctgctgaacgccaccgagggtcaagtcacagacaagacgactcggaccgatg

SEQ ID NO: 1869 - DNA, 203 bp, synthetic construct
  source 1..203: mol_type = other DNA
ggcgcgccagtcctaagatgaatgcagagcccgagaggaagtttggcgtggtggtggttggtgttggccgagccggctccgtgcggatgagggacttgcggaatccacacccttcctcagcgttcctgaacctgattggcttcgtgtcgagaagggagctcgggagcattgatggagtccagcagattcgactcggaccgatg

SEQ ID NO: 1870 - DNA, 203 bp, synthetic construct
  source 1..203: mol_type = other DNA
ggcgcgccagtcctcagaaaggaaaagtcttgcacgaggagcatgttgaactcttgatggaggaattcgctttcctgaaaaaagaagtggtggggaaagacctgctgaaagggtcgctcctcttcacagctggcccgttggaagaagagcggtttggcttccctgcattcagcggcatctctcgcctgcgactcggaccgatg

SEQ ID NO: 1871 - DNA, 203 bp, synthetic construct
  source 1..203: mol_type = other DNA
ggcgcgccagtcctacccttcctcagcgttcctgaacctgattggcttcgtgtcgagaagggagctcgggagcattgatggagtccagcagatttctttggaggatgctctttccagccaagaggtggaggtcgcctatatctgcagtgagagctccagccatgaggactacatcaggcagttccttacgactcggaccgatg

SEQ ID NO: 1872 - DNA, 203 bp, synthetic construct
  source 1..203: mol_type = other DNA
ggcgcgccagtcctatgctggcaagcacgtccttgtggaataccccatgacactgtcattggcggccgctcaggaactgtgggagctggctgagcagaaaggaaaagtcttgcacgaggagcatgttgaactcttgatggaggaattcgctttcctgaaaaaagaagtggtggggaaagacctgctgacgactcggaccgatg

SEQ ID NO: 1873 - DNA, 203 bp, synthetic construct
  source 1..203: mol_type = other DNA
ggcgcgccagtccttggagacagagaagaaaagtccactgtcatggattgaagaaaaaggacctggtctaaaacgaaacagatatttaagcttccatttcaagtctgggtccttggagaatgtgccaaatgtaggagtgaataagaacatatttctgaaagatcaaaatatatttgtccagaaactctcgactcggaccgatg

SEQ ID NO: 1874 - DNA, 203 bp, synthetic construct
  source 1..203: mol_type = other DNA
ggcgcgccagtcctaatggcctccctttgaatatatgattttagccaccatcatagcgaattgcatcgtcctcgcactggagcagcatctgcctgatgatgacaagaccccgatgtctgaacggctggatgacacagaaccatacttcattggaattttttgtttcgaggctggaattaaaatcattgcgactcggaccgatg

SEQ ID NO: 1875 - DNA, 203 bp, synthetic construct
  source 1..203: mol_type = other DNA
ggcgcgccagtcctcccttgggtttgccttccacaaaggctcctacttgaggaatggctggaatgtcatggactttgtggtggtgctaacgggcatcttggcgacagttgggacggagtttgacctacggacgctgagggcagttcgagtgctgcggccgctcaagctggtgtctggaatcccaagttcgactcggaccgatg

SEQ ID NO: 1876 - DNA, 203 bp, synthetic construct
  source 1..203: mol_type = other DNA
ggcgcgccagtcctctccatgtgggacagaagagcccgcccgcacctgccccaatgggaccaaatgtcagccctactgggaagggcccaacaacgggatcactcagttcgacaacatcctgtttgcagtgctgactgttttccagtgcataaccatggaagggtggactgatctcctctacaatagcacgactcggaccgatg

SEQ ID NO: 1877 - DNA, 203 bp, synthetic construct
  source 1..203: mol_type = other DNA
ggcgcgccagtcctacgatgcctcagggaacacttggaactggttgtacttcatccccctcatcatcatcggctccttttttatgctgaaccttgtgctgggtgtgctgtcaggggagtttgccaaagaaagggaacgggtggagaaccggcgggcttttctgaagctgaggcggcaacaacagattgcgactcggaccgatg

SEQ ID NO: 1878 - DNA, 203 bp, synthetic construct
  source 1..203: mol_type = other DNA
ggcgcgccagtcctaagaagcagcgaaccagaaacttgccctacagaaagccaaggaggtggcagaagtgagtcctctgtccgcggccaacatgtctatagctgtgaaagagcaacagaagaatcaaaagccagccaagtccgtgtgggagcagcggaccagtgagatgcgaaagcagaacttgctggcgactcggaccgatg

SEQ ID NO: 1879 - DNA, 203 bp, synthetic construct
  source 1..203: mol_type = other DNA
ggcgcgccagtcctacgcccgggagggcagcctggagcaacccgggttctgggagggcgaggccgagcgaggcaaggccggggacccccaccggaggcacgtgcaccggcaggggggcagcagggagagccgcagcgggtccccgcgcacgggcgcggacggggagcatcgacgtcatcgcgcgcacccgactcggaccgatg

SEQ ID NO: 1880 - DNA, 203 bp, synthetic construct
  source 1..203: mol_type = other DNA
ggcgcgccagtcctcggccgctccccacggcagccttggccacgccggcctgccccagagcccagccaagatgggaaacagcaccgaccccggccccatgctggccatccctgccatggccaccaacccccagaacgccgccagccgccggacgcccaacaacccggggaacccatccaatcccggcccgactcggaccgatg

SEQ ID NO: 1881 - DNA, 203 bp, synthetic construct
  source 1..203: mol_type = other DNA
ggcgcgccagtccttgccaaaaaaagaggaagagaagaaggaggaggaggaagacgaccgtggggaagacggccctaagccaatgcctccctatagctccatgttcatcctgtccacgaccaacccccttcgccgcctgtgccattacatcctgaacctgcgctactttgagatgtgcatcctcatggcgactcggaccgatg

SEQ ID NO: 1882 - DNA, 203 bp, synthetic construct
  source 1..203: mol_type = other DNA
ggcgcgccagtccttcattgccatgagcagcatcgccctggccgccgaggaccctgtgcagcccaacgcacctcggaacaacgtgctgcgatactttgactacgtttttacaggcgtctttacctttgagatggtgatcaagatgattgacctggggctcgtcctgcatcagggtgcctacttccgtgcgactcggaccgatg

SEQ ID NO: 1883 - DNA, 203 bp, synthetic construct
  source 1..203: mol_type = other DNA
ggcgcgccagtccttggagatgtccattttctacgtcgtctactttgtggtgttccccttcttctttgtcaatatctttgtggccttgatcatcatcaccttccaggagcaaggggacaagatgatggaggaatacagcctggagaaaaatgagagggcctgcattgatttcgccatcagcgccaagccgactcggaccgatg

SEQ ID NO: 1884 - DNA, 203 bp, synthetic construct
  source 1..203: mol_type = other DNA
ggcgcgccagtcctcgctgacccgacacatgccgcagaacaagcagagcttccagtaccgcatgtggcagttcgtggtgtctccgcctttcgagtacacgatcatggccatgatcgccctcaacaccatcgtgcttatgatgaagttctatggggcttctgttgcttatgaaaatgccctgcgggtgtcgactcggaccgatg

SEQ ID NO: 1885 - DNA, 203 bp, synthetic construct
  source 1..203: mol_type = other DNA
ggcgcgccagtccttcaacatcgtcttcacctccctcttctctctggaatgtgtgctgaaagtcatggcttttgggattctgaattatttccgcgatgcctggaacatcttcgactttgtgactgttctgggcagcatcaccgatatcctcgtgactgagtttgggaatccgaataacttcatcaacccgactcggaccgatg

SEQ ID NO: 1886 - DNA, 203 bp, synthetic construct
  source 1..203: mol_type = other DNA
ggcgcgccagtcctgtaacattggcatcgacgtggaggacgaggacagtgatgaagatgagttccaaatcactgagcacaataacttccggaccttcttccaggccctcatgcttctcttccggagtgccaccggggaagcttggcacaacatcatgctttcctgcctcagcgggaaaccgtgtgatacgactcggaccgatg

SEQ ID NO: 1887 - DNA, 203 bp, synthetic construct
  source 1..203: mol_type = other DNA
ggcgcgccagtcctagtccacggacctcaccgtggggaagatctacgcagccatgatgatcatggagtactaccggcagagcaaggccaagaagctgcaggccatgcgcgaggagcaggaccggacacccctcatgttccagcgcatggagcccccgtccccaacgcaggaagggggacctggccagacgactcggaccgatg

SEQ ID NO: 1888 - DNA, 203 bp, synthetic construct
  source 1..203: mol_type = other DNA
ggcgcgccagtcctctcagtccgtggagatgcgagagatgggcagagatggctactccgacagcgagcactacctccccatggaaggccagggccgggctgcctccatgccccgcctccctgcagagaaccagaggagaaggggccggccacgtgggaataacctcagtaccatctcagacaccagcccgactcggaccgatg

SEQ ID NO: 1889 - DNA, 203 bp, synthetic construct
  source 1..203: mol_type = other DNA
ggcgcgccagtcctgccgggcacgggctcgggaccagcgctggtcccgctcgcccagcgagggccgagagcacatggcgcaccggcagggcagtagttccgtaagtggaagcccagccccctcaacatctggtaccagcactccgcggcggggccgccgccagctcccccagaccccctccacccccccgactcggaccgatg

SEQ ID NO: 1890 - DNA, 203 bp, synthetic construct
  source 1..203: mol_type = other DNA
ggcgcgccagtcctatcggccgcccacggggggccacagcagcggccgctcgcccaggatggagaggcgggtcccaggcccggcccggagcgagtcccccagggcctgtcgacacggcggggcccggtggccggcatctggcccgcacgtgtccgaggggcccccgggtccccggcaccatggctactcgactcggaccgatg

SEQ ID NO: 1891 - DNA, 203 bp, synthetic construct
  source 1..203: mol_type = other DNA
ggcgcgccagtcctcagccctccccagctgcccaggaagagccccagccatggaacaccagctcctgtgctgcgaagtggaaaccatccgccgcgcgtaccccgatgccaacctcctcaacgaccgggtgctgcgggccatgctgaaggcggaggagacctgcgcgccctcggtgtcctacttcaaatcgactcggaccgatg

SEQ ID NO: 1892 - DNA, 203 bp, synthetic construct
  source 1..203: mol_type = other DNA
ggcgcgccagtcctgtgtgcagaaggaggtcctgccgtccatgcggaagatcgtcgccacctggatgctggaggtctgcgaggaacagaagtgcgaggaggaggtcttcccgctggccatgaactacctggaccgcttcctgtcgctggagcccgtgaaaaagagccgcctgcagctgctgggggccacgactcggaccgatg

SEQ ID NO: 1893 - DNA, 203 bp, synthetic construct
  source 1..203: mol_type = other DNA
ggcgcgccagtcctaggaggtggacctggcttgcacacccaccgacgtgcgggacgtggacatctgagggcgccaggcaggcgggcgccaccgccacccgcagcgagggcggagccggccccaggtgctcccctgacagtccctcctctccggagcattttgataccagaagggaaagcttcattctccgactcggaccgatg

SEQ ID NO: 1894 - DNA, 203 bp, synthetic construct
  source 1..203: mol_type = other DNA
ggcgcgccagtccttgagggaggacaggcgggaggaggtgtgaggaggaggctcccgaggggaaggggcggtgcccacaccggggacaggccgcagctccattttcttattgcgctgctaccgttgacttccaggcacggtttggaaatattcacatcgcttctgtgtatctctttcacattgtttgccgactcggaccgatg

SEQ ID NO: 1895 - DNA, 203 bp, synthetic construct
  source 1..203: mol_type = other DNA
ggcgcgccagtcctaaccacgcgggggccttgagggacgctttgtctgtcgtgatggggcaagggcacaagtcctggatgttgtgtgtatcgagaggccaaaggctggtggcaagtgcacggggcacagcggagtctgtcctgtgacgcgcaagtctgagggtctgggcggcgggcggctgggtctgtcgactcggaccgatg

SEQ ID NO: 1896 - DNA, 203 bp, synthetic construct
  source 1..203: mol_type = other DNA
ggcgcgccagtcctcagaagagaagggaaatggcaagggagcattccaggagagaaagggaccgcttggagcagttagaaaggaagcgggagcgggagcgcaagatgcgggagcagcagaaggagcagcgggagcagaaggagcgcgagcggcgggcggaggagcggcgcaaggagcgggaggcccgccgactcggaccgatg

SEQ ID NO: 1897 - DNA, 203 bp, synthetic construct
  source 1..203: mol_type = other DNA
ggcgcgccagtcctagggaagtgtctgcacatcaccgaacgatgagagaggactacagcgacaaagtgaaagccagccactggagtcgcagcccgcctcggccgccgcgggagcggttcgagttgggagacggccggaagccagtaaaagaagagaaaatggaagaaagggacctgctgtccgacttacgactcggaccgatg

SEQ ID NO: 1898 - DNA, 203 bp, synthetic construct
  source 1..203: mol_type = other DNA
ggcgcgccagtcctctgagccacgccggcatcctcaaggtgggtgattttgggctggcgcgggagtacggatcccctctgaaggcctacaccccggtcgtggtgacccagtggtaccgcgccccagagctgctgcttggtgccaaggaatactccacggccgtggacatgtggtcagtgggctgcatccgactcggaccgatg

SEQ ID NO: 1899 - DNA, 203 bp, synthetic construct
  source 1..203: mol_type = other DNA
ggcgcgccagtcctttcggggagctgctgactcagaagcctctgttccccgggaattcggaaatcgatcagatcaacaaagtgttcaaggagctggggacccccagtgagaaaatctggcccggctacagtgagctcccagtagtcaaaaagatgaccttcagcgagcacccctacaacaacctccgccgactcggaccgatg

SEQ ID NO: 1900 - DNA, 203 bp, synthetic construct
  source 1..203: mol_type = other DNA
ggcgcgccagtcctaagcgcttcggggctctgctctcagaccagggcttcgacctcatgaacaagttcctgacctacttccccgggaggaggatcagcgctgaggacggcctcaagcatgagtatttccgcgagacccccctccccatcgacccctccatgttccccacgtggcccgccaagagcgagcgactcggaccgatg

SEQ ID NO: 1901 - DNA, 203 bp, synthetic construct
  source 1..203: mol_type = other DNA
ggcgcgccagtcctgcccagactcggacgggctttgccaccctctccgcttgcctggtcccctctcctctccgccctcccgctcgccagtccatttgatcagcggagactcggcggccgggccggggcttccccgcagcccctgcgcgctcctagagctcgggccgtggctcgtcggggtctgtgtctcgactcggaccgatg

SEQ ID NO: 1902 - DNA, 203 bp, synthetic construct
  source 1..203: mol_type = other DNA
ggcgcgccagtccttttggctccgagggcagtcgctgggcttccgagaggggttcgggctgcgtaggggcgctttgttttgttcggttttgtttttttgagagtgcgagagaggcggtcgtgcagacccgggagaaagatgtcaaacgtgcgagtgtctaacgggagccctagcctggagcggatggacgactcggaccgatg

SEQ ID NO: 1903 - DNA, 203 bp, synthetic construct
  source 1..203: mol_type = other DNA
ggcgcgccagtcctaaagactgatccgtcggacagccagacggggttagcggagcaatgcgcaggaataaggaagcgacctgcaaccgacgattcttctactcaaaacaaaagagccaacagaacagaagaaaatgtttcagacggttccccaaatgccggttctgtggagcagacgcccaagaagcccgactcggaccgatg

SEQ ID NO: 1904 - DNA, 203 bp, synthetic construct
  source 1..203: mol_type = other DNA
ggcgcgccagtcctcccggggcccgcttgcctcagcttcttgctgccgccagcacgctaagctccagtcggcgccgaaggagagcttcccgaccctcgtgtccagtagccgcaatcccaggctgggagggtgaggcgccgcgctctgccgcccccccgcccctcgctccctgtgtcctggcggatttgcgactcggaccgatg

SEQ ID NO: 1905 - DNA, 203 bp, synthetic construct
  source 1..203: mol_type = other DNA
ggcgcgccagtcctcacgtaatctatccgaaagcccagtcccacccgccacccgactctggagctcccattcttcaggaccctgctgaagtatcgcttctcagccgccttctccaggcgcagctgcattcgcttctcggtttttgcactcgctgtgcaccgagttactttcccggcccctcgttgacacgactcggaccgatg

SEQ ID NO: 1906 - DNA, 203 bp, synthetic construct
  source 1..203: mol_type = other DNA
ggcgcgccagtcctccgttcacaggtggctgttggtctttagtaagggtgctgtcttccctgtctgatccttagcaaaagtaggaaggtagagttgttggcagaaatcctgggataagagaatagtttcctggaagatctgtgcctccaaccagcagagagggattgagcttcattgaactcaacagacgactcggaccgatg

SEQ ID NO: 1907 - DNA, 203 bp, synthetic construct
  source 1..203: mol_type = other DNA
ggcgcgccagtcctgccaacatttcatagcaccatgttcaagaggaggttgaagtggcatggcaatggttagagaccctgctgggcgtgaacaccctctggctacctagggacctgtgggcctaccacctggtgccctcatggagacaagaagccctgggttgaacaacatgaagccccagtcactgccgactcggaccgatg

SEQ ID NO: 1908 - DNA, 203 bp, synthetic construct
  source 1..203: mol_type = other DNA
ggcgcgccagtccttactagccaagacccaggagctggagaaggaagcccatgaaaggagccaggagttaatacagctgaagagtcaaggggatctggagaaggctgaacttcaggaccgggtgaccgagctctctgctctgttgacccagtctcagaagcaaaatgaagattatgaaaagatgataacgactcggaccgatg

SEQ ID NO: 1909 - DNA, 203 bp, synthetic construct
  source 1..203: mol_type = other DNA
ggcgcgccagtccttcagtgaactgatcactcttcgggaagccctggagtcaagtcacctggaaggggagttactgaggcaagagcaaacggaagtgaccgcagcgctggctagggcagagcagtcaattgcagagctgtcgagttctgaaaacaccctgaagacagaagtagctgatcttcgggctgcgactcggaccgatg

SEQ ID NO: 1910 - DNA, 203 bp, synthetic construct
  source 1..203: mol_type = other DNA
ggcgcgccagtcctaagccctgtgggaaaagaacactcacctggaggctcagctgcagaaagctgaggaggctggggctgagctgcaggcagatctcagggacatccaagaagagaaggaagaaattcaaaagaaactaagtgagtcacgtcaccagcaggaggcagccacgactcagctggagcagccgactcggaccgatg

SEQ ID NO: 1911 - DNA, 203 bp, synthetic construct
  source 1..203: mol_type = other DNA
ggcgcgccagtcctgcagtctgtttgaagcccaacaacaaaattctgtgatagaggtcaccaaggggcagctggaggtccagattcaaactgtcactcaagccaaggaagtaatccaaggggaagtgaggtgcctgaagctggaactggacactgaacggagtcaggcagagcaggagcgggatgctgcgactcggaccgatg

SEQ ID NO: 1912 - DNA, 203 bp, synthetic construct
  source 1..203: mol_type = other DNA
ggcgcgccagtcctctctctccgctgaggcagtagcatctgccctccacaagcttcatcaagacctgtggaagactcaacagacccgggatgttctgagggatcaggtccagaaactggaagagcgtctaactgatactgaggctgagaagagccaggtccacacagagttgcaggatctgcagagaccgactcggaccgatg

SEQ ID NO: 1913 - DNA, 203 bp, synthetic construct
  source 1..203: mol_type = other DNA
ggcgcgccagtcctgcgaactgaaggtggcccaagggaaggctctgcaagagaatttggccctcctgacccagaccctagctgaaagagaagaggaggtggagactctgcggggacaaatccaggaactggagaagcaacgggaaatgcagaaggctgctttggaattgctgtctctggacctgaagacgactcggaccgatg

SEQ ID NO: 1914 - DNA, 203 bp, synthetic construct
  source 1..203: mol_type = other DNA
ggcgcgccagtcctagaggaaccaagaggtagatctgcagcaagaacagattcaggagctagagaagtgtaggtctgttttagagcatctgcccatggccgtccaggagcgagagcagaagctgactgtgcagagggagcagatcagagagctcgagaaggatcgggagactcagaggaacgtcttggcgactcggaccgatg

SEQ ID NO: 1915 - DNA, 203 bp, synthetic construct
  source 1..203: mol_type = other DNA
ggcgcgccagtcctagctgcagaggcagaaagagcatctgactcaggatctcgagaggagagaccaggagctgatgctgcagaaggagaggattcaggttctcgaggatcagaggacccggcagaccaagatcctggaggaggacctggaacagatcaagctgtccttgagagagcgaggccgggagccgactcggaccgatg

SEQ ID NO: 1916 - DNA, 203 bp, synthetic construct
  source 1..203: mol_type = other DNA
ggcgcgccagtcctagcagctccagggcctgcacaggaaggtaggtgagaccagcctcctcctgtcccagcgagagcaggaaatagtggtcctgcagcagcaactgcaggaagccagggaacaaggggagctgaaggagcagtcacttcagagtcaactggatgaggcccagagagccctagcccagacgactcggaccgatg

SEQ ID NO: 1917 - DNA, 203 bp, synthetic construct
  source 1..203: mol_type = other DNA
ggcgcgccagtcctgggaccaggaactggaggctctgcagcaagaacagcagcaggcccagggacaggaggagagggtgaaggaaaaggcagacgccctccagggagctctggagcaagcccatatgacactgaaggagcgtcatggagagcttcaggaccacaaggaacaggcacgaaggctggaggcgactcggaccgatg

SEQ ID NO: 1918 - DNA, 203 bp, synthetic construct
  source 1..203: mol_type = other DNA
ggcgcgccagtcctaagagctggcagtggagggacggcgggtccaggccctggaggaggtgctgggagacctaagggctgagtctcgggaacaggagaaagctctgttggccctccagcagcagtgtgctgagcaggcacaggagcatgaggtggagaccagggccctgcaggacagctggctgcaggcgactcggaccgatg

SEQ ID NO: 1919 - DNA, 203 bp, synthetic construct
  source 1..203: mol_type = other DNA
ggcgcgccagtcctaagccagggagattgagtggagggagaaggcccaggacttggcactctccctagcgcagaccaaggccagtgtcagcagtctgcaggaggtagccatgttcctacaagcctctgtcctggagcgggactcagaacagcaaaggctgcaggatgaactggagctcaccagacgggcgactcggaccgatg

SEQ ID NO: 1920 - DNA, 203 bp, synthetic construct
  source 1..203: mol_type = other DNA
ggcgcgccagtcctctctggagaaggagcggctacacagcccaggtgcaaccagcacagcagaactggggtccagaggggagcagggtgtgcagctgggagaggtctcaggagtggaggctgagcctagtcctgatggaatggagaagcagtcatggagacaaaggcttgaacacctgcagcaagcagcgactcggaccgatg

SEQ ID NO: 1921 - DNA, 203 bp, synthetic construct
  source 1..203: mol_type = other DNA
ggcgcgccagtcctttcttgccgtggcccaggcccctgaggccactgtcctggaggcagagacccgcaggctggatgagtccctgactcaaagtctgacatccccagggccagtcctgctacaccccagccccagcactacccaagccgcctccaggtagcagccacagccaggagcacacagacagacgactcggaccgatg

SEQ ID NO: 1922 - DNA, 203 bp, synthetic construct
  source 1..203: mol_type = other DNA
ggcgcgccagtcctagactgtgtcatgggtcatggcccctccgcacacctacaggtttgccaaaggaaaagcctggctctgttaggcacccaggagccccaggtcggcgggtgttcccaggaagaggaagtaaatctgcaaccctggggaggaccccaactcacctgggaatgaggcaaattgcatttcgactcggaccgatg

SEQ ID NO: 1923 - DNA, 203 bp, synthetic construct
  source 1..203: mol_type = other DNA
ggcgcgccagtcctctcagagctgggaaggaggctctagatggcggctgtgccttagagagagcgcgctctgctccctgcctttgcctcactttacgcaactttccctaactttcgggcagcctcagggggcccccgtagccccctgcctttcctagggacttactggggtcgattcgaaccttttttcgactcggaccgatg

SEQ ID NO: 1924 - DNA, 203 bp, synthetic construct
  source 1..203: mol_type = other DNA
ggcgcgccagtccttgctttatttttttgaccagttaacatatttgagggttattttatttatttttcgttttttaacggaggattttgcctttatttttaattatttgggatctgatatttttctactagtagataggactcttggtttggacatactacatggatcagtaaatacctgggcacaggcgactcggaccgatg

SEQ ID NO: 1925 - DNA, 203 bp, synthetic construct
  source 1..203: mol_type = other DNA
ggcgcgccagtcctagggaagtgatccaggaagtggacatggcagcgagtcgaacagcagctctgaatcttctgagagtcagtcggaatctgagagcgaatcagcaggttccaaatcccagccagtcctcccagaagccaaagagaagccagcctctaagaaggaacggatagctgatgtgaagaagacgactcggaccgatg

SEQ ID NO: 1926 - DNA, 203 bp, synthetic construct
  source 1..203: mol_type = other DNA
ggcgcgccagtcctgtaaatctacattgggtcaaacagattttccagctcatagtcggaagccggcaccctcaaatgagcccgaatatctatgtaaatggatgggactcccctattcagagtgtagctgggaagatgaagccctcattggaaagaaattccagaattgcattgacagcttccacagtacgactcggaccgatg

SEQ ID NO: 1927 - DNA, 203 bp, synthetic construct
  source 1..203: mol_type = other DNA
ggcgcgccagtcctggttgaagaatgatgactctttattgtataaaactctgattgatttcaagtccaaccataggctcctgattacggggacccctcttcagaattccctcaaagagctctggtccttgctgcactttattatgccggagaagtttgaattttgggaagattttgaagaagaccatgcgactcggaccgatg

SEQ ID NO: 1928 - DNA, 203 bp, synthetic construct
  source 1..203: mol_type = other DNA
ggcgcgccagtcctggaaggggagagaaaatggctaccagagtcttcataaggtgctagagcctttccttctccggagagtcaaaaaagatgtggagaaatcccttcctgctaaagtggaacagattctcagggtggagatgtcagcccttcagaaacagtattacaagtggattctgaccaggaattcgactcggaccgatg

SEQ ID NO: 1929 - DNA, 203 bp, synthetic construct
  source 1..203: mol_type = other DNA
ggcgcgccagtcctgtgactctgacactgagtctaagaggcaggcccagagatcctctgcttctgagagtgaaacggaagactctgatgatgacaagaagccaaagcgcagagggcgtccgaggagtgtgcggaaggacctcgtggagggatttactgatgcagagatccgaaggttcatcaaggcttcgactcggaccgatg

SEQ ID NO: 1930 - DNA, 203 bp, synthetic construct
  source 1..203: mol_type = other DNA
ggcgcgccagtcctataagaagtttggtctccctcttgaacggctggagtgcatagcacgtgatgctgagctggtagataagtcggtggcagatctgaagcgcctgggtgaactgatccacaacagctgtgtgtcagcaatgcaggaatacgaagagcagctgaaagaaaatgccagcgagggaaaagcgactcggaccgatg

SEQ ID NO: 1931 - DNA, 203 bp, synthetic construct
  source 1..203: mol_type = other DNA
ggcgcgccagtccttagagtggggggtggaagatgattctcgcctgttgctggggatttatgaacatggctatggaaactgggagttaattaaaacagacccagagcttaaattaactgacaaaattctgccggtggagacagataaaaagcctcaggggaagcagctacagacccgagcggattactcgactcggaccgatg

SEQ ID NO: 1932 - DNA, 203 bp, synthetic construct
  source 1..203: mol_type = other DNA
ggcgcgccagtcctaatcttcgagtaaatcaaagcgatctcagggtcctgtccatattacagcaggaagtgaacctgtccccattggagaggatgaggatgatgatctggaccaggagacattcagcatatgtaaggagaggatgaggcccgtgaaaaaggcactgaaacagctcgacaaacctgacacgactcggaccgatg

SEQ ID NO: 1933 - DNA, 203 bp, synthetic construct
  source 1..203: mol_type = other DNA
ggcgcgccagtcctataagttatacaagatggctcataagaaaaggtctcaagaagaagaggagcaaaagaagaaagacgacgtgactgggggtaagaaaccatttcgtccagaggcctcaggctccagccgggactctctgatatctcagtcccatacctcacacaaccttcaccctcagaagcctccgactcggaccgatg

SEQ ID NO: 1934 - DNA, 203 bp, synthetic construct
  source 1..203: mol_type = other DNA
ggcgcgccagtcctatgagcagcactggtacaaggaccaccattatggggaccggcgacatatggatgcccaccgttccggaagctatcgacccaacaacatgtccagaaagaggccttatgaccagtacagcagtgaccgagaccaccggggacacagagattattatgacaggcaccatcatgactcgactcggaccgatg

SEQ ID NO: 1935 - DNA, 203 bp, synthetic construct
  source 1..203: mol_type = other DNA
ggcgcgccagtcctccaagcggaggagatccgatgaatttaggcctcaaaattaccaccagcaggatttccgacgaatgtctgatcaccgccccgctatgggctaccatggccagggaccctcagaccattaccgctctttccacacagataaactgggggaatataaacagcctctacccccattgccgactcggaccgatg

SEQ ID NO: 1936 - DNA, 203 bp, synthetic construct
  source 1..203: mol_type = other DNA
ggcgcgccagtccttggcaccccatcccattccagcctagttctggcctcccactttgacgggcacttggaggaggagctgactgtgtgtgtaccagcttcactgggatgtgtttccccagtcaaggaacaggggatcttcagagtcatgaatgttttcttgccagggtcagtgttcccaggaccttacgactcggaccgatg

SEQ ID NO: 1937 - DNA, 203 bp, synthetic construct
  source 1..203: mol_type = other DNA
ggcgcgccagtcctgtgcatggtcggggcaggaactggtgcatggaggctgctgggacctggtgaacagtgtgtgatttggttgatttggttcactctgacatgatggatgctgctgatggggagtggcgagttggggcaagcgggtggggacaagcataggacttgaaggggagcaggtacacccctcgactcggaccgatg

SEQ ID NO: 1938 - DNA, 203 bp, synthetic construct
  source 1..203: mol_type = other DNA
ggcgcgccagtcctcaaatgtgttcttgggagaagtgatacactcggcctcattatgtgaaacctgtgggtggggttggggtggagaagtagagagagggcaacagcttccacaactgcttcatctctgccaacactaatttttcccacactgtctttgtacatttcagagctttggtctcctgagtgcgactcggaccgatg

SEQ ID NO: 1939 - DNA, 203 bp, synthetic construct
  source 1..203: mol_type = other DNA
ggcgcgccagtcctggcctccttttcccactgtgccagggaaggtaggtttctctggctgactgagtactgtgagtgaggcaacactgatgccagcatgggtcttacttgactggggagtaggctgagtgaggggtagggtggggtaggtggggagtagtgtggccagggaactggaatccctggtggcgactcggaccgatg

SEQ ID NO: 1940 - DNA, 203 bp, synthetic construct
  source 1..203: mol_type = other DNA
ggcgcgccagtcctatttctgattcctgtggtgagaaggaaagctacaggacctggagaaggggatgcagaggcaggcctgctgaccaacttgttgcaatcacaaaggtgggggtcctggtgcaggcagtgaacaggcttctaatgtggggttcagtagtgccagcaagtgggggaaactttcagtatcgactcggaccgatg

SEQ ID NO: 1941 - DNA, 203 bp, synthetic construct
  source 1..203: mol_type = other DNA
ggcgcgccagtcctcacctaaaacctgcacgtgaacaagggttgacatgatacactatggccttagaaaagggccaggtgaaaccccaagctaatcactgcggtctttcagagccggacagacaggtgccagcagagcccggggctcactctcctttcagtcattcctcagcccttcgaagggaagcccgactcggaccgatg

SEQ ID NO: 1942 - DNA, 203 bp, synthetic construct
  source 1..203: mol_type = other DNA
ggcgcgccagtcctagcccagtcgccgccgcccgcccacaaagccacaggcaggtgcaggcgcagccgcggcgagagcgtatggagccgagccgttagcgcgcgccgtcggtgagtcagtccgtccgtccgtccgtccgtcggggcgccgcagctcccgccaggcccagcggccccggcccctcgtctcgactcggaccgatg

SEQ ID NO: 1943 - DNA, 203 bp, synthetic construct
  source 1..203: mol_type = other DNA
ggcgcgccagtcctccccgcacccggagccacccggtggagcgggccttgccgcggcagccatgtccatgggcctggagatcacgggcaccgcgctggccgtgctgggctggctgggcaccatcgtgtgctgcgcgttgcccatgtggcgcgtgtcggccttcatcggcagcaacatcatcacgtcgccgactcggaccgatg

SEQ ID NO: 1944 - DNA, 203 bp, synthetic construct
  source 1..203: mol_type = other DNA
ggcgcgccagtcctagaacatctgggagggcctgtggatgaactgcgtggtgcagagcaccggccagatgcagtgcaaggtgtacgactcgctgctggcactgccacaggaccttcaggcggcccgcgccctcatcgtggtggccatcctgctggccgccttcgggctgctagtggcgctggtgggcgcgactcggaccgatg

SEQ ID NO: 1945 - DNA, 203 bp, synthetic construct
  source 1..203: mol_type = other DNA
ggcgcgccagtcctcccagtgcaccaactgcgtgcaggacgacacggccaaggccaagatcaccatcgtggcaggcgtgctgttccttctcgccgccctgctcaccctcgtgccggtgtcctggtcggccaacaccattatccgggacttctacaaccccgtggtgcccgaggcgcagaagcgcgagacgactcggaccgatg

SEQ ID NO: 1946 - DNA, 203 bp, synthetic construct
  source 1..203: mol_type = other DNA
ggcgcgccagtccttgggcgcgggcctgtacgtgggctgggcggccgcggcgctgcagctgctggggggcgcgctgctctgctgctcgtgtcccccacgcgagaagaagtacacggccaccaaggtcgtctactccgcgccgcgctccaccggcccgggagccagcctgggcacaggctacgaccgcacgactcggaccgatg

SEQ ID NO: 1947 - DNA, 203 bp, synthetic construct
  source 1..203: mol_type = other DNA
ggcgcgccagtcctccccagcagccacggctttgcgggccgggcagtcgacttcggggcccagggaccaacctgcatggactgtgaaacctcacccttctggagcacggggcctgggtgaccgccaatacttgaccaccccgtcgagccccatcgggccgctgcccccatgctcgcgctgggcagggacgactcggaccgatg

SEQ ID NO: 1948 - DNA, 203 bp, synthetic construct
  source 1..203: mol_type = other DNA
ggcgcgccagtcctctgaagactggttttggctttaccaatgtgactgcacaccaaaaatggaaattttcaagacctggcatcaggctcctttctgtcaaggcacagacagcacacattgtcctggaagatggaactaagatgaaaggttactcctttggccatccatcctctgttgctggtgaagtgcgactcggaccgatg

SEQ ID NO: 1949 - DNA, 203 bp, synthetic construct
  source 1..203: mol_type = other DNA
ggcgcgccagtcctggtttgctggtgctggattatagtaaagactacaaccactggctggctaccaagagtttagggcaatggctacaggaagaaaaggttcctgcaatttatggagtggacacaagaatgctgactaaaataattcgggataagggtaccatgcttgggaagattgaatttgaaggtcgactcggaccgatg

SEQ ID NO: 1950 - DNA, 203 bp, synthetic construct
  source 1..203: mol_type = other DNA
ggcgcgccagtcctccctggaaccatgatttcaccaagatggagtatgatgggattttgatcgcgggaggaccggggaacccagctcttgcagaaccactaattcagaatgtcagaaagattttggagagtgatcgcaaggagccattgtttggaatcagtacaggaaacttaataacaggattggctcgactcggaccgatg

SEQ ID NO: 1951 - DNA, 203 bp, synthetic construct
  source 1..203: mol_type = other DNA
ggcgcgccagtcctgctggtgccaaaacctacaagatgtccatggccaacagagggcagaatcagcctgttttgaatatcacaaacaaacaggctttcattactgctcagaatcatggctatgccttggacaacaccctccctgctggctggaaaccactttttgtgaatgtcaacgatcaaacaaatcgactcggaccgatg

SEQ ID NO: 1952 - DNA, 203 bp, synthetic construct
  source 1..203: mol_type = other DNA
ggcgcgccagtcctgaggggattatgcatgagagcaaacccttcttcgctgtgcagttccacccagaggtcaccccggggccaatagacactgagtacctgtttgattcctttttctcactgataaagaaaggaaaagctaccaccattacatcagtcttaccgaagccagcactagttgcatctcggcgactcggaccgatg

SEQ ID NO: 1953 - DNA, 203 bp, synthetic construct
  source 1..203: mol_type = other DNA
ggcgcgccagtcctacttcagttgagtccattatggctacggaagacaggcagctgttttcagataaactaaatgagatcaatgaaaagattgctccaagttttgcagtggaatcgattgaggatgcactgaaggcagcagacaccattggctacccagtgatgatccgttccgcctatgcactgggtcgactcggaccgatg

SEQ ID NO: 1954 - DNA, 203 bp, synthetic construct
  source 1..203: mol_type = other DNA
ggcgcgccagtcctaatgttgatgccatgggtgttcacacaggtgactcagttgttgtggctcctgcccagacactctccaatgccgagtttcagatgttgagacgtacttcaatcaatgttgttcgccacttgggcattgtgggtgaatgcaacattcagtttgcccttcatcctacctcaatggaacgactcggaccgatg

SEQ ID NO: 1955 - DNA, 203 bp, synthetic construct
  source 1..203: mol_type = other DNA
ggcgcgccagtcctaaacagattgatacactggctgcagaatacccatcagtaacaaactatctctatgttacctacaatggtcaggagcatgatgtcaattttgatgaccatggaatgatggtgctaggctgtggtccatatcacattggcagcagtgtggaatttgattggtgtgctgtctctagtcgactcggaccgatg

SEQ ID NO: 1956 - DNA, 203 bp, synthetic construct
  source 1..203: mol_type = other DNA
ggcgcgccagtcctctggaatttgcaaagtctgtggactacccctgcttgttgaggccttcctatgttttgagtgggtctgctatgaatgtggtattctctgaggatgagatgaaaaaattcctagaagaggcgactagagtttctcaggagcacccagtggtgctgacaaaatttgttgaaggggcccgactcggaccgatg

SEQ ID NO: 1957 - DNA, 203 bp, synthetic construct
  source 1..203: mol_type = other DNA
ggcgcgccagtcctctcactaattttcaggtgaccaaactttttgctgaagctgtgcagaaatctcgcaaggtggactccaagagtcttttccactacaggcagtacagtgctggaaaagcagcatagagatgcagacaccccagccccattattaaatcaacctgagccacatgttatctaaaggaacgactcggaccgatg

SEQ ID NO: 1958 - DNA, 203 bp, synthetic construct
  source 1..203: mol_type = other DNA
ggcgcgccagtcctttagagtatggacttttcttttctttttctttttctttttttctttttgagatggagtcacactctccaggctggagtgcagtggcacaatctcggctcactgcaatttccgtctcccaagttcaagcgattctcctgctttagactatggatttctttaaggaatactggtttcgactcggaccgatg

SEQ ID NO: 1959 - DNA, 203 bp, synthetic construct
  source 1..203: mol_type = other DNA
ggcgcgccagtccttgctaggctgtggtccatatcacattggcagcagtgtggaatttgattggtgtgctgtctctagtatccgcacactgcgtcaacttggcaagaagacggtggtggtgaattgcaatcctgagactgtgagcacagactttgatgagtgtgacaaactgtactttgaagagttgtcgactcggaccgatg

SEQ ID NO: 1960 - DNA, 203 bp, synthetic construct
  source 1..203: mol_type = other DNA
ggcgcgccagtccttagaagaggcgactagagtttctcaggagcacccagtggtgctgacaaaatttgttgaaggggcccgagaagtagaaatggacgctgttggcaaagatggaagggttatctctcatgccatctctgaacatgttgaagatgcaggtgtccactcgggagatgccactctgatgccgactcggaccgatg

SEQ ID NO: 1961 - DNA, 203 bp, synthetic construct
  source 1..203: mol_type = other DNA
ggcgcgccagtccttgcccacacaaaccatcagccaaggggccattgaaaaggtgaaggatgctacccggaagattgcaaaggcttttgccatctctggtccattcaacgtccaatttcttgtcaaaggaaatgatgtcttggtgattgagtgtaacttgagagcttctcgatccttcccctttgtttcgactcggaccgatg

SEQ ID NO: 1962 - DNA, 203 bp, synthetic construct
  source 1..203: mol_type = other DNA
ggcgcgccagtcctaaggtttcaagctgtttgccacggaagccacatcagactggctcaacgccaacaatgtccctgccaccccagtggcatggccgtctcaagaaggacagaatcccagcctctcttccatcagaaaattgattagagatggcagcattgacctagtgattaaccttcccaacaacacgactcggaccgatg

SEQ ID NO: 1963 - DNA, 203 bp, synthetic construct
  source 1..203: mol_type = other DNA
ggcgcgccagtcctacactaaatttgtccatgataattatgtgattcggaggacagctgttgatagtggaatccctctcctcactaattttcaggtgaccaaactttttgctgaagctgtgcagaaatctcgcaaggtggactccaagagtcttttccactacaggcagtacagtgctggaaaagcagcgactcggaccgatg

SEQ ID NO: 1964 - DNA, 203 bp, synthetic construct
  source 1..203: mol_type = other DNA
ggcgcgccagtcctggctaatccaggaatattgttatcccttcccattatattgaagttgagaaatgtgacagaggcatttagagtatggacttttcttttctttttctttttctttttttctttttgagatggagtcacactctccaggctggagtgcagtggcacaatctcggctcactgcaatttcgactcggaccgatg

SEQ ID NO: 1965 - DNA, 203 bp, synthetic construct
  source 1..203: mol_type = other DNA
ggcgcgccagtccttttgtcattcacactctcccccagttttggaataacttggaagtaaggttcattcccttaagacgatggattctgttgaactatggggtcccacactgcactattaattccacccactgtaagggcaaggacaccattccttctacatataagaaaaaagtctctccccaagggcgactcggaccgatg

SEQ ID NO: 1966 - DNA, 203 bp, synthetic construct
  source 1..203: mol_type = other DNA
ggcgcgccagtcctgattcaagtgctggctttgcgtccgcttccccatccacttactagcgcaggagaaggctatctcggtccccagagaagcctggacccacacgcgggctagatccagagaacctgacgacccggcgacggcgacgtctcttttgactaaaagacagtgtccagtgctccagcctacgactcggaccgatg

SEQ ID NO: 1967 - DNA, 203 bp, synthetic construct
  source 1..203: mol_type = other DNA
ggcgcgccagtcctgggagacactttctacatcaaaacctccaccaccgtgcgcaccacagagattaacttcaaggttggggaggagtttgaggagcagactgtggatgggaggccctgtaagagcctggtgaaatgggagagtgagaataaaatggtctgtgagcagaagctcctgaagggagagggcgactcggaccgatg

SEQ ID NO: 1968 - DNA, 203 bp, synthetic construct
  source 1..203: mol_type = other DNA
ggcgcgccagtcctccccaagacctcgtggaccagagaactgaccaacgatggggaactgatcctgaccatgacggcggatgacgttgtgtgcaccagggtctacgtccgagagtgagtggccacaggtagaaccgcggccgaagcccaccactggccatgctcaccgccctgcttcactgccccctccgactcggaccgatg

SEQ ID NO: 1969 - DNA, 203 bp, synthetic construct
  source 1..203: mol_type = other DNA
ggcgcgccagtcctcgtcccaccccctccttctaggatagcgctccccttaccccagtcacttctgggggtcactgggatgcctcttgcagggtcttgctttctttgacctcttctctcctcccctacaccaacaaagaggaatggctgcaagagcccagatcacccattccgggttcactccccgcccgactcggaccgatg

SEQ ID NO: 1970 - DNA, 203 bp, synthetic construct
  source 1..203: mol_type = other DNA
ggcgcgccagtcctggagcgggaggcggggccacttcaatcctgggcaggggcggttccgtacagggtataaaagctgtccgcgcgggagcccaggccagctttggggttgtccctggacttgtcttggttccagaacctgacgacccggcgacggcgacgtctcttttgactaaaagacagtgtccacgactcggaccgatg

SEQ ID NO: 1971 - DNA, 203 bp, synthetic construct
  source 1..203: mol_type = other DNA
ggcgcgccagtccttgaagggagagggccccaagacctcgtggaccagagaactgaccaacgatggggaactgatcctgaccatgacggcggatgacgttgtgtgcaccagggtctacgtccgagagtgagtggccacaggtagaaccgcggccgaagcccaccactggccatgctcaccgccctgctcgactcggaccgatg

SEQ ID NO: 1972 - DNA, 203 bp, synthetic construct
  source 1..203: mol_type = other DNA
ggcgcgccagtccttcactgccccctccgtcccaccccctccttctaggatagcgctccccttaccccagtcacttctgggggtcactgggatgcctcttgcagggtcttgctttctttgacctcttctctcctcccctacaccaacaaagaggaatggctgcaagagcccagatcacccattccgggcgactcggaccgatg

SEQ ID NO: 1973 - DNA, 203 bp, synthetic construct
  source 1..203: mol_type = other DNA
ggcgcgccagtcctcgaatctcctggggccgtccgtgccggctcgggccgtcgtggcggctcgagctcctggaacttgctcaggctccggaggtccgaggccctcgaagttatgcgtcgcctccaggcggttgcggcgggcgcgggctcctaaagggcgtcacacccggactccgccgactaggcaaccgactcggaccgatg

SEQ ID NO: 1974 - DNA, 203 bp, synthetic construct
  source 1..203: mol_type = other DNA
ggcgcgccagtcctctccattcatctttccactgcgcctccggcgcccccgccttctccggtcccctcctcggagtcattttttcctgttccccctctgccgccctttcctcacgccccgggtgaggcaattctcttggaagcgaaggtgtcggctatgagccggagcctccttccttgaatttctcccgactcggaccgatg

SEQ ID NO: 1975 - DNA, 203 bp, synthetic construct
  source 1..203: mol_type = other DNA
ggcgcgccagtcctctcccctttccctttatgggcaactgttatggcgtgaatttttctatacagcagcaacaaataatccacgctttgataaaatggaaggaaaccctatctgtgttcagattccttgggataaaaatcctgaggctttagccaaatgggcggaaggccggacaggctttccatggacgactcggaccgatg

SEQ ID NO: 1976 - DNA, 203 bp, synthetic construct
  source 1..203: mol_type = other DNA
ggcgcgccagtcctttgatgccatcatgacacagcttcgtcaggagggttggattcatcatctagccaggcatgcagttgcttgcttcctgacacgaggggacctgtggattagttgggaagaaggaatgaaggtatttgaagaattattgcttgatgcagattggagcataaatgctggaagttggacgactcggaccgatg

SEQ ID NO: 1977 - DNA, 203 bp, synthetic construct
  source 1..203: mol_type = other DNA
ggcgcgccagtccttgggatattctgcagaaaatatcccaggttgtagcagcagtggaagttgctctcaagggagtggtattttacactatgctcatggcgacagtcagcaaactcacctgttgaagcaaggaagaagctccatgggcactggtctcagtggtgggaaacgtcctagtcaggaagaggcgactcggaccgatg

SEQ ID NO: 1978 - DNA, 203 bp, synthetic construct
  source 1..203: mol_type = other DNA
ggcgcgccagtccttctcttcttctttcgcggttcagcatgcaggaaaaagacgcctcctcacaaggtttcctgccacacttccaacatttcgccacgcaggcgatccatgtgggccaggatccagagcaatggacctccagggctgtagtgccccccatctcactgtccaccacgttcaagcaagggcgactcggaccgatg

SEQ ID NO: 1979 - DNA, 203 bp, synthetic construct
  source 1..203: mol_type = other DNA
ggcgcgccagtccttgtatggatgatgtgtatggaggtacaaacaggtacttcaggcaagtggcatctgaatttggattaaagatttcttttgttgattgttccaaaatcaaattactagaggcagcaattacaccagaaaccaagcgccctttggctctgggagctgatatttctatgtattctgcacgactcggaccgatg

SEQ ID NO: 1980 - DNA, 203 bp, synthetic construct
  source 1..203: mol_type = other DNA
ggcgcgccagtcctgttggcgtcttcgtcgccgcgctcgccccgggctactcctgcgcgccacaatgagctcccgcatcgccagggcgctcgccttagtcgtcacccttctccacttgaccaggctggcgctctccacctgccccgctgcctgccactgccccctggaggcgcccaagtgcgcgccggcgactcggaccgatg

SEQ ID NO: 1981 - DNA, 203 bp, synthetic construct
  source 1..203: mol_type = other DNA
ggcgcgccagtcctgcgaggagtgggtctgtgacgaggatagtatcaaggaccccatggaggaccaggacggcctccttggcaaggagctgggattcgatgcctccgaggtggagttgacgagaaacaatgaattgattgcagttggaaaaggcagctcactgaagcggctccctgtttttggaatggcgactcggaccgatg

SEQ ID NO: 1982 - DNA, 203 bp, synthetic construct
  source 1..203: mol_type = other DNA
ggcgcgccagtcctagcctcgcatcctatacaaccctttacaaggccagaaatgtattgttcaaacaacttcatggtcccagtgctcaaagacctgtggaactggtatctccacacgagttaccaatgacaaccctgagtgccgccttgtgaaagaaacccggatttgtgaggtgcggccttgtggaccgactcggaccgatg

SEQ ID NO: 1983 - DNA, 203 bp, synthetic construct
  source 1..203: mol_type = other DNA
ggcgcgccagtcctagatgcggttccgctgcgaagatggggagacattttccaagaacgtcatgatgatccagtcctgcaaatgcaactacaactgcccgcatgccaatgaagcagcgtttcccttctacaggctgttcaatgacattcacaaatttagggactaaatgctacctgggtttccagggccgactcggaccgatg

SEQ ID NO: 1984 - DNA, 203 bp, synthetic construct
  source 1..203: mol_type = other DNA
ggcgcgccagtcctaggcagaagccggcggcgcgcggacagccagtcggcgccgcgcggagctggccgctggattggctgcaacactcgcgtgtcaggcggttgctaggctccggccgcgcgccccgcccttgcgctcagcgccctctcaccgcccggctctgtgtgctccgggatggagcaggtgtgcgactcggaccgatg

SEQ ID NO: 1985 - DNA, 203 bp, synthetic construct
  source 1..203: mol_type = other DNA
ggcgcgccagtcctcagagggtgagaacccagctctgggaccaagtcacttgcttccttacttagcaagactatcgacttgagcaaacttggacctgggatgaggatgtctgtgggcctctcgctgctgctgcccctctgggggaggacctttctcctcctgctctctgtggttatggctcagtcccacgactcggaccgatg

SEQ ID NO: 1986 - DNA, 203 bp, synthetic construct
  source 1..203: mol_type = other DNA
ggcgcgccagtcctgggctgctccctgaaccagaacagtgtgcctgacattcatggtgtagaggcccctgccagggagggcgcaatgtctgctcagcttggctaccctgtggtgggttggcacatcgccaataagaagccccctcttcccaaacgcgtccggaggcagatccatgctacacccacacccgactcggaccgatg

SEQ ID NO: 1987 - DNA, 203 bp, synthetic construct
  source 1..203: mol_type = other DNA
ggcgcgccagtcctaaccccaaccctaggccccatccagcctactcgggtgtcagaagctggcaccacagttcctggccagattcgcccaacgatgaccattcctggctatgtggagcctactgcagttgctacccctcccacaaccaccaccaagaagccacgagtatccacaccaaaaccagcaaccgactcggaccgatg

SEQ ID NO: 1988 - DNA, 203 bp, synthetic construct
  source 1..203: mol_type = other DNA
ggcgcgccagtcctccagcgcccagagctcaagaaccatattgacagggtagatgcctgggttggcacctactttgaggtgaagatcccgtcagacactttctatgaccatgaggacaccaccactgacaagctgaagctgaccctgaaactgcgggagcagcagctggtgggcgagaagtcctgggtcgactcggaccgatg

SEQ ID NO: 1989 - DNA, 203 bp, synthetic construct
  source 1..203: mol_type = other DNA
ggcgcgccagtcctgaaccaggacaccatgggagagtacacgcccctgcgggatgaggatcccaatgcgcctccctaccagcccccaccgcccttcacagcacccatggagggcaagggctcccgtcccaagaacatgaccccataccggtcacctcctccctatgtcccaccttaacccgcaagcgccgactcggaccgatg

SEQ ID NO: 1990 - DNA, 203 bp, synthetic construct
  source 1..203: mol_type = other DNA
ggcgcgccagtcctctgggtggaggcagggtagggcaggggcctggagacgacatggtgttgtctgtggagaccggtggcctgcagaccattgcccaccgggagccgacacctgacctagcacacactgacacaggggcctggacaagcccgccctctctggtcctcccaaaccccaaagcagctggacgactcggaccgatg

SEQ ID NO: 1991 - DNA, 203 bp, synthetic construct
  source 1..203: mol_type = other DNA
ggcgcgccagtcctttgggtgggtatggggaattgctttgctaaaaataagctcccagggtgtttcaaacttagagaagaccaagggacagtattttttatcaaaggaatactattttttcacactacgtcaacttggttgctctgataccccagagcctgattgggggcctcccggccctggctcaccgactcggaccgatg

SEQ ID NO: 1992 - DNA, 203 bp, synthetic construct
  source 1..203: mol_type = other DNA
ggcgcgccagtcctgccaagtccctggtgctgggtttgctctcccgctgttgccaggggctggaagctggaggggtctcttgggccatggacatccccacttccagcccatgtacactagtggcccacgaccaaggggtcttcatttccatgaaaaagggactccaagaggcagtggtggctgtggcccgactcggaccgatg

SEQ ID NO: 1993 - DNA, 203 bp, synthetic construct
  source 1..203: mol_type = other DNA
ggcgcgccagtcctaggggagggctggtaggagggggggagaggtctctgtcctactgctctccagagggcatttccccttgcgccttctcccacagggcccagcccctctcccctgccccagtccccagggggtactctggagtgagcagtgcccctgtgggggagcctgtaaatgcgggctcagtgcgactcggaccgatg

SEQ ID NO: 1994 - DNA, 203 bp, synthetic construct
  source 1..203: mol_type = other DNA
ggcgcgccagtcctgctcgcgcctcttaggcttggcggtggcggcggcggcagcttcgcgccgaatccccggggagcggcggtggcggcgtcctggggccaggaggagcgaacacctgccgcggtcctcccgccggcgctggggattctcattctgtctcccatgctggagtgcagtggcgcggtcttcgactcggaccgatg

SEQ ID NO: 1995 - DNA, 203 bp, synthetic construct
  source 1..203: mol_type = other DNA
ggcgcgccagtcctcaaacttggacctgggatgaggatgtctgtgggcctctcgctgctgctgcccctctgggggaggacctttctcctcctgctctctgtggttatggctcagtcccactggcccagtgaaccctcagaggctgtcagggactgggaaaaccagcttgaggcatccatgcactcagtcgactcggaccgatg

SEQ ID NO: 1996 - DNA, 203 bp, synthetic construct
  source 1..203: mol_type = other DNA
ggcgcgccagtcctgctctcagacctccacgaggctgttcccacagtggttggcattcctgatggcacggctgtcgtcgggcgctcatttcgagtgaccattccaacagatttgattgcctccagtggagatatcatcaaggtatcagcggcagggaaggaggctttgccatcttggctgcactgggacgactcggaccgatg

SEQ ID NO: 1997 - DNA, 203 bp, synthetic construct
  source 1..203: mol_type = other DNA
ggcgcgccagtcctagcctccccagaccctggtgaggtggtatcatctgcctgtgctgcggatgaacctgtgactgttttgacggtgattttggatgccgacctcaccaagatgaccccaaagcaaaggattgacctcctgcacaggatgcggagcttctcagaagtagagcttcacaacatgaaattcgactcggaccgatg

SEQ ID NO: 1998 - DNA, 203 bp, synthetic construct
  source 1..203: mol_type = other DNA
ggcgcgccagtcctaatgtctgctcagcttggctaccctgtggtgggttggcacatcgccaataagaagccccctcttcccaaacgcgtccggaggcagatccatgctacacccacacctgtcactgccattgggcccccaaccacggctatccaggagcccccatccaggatcgtgccaacccccaccgactcggaccgatg

SEQ ID NO: 1999 - DNA, 203 bp, synthetic construct
  source 1..203: mol_type = other DNA
ggcgcgccagtcctatctccagccattgctcctccaacagagaccatggctcctccagtcagggatcctgttcctgggaaacccacggtcaccatccggactcgaggcgccattattcaaaccccaaccctaggccccatccagcctactcgggtgtcagaagctggcaccacagttcctggccagatcgactcggaccgatg

SEQ ID NO: 2000 - DNA, 203 bp, synthetic construct
  source 1..203: mol_type = other DNA
ggcgcgccagtccttcgcccaacgatgaccattcctggctatgtggagcctactgcagttgctacccctcccacaaccaccaccaagaagccacgagtatccacaccaaaaccagcaacgccttcaactgactccaccaccaccacgactcgcaggccaaccaagaaaccacggacaccccggccagtcgactcggaccgatg

SEQ ID NO: 2001 - DNA, 203 bp, synthetic construct
  source 1..203: mol_type = other DNA
ggcgcgccagtcctgatcccgtcagacactttctatgaccatgaggacaccaccactgacaagctgaagctgaccctgaaactgcgggagcagcagctggtgggcgagaagtcctgggtacagttcaacagcaacagccagctcatgtatggccttcccgacagcagccacgtgggcaaacacgagtacgactcggaccgatg

SEQ ID NO: 2002 - DNA, 203 bp, synthetic construct
  source 1..203: mol_type = other DNA
ggcgcgccagtcctcttctccaacgccctagagcctgactttaaggccacaagcatcactgtgacgggctctggcagttgtcggcacctacagtttatccctgtggtaccacccaggagagtgccctcagaggcgccgcccacagaagtgcctgacagggaccctgagaagagcagtgaggatgatgtcgactcggaccgatg

SEQ ID NO: 2003 - DNA, 203 bp, synthetic construct
  source 1..203: mol_type = other DNA
ggcgcgccagtcctcaagcccccaccctcctccagcatgccactcattctgcaggaggagaaggctcccctaccccctcctgagtaccccaaccagagtgtgcccgagaccactcctctgaaccaggacaccatgggagagtacacgcccctgcgggatgaggatcccaatgcgcctccctaccagcccgactcggaccgatg

SEQ ID NO: 2004 - DNA, 203 bp, synthetic construct
  source 1..203: mol_type = other DNA
ggcgcgccagtcctcccaccgcccttcacagcacccatggagggcaagggctcccgtcccaagaacatgaccccataccggtcacctcctccctatgtcccaccttaacccgcaagcgcctgggtggaggcagggtagggcaggggcctggagacgacatggtgttgtctgtggagaccggtggcctgcgactcggaccgatg

SEQ ID NO: 2005 - DNA, 203 bp, synthetic construct
  source 1..203: mol_type = other DNA
ggcgcgccagtcctcgcttcatttttgatggctggctctgaaagcaccatgtggagtggaggtggagggagcgaggaaccatgaatgaactcgcaggcagtgccgggcggccccctggctctctgcgttttgcctttaacactaactgtactgttttttctattcacgtgtgtctagctgcaggatgtcgactcggaccgatg

SEQ ID NO: 2006 - DNA, 203 bp, synthetic construct
  source 1..203: mol_type = other DNA
ggcgcgccagtcctgccatggacatccccacttccagcccatgtacactagtggcccacgaccaaggggtcttcatttccatgaaaaagggactccaagaggcagtggtggctgtggcccccaactttggtgctccagggtgggccagctgcttgtgggggcacctgggaggtcaaaggtctccaccacgactcggaccgatg

SEQ ID NO: 2007 - DNA, 203 bp, synthetic construct
  source 1..203: mol_type = other DNA
ggcgcgccagtcctaaattgttttattaaaaaaaagatttaaaatggtgatgcttacagcagtttgtacgagctcttaagtgttgattccatggaactgacggctttgcttgttttgattcttttccccctacttttcctaatggtttaaattctggaattacactggggttcttttgccttttttagcgactcggaccgatg

SEQ ID NO: 2008 - DNA, 203 bp, synthetic construct
  source 1..203: mol_type = other DNA
ggcgcgccagtcctgccttctcccacagggcccagcccctctcccctgccccagtccccagggggtactctggagtgagcagtgcccctgtgggggagcctgtaaatgcgggctcagtggaccactggtgactgggctcatgcctccaagtcagagtttccctggtgccccagagacaggagcacaagcgactcggaccgatg

SEQ ID NO: 2009 - DNA, 203 bp, synthetic construct
  source 1..203: mol_type = other DNA
ggcgcgccagtcctagatgggggtgccgggaggagcggatgcagctggagcggctcccttggggtgccgagtggcaggtggggggcggtgagggtccttgagggcgggccttagagtcttcagaagggcaggactctgagggctttttggagctcgctatgcttaacctggagatgattaaggccccgcgactcggaccgatg

SEQ ID NO: 2010 - DNA, 203 bp, synthetic construct
  source 1..203: mol_type = other DNA
ggcgcgccagtcctctttttttgttcactgtgcagggattgttcattgctgctggaggaagatcatggactgtcgcgggaaactgaagtggttgagtatccactagtcgtggatgagggcagtgacttcgcagttttttgcgaattacacatctctttgattatgttgtgactagttttgttagatagcgactcggaccgatg

SEQ ID NO: 2011 - DNA, 203 bp, synthetic construct
  source 1..203: mol_type = other DNA
ggcgcgccagtccttcatttagtgtttgggatacctgttaagccctttgtccagggactgtggttggatttatgaattatttggacggttgtccacttgaaagaactgacagtagcttcataacaatgttacaaatctcgttctaagattaagctgttgaacctatatttgccattagcgcttaatttcgactcggaccgatg

SEQ ID NO: 2012 - DNA, 203 bp, synthetic construct
  source 1..203: mol_type = other DNA
ggcgcgccagtcctttgaagtattatttttatgaatcaagccctggaaaaggacaagatatttgaatgaaatagcacccataatggagaacttcacagttgctactcctgtgataggtttatcttagtttcattgtggtataaatggaatagcaggtgttgtcaggtacaaggtttgtagcttgccaacgactcggaccgatg

SEQ ID NO: 2013 - DNA, 203 bp, synthetic construct
  source 1..203: mol_type = other DNA
ggcgcgccagtcctctcaaagcagggctggtgatcatccttttagcagcccatcacctgcgtcaggtggcagtttcagtgagactaagtcaggcgtcctttgtagccttgaggaaagatggtcttcgtatcagaaccaaactgataactcggtttcaaatgatcccttattgatgacacagtattttacgactcggaccgatg

SEQ ID NO: 2014 - DNA, 203 bp, synthetic construct
  source 1..203: mol_type = other DNA
ggcgcgccagtccttgtctagtacacctgctccgaagtatttgaaaatattgccttctggtcttaagtataatgcaagacatccttctaccaaggtaatgaagcaaatggatataggtgtgtattttggactacctcccaaaagaaaggaagagaaattgctaggggaaagtgcattagaagggataacgactcggaccgatg

SEQ ID NO: 2015 - DNA, 203 bp, synthetic construct
  source 1..203: mol_type = other DNA
ggcgcgccagtccttcagagcagatcccagcatggaacgttctcttcttgcggaccagaaagtccatatgctgtacttagataccacatattgtagcccagaatacacctttccatctcagcaagaggttatccggtttgccatcaacactgcctttgaggctgtaactctaaacccacatgctcttgcgactcggaccgatg

SEQ ID NO: 2016 - DNA, 203 bp, synthetic construct
  source 1..203: mol_type = other DNA
ggcgcgccagtcctttgtctgtggcacttactctattggaaaagagaaagtcttcctagccattgctgatgttttaggttcaaaagtgggcatgtcccaggaaaaatataaaactctacagtgcctcaatataccagaaattaattcactcatcactaccgacatgtgcagttcattggttcaccttccgactcggaccgatg

SEQ ID NO: 2017 - DNA, 203 bp, synthetic construct
  source 1..203: mol_type = other DNA
ggcgcgccagtcctcttacagtgaacacagcagctacctagaaatgaagcgctttgtccagtggctgaagccccagaaaatcatacctactgtaaatgtgggcacctggaaatctaggagcacaatggagaaatattttagagagtggaaattggaagctggatattgatgatacctccgaggattcacgactcggaccgatg

SEQ ID NO: 2018 - DNA, 203 bp, synthetic construct
  source 1..203: mol_type = other DNA
ggcgcgccagtcctgattcgacacggcactggcagcgggaacttgttcccgccaagaccctaaagggattgttcattgctgctggaggaagatcatggactgtcgcgggaaactgaagtggttgagtatccactagtcgtggatgagggcagtgacttcgcagttttttgcgaattacacatctctttcgactcggaccgatg

SEQ ID NO: 2019 - DNA, 203 bp, synthetic construct
  source 1..203: mol_type = other DNA
ggcgcgccagtcctaatgataaaatcattttgccatgttagaagacatttccgaagaagacatttgggaatacaaatctaaaagaaaaccaaaacgagttgatccaaataatggctctaaaaatattctaaaatctgttgaaaaagcaacagatggaaaataccagtcaaaacggagtagaaacagaacgactcggaccgatg

SEQ ID NO: 2020 - DNA, 203 bp, synthetic construct
  source 1..203: mol_type = other DNA
ggcgcgccagtcctattacaagagatacactcacttcctgctagctcaaagcagggctggtgatcatccttttagcagcccatcacctgcgtcaggtggcagtttcagtgagactaagtcaggcgtcctttgtagccttgaggaaagatggtcttcgtatcagaaccaaactgataactcggtttcaacgactcggaccgatg

SEQ ID NO: 2021 - DNA, 203 bp, synthetic construct
  source 1..203: mol_type = other DNA
ggcgcgccagtcctcagtttattgtagtgagataactggcaatttgttgaagaacaagcttcatgtgcaagaacaatatattcacccattgccactggacactgaatgtattgtgaatggtgtcaaagttgttttgcttgatgccaatcactgtccaggtgctgtcatgatcctcttttatcttcctacgactcggaccgatg

SEQ ID NO: 2022 - DNA, 203 bp, synthetic construct
  source 1..203: mol_type = other DNA
ggcgcgccagtcctaatgcctctcagcatcatcaaggataactgaaactgggtctccctgggacccttaatttcttgtcccctgccctccatgggcagttatattctgcatcaagccttagaagaggaagcaaaggcagattcagggaccaaaaggattaatgataattaataaagtagtttgaagcacgactcggaccgatg

SEQ ID NO: 2023 - DNA, 203 bp, synthetic construct
  source 1..203: mol_type = other DNA
ggcgcgccagtcctatagagcggctcccagcgttccctgcggcgtaggaggcggtccagactataaaagcggctgccggaaagcggccggcacctcattcatttctaccggtctctagtagtgcagcttcggctggtgtcatcggtgtccttcctccgctgccgcccccgcaaggcttcgccgtcatccgactcggaccgatg

SEQ ID NO: 2024 - DNA, 203 bp, synthetic construct
  source 1..203: mol_type = other DNA
ggcgcgccagtccttggaaaccctggggagaaattagttaaaaagaagtggaatcttgatgagctgcctaaatttgagaagaatttttatcaagagcaccctgatttggctaggcgcacagcacaagaggtggaaacatacagaagaagcaaggaaattacagttagaggtcacaactgcccgaagcccgactcggaccgatg

SEQ ID NO: 2025 - DNA, 203 bp, synthetic construct
  source 1..203: mol_type = other DNA
ggcgcgccagtccttcctgccattgtccacatcaatcatcagccattcctagagagaggcgatgggcctatttgtttggtgctggcaccaactcgggaactggcccaacaggtgcagcaagtagctgctgaatattgtagagcatgtcgcttgaagtctacttgtatctacggtggtgctcctaagggcgactcggaccgatg

SEQ ID NO: 2026 - DNA, 203 bp, synthetic construct
  source 1..203: mol_type = other DNA
ggcgcgccagtcctaccacaaatacgtgatttggagagaggtgtggaaatctgtattgcaacacctggaagactgattgactttttagagtgtggaaaaaccaatctgagaagaacaacctaccttgtccttgatgaagcagatagaatgcttgatatgggctttgaaccccaaataaggaagattgtcgactcggaccgatg

SEQ ID NO: 2027 - DNA, 203 bp, synthetic construct
  source 1..203: mol_type = other DNA
ggcgcgccagtcctggatcaaataagacctgataggcaaactctaatgtggagtgcgacttggccaaaagaagtaagacagcttgctgaagatttcctgaaagactatattcatataaacattggtgcacttgaactgagtgcaaaccacaacattcttcagattgtggatgtgtgtcatgacgtagacgactcggaccgatg

SEQ ID NO: 2028 - DNA, 203 bp, synthetic construct
  source 1..203: mol_type = other DNA
ggcgcgccagtcctaaaggatgaaaaacttattcgtctaatggaagagatcatgagtgagaaggagaataaaaccattgtttttgtggaaaccaaaagaagatgtgatgagcttaccagaaaaatgaggagagatgggtggcctgccatgggtatccatggtgacaagagtcaacaagagcgtgactgcgactcggaccgatg

SEQ ID NO: 2029 - DNA, 203 bp, synthetic construct
  source 1..203: mol_type = other DNA
ggcgcgccagtcctggttctaaatgaattcaaacatggaaaagctcctattctgattgctacagatgtggcctccagagggctagatgtggaagatgtgaaatttgtcatcaattatgactaccctaactcctcagaggattatattcatcgaattggaagaactgctcgcagtaccaaaacaggcaccgactcggaccgatg

SEQ ID NO: 2030 - DNA, 203 bp, synthetic construct
  source 1..203: mol_type = other DNA
ggcgcgccagtccttttttttttgccagaagagaggtcttcaggagacttcatttaaattctgattattaaactgaggctttaattgatgttaatgccttatgtcaaatgtaaagttagaatttgctagggctgggatagggagtgatatttctaggacttagacattgaaaactaattcagcctgtacgactcggaccgatg

SEQ ID NO: 2031 - DNA, 203 bp, synthetic construct
  source 1..203: mol_type = other DNA
ggcgcgccagtccttgcccaaagtcttggaaacttgctggatatgatgtaccgggagccagcacgatggtcctacacattccagacattttcctttttgagccgcctgaaagtacagctggagcccttccctgagaaactcttacaggccaggaagccagtacagatctttgagaggtctgtgtacagcgactcggaccgatg

SEQ ID NO: 2032 - DNA, 203 bp, synthetic construct
  source 1..203: mol_type = other DNA
ggcgcgccagtccttcccaaccacctttccatccccagcccctctcatccctggagcactctgccgctcaagagctggtttgttaattattgttagactttgccattgttttcttttgtacctgaagcattttgaaaataaagtttacttaagttatgcttgtttttctaaaaaaaaaaaaaaaaaaacgactcggaccgatg

SEQ ID NO: 2033 - DNA, 203 bp, synthetic construct
  source 1..203: mol_type = other DNA
ggcgcgccagtcctgtactagcgtccctgacagcgcggaatctgggtgcagttcctgcagtaccccactctacgatcagggtggcccggtggaaatcctgccctttctgtacctgggcagtgcgtatcacgcttcccgcaaggacatgctggatgccttgggcatcactgccttgatcaacgtctcagcgactcggaccgatg

SEQ ID NO: 2034 - DNA, 203 bp, synthetic construct
  source 1..203: mol_type = other DNA
ggcgcgccagtcctccgccatggctgtgctcgaccgaggcacctccaccaccaccgtgttcaacttccccgtctccatccctgtccactccacgaacagtgcgctgagctaccttcagagccccattacgacctctcccagctgctgaaaggccacgggaggtgaggctcttcacatcccattgggaccgactcggaccgatg

SEQ ID NO: 2035 - DNA, 203 bp, synthetic construct
  source 1..203: mol_type = other DNA
ggcgcgccagtccttacctggaagatgaagcccggggcaagaactgtggtgtcttggtacattgcttggctggcattagccgctcagtcactgtgactgtggcttaccttatgcagaagctcaatctgtcgatgaacgatgcctatgacattgtcaaaatgaaaaaatccaacatatcccctaacttccgactcggaccgatg

SEQ ID NO: 2036 - DNA, 203 bp, synthetic construct
  source 1..203: mol_type = other DNA
ggcgcgccagtccttgtatagatacaggcagtaggtttgctctgtacccatgtgtacagcctacccatgcagggactgggattcgaggacttccaggcgcatagggtagaaccaaatgatagggtaggagcatgtgttctttagggccttgtaaggctgtttccttttgcatctggaactgactatatcgactcggaccgatg

SEQ ID NO: 2037 - DNA, 203 bp, synthetic construct
  source 1..203: mol_type = other DNA
ggcgcgccagtcctagaccttgttatggcgaagtctttagtctttttcatgtattttcctcatgattttttctctttatgtagtttgactatgccttacctttgtaaatatttttgcttgtgttgtcgcaaaggggataatctgggaaagacaccaaatcatgggctcactttaaaaaaagaaagaatcgactcggaccgatg

SEQ ID NO: 2038 - DNA, 203 bp, synthetic construct
  source 1..203: mol_type = other DNA
ggcgcgccagtcctctgaagcacttctaccctagccgggcccagcccccgagcagtgcagcctcccgagtgcagagtgcagcccctgcccgccctggcccagctgcccatgtctaccctgctggatcccaagtaatgatgatcccttcccagatctcctacccagcctcccagggggcctactacatccgactcggaccgatg

SEQ ID NO: 2039 - DNA, 203 bp, synthetic construct
  source 1..203: mol_type = other DNA
ggcgcgccagtcctcctggacaggggcgttccacatacgttgtcccgacacagcagtaccctgtgcagccaggagccccaggcttctatccaggtgcaagccctacagaatttgggacctacgctggcgcctactatccagcccaaggggtgcagcagtttcccactggcgtggcccccgccccagttcgactcggaccgatg

SEQ ID NO: 2040 - DNA, 203 bp, synthetic construct
  source 1..203: mol_type = other DNA
ggcgcgccagtcctgagacgccccaggttgctgtcattgtccggccagatgaccggtcacagggagcaatcattgctgaccggccagggctgcctggcccagagcatagcccttcagaatcccagccttcgtcgccttctccgaccccatcaccatccccagtcttggaaccggggtctgagcctaatcgactcggaccgatg

SEQ ID NO: 2041 - DNA, 203 bp, synthetic construct
  source 1..203: mol_type = other DNA
ggcgcgccagtccttctgagttttcttccagtcctctccaggctcccacccctttggcatctcacacagtggaaattcatgagcctaatggcatggtcccatctgaagatctggaaccagaggtggagtcaagcccagagcttgctcctcccccagcttgcccctccgaatcccctgtgcccattgctcgactcggaccgatg

SEQ ID NO: 2042 - DNA, 203 bp, synthetic construct
  source 1..203: mol_type = other DNA
ggcgcgccagtcctcagaagccagagggattgccacatatcagtgacgtggtgctggacaaggccaataaaacaccactgcggccactggatcccactagactacaaggcataaattgtggcccagacttcactccatcctttgccaaccttggccggacaacccttagcacccgtgggcccccaaggcgactcggaccgatg

SEQ ID NO: 2043 - DNA, 203 bp, synthetic construct
  source 1..203: mol_type = other DNA
ggcgcgccagtcctgataaggatcgaggggaagaagatgctgatggcagcaaaacccaggacctattccgcagggtgcgctccatcctgaataaactgacaccccagatgttccagcagctgatgaagcaagtgacgcagctggccatcgacaccgaggaacgcctcaaaggggtcattgacctcattcgactcggaccgatg

SEQ ID NO: 2044 - DNA, 203 bp, synthetic construct
  source 1..203: mol_type = other DNA
ggcgcgccagtcctgtttttgagaagaagcaaaaagagatggatgaagctgctacggcagaggaacgaggacgcctgaaggaagagctggaagaggctcgggacatagcccggcggcgctctttagggaatatcaagtttattggagagttgttcaaactgaagatgttaacagaggcaataatgcatcgactcggaccgatg

SEQ ID NO: 2045 - DNA, 203 bp, synthetic construct
  source 1..203: mol_type = other DNA
ggcgcgccagtcctggtcctccaggccctcccatcagccgtggacttccccttgtggatgatggtggctggaacacagttcccatcagcaaaggtagccgccccattgacacctcacgactcaccaagatcaccaagcctggctccatcgattctaacaaccagctctttgcacctggagggcgactgcgactcggaccgatg

SEQ ID NO: 2046 - DNA, 203 bp, synthetic construct
  source 1..203: mol_type = other DNA
ggcgcgccagtcctgctagcctcacggaggatcgggaccgtgggcgggatgccgtgaagcgagaagctgccctacccccagtgagccccctgaaggcggctctctctgaggaggagttagagaagaaatccaaggctatcattgaggaatatctccatctcaatgacatgaaagaggcagtccagtgccgactcggaccgatg

SEQ ID NO: 2047 - DNA, 203 bp, synthetic construct
  source 1..203: mol_type = other DNA
ggcgcgccagtcctgtgcaggagctggcctcaccctccttgctcttcatctttgtacggcatggtgtcgagtctacgctggagcgcagtgccattgctcgtgagcatatggggcagctgctgcaccagctgctctgtgctgggcatctgtctactgctcagtactaccaagggttgtatgaaatcttgcgactcggaccgatg

SEQ ID NO: 2048 - DNA, 203 bp, synthetic construct
  source 1..203: mol_type = other DNA
ggcgcgccagtcctctcctgtgcaaaagcatgggtcctaaaaaggtggggacgctgtggcgagaagccgggcttagctggaaggaatttctacctgaaggccaggacattggtgcattcgtcgctgaacagaaggtggagtataccctgggagaggagtcggaagcccctggccagagggcactcccccgactcggaccgatg

SEQ ID NO: 2049 - DNA, 203 bp, synthetic construct
  source 1..203: mol_type = other DNA
ggcgcgccagtccttccgaggagctgaacaggcagctggagaagctgctgaaggagggcagcagtaaccagcgggtgttcgactggatagaggccaacctgagtgagcagcagatagtatccaacacgttagttcgagccctcatgacggctgtctgctattctgcaattatttttgagactcccctccgactcggaccgatg

SEQ ID NO: 2050 - DNA, 203 bp, synthetic construct
  source 1..203: mol_type = other DNA
ggcgcgccagtcctcgagtggacgttgcagtgctgaaagcgcgagcgaagctgctgcagaaatacctgtgtgacgagcagaaggagctacaggcgctctacgccctccaggcccttgtagtgaccttagaacagcctcccaacctgctgcggatgttctttgacgcactgtatgacgaggacgtggtgcgactcggaccgatg

SEQ ID NO: 2051 - DNA, 203 bp, synthetic construct
  source 1..203: mol_type = other DNA
ggcgcgccagtcctcagatggcccggctagccgcctggactgcaggggggcggcagcagcggcggtggcagtgggtgcctgtagtgtgatgtgtctgaactaataaagtggctgaagaggcaggatggcttggggctgcctgggcccccctccaggatgccgccaggtgtccctctcctccccctgggcgactcggaccgatg

SEQ ID NO: 2052 - DNA, 203 bp, synthetic construct
  source 1..203: mol_type = other DNA
ggcgcgccagtccttcacttgcctgaaaccggctcctcgacggccgccgcccgcctggccttttagggcctgactcccgcccttcctggcctacactcctgggcggcggcaggcctagcttctggcccagtgcgggttccccggcggcaggcgtatcctgtgtgcccctgggccaggcccgaacccggcgactcggaccgatg

SEQ ID NO: 2053 - DNA, 203 bp, synthetic construct
  source 1..203: mol_type = other DNA
ggcgcgccagtccttctcctacccagcctcccagggggcctactacatccctggacaggggcgttccacatacgttgtcccgacacagcagtaccctgtgcagccaggagccccaggcttctatccaggtgcaagccctacagaatttgggacctacgctggcgcctactatccagcccaaggggtgccgactcggaccgatg

SEQ ID NO: 2054 - DNA, 203 bp, synthetic construct
  source 1..203: mol_type = other DNA
ggcgcgccagtcctagcagtttcccactggcgtggcccccgccccagttttgatgaaccagccaccccagattgctcccaagagggagcgtaagacgatccgaattcgagatccaaaccaaggaggaaaggatatcacagaggagatcatgtctggggcccgcactgcctccacacccacccctcccccgactcggaccgatg

SEQ ID NO: 2055 - DNA, 203 bp, synthetic construct
  source 1..203: mol_type = other DNA
ggcgcgccagtcctagacgggaggcggtctggagcctcaagctaatggggagacgccccaggttgctgtcattgtccggccagatgaccggtcacagggagcaatcattgctgaccggccagggctgcctggcccagagcatagcccttcagaatcccagccttcgtcgccttctccgaccccatcaccgactcggaccgatg

SEQ ID NO: 2056 - DNA, 203 bp, synthetic construct
  source 1..203: mol_type = other DNA
ggcgcgccagtcctcatccccagtcttggaaccggggtctgagcctaatctcgcagtcctctctattcctggggacactatgacaactatacaaatgtctgtagaagaatcaacccccatctcccgtgaaactggggagccatatcgcctctctccagaacccactcctctcgccgaacccatactggcgactcggaccgatg

SEQ ID NO: 2057 - DNA, 203 bp, synthetic construct
  source 1..203: mol_type = other DNA
ggcgcgccagtcctaagtagaagtgacacttagcaaaccggttccagaatctgagttttcttccagtcctctccaggctcccacccctttggcatctcacacagtggaaattcatgagcctaatggcatggtcccatctgaagatctggaaccagaggtggagtcaagcccagagcttgctcctcccccgactcggaccgatg

SEQ ID NO: 2058 - DNA, 203 bp, synthetic construct
  source 1..203: mol_type = other DNA
ggcgcgccagtcctcagcttgcccctccgaatcccctgtgcccattgctccaactgcccaacctgaggaactgctcaacggagccccctcgccaccagctgtggacttaagcccagtcagtgagccagaggagcaggccaaggaggtgacagcatcaatggcgccccccaccatcccctctgctactccgactcggaccgatg

SEQ ID NO: 2059 - DNA, 203 bp, synthetic construct
  source 1..203: mol_type = other DNA
ggcgcgccagtcctaggcagcagcagccactcaagtggcagtatctgtgccaaagaggagacggaaaattaaggagctaaataagaaggaggctgttggagaccttctggatgccttcaaggaggcgaacccggcagtaccagaggtggaaaatcagcctcctgcaggcagcaatccaggcccagagtcgactcggaccgatg

SEQ ID NO: 2060 - DNA, 203 bp, synthetic construct
  source 1..203: mol_type = other DNA
ggcgcgccagtccttcctgcttggttttcagttcatctttgccagtatgcagaagccagagggattgccacatatcagtgacgtggtgctggacaaggccaataaaacaccactgcggccactggatcccactagactacaaggcataaattgtggcccagacttcactccatcctttgccaaccttgcgactcggaccgatg

SEQ ID NO: 2061 - DNA, 203 bp, synthetic construct
  source 1..203: mol_type = other DNA
ggcgcgccagtcctacaccgaggaacgcctcaaaggggtcattgacctcatttttgagaaggccatttcagagcccaacttctctgtggcctatgccaacatgtgccgctgcctcatggcgctgaaagtgcccactacggaaaagccaacagtgactgtgaacttccgaaagctgttgttgaatcgatcgactcggaccgatg

SEQ ID NO: 2062 - DNA, 203 bp, synthetic construct
  source 1..203: mol_type = other DNA
ggcgcgccagtcctagcagctcatggccaagggcagtgacaagcgtcggggcggtcctccaggccctcccatcagccgtggacttccccttgtggatgatggtggctggaacacagttcccatcagcaaaggtagccgccccattgacacctcacgactcaccaagatcaccaagcctggctccatcgcgactcggaccgatg

SEQ ID NO: 2063 - DNA, 203 bp, synthetic construct
  source 1..203: mol_type = other DNA
ggcgcgccagtcctgagaacggccctcccagcctgaggggctgcgcaaggcagctagcctcacggaggatcgggaccgtgggcgggatgccgtgaagcgagaagctgccctacccccagtgagccccctgaaggcggctctctctgaggaggagttagagaagaaatccaaggctatcattgaggaatcgactcggaccgatg

SEQ ID NO: 2064 - DNA, 203 bp, synthetic construct
  source 1..203: mol_type = other DNA
ggcgcgccagtcctctactgctcagtactaccaagggttgtatgaaatcttggaattggctgaggacatggaaattgacatcccccacgtgtggctctacctagcggaactggtaacacccattctgcaggaaggtggggtgcccatgggggagctgttcagggagattacaaagcctctgagaccgtcgactcggaccgatg

SEQ ID NO: 2065 - DNA, 203 bp, synthetic construct
  source 1..203: mol_type = other DNA
ggcgcgccagtccttgggcaaagctgcttccctgttgctggagatcctgggcctcctgtgcaaaagcatgggtcctaaaaaggtggggacgctgtggcgagaagccgggcttagctggaaggaatttctacctgaaggccaggacattggtgcattcgtcgctgaacagaaggtggagtataccctggcgactcggaccgatg

SEQ ID NO: 2066 - DNA, 203 bp, synthetic construct
  source 1..203: mol_type = other DNA
ggcgcgccagtccttccaggatgccgccaggtgtccctctcctccccctggggcacagagatatattatatataaagtcttgaaatttggtgtgtcttggggtggggaggggcaccaacgcctgcccctggggtccttttttttattttctgaaaatcactctcgggactgccgtcctcgctgctgggcgactcggaccgatg

SEQ ID NO: 2067 - DNA, 203 bp, synthetic construct
  source 1..203: mol_type = other DNA
ggcgcgccagtcctgcagacggcaaccgggccgctgattgggcggcgaaggagccattcggggagactctggtgggttcggctgccccaagagtgataagttcggcttcagacacgccttagcgccagcagtgagtcggagctctatggaggtggcagcgggtaccgagtggcggctgcagcagcgaccgactcggaccgatg

SEQ ID NO: 2068 - DNA, 203 bp, synthetic construct
  source 1..203: mol_type = other DNA
ggcgcgccagtcctgaacgagccaagtccttaatggatcagtactttgcccgaatgtgctccttgatgttaagtaaggaattgccagcaaggattcgtttcctgctgcaggataccgtagagttgcgagaacaccattgggttcctcgcaaggcttttcttgacaatggaccaaagacgatcaatcaacgactcggaccgatg

SEQ ID NO: 2069 - DNA, 203 bp, synthetic construct
  source 1..203: mol_type = other DNA
ggcgcgccagtcctattcgtcaagatgcagtaaaagatctaggggtgtttattcctgctcctatggctcaagggatgagaagtgacttctttctggagggaccgttcatgccacccaggatgaaaatggatagggacccacttggaggacttgctgatatgtttggacaaatgccaggtagcggaattcgactcggaccgatg

SEQ ID NO: 2070 - DNA, 203 bp, synthetic construct
  source 1..203: mol_type = other DNA
ggcgcgccagtcctccaccgtcaaaggaagaactccttaaactaactgaaactgttgtgactgaatatctaaatagtggaaatgcaaatgaggctgtcaatggtgtaagagaaatgagggctcctaaacactttcttcctgagatgttaagcaaagtaatcatcctgtcactagatagaagcgatgaacgactcggaccgatg

SEQ ID NO: 2071 - DNA, 203 bp, synthetic construct
  source 1..203: mol_type = other DNA
ggcgcgccagtcctacttccctaacttgcgcctgggtgggaggaatgctccgctcttttgttcccaggaagggaaaaacggggcggaggttcctgctgccatgttgtggccctggtcttccgcctgcaagtgctagtcctgtacacccggccccctctcgcgcgtctttccacgagctctccacggggcgactcggaccgatg

SEQ ID NO: 2072 - DNA, 203 bp, synthetic construct
  source 1..203: mol_type = other DNA
ggcgcgccagtcctaggaggcgaaagggtggacaggggaaaactgctgaagagctttcggagagacctcatctagtcgctggcctcgtcaaggcagtaaaaattcctagggcagacattttccacgtgatgttgctcgtgtctgtagttagacttttctattgatctcagtgctcagttttaaagatacgactcggaccgatg

SEQ ID NO: 2073 - DNA, 203 bp, synthetic construct
  source 1..203: mol_type = other DNA
ggcgcgccagtcctagcactagacgagatgacaactccgcagcaaacaactccgcaaacgaaaaagaacgacatgatgcaatcttcaggaaagtaagaggcatactaaataagcttactcctgaaaagtttgacaagctatgccttgagctcctcaatgtgggtgtagagtctaaactcatccttaaacgactcggaccgatg

SEQ ID NO: 2074 - DNA, 203 bp, synthetic construct
  source 1..203: mol_type = other DNA
ggcgcgccagtcctttacaagatgaatttgaaaaccgaactagaaatgttgatgtctatgataagcgtgaaaatcccctcctccccgaggaggaggaacagagagccattgctaagatcaagatgttgggaaacatcaaattcattggagagcttggcaagcttgatcttattcacgaatctatccttcgactcggaccgatg

SEQ ID NO: 2075 - DNA, 203 bp, synthetic construct
  source 1..203: mol_type = other DNA
ggcgcgccagtccttcaaatcaactcttcaatggccatgggggacacatcatgcctcccacacaatcgcagtttggagagatgggaggcaagtttatgaaaagccaggggctaagccagctctaccataaccagagtcagggactcttatcccagctgcaaggacagtcgaaggatatgccacctcggcgactcggaccgatg

SEQ ID NO: 2076 - DNA, 203 bp, synthetic construct
  source 1..203: mol_type = other DNA
ggcgcgccagtcctgacatccctttggtgaaatcctatttagcacagtttgcagctcgtgccatcatttcagagctggtgagcatttcagaactagctcaaccactagaaagtggcacccattttcctctcttcctactttgtcttcagcagttagctaaattacaagatcgagaatggttaacagaacgactcggaccgatg

SEQ ID NO: 2077 - DNA, 203 bp, synthetic construct
  source 1..203: mol_type = other DNA
ggcgcgccagtcctctactatctttcaagccagtaatgcagaaatttcttcatgatcacgttgatctacaagtcagtgccctgtatgctctccaggtgcactgctataacagcaacttcccaaaaggcatgttacttcgcttttttgtgcacttctatgacatggaaattattgaagaagaagctttccgactcggaccgatg

SEQ ID NO: 2078 - DNA, 203 bp, synthetic construct
  source 1..203: mol_type = other DNA
ggcgcgccagtcctccctggactctctcaaaccccttatccctctggacagaatgcaggtccaaccacgctggtataccctcaaacccctcagacaatgaattcacaacctcaaacccgttctccgtttttccagaggcctcaaatacagcctcctagagctaccatcccgaacagcagtccttccatcgactcggaccgatg

SEQ ID NO: 2079 - DNA, 203 bp, synthetic construct
  source 1..203: mol_type = other DNA
ggcgcgccagtccttcgtcctggtgcacagacacccactgcagtgtaccaggctaatcagcacatcatgatggttaaccatctgcccatgccgtacccagtgccccaggggcctcagtactgtataccacagtaccgtcatagtggccctccttatgttgggcccccccaacaatatccagttcaacccgactcggaccgatg

SEQ ID NO: 2080 - DNA, 203 bp, synthetic construct
  source 1..203: mol_type = other DNA
ggcgcgccagtcctaaaccagggaggtaaagacataacagaggagattatgtctggaggtggcagcagaaatcctactccacccataggaagacccacgtccacacctactcctcctcagcagctgcccagccaggtccccgagcacagccctgtggtttatgggactgtggagagcgctcatcttgccgactcggaccgatg

SEQ ID NO: 2081 - DNA, 203 bp, synthetic construct
  source 1..203: mol_type = other DNA
ggcgcgccagtcctatcctggaagcctactgatactgaaggtaagaagcagtatgacagggagtttctgctggacttccagttcatgcctgcctgtatacaaaaaccagagggcctgcctcctatcagtgatgtggttcttgacaagatcaaccaacccaaattgccaatgcgaactctggatcctcgcgactcggaccgatg

SEQ ID NO: 2082 - DNA, 203 bp, synthetic construct
  source 1..203: mol_type = other DNA
ggcgcgccagtcctaattttgcctcgaggaccagactttacaccagcctttgctgattttggaaggcagacacctggtggaagaggcgtacctttgttgaatgttgggtcacgaagatctcaacctggccaaagaagagaacccagaaagatcatcacagtttctgtaaaagaagatgtacacctgaacgactcggaccgatg

SEQ ID NO: 2083 - DNA, 203 bp, synthetic construct
  source 1..203: mol_type = other DNA
ggcgcgccagtcctggagcggctgaaaggagttattgacctggtctttgagaaggctattgatgaacccagtttctctgtggcttacgcaaacatgtgtcgatgtctagtaacgctgaaagtacccatggcagacaagcctggtaacacagtgaatttccggaagctgctactgaaccgttgccagaacgactcggaccgatg

SEQ ID NO: 2084 - DNA, 203 bp, synthetic construct
  source 1..203: mol_type = other DNA
ggcgcgccagtcctactcaaaatgctgactgaagccatcatgcatgactgtgtggtgaagctgctaaagaaccatgatgaagaatccctggagtgcctgtgtcgcctgctcaccaccattggcaaagacttggactttgaaaaagcaaagccacgtatggaccagtactttaatcagatggagaaaatcgactcggaccgatg

SEQ ID NO: 2085 - DNA, 203 bp, synthetic construct
  source 1..203: mol_type = other DNA
ggcgcgccagtcctgggaaaaggcagcagtggtggagcaaaggcaagtgagactgatgccttacggtcaagtgcttccagtttaaacagattctctgccctgcaacctccagcaccctcagggtccacgccatccacgcctgtagagtttgattcccgaaggaccttaactagtcgtggaagtatgggcgactcggaccgatg

SEQ ID NO: 2086 - DNA, 203 bp, synthetic construct
  source 1..203: mol_type = other DNA
ggcgcgccagtcctcagggagaagaatgacaagccccttccatctgcaacagctcggccaaatactttcatgaggggtggcagcagtaaagacctgctagacaatcagtctcaagaagagcagcggagagagatgctggagaccgtgaagcagctcacaggaggtgtggatgtggagaggaacagcaccgactcggaccgatg

SEQ ID NO: 2087 - DNA, 203 bp, synthetic construct
  source 1..203: mol_type = other DNA
ggcgcgccagtcctgaatgcccagggcctactacatgtttttgtgagagtgggagtggagtccaccctggaaaggagccagatcaccagggatcacatgggccaattactctatcagctggtacagtcagaaaaactcagcaaacaggactttttcaaaggtttttcagaaactttggaattggcagacgactcggaccgatg

SEQ ID NO: 2088 - DNA, 203 bp, synthetic construct
  source 1..203: mol_type = other DNA
ggcgcgccagtccttgacatggccattgatattccccatatttggttgtaccttgctgaactggtgacccccatgttaaaagaaggtggaatctccatgagagaacttaccatagaatttagcaaacctttacttcctgttggaagagctggggtcttgctatctgaaatattgcacctactatgcaacgactcggaccgatg

SEQ ID NO: 2089 - DNA, 203 bp, synthetic construct
  source 1..203: mol_type = other DNA
ggcgcgccagtcctcaatttaagtatttttttaaaaagtttcacgtcttcgccaatcacagtgcagcaaggccaattctcgcagaaacccccacgtgtgcacgagtgggagaggggaaagagaaaaaaaggtgatcatggaggaaaaaggtactggataaaagtaaacttcaaaccttagggcgggagcgactcggaccgatg

SEQ ID NO: 2090 - DNA, 203 bp, synthetic construct
  source 1..203: mol_type = other DNA
ggcgcgccagtcctacaaattcctagaggacctgtgcaacaacctcttgaggatcgaatcttcactcccgctgtctcagcagtctacagcacggtaacacaagtggcaagacagccgggaacccctaccccatccccttattcagcacatgaaataaacaaggggcatccaaatcttgcggcaacgcccgactcggaccgatg

SEQ ID NO: 2091 - DNA, 203 bp, synthetic construct
  source 1..203: mol_type = other DNA
ggcgcgccagtcctgaacagcagtccttccattcgtcctggtgcacagacacccactgcagtgtaccaggctaatcagcacatcatgatggttaaccatctgcccatgccgtacccagtgccccaggggcctcagtactgtataccacagtaccgtcatagtggccctccttatgttgggcccccccacgactcggaccgatg

SEQ ID NO: 2092 - DNA, 203 bp, synthetic construct
  source 1..203: mol_type = other DNA
ggcgcgccagtcctacaatatccagttcaaccaccggggccaggtcctttttatcctggaccaggacctggggacttccccaatgcttatggaacgcctttttacccaagtcagccggtgtatcagtcagcacctatcatagtgcctacgcagcaacagccgcctccagccaagagagagaaaaaaaccgactcggaccgatg

SEQ ID NO: 2093 - DNA, 203 bp, synthetic construct
  source 1..203: mol_type = other DNA
ggcgcgccagtcctgagcgctcatcttgctgccagcacccctgtcactgcagctagcgaccagaagcaagaggagaagccaaaaccagatccagtgttaaagtctccttccccagtccttaggctagtcctcagtggagagaagaaagaacaagaaggccagacatctgaaactactgcaatagtatccgactcggaccgatg

SEQ ID NO: 2094 - DNA, 203 bp, synthetic construct
  source 1..203: mol_type = other DNA
ggcgcgccagtcctcatagcagagcttcctctgcctccatcacctaccactgtttcttctgttgctcgaagtacaattgcagcccccacctcttctgctcttagtagccaaccaatattcaccactgctatagatgacagatgtgaactctcatccccaagagaagacacaattcctatacccagcctcgactcggaccgatg

SEQ ID NO: 2095 - DNA, 203 bp, synthetic construct
  source 1..203: mol_type = other DNA
ggcgcgccagtcctaactctggatcctcgaattttgcctcgaggaccagactttacaccagcctttgctgattttggaaggcagacacctggtggaagaggcgtacctatttgcaaagtgcagagcaggcatggattgccaattctggaacagagcaaagccccaacttgccctccactggtgatgtccgactcggaccgatg

SEQ ID NO: 2096 - DNA, 203 bp, synthetic construct
  source 1..203: mol_type = other DNA
ggcgcgccagtcctacacccacccatgaagagcctgcctctagggttgttgaatgttgggtcacgaagatctcaacctggccaaagaagagaacccagaaagatcatcacagtttctgtaaaagaagatgtacacctgaaaaaggcagaaaatgcctggaagccaagccaaaaacgagacagccaagccgactcggaccgatg

SEQ ID NO: 2097 - DNA, 203 bp, synthetic construct
  source 1..203: mol_type = other DNA
ggcgcgccagtcctgaaagaacttgaggctgccagtgctccagaggagaggacaaggcttcatgatgaactggaagaagccaaggacaaagcccggcggagatccattggcaacatcaagtttattggagaactctttaaactcaaaatgctgactgaagccatcatgcatgactgtgtggtgaagctcgactcggaccgatg

SEQ ID NO: 2098 - DNA, 203 bp, synthetic construct
  source 1..203: mol_type = other DNA
ggcgcgccagtccttgttatagacctaaggctgtgcaattgggtatctcgaagagcagatcaagggcctaaaactatcgaacagattcacaaagaggctaaaatagaagaacaagaagagcaaaggaaggtccagcaactcatgaccaaagagaagagaagaccaggtgtccagagagtggacgaaggcgactcggaccgatg

SEQ ID NO: 2099 - DNA, 203 bp, synthetic construct
  source 1..203: mol_type = other DNA
ggcgcgccagtcctacggtcaagtgcttccagtttaaacagattctctgccctgcaacctccagcaccctcagggtccacgccatccacgcctgtagagtttgattcccgaaggaccttaactagtcgtggaagtatgggcagggagaagaatgacaagccccttccatctgcaacagctcggccaaacgactcggaccgatg

SEQ ID NO: 2100 - DNA, 203 bp, synthetic construct
  source 1..203: mol_type = other DNA
ggcgcgccagtccttactttcatgaggggtggcagcagtaaagacctgctagacaatcagtctcaagaagagcagcggagagagatgctggagaccgtgaagcagctcacaggaggtgtggatgtggagaggaacagcactgaggctgagcgaaataaaacaagggagtcagcaaaaccagaaatttccgactcggaccgatg

SEQ ID NO: 2101 - DNA, 203 bp, synthetic construct
  source 1..203: mol_type = other DNA
ggcgcgccagtcctcaagtacctagactcagatacagagaaggaactgcaagcactttatgcactacaagcatcgatagtaaaacttgatcaacctgccaatttgctgcggatgttttttgattgtctatatgacgaggaggtgatctccgaggatgccttctacaaatgggagagcagcaaggaccccgactcggaccgatg

SEQ ID NO: 2102 - DNA, 203 bp, synthetic construct
  source 1..203: mol_type = other DNA
ggcgcgccagtcctgcagcaaggccaattctcgcagaaacccccacgtgtgcacgagtgggagaggggaaagagaaaaaaaggtgatcatggaggaaaaaggtactggataaaagtaaacttcaaaccttagggcgggagcactaaaaccaaaatacatgtattatttatagaaaatattttctgtttcgactcggaccgatg

SEQ ID NO: 2103 - DNA, 203 bp, synthetic construct
  source 1..203: mol_type = other DNA
ggcgcgccagtcctttctggtcgaagacgcaggttctggactggatcagctaccaagtggagaagaacaagtacgacgcaagcgccattgacttctcacgatgtgacatggatggcgccaccctctgcaattgtgcccttgaggagctgcgtctggtctttgggcctctgggggaccaactccatgcccgactcggaccgatg

SEQ ID NO: 2104 - DNA, 203 bp, synthetic construct
  source 1..203: mol_type = other DNA
ggcgcgccagtcctagctgatgttttggtgtattgtcagccatcgtcctgggactcggagactatggcctcgcctccccaccctcctcttggaattacaagccctggggtttgaagctgactttatagctgcaagtgtatctccttttatctggtgcctcctcaaacccagtctcagacactaaatgccgactcggaccgatg

SEQ ID NO: 2105 - DNA, 203 bp, synthetic construct
  source 1..203: mol_type = other DNA
ggcgcgccagtccttaatttatgtgctatataaatatgtcagatgtacatagagatctattttttctaaaacattcccctccccactcctctcccacagagtgctggactgttccaggccctccagtgggctgatgctgggacccttaggatggggctcccagctcctttctcctgtgaatggaggcacgactcggaccgatg

SEQ ID NO: 2106 - DNA, 203 bp, synthetic construct
  source 1..203: mol_type = other DNA
ggcgcgccagtcctgagacctccaataaagtgccttctgggctttttctaacctttgtcttagctacctgtgtactgaaatttgggcctttggatcgaatatggtcaagaggttggaggggaggaaaatgaaggtctaccaggctgagggtgagggcaaaggctgacgaagaggggagttacagatttcgactcggaccgatg

SEQ ID NO: 2107 - DNA, 203 bp, synthetic construct
  source 1..203: mol_type = other DNA
ggcgcgccagtcctaggtttgttacatgggtatattgtgtgatgctgagcttgggatgcgaatgatcctgtcacccaggtagtgagtatagcacccagtgaaactgtagtctcatgccaggcactgtgctagcccactctggctcatttaatcctctcctaagaagagaggagacacagcgtccccatcgactcggaccgatg

SEQ ID NO: 2108 - DNA, 203 bp, synthetic construct
  source 1..203: mol_type = other DNA
ggcgcgccagtccttctgttccccctgctgccacctttggggccgatgacttggtactgaccctgagcaacccccagatgtcattggagggtacagagaaggccagctggttgggggaacagccccagttctggtcgaagacgcaggttctggactggatcagctaccaagtggagaagaacaagtaccgactcggaccgatg

SEQ ID NO: 2109 - DNA, 203 bp, synthetic construct
  source 1..203: mol_type = other DNA
ggcgcgccagtcctgagaaggatggcatggccttccaggaggccctagacccagggccctttgaccagggcagcccctttgcccaggagctgctggacgacggtcagcaagccagcccctaccaccccggcagctgtggcgcaggagccccctcccctggcagctctgacgtctccaccgcagggactcgactcggaccgatg

SEQ ID NO: 2110 - DNA, 203 bp, synthetic construct
  source 1..203: mol_type = other DNA
ggcgcgccagtcctggtgcttctcggagctcccactcctcagactccggtggaagtgacgtggacctggatcccactgatggcaagctcttccccagcgatggttttcgtgactgcaagaagggggatcccaagcacgggaagcggaaacgaggccggccccgaaagctgagcaaagagtactgggaccgactcggaccgatg

SEQ ID NO: 2111 - DNA, 203 bp, synthetic construct
  source 1..203: mol_type = other DNA
ggcgcgccagtccttgtctcgagggcaagaagagcaagcacgcgcccagaggcacccacctgtgggagttcatccgggacatcctcatccacccggagctcaacgagggcctcatgaagtgggagaatcggcatgaaggcgtcttcaagttcctgcgctccgaggctgtggcccaactatggggccaacgactcggaccgatg

SEQ ID NO: 2112 - DNA, 203 bp, synthetic construct
  source 1..203: mol_type = other DNA
ggcgcgccagtcctctatacccgggaccaaactcacggaccactcgaggcctgcaaaccttcctgggaggacaggcaggccagatggcccctccactggggaatgctcccagctgtgctgtggagagaagctgatgttttggtgtattgtcagccatcgtcctgggactcggagactatggcctcgcccgactcggaccgatg

SEQ ID NO: 2113 - DNA, 203 bp, synthetic construct
  source 1..203: mol_type = other DNA
ggcgcgccagtccttcccctccccactcctctcccacagagtgctggactgttccaggccctccagtgggctgatgctgggacccttaggatggggctcccagctcctttctcctgtgaatggaggcagagacctccaataaagtgccttctgggctttttctaacctttgtcttagctacctgtgtacgactcggaccgatg

SEQ ID NO: 2114 - DNA, 203 bp, synthetic construct
  source 1..203: mol_type = other DNA
ggcgcgccagtcctcggaagcttttcctggtgtgggcgcttctaacctaatcctcaatcgattccagaactattactctgtttccacagtgatactgtgtctaggttttagggaggacagttcattgatgttacttaagaatgctttccaggtggaaagttccttaagtttgaggcttcaaattccatcgactcggaccgatg

SEQ ID NO: 2115 - DNA, 203 bp, synthetic construct
  source 1..203: mol_type = other DNA
ggcgcgccagtccttgccccagccctcagggccgccagcaaggaagaaatttgtgatacccctcgacgaggatgaggtccctcctggagtggccaagcccttattccgatctacacagagccttcccactgtggacacctcggcccaggcggcccctcagacctacgccgaatatgccatctcacagccgactcggaccgatg

SEQ ID NO: 2116 - DNA, 203 bp, synthetic construct
  source 1..203: mol_type = other DNA
ggcgcgccagtccttaattcccgactatgtgctgggccagagcacctgtgccctgttcctcagcctccgctaccacaacctgcacccagactacatccatgggcggctgcagagcctggggaagaacttcgccttgcgggtcctgcttgtccaggtggatgtgaaagatccccagcaggccctcaaggcgactcggaccgatg

SEQ ID NO: 2117 - DNA, 203 bp, synthetic construct
  source 1..203: mol_type = other DNA
ggcgcgccagtcctagctggctaagatgtgtatcctggccgactgcacattgatcctcgcctggagccccgaggaagctgggcggtacctggagacctacaaggcctatgagcagaaaccagcggacctcctgatggagaagctagagcaggacttcgtctcccggtctctggaacagctcatcgccgcgactcggaccgatg

SEQ ID NO: 2118 - DNA, 203 bp, synthetic construct
  source 1..203: mol_type = other DNA
ggcgcgccagtcctcatcaagagaagatctggccttatgcccaggcctgggccctcagaaagcccggaggctgtttgatgtcctgcacgagcccttcttgaaagtaccctgatgaccccagctgccaaggaaacccccagtgtaataataaatcgtcctcccaggccaggctcctgctggctgcgctgcgactcggaccgatg

SEQ ID NO: 2119 - DNA, 203 bp, synthetic construct
  source 1..203: mol_type = other DNA
ggcgcgccagtcctgtggcggccctggcatctcctcttggggcactgtctctggcatccggctttcctgactctgcttcttcctcttcttggtggatcccggagttgccctggcttcaggctgtccctcccctggcagttcaggctctagtggctgaattggctcagtcactgtgtgacctctctcttcgactcggaccgatg

SEQ ID NO: 2120 - DNA, 203 bp, synthetic construct
  source 1..203: mol_type = other DNA
ggcgcgccagtcctctggctgttgaggcgccatggtcccccctggggactccagaggcttcatctccggctccactggctccatcgcctccgtccctggctccatcattgccatctgtcccttttcttttttcctcttcttcgtagggggcagagggatggcttcctccagtggctccaccttcacctcgactcggaccgatg

SEQ ID NO: 2121 - DNA, 203 bp, synthetic construct
  source 1..203: mol_type = other DNA
ggcgcgccagtcctgtggctgagactcaactgtcaccccctcctctggctccatcccttccgtccccttttgcctctttctctttttggtcggggacaggactgtgtcttctagaggctcagtgttaatctgttcctgcttcactgtcttgtcttctggctcgaaggtttctttccctttgggcttctcgactcggaccgatg

SEQ ID NO: 2122 - DNA, 203 bp, synthetic construct
  source 1..203: mol_type = other DNA
ggcgcgccagtccttcctcttcttggtggtggacgggaacagcactcccagaggctccagtgtctccactgtgggctctgtccccacaggccctgctgcctctggttctttcagctgctgattttttttcttcttcttcttccgcacatccatttctggcgaccccaaagccatgtccacctccagggcgactcggaccgatg

SEQ ID NO: 2123 - DNA, 203 bp, synthetic construct
  source 1..203: mol_type = other DNA
ggcgcgccagtcctccccgtgcccattcactgcctcctgagtgactggggcctctgtcacctgcatctcctttttcttcttccctgaggtgagcaggttgggggccaaggctgacctaggccctgtgactggtgggttgcccccaaaggcacagaaccgaggcctcaggccaggagggatctgtggtgcgactcggaccgatg

SEQ ID NO: 2124 - DNA, 203 bp, synthetic construct
  source 1..203: mol_type = other DNA
ggcgcgccagtcctggggacttgctgggatgggctgcagagggctccctgacagggattgctggggaccctcaaggatccttagggtgccctggggggctgaggcacaggtgagtccacctcctgcctccgttgagggggccagcagggtcgcttctccagcttggggacagctgctgaggactcgatcgactcggaccgatg

SEQ ID NO: 2125 - DNA, 203 bp, synthetic construct
  source 1..203: mol_type = other DNA
ggcgcgccagtcctgcctaggctggagtgcagtggcatgatctcggctcactgcaatgtccacctcctgggttcaagcgattctcctgcctcagcctctcaagtagctgggattacaggcacctgccaccacgcccagccaatttttgtatttttagtagagacaatttcactatgttggccaggctgcgactcggaccgatg

SEQ ID NO: 2126 - DNA, 203 bp, synthetic construct
  source 1..203: mol_type = other DNA
ggcgcgccagtcctgagccgaaggtggaggtcaaaggggcgtggcgttacagagcctctagcgctgggtgttggggacctgacgctatggagctctcggagttttgtgggggacggctgtgagtggggggttcctgctgcgggatgagaacgtagacgccagtggctcactcgctcctggcaccttcccgactcggaccgatg

SEQ ID NO: 2127 - DNA, 203 bp, synthetic construct
  source 1..203: mol_type = other DNA
ggcgcgccagtcctaggcggcccctcagacctacgccgaatatgccatctcacagcctctggaaggggctggggccacgtgccccacagggtcagagcccctggcaggagagacgcccaaccaggccctgaaacccggggcaaaatccaacagcatcattgtgagccctcggcagaggggcaatcccgcgactcggaccgatg

SEQ ID NO: 2128 - DNA, 203 bp, synthetic construct
  source 1..203: mol_type = other DNA
ggcgcgccagtcctagcaggacttcgtctcccgggtgactgaatgtctgaccaccgtgaagtcagtcaacaaaacggacagtcagaccctcctgaccacatttggatctctggaacagctcatcgccgcatcaagagaagatctggccttatgcccaggcctgggccctcagaaagtaagagctctggcgactcggaccgatg

SEQ ID NO: 2129 - DNA, 203 bp, synthetic construct
  source 1..203: mol_type = other DNA
ggcgcgccagtcctgcaggtgctgacaatactgctgccttacccgccatacattaaggagcagggtcctggtcctaaagagttattcaaatgaaggtggttcgacgccccgaacctcacctgacctcaactaacccttaaaaatgcacacctcatgagtctacctgagcattcaggcagcactgacaacgactcggaccgatg

SEQ ID NO: 2130 - DNA, 203 bp, synthetic construct
  source 1..203: mol_type = other DNA
ggcgcgccagtcctaacttgacccaggtggctagcaaattagaaacaccattcatctctaacatatgatactgatgccatgtaaaggcctttaataagtcattgaaatttactgtgagactgtatgttttaattgcatttaaaaatatatagcttgaaagcagttaaactgattagtattcaggcactcgactcggaccgatg

SEQ ID NO: 2131 - DNA, 203 bp, synthetic construct
  source 1..203: mol_type = other DNA
ggcgcgccagtcctcttagaaggaagaggttggtagttccctgctctgttttgaacatgctctagtttattaacctggggacattcccattgctgtcttaagtaagtctcatagccagctcctgtcacgtgactctcatatggattcattttcgggccagctctgaacaaagcatcatgaacatatgtcgactcggaccgatg

SEQ ID NO: 2132 - DNA, 203 bp, synthetic construct
  source 1..203: mol_type = other DNA
ggcgcgccagtcctccatgcaaaagtggggctaaatgaagtgtgttaaggggtcggctaagtgggacattagtaactgcacactatttccctctactgagtaaaccctatctgtgattcccccaaacatctggcatggctcccttttgtccttcctgtgccctgcaaatattagcaaagaagcttcatcgactcggaccgatg

SEQ ID NO: 2133 - DNA, 203 bp, synthetic construct
  source 1..203: mol_type = other DNA
ggcgcgccagtcctgccaggttaggaaggcagcattccatgaccagaaacagggacaaagaaatccccccttcagaacagaggcatttaaaatggaaaagagagattggattttggtgggtaacttagaaggatggcatctccatgtagaataaatgaagaaagggaggcccagccgcaggaaggcagcgactcggaccgatg

SEQ ID NO: 2134 - DNA, 203 bp, synthetic construct
  source 1..203: mol_type = other DNA
ggcgcgccagtcctttgaatggagattctgattcagtgggttgggggcagagtttctgcagttccatcaggtcccccccaggtgcaggtgctgacaatactgctgccttacccgccatacattaaggagcagggtcctggtcctaaagagttattcaaatgaaggtggttcgacgccccgaacctcaccgactcggaccgatg

SEQ ID NO: 2135 - DNA, 203 bp, synthetic construct
  source 1..203: mol_type = other DNA
ggcgcgccagtcctctgacctcaactaacccttaaaaatgcacacctcatgagtctacctgagcattcaggcagcactgacaatagttatgcctgtactaaggagcatgattttaagaggctttggcccaatgcctataaaatgcccatttcgaagatatacaaaaacatacttcaaaaatgttaaaccgactcggaccgatg

SEQ ID NO: 2136 - DNA, 203 bp, synthetic construct
  source 1..203: mol_type = other DNA
ggcgcgccagtcctagtgcaattgaagaattgacctaagtaagctgacattatggttaataatagtattttagatttgtgcagcaaaataatttcataacttttttgtttttgttacttggataagatcaatctgttttattttagtaaatctttgcaggcaagttagagaaaatgcagtgtggcttacgactcggaccgatg

SEQ ID NO: 2137 - DNA, 203 bp, synthetic construct
  source 1..203: mol_type = other DNA
ggcgcgccagtccttgatgaaagatgctgtggattcaattctttcagtcaagaataaacacagactttgtaggttcctgctgaataaagcaaatcccagaaacccagattttggaagaatcagcaaccccagcataaaataaacccctatcaaaatgtcagaggacatggcaaggtaaacttagcattcgactcggaccgatg

SEQ ID NO: 2138 - DNA, 203 bp, synthetic construct
  source 1..203: mol_type = other DNA
ggcgcgccagtccttgtccaagagcacgcagtttgagtacgcctggtgcctggtgcggagcaagtacaatgatgacatccgtaaaggcatcgtgctgctcgaggagctgctgcccaaagggagcaaggaggaacagcgggattacgtcttctacctggccgtggggaactaccggctcaaggaatacgcgactcggaccgatg

SEQ ID NO: 2139 - DNA, 203 bp, synthetic construct
  source 1..203: mol_type = other DNA
ggcgcgccagtcctctgtgtccaagtccaaatcctgaaggagacgcgggagcccacggagaacgctccaggagggcctgtccatcctcgctgtcctttccctgttctccccctgccccccgtctctatcctctgtggccttcagctaatttctgctcccctgagattcgtccttcagccccatcatgtcgactcggaccgatg

SEQ ID NO: 2140 - DNA, 203 bp, synthetic construct
  source 1..203: mol_type = other DNA
ggcgcgccagtcctgcagattccatttcatgatgtcagattcccacctcctgtaggttataataaagatataaatgaaagtgatgaagttgaggtgtattccagagcaaatgaaaaagagccttgctgttggtggttagctaaagtgaggatgataaagggtgagttttatgtgatagaatatgcagccgactcggaccgatg

SEQ ID NO: 2141 - DNA, 203 bp, synthetic construct
  source 1..203: mol_type = other DNA
ggcgcgccagtcctggaaattatgccaccaaattcccttccttccaataattcaagggttggacctaatgccccagaagaaaaaaaacatttagatataaaggaaaacagcacccatttttctcaacctaacagtacaaaagtccagagggtgttagtggcttcatcagttgtagcaggggaatcccacgactcggaccgatg

SEQ ID NO: 2142 - DNA, 203 bp, synthetic construct
  source 1..203: mol_type = other DNA
ggcgcgccagtcctcgtggatggtcagcaaccactcgtgaatggagtaccctaaactgcataattctgaagttatatttcctataccatttccgtaattcttattccatattagaaaactttgttaggccaaagacaaatagtaggcaagatggcacagggcatgaaatgaacacaaattatgctaagcgactcggaccgatg

SEQ ID NO: 2143 - DNA, 203 bp, synthetic construct
  source 1..203: mol_type = other DNA
ggcgcgccagtcctaattttttattttttggtattggccataagcaacaattttcagatttgcacaaaaagataccttaaaatttgaaacattgcttttaaaactacttagcacttcagggcagattttagttttattttctaaagtactgagcagtgatattctttgttaatttggaccattttcctcgactcggaccgatg

SEQ ID NO: 2144 - DNA, 203 bp, synthetic construct
  source 1..203: mol_type = other DNA
ggcgcgccagtcctgcattgggtgatcattcaccagtacattctcagtttttcttaatatatagcatttatggtaatcatattagacttctgttttcaatctcgtatagaagtcttcatgaaatgctatgtcatttcatgtcctgtgtcagtttatgttttggtccacttttccagtattttagtggacgactcggaccgatg

SEQ ID NO: 2145 - DNA, 203 bp, synthetic construct
  source 1..203: mol_type = other DNA
ggcgcgccagtccttttttttctttttttcttttgttttttgaagtgttggggtttggttttgttttttgagtcttttttttttaagtgaaatttattgaggaaaaatatgtgaaggaccttcactctaagatgttatatttttcttaaaaagtaactcctagtaggggtaccactgaatctgtacagcgactcggaccgatg

SEQ ID NO: 2146 - DNA, 203 bp, synthetic construct
  source 1..203: mol_type = other DNA
ggcgcgccagtccttgatttctagttatttattctgggaatgtatagtatttgaaaacagaaattggtaccttgcacacatcatctgtaagctgtttggttttaaaatactgtagataattaaccaaggtagaatgaccttgtaatgtaactgctcttgggcaatattctctgtacatattagcgacacgactcggaccgatg

SEQ ID NO: 2147 - DNA, 203 bp, synthetic construct
  source 1..203: mol_type = other DNA
ggcgcgccagtcctagagcaagaggcaggctcagcaaatggttcagccccagtccccggtggctgtcagtcaaagcaagcccggttgttatgacaatggaaaacactatcagataaatcaacagtgggagcggacctacctaggcaatgcgttggtttgtacttgttatggaggaagccgaggttttacgactcggaccgatg

SEQ ID NO: 2148 - DNA, 203 bp, synthetic construct
  source 1..203: mol_type = other DNA
ggcgcgccagtcctactgcgagagtaaacctgaagctgaagagacttgctttgacaagtacactgggaacacttaccgagtgggtgacacttatgagcgtcctaaagactccatgatctgggactgtacctgcatcggggctgggcgagggagaataagctgtaccatcgcaaaccgctgccatgaagcgactcggaccgatg

SEQ ID NO: 2149 - DNA, 203 bp, synthetic construct
  source 1..203: mol_type = other DNA
ggcgcgccagtccttggggatgcagtggctgaagacacaaggaaataagcaaatgctttgcacgtgcctgggcaacggagtcagctgccaagagacagctgtaacccagacttacggtggcaactcaaatggagagccatgtgtcttaccattcacctacaatggcaggacgttctactcctgcaccacgactcggaccgatg

SEQ ID NO: 2150 - DNA, 203 bp, synthetic construct
  source 1..203: mol_type = other DNA
ggcgcgccagtcctgcacttctgagggcagaagagacaacatgaagtggtgtgggaccacacagaactatgatgccgaccagaagtttgggttctgccccatggctgcccacgaggaaatctgcacaaccaatgaaggggtcatgtaccgcattggagatcagtgggataagcagcatgacatgggtccgactcggaccgatg

SEQ ID NO: 2151 - DNA, 203 bp, synthetic construct
  source 1..203: mol_type = other DNA
ggcgcgccagtcctacatgatgaggtgcacgtgtgttgggaatggtcgtggggaatggacatgcattgcctactcgcagcttcgagatcagtgcattgttgatgacatcacttacaatgtgaacgacacattccacaagcgtcatgaagaggggcacatgctgaactgtacatgcttcggtcagggtccgactcggaccgatg

SEQ ID NO: 2152 - DNA, 203 bp, synthetic construct
  source 1..203: mol_type = other DNA
ggcgcgccagtcctggggcaggtggaagtgtgatcccgtcgaccaatgccaggattcagagactgggacgttttatcaaattggagattcatgggagaagtatgtgcatggtgtcagataccagtgctactgctatggccgtggcattggggagtggcattgccaacctttacagacctatccaagctcgactcggaccgatg

SEQ ID NO: 2153 - DNA, 203 bp, synthetic construct
  source 1..203: mol_type = other DNA
ggcgcgccagtcctcaagtggtcctgtcgaagtatttatcactgagactccgagtcagcccaactcccaccccatccagtggaatgcaccacagccatctcacatttccaagtacattctcaggtggagacctaaaaattctgtaggccgttggaaggaagctaccataccaggccacttaaactcctcgactcggaccgatg

SEQ ID NO: 2154 - DNA, 203 bp, synthetic construct
  source 1..203: mol_type = other DNA
ggcgcgccagtcctacaccatcaaaggcctgaagcctggtgtggtatacgagggccagctcatcagcatccagcagtacggccaccaagaagtgactcgctttgacttcaccaccaccagcaccagcacacctgtgaccagcaacaccgtgacaggagagacgactcccttttctcctcttgtggccacgactcggaccgatg

SEQ ID NO: 2155 - DNA, 203 bp, synthetic construct
  source 1..203: mol_type = other DNA
ggcgcgccagtcctcttctgaatctgtgaccgaaatcacagccagtagctttgtggtctcctgggtctcagcttccgacaccgtgtcgggattccgggtggaatatgagctgagtgaggagggagatgagccacagtacctggatcttccaagcacagccacttctgtgaacatccctgacctgcttccgactcggaccgatg

SEQ ID NO: 2156 - DNA, 203 bp, synthetic construct
  source 1..203: mol_type = other DNA
ggcgcgccagtcctctggccgaaaatacattgtaaatgtctatcagatatctgaggatggggagcagagtttgatcctgtctacttcacaaacaacagcgcctgatgcccctcctgacccgactgtggaccaagttgatgacacctcaattgttgttcgctggagcagaccccaggctcccatcacagcgactcggaccgatg

SEQ ID NO: 2157 - DNA, 203 bp, synthetic construct
  source 1..203: mol_type = other DNA
ggcgcgccagtcctggtacagaatagtctattcgccatcagtagaaggtagcagcacagaactcaaccttcctgaaactgcaaactccgtcaccctcagtgacttgcaacctggtgttcagtataacatcactatctatgctgtggaagaaaatcaagaaagtacacctgttgtcattcaacaagaaacgactcggaccgatg

SEQ ID NO: 2158 - DNA, 203 bp, synthetic construct
  source 1..203: mol_type = other DNA
ggcgcgccagtcctaccaagagagccccaaagccactggagtctttaccacactgcagcctgggagctctattccaccttacaacaccgaggtgactgagaccaccattgtgatcacatggacgcctgctccaagaattggttttaagctgggtgtacgaccaagccagggaggagaggcaccacgagcgactcggaccgatg

SEQ ID NO: 2159 - DNA, 203 bp, synthetic construct
  source 1..203: mol_type = other DNA
ggcgcgccagtcctgtgtttacactgtcaaggatgacaaggaaagtgtccctatctctgataccatcatcccagaggtgccccaactcactgacctaagctttgttgatataaccgattcaagcatcggcctgaggtggaccccgctaaactcttccaccattattgggtaccgcatcacagtagttgcgactcggaccgatg

SEQ ID NO: 2160 - DNA, 203 bp, synthetic construct
  source 1..203: mol_type = other DNA
ggcgcgccagtccttgcctggtacagaatatgtagtgagtgtctccagtgtctacgaacaacatgagagcacacctcttagaggaagacagaaaacaggtcttgattccccaactggcattgacttttctgatattactgccaactcttttactgtgcactggattgctcctcgagccaccatcactgcgactcggaccgatg

SEQ ID NO: 2161 - DNA, 203 bp, synthetic construct
  source 1..203: mol_type = other DNA
ggcgcgccagtcctgctacaggatccgccatcatcccgagcacttcagtgggagacctcgagaagatcgggtgccccactctcggaattccatcaccctcaccaacctcactccaggcacagagtatgtggtcagcatcgttgctcttaatggcagagaggaaagtcccttattgattggccaacaatcgactcggaccgatg

SEQ ID NO: 2162 - DNA, 203 bp, synthetic construct
  source 1..203: mol_type = other DNA
ggcgcgccagtcctctaccatcagcggccttaaacctggagttgattataccatcactgtgtatgctgtcactggccgtggagacagccccgcaagcagcaagccaatttccattaattaccgaacagaaattgacaaaccatcccagatgcaagtgaccgatgttcaggacaacagcattagtgtcacgactcggaccgatg

SEQ ID NO: 2163 - DNA, 203 bp, synthetic construct
  source 1..203: mol_type = other DNA
ggcgcgccagtcctatgctcttaaggacactttgacaagcagaccagctcagggagttgtcaccactctggagaatgtcagcccaccaagaagggctcgtgtgacagatgctactgagaccaccatcaccattagctggagaaccaagactgagacgatcactggcttccaagttgatgccgttccagcgactcggaccgatg

SEQ ID NO: 2164 - DNA, 203 bp, synthetic construct
  source 1..203: mol_type = other DNA
ggcgcgccagtcctccaatggccagactccaatccagagaaccatcaagccagatgtcagaagctacaccatcacaggtttacaaccaggcactgactacaagatctacctgtacaccttgaatgacaatgctcggagctcccctgtggtcatcgacgcctccactgccattgatgcaccatccaacccgactcggaccgatg

SEQ ID NO: 2165 - DNA, 203 bp, synthetic construct
  source 1..203: mol_type = other DNA
ggcgcgccagtccttgcgtttcctggccaccacacccaattccttgctggtatcatggcagccgccacgtgccaggattaccggctacatcatcaagtatgagaagcctgggtctcctcccagagaagtggtccctcggccccgccctggtgtcacagaggctactattactggcctggaaccgggaacgactcggaccgatg

SEQ ID NO: 2166 - DNA, 203 bp, synthetic construct
  source 1..203: mol_type = other DNA
ggcgcgccagtcctaccctgggtatgacactggaaatggtattcagcttcctggcacttctggtcagcaacccagtgttgggcaacaaatgatctttgaggaacatggttttaggcggaccacaccgcccacaacggccacccccataaggcataggccaagaccatacccgccgaatgtaggtgaggcgactcggaccgatg

SEQ ID NO: 2167 - DNA, 203 bp, synthetic construct
  source 1..203: mol_type = other DNA
ggcgcgccagtcctaaatccaaattggtcacatccccagggaagatgtagactatcacctgtacccacagggtccgggactcaatccaaatgcctctacaggacaagaagctctctctcagacaaccatctcatgggccccattccaggacacttctgagtacatcatttcatgtcatcctgttggcacgactcggaccgatg

SEQ ID NO: 2168 - DNA, 203 bp, synthetic construct
  source 1..203: mol_type = other DNA
ggcgcgccagtcctctgatgaagaacccttacagttcagggttcctggaacttctaccagtgccactctgacaggcctcaccagaggtgccacctacaacatcatagtggaggcactgaaagaccagcagaggcataaggttcgggaagaggttgttaccgtgggcaactctgtcaacgaaggcttgacgactcggaccgatg

SEQ ID NO: 2169 - DNA, 203 bp, synthetic construct
  source 1..203: mol_type = other DNA
ggcgcgccagtcctagcttcagctcaactcacagcttctccaagcatcaccctgggagtttcctgagggttttctcataaatgagggctgcacattgcctgttctgcttcgaagtattcaataccgctcagtattttaaatgaagtgattctaagatttggtttgggatcaataggaaagcatatgcacgactcggaccgatg

SEQ ID NO: 2170 - DNA, 203 bp, synthetic construct
  source 1..203: mol_type = other DNA
ggcgcgccagtcctaaatcagttgctacaaaaactgattggtttttgtcacttcatctcttcactaatggagatagctttacactttctgctttaatagatttaagtggaccccaatatttattaaaattgctagtttaccgttcagaagtataatagaaataatctttagttgctcttttctaaccacgactcggaccgatg

SEQ ID NO: 2171 - DNA, 203 bp, synthetic construct
  source 1..203: mol_type = other DNA
ggcgcgccagtcctataagagaccacaagcgacccgcagggccagacgttcttcgccgagagtcgtcggggtttcctgcttcaacagtgcttggacggaacccggcgctcgttccccaccccggccggccgcccatagccagccctccgtcacctcttcaccgcaccctcggactgccccaaggcccccgactcggaccgatg

SEQ ID NO: 2172 - DNA, 203 bp, synthetic construct
  source 1..203: mol_type = other DNA
ggcgcgccagtcctcgccgccgctccagcgccgcgcagccaccgccgccgccgccgcctctccttagtcgccgccatgacgaccgcgtccacctcgcaggtgcgccagaactaccaccaggactcagaggccgccatcaaccgccagatcaacctggagctctacgcctcctacgtttacctgtccatcgactcggaccgatg

SEQ ID NO: 2173 - DNA, 203 bp, synthetic construct
  source 1..203: mol_type = other DNA
ggcgcgccagtcctcgggctgaatgcaatggagtgtgcattacatttggaaaaaaatgtgaatcagtcactactggaactgcacaaactggccactgacaaaaatgacccccatttgtgtgacttcattgagacacattacctgaatgagcaggtgaaagccatcaaagaattgggtgaccacgtgaccgactcggaccgatg

SEQ ID NO: 2174 - DNA, 203 bp, synthetic construct
  source 1..203: mol_type = other DNA
ggcgcgccagtcctcaacttgcgcaagatgggagcgcccgaatctggcttggcggaatatctctttgacaagcacaccctgggagacagtgataatgaaagctaagcctcgggctaatttccccatagccgtggggtgacttccctggtcaccaaggcagtgcatgcatgttggggtttcctttacctcgactcggaccgatg

SEQ ID NO: 2175 - DNA, 203 bp, synthetic construct
  source 1..203: mol_type = other DNA
ggcgcgccagtcctcaaaaagaaacgagtatttgtatttattaaactcattagtttgggcagtatactaaggtgtggctgtcttggattcagatagaactaagggttcccgactctgaatccagagtctgagttaaatgtttccaatggttcagtctagctttcacagtttttatgaataaaaggcatcgactcggaccgatg

SEQ ID NO: 2176 - DNA, 203 bp, synthetic construct
  source 1..203: mol_type = other DNA
ggcgcgccagtcctggctattcccagcagagcagtcagccctacggacagcagagttacagtggttatagccagtccacggacacttcaggctatggccagagcagctattcttcttatggccagagccagaacacaggctatggaactcagtcaactccccagggatatggctcgactggcggctatcgactcggaccgatg

SEQ ID NO: 2177 - DNA, 203 bp, synthetic construct
  source 1..203: mol_type = other DNA
ggcgcgccagtcctcgggcagactttaatcggggtggtggcaatggtcgtggaggccgagggcgaggaggacccatgggccgtggaggctatggaggtggtggcagtggtggtggtggccgaggaggatttcccagtggaggtggtggcggtggaggacagcagcgagctggtgactggaagtgtcctcgactcggaccgatg

SEQ ID NO: 2178 - DNA, 203 bp, synthetic construct
  source 1..203: mol_type = other DNA
ggcgcgccagtcctttcaagtgttccacaagtatgttctctactgaagagttgctgcatccttgaatcttgggtgatttgaggcacagaaactatgactttattttttgagatggagttttgctcttgttgcccaggctggagtgcaatggcacgtttttcggcttaccgcaactgccgcctcctgggcgactcggaccgatg

SEQ ID NO: 2179 - DNA, 203 bp, synthetic construct
  source 1..203: mol_type = other DNA
ggcgcgccagtcctgttagccctttcagcttttttccccatcttgtgccgggccttcctgggtttcagtacttggatgtagggctgcagttatgtcagtggtgggtagattgaccaggaattaaggtctagggtccagcccatgtgagacttgactcactgatctacctttaggcatgtcttccttcccgactcggaccgatg

SEQ ID NO: 2180 - DNA, 203 bp, synthetic construct
  source 1..203: mol_type = other DNA
ggcgcgccagtcctagtctcatcctttttaaattttttttttttttttgagacggtctcactctcacccaggctggattgcagtggtgtgatctcgaccaactgcaacctctgcctcccacccgcaagctatctgcccacctcagcctctggagtagctgggacgggactacaggcacctgccaccatcgactcggaccgatg

SEQ ID NO: 2181 - DNA, 203 bp, synthetic construct
  source 1..203: mol_type = other DNA
ggcgcgccagtcctcgaggggcggccggagagcgccagggcctgagctgccggagcggcgcctgtgagtgagtgcagaaagcaggcgcccgcgcgctagccgtggcaggagcagcccgcacgccgcgctctctccctgggcgacctgcagtttgcaatatgactttggaggaattctcggctggagagcgactcggaccgatg

SEQ ID NO: 2182 - DNA, 203 bp, synthetic construct
  source 1..203: mol_type = other DNA
ggcgcgccagtcctgtgacgaatccacattcatctcaatggaaggatcctgccttaagtcaacttatttgtttttgccgggaaagtcgctacatggatcaatgggttccagtgattaatctccctgaacggtgatggcatctgaatgaaaataactgaaccaaattgcactgaagtttttgaaatacccgactcggaccgatg

SEQ ID NO: 2183 - DNA, 203 bp, synthetic construct
  source 1..203: mol_type = other DNA
ggcgcgccagtcctaccgtcaaggctgagaacgggaagcttgtcatcaatggaaatcccatcaccatcttccaggagcgagatccctccaaaatcaagtggggcgatgctggcgctgagtacgtcgtggagtccactggcgtcttcaccaccatggagaaggctggggctcatttgcaggggggagcccgactcggaccgatg

SEQ ID NO: 2184 - DNA, 203 bp, synthetic construct
  source 1..203: mol_type = other DNA
ggcgcgccagtcctatgaccacagtccatgccatcactgccacccagaagactgtggatggcccctccgggaaactgtggcgtgatggccgcggggctctccagaacatcatccctgcctctactggcgctgccaaggctgtgggcaaggtcatccctgagctgaacgggaagctcactggcatggcccgactcggaccgatg

SEQ ID NO: 2185 - DNA, 203 bp, synthetic construct
  source 1..203: mol_type = other DNA
ggcgcgccagtcctcactcctccacctttgacgctggggctggcattgccctcaacgaccactttgtcaagctcatttcctggtatgacaacgaatttggctacagcaacagggtggtggacctcatggcccacatggcctccaaggagtaagacccctggaccaccagccccagcaagagcacaagacgactcggaccgatg

SEQ ID NO: 2186 - DNA, 203 bp, synthetic construct
  source 1..203: mol_type = other DNA
ggcgcgccagtcctggaagagagagaccctcactgctggggagtccctgccacactcagtcccccaccacactgaatctcccctcctcacagttgccatgtagaccccttgaagaggggaggggcctagggagccgcaccttgtcatgtaccatcaataaagtaccctgtgctcaaccaaaaaaaaaacgactcggaccgatg

SEQ ID NO: 2187 - DNA, 203 bp, synthetic construct
  source 1..203: mol_type = other DNA
ggcgcgccagtcctgtgcgcagcgggtgcatccctgtccggatgctgcgcctgcggtagagcggccgccatgttgcaaccgggaaggaaatgaatgggcagccgttaggaaagcctgccggtgactaaccctgcgctcctgcctcgatgggtggagtcgcgtgtggcggggaagtcaggtggagcgagcgactcggaccgatg

SEQ ID NO: 2188 - DNA, 203 bp, synthetic construct
  source 1..203: mol_type = other DNA
ggcgcgccagtcctgctagctggcccgatttctcctccgggtgatgcttttcctagattattctctgatttggtcgtattgggcgcctggtcaccagggctgcttttaactctggtaaagtggatattgttgccatcaatgaccccttcattgacctcaactacatggtttacatgttccaatatgatcgactcggaccgatg

SEQ ID NO: 2189 - DNA, 203 bp, synthetic construct
  source 1..203: mol_type = other DNA
ggcgcgccagtccttccacccatggcaaattccatggcaccgtcaaggctgagaacgggaagcttgtcatcaatggaaatcccatcaccatcttccaggagcgagatccctccaaaatcaagtggggcgatgctggcgctgagtacgtcgtggagtccactggcgtcttcaccaccatggagaaggctcgactcggaccgatg

SEQ ID NO: 2190 - DNA, 203 bp, synthetic construct
  source 1..203: mol_type = other DNA
ggcgcgccagtcctaactttggtatcgtggaaggactcatgaccacagtccatgccatcactgccacccagaagactgtggatggcccctccgggaaactgtggcgtgatggccgcggggctctccagaacatcatccctgcctctactggcgctgccaaggctgtgggcaaggtcatccctgagctgcgactcggaccgatg

SEQ ID NO: 2191 - DNA, 203 bp, synthetic construct
  source 1..203: mol_type = other DNA
ggcgcgccagtcctaccagccccagcaagagcacaagaggaagagagagaccctcactgctggggagtccctgccacactcagtcccccaccacactgaatctcccctcctcacagttgccatgtagaccccttgaagaggggaggggcctagggagccgcaccttgtcatgtaccatcaataaagtacgactcggaccgatg

SEQ ID NO: 2192 - DNA, 203 bp, synthetic construct
  source 1..203: mol_type = other DNA
ggcgcgccagtcctgcttcccatacggcagtggctgggggagagtgatggagagaaaggctaagctaaggtcaaagaaagtggaggaaggctggcttgtcccgctggacttgacggcggagctgctgcaatctcgcgggctgggcccttgccccgggtggacccgagtgcctgcggggaggcgggtgtcgactcggaccgatg

SEQ ID NO: 2193 - DNA, 203 bp, synthetic construct
  source 1..203: mol_type = other DNA
ggcgcgccagtcctgacgtcagacggtttttgggtcattccctggcacggggactttattttcataacagcatgaagtgccgtggaactggaataggcgtgtcctctccctcgaccctccccctccttgtccctctgctcacccctcgctcgttccctccctccggcgagggccgcctttataacaaccgactcggaccgatg

SEQ ID NO: 2194 - DNA, 203 bp, synthetic construct
  source 1..203: mol_type = other DNA
ggcgcgccagtccttggtgattctgggtctggccgtgggcttcagcctagtccaggatgttatcgctattgaatatattgtcctgaccatgaataggaccaacgtcaatgtcttttctgagctttccgctcctcgtcgcaatgaagactttgtcctcctgctcacctacgtcctcttcttgatggcgccgactcggaccgatg

SEQ ID NO: 2195 - DNA, 203 bp, synthetic construct
  source 1..203: mol_type = other DNA
ggcgcgccagtccttgaccttcctcatgtcctccttcaccttctgtggttccttcacgggctggaagagacatggggcccacatctacctcacgatgctcctctccattgccatctgggtggcctggatcaccctgctcatgcttcctgactttgaccgcaggtgggatgacaccatcctcagctccgcgactcggaccgatg

SEQ ID NO: 2196 - DNA, 203 bp, synthetic construct
  source 1..203: mol_type = other DNA
ggcgcgccagtcctctcaaggttttgaagagacaggggacacgctctatgccccctattccacacattttcagctgcagaaccagcctccccaaaaggaattctccatcccacgggcccacgcttggccgagcccttacaaagactatgaagtaaagaaagagggcagctaactctgtcctgaagagtcgactcggaccgatg

SEQ ID NO: 2197 - DNA, 203 bp, synthetic construct
  source 1..203: mol_type = other DNA
ggcgcgccagtcctctcgaccacctgtgctcaagcaatcctcccatctccatctcccaaagtgctgggatgacaggcgtgagccacagctcccagcctaggcccttaatcttgctgttattttccatggactaaaggtctggtcatctgagctcacgctggctcacacagctctaggggcctgctcctcgactcggaccgatg

SEQ ID NO: 2198 - DNA, 203 bp, synthetic construct
  source 1..203: mol_type = other DNA
ggcgcgccagtcctctaaatttactcatctctctagtgctgcctcacattgggcctcagcagctccccagcaccaattcacaggtcacccctctcttcttgcactgtccccaaacttgctgtcaattccgagatctaatctccccctacgctctgccaggaattctttcagacctcactagcacaagccgactcggaccgatg

SEQ ID NO: 2199 - DNA, 203 bp, synthetic construct
  source 1..203: mol_type = other DNA
ggcgcgccagtcctccggttgctccttgtcaggagaatttgtagatcattctcacttcaaattcctggggctgatacttctctcatcttgcaccccaacctctgtaaatagatttaccgcatttacggctgcattctgtaagtgggcatggtctcctaatggaggagtgttcattgtataataagttacgactcggaccgatg

SEQ ID NO: 2200 - DNA, 203 bp, synthetic construct
  source 1..203: mol_type = other DNA
ggcgcgccagtcctccttccgttgagcctgtggaagaatatgattatgaagatctgaaagaatcttccaattctgtttcaaaccatcagctcagtggatttgatcaagctcgtctttattcatgccttgatcacatgagagaggtacttggagatgctgtgccagatgaaatattaattgaagcagttcgactcggaccgatg

SEQ ID NO: 2201 - DNA, 203 bp, synthetic construct
  source 1..203: mol_type = other DNA
ggcgcgccagtcctctgaagaacaagtttgatgtgcagaaggctttgtcaggggttctggaacaagatagagtgcagagtttgaaggacaagaatgaggcaacagtatctacaggaaagatagcaaaaggaaaaccagtagattcccagacatcgcgaagtgaatctgaaattgtgccaaaagttgctcgactcggaccgatg

SEQ ID NO: 2202 - DNA, 203 bp, synthetic construct
  source 1..203: mol_type = other DNA
ggcgcgccagtcctaaaatgactgtatctggaaagaagcaaactatgggatttgaagtgcctggagtatcttctgaagaaaatggtcatagtttccacacacctcaaaaaggaccgcccattgaagatgccattgcttcttccgatgttcttgagactgcttctaaatctgctaatccaccccacacgcgactcggaccgatg

SEQ ID NO: 2203 - DNA, 203 bp, synthetic construct
  source 1..203: mol_type = other DNA
ggcgcgccagtcctattcaagcatcagaagagcagagttcaaccccagcaccggtgaaaaagtctggcaagctgaggcagcaaatagatgtgaaggcggaactggagaagcggcaaggagggaagcagctactcaacttagtggtcattggtcatgttgatgctgggaaaagtactctgatgggccatcgactcggaccgatg

SEQ ID NO: 2204 - DNA, 203 bp, synthetic construct
  source 1..203: mol_type = other DNA
ggcgcgccagtcctggttatatccaaactggtgaccgactactggcaatgcctcctaatgaaacttgtaccgtgaaaggaatcactctgcatgatgaacctgtcgactgggcggcagcaggcgatcatgttagtcttactttggttgggatggatatcatcaaaatcaatgttggctgcatattttgtcgactcggaccgatg

SEQ ID NO: 2205 - DNA, 203 bp, synthetic construct
  source 1..203: mol_type = other DNA
ggcgcgccagtcctgaggctggggtgggaagatcacttgagcccaggaggtcgaggctgcagtgagccatgatcacatcactgcagtccagcctgggtgacagagcaagacctgtcaccctgccacccataaaaaacctcttctgtaatgccaggttcttgacaagatgtgataattccacacttacacgactcggaccgatg

SEQ ID NO: 2206 - DNA, 203 bp, synthetic construct
  source 1..203: mol_type = other DNA
ggcgcgccagtccttcctcagatctcccatccagggcaaggacagactaaaagagcatatcttctccagaagtcctagaaacatctcatcattgactatgattgaattttatttattaatacttccctaggatatcctgtgtttgagtgtgaagttaatatcacacaaagcatgtagctaacagttgtcgactcggaccgatg

SEQ ID NO: 2207 - DNA, 203 bp, synthetic construct
  source 1..203: mol_type = other DNA
ggcgcgccagtcctattcattccttccttctccaatagtgtttaagtacaatctttttatttgcattttattgatgattgattgtggttgaaaggagtggtgatattatttcgaggatccactgtgtaagaagactgttggcagtggaaggctcgagttgattaagtgacaaagaggtaaagcagacacgactcggaccgatg

SEQ ID NO: 2208 - DNA, 203 bp, synthetic construct
  source 1..203: mol_type = other DNA
ggcgcgccagtcctaaaaaaaaaaaagcaaagaaactaagtctgtacagcaaaagatggaaaggaaacaagaaaattaaatgaagacaaaggttgtgattattacagtaaatgaaaataggtttttatctttaaaatgtagactcaaactgcaaagctaatgatatgctatctgcaaaatattcctatcgactcggaccgatg

SEQ ID NO: 2209 - DNA, 203 bp, synthetic construct
  source 1..203: mol_type = other DNA
ggcgcgccagtcctccttccatactggccatattttggaacactgacctagacatgtccagatgggagtcccattcctagcagacaagctgagcaccgttgtaaccagagaactattactaggccttgaagaacctgtctaactggatgctcattgcctgggcaaggcctgtttaggccggttgcggtcgactcggaccgatg

SEQ ID NO: 2210 - DNA, 203 bp, synthetic construct
  source 1..203: mol_type = other DNA
ggcgcgccagtcctggctcatgcctgtaatcctagcactttgggaggctgaggtgggtggatcacctgaggtcaggagttcgagaccagcctcgccaacatggcgaaaccccatctctactaaaaatacaaaagttagctgggtgtggtggcagaggcctgtaatcccagctccttgggaggctgaggcgactcggaccgatg

SEQ ID NO: 2211 - DNA, 203 bp, synthetic construct
  source 1..203: mol_type = other DNA
ggcgcgccagtcctccttaccccggggtctggtgtatgctgtgctttcctcagcagtatggctctgacatctcttagatgtcccaacttcagctgttgggagatggtgatattttcaaccctacttcctaaacatctgtctggggttcctttagtcttgaatgtcttatgctcaattatttggtgttgcgactcggaccgatg

SEQ ID NO: 2212 - DNA, 203 bp, synthetic construct
  source 1..203: mol_type = other DNA
ggcgcgccagtcctcttactagagagcccatcgcctgggacctcctggaccaccagaagccaactagccaacacagagcccaccaagggccttccagaccatccatccagaagcatgtgataagacctccttccatactggccatattttggaacactgacctagacatgtccagatgggagtcccatcgactcggaccgatg

SEQ ID NO: 2213 - DNA, 203 bp, synthetic construct
  source 1..203: mol_type = other DNA
ggcgcgccagtcctgggctgttgggagtgaggatggagtgttcagtgcccatttctcattttacattttaaagtcgttcctccaacatagtgtgtattggtctgaagggggtggtgggatgccaaagcctgctcaagttatggacattgtggccaccatgtggcttaaatgattttttctaactaatacgactcggaccgatg

SEQ ID NO: 2214 - DNA, 203 bp, synthetic construct
  source 1..203: mol_type = other DNA
ggcgcgccagtccttgcaagtgttttcgcccccatcagtgtcgtcgagtgccttctgcagtgcgaagaaactgaaaatagagccctctggctgggatgtttcaggacagagtagcaacgacaaatattatacccacagcaaaaccctcccagccacacaagggcaagccaactcctctcaccaggtagcgactcggaccgatg

SEQ ID NO: 2215 - DNA, 203 bp, synthetic construct
  source 1..203: mol_type = other DNA
ggcgcgccagtccttcttgcagcaggtggccacagccttgatgaagctcaagagtcttggtctgatccacgctgaccttaagcctgaaaacatcatgctggttgatccagttcgccagccctaccgagtgaaggtcattgactttggttctgctagtcacgtttccaaagctgtgtgctcaacctactcgactcggaccgatg

SEQ ID NO: 2216 - DNA, 203 bp, synthetic construct
  source 1..203: mol_type = other DNA
ggcgcgccagtcctcttcaacttggcaacagttgcctggggtagctctacacaactctgtccagcccacagcaatgattccagaggccatggggagtggacagcagctagctgactggaggaatgcccactctcatggcaaccagtacagcactatcatgcagcagccatccttgctgactaaccatgcgactcggaccgatg

SEQ ID NO: 2217 - DNA, 203 bp, synthetic construct
  source 1..203: mol_type = other DNA
ggcgcgccagtcctgcaccacatcttcttataattccttggtccctgtccaagatcagcatcagcccatcatcattccagatactcccagccctcctgtgagtgtcatcactatccgaagtgacactgatgaggaagaggacaacaaatacaagcccagtagctctggactgaagccaaggtctaatgcgactcggaccgatg

SEQ ID NO: 2218 - DNA, 203 bp, synthetic construct
  source 1..203: mol_type = other DNA
ggcgcgccagtccttcatcagttatgtcactgtcaatgattctccagactctgactcttctttgagcagcccttattccactgataccctgagtgctctccgaggcaatagtggatccgttttggaggggcctggcagagttgtggcagatggcactggcacccgcactatcattgtgcctccactgacgactcggaccgatg

SEQ ID NO: 2219 - DNA, 203 bp, synthetic construct
  source 1..203: mol_type = other DNA
ggcgcgccagtcctaaactcagcttggtgactgcactgtagcaacccaggcctcaggtctcctgagcaataagactaagccagtcgcttcagtgagtgggcagtcatctggatgctgtatcacccccacagggtatcgagctcaacgcggggggaccagtgcagcacaaccactcaatcttagccaggcgactcggaccgatg

SEQ ID NO: 2220 - DNA, 203 bp, synthetic construct
  source 1..203: mol_type = other DNA
ggcgcgccagtcctgatgtctcactactaaactaccagtcagctttgtacccatcatctgctgcaccagttcctggagttgcccagcagggtgtttccttgcagcctggaaccacccagatttgcactcagacagatccattccaacagacatttatagtatgtccacctgcgtttcaaactggactacgactcggaccgatg

SEQ ID NO: 2221 - DNA, 203 bp, synthetic construct
  source 1..203: mol_type = other DNA
ggcgcgccagtcctcaagcaacaacaaagcattctggattccctgtgaggatggataatgctgtaccgattgtaccccaggcaccagctgctcagccactacagattcagtcaggagttctcacgcagggaagctgtacaccactaatggtagcaactctccaccctcaagtagccaccatcacaccgcgactcggaccgatg

SEQ ID NO: 2222 - DNA, 203 bp, synthetic construct
  source 1..203: mol_type = other DNA
ggcgcgccagtcctcagtatgcggtgccctttactctgagctgcgcagccggccggccggcgctggttgaacagactgccgctgtactgcaggcgtggcctggagggactcagcaaattctcctgccttcaacttggcaacagttgcctggggtagctctacacaactctgtccagcccacagcaatgcgactcggaccgatg

SEQ ID NO: 2223 - DNA, 203 bp, synthetic construct
  source 1..203: mol_type = other DNA
ggcgcgccagtcctagtgagcttgccttaggatggaccagcaagcccccgtggaccctaagttgttcaccgggatttatcagaacaggattagtagctgtattgtgtaatgcattgttctcagtttccctgccaacattgaaaaataaaaacagcagcttttctcctttaccaccacctctaccccttcgactcggaccgatg

SEQ ID NO: 2224 - DNA, 203 bp, synthetic construct
  source 1..203: mol_type = other DNA
ggcgcgccagtcctccttgtcttttttctgtaagggacaagatttgttgtttttgtaagaaatgagatgcaggaaagaaaaccaaatcccattcctgcaccccagtccaataagcagataccacttaagataggagtctaaactccacagaaaaggataataccaagagcttgtattgttaccttagtcgactcggaccgatg

SEQ ID NO: 2225 - DNA, 203 bp, synthetic construct
  source 1..203: mol_type = other DNA
ggcgcgccagtcctgaagggaggaagcctggtgaatttagtgagcagctggcctgggtcacagtgacctgacctcaaaccagcttaaggctttaagtcctctctcagaacttggcatttccaacttcttcctttccgggtgagagaagaagcggagaagggttcagtgtagccactctgggctcatagcgactcggaccgatg

SEQ ID NO: 2226 - DNA, 203 bp, synthetic construct
  source 1..203: mol_type = other DNA
ggcgcgccagtcctggacacttggtcactccagagtttttaatagctcccaggaggtgatattattttcagtgctcagctgaaataccaaccccaggaataagaactccatttcaaacagttctggccattctgagcctgcttttgtgattgctcatccattgtcctccactagaggggctaagcttgcgactcggaccgatg

SEQ ID NO: 2227 - DNA, 203 bp, synthetic construct
  source 1..203: mol_type = other DNA
ggcgcgccagtcctctttggttttacaaagtagcttgtattttcagtattttctacataatatggtaaaatgtagagcaattgcaatgcatcaataaaatgggtaaattttctgacttatgtggctgtttttgacttctgttataggatataaaggggatcaataaatgacatctttgaaagtgaaaacgactcggaccgatg

SEQ ID NO: 2228 - DNA, 203 bp, synthetic construct
  source 1..203: mol_type = other DNA
ggcgcgccagtcctcgcaccacccccagctacgtggccttcacggacaccgagcggctcatcggggatgcggccaagaaccaggtggcgctgaacccgcagaacaccgtgtttgacgcgaagcggctgattggccgcaagttcggcgacccggtggtgcagtcggacatgaagcactggcctttccagcgactcggaccgatg

SEQ ID NO: 2229 - DNA, 203 bp, synthetic construct
  source 1..203: mol_type = other DNA
ggcgcgccagtcctgtgatcaacgacggagacaagcccaaggtgcaggtgagctacaagggggagaccaaggcattctaccccgaggagatctcgtccatggtgctgaccaagatgaaggagatcgccgaggcgtacctgggctacccggtgaccaacgcggtgatcaccgtgccggcctacttcaaccgactcggaccgatg

SEQ ID NO: 2230 - DNA, 203 bp, synthetic construct
  source 1..203: mol_type = other DNA
ggcgcgccagtcctgtgtacgagggcgagagggccatgacgaaagacaacaatctgttggggcgcttcgagctgagcggcatccctccggcccccaggggcgtgccccagatcgaggtgaccttcgacatcgatgccaacggcatcctgaacgtcacggccacggacaagagcaccggcaaggccaaccgactcggaccgatg

SEQ ID NO: 2231 - DNA, 203 bp, synthetic construct
  source 1..203: mol_type = other DNA
ggcgcgccagtcctggtcccgggcctgggggcttcggggctcagggtcccaagggagggtctgggtcaggccccaccattgaggaggtagattaggggcctttccaagattgctgtttttgttttggagcttcaagactttgcatttcctagtatttctgtttgtcagttctcaatttcctgtgtttgcgactcggaccgatg

SEQ ID NO: 2232 - DNA, 203 bp, synthetic construct
  source 1..203: mol_type = other DNA
ggcgcgccagtcctcaatgttgaaattttttggtgaagtactgaacttgctttttttccggtttctacatgcagagatgaatttatactgccatcttacgactatttcttctttttaatacacttaactcaggccattttttaagttggttacttcaaagtaaataaactttaaaattcaaaaaaaaacgactcggaccgatg

SEQ ID NO: 2233 - DNA, 203 bp, synthetic construct
  source 1..203: mol_type = other DNA
ggcgcgccagtcctaattttttggtgaagtactgaacttgctttttttccggtttctacatgcagagatgaatttatactgccatcttacgactatttcttctttttaatacacttaactcaggccattttttaagttggttacttcaaagtaaataaactttaaaattcaaaaaaaaaaaaaaaaaacgactcggaccgatg

SEQ ID NO: 2234 - DNA, 203 bp, synthetic construct
  source 1..203: mol_type = other DNA
ggcgcgccagtcctctgccgcctgcaagtcggaaattgcgctgtgctcctgtgctacggcctgtggctggactgcctgctgctgcccaactggctggcaagatgaagctctccctggtggccgcgatgctgctgctgctcagcgcggcgcgggccgaggaggaggacaagaaggaggacgtgggcacgcgactcggaccgatg

SEQ ID NO: 2235 - DNA, 203 bp, synthetic construct
  source 1..203: mol_type = other DNA
ggcgcgccagtcctgtcccacagattgaagtcacctttgagatagatgtgaatggtattcttcgagtgacagctgaagacaagggtacagggaacaaaaataagatcacaatcaccaatgaccagaatcgcctgacacctgaagaaatcgaaaggatggttaatgatgctgagaagtttgctgaggaacgactcggaccgatg

SEQ ID NO: 2236 - DNA, 203 bp, synthetic construct
  source 1..203: mol_type = other DNA
ggcgcgccagtcctgacaaaaagctcaaggagcgcattgatactagaaatgagttggaaagctatgcctattctctaaagaatcagattggagataaagaaaagctgggaggtaaactttcctctgaagataaggagaccatggaaaaagctgtagaagaaaagattgaatggctggaaagccaccaacgactcggaccgatg

SEQ ID NO: 2237 - DNA, 203 bp, synthetic construct
  source 1..203: mol_type = other DNA
ggcgcgccagtcctgagaccacaggcttgttaccaccatgctcggcttttgcattaatctaagaaaaggggagagaagttaatccacatctttactcaggcaaggggcatttcacagtgcccaagagtggggttttcttgaacatacttggtttcctatttccccttatctttctaaaactgcctttccgactcggaccgatg

SEQ ID NO: 2238 - DNA, 203 bp, synthetic construct
  source 1..203: mol_type = other DNA
ggcgcgccagtccttggtggctttttttaaaattattactaatgatgcttttatagctgcttggattctctgagaaatgatggggagtgagtgatcactggtattaactttatacacttggatttcatttgtaactttaggatgtaaaggtatattgtgaaccctagctgtgtcagaatctccatccccgactcggaccgatg

SEQ ID NO: 2239 - DNA, 203 bp, synthetic construct
  source 1..203: mol_type = other DNA
ggcgcgccagtccttgaaatttctcattagtggtactggggtgggatcttggatggtgacattgaaactacactaaatcccctcactatgaatgggttgttaaaggcaatggtttgtgtcaaaactggtttaggattacttagattgtgttcctgaagaaaagagtccaggtaaatggtatgatcaatcgactcggaccgatg

SEQ ID NO: 2240 - DNA, 203 bp, synthetic construct
  source 1..203: mol_type = other DNA
ggcgcgccagtcctttaaagatgacctacagtgctgtgtaccctggggcaatagggttaaatggtagttagcaactagggctagtcttcccttacctcaaaggctctcactaccgtggaccacctagtctgtaactctttctgaggagctgttactgaatattaaaaagatagacttcaactatgaaacgactcggaccgatg

SEQ ID NO: 2241 - DNA, 203 bp, synthetic construct
  source 1..203: mol_type = other DNA
ggcgcgccagtcctattatccagatattttgggtgggccgcaaaggcgagctacttagacgcaccccggtgagctcggccatgcagacaccaatgggaatcccaatggggaagtcgatgctggtgcttctcaccttcttggccttcgcctcgtgctgcattgctgcttaccgccccagtgagaccctgcgactcggaccgatg

SEQ ID NO: 2242 - DNA, 203 bp, synthetic construct
  source 1..203: mol_type = other DNA
ggcgcgccagtccttgcggcggggagctggtggacaccctccagttcgtctgtggggaccgcggcttctacttcagcaggcccgcaagccgtgtgagccgtcgcagccgtggcatcgttgaggagtgctgtttccgcagctgtgacctggccctcctggagacgtactgtgctacccccgccaagtcccgactcggaccgatg

SEQ ID NO: 2243 - DNA, 203 bp, synthetic construct
  source 1..203: mol_type = other DNA
ggcgcgccagtcctttcagggaggccaaacgtcaccgtcccctgattgctctacccacccaagaccccgcccacgggggcgcccccccagagatggccagcaatcggaagtgagcaaaactgccgcaagtctgcagcccggcgccaccatcctgcagcctcctcctgaccacggacgtttccatcaggcgactcggaccgatg

SEQ ID NO: 2244 - DNA, 203 bp, synthetic construct
  source 1..203: mol_type = other DNA
ggcgcgccagtcctttccatcccgaaaatctctcggttccacgtccccctggggcttctcctgacccagtccccgtgccccgcctccccgaaacaggctactctcctcggccccctccatcgggctgaggaagcacagcagcatcttcaaacatgtacaaaatcgattggctttaaacacccttcacacgactcggaccgatg

SEQ ID NO: 2245 - DNA, 203 bp, synthetic construct
  source 1..203: mol_type = other DNA
ggcgcgccagtcctggtgggcacgtcgctgctaccgccatctcccttctcacgggaattttcagggtaaactggccatccgaaaatagcaacaacccagactggctcctcactcccttttccatcactaaaaatcacagagcagtcagagggacccagtaagaccaaaggaggggaggacagagcatgcgactcggaccgatg

SEQ ID NO: 2246 - DNA, 203 bp, synthetic construct
  source 1..203: mol_type = other DNA
ggcgcgccagtcctacgcacagcacacacagcacacagatgagcacacagcacacacacaaacgcacagcacacacacgcacacacatgcacacacagcacacaaacgcacggcacacacacgcacacacatgcacacacagcacacacacaaacgcacagcacacacaaacgcacagcacacacgcacgactcggaccgatg

SEQ ID NO: 2247 - DNA, 203 bp, synthetic construct
  source 1..203: mol_type = other DNA
ggcgcgccagtcctctaattccatctttccaccatgacagagatgcccttgtgaggctggcctccttggcgcctgtccccacggcccccgcagcgtgagccacgatgctccccataccccacccattcccgatacaccttacttactgtgtgttggcccagccagagtgaggaaggagtttggccacacgactcggaccgatg

SEQ ID NO: 2248 - DNA, 203 bp, synthetic construct
  source 1..203: mol_type = other DNA
ggcgcgccagtcctttggagatggcggtagctgagcagacatgcccccacgagtagcctgactccctggtgtgctcctggaaggaagatcttggggacccccccaccggagcacacctagggatcatctttgcccgtctcctggggaccccccaagaaatgtggagtcctcgggggccgtgcactgatcgactcggaccgatg

SEQ ID NO: 2249 - DNA, 203 bp, synthetic construct
  source 1..203: mol_type = other DNA
ggcgcgccagtcctgggtggccgccttccgcacacttgaggaaccctcccctctccctcggtgacatcttgcccgcccctcagcaccctgccttgtctccaggaggtccgaagctctgtgggacctcttgggggcaaggtggggtgaggccggggagtagggaggtcaggcgggtctgagcccacagacgactcggaccgatg

SEQ ID NO: 2250 - DNA, 203 bp, synthetic construct
  source 1..203: mol_type = other DNA
ggcgcgccagtcctggccactaaccatcctggcccgggctgcctgtctgacctccgtgcctagtcgtggctctccatcttgtctcctccccgtgtccccaatgtcttcagtggggggccccctcttgggtcccctcctctgccatcacctgaagacccccacgccaaacactgaatgtcacctgtgcccgactcggaccgatg

SEQ ID NO: 2251 - DNA, 203 bp, synthetic construct
  source 1..203: mol_type = other DNA
ggcgcgccagtcctccgctaatgtaccatgccctggtgctggaaagtgcctgagccagctgccccagcggcctcagcactaccaagttggcacaaagctccccaaattcggaggggctcagggaaacgagtggaggggatgaggaggtgaggggtaaacccatcatttcagttggcatttgagcaggtcgactcggaccgatg

SEQ ID NO: 2252 - DNA, 203 bp, synthetic construct
  source 1..203: mol_type = other DNA
ggcgcgccagtcctccagcccccagccccagggctctgaatcgctgccagctcagccccctgcccagcctgccccacagcctgagccccagcaggccagagagcccagtcctgaggtgagctgctgtggcctgtggcccaggcgaccccagcgctcccagaactgaggctggcagccagccccagcctcgactcggaccgatg

SEQ ID NO: 2253 - DNA, 203 bp, synthetic construct
  source 1..203: mol_type = other DNA
ggcgcgccagtcctcagccccaactgcgaggcagagagacaccaatgggaatcccaatggggaagtcgatgctggtgcttctcaccttcttggccttcgcctcgtgctgcattgctgcttaccgccccagtgagaccctgtgcggcggggagctggtggacaccctccagttcgtctgtggggaccgccgactcggaccgatg

SEQ ID NO: 2254 - DNA, 203 bp, synthetic construct
  source 1..203: mol_type = other DNA
ggcgcgccagtcctggcttctacttcagcaggcccgcaagccgtgtgagccgtcgcagccgtggcatcgttgaggagtgctgtttccgcagctgtgacctggccctcctggagacgtactgtgctacccccgccaagtccgagagggacgtgtcgacccctccgaccgtgcttccggacaacttcccccgactcggaccgatg

SEQ ID NO: 2255 - DNA, 203 bp, synthetic construct
  source 1..203: mol_type = other DNA
ggcgcgccagtcctagataccccgtgggcaagttcttccaatatgacacctggaagcagtccacccagcgcctgcgcaggggcctgcctgccctcctgcgtgcccgccggggtcacgtgctcgccaaggagctcgaggcgttcagggaggccaaacgtcaccgtcccctgattgctctacccacccaacgactcggaccgatg

SEQ ID NO: 2256 - DNA, 203 bp, synthetic construct
  source 1..203: mol_type = other DNA
ggcgcgccagtcctgaccccgcccacgggggcgcccccccagagatggccagcaatcggaagtgagcaaaactgccgcaagtctgcagcccggcgccaccatcctgcagcctcctcctgaccacggacgtttccatcaggttccatcccgaaaatctctcggttccacgtccccctggggcttctcctcgactcggaccgatg

SEQ ID NO: 2257 - DNA, 203 bp, synthetic construct
  source 1..203: mol_type = other DNA
ggcgcgccagtcctgacccagtccccgtgccccgcctccccgaaacaggctactctcctcggccccctccatcgggctgaggaagcacagcagcatcttcaaacatgtacaaaatcgattggctttaaacacccttcacataccctccccccaaattatccccaattatccccacacataaaaaatcacgactcggaccgatg

SEQ ID NO: 2258 - DNA, 203 bp, synthetic construct
  source 1..203: mol_type = other DNA
ggcgcgccagtcctagggtaaactggccatccgaaaatagcaacaacccagactggctcctcactcccttttccatcactaaaaatcacagagcagtcagagggacccagtaagaccaaaggaggggaggacagagcatgaaaaccaaaatccatgcaaatgaaatgtaattggcacgaccctcaccccgactcggaccgatg

SEQ ID NO: 2259 - DNA, 203 bp, synthetic construct
  source 1..203: mol_type = other DNA
ggcgcgccagtcctacacacatgcacacacagcacacacactagcacacagcacacacacaaagacacagcacacacatgcacacacagcacacacacgcgaacacagcacacacgaacacagcacacacagcacacacacaaacacagcacacacatgcacacagcacacgcacacacagcacacaccgactcggaccgatg

SEQ ID NO: 2260 - DNA, 203 bp, synthetic construct
  source 1..203: mol_type = other DNA
ggcgcgccagtccttccttggcgcctgtccccacggcccccgcagcgtgagccacgatgctccccataccccacccattcccgatacaccttacttactgtgtgttggcccagccagagtgaggaaggagtttggccacattggagatggcggtagctgagcagacatgcccccacgagtagcctgaccgactcggaccgatg

SEQ ID NO: 2261 - DNA, 203 bp, synthetic construct
  source 1..203: mol_type = other DNA
ggcgcgccagtcctagggtctcctcaggtgtcaggagggtgctcggaggccacaggagggggctcctggctggcctgaggctggccggaggggaaggggctagcaggtgtgtaaacagagggttccatcaggctggggcagggtggccgccttccgcacacttgaggaaccctcccctctccctcggtcgactcggaccgatg

SEQ ID NO: 2262 - DNA, 203 bp, synthetic construct
  source 1..203: mol_type = other DNA
ggcgcgccagtcctgagcccacgggtctggtgatgccatagcagccaccaccgcggcgcctagggctgcggcagggactcggcctctgggaggtttacctcgcccccacttgtgcccccagctcagcccccctgcacgcagcccgactagcagtctagaggcctgaggcttctgggtcctggtgacggcgactcggaccgatg

SEQ ID NO: 2263 - DNA, 203 bp, synthetic construct
  source 1..203: mol_type = other DNA
ggcgcgccagtcctggctggcatgaccccgggggtcgtccatgccagtccgcctcagtcgcagagggtccctcggcaagcgccctgtgagtgggccattcggaacattggacagaagcccaaagagccaaattgtcacaattgtggaacccacattggcctgagatccaaaacgcttcgaggcacccccgactcggaccgatg

SEQ ID NO: 2264 - DNA, 203 bp, synthetic construct
  source 1..203: mol_type = other DNA
ggcgcgccagtcctaaattacctgcccattcgtcaggacacccacccacccagtgttatattctgcctcgccggagtgggtgttcccgggggcacttgccgaccagccccttgcgtccccaggtttgcagctctcccctgggccactaaccatcctggcccgggctgcctgtctgacctccgtgcctacgactcggaccgatg

SEQ ID NO: 2265 - DNA, 203 bp, synthetic construct
  source 1..203: mol_type = other DNA
ggcgcgccagtcctgtcgtggctctccatcttgtctcctccccgtgtccccaatgtcttcagtggggggccccctcttgggtcccctcctctgccatcacctgaagacccccacgccaaacactgaatgtcacctgtgcctgccgcctcggtccaccttgcggcccgtgtttgactcaactcaactcccgactcggaccgatg

SEQ ID NO: 2266 - DNA, 203 bp, synthetic construct
  source 1..203: mol_type = other DNA
ggcgcgccagtcctccacctggggcccgcgcccgcccgccgcccgcagcgctctctgctcctgctgcagctgctgctgctcgtcgctgccccggggtccacgcaggcccaggccgccccgttccccgagctgtgcagttatacatgggaagctgttgataccaaaaataatgtactttataaaatcaacgactcggaccgatg

SEQ ID NO: 2267 - DNA, 203 bp, synthetic construct
  source 1..203: mol_type = other DNA
ggcgcgccagtcctagtccagagcagcattgccttcctgtgtgggaaaaccctgggaactcctgaatttgtaactgcaacagaatgtgtgcactactttgagtggaggaccactgcagcctgcaagaaagacatatttaaagcaaataaggaggtgccatgctatgtgtttgatgaagagttgaggaacgactcggaccgatg

SEQ ID NO: 2268 - DNA, 203 bp, synthetic construct
  source 1..203: mol_type = other DNA
ggcgcgccagtcctgcatgatctcaatcctctgatcaagcttagtggtgcctacttggtggatgactccgatccggacacttctctattcatcaatgtttgtagagacatagacacactacgagacccaggttcacagctgcgggcctgtccccccggcactgccgcctgcctggtaagaggacaccacgactcggaccgatg

SEQ ID NO: 2269 - DNA, 203 bp, synthetic construct
  source 1..203: mol_type = other DNA
ggcgcgccagtcctcctctgcggtgccaccgacgggaagaagcgctatgacctgtccgcgctggtccgccatgcagaaccagagcagaattgggaagctgtggatggcagtcagacggaaacagagaagaagcattttttcattaatatttgtcacagagtgctgcaggaaggcaaggcacgagggtgcgactcggaccgatg

SEQ ID NO: 2270 - DNA, 203 bp, synthetic construct
  source 1..203: mol_type = other DNA
ggcgcgccagtcctccaactgaactacagaggcggcacaccctataacaatgaaagacacacaccgagagctacgctcatcacctttctctgtgatcgagacgcgggagtgggcttccctgaatatcaggaagaggataactccacctacaacttccggtggtacaccagctatgcctgcccggaggacgactcggaccgatg

SEQ ID NO: 2271 - DNA, 203 bp, synthetic construct
  source 1..203: mol_type = other DNA
ggcgcgccagtcctgctcaagaattggaagccagcaaggccagtcggaattgagaaaagcctccagctgtccacagagggcttcatcactctgacctacaaagggcctctctctgccaaaggtaccgctgatgcttttatcgtccgctttgtttgcaatgatgatgtttactcagggcccctcaaattcgactcggaccgatg

SEQ ID NO: 2272 - DNA, 203 bp, synthetic construct
  source 1..203: mol_type = other DNA
ggcgcgccagtcctcctgcatcaagatatcgactctgggcaagggatccgaaacacttactttgagtttgaaaccgcgttggcctgtgttccttctccagtggactgccaagtcaccgacctggctggaaatgagtacgacctgactggcctaagcacagtcaggaaaccttggacggctgttgacaccgactcggaccgatg

SEQ ID NO: 2273 - DNA, 203 bp, synthetic construct
  source 1..203: mol_type = other DNA
ggcgcgccagtcctctctgtcgatgggagaaagaggactttctatttgagcgtttgcaatcctctcccttacattcctggatgccagggcagcgcagtggggtcttgcttagtgtcagaaggcaatagctggaatctgggtgtggtgcagatgagtccccaagccgcggcgaatggatctttgagcatcgactcggaccgatg

SEQ ID NO: 2274 - DNA, 203 bp, synthetic construct
  source 1..203: mol_type = other DNA
ggcgcgccagtcctcatgtatgtcaacggtgacaagtgtgggaaccagcgcttctccaccaggatcacgtttgagtgtgctcagatatcgggctcaccagcatttcagcttcaggatggttgtgagtacgtgtttatctggagaactgtggaagcctgtcccgttgtcagagtggaaggggacaactgcgactcggaccgatg

SEQ ID NO: 2275 - DNA, 203 bp, synthetic construct
  source 1..203: mol_type = other DNA
ggcgcgccagtcctaaaggagacttcagattgttcctacttgtttgagtggcgaacgcagtatgcctgcccacctttcgatctgactgaatgttcattcaaagatggggctggcaactccttcgacctctcgtccctgtcaaggtacagtgacaactgggaagccatcactgggacgggggacccggacgactcggaccgatg

SEQ ID NO: 2276 - DNA, 203 bp, synthetic construct
  source 1..203: mol_type = other DNA
ggcgcgccagtcctgcactacctcatcaatgtctgcaagtctctggccccgcaggctggcactgagccgtgccctccagaagcagccgcgtgtctgctgggtggctccaagcccgtgaacctcggcagggtaagggacggacctcagtggagagatggcataattgtcctgaaatacgttgatggcgacgactcggaccgatg

SEQ ID NO: 2277 - DNA, 203 bp, synthetic construct
  source 1..203: mol_type = other DNA
ggcgcgccagtcctcttatgtccagatgggattcggaaaaagtcaaccaccatccgattcacctgcagcgagagccaagtgaactccaggcccatgttcatcagcgccgtggaggactgtgagtacacctttgcctggcccacagccacagcctgtcccatgaagagcaacgagcatgatgactgccacgactcggaccgatg

SEQ ID NO: 2278 - DNA, 203 bp, synthetic construct
  source 1..203: mol_type = other DNA
ggcgcgccagtcctggtcaccaacccaagcacaggacacctgtttgatctgagctccttaagtggcagggcgggattcacagctgcttacagcgagaaggggttggtttacatgagcatctgtggggagaatgaaaactgccctcctggcgtgggggcctgctttggacagaccaggattagcgtgggcgactcggaccgatg

SEQ ID NO: 2279 - DNA, 203 bp, synthetic construct
  source 1..203: mol_type = other DNA
ggcgcgccagtcctcaaggccaacaagaggctgagatacgtggaccaggtcctgcagctggtgtacaaggatgggtccccttgtccctccaaatccggcctgagctataagagtgtgatcagtttcgtgtgcaggcctgaggccgggccaaccaataggcccatgctcatctccctggacaagcagaccgactcggaccgatg

SEQ ID NO: 2280 - DNA, 203 bp, synthetic construct
  source 1..203: mol_type = other DNA
ggcgcgccagtcctagatgagcagctcctctacagcttcaacttgtccagcctttccacgagcacctttaaggtgactcgcgactcgcgcacctacagcgttggggtgtgcacctttgcagtcgggccagaacaaggaggctgtaaggacggaggagtctgtctgctctcaggcaccaagggggcatccgactcggaccgatg

SEQ ID NO: 2281 - DNA, 203 bp, synthetic construct
  source 1..203: mol_type = other DNA
ggcgcgccagtcctctttggacggctgcaatcaatgaaactggattacaggcaccaggatgaagcggtcgttttaagttacgtgaatggtgatcgttgccctccagaaaccgatgacggcgtcccctgtgtcttccccttcatattcaatgggaagagctacgaggagtgcatcatagagagcagggccgactcggaccgatg

SEQ ID NO: 2282 - DNA, 203 bp, synthetic construct
  source 1..203: mol_type = other DNA
ggcgcgccagtcctaaagacggtgggcagacctgcattcaagaggtttgatatcgacagctgcacttactacttcagctgggactcccgggctgcctgcgccgtgaagcctcaggaggtgcagatggtgaatgggaccatcaccaaccctataaatggcaagagcttcagcctcggagatatttatttcgactcggaccgatg

SEQ ID NO: 2283 - DNA, 203 bp, synthetic construct
  source 1..203: mol_type = other DNA
ggcgcgccagtccttaagctgttcagagcctctggggacatgaggaccaatggggacaactacctgtatgagatccaactttcctccatcacaagctccagaaacccggcgtgctctggagccaacatatgccaggtgaagcccaacgatcagcacttcagtcggaaagttggaacctctgacaagaccgactcggaccgatg

SEQ ID NO: 2284 - DNA, 203 bp, synthetic construct
  source 1..203: mol_type = other DNA
ggcgcgccagtcctcaagtactaccttcaagacggcgatctcgatgtcgtgtttgcctcttcctctaagtgcggaaaggataagaccaagtctgtttcttccaccatcttcttccactgtgaccctctggtggaggacgggatccccgagttcagtcacgagactgccgactgccagtacctcttctccgactcggaccgatg

SEQ ID NO: 2285 - DNA, 203 bp, synthetic construct
  source 1..203: mol_type = other DNA
ggcgcgccagtcctttggtacacctcagccgtgtgtcctctgggggtgggctttgacagcgagaatcccggggacgacgggcagatgcacaaggggctgtcagaacggagccaggcagtcggcgcggtgctcagcctgctgctggtggcgctcacctgctgcctgctggccctgttgctctacaagaacgactcggaccgatg

SEQ ID NO: 2286 - DNA, 203 bp, synthetic construct
  source 1..203: mol_type = other DNA
ggcgcgccagtcctgaacggccatattaccaccaagtcagtgaaagccctcagctccctgcatggggatgaccaggacagtgaggatgaggttctgaccatcccagaggtgaaagttcactcgggcaggggagctggggcagagagctcccacccagtgagaaacgcacagagcaatgcccttcaggacgactcggaccgatg

SEQ ID NO: 2287 - DNA, 203 bp, synthetic construct
  source 1..203: mol_type = other DNA
ggcgcgccagtcctgcgtgaggacgatagggtggggctggtcaggggtgagaaggcgaggaaagggaagtccagctctgcacagcagaagacagtgagctccaccaagctggtgtccttccatgacgacagcgacgaggacctcttacacatctgactccgcagtgcctgcaggggagcacggagccgcgactcggaccgatg

SEQ ID NO: 2288 - DNA, 203 bp, synthetic construct
  source 1..203: mol_type = other DNA
ggcgcgccagtccttataggtctcatctcttcaggttctcatgataccacctttactgtgcttatttttttaagaaaaaagtgttgatcaaccattcgacctataagaagccttaatttgcacagtgtgtgacttacagaaactgcatgaaaaatcatgggccagagcctcggccctagcattgcactcgactcggaccgatg

SEQ ID NO: 2289 - DNA, 203 bp, synthetic construct
  source 1..203: mol_type = other DNA
ggcgcgccagtccttggcctcatgctggagggaggctgggcgggtacagcgcggaggaggagggaggccaggcgggcatggcgtggaggaggagggaggccgggcggtcacagcatggaggaggagggaggcgctgctggtgttcttattctggcggcagcgcctttcctgccatgtttagtgaatgacgactcggaccgatg

SEQ ID NO: 2290 - DNA, 203 bp, synthetic construct
  source 1..203: mol_type = other DNA
ggcgcgccagtcctgctgagaagcaaaccgccctgcagcatccctcagcctgtaccggtttggctggcttgtttgatttcaacatgagtgtattttttaaaattgatttttctcttcatttttttttcaatcaactttactgtaatataaagtattcaacaatttcaataaaagataaattattaaaacgactcggaccgatg

SEQ ID NO: 2291 - DNA, 203 bp, synthetic construct
  source 1..203: mol_type = other DNA
ggcgcgccagtcctcatttgtatctagtgtgtgtcttaacatctttctaaatcggcagtgtaactgcatagtttaacttcctgtctgtctccctcattttactcttccctccttgtcttatgttttggcttttgtgtatcagagcatctttctttgcagcatcctagtcttgcttcagtttctgtggtcgactcggaccgatg

SEQ ID NO: 2292 - DNA, 203 bp, synthetic construct
  source 1..203: mol_type = other DNA
ggcgcgccagtcctctcttttcatcctgcttgaagattcggagtgtggaaggaggctaggaagtctggtgcagtaggtgagcagacctcttgctgcccagcccagggtgggtggggcgcacacctgtctttgtgcatgcaaatctgatacacctggcgcatcctctggagagcacaacgcatggaaagcgactcggaccgatg

SEQ ID NO: 2293 - DNA, 203 bp, synthetic construct
  source 1..203: mol_type = other DNA
ggcgcgccagtcctgtctggaagctctgtgtagccattccttctgcagtcatcctacccaagtaaaagtaaccttggctatgttaccaccgttttggtcacccaggaggacatcttagcaagggtgcctgcgagggagtgtgggactgggcctcatcctcgccggcgttggaaaccaaggccttgtatcgactcggaccgatg

SEQ ID NO: 2294 - DNA, 203 bp, synthetic construct
  source 1..203: mol_type = other DNA
ggcgcgccagtcctcccaaggctaaactttctaattcccttctttgggctcgggggctcccggagcagggcgagagctcgcgtcgccggaaaggaagacgggaagaaagggcaggcggctcggcgggcgtcttctccactcctctgccgcgtccccgtggctgcagggagccggcatggggcttctcccgactcggaccgatg

SEQ ID NO: 2295 - DNA, 203 bp, synthetic construct
  source 1..203: mol_type = other DNA
ggcgcgccagtcctcctactgtatcgtcagccacttgcaggaggacaaaaaatgcttcatatgcaattcccaagatccttatcatgagaccctgaatcctgacagccatctcattgaaaatgtggtcactacatttgctccaaaccgccttaagatttggtggcaatctgaaaatggtgtggaaaatgcgactcggaccgatg

SEQ ID NO: 2296 - DNA, 203 bp, synthetic construct
  source 1..203: mol_type = other DNA
ggcgcgccagtcctgccagtgctcatgccggcctcacatgattggacgtcagtgcaacgaagtggaacctggttactactttgccaccctggatcactacctctatgaagcggaggaagccaacttggggcctggggttagcatagtggagcggcaatatatccaggaccggattccctcctggactgcgactcggaccgatg

SEQ ID NO: 2297 - DNA, 203 bp, synthetic construct
  source 1..203: mol_type = other DNA
ggcgcgccagtcctgagccggcttcgtccgagtgcctgaaggggcttatttggagtttttcattgacaacataccatattccatggagtacgacatcctaattcgctacgagccacagctacccgaccactgggaaaaagctgtcatcacagtgcagcgacctggaaggattccaaccagcagccgatcgactcggaccgatg

SEQ ID NO: 2298 - DNA, 203 bp, synthetic construct
  source 1..203: mol_type = other DNA
ggcgcgccagtcctgatgcaaaccttgtgagtgccatctgcaaggatctgtcaatgccttctgcaatcccgtcactggccagtgccactgtttccagggagtgtatgctcggcagtgtgatcggtgcttacctgggcactggggctttccaagttgccagccctgccagtgcaatggccacgccgatgcgactcggaccgatg

SEQ ID NO: 2299 - DNA, 203 bp, synthetic construct
  source 1..203: mol_type = other DNA
ggcgcgccagtcctactgcgacccagtgactggggagtgcttgaactgccaggactacaccatgggtcataactgtgaaaggtgcttggctggttactatggcgaccccatcattgggtcaggagatcactgccgcccttgcccttgcccagatggtcccgacagtggacgccagtttgccaggagctcgactcggaccgatg

SEQ ID NO: 2300 - DNA, 203 bp, synthetic construct
  source 1..203: mol_type = other DNA
ggcgcgccagtcctacaaggagactgggaggtgtctcaagtgcctgtaccacacggaaggggaacactgtcagttctgccggtttggatactatggtgatgccctccagcaggactgtcgaaagtgtgtctgtaattacctgggcaccgtgcaagagcactgtaacggctctgactgccagtgcgacacgactcggaccgatg

SEQ ID NO: 2301 - DNA, 203 bp, synthetic construct
  source 1..203: mol_type = other DNA
ggcgcgccagtcctctgggtttggaggccgcacctgcagcgagtgccaggaactcttctggggagaccccgacgtggagtgccgagcctgtgactgtgaccccaggggcattgagacgccacagtgtgaccagtccacgggccagtgtgtctgcgttgagggtgttgagggtccacgctgtgacaagtcgactcggaccgatg

SEQ ID NO: 2302 - DNA, 203 bp, synthetic construct
  source 1..203: mol_type = other DNA
ggcgcgccagtcctgcacgcgagggtactcgggggtcttccctgactgcacaccctgccaccagtgctttgctctctgggatgtgatcattgccgagctgaccaacaggacacacagattcctggagaaagccaaggccttgaagatcagtggtgtgatcgggccttaccgtgagactgtggactcggcgactcggaccgatg

SEQ ID NO: 2303 - DNA, 203 bp, synthetic construct
  source 1..203: mol_type = other DNA
ggcgcgccagtccttggagaggaaagtcagcgagataaaagacatcctggcgcagagccccgcagcagagccactgaaaaacattgggaatctctttgaggaagcagagaaactgattaaagatgttacagaaatgatggctcaagtagaagtgaaattatctgacacaacttcccaaagcaacagcacgactcggaccgatg

SEQ ID NO: 2304 - DNA, 203 bp, synthetic construct
  source 1..203: mol_type = other DNA
ggcgcgccagtcctcagccaaagaactggattctctacagacagaagccgaaagcctagacaacactgtgaaagaacttgctgaacaactggaatttatcaaaaactcagatattcggggtgccttggatagcattaccaagtatttccagatgtctcttgaggcagaggagagggtgaatgcctccacgactcggaccgatg

SEQ ID NO: 2305 - DNA, 203 bp, synthetic construct
  source 1..203: mol_type = other DNA
ggcgcgccagtcctcctgtggaacacccccaggggcctcctgttccgagactgaatgtggcgggccaaactgcagaactgacgaaggagagaggaagtgtggggggcctggctgtggtggtctggttactgttgcacacaacgcctggcagaaagccatggacttggaccaagatgtcctgagtgccccgactcggaccgatg

SEQ ID NO: 2306 - DNA, 203 bp, synthetic construct
  source 1..203: mol_type = other DNA
ggcgcgccagtcctaggatagtgctgatttggacagcattgaagcagttgctaatgaagtattgaaaatggagatgcctagcaccccacagcagttacagaacttgacagaagatatacgtgaacgagttgaaagcctttctcaagtagaggttattcttcagcatagtgctgctgacattgccagagcgactcggaccgatg

SEQ ID NO: 2307 - DNA, 203 bp, synthetic construct
  source 1..203: mol_type = other DNA
ggcgcgccagtcctctgagatgttgttagaagaagctaaaagagcaagcaaaagtgcaacagatgttaaagtcactgcagatatggtaaaggaagctctggaagaagcagaaaaggcccaggtcgcagcagagaaggcaattaaacaagcagatgaagacattcaaggaacccagaacctgttaacttcgactcggaccgatg

SEQ ID NO: 2308 - DNA, 203 bp, synthetic construct
  source 1..203: mol_type = other DNA
ggcgcgccagtcctcgattgagtctgaaacagcagcttctgaggaaaccttgttcaacgcgtcccagcgcatcagcgagttagagaggaatgtggaagaacttaagcggaaagctgcccaaaactccggggaggcagaatatattgaaaaagtagtatatactgtgaagcaaagtgcagaagatgttacgactcggaccgatg

SEQ ID NO: 2309 - DNA, 203 bp, synthetic construct
  source 1..203: mol_type = other DNA
ggcgcgccagtcctctcgcccgccccgcttccgcccgctgtcctgctgcacgaacccttccaactctcctttcctcccccacccttgagttacccctctgtctttcctgctgttgcgcgggtgctcccacagcggagcggagattacagagccgccgggatgccccaactctccggaggaggtggcggcgactcggaccgatg

SEQ ID NO: 2310 - DNA, 203 bp, synthetic construct
  source 1..203: mol_type = other DNA
ggcgcgccagtcctgtccagacatcctccagctcctgatatccctactttttatcccttgtctccgggtggtgttggacagatcaccccacctcttggctggttttcccatcatatgattcccggtcctcctggtccccacacaactggcatccctcatccagctattgtaacacctcaggtcaaacacgactcggaccgatg

SEQ ID NO: 2311 - DNA, 203 bp, synthetic construct
  source 1..203: mol_type = other DNA
ggcgcgccagtcctggaacatccccacactgacagtgacctaatgcacgtgaagcctcagcatgaacagagaaaggagcaggagccaaaaagacctcacattaagaagcctctgaatgcttttatgttatacatgaaagaaatgagagcgaatgtcgttgctgagtgtactctaaaagaaagtgcagccgactcggaccgatg

SEQ ID NO: 2312 - DNA, 203 bp, synthetic construct
  source 1..203: mol_type = other DNA
ggcgcgccagtccttgagcagcttttctcccctcatatctgcgtgcacttcccagagcatcttgcatccaaacctgtaacctttcggcaaggacggtaacttggctgcatttgcctgtcatgcgcaactggagccagcaaccagcacatccatcagcaccccagtggaggagttcatggaagagttcccgactcggaccgatg

SEQ ID NO: 2313 - DNA, 203 bp, synthetic construct
  source 1..203: mol_type = other DNA
ggcgcgccagtcctctctttgtttctgcttcatttttctttcttttcttttctcctaaagcttttatttaacagtgcaaaaggatcgtttttttttgcttttttaaacttgaatttttttaatttacactttttagttttaattttcttgtatattttgctagctatgagcttttaaataaaattgaacgactcggaccgatg

SEQ ID NO: 2314 - DNA, 203 bp, synthetic construct
  source 1..203: mol_type = other DNA
ggcgcgccagtcctcaattggcagccctatttcagtttattttttcttctgttttcttcttttctttttttaaacagtaaaccttaacagatgcgttcagcagactggtttgcagtgaattttcatttctttccttatcacccccttgttgtaaaaagcccagcacttgaattgttattactttaaatcgactcggaccgatg

SEQ ID NO: 2315 - DNA, 203 bp, synthetic construct
  source 1..203: mol_type = other DNA
ggcgcgccagtcctttttatttggggtttgggaccggatcaggccttaaatctacgcagaagaaaggcggagaagcagcggaagccgggcactagtcctgcagggtggaaggcgctttatcgggtcttctggcccgctgcgggcgatagagctggtaacctgagtagagtaaatagagacacgtgggtcgactcggaccgatg

SEQ ID NO: 2316 - DNA, 203 bp, synthetic construct
  source 1..203: mol_type = other DNA
ggcgcgccagtccttggatctctttctccacccatcccgagaacatcaaataaagtgcccgtggtgcagccatcccatgcggtccatcctctcacccccctcatcacttacagtgacgagcacttttctccaggatcacacccgtcacacatcccatcagatgtcaactccaaacaaggcatgtccagcgactcggaccgatg

SEQ ID NO: 2317 - DNA, 203 bp, synthetic construct
  source 1..203: mol_type = other DNA
ggcgcgccagtcctacatcctccagctcctgatatccctactttttatcccttgtctccgggtggtgttggacagatcaccccacctcttggctggttttcccatcatatgattcccggtcctcctggtccccacacaactggcatccctcatccagctattgtaacacctcaggtcaaacaggaacacgactcggaccgatg

SEQ ID NO: 2318 - DNA, 203 bp, synthetic construct
  source 1..203: mol_type = other DNA
ggcgcgccagtcctaggtacaggtccaagaatgacagctgcctacatctgaaacatggtggaaaacgaagctcattcccaacgtgcaaagccaaggcagcgaccccaggacctcttctggagatggaagcttgttgaaaacccagactgtctccacggcctgcccagtcgaccccaaaggaacactgacgactcggaccgatg

SEQ ID NO: 2319 - DNA, 203 bp, synthetic construct
  source 1..203: mol_type = other DNA
ggcgcgccagtcctccgccctgttcgagctgtgcgggcgggcggtgagcgcccatatgggggttctggagagcggggtgtgggccctcccaggcccaatacttcaaagcatcctacctctgctcaatatatattacttggagaggattgaggaaactgccctcaagaaaggcctctcaactcaggccacgactcggaccgatg

SEQ ID NO: 2320 - DNA, 203 bp, synthetic construct
  source 1..203: mol_type = other DNA
ggcgcgccagtcctgctcccgccatgtccgacagctcaccatctgtaacatgctgcagggtgcaaccgagctggtggctgagcccaaccgcagggttctggagaccctggccagctccctgcacactctcaagttccgccacctgctgttctctgatgtggctgctcagcagtcacttcggcagctgtcgactcggaccgatg

SEQ ID NO: 2321 - DNA, 203 bp, synthetic construct
  source 1..203: mol_type = other DNA
ggcgcgccagtccttgcatcagctcattcaccatggggctgtcagtcaagtgtcgctatactcctggcctgtgcctgagtcagcccttttcatccttattctcaccatgagtgctggcttctggcaaccagggcctggtggcccaccctgccgcctctgtggagaggcctcccgaggccgggccccatcgactcggaccgatg

SEQ ID NO: 2322 - DNA, 203 bp, synthetic construct
  source 1..203: mol_type = other DNA
ggcgcgccagtcctcccgagatgaagggtccctcttattgggctcacgtcggccccgccgggatgctgctgagcgatgtgctgcagccctgatggccagccggcgtaagagtgaagccaagcagatgcccagagctgcacctgccactcgggtaacacgccggagcacacaggagagcctgacagcagcgactcggaccgatg

SEQ ID NO: 2323 - DNA, 203 bp, synthetic construct
  source 1..203: mol_type = other DNA
ggcgcgccagtcctgcggaacagaccttaagagggagctgcaccccccagccacctcccatgaggctcctggcaccaagcggtcaccttctgctccagcagccacctcctctgcctcttcttctacatcctcatacaaacgggcaccagctagctcagccccacagcctaagcccctaaagcgtttcacgactcggaccgatg

SEQ ID NO: 2324 - DNA, 203 bp, synthetic construct
  source 1..203: mol_type = other DNA
ggcgcgccagtcctttccagcactggaagcttcacaaagattccgcagcatctccaccttggagctattcacagttccactctccacagaggcagccctgacactatgccacctgctgagctcctgggtgtcactggagagcctcacactctcctacaatggcctgggctctaacatcttccgcctgccgactcggaccgatg

SEQ ID NO: 2325 - DNA, 203 bp, synthetic construct
  source 1..203: mol_type = other DNA
ggcgcgccagtccttagacagcctgcgggccctgtcaggccaggctggatgtcgcctccgtgccctgcatctcagtgacctgttctcaccactgcccatcctggagctgacacgtgctatcgtgcgagcactgcccctgctacgggtcctctctattcgtgttgaccacccaagccagcgggacaacccgactcggaccgatg

SEQ ID NO: 2326 - DNA, 203 bp, synthetic construct
  source 1..203: mol_type = other DNA
ggcgcgccagtccttgtttgagaagcgcccagcccaatttctgcctgagatggttgctgctatgaagggcaactccacactgaagggcctccggctgccagggaaccgcctggggaatgctggcctgctggccttggcagatgttttctcagaggattcatcctcctctctctgtcagctggacatcacgactcggaccgatg

SEQ ID NO: 2327 - DNA, 203 bp, synthetic construct
  source 1..203: mol_type = other DNA
ggcgcgccagtccttcttcccttgcactgaggtcctggaggccttgatgaggcccagcaaacaggcattctcacagctgggtttatagtctttgggccccttactcagtatcctgggaaccctgggccaggaggttacagtggtcatcataattgctgaagagatcccctcccctgcccctgggttcccgactcggaccgatg

SEQ ID NO: 2328 - DNA, 203 bp, synthetic construct
  source 1..203: mol_type = other DNA
ggcgcgccagtcctcatgggactgtctctggtagagatggcggttgggaggtatcccatccctcctccagatgccaaggagctggagctgatgtttgggtgccaggtggaaggagatgcggctgagaccccacccaggccaaggacccccgggaggccccttagctcatacggaatggacagccgacccgactcggaccgatg

SEQ ID NO: 2329 - DNA, 203 bp, synthetic construct
  source 1..203: mol_type = other DNA
ggcgcgccagtccttcccatggcaatttttgagttgttggattacatagtcaacgagcctcctccaaaactgcccagtggagtgttcagtctggaatttcaagattttgtgaataaatgcttaataaaaaaccccgcagagagagcagatttgaagcaactcatggttcatgcttttatcaagagatccgactcggaccgatg

SEQ ID NO: 2330 - DNA, 203 bp, synthetic construct
  source 1..203: mol_type = other DNA
ggcgcgccagtcctgttcagatgtgcatttcacctgtgacaaaggatgaagaacacagcatgtgccaagattctactcttgtcatttttaatattactgtctttattcttattactattattgttcccctaagtggattggctttgtgcttggggctatttgtgtgtatgctgatgatcaaaacctgtcgactcggaccgatg

SEQ ID NO: 2331 - DNA, 203 bp, synthetic construct
  source 1..203: mol_type = other DNA
ggcgcgccagtcctactgccatcctggcccagggcatctgggaggaaccgagggggctgctcccacctggctctgtggcgagccatttgtcccaagtgccaaagaagcagaccattggggctcccagccaggcccttgtcggccccaccagtgcctctccctgctgctcctaggacccgtctccagctcgactcggaccgatg

SEQ ID NO: 2332 - DNA, 203 bp, synthetic construct
  source 1..203: mol_type = other DNA
ggcgcgccagtcctggtggccacacctctatcccggctttggtgcggggtacacaagaggggatgagttgtgtgaataccccaagactcccatgagggagatgccatgagccgcccaaggccttcccctggcactggcaaacagggcctctgcggagcacactggctcacccagtcctgcccgccacccgactcggaccgatg

SEQ ID NO: 2333 - DNA, 203 bp, synthetic construct
  source 1..203: mol_type = other DNA
ggcgcgccagtcctctttgaggtggaggctgatgacttggtgaccatctcagaactgggccgtggagcctatggggtggtagagaaggtgcggcacgcccagagcggcaccatcatggccgtgaagcggatccgggccaccgtgaactcacaggagcagaagcggctgctcatggacctggacatcaacgactcggaccgatg

SEQ ID NO: 2334 - DNA, 203 bp, synthetic construct
  source 1..203: mol_type = other DNA
ggcgcgccagtccttatcgtgcgggccctggagcatctgcacagcaagctgtcggtgatccacagagatgtgaagccctccaatgtccttatcaacaaggagggccatgtgaagatgtgtgactttggcatcagtggctacttggtggactctgtggccaagacgatggatgccggctgcaagccctacgactcggaccgatg

SEQ ID NO: 2335 - DNA, 203 bp, synthetic construct
  source 1..203: mol_type = other DNA
ggcgcgccagtcctcatggcccctgagaggatcaacccagagctgaaccagaagggctacaatgtcaagtccgacgtctggagcctgggcatcaccatgattgagatggccatcctgcggttcccttacgagtcctgggggaccccgttccagcagctgaagcaggtggtggaggagccgtccccccacgactcggaccgatg

SEQ ID NO: 2336 - DNA, 203 bp, synthetic construct
  source 1..203: mol_type = other DNA
ggcgcgccagtcctgctcccagccgaccgtttctcccccgagtttgtggacttcactgctcagtgcctgaggaagaaccccgcagagcgtatgagctacctggagctgatggagcaccccttcttcaccttgcacaaaaccaagaagacggacattgctgccttcgtgaaggagatcctgggagaagacgactcggaccgatg

SEQ ID NO: 2337 - DNA, 203 bp, synthetic construct
  source 1..203: mol_type = other DNA
ggcgcgccagtcctctcataggggctgggcctcggaccccactccggccctccagagccccacagccccatctgcgggggcagtgctcacccacaccataagctactgccatcctggcccagggcatctgggaggaaccgagggggctgctcccacctggctctgtggcgagccatttgtcccaagtgcgactcggaccgatg

SEQ ID NO: 2338 - DNA, 203 bp, synthetic construct
  source 1..203: mol_type = other DNA
ggcgcgccagtcctccaaagaagcagaccattggggctcccagccaggcccttgtcggccccaccagtgcctctccctgctgctcctaggacccgtctccagctgctgagatcctggactgagggggcctggatgccccctgtggatgctgctgcccctgcacagcaggctgccagtgcctgggtggacgactcggaccgatg

SEQ ID NO: 2339 - DNA, 203 bp, synthetic construct
  source 1..203: mol_type = other DNA
ggcgcgccagtcctagatgccatgagccgcccaaggccttcccctggcactggcaaacagggcctctgcggagcacactggctcacccagtcctgcccgccaccgttatcggtgtcattcacctttcgtgttttttttaatttatcctctgttgattttttcttttgctttatgggtttggcttgtttcgactcggaccgatg

SEQ ID NO: 2340 - DNA, 203 bp, synthetic construct
  source 1..203: mol_type = other DNA
ggcgcgccagtcctttcttgcatggtttggagctgatcgcttctcccccaccccctagggtaccagcaggcagagccttgccctctgctcaggctggggtccagtgggaggggcccaagatctctgctcagagaagtgcagggggagccttccagctcactctccctgaggactggcttgacaggggccgactcggaccgatg

SEQ ID NO: 2341 - DNA, 203 bp, synthetic construct
  source 1..203: mol_type = other DNA
ggcgcgccagtcctttgccggtgctggccgccgccgggagagcccggggcagagcagaggtgctcatcagcactgtaggcccggaagattgtgtggtcccgttcctgacccggcctaaggtccctgtcttgcagctggatagcggcaactacctcttctccactagtgcaatctgccgatatttttttcgactcggaccgatg

SEQ ID NO: 2342 - DNA, 203 bp, synthetic construct
  source 1..203: mol_type = other DNA
ggcgcgccagtcctagtcgtcagaactgtcctttcctggctggggagacagaatctctagccgacattgttttgtggggagccctatacccattactgcaagatcccgcctacctccctgaggagctgagtgccctgcacagctggttccagacactgagtacccaggaaccatgtcagcgagctgcacgactcggaccgatg

SEQ ID NO: 2343 - DNA, 203 bp, synthetic construct
  source 1..203: mol_type = other DNA
ggcgcgccagtcctgaaagtttgcccccgctgcggccccagcagaatccagtgttgcctgtggctggagaaaggaatgtgctcatcaccagtgccctcccttacgtcaacaatgtcccccaccttgggaacatcattggttgtgtgctcagtgccgatgtctttgccaggtactctcgcctccgccagcgactcggaccgatg

SEQ ID NO: 2344 - DNA, 203 bp, synthetic construct
  source 1..203: mol_type = other DNA
ggcgcgccagtccttggaacaccctctatctgtgtgggacagatgagtatggtacagcaacagagaccaaggctctggaggagggactaaccccccaggagatctgcgacaagtaccacatcatccatgctgacatctaccgctggtttaacatttcgtttgatatttttggtcgcaccaccactccacgactcggaccgatg

SEQ ID NO: 2345 - DNA, 203 bp, synthetic construct
  source 1..203: mol_type = other DNA
ggcgcgccagtcctcagcagaccaaaatcacccaggacattttccagcagttgctgaaacgaggttttgtgctgcaagatactgtggagcaactgcgatgtgagcactgtgctcgcttcctggctgaccgcttcgtggagggcgtgtgtcccttctgtggctatgaggaggctcggggtgaccagtgtcgactcggaccgatg

SEQ ID NO: 2346 - DNA, 203 bp, synthetic construct
  source 1..203: mol_type = other DNA
ggcgcgccagtcctgacaagtgtggcaagctcatcaatgctgtcgagcttaagaagcctcagtgtaaagtctgccgatcatgccctgtggtgcagtcgagccagcacctgtttctggacctgcctaagctggagaagcgactggaggagtggttggggaggacattgcctggcagtgactggacaccccgactcggaccgatg

SEQ ID NO: 2347 - DNA, 203 bp, synthetic construct
  source 1..203: mol_type = other DNA
ggcgcgccagtcctggcaacttcatcaacagagctgggatgtttgtgtctaagttctttgggggctatgtgcctgagatggtgctcacccctgatgatcagcgcctgctggcccatgtcaccctggagctccagcactatcaccagctacttgagaaggttcggatccgggatgccttgcgcagtatccgactcggaccgatg

SEQ ID NO: 2348 - DNA, 203 bp, synthetic construct
  source 1..203: mol_type = other DNA
ggcgcgccagtccttccccgaagccagcagttgtagagactgttacaacagccaagccacagcagatacaagcgctgatggatgaagtgacaaaacaaggaaacattgtccgagaactgaaagcacaaaaggcagacaagaacgaggttgctgcggaggtggcgaaactcttggatctaaagaaacagcgactcggaccgatg

SEQ ID NO: 2349 - DNA, 203 bp, synthetic construct
  source 1..203: mol_type = other DNA
ggcgcgccagtccttaaggactcgactacctccgaagaaagccgaaacatgtggctccgcccacactggcctcagctctccgttctcgactattgccgaagtgagccgaagtttgtggccccgcttccggagaactcaagctcccgattgtgcccgaaggaacccgaagggagaccccgcctcattcccgactcggaccgatg

SEQ ID NO: 2350 - DNA, 203 bp, synthetic construct
  source 1..203: mol_type = other DNA
ggcgcgccagtccttcacggcgagctccagaccccgcctcctttccggagcccgtctgttccccttcgggtccaaagcttttggctcctccttgttccgagcccgaaggcccgccccttcacgtactcggagctcggatcccagtgtggacctggactcgaatcccgttgccgactcgcgctctcggccgactcggaccgatg

SEQ ID NO: 2351 - DNA, 203 bp, synthetic construct
  source 1..203: mol_type = other DNA
ggcgcgccagtcctctcctgcccggcgagcagctcaggtcctgggctgaagagatggggagcagccgctgtgggcctggggctcaccctgttcacctgtggcccccacactttgcattctctggtcaccatcctcgggacctgggccctcattcaggcccagccctgctggtgagcctggccagtgaacgactcggaccgatg

SEQ ID NO: 2352 - DNA, 203 bp, synthetic construct
  source 1..203: mol_type = other DNA
ggcgcgccagtcctctggagcagcccttccccggggcagtgcccagcctgcggcccctgctgcgccgcgcctggccggccccgctcttcggcctgctgttcctgctctcctctcacctcttcccgctggaggccgtgcgcgaggacgccttctacgcccgcccgctgcccgcccgcctcttctacatgcgactcggaccgatg

SEQ ID NO: 2353 - DNA, 203 bp, synthetic construct
  source 1..203: mol_type = other DNA
ggcgcgccagtcctctgagcgcctactggcacggcctccacccgggctactacctgagcttcctgaccatcccgctgtgcctggctgccgagggccggctggagtcagccctgcgggggcggctgagcccagggggccagaaggcctgggactgggtgcactggttcctgaagatgcgcgcctatgaccgactcggaccgatg

SEQ ID NO: 2354 - DNA, 203 bp, synthetic construct
  source 1..203: mol_type = other DNA
ggcgcgccagtccttacatgtgcatgggcttcgtgctgctctccttggccgacacccttcggtactgggcctccatctacttctgtatccacttcctggccctggcagccctggggctggggctggctttaggtgggggcagccccagccggcggaaggcagcatcccagcccaccagccttgccccacgactcggaccgatg

SEQ ID NO: 2355 - DNA, 203 bp, synthetic construct
  source 1..203: mol_type = other DNA
ggcgcgccagtcctgagaagctccgggaggagtaagctgtcacgacgctccctctgccagctggtcccgggaattctgtgaaccaggctgctgtctcctccccagaaagagtccttaccttggagagggtcctggagagaatttcctcttccccagctaaataccctgcctgcaactgaagcagaccccgactcggaccgatg

SEQ ID NO: 2356 - DNA, 203 bp, synthetic construct
  source 1..203: mol_type = other DNA
ggcgcgccagtccttttgcatccacaatgtggggtcggagcttgggggcaggtcctgggagtgggaagcctcttccttgtgtctttcgctccacttttagctcatcgcaccaatattgcagacttggaaggaagcataagcttcccatttcacaaaggggaaactgaggtgcgggtgcgcgggcctggcgactcggaccgatg

SEQ ID NO: 2357 - DNA, 203 bp, synthetic construct
  source 1..203: mol_type = other DNA
ggcgcgccagtcctggagacactcagctacagctactgctacgtgggaatcatgacaggcccgttcttccgctaccgcacctacctggactggctggagcagcccttccccggggcagtgcccagcctgcggcccctgctgcgccgcgcctggccggccccgctcttcggcctgctgttcctgctctccgactcggaccgatg

SEQ ID NO: 2358 - DNA, 203 bp, synthetic construct
  source 1..203: mol_type = other DNA
ggcgcgccagtcctctctcacctcttcccgctggaggccgtgcgcgaggacgccttctacgcccgcccgctgcccgcccgcctcttctacatgatccccgtcttcttcgccttccgcatgcgcttctacgtggcctggattgccgccgagtgcggctgcattgccgccggctttggggcctaccccgtcgactcggaccgatg

SEQ ID NO: 2359 - DNA, 203 bp, synthetic construct
  source 1..203: mol_type = other DNA
ggcgcgccagtcctcctgcgggggcggctgagcccagggggccagaaggcctgggactgggtgcactggttcctgaagatgcgcgcctatgactacatgtgcatgggcttcgtgctgctctccttggccgacacccttcggtactgggcctccatctacttctgtatccacttcctggccctggcagccgactcggaccgatg

SEQ ID NO: 2360 - DNA, 203 bp, synthetic construct
  source 1..203: mol_type = other DNA
ggcgcgccagtcctagtccttaccttggagagggtcctggagagaatttcctcttccccagctaaataccctgcctgcaactgaagcagacccgggggtgtcctccctgccctctgcccagaggccacctccactcctacaaaatcaaagtattgtccagacaagagtcactggcccctgctccagctcgactcggaccgatg

SEQ ID NO: 2361 - DNA, 203 bp, synthetic construct
  source 1..203: mol_type = other DNA
ggcgcgccagtccttctgggtatccagagagcactgcacttccccaaaacggaaggggcccctgggcagtgggttttgggcaaattccctttctttgcatccacaatgtggggtcggagcttgggggcaggtcctgggagtgggaagcctcttccttgtgtctttcgctccacttttagctcatcgcacgactcggaccgatg

SEQ ID NO: 2362 - DNA, 203 bp, synthetic construct
  source 1..203: mol_type = other DNA
ggcgcgccagtcctcgactacttgtacaagcagccagccgagcacctgcagctgctggaggaagctgccaaggaggtagctgatgaggtgacccggccccggccttctggggaggaggtgctccaggacatccaggtcatgctcaagtcggacgccagcccttccagcattcgtagcctgaagtcggacgactcggaccgatg

SEQ ID NO: 2363 - DNA, 203 bp, synthetic construct
  source 1..203: mol_type = other DNA
ggcgcgccagtcctcatgatgtcacacctggtgaagatccctggcatcatcatcgcggcctctggggtccgtgccaaggccacccgcatctctatccagtgccgcagctgccgcaacaccctcaccaacattgccatgcgccctggcctcgagggctatgccctgcccaggaagtgcaacacagatcacgactcggaccgatg

SEQ ID NO: 2364 - DNA, 203 bp, synthetic construct
  source 1..203: mol_type = other DNA
ggcgcgccagtcctggctgggcgccccaaatgcccattggacccgtacttcatcatgcccgacaaatgcaaatgcgtggacttccagaccctgaagctgcaggagctgcctgatgcagtcccccacggggagatgcccagacacatgcagctctactgcgacaggtacctgtgtgacaaggtcgtccccgactcggaccgatg

SEQ ID NO: 2365 - DNA, 203 bp, synthetic construct
  source 1..203: mol_type = other DNA
ggcgcgccagtcctggaggaggaggagttccgtcgcctggctgccctcccaaatgtctatgaggtcatctccaagagcatcgccccctccatctttgggggcacagacatgaagaaggccattgcctgcctgctctttgggggctcccgaaagaggctccctgatggacttactcgccgaggagacatcgactcggaccgatg

SEQ ID NO: 2366 - DNA, 203 bp, synthetic construct
  source 1..203: mol_type = other DNA
ggcgcgccagtcctcaacctgctgatgctaggggaccctgggacagccaagtcccagcttctgaagtttgtggagaagtgttctcccattggggtatacacgtctgggaaaggcagcagcgcagctggactgacagcctcggtgatgagggacccttcgtcccggaatttcatcatggagggcggagccgactcggaccgatg

SEQ ID NO: 2367 - DNA, 203 bp, synthetic construct
  source 1..203: mol_type = other DNA
ggcgcgccagtcctgttcggccgctgggatgagacgaagggggaggacaacattgacttcatgcccaccatcttgtcgcgcttcgacatgatcttcatcgtcaaggatgagcacaatgaggagagggatgtgatgctggccaagcatgtcatcactctgcacgtgagcgcactgacacagacacaggccgactcggaccgatg

SEQ ID NO: 2368 - DNA, 203 bp, synthetic construct
  source 1..203: mol_type = other DNA
ggcgcgccagtcctcatcactgtgcggcagctggaggccattgtgcgcatcgcggaagccctcagcaagatgaagctgcagcccttcgccacagaggcagatgtggaggaggccctgcggctcttccaagtgtccacgttggatgctgccttgtccggtaccctgtcaggggtggagggcttcaccagcgactcggaccgatg

SEQ ID NO: 2369 - DNA, 203 bp, synthetic construct
  source 1..203: mol_type = other DNA
ggcgcgccagtcctccaggaggaccaggagatgctgagccgcatcgagaagcagctcaagcgccgctttgccattggctcccaggtgtctgagcacagcatcatcaaggacttcaccaagcagaaatacccggagcacgccatccacaaggtgctgcagctcatgctgcggcgcggcgagatccagcacgactcggaccgatg

SEQ ID NO: 2370 - DNA, 203 bp, synthetic construct
  source 1..203: mol_type = other DNA
ggcgcgccagtcctgagcaggagcgagagcaggaacagaagaaggccaatagcctggccaggctggcacatacccttcctgtggaggaaccccgcatggaggcgccacccctgcctctgtctccaccggctcccccgccggcacccccaccaccacttgccacccctgccccactgactgtcatccctcgactcggaccgatg

SEQ ID NO: 2371 - DNA, 203 bp, synthetic construct
  source 1..203: mol_type = other DNA
ggcgcgccagtcctatccctgtggtgaccaactcccctcagcctctacccccacccccacccttgcccgcggcagcccagcctctgcccctggcgcctcgtcagccggccctggttggcgcccccggactcagcattaaggagcctgcccccctgcccagcaggccgcaggtgcccacccctgctccccgactcggaccgatg

SEQ ID NO: 2372 - DNA, 203 bp, synthetic construct
  source 1..203: mol_type = other DNA
ggcgcgccagtcctctactgccggactcgaaggccaccattccacccaatggcagccccaagcctttgcagcccctccccacgcctgtcctgaccatagcgccacaccctggagtccagcctcagctggccccccagcagccgcccccacccacgctggggaccctgaagttggcaccagctgaagaacgactcggaccgatg

SEQ ID NO: 2373 - DNA, 203 bp, synthetic construct
  source 1..203: mol_type = other DNA
ggcgcgccagtcctgaggatgaccaggcctccacctccaccgcctctgagggtgaggacaacatagacgaggatatggaggaggaccgggcgggcctgggcccacctaagctgagccatcgtccccagccggagctgctgaagtccaccctgccaccccccagcaccacccctgcgcctctgcctccacgactcggaccgatg

SEQ ID NO: 2374 - DNA, 203 bp, synthetic construct
  source 1..203: mol_type = other DNA
ggcgcgccagtcctcacccacaccctcacccccactccgtggccctacctcctgcccacctccccgtgcagcagcagcagccacagcagaagacccctctgccagcccctcctcccccaccggctgcccctgcccagacactggtgccagctccagcccatctggtggcgacggctgggggtggctcccgactcggaccgatg

SEQ ID NO: 2375 - DNA, 203 bp, synthetic construct
  source 1..203: mol_type = other DNA
ggcgcgccagtcctacggtcatcgcccacacagccaccactcacgcttcagtcatccagactgtgaaccacgttctgcaggggccaggcggcaagcacatcgcccacatcgccccctcggcccccagccctgcggtgcaactggcgcctgccacaccccccattgggcacatcactgtgcaccctgcccgactcggaccgatg

SEQ ID NO: 2376 - DNA, 203 bp, synthetic construct
  source 1..203: mol_type = other DNA
ggcgcgccagtcctccccagctggtgggccagaccgtgctcaaccctgtgaccatggtcaccatgccctccttcccagtcagcacactcaagctggcttgaggacgaggccactcagaggcccccagtggggacagggagggggacctgtcccccactctctcacccaccagctccacacattccagccgactcggaccgatg

SEQ ID NO: 2377 - DNA, 203 bp, synthetic construct
  source 1..203: mol_type = other DNA
ggcgcgccagtcctcagtgccgctcctgcttcccctccctaccctcggaaatcagtgcgatgtggacgtcacgctccctgacttctcccccgccctgccccgccttcgtgtgctgctgctgctattgctgtctggtgaggtggcccaggcccccggctttcctccggagcctcatgttctcttcccagcgactcggaccgatg

SEQ ID NO: 2378 - DNA, 203 bp, synthetic construct
  source 1..203: mol_type = other DNA
ggcgcgccagtcctttccccgtcccctgcagcctgggtctggatgggaggagagccactgggcccctgtccccagtccccagtccccagccctgggcttggctcttggcttccagaaggcagcaaagaggggcgctgtcctgcgttcagcccctgatctctgacctctgctgagtgctgggcactgctcgactcggaccgatg

SEQ ID NO: 2379 - DNA, 203 bp, synthetic construct
  source 1..203: mol_type = other DNA
ggcgcgccagtcctccaagggacaggtgggcctggcggcctgtgggtttgggtgcctcctgcagtttgggagacatggaccagcatctggtcttgtttccaggagcatagaagccacatcgttgagacatcaggaaggtaaaaacccagcggcttagccaagccctaagcctgtccccagaccaaccccgactcggaccgatg

SEQ ID NO: 2380 - DNA, 203 bp, synthetic construct
  source 1..203: mol_type = other DNA
ggcgcgccagtccttgggacctatacagaacagagggccagagctagggctgctgcttctgctccagcccctttgcctctgtcctcccatcccctcaacaccctgcttctcccggggacgcttttgagtgggccctgcccggggagctgcagagcagcagcacctttctctgagaagaggtccttggtcgactcggaccgatg

SEQ ID NO: 2381 - DNA, 203 bp, synthetic construct
  source 1..203: mol_type = other DNA
ggcgcgccagtccttctctggaaataaagaatccttagatgcctaaaaattcccttcctgttccctcctggtcctggacacctcccaggggactgttccttatttctctctcctggtgtgggtaaagggacagttacaaaccaggtcaccatcctcagaggctgagccctgtacccaccccagcacagcgactcggaccgatg

SEQ ID NO: 2382 - DNA, 203 bp, synthetic construct
  source 1..203: mol_type = other DNA
ggcgcgccagtcctccacctccgccagaccccgtggctctgggagagccagctttgctattcccattgtgacagcgatggcaggcctgacccacggggcagttagagcagcctcgtggagctcgcccctcccctcagcctgcccacctctccctgcatcctgaggccagtggcccccgggcctgcacacgactcggaccgatg

SEQ ID NO: 2383 - DNA, 203 bp, synthetic construct
  source 1..203: mol_type = other DNA
ggcgcgccagtcctgatacctcatcatccacccgctgcccctccccgtccctgtcccccagcatcgggggcctgcaaatctagtgccgaatgactatgtccagattggtgacgatgggtgttgctgtttttcttgtcgtttgtgaacgctgtgatgctgtgtgcccaagtgggcagtcaccacccagccgactcggaccgatg

SEQ ID NO: 2384 - DNA, 203 bp, synthetic construct
  source 1..203: mol_type = other DNA
ggcgcgccagtccttcaggctccgcctacagctcaactccctgccactggccagcccactgttaacaacgactattcctattaccacatttctgaagcacaaaatgtctccagtcatgttccataccctgtagcgttacatgtaaatatagtcaatgtccctcagccagctgccgcagccattcagagcgactcggaccgatg

SEQ ID NO: 2385 - DNA, 203 bp, synthetic construct
  source 1..203: mol_type = other DNA
ggcgcgccagtcctaaggtcaatcttagaaagctctccaagaactcctacaccattcaaacatgcacttgcagctcaagaaattaaatacggtcccctgaagatgctacctcagacaccctctcatctagtagaagatctgcaggatgtgatcaaacaggaatctgatgaatctggaattgttgctgacgactcggaccgatg

SEQ ID NO: 2386 - DNA, 203 bp, synthetic construct
  source 1..203: mol_type = other DNA
ggcgcgccagtcctgtttcaagaaaatggaccacccttactgaagaaaatcaaacaagaggtggaatctccaactgataaatcaggaaacttcttctgctcacaccactgggaaggggacagtctgaatacccaactgttcacgcagacctcgcctgtggcagatgcaccgaatattcttacaagctccgactcggaccgatg

SEQ ID NO: 2387 - DNA, 203 bp, synthetic construct
  source 1..203: mol_type = other DNA
ggcgcgccagtcctcgttttaatggcaccagcatcagaagatgaagacaatgttctcaaagcatttacagtacctaaaaacaggtccctggcgagccccttgcagccttgtagcagtacctgggaacctgcatcctgtggaaagatggaggagcagatgacatcttccagtcaagctcgtaaatacgtcgactcggaccgatg

SEQ ID NO: 2388 - DNA, 203 bp, synthetic construct
  source 1..203: mol_type = other DNA
ggcgcgccagtcctgaatgcattctcagcccggacgctggtcatgtgagacatttccagaaaagcattatggttttcagaacacttcaagttgacttgggatatatcattcctcaacatgaaacttttcatgaatgggagaagaacctatttttgttgtggtacaacagttgagagcagcaccaagtgcgactcggaccgatg

SEQ ID NO: 2389 - DNA, 203 bp, synthetic construct
  source 1..203: mol_type = other DNA
ggcgcgccagtcctctctgcattttttattgtggtttttttgttattgttggtttatacaagcatgcgttgcacttcttttttgggagatgtgtgttgttgatgttctatgttttgttttgagtgtagcctgactgttttataatttgggagttctgcatttgatccgcatcccctgtggtttctaagcgactcggaccgatg

SEQ ID NO: 2390 - DNA, 203 bp, synthetic construct
  source 1..203: mol_type = other DNA
ggcgcgccagtccttgtatggtctcagaactgttgcatggatcctgtgtttgcaactggggagacagaaactgtggttgatagccagtcactgccttaagaacatttgatgcaagatggccagcactgaacttttgagatatgacggtgtacttactgccttgtagcaaaataaagatgtgcccttatcgactcggaccgatg

SEQ ID NO: 2391 - DNA, 203 bp, synthetic construct
  source 1..203: mol_type = other DNA
ggcgcgccagtccttaattccagcgagaggcagagggagcgagcgggcggccggctagggtggaagagccgggcgagcagagctgcgctgcgggcgtcctgggaagggagatccggagcgaatagggggcttcgcctctggcccagccctcccgctgatcccccagccaggggtccgcaacccttgcccgactcggaccgatg

SEQ ID NO: 2392 - DNA, 203 bp, synthetic construct
  source 1..203: mol_type = other DNA
ggcgcgccagtcctgcatccacgaaactttgcccatagcagcgggcgggcactttgcactggaacttacaacacccgagcaaggacgcgactctcccgacgcggggaggctattctgcccatttggggacacttccccgccgctgccaggacccgcttctctgaaaggctctccttgcagctgcttagcgactcggaccgatg

SEQ ID NO: 2393 - DNA, 203 bp, synthetic construct
  source 1..203: mol_type = other DNA
ggcgcgccagtcctatggtgaccgagctgctgggaggagacatggtgaaccagagtttcatctgcgacccggacgacgagaccttcatcaaaaacatcatcatccaggactgtatgtggagcggcttctcggccgccgccaagctcgtctcagagaagctggcctcctaccaggctgcgcgcaaagaccgactcggaccgatg

SEQ ID NO: 2394 - DNA, 203 bp, synthetic construct
  source 1..203: mol_type = other DNA
ggcgcgccagtcctagcggcagcccgaaccccgcccgcggccacagcgtctgctccacctccagcttgtacctgcaggatctgagcgccgccgcctcagagtgcatcgacccctcggtggtcttcccctaccctctcaacgacagcagctcgcccaagtcctgcgcctcgcaagactccagcgccttccgactcggaccgatg

SEQ ID NO: 2395 - DNA, 203 bp, synthetic construct
  source 1..203: mol_type = other DNA
ggcgcgccagtccttctccgtcctcggattctctgctctcctcgacggagtcctccccgcagggcagccccgagcccctggtgctccatgaggagacaccgcccaccaccagcagcgactctgaggaggaacaagaagatgaggaagaaatcgatgttgtttctgtggaaaagaggcaggctcctggccgactcggaccgatg

SEQ ID NO: 2396 - DNA, 203 bp, synthetic construct
  source 1..203: mol_type = other DNA
ggcgcgccagtcctaaaaggtcagagtctggatcaccttctgctggaggccacagcaaacctcctcacagcccactggtcctcaagaggtgccacgtctccacacatcagcacaactacgcagcgcctccctccactcggaaggactatcctgctgccaagagggtcaagttggacagtgtcagagtccgactcggaccgatg

SEQ ID NO: 2397 - DNA, 203 bp, synthetic construct
  source 1..203: mol_type = other DNA
ggcgcgccagtcctctgagacagatcagcaacaaccgaaaatgcaccagccccaggtcctcggacaccgaggagaatgtcaagaggcgaacacacaacgtcttggagcgccagaggaggaacgagctaaaacggagcttttttgccctgcgtgaccagatcccggagttggaaaacaatgaaaaggcccgactcggaccgatg

SEQ ID NO: 2398 - DNA, 203 bp, synthetic construct
  source 1..203: mol_type = other DNA
ggcgcgccagtcctacacagaatttcaatcctagtatatagtacctagtattataggtactataaaccctaattttttttatttaagtacattttgctttttaaagttgatttttttctattgtttttagaaaaaataaaataactggcaaatatatcattgagccaaatcttaaaaaaaaaaaaaaacgactcggaccgatg

SEQ ID NO: 2399 - DNA, 203 bp, synthetic construct
  source 1..203: mol_type = other DNA
ggcgcgccagtccttgcctgcgcagctccggccgcctggctccccatactagtcgccgatatttggagttcttacaacatggcagacattgacaacaaagaacagtctgaacttgatcaagatttggatgatgttgaagaagtagaagaagaggaaactggtgaagaaacaaaactcaaagcacgtcacgactcggaccgatg

SEQ ID NO: 2400 - DNA, 203 bp, synthetic construct
  source 1..203: mol_type = other DNA
ggcgcgccagtcctagatgagaaaaaagatgaagaaaaagaagaccccaaaggaattcctgaattttggttaactgtttttaagaatgttgacttgctcagtgatatggttcaggaacacgatgaacctattctgaagcacttgaaagatattaaagtgaagttctcagatgctggccagcctatgagcgactcggaccgatg

SEQ ID NO: 2401 - DNA, 203 bp, synthetic construct
  source 1..203: mol_type = other DNA
ggcgcgccagtcctttttgtcttagaatttcactttgaacccaatgaatattttacaaatgaagtgctgacaaagacatacaggatgaggtcagaaccagatgattctgatcccttttcttttgatggaccagaaattatgggttgtacagggtgccagatagattggaaaaaaggaaagaatgtcaccgactcggaccgatg

SEQ ID NO: 2402 - DNA, 203 bp, synthetic construct
  source 1..203: mol_type = other DNA
ggcgcgccagtccttttgaaaactattaagaagaagcagaaacacaagggacgtgggacagttcgtactgtgactaaaacagtttccaatgactctttctttaacttttttgcccctcctgaagttcctgagagtggagatctggatgatgatgctgaagctatccttgctgcagacttcgaaattggcgactcggaccgatg

SEQ ID NO: 2403 - DNA, 203 bp, synthetic construct
  source 1..203: mol_type = other DNA
ggcgcgccagtcctgctattgccaaagtgaaggtgtagataatacctagtcttgttacataaaggggatgtggtttgcagaagaattttctttataaaattgaagttttaagggacgtcagtgtttatgccatttttccagttccaaaatgattccattccattctagaaatttgaagtatgtaacctcgactcggaccgatg

SEQ ID NO: 2404 - DNA, 203 bp, synthetic construct
  source 1..203: mol_type = other DNA
ggcgcgccagtcctgtctcattttttcctgttagaaatggtgaaatatcatataatcacttataaagaaaactgatatgaaaaaattttagagttgtttgctttatggtcactcaagtagggtaagtgttccacaaattccacaagttgatagtttaacatggatgtctgaaagccacatatataattcgactcggaccgatg

SEQ ID NO: 2405 - DNA, 203 bp, synthetic construct
  source 1..203: mol_type = other DNA
ggcgcgccagtcctactttcataaaaatatttttgttgtgtgaataggttaatgatatggtaaggcccctaaaataactgaattaattgtttattgtaattgtaggccattcccattattaaaaataaagacaaaacttgaagtaactgaaaatcttatcgtgctatgtagaaatattgaactaatatcgactcggaccgatg

SEQ ID NO: 2406 - DNA, 203 bp, synthetic construct
  source 1..203: mol_type = other DNA
ggcgcgccagtcctggaggaggagcctctgccagactggagagaagcaggcctgagcctccccaaaggcagctcctggggactcccaggaccacaggctgagacgagacgcagggtggctggaggaagtgagaggtgaactcagcctgggactggctgggcgagactctccacctgctccctgggacccgactcggaccgatg

SEQ ID NO: 2407 - DNA, 203 bp, synthetic construct
  source 1..203: mol_type = other DNA
ggcgcgccagtcctatcgcccaccatggctgtggcccagcagctgcgggccgagagtgactttgaacagcttccggatgatgttgccatctcggccaacattgctgacatcgaggagaagagaggcttcaccagccactttgttttcgtcatcgaggtgaagacaaaaggaggatccaagtacctcatcgactcggaccgatg

SEQ ID NO: 2408 - DNA, 203 bp, synthetic construct
  source 1..203: mol_type = other DNA
ggcgcgccagtccttggaagctgcacatcacgcagaaggacaactacagggtctacaacacgatgccatgagctgacggtgtccctggagcagtgaggggacaccagcaaaaaccttcagctctcagaggagattgggaccaggaaaacctgggaggatgggcagacttcctgtctttgaggctaatgcgactcggaccgatg

SEQ ID NO: 2409 - DNA, 203 bp, synthetic construct
  source 1..203: mol_type = other DNA
ggcgcgccagtcctactacaccctgcatgcttcgaaactctgacagcatactggaggccattcagaaaaagcttggaataaaggttggggagactacacctgacaaacttttcactcttatagaagtggaatgtttaggggcctgtgtgaacgcaccaatggttcaaataaatgacaattactatgagcgactcggaccgatg

SEQ ID NO: 2410 - DNA, 203 bp, synthetic construct
  source 1..203: mol_type = other DNA
ggcgcgccagtcctggccaaggagtggacgcttctcttgtgagccagctggaggtcttacctctttgactgaaccacccaagggacctggatttggtgtacaagcaggcctttaatttatattgaactgtaaatatgtcactagagaaataaaatatggacttccaatctacgtaaacttaaaaaaaacgactcggaccgatg

SEQ ID NO: 2411 - DNA, 203 bp, synthetic construct
  source 1..203: mol_type = other DNA
ggcgcgccagtcctgcaagcatcagaggccacccaggcggtggcatcgttggcagaggccgcagtggcagcttctcaggagatgcagcagggagctacagtcactatggcgcttaacagcgaagctgccgcccatgctgtcgccaccctggctgaggccaccttacaaggtgggggacagatcgtcttcgactcggaccgatg

SEQ ID NO: 2412 - DNA, 203 bp, synthetic construct
  source 1..203: mol_type = other DNA
ggcgcgccagtcctgtctggggaaaccgcagcagccgtcggagcacttactggagtccaagatgctaatggcctggtccagatccctgtgagcatgtaccagactgtggtgaccagcctcgcccagggcaacggaccagtgcaggtggccatggcccctgtgaccaccaggatatcagacagcgcagtcgactcggaccgatg

SEQ ID NO: 2413 - DNA, 203 bp, synthetic construct
  source 1..203: mol_type = other DNA
ggcgcgccagtcctgttaactctgtctttctcagctgcaagccctgagtctccagtagctgaattcacctgacttttcaacaggccaaatctctgaaccttgagtacagggacagctcctcctccctcctcccagctctccccatgtgtgtgatggtgtatttaatgtgtttttttaatgcgacattacgactcggaccgatg

SEQ ID NO: 2414 - DNA, 203 bp, synthetic construct
  source 1..203: mol_type = other DNA
ggcgcgccagtcctgtggcccagcaagtgcagcaggtccatgtggctacttacaccgagcatagtatgctgagtgctgatgaagactcgccttcttctcccgaggacacctcttacgatgactcagatatactcaactccacagcagctgatgaggtgacagctcatctggcagctgcaggtcctgtgcgactcggaccgatg

SEQ ID NO: 2415 - DNA, 203 bp, synthetic construct
  source 1..203: mol_type = other DNA
ggcgcgccagtccttggtagggtacgtggccagacacagtcacccagtttttgttcataccagggtcatgcgttgagctactgacaaactcaggcggaggtgaccatgcccttcaccaaagctgcctcccagtggccacacagaactctccctgctggactcacctgaggaaagaggctccagcatggcgactcggaccgatg

SEQ ID NO: 2416 - DNA, 203 bp, synthetic construct
  source 1..203: mol_type = other DNA
ggcgcgccagtcctggtgggtcagagatgtgcttgcaaggtccagggactgcgtggtctgccagctgagatgctcctcgggctggcccaggtgctgaccttgccacaggcagatgaatgtcttgaaagctcccgggcctcagcctcccatctcctctccttcccaggaatccttgatctcatgactatcgactcggaccgatg

SEQ ID NO: 2417 - DNA, 203 bp, synthetic construct
  source 1..203: mol_type = other DNA
ggcgcgccagtcctaaagaaaaatcgtcctagaccaggatacacccgtgggagcaattttctctactgtctgtagcttcacagaggaggcgctggaatgaacaagaagagacatctggtctgtggccacagcaccctgaacgcccctgatcttgtgtgatcttggaagctaagcttggttgggcccggcgactcggaccgatg

SEQ ID NO: 2418 - DNA, 203 bp, synthetic construct
  source 1..203: mol_type = other DNA
ggcgcgccagtccttcagtacgcggaagggaagaagggacacctggccatagaaaacagctgagggtgtttgctgtgttcctggatcaggccctgcttcagaagggactcctggaggcccatgttccttgatgcaacctcgtggcccaggccgggagcagcttgcctcctcagaggtgttgactatctcgactcggaccgatg

SEQ ID NO: 2419 - DNA, 203 bp, synthetic construct
  source 1..203: mol_type = other DNA
ggcgcgccagtcctggggccatggccagtacagagtcctccctgttgagatccctaggcctcagcccaggtcctggcagcagtgaggtggagctggactgttggtttgatgaggatttcaagttcatcctgctgcctgtgagctatgcagttgtctttgtgctgggcttgggccttaacgccccaacccgactcggaccgatg

SEQ ID NO: 2420 - DNA, 203 bp, synthetic construct
  source 1..203: mol_type = other DNA
ggcgcgccagtcctctatggctcttcatcttccgcctccgaccctgggatgcaacggccacctacatgttccacctggcattgtcagacaccttgtatgtgctgtcgctgcccaccctcatctactattatgcagcccacaaccactggccctttggcactgagatctgcaagttcgtccgctttcttcgactcggaccgatg

SEQ ID NO: 2421 - DNA, 203 bp, synthetic construct
  source 1..203: mol_type = other DNA
ggcgcgccagtcctttctattggaacctctactgcagtgtccttttcctcacctgcatcagcgtgcaccgctacctgggcatctgccacccacttcgggcactacgctggggccgccctcgcctcgcaggccttctctgcctggcagtttggttggtcgtagccggctgcctcgtgcccaacctgttccgactcggaccgatg

SEQ ID NO: 2422 - DNA, 203 bp, synthetic construct
  source 1..203: mol_type = other DNA
ggcgcgccagtccttttgtcacaaccagcaacaaagggaccaccgtcctgtgccatgacaccactcggcctgaagagtttgaccactatgtgcacttcagctcggcggtcatggggctgctctttggcgtgccctgcctggtcactcttgtttgctatggactcatggctcgtcgcctgtatcagccccgactcggaccgatg

SEQ ID NO: 2423 - DNA, 203 bp, synthetic construct
  source 1..203: mol_type = other DNA
ggcgcgccagtcctttgccaggctctgcacagtcgtcttctcgcctccgctctctccgcaccatagctgtggtgctgactgtctttgctgtctgcttcgtgcctttccacatcacccgcaccatttactacctggccaggctgttggaagctgactgccgagtactgaacattgtcaacgtggtctatcgactcggaccgatg

SEQ ID NO: 2424 - DNA, 203 bp, synthetic construct
  source 1..203: mol_type = other DNA
ggcgcgccagtcctaaagtgactcggcccctggccagtgccaacagctgcctggatcctgtgctctacttgctcactggggacaaatatcgacgtcagctccgtcagctctgtggtggtggcaagccccagccccgcacggctgcctcttccctggcactagtgtccctgcctgaggatagcagctgccgactcggaccgatg

SEQ ID NO: 2425 - DNA, 203 bp, synthetic construct
  source 1..203: mol_type = other DNA
ggcgcgccagtcctccctcaccctgagggttgcagggaggcagggatatcatgggtgacctcatctctcataaccccttcagttgccgactctttttagccaatgccaatcttctactcctttctcgttgtttctgttccttcctggggccattggtcctacaatcttcctgaaaatcttccccagtccgactcggaccgatg

SEQ ID NO: 2426 - DNA, 203 bp, synthetic construct
  source 1..203: mol_type = other DNA
ggcgcgccagtcctgactctttttagccaatgccaatcttctactcctttctcgttgtttctgttccttcctggggccattggtcctacaatcttcctgaaaatcttccccagtcctctttccctgtcccatttcccccacagcctcctatagcatgtgtttctctacccagaccagagcattcagctcgactcggaccgatg

SEQ ID NO: 2427 - DNA, 203 bp, synthetic construct
  source 1..203: mol_type = other DNA
ggcgcgccagtcctcctgaacatgacccgctcccactctggaggcgagctggagagcttggctcgtggaagaaggagcctgggttccctgaccattgctgagccggccatgatcgccgagtgcaagacgcgcaccgaggtgttcgagatctcccggcgcctcatagaccgcaccaacgccaacttcctcgactcggaccgatg

SEQ ID NO: 2428 - DNA, 203 bp, synthetic construct
  source 1..203: mol_type = other DNA
ggcgcgccagtcctggtgtggccgccctgtgtggaggtgcagcgctgctccggctgctgcaacaaccgcaacgtgcagtgccgccccacccaggtgcagctgcgacctgtccaggtgagaaagatcgagattgtgcggaagaagccaatctttaagaaggccacggtgacgctggaagaccacctggccgactcggaccgatg

SEQ ID NO: 2429 - DNA, 203 bp, synthetic construct
  source 1..203: mol_type = other DNA
ggcgcgccagtcctcgggctccttcccctgcacctggcctgggccacacctgagcgctgtggactgtcctgaggagccctgaggacctctcagcatagcctgcctgatccctgaacccctggccagctctgaggggaggcacctccaggcaggccaggctgcctcggactccatggctaagaccacagcgactcggaccgatg

SEQ ID NO: 2430 - DNA, 203 bp, synthetic construct
  source 1..203: mol_type = other DNA
ggcgcgccagtcctacgggcacacagactggagaaaacccctcccacggtgcccaaacaccagtcacctcgtctccctggtgcctctgtgcacagtggcttcttttcgttttcgttttgaagacgtggactcctcttggtgggtgtggccagcacaccaagtggctgggtgccctctcaggtgggttacgactcggaccgatg

SEQ ID NO: 2431 - DNA, 203 bp, synthetic construct
  source 1..203: mol_type = other DNA
ggcgcgccagtcctcactgttcacatcatagataaagctgatttgtatatttattatgacaatttctggcagatgtaggtaaagaggaaaaggatccttttcctaattcacacaaagactccttgtggactggctgtgcccctgatgcagcctgtggcttggagtggccaaataggagggagactgtgcgactcggaccgatg

SEQ ID NO: 2432 - DNA, 203 bp, synthetic construct
  source 1..203: mol_type = other DNA
ggcgcgccagtcctttctgagctccacctctggtggctcctcctaggaaaccagctcgtgggctgggaatgggggagagaagggaaaagatccccaagaccccctggggtgggatctgagctcccacctcccttcccacctactgcactttcccccttcccgccttccaaaacctgcttccttcagttcgactcggaccgatg

SEQ ID NO: 2433 - DNA, 203 bp, synthetic construct
  source 1..203: mol_type = other DNA
ggcgcgccagtcctcgtgcccgccgcccgggccccgcgccagggcgcacacgctcccgcccccctacccggcccgggcgggagtttgcacctctccctgcccgggtgctcgagctgccgttgcaaagccaactttggaaaaagttttttgggggagacttgggccttgaggtgcccagctccgcgcttcgactcggaccgatg

SEQ ID NO: 2434 - DNA, 203 bp, synthetic construct
  source 1..203: mol_type = other DNA
ggcgcgccagtcctctcgtggaagaaggagcctgggttccctgaccattgctgagccggccatgatcgccgagtgcaagacgcgcaccgaggtgttcgagatctcccggcgcctcatagaccgcaccaacgccaacttcctggtgtggccgccctgtgtggaggtgcagcgctgctccggctgctgcacgactcggaccgatg

SEQ ID NO: 2435 - DNA, 203 bp, synthetic construct
  source 1..203: mol_type = other DNA
ggcgcgccagtcctacaaccgcaacgtgcagtgccgccccacccaggtgcagctgcgacctgtccaggtgagaaagatcgagattgtgcggaagaagccaatctttaagaaggccacggtgacgctggaagaccacctggcatgcaagtgtgagacagtggcagctgcacggcctgtgacccgaagcccgactcggaccgatg

SEQ ID NO: 2436 - DNA, 203 bp, synthetic construct
  source 1..203: mol_type = other DNA
ggcgcgccagtcctcggggggttcccaggagcagcgagccaaaacgccccaaactcgggtgaccattcggacggtgcgagtccgccggccccccaagggcaagcaccggaaattcaagcacacgcatgacaagacggcactgaaggagacccttggagcctaggggcatcggcaggagagtgtgtgggcgactcggaccgatg

SEQ ID NO: 2437 - DNA, 203 bp, synthetic construct
  source 1..203: mol_type = other DNA
ggcgcgccagtcctcagggttatttaatatggtatttgctgtattgcccccatggggtccttggagtgataatattgtttccctcgtccgtctgtctcgatgcctgattcggacggccaatggtgcttcccccacccctccacgtgtccgtccacccttccatcagcgggtctcctcccagcggcctccgactcggaccgatg

SEQ ID NO: 2438 - DNA, 203 bp, synthetic construct
  source 1..203: mol_type = other DNA
ggcgcgccagtcctcggcgtcttgcccagcagctcaagaagaaaaagaaggactgaactccatcgccatcttcttcccttaactccaagaacttgggataagagtgtgagagagactgatggggtcgctctttgggggaaacgggctccttcccctgcacctggcctgggccacacctgagcgctgtgcgactcggaccgatg

SEQ ID NO: 2439 - DNA, 203 bp, synthetic construct
  source 1..203: mol_type = other DNA
ggcgcgccagtcctgactgtcctgaggagccctgaggacctctcagcatagcctgcctgatccctgaacccctggccagctctgaggggaggcacctccaggcaggccaggctgcctcggactccatggctaagaccacagacgggcacacagactggagaaaacccctcccacggtgcccaaacacccgactcggaccgatg

SEQ ID NO: 2440 - DNA, 203 bp, synthetic construct
  source 1..203: mol_type = other DNA
ggcgcgccagtcctcccctgcctcctgccaccccttcctccccacactccactctgattcacctcttcctctggttcctttcatctctctacctccaccctgcattttcctcttgtcctggcccttcagtctgctccaccaaggggctcttgaaccccttattaaggccccagatgatcccagtcactcgactcggaccgatg

SEQ ID NO: 2441 - DNA, 203 bp, synthetic construct
  source 1..203: mol_type = other DNA
ggcgcgccagtcctaaagtcctctgctccagcaactgcccttccaggtgggtgtgggacacctgggagaaggtctccaagggagggtgcagccctcttgcccgcacccctccctgcttgcacacttccccatctttgatccttctgagctccacctctggtggctcctcctaggaaaccagctcgtggcgactcggaccgatg

SEQ ID NO: 2442 - DNA, 203 bp, synthetic construct
  source 1..203: mol_type = other DNA
ggcgcgccagtcctgctgggaatgggggagagaagggaaaagatccccaagaccccctggggtgggatctgagctcccacctcccttcccacctactgcactttcccccttcccgccttccaaaacctgcttccttcagtttgtaaagtcggtgattatatttttgggggctttccttttattttttacgactcggaccgatg

SEQ ID NO: 2443 - DNA, 203 bp, synthetic construct
  source 1..203: mol_type = other DNA
ggcgcgccagtcctggaggtaagaactaagacgttcttaaaccctactacgtgctggaatcctgaagtgcctgccatcattcaaacttaagcactaactctctagagagacactgccattcataccacagaacgagaaggcagtggcgatcctcaacggctacatgtcactgcctgccacttccggctcgactcggaccgatg

SEQ ID NO: 2444 - DNA, 203 bp, synthetic construct
  source 1..203: mol_type = other DNA
ggcgcgccagtcctacgtgaagttggctttgaatacatgaatagggaacttctctggcatggttttgctgaatttctgatttttctcttaccacttatcaatgtccagaagttgaaagccaagctgtcttcatggtgtattcctcttactggtgcacctaatagtgacaatacattagccaccagtggcgactcggaccgatg

SEQ ID NO: 2445 - DNA, 203 bp, synthetic construct
  source 1..203: mol_type = other DNA
ggcgcgccagtcctcaaagaatgcgctctatgtggagagtggcccaccatgcctcacaccataggatgtgagcatattttctgttatttctgtgctaagagtagtttcttatttgacgtgtactttacttgtcctaagtgtggcacagaagtacacagtctgcagccactgaaatcaggaatcgagatcgactcggaccgatg

SEQ ID NO: 2446 - DNA, 203 bp, synthetic construct
  source 1..203: mol_type = other DNA
ggcgcgccagtccttttggagactctgggatgagtgtgcatttattttcagagttgacataatatgataatgtgacaattatgagactgttttaaaccttaagacctgatgcctcagttgtaacttttttttttttttctgagacggtgtcctgctctgtcacccaggctggagtgcagtggcgcgatcgactcggaccgatg

SEQ ID NO: 2447 - DNA, 203 bp, synthetic construct
  source 1..203: mol_type = other DNA
ggcgcgccagtccttaattctgtatccttcactctttttctctgcctttttttacttaaaagtaaattcagactcttaaaatggtatagaattattagcttgaacattgaattatctcgtcttaactagaatgttttttaaaaaacagtttttaaatgtttttaaataaacatcttgctagtatgatgcgactcggaccgatg

SEQ ID NO: 2448 - DNA, 203 bp, synthetic construct
  source 1..203: mol_type = other DNA
ggcgcgccagtcctcatctgagcctcccaagttgctgggaccacaggcccataccaccatgcctggctaatttttgtagagatgaggtctcactttgttgcccaggctggtcttgaacttctgggctcaagcagtcctcctaccctggcctcccaaagttgtgggattacaggcatgagccactgcaccgactcggaccgatg

SEQ ID NO: 2449 - DNA, 203 bp, synthetic construct
  source 1..203: mol_type = other DNA
ggcgcgccagtcctcctaaaggagtcctggaggaggccgttcaccacaggaaactgaggtgttcttagaagggtggatgctggcagatctctactagttagagtctacatttgccttactcatttcaaaagtccacattgcagtctcattttaccagtgatctagcttgataaggacattcataagtacgactcggaccgatg

SEQ ID NO: 2450 - DNA, 203 bp, synthetic construct
  source 1..203: mol_type = other DNA
ggcgcgccagtccttcgctccggaagcctgcgagttccggaagccttggtaatccagattcggctaggaaaagacaagctttccagagaatgtttcagagaaagttacgtggagcgtgggcgtttcgcagactcctaagtggtctggaacctaacctgcagtgtctctgagcttctggcaagtatgagcgactcggaccgatg

SEQ ID NO: 2451 - DNA, 203 bp, synthetic construct
  source 1..203: mol_type = other DNA
ggcgcgccagtcctgtgtgaattttgtgattggacttttgaaattaggtgggctgattaattttttgattttccttcagaggggaaagtttgcaactttgacagaacgtctcctaggtattcattctgtattttgcaagcctcaaaacatacgtgaagttggctttgaatacatgaatagggaacttccgactcggaccgatg

SEQ ID NO: 2452 - DNA, 203 bp, synthetic construct
  source 1..203: mol_type = other DNA
ggcgcgccagtcctctttgaggaaaaaaatgcaccgtgtttaaattcttaatattagtcatcctaagtataccatttatgtatcctttataaggaatgtgctcctagccactgtcttctcctttccaggcatgactgaaatctaatcactggaaaccatgtgattctaaatatattatgtaaatgttacgactcggaccgatg

SEQ ID NO: 2453 - DNA, 203 bp, synthetic construct
  source 1..203: mol_type = other DNA
ggcgcgccagtcctgtatgaacagcactatttacaggtctctttctcttgcctttgattcagagctgtcattctcagtaaatattgatagttttattgaaacaaaaggggtctttagcatgggaatagtaacagcagtgcataatcaagataattctgtatccttcactctttttctctgccttttttcgactcggaccgatg

SEQ ID NO: 2454 - DNA, 203 bp, synthetic construct
  source 1..203: mol_type = other DNA
ggcgcgccagtccttaagagtattttacatcttaagaatttgccttcttttgccttctgtaattttaaaacattattgtagaaaacaccaacaattcaggaaaaaatataaaatcaactttcccacaattttttgagagagatcatcactatattttactatatttgtagatttgttgcacgtacattcgactcggaccgatg

SEQ ID NO: 2455 - DNA, 203 bp, synthetic construct
  source 1..203: mol_type = other DNA
ggcgcgccagtcctatacaaacgtctttgttttttgtttgtttgtttgtttttggtgagaaagggcctcacccagtcacccaggttggagtgcagtggtgtgatcatggctaaccgcagcctttccctcccagggctcaagcgatcctcccatctgagcctcccaagttgctgggaccacaggcccatcgactcggaccgatg

SEQ ID NO: 2456 - DNA, 203 bp, synthetic construct
  source 1..203: mol_type = other DNA
ggcgcgccagtccttgacacatagtaaatagaatataatagtagtgctttcctttgctgttgtcagtattactctgagtcggtttcattctcacacagaatgatggccgctagaagctcaaggcttataatctgctagctttctgatcccactggcatgagatactcttgcctaatagttacagctaacgactcggaccgatg

SEQ ID NO: 2457 - DNA, 203 bp, synthetic construct
  source 1..203: mol_type = other DNA
ggcgcgccagtcctagtccaggagctcactgttactggtctgccttggattatgtgcacattcctgaaccagccactatagctaggggatggaaaatactgttcctggttacttaaatgtaggtgatgctcctcccatataccacatgaacctaaaggagtcctggaggaggccgttcaccacaggaacgactcggaccgatg

SEQ ID NO: 2458 - DNA, 203 bp, synthetic construct
  source 1..203: mol_type = other DNA
ggcgcgccagtcctactgaggtgttcttagaagggtggatgctggcagatctctactagttagagtctacatttgccttactcatttcaaaagtccacattgcagtctcattttaccagtgatctagcttgataaggacattcataagtaactggatgattctttaacattgcagatttgaaaggattcgactcggaccgatg

SEQ ID NO: 2459 - DNA, 203 bp, synthetic construct
  source 1..203: mol_type = other DNA
ggcgcgccagtcctcgagccgctcaccccgccgttctcagcgctgcccgaccccgctcgcgcgccctcccgccgccagtcccggcagcgccctcagttgtcctccgactcgccctcggccttccgcgccagccgcagccacagccgcaacgccacccgcagccacagccacagccacagccccaggcacgactcggaccgatg

SEQ ID NO: 2460 - DNA, 203 bp, synthetic construct
  source 1..203: mol_type = other DNA
ggcgcgccagtccttagccttcggcacagccccggctccggctcctgcggcagctcctctgggcaccgtccctgcgccgacatcctggaggttgggatgctcttgtccaaaatcaactcgcttgcccacctgcgcgccgcgccctgcaacgacctgcacgccaccaagctggcgcccggcaaggagaacgactcggaccgatg

SEQ ID NO: 2461 - DNA, 203 bp, synthetic construct
  source 1..203: mol_type = other DNA
ggcgcgccagtcctggagcccctggagtcgcagtaccaggtgggcccgctactgggcagcggcggcttcggctcggtctactcaggcatccgcgtctccgacaacttgccggtggccatcaaacacgtggagaaggaccggatttccgactggggagagctgcctaatggcactcgagtgcccatggacgactcggaccgatg

SEQ ID NO: 2462 - DNA, 203 bp, synthetic construct
  source 1..203: mol_type = other DNA
ggcgcgccagtcctagtggtcctgctgaagaaggtgagctcgggtttctccggcgtcattaggctcctggactggttcgagaggcccgacagtttcgtcctgatcctggagaggcccgagccggtgcaagatctcttcgacttcatcacggaaaggggagccctgcaagaggagctggcccgcagcttcgactcggaccgatg

SEQ ID NO: 2463 - DNA, 203 bp, synthetic construct
  source 1..203: mol_type = other DNA
ggcgcgccagtccttcagcatctcattagatggtgcttggccctgagaccatcagataggccaaccttcgaagaaatccagaaccatccatggatgcaagatgttctcctgccccaggaaactgctgagatccacctccacagcctgtcgccggggcccagcaaatagcagcctttctggcaggtcctcgactcggaccgatg

SEQ ID NO: 2464 - DNA, 203 bp, synthetic construct
  source 1..203: mol_type = other DNA
ggcgcgccagtcctcccctctcttgtcagatgcccgagggaggggaagcttctgtctccagcttcccgagtaccagtgacacgtctcgccaagcaggacagtgcttgatacaggaacaacatttacaactcattccagatcccaggcccctggaggctgcctcccaacagtggggaagagtgactctccgactcggaccgatg

SEQ ID NO: 2465 - DNA, 203 bp, synthetic construct
  source 1..203: mol_type = other DNA
ggcgcgccagtcctcaggggtcctaggcctcaactcctcccatagatactctcttcttctcataggtgtccagcattgctggactctgaaatatcccgggggtggggggtgggggtgggtcagaaccctgccatggaactgtttccttcatcatgagttctgctgaatgccgcgatgggtcaggtaggcgactcggaccgatg

SEQ ID NO: 2466 - DNA, 203 bp, synthetic construct
  source 1..203: mol_type = other DNA
ggcgcgccagtcctcccaggcctttccgtgcttcctgtggctgggcttgtgtccccaccacatctacggactgcccacaggagagtacccagggctgatgaaggtcagctatcaccacggcaaccacgcagaccctgaggagcgggactgccccacagcacgcacagacatcggagacgtccagatcccgactcggaccgatg

SEQ ID NO: 2467 - DNA, 203 bp, synthetic construct
  source 1..203: mol_type = other DNA
ggcgcgccagtccttgagcagctttgtcagagatcacttacctgatctgaagcccgagcctgctgtcattgagagctgcatgtacacgaatacccctgatgagcagttcattctcgatcgccacccaaagtatgacaacattgtcattggtgctggattctctgggcacgggttcaagctggcccctgcgactcggaccgatg

SEQ ID NO: 2468 - DNA, 203 bp, synthetic construct
  source 1..203: mol_type = other DNA
ggcgcgccagtcctcacctgtaatctcggcactttggggggctgagacaggcggatcacctgaggccaggaattcaagaccagcctggccaacatggtgaaaccctatctccactaaaaatacaaaattagctgggtgtggtggcgcatgcctgtaatcccagctacttgggagactgaggcaagagacgactcggaccgatg

SEQ ID NO: 2469 - DNA, 203 bp, synthetic construct
  source 1..203: mol_type = other DNA
ggcgcgccagtcctgaggctgaggcagtggctccttgcacagcagctgcacgcgccgtggctccggatctcttcgtctttgcagcgtagcccgagtcggtcagcgccggaggacctcagcagccatgtcgaagccccatagtgaagccgggactgccttcattcagacccagcagctgcacgcagccacgactcggaccgatg

SEQ ID NO: 2470 - DNA, 203 bp, synthetic construct
  source 1..203: mol_type = other DNA
ggcgcgccagtcctctcagatgctggagagcatgatcaagaagccccgccccactcgggctgaaggcagtgatgtggccaatgcagtcctggatggagccgactgcatcatgctgtctggagaaacagccaaaggggactatcctctggaggctgtgcgcatgcagcacctgattgcccgtgaggcagcgactcggaccgatg

SEQ ID NO: 2471 - DNA, 203 bp, synthetic construct
  source 1..203: mol_type = other DNA
ggcgcgccagtcctaccgcccacgtgcccccatcattgctgtgacccggaatccccagacagctcgtcaggcccacctgtaccgtggcatcttccctgtgctgtgcaaggacccagtccaggaggcctgggctgaggacgtggacctccgggtgaactttgccatgaatgttggcaaggcccgaggctcgactcggaccgatg

SEQ ID NO: 2472 - DNA, 203 bp, synthetic construct
  source 1..203: mol_type = other DNA
ggcgcgccagtcctcactctgggctgtaacgtggcactggtaggttgggacaccagggaagaagatcaacgcctcactgaaacatggctgtgtttgcagcctgctctagtgggacagcccagagcctggctgcccatcatgtggccccacccaatcaagggaagaaggaggaatgctggactggaggccgactcggaccgatg

SEQ ID NO: 2473 - DNA, 203 bp, synthetic construct
  source 1..203: mol_type = other DNA
ggcgcgccagtcctccctggagccagatggcaagagggtgacagcttcctttcctgtgtgtactctgtccagttcctttagaaaaaatggatgcccagaggactcccaaccctggcttggggtcaagaaacagccagcaagagttaggggccttagggcactgggctgttgttccattgaagccgactcgactcggaccgatg

SEQ ID NO: 2474 - DNA, 203 bp, synthetic construct
  source 1..203: mol_type = other DNA
ggcgcgccagtccttctaggcctctccagtttgcacctgtccccaccctccactcagctgtcctgcagcaaacactccaccctccaccttccattttcccccactactgcagcacctccaggcctgttgctatagagcctacctgtatgtcaataaacaacagctgaagcaccaaaaaaaaaaaaaaacgactcggaccgatg

SEQ ID NO: 2475 - DNA, 203 bp, synthetic construct
  source 1..203: mol_type = other DNA
ggcgcgccagtcctggccggccccgggcacgcaggcagggcggcgcaggatccagggcgtctgggatgcagtggagctcagagagaggagaacggctcctcacgcctggggcctgctcttcagaagtccccagcgccgttccttccagatcaggacctcagcagccatgtcgaagccccatagtgaagcgactcggaccgatg

SEQ ID NO: 2476 - DNA, 203 bp, synthetic construct
  source 1..203: mol_type = other DNA
ggcgcgccagtcctccgggactgccttcattcagacccagcagctgcacgcagccatggctgacacattcctggagcacatgtgccgcctggacattgattcaccacccatcacagcccggaacactggcatcatctgtaccattggcccagcttcccgatcagtggagacgttgaaggagatgattacgactcggaccgatg

SEQ ID NO: 2477 - DNA, 203 bp, synthetic construct
  source 1..203: mol_type = other DNA
ggcgcgccagtcctagtctggaatgaatgtggctcgtctgaacttctctcatggaactcatgagtaccatgcggagaccatcaagaatgtgcgcacagccacggaaagctttgcttctgaccccatcctctaccggcccgttgctgtggctctagacactaaaggacctgagatccgaactgggctcacgactcggaccgatg

SEQ ID NO: 2478 - DNA, 203 bp, synthetic construct
  source 1..203: mol_type = other DNA
ggcgcgccagtccttgctgtgcaaggacccagtccaggaggcctgggctgaggacgtggacctccgggtgaactttgccatgaatgttggcaaggcccgaggcttcttcaagaagggagatgtggtcattgtgctgaccggatggcgccctggctccggcttcaccaacaccatgcgtgttgttcctgcgactcggaccgatg

SEQ ID NO: 2479 - DNA, 203 bp, synthetic construct
  source 1..203: mol_type = other DNA
ggcgcgccagtcctaggactcccaaccctggcttggggtcaagaaacagccagcaagagttaggggccttagggcactgggctgttgttccattgaagccgactctggccctggcccttacttgcttctctagctctctaggcctctccagtttgcacctgtccccaccctccactcagctgtcctgccgactcggaccgatg

SEQ ID NO: 2480 - DNA, 203 bp, synthetic construct
  source 1..203: mol_type = other DNA
ggcgcgccagtccttccgcccccttcccgcctccccgtatataagacttcgccgagcgctctcactcgcacaagtggaccggggtgttgggtgctagtcggcaccagaggcaagggtgcgaggaccacggccggctcggacgtgtgaccgcgcctagggggtggcagcgggcagtgcggggcggcaagcgactcggaccgatg

SEQ ID NO: 2481 - DNA, 203 bp, synthetic construct
  source 1..203: mol_type = other DNA
ggcgcgccagtcctgcaagaaaggtgttgacagagccagaagttcgatactacctcaggcagattgtgtctggactgaaataccttcatgaacaagaaatcttgcacagagatctcaaactagggaacttttttattaatgaagccatggaactaaaagttggggacttcggtctggcagccaggctacgactcggaccgatg

SEQ ID NO: 2482 - DNA, 203 bp, synthetic construct
  source 1..203: mol_type = other DNA
ggcgcgccagtcctcttgaagacagtaccatgggaagtgttgcagacacagtggcaagggttcttcggggatgtctggaaaacatgccggaagctgattgcattcccaaagagcagctgagcacatcatttcagtgggtcaccaaatgggttgattactctaacaaatatggctttgggtaccagctccgactcggaccgatg

SEQ ID NO: 2483 - DNA, 203 bp, synthetic construct
  source 1..203: mol_type = other DNA
ggcgcgccagtccttcagaccacaccgtcggtgtccttttcaacaatggtgctcacatgagcctccttccagacaaaaaaacagttcactattacgcagagcttggccaatgctcagttttcccagcaacagatgctcctgagcaatttattagtcaagtgacggtgctgaaatacttttctcattaccgactcggaccgatg

SEQ ID NO: 2484 - DNA, 203 bp, synthetic construct
  source 1..203: mol_type = other DNA
ggcgcgccagtcctcaaaatgaagaataccttctcacctacatcaatgaggataggatatctacaactttcaggctgacaactctgctgatgtctggctgttcatcagaattaaaaaatcgaatggaatatgccctgaacatgctcttacaaagatgtaactgaaagacttttcgaatggaccctatgcgactcggaccgatg

SEQ ID NO: 2485 - DNA, 203 bp, synthetic construct
  source 1..203: mol_type = other DNA
ggcgcgccagtcctggactcctcttttccactgtgagatctacagggaagccaaaagaatgatctagagtatgttgaagaagatggacatgtggtggtacgaaaacaattcccctgtggcctgctggactggttggaaccagaacaggctaaggcatacagttcttgactttggacaatccaagagtgcgactcggaccgatg

SEQ ID NO: 2486 - DNA, 203 bp, synthetic construct
  source 1..203: mol_type = other DNA
ggcgcgccagtcctgcgccgcctccttcggcgttcgccccagggaccggcaggcgggggaccgcggcccaggctgaagctcagggccctgtctgctctgtggactcaacagtttgtggcaagacaagctcagaactgagaagctgtcaccacagtagcttggagctcggcggcacaaccagcaccatccgactcggaccgatg

SEQ ID NO: 2487 - DNA, 203 bp, synthetic construct
  source 1..203: mol_type = other DNA
ggcgcgccagtccttggtcgcgatggtggacacggaaagcccactctgccccctctccccactcgaggccggcgatctagagagcccgttatctgaagagttcctgcaagaaatgggaaacatccaagagatttcgcaatccatcggcgaggatagttctggaagctttggctttacggaataccagtcgactcggaccgatg

SEQ ID NO: 2488 - DNA, 203 bp, synthetic construct
  source 1..203: mol_type = other DNA
ggcgcgccagtcctatttaggaagctgtcctggctcagatggctcggtcatcacggacacgctttcaccagcttcgagcccctcctcggtgacttatcctgtggtccccggcagcgtggacgagtctcccagtggagcattgaacatcgaatgtagaatctgcggggacaaggcctcaggctatcattcgactcggaccgatg

SEQ ID NO: 2489 - DNA, 203 bp, synthetic construct
  source 1..203: mol_type = other DNA
ggcgcgccagtcctcaggaaaggccagtaacaatccaccttttgtcatacatgatatggagacactgtgtatggctgagaagacgctggtggccaagctggtggccaatggcatccagaacaaggaggcggaggtccgcatctttcactgctgccagtgcacgtcagtggagaccgtcacggagctcacgactcggaccgatg

SEQ ID NO: 2490 - DNA, 203 bp, synthetic construct
  source 1..203: mol_type = other DNA
ggcgcgccagtcctgcctaaggaaaccgttctgtgatatcatggaacccaagtttgattttgccatgaagttcaatgcactggaactggatgacagtgatatctccctttttgtggctgctatcatttgctgtggagatcgtcctggccttctaaacgtaggacacattgaaaaaatgcaggagggtacgactcggaccgatg

SEQ ID NO: 2491 - DNA, 203 bp, synthetic construct
  source 1..203: mol_type = other DNA
ggcgcgccagtcctaaagacttcacttctgtttcctgaatctaaagaaagacaacatgctgctttttaatcataggatggagaattttaaagaactgtttgggccaggcacagtcgctcatacttgtaatcccagcactttgggaggccgaggcgggtggatcacaaggtcagcagatcgagaccatccgactcggaccgatg

SEQ ID NO: 2492 - DNA, 203 bp, synthetic construct
  source 1..203: mol_type = other DNA
ggcgcgccagtcctctggccaacatggtgaaaccctgtctctactaaaaatacaaaaattagccgggtgtggtggcacatgcctgtaatcccagctactcgggaagctgaggcaggagaattgcttgaaccagggagttggaggttgcagtgagctaagactgcaccactgcactccagcctggtgaccgactcggaccgatg

SEQ ID NO: 2493 - DNA, 203 bp, synthetic construct
  source 1..203: mol_type = other DNA
ggcgcgccagtcctgtgttcctccgggccccatttggcagctcccgtatcttttgttatgttgcttttaaagatatgatgttttattgttttaactcttggtgacagtagatgctctctggagcgcagacgaggcacatgtgtcttcatagcctgggctgggtgggagccagtcaccctgcggatcgacgactcggaccgatg

SEQ ID NO: 2494 - DNA, 203 bp, synthetic construct
  source 1..203: mol_type = other DNA
ggcgcgccagtcctaaattagttcatcggggtggcacacatcagtagtcccagctactctgcaggctgaggtgggaggattgcttgaacccaggaggtcgaggctgcagtgagctgtgatctcaccactgcattccagcctgggtgacagagttagattccaccctctcccaccccggcaaaaaaaaacgactcggaccgatg

SEQ ID NO: 2495 - DNA, 203 bp, synthetic construct
  source 1..203: mol_type = other DNA
ggcgcgccagtcctatccgtttcagtattatttcctaaaatgagaagcccctgtgtcaacaagatccaggggctggagcccaatgccaagcctgtgttgtccccagcgaccctgcagctgctcgctctgatgtaccctgtgccattcaaggagatgtggtccaggaaagtgagcctcatggttttcagcgactcggaccgatg

SEQ ID NO: 2496 - DNA, 203 bp, synthetic construct
  source 1..203: mol_type = other DNA
ggcgcgccagtccttctctggtgaagccagaatggagacacccgtgacctcaggctgaaagtcactcgacattggtctcttgtgttgatagggaaggaaatcaggcattcctatttctttaaataacaaaaccactaattgccactcaatgctggaatattttgggtcacctaatcatagatttctcacgactcggaccgatg

SEQ ID NO: 2497 - DNA, 203 bp, synthetic construct
  source 1..203: mol_type = other DNA
ggcgcgccagtcctcctaaggccgtttggatgaattgtcaaaacaagatgcttccagttacagcggcaggagcgggactgggagcacgggctgacggctgctggtgcctttcttcccacctcgcttgcctgtttccgcttgacccttcctccagctccgatgagaagagtataaagcatcttcctaaccgactcggaccgatg

SEQ ID NO: 2498 - DNA, 203 bp, synthetic construct
  source 1..203: mol_type = other DNA
ggcgcgccagtcctgggccattttagacccccagggaaacagccttcctggagcgttgtctggaggttccagggacagggcagcctcccagagccgagcaagagctcaaggtacaaatgagagatttgctataccgtgagaagtcaacaacttagccaccacttccccgcaatggaccatgtaacaaacgactcggaccgatg

SEQ ID NO: 2499 - DNA, 203 bp, synthetic construct
  source 1..203: mol_type = other DNA
ggcgcgccagtccttggcctttggtggggggcttcctggggcctggggaaagctggccaccttcaacagctggtacctcttcaacagtgtggcctttcaaaatgcagatgccaccaggagaacatgcccacagctcaccacctatggatgccatggctctgggcagctttcaaagcaggttcctgtggcgactcggaccgatg

SEQ ID NO: 2500 - DNA, 203 bp, synthetic construct
  source 1..203: mol_type = other DNA
ggcgcgccagtcctaaattatgctgtccatagaagtcacccatgaagactgatgccaccacctgaaggctcatgattgttaaaaatgtccacgggaacctctcgtccacaggaggtttgtctcaacacttcccatttttacggcattggcattgccaagcatggggaagtatctgctcttctcatgttcgactcggaccgatg

SEQ ID NO: 2501 - DNA, 203 bp, synthetic construct
  source 1..203: mol_type = other DNA
ggcgcgccagtcctccctattggaaacacaaaggaagctgaaatcaaacatctaaaatacactgcgtacacgtgtgcgtgcacacacacacacacacacacacacacacagctcttcatttctcctgagccatgcagaatttactttcaatgtggaaatctgttccctttaccacactgtatatgcaccgactcggaccgatg

SEQ ID NO: 2502 - DNA, 203 bp, synthetic construct
  source 1..203: mol_type = other DNA
ggcgcgccagtcctagcagattcagtgtcatgtgaggacgtgcttcctgcttcatagataagagtagcttggagctcggcggcacaaccagcaccatctggtcgcgatggtggacacggaaagcccactctgccccctctccccactcgaggccggcgatctagagagcccgttatctgaagagttcccgactcggaccgatg

SEQ ID NO: 2503 - DNA, 203 bp, synthetic construct
  source 1..203: mol_type = other DNA
ggcgcgccagtcctagatccagaaaaagaacagaaacaaatgccagtattgtcgatttcacaagtgcctttctgtcgggatgtcacacaacgcgattcgttttggacgaatgccaagatctgagaaagcaaaactgaaagcagaaattcttacctgtgaacatgacatagaagattctgaaactgcagcgactcggaccgatg

SEQ ID NO: 2504 - DNA, 203 bp, synthetic construct
  source 1..203: mol_type = other DNA
ggcgcgccagtcctccaatggcatccagaacaaggaggcggaggtccgcatctttcactgctgccagtgcacgtcagtggagaccgtcacggagctcacggaattcgccaaggccatcccaggcttcgcaaacttggacctgaacgatcaagtgacattgctaaaatacggagtttatgaggccatatcgactcggaccgatg

SEQ ID NO: 2505 - DNA, 203 bp, synthetic construct
  source 1..203: mol_type = other DNA
ggcgcgccagtcctggcagctggtgacggagcatgcgcagctggtgcagatcatcaagaagacggagtcggatgctgcgctgcacccgctactgcaggagatctacagggacatgtactgagttccttcagatcagccacaccttttccaggagttctgaagctgacagcactacaaaggagacggggcgactcggaccgatg

SEQ ID NO: 2506 - DNA, 203 bp, synthetic construct
  source 1..203: mol_type = other DNA
ggcgcgccagtcctgagcagcacgattttgcacaaatatccaccactttaaccttagagcttggacagtctgagctgtaggtaaccggcatattattccatatctttgttttaaccagtacttctaagagcatagaactcaaatgctgggggtaggtggctaatctcaggactgggaagattacggcgcgactcggaccgatg

SEQ ID NO: 2507 - DNA, 203 bp, synthetic construct
  source 1..203: mol_type = other DNA
ggcgcgccagtcctcgtccagtcaacctgaacccacccagtccagctgtctgtgggaatggtggtgttcttagggacagactgacaccttacttgtcagtgttcctccgggccccatttggcagctcccgtatcttttgttatgttgcttttaaagatatgatgttttattgttttaactcttggtgacgactcggaccgatg

SEQ ID NO: 2508 - DNA, 203 bp, synthetic construct
  source 1..203: mol_type = other DNA
ggcgcgccagtcctcagtagatgctctctggagcgcagacgaggcacatgtgtcttcatagcctgggctgggtgggagccagtcaccctgcggatcgagagagggggtagagtcttcttcaaatggcagttttacttcaaatggcagatttcacaagagttggttattttttacaatggtttaggttgcgactcggaccgatg

SEQ ID NO: 2509 - DNA, 203 bp, synthetic construct
  source 1..203: mol_type = other DNA
ggcgcgccagtcctttgtcctgttgagaatttttagatctggactggaactgccaggaccaccgcctccagggagtcgctgggcacctggaggtatcgtcgatgcctctcccccatctttagaaaatttggctcttctgaggtcattattattttaagaatgattaggattgataagggtcccatgaccgactcggaccgatg

SEQ ID NO: 2510 - DNA, 203 bp, synthetic construct
  source 1..203: mol_type = other DNA
ggcgcgccagtccttgcagtgagctgtgatctcaccactgcattccagcctgggtgacagagttagattccaccctctcccaccccggcaaaaaaaaaaaaaaaagatgcaatcaaaggggctgttggccagcaatggcagcagcagcggcgggcagtctgcccaagtgtcttaggaaccaaaagcaacgactcggaccgatg

SEQ ID NO: 2511 - DNA, 203 bp, synthetic construct
  source 1..203: mol_type = other DNA
ggcgcgccagtcctgacatcagccaaaagaacaaaagagatgtcaggacagattccaggagtgtcggagcacatgtgtggcacccgctccctctggcagcgaatgtaggaagtcgccaaatttacccactcttcaacaagtcattgtttaaacacggtttttcattttctcaacttttaatagcaaaacgactcggaccgatg

SEQ ID NO: 2512 - DNA, 203 bp, synthetic construct
  source 1..203: mol_type = other DNA
ggcgcgccagtcctttttaaagagctgtgttttgttttgtttcgcatttagagagcagacaaggcacccttctgctgcgctgatacgtttcttacactgggccattttagacccccagggaaacagccttcctggagcgttgtctggaggttccagggacagggcagcctcccagagccgagcaagagcgactcggaccgatg

SEQ ID NO: 2513 - DNA, 203 bp, synthetic construct
  source 1..203: mol_type = other DNA
ggcgcgccagtcctactgaactccagttttaaaatagattcattgcttcaacacagcaagcccaatgcacccagctaagactggcttgaccgacagcctggcctttggtggggggcttcctggggcctggggaaagctggccaccttcaacagctggtacctcttcaacagtgtggcctttcaaaatgcgactcggaccgatg

SEQ ID NO: 2514 - DNA, 203 bp, synthetic construct
  source 1..203: mol_type = other DNA
ggcgcgccagtcctcagatgccaccaggagaacatgcccacagctcaccacctatggatgccatggctctgggcagctttcaaagcaggttcctgtggtctcctcagctgtttgagggggtaacagcaaatcagcctccattttaaaatgaaaacaccagcctccagatgtagggcctgctgggtgttcgactcggaccgatg

SEQ ID NO: 2515 - DNA, 203 bp, synthetic construct
  source 1..203: mol_type = other DNA
ggcgcgccagtcctaaatgattaacctgcctcgactgtgctgagggcaacaaaggccatctcaccaaaggattattcgatgccattaaatcatcccgtgaccttcctgcttccgagtccatggcctttgcccagggcatgtactcccctgagaggccttctgcctagaaagatctatgactgggttcccgactcggaccgatg

SEQ ID NO: 2516 - DNA, 203 bp, synthetic construct
  source 1..203: mol_type = other DNA
ggcgcgccagtcctgctccagtcctgaaggcggagaagattctgacagagaagatggaaattactgccctcctgtcaagcgagaaagaacatcctctttaacccagttcccaccctcacagtcagaggaaaggagcagtggcttccggttgaagccaccaacgctgatccacggccaagcccccagcgcgactcggaccgatg

SEQ ID NO: 2517 - DNA, 203 bp, synthetic construct
  source 1..203: mol_type = other DNA
ggcgcgccagtcctcaggtctgccaagccagaagcccaaggagcagcagcggagcgtgcttcgcccggcagtgttacaagctccgcagccaaaggcgctgtcccagactgtccccagcagtggcaccaacggggtcagcctcccagcagactgcacgggggcagtgcccgcagcatcccctgacactgcgactcggaccgatg

SEQ ID NO: 2518 - DNA, 203 bp, synthetic construct
  source 1..203: mol_type = other DNA
ggcgcgccagtccttaaatgagagcgtggacgaagccgacatggagaatgctggacaccccagcgcagacacgccaaccgcaacgaactatttcctccagtatatcagttccagtttagagaactcaaccaatagtgccgacgcctccagcaacaaatttgtatttggccagaacatgagcgagcgagcgactcggaccgatg

SEQ ID NO: 2519 - DNA, 203 bp, synthetic construct
  source 1..203: mol_type = other DNA
ggcgcgccagtccttggaagtcatcaccggggaggaggcggagagcaatgtgttacagatgcagtgcaagctgtttgtctttgacaagacctcacagtcctgggtggagagaggccgggggctgctcagactcaatgacatggcgtccaccgatgacggcacactacagtcccgactagtgatgcggacgactcggaccgatg

SEQ ID NO: 2520 - DNA, 203 bp, synthetic construct
  source 1..203: mol_type = other DNA
ggcgcgccagtcctcccaggggagcctgcgactgatcctcaacaccaagctgtgggcccagatgcagatcgacaaggccagcgagaagagcattcgcatcacagccatggacaccgaggaccagggcgtgaaggtcttcctgatctcggccagctccaaggacacaggtcagttgtatgcagccctgccgactcggaccgatg

SEQ ID NO: 2521 - DNA, 203 bp, synthetic construct
  source 1..203: mol_type = other DNA
ggcgcgccagtcctagactcgggaactgcctgaatgtggtttgggacacgagacctcatcatattgatgagcgaacaaacaagaacatttcctccctcccctcctttgaattgaaatggcacattaagacttgtcacggcttctcactgggactggagacctcgttccttcaccccgcgtgtcgccagcgactcggaccgatg

SEQ ID NO: 2522 - DNA, 203 bp, synthetic construct
  source 1..203: mol_type = other DNA
ggcgcgccagtcctcctctgggtccagccagagcccctggcttctccgccacccacacccttcccaccctgctgtggggccctgcctttgtggggagcagccagccctctgcccctgcccagggctccccaactataggcctgggacccccgcccagcttggggggctgctcgtacgagtgtagacaccgactcggaccgatg

SEQ ID NO: 2523 - DNA, 203 bp, synthetic construct
  source 1..203: mol_type = other DNA
ggcgcgccagtcctcaggggctggtcccagaacaggcagtctcacaagcacgcagcacactggagtggacgcctgtgcccacccgagcctggagcatggccaagagccagcttgcaccacccacctgggaggccgaggaggaggtcccctgggcacagggcctctttgggacttcagaggaaatctcccgactcggaccgatg

SEQ ID NO: 2524 - DNA, 203 bp, synthetic construct
  source 1..203: mol_type = other DNA
ggcgcgccagtcctcagtcccactctcggagggttaagagaaggcctcctgcagctgtgccgtccacacctctaggtcgccagagccctggcccccagcccccagcaagcctgagcccgggaagaaccagaggccctcccgagagacccagtcacacgtctctgctttaagccttagccagctagtgacgactcggaccgatg

SEQ ID NO: 2525 - DNA, 203 bp, synthetic construct
  source 1..203: mol_type = other DNA
ggcgcgccagtcctgaaccagaggccctcccgagagacccagtcacacgtctctgctttaagccttagccagctagtgacgagtacaacgagataacgcccatgtgttttggaacatttatgtaagattgtcatatgaaatgtatttgggaactacattaaacttttaactaaaaaaaaaaaaaaaaacgactcggaccgatg

SEQ ID NO: 2526 - DNA, 203 bp, synthetic construct
  source 1..203: mol_type = other DNA
ggcgcgccagtcctggacagtgcgcatctccctggtcaccaaggaccctcctcaccggcctcacccccacgagcttgtaggaaaggactgccgggatggcttctatgaggctgagctctgccgggaccgctgcatccacagtttccagaacctgggaatccagtgtgtgaagaagcgggacctggagccgactcggaccgatg

SEQ ID NO: 2527 - DNA, 203 bp, synthetic construct
  source 1..203: mol_type = other DNA
ggcgcgccagtcctaggctatcagtcagcgcatccagaccaacaacaaccccttccaagttcctatagaagagcagcgtggggactacgacctgaatgctgtgcggctctgcttccaggtgacagtgcgggacccatcaggcaggcccctccgcctgccgcctgtcctttctcatcccatctttgacacgactcggaccgatg

SEQ ID NO: 2528 - DNA, 203 bp, synthetic construct
  source 1..203: mol_type = other DNA
ggcgcgccagtcctatcgtgcccccaacactgccgagctcaagatctgccgagtgaaccgaaactctggcagctgcctcggtggggatgagatcttcctactgtgtgacaaggtgcagaaagaggacattgaggtgtatttcacgggaccaggctgggaggcccgaggctccttttcgcaagctgatgcgactcggaccgatg

SEQ ID NO: 2529 - DNA, 203 bp, synthetic construct
  source 1..203: mol_type = other DNA
ggcgcgccagtcctctcaggctgtggccccacctgcccccaagcccacccaggctggggaaggaacgctgtcagaggccctgctgcagctgcagtttgatgatgaagacctgggggccttgcttggcaacagcacagacccagctgtgttcacagacctggcatccgtcgacaactccgagtttcagccgactcggaccgatg

SEQ ID NO: 2530 - DNA, 203 bp, synthetic construct
  source 1..203: mol_type = other DNA
ggcgcgccagtcctagctgctgaaccagggcatacctgtggccccccacacaactgagcccatgctgatggagtaccctgaggctataactcgcctagtgacaggggcccagaggccccccgacccagctcctgctccactgggggccccggggctccccaatggcctcctttcaggagatgaagactcgactcggaccgatg

SEQ ID NO: 2531 - DNA, 203 bp, synthetic construct
  source 1..203: mol_type = other DNA
ggcgcgccagtcctccccatccccatcctccagcttctggtactctcctagagacagaagcaggctggaggtaaggcctttgagcccacaaagccttatcaagtgtcttccatcatggattcattacagcttaatcaaaataacgccccagataccagcccctgtatggcactggcattgtccctgtgcgactcggaccgatg

SEQ ID NO: 2532 - DNA, 203 bp, synthetic construct
  source 1..203: mol_type = other DNA
ggcgcgccagtcctaggtgaagcacttctgtcccaatgtgcccatcatcctggtggccaacaaaaaagacctgcgcagcgacgagcatgtccgcacagagctggcccgcatgaagcaggaacccgtgcgcacggatgacggccgcgccatggccgtgcgcatccaagcctacgactacctcgagtgctcgactcggaccgatg

SEQ ID NO: 2533 - DNA, 203 bp, synthetic construct
  source 1..203: mol_type = other DNA
ggcgcgccagtcctcaagggtcccctgagcatgcttttctgaagagccgggcctcagagtgtgtggctgtgtgtctgttcgactcccctcgccccattttcaccccacccccgcctctgatccccgggggcgagattggcgcgggagtgtggccgcgccccatcagatgttctcccttcaccagcgggcgactcggaccgatg

SEQ ID NO: 2534 - DNA, 203 bp, synthetic construct
  source 1..203: mol_type = other DNA
ggcgcgccagtcctactgcggccgtgtctgtggcagctggagacagagctgagggagcaagaggtgtcggaggtctcatctttgaactactgccggagcttctgccagaccttattgcaatatgcaagcaacaagaatgcatcagaacatattgtgtatcttctggaggtatatcgacttgccatccacgactcggaccgatg

SEQ ID NO: 2535 - DNA, 203 bp, synthetic construct
  source 1..203: mol_type = other DNA
ggcgcgccagtcctaagctttgccagtgcacgtccatacttaactactgaatgtgaagatgtcctcttagtgcttggcagattagtactgagttgtttcgaattactgctttcagtgtctgaaagtgaactgccatgtgaagtctggctaccattccttcagtctctacaggagtcacatgatgcattcgactcggaccgatg

SEQ ID NO: 2536 - DNA, 203 bp, synthetic construct
  source 1..203: mol_type = other DNA
ggcgcgccagtcctgttgaaatctaactgcatcccccaggctactgctttatcaaaactatgtgcagaatctaaagaaatttcaaatgtgtcatcttttcagcaagcctatatcacatgtttatgttctatgctccctaatgaagatgctattaaggagattgcaaaggtcgactgcaaggaagtactcgactcggaccgatg

SEQ ID NO: 2537 - DNA, 203 bp, synthetic construct
  source 1..203: mol_type = other DNA
ggcgcgccagtccttcatcattctaagatgcatatggaagatggaatttacacctgtccagtttgtattaaaaaatttaagagaaaagaaatgtttgttcctcatgtgatggagcatgttaaaatgccaccaagcagaagggaccgctctaaaaagaaattactgttaaaaggctctcaaaagggtatcgactcggaccgatg

SEQ ID NO: 2538 - DNA, 203 bp, synthetic construct
  source 1..203: mol_type = other DNA
ggcgcgccagtcctctctgaaactatgcaggatgtattgttatctaatgagaaagtctttgggccctccagtttaaaagaaaaatgttccagtatggcagtttgttttgacgggactaagtttacctgtggttttgatggctgtggttccacatacaaaaatgcaagaggaatgcagaaacatttacgcgactcggaccgatg

SEQ ID NO: 2539 - DNA, 203 bp, synthetic construct
  source 1..203: mol_type = other DNA
ggcgcgccagtccttgggcctgaagatagaggatttcttagagagacgcctgcagacccaggtcttcaagctgggcttggccaagtccatccaccacgctcgcgtgctgatccgccagcgccatatcagggtccgcaagcaggtggtgaacatcccgtccttcattgtccgcctggattcccagaagccgactcggaccgatg

SEQ ID NO: 2540 - DNA, 203 bp, synthetic construct
  source 1..203: mol_type = other DNA
ggcgcgccagtccttctcgctgctgcccgagtcagggctgagtcacccagctgatgtagacagtggctgccttccgaagagtgcgtgtttgcatgtgtgtgactctgcggctgctcaactcccaacaaaccagaggaccagccacaaacttaaccaacatccccaaacccgagttcacagatgtgggacgactcggaccgatg

SEQ ID NO: 2541 - DNA, 203 bp, synthetic construct
  source 1..203: mol_type = other DNA
ggcgcgccagtcctctgattttcaaggctacttaaaaaaatctgcagcgtacattaatggatttctgttgtgtttaaattctccacagattgtattgtaaatattttatgaagtagagcatatgtatatatttatatatacgtgcacatacattagtagcactacctttggaagtctcagctcttgctcgactcggaccgatg

SEQ ID NO: 2542 - DNA, 203 bp, synthetic construct
  source 1..203: mol_type = other DNA
ggcgcgccagtccttttcgggactgaagccagttttgcatgataaaagtggccttgttacgggagataattgtgttctgttgggactttagacaaaactcacctgcaaaaaactgacaggcattaactactggaacttccaaataatgtgtttgctgatcgttttactcttcgcataaatattttaggcgactcggaccgatg

SEQ ID NO: 2543 - DNA, 203 bp, synthetic construct
  source 1..203: mol_type = other DNA
ggcgcgccagtccttccactgcctttaaccctcagcctcagagtcagatgcaggatacaaggcagatccaaccatccccaccgtggtcctacgatcagtcctaccaatacctgggatccattgcctctccttctgtgcacccagcaacgcccatttcacctggacgtgccagcggcatgacaaccctccgactcggaccgatg

SEQ ID NO: 2544 - DNA, 203 bp, synthetic construct
  source 1..203: mol_type = other DNA
ggcgcgccagtccttctgcagaactttccagtcgactctcaacggcacccgacctgacagcgttcagcgacccgcgccagttccccgcgctgccctccatctccgacccccgcatgcactatccaggcgccttcacctactccccgacgccggtcacctcgggcatcggcatcggcatgtcggccatgcgactcggaccgatg

SEQ ID NO: 2545 - DNA, 203 bp, synthetic construct
  source 1..203: mol_type = other DNA
ggcgcgccagtcctggctcggccacgcgctaccacacctacctgccgccgccctaccccggctcgtcgcaagcgcagggaggcccgttccaagccagctcgccctcctaccacctgtactacggcgcctcggccggctcctaccagttctccatggtgggcggcgagcgctcgccgccgcgcatcctgcgactcggaccgatg

SEQ ID NO: 2546 - DNA, 203 bp, synthetic construct
  source 1..203: mol_type = other DNA
ggcgcgccagtcctccgccctgcaccaacgcctccaccggctccgcgctgctcaaccccagcctcccgaaccagagcgacgtggtggaggccgagggcagccacagcaactcccccaccaacatggcgccctccgcgcgcctggaggaggccgtgtggaggccctactgaggcgccaggcctggcccgcgactcggaccgatg

SEQ ID NO: 2547 - DNA, 203 bp, synthetic construct
  source 1..203: mol_type = other DNA
ggcgcgccagtcctgtatcacattgaagaaggctagaaaaaaagaatgagtaatgtgatcgcttggttatccagaagtattgtttacattaaactccctttcatgttaatcaaacaagtgagtagctcacgcagcaacgtttttaataggatttttagacactgagggtcactccaaggatcagaagtcgactcggaccgatg

SEQ ID NO: 2548 - DNA, 203 bp, synthetic construct
  source 1..203: mol_type = other DNA
ggcgcgccagtcctatggaattttctgccaggctcaacaagggtctcatatctaacttcctccttaaaacagagaaggtcaatctagttccagagggttgaggcaggtgccaataattacatctttggagaggatttgatttctgcccagggatttgctcaccccaaggtcatctgataatttcacagcgactcggaccgatg

SEQ ID NO: 2549 - DNA, 203 bp, synthetic construct
  source 1..203: mol_type = other DNA
ggcgcgccagtccttggtcccacctgtgcgagaccccctgtcctgtgctgctcactcaacaacatctttgtgttgctttcaccaggctgagaccctaccctatggggtatatgggcttttacctgtgcaccagtgtgacaggaaagattcatgtcactactgtccgtggctacaattcaaaggtatcccgactcggaccgatg

SEQ ID NO: 2550 - DNA, 203 bp, synthetic construct
  source 1..203: mol_type = other DNA
ggcgcgccagtcctaatatctccctttttttctctcttcctctatcttccaaaccccactttctccctcctccttttcctgtgttctcttaagcagatagcacatacccccacccagtaccaaatttcagaacacaagaaggtccagttcttcccccttcacataaaggaacatggtttgtcagccttcgactcggaccgatg

SEQ ID NO: 2551 - DNA, 203 bp, synthetic construct
  source 1..203: mol_type = other DNA
ggcgcgccagtccttctcctgtttatgggtttcttccagcagaacagagacattgccaaccatattggatctgcttgctgtccaaaccagcaaactttcctgggcaaatcacaatcagtgagtaaatagacagcctttctgctgccttgggtttctgtgcagataaacagaaatgctctgattagaaacgactcggaccgatg

SEQ ID NO: 2552 - DNA, 203 bp, synthetic construct
  source 1..203: mol_type = other DNA
ggcgcgccagtccttctcacaaaacatattttacatctgaacaaaatgcctttttgtttaccgtagcgtatacatttgttttgggatttttgtgtgtttgttgggaattttgtttttagccaggtcagtattgatgaggctgatcatttggctctttttttccttccagaagagttgcatcaacaaagcgactcggaccgatg

SEQ ID NO: 2553 - DNA, 203 bp, synthetic construct
  source 1..203: mol_type = other DNA
ggcgcgccagtcctttaattgtatttatgtatgtaaatagattttaagcttcattataaaatattgttaatgcctataactttttttcaatttttttgtgtgtgtttctaaggactttttcttaggtttgctaaatactgtagggaaaaaaatgcttctttctactttgtttattttagactttaaaacgactcggaccgatg

SEQ ID NO: 2554 - DNA, 203 bp, synthetic construct
  source 1..203: mol_type = other DNA
ggcgcgccagtcctaaggggaactgtcaagctggtgtcttcagccagatgacatgagagaatatcccagaaccctctctccaaggtgtttctagatagcacaggagagcaggcactgcactgtccacagtccacggtacacagtcgggtgggccgcctcccctctcctgggagcattcgtcgtgcccacgactcggaccgatg

SEQ ID NO: 2555 - DNA, 203 bp, synthetic construct
  source 1..203: mol_type = other DNA
ggcgcgccagtcctcctgcccatcgctttcaaggtggtggccctaggggatgttccagatggcactctggtcactgtgatggctggcaatgatgaaaactactcggctgagctgagaaatgctaccgcagccatgaagaaccaggttgcaagatttaatgacctcaggtttgtcggtcgaagtggaagcgactcggaccgatg

SEQ ID NO: 2556 - DNA, 203 bp, synthetic construct
  source 1..203: mol_type = other DNA
ggcgcgccagtccttgttaatcaaacaagtgagtagctcacgcagcaacgtttttaataggatttttagacactgagggtcactccaaggatcagaagtatggaattttctgccaggctcaacaagggtctcatatctaacttcctccttaaaacagagaaggtcaatctagttccagagggttgaggcgactcggaccgatg

SEQ ID NO: 2557 - DNA, 203 bp, synthetic construct
  source 1..203: mol_type = other DNA
ggcgcgccagtccttatagcaatttaagggcccaccagaagcaggcctcgaggagtcaatttgcctctgtgtgcctcagtggagacaagtgggaaaacatggtcccacctgtgcgagaccccctgtcctgtgctgctcactcaacaacatctttgtgttgctttcaccaggctgagaccctaccctatcgactcggaccgatg

SEQ ID NO: 2558 - DNA, 203 bp, synthetic construct
  source 1..203: mol_type = other DNA
ggcgcgccagtcctttttgacacatgtgtgctccaaatgatctggtggttatttaacgtacctcttaaaattcgttgaaacgatttcaggtcaactctgaagagtatttgaaagcaggacttcagaacagtgtttgatttttattttataaatttaagcattcaaattaggcaaatctttggctgcagcgactcggaccgatg

SEQ ID NO: 2559 - DNA, 203 bp, synthetic construct
  source 1..203: mol_type = other DNA
ggcgcgccagtcctttttttcagcacatgttaccatgtctgacctgcaaaaatgctggagaaaaatgaaggaaaaaattatgtttttcagtttaattctgttaactgaagatattccaactcaaaaccagcctcatgctctgattagataatcttttacattgaacctttactctcaaagccatgtgtcgactcggaccgatg

SEQ ID NO: 2560 - DNA, 203 bp, synthetic construct
  source 1..203: mol_type = other DNA
ggcgcgccagtcctgtgtgtgaaaaattgcattcattgacttcaggtagattaaggtatctttttattcattgccctcaggaaagttaaggtatcaatgagacccttaagccaatcatgtaataactgcatgtgtctggtccaggagaagtattgaataagccatttctactgcttactcatgtccctcgactcggaccgatg

SEQ ID NO: 2561 - DNA, 203 bp, synthetic construct
  source 1..203: mol_type = other DNA
ggcgcgccagtcctatacccccacccagtaccaaatttcagaacacaagaaggtccagttcttcccccttcacataaaggaacatggtttgtcagcctttctcctgtttatgggtttcttccagcagaacagagacattgccaaccatattggatctgcttgctgtccaaaccagcaaactttcctggcgactcggaccgatg

SEQ ID NO: 2562 - DNA, 203 bp, synthetic construct
  source 1..203: mol_type = other DNA
ggcgcgccagtcctgagagcaggcactgcactgtccacagtccacggtacacagtcgggtgggccgcctcccctctcctgggagcattcgtcgtgcccagcctgagcagggcagctggactgctgctgttcaggagccaccagagccttcctctctttgtaccacagtttcttctgtaaatccagtgtcgactcggaccgatg

SEQ ID NO: 2563 - DNA, 203 bp, synthetic construct
  source 1..203: mol_type = other DNA
ggcgcgccagtcctagagaggaaattagcagagcgattggtggagaatgatatctgtcaaaagaaacacttggagagcactgagtttagtaataggtgactgccggaaaaaagggaactttgaatattgtcaagatcgtactgagaagcactccacaatgccagactcacctgtggatgtgaagacgccgactcggaccgatg

SEQ ID NO: 2564 - DNA, 203 bp, synthetic construct
  source 1..203: mol_type = other DNA
ggcgcgccagtcctaatctaggctgactcctccaacaatgccacctcccccaactactcaaggagctccaagaaccagttcatttacaccgacaacgttaactaatggcacgagccattctcctacagccttgaatggcgccccctcaccacccaatggcttcagcaatgggccttcctcttcttcctcgactcggaccgatg

SEQ ID NO: 2565 - DNA, 203 bp, synthetic construct
  source 1..203: mol_type = other DNA
ggcgcgccagtcctcctcctctctggctaatcaacagctgcccccagcctgtggtgccaggcaactcagcaagctgaaaaggttccttactaccctgcagcagtttggcaatgacatttcacccgagataggagaaagagttcgcaccctcgttctgggactagtgaactccactttgacaattgaagcgactcggaccgatg

SEQ ID NO: 2566 - DNA, 203 bp, synthetic construct
  source 1..203: mol_type = other DNA
ggcgcgccagtcctaatttcattccaaactgcaagaagctactaacttcccactgagaccttttgtcatcccatttttgaaggccaacttgcccctgctgcagcgtgagctcctccactgcgcaagactggccaaacagaaccctgcccagtacctcgcccagcatgaacagctgcttctggatgccacgactcggaccgatg

SEQ ID NO: 2567 - DNA, 203 bp, synthetic construct
  source 1..203: mol_type = other DNA
ggcgcgccagtcctacggcttatcctaccagcccaatggcctgcctcaccctaccccacctccacctcagcattaccgtttggatgatatggccattgcccaccactacagggactcctatcgacaccccagccacagggacctcagggacagaaacagacctatggggttgcatggcacacgtcaagcgactcggaccgatg

SEQ ID NO: 2568 - DNA, 203 bp, synthetic construct
  source 1..203: mol_type = other DNA
ggcgcgccagtcctaagaaatgattgatcacagactaacagacagagaatgggcagaagagtggaaacatcttgaccatctgttaaactgcataatggacatggtagaaaaaacaaggcgatctctcaccgtactaaggcggtgtcaagaagcagaccgggaagaattgaattactggatccggcggtcgactcggaccgatg

SEQ ID NO: 2569 - DNA, 203 bp, synthetic construct
  source 1..203: mol_type = other DNA
ggcgcgccagtcctacagtgacgccgaggacttaaaaaaaggtggcggcagtagcagcagccactctaggcagcagagtcccgtcaacccagacccagttgcactagacgcgcatcgggaattccttcacaggcctgcgtctggatacgtgccagaggagatctggaagaaagctgaggaggccgtcacgactcggaccgatg

SEQ ID NO: 2570 - DNA, 203 bp, synthetic construct
  source 1..203: mol_type = other DNA
ggcgcgccagtccttgctcaaagttgttttttttgtttgtttgtttattagatgaattatcctatttcagtacttcagcaagagagaacctaactgtatcttgaggtggtagtaaaacacagagggccagtaacgggtcgtaatgacttattgtggataacaaagatatcttttctttagagaactgacgactcggaccgatg

SEQ ID NO: 2571 - DNA, 203 bp, synthetic construct
  source 1..203: mol_type = other DNA
ggcgcgccagtcctaaagggaagtcagccaaagactgatctgatggaccaaaatcggaattttgaaaagcaccagtactactttccaaatgatcagcaggttaaacatgttcagcaaggtatagtatgaatccattaacccttcgttgtccagggtccagaccagaactacttgttagttttgaaaaccgactcggaccgatg

SEQ ID NO: 2572 - DNA, 203 bp, synthetic construct
  source 1..203: mol_type = other DNA
ggcgcgccagtcctaatgtaggccttggaaacagttttaagtggcttttaagtatctgcatagaggcaatcctaaggtttgctttaagtctcttaaatctaacatttttaaaagcatttcttccctgtattttcatatacaagttggttttaattttgtttgggtggtgttattttttttaaatgactcgactcggaccgatg

SEQ ID NO: 2573 - DNA, 203 bp, synthetic construct
  source 1..203: mol_type = other DNA
ggcgcgccagtccttacagtacgtctcattactttttaattcagggcaccctgagtgaaaacaaatacaaaaaaaaatccctaactctgagctctatctctgattcctcttcctccttcccctcttcctcctcttcctctcctcctgttttgctacattctcctcagtggcaaaaagtttcactctaccgactcggaccgatg

SEQ ID NO: 2574 - DNA, 203 bp, synthetic construct
  source 1..203: mol_type = other DNA
ggcgcgccagtccttgttactttccttttttgcttgtcacttatatacaggctatgtgagaatataatttgtaggtataacacattaagaaaaagttatcttcattggatagaattgaatggtggtcgctgataggaatagggcgtcctctagctcttatctctgtctcttactcttttctctttctccgactcggaccgatg

SEQ ID NO: 2575 - DNA, 203 bp, synthetic construct
  source 1..203: mol_type = other DNA
ggcgcgccagtcctgttgtccgaattcctcaagggacagaaaaaaaattggagactgttgaaatgcagatttgaagtaatttttttaaaatattattttgggttctgcgacattgtgaaaaattaaagttgttgtgcaatacttaattcagacatgtaccacaagttaatggtagactaacactggggcgactcggaccgatg

SEQ ID NO: 2576 - DNA, 203 bp, synthetic construct
  source 1..203: mol_type = other DNA
ggcgcgccagtcctaataaaaaagttgaaaaaaatctggatcctctgtctccctcgtccccggtgtgccatggttgcccaccagtgaccccagcctgaggagtccatcctccatggtgctgaatcaaatctgtagagtttattcagctacaaagcgtggctctgtaacaggagttggcttatccatgccgactcggaccgatg

SEQ ID NO: 2577 - DNA, 203 bp, synthetic construct
  source 1..203: mol_type = other DNA
ggcgcgccagtcctgtgttgagtagggaatgatgtcagaactttgcaaaagtcgagctcattcataaggggatgtttctcaggcaggaggagtaggaagagtgggaggagaattactaccttccataggaaaggagagcttggcttgcctagattagctgctgcatagatagcagaggcccttttggccgactcggaccgatg

SEQ ID NO: 2578 - DNA, 203 bp, synthetic construct
  source 1..203: mol_type = other DNA
ggcgcgccagtcctaaggtgaatgctggttacatgggagggtgacttggagccctctagtttccttcttgtgccagctgggttcctgtttcaaggccaggcttctctaacttgtcttcctgggaaatgtagcttttccaagaatttggtagtgcacaccaggaaaaactaggtatcagaacagattttcgactcggaccgatg

SEQ ID NO: 2579 - DNA, 203 bp, synthetic construct
  source 1..203: mol_type = other DNA
ggcgcgccagtcctccctcctgcctgtccctttctgtcttctctctctctctcccacttttcctccctctcccgctccgtctcacacgcaccctctgtttattttcctgcctccatctgggccctgctgatattgtaatcaccctgatgcacgttggcttctctcctctccctcctgcgctcacacaccgactcggaccgatg

SEQ ID NO: 2580 - DNA, 203 bp, synthetic construct
  source 1..203: mol_type = other DNA
ggcgcgccagtcctactcagcaagctgaaaaggttccttactaccctgcagcagtttggcaatgacatttcacccgagataggagaaagagttcgcaccctcgttctgggactagtgaactccactttgacaattgaagaatttcattccaaactgcaagaagctactaacttcccactgagacctttcgactcggaccgatg

SEQ ID NO: 2581 - DNA, 203 bp, synthetic construct
  source 1..203: mol_type = other DNA
ggcgcgccagtccttgtcatcccatttttgaaggccaacttgcccctgctgcagcgtgagctcctccactgcgcaagactggccaaacagaaccctgcccagtacctcgcccagcatgaacagctgcttctggatgccagcaccacctcacctgttgactcctcagagctgcttctcgatgtgaacgacgactcggaccgatg

SEQ ID NO: 2582 - DNA, 203 bp, synthetic construct
  source 1..203: mol_type = other DNA
ggcgcgccagtcctaaacgggaagaggcgaactccagacagaaccaaagaaaatggctttgacagagagcctttgcactcagaacatccaagcaagcgaccatgcactattagcccaggccagcggtacagtccaaataacggcttatcctaccagcccaatggcctgcctcaccctaccccacctcccgactcggaccgatg

SEQ ID NO: 2583 - DNA, 203 bp, synthetic construct
  source 1..203: mol_type = other DNA
ggcgcgccagtcctggcggagcggaaagcccacgacatgatcacaacagagagggccaagatggagcgcacggtcgccgaggccaaacggcaggcggcggaggacgcactggcagttatcaatcagcaggaggattcaagcgagagttgctggaattgtggccgtaaagcgagtgaaacctgcagtggcgactcggaccgatg

SEQ ID NO: 2584 - DNA, 203 bp, synthetic construct
  source 1..203: mol_type = other DNA
ggcgcgccagtcctctgtaacacagcccgatactgtggctcattttgccagcacaaagactgggagaagcaccatcacatctgtggacagaccctgcaggcccagcagcagggagacacacctgcagtcagctcctctgtcacgcccaacagcggggctgggagcccgatggacacaccaccagcagccgactcggaccgatg

SEQ ID NO: 2585 - DNA, 203 bp, synthetic construct
  source 1..203: mol_type = other DNA
ggcgcgccagtcctggctgtgtagacaaccaaagtttacaaggctgggaagacacttctccaaatacatatacaccaggcatttctttaaaatcaaaaacaatccattagctttggggcggggggtggggggagggttaaatgtaggccttggaaacagttttaagtggcttttaagtatctgcatagcgactcggaccgatg

SEQ ID NO: 2586 - DNA, 203 bp, synthetic construct
  source 1..203: mol_type = other DNA
ggcgcgccagtcctttggaagtccatctgccagcacacctgcttaaagtgaaatgaaagcacataaccaggctctgaatgggttatattttatcatggtgctcccagaatcctttgacctcactctgctttctagtctgcttgtgacactggacagtcctttcttacagagctattatatgttctaggcgactcggaccgatg

SEQ ID NO: 2587 - DNA, 203 bp, synthetic construct
  source 1..203: mol_type = other DNA
ggcgcgccagtcctctacgaagggttaaataatcccaaaaatgaggtatgtcatacccacacgtctttatctctagaagctgtgatgtatgtgaaacagcactgttattcttaacactagtgtgtaaaataaggattagtacagtacgtctcattactttttaattcagggcaccctgagtgaaaacacgactcggaccgatg

SEQ ID NO: 2588 - DNA, 203 bp, synthetic construct
  source 1..203: mol_type = other DNA
ggcgcgccagtcctaatacaaaaaaaaatccctaactctgagctctatctctgattcctcttcctccttcccctcttcctcctcttcctctcctcctgttttgctacattctcctcagtggcaaaaagtttcactctacctctgacagcatgtatattgcaccagtagctaacaaaaactggtctagtcgactcggaccgatg

SEQ ID NO: 2589 - DNA, 203 bp, synthetic construct
  source 1..203: mol_type = other DNA
ggcgcgccagtcctataatttgtaggtataacacattaagaaaaagttatcttcattggatagaattgaatggtggtcgctgataggaatagggcgtcctctagctcttatctctgtctcttactcttttctctttctctttttctctgtcatgagactgtgtgtgacagggccacctgtctttttttcgactcggaccgatg

SEQ ID NO: 2590 - DNA, 203 bp, synthetic construct
  source 1..203: mol_type = other DNA
ggcgcgccagtccttgtgccatggttgcccaccagtgaccccagcctgaggagtccatcctccatggtgctgaatcaaatctgtagagtttattcagctacaaagcgtggctctgtaacaggagttggcttatccatgcgtgttgagtagggaatgatgtcagaactttgcaaaagtcgagctcattccgactcggaccgatg

SEQ ID NO: 2591 - DNA, 203 bp, synthetic construct
  source 1..203: mol_type = other DNA
ggcgcgccagtcctataaggggatgtttctcaggcaggaggagtaggaagagtgggaggagaattactaccttccataggaaaggagagcttggcttgcctagattagctgctgcatagatagcagaggcccttttggctgtgttttgataaaattagaaatgagtacctaaatctggatcactctgccgactcggaccgatg

SEQ ID NO: 2592 - DNA, 203 bp, synthetic construct
  source 1..203: mol_type = other DNA
ggcgcgccagtccttcagagaggttcgtgccaacctcatgaggctctgactcttgtcaggttgcttggctgccttgtgcatacccgaatggcagatcagctgacatgacatggaactgctctatctgccttgtcccctctcctctaattaaaagtcgctaccattgtcactcttggttatgtagttaacgactcggaccgatg

SEQ ID NO: 2593 - DNA, 203 bp, synthetic construct
  source 1..203: mol_type = other DNA
ggcgcgccagtccttatccactgtggctatctccaacttgctgggacatccagttatctcctctgacacatattttttcattctctagttacaaagtttgttagagtttgaaaaacaaacccttctcccctaccctgtgaatgctgttagtttttatgtgtagttttcaaaacacagattatcttatacgactcggaccgatg

SEQ ID NO: 2594 - DNA, 203 bp, synthetic construct
  source 1..203: mol_type = other DNA
ggcgcgccagtcctttatgattttcattctgttcagcggctatactcagactttactctaaaagtcaaatcttctgacattctttgaagtgaagcattctatgaatgtgagctgaagaaatgaatgaaatgaaataatgcagcatctagtgctttttgcatggcccaaaggggctctgtgctgctccacgactcggaccgatg

SEQ ID NO: 2595 - DNA, 203 bp, synthetic construct
  source 1..203: mol_type = other DNA
ggcgcgccagtcctacacctccaagcaacgagttcaagatcagtatgaaattggaagcacaggaccccaggaacaccacatccacctgtattgccacagtagttggactgacaggtgcccgccttcgcctgcgccttgatgggagcgacaacaaaaatgacttctggcggctggttgactcagctgaacgactcggaccgatg

SEQ ID NO: 2596 - DNA, 203 bp, synthetic construct
  source 1..203: mol_type = other DNA
ggcgcgccagtcctaaaatgggaatgaagctagaagctgtggacaggaagaaccctcatttcatttgcccagccactattggggaggttcggggctcagaggtgcttgtcacttttgatgggtggcgaggggcctttgactactggtgccgcttcgactcccgagacatcttccctgtgggctggtgtcgactcggaccgatg

SEQ ID NO: 2597 - DNA, 203 bp, synthetic construct
  source 1..203: mol_type = other DNA
ggcgcgccagtccttccttgactggagacaacctgcagcctcctggcaccaaagttgtgattccaaagaatccctatcctgcctccgatgtgaatactgagaagcccagcatccacagcagcaccaaaactgtcttggaacatcaaccagggcagagggggcgtaaaccaggaaagaagcggggccggcgactcggaccgatg

SEQ ID NO: 2598 - DNA, 203 bp, synthetic construct
  source 1..203: mol_type = other DNA
ggcgcgccagtcctgcctgtatcgactgtgcttatcaccagaaaaccgtcttcagcttcctcaagcaaggccatggtggtgaggttatctcagccgtgtttgaccgggaacagcataccctcaacctcccagcagtcaacagcatcacctacgtcctccgcttcctggagaaactctgccacaaccttcgactcggaccgatg

SEQ ID NO: 2599 - DNA, 203 bp, synthetic construct
  source 1..203: mol_type = other DNA
ggcgcgccagtcctcccaccaaccttgtcagcacctcccaaaggcaccggcccttgctttcatcctgtggcctcccaccaagcactgcctcagctgtgcgcaggctatgctccaggggagtgttaaaaggatcaaatgaaagaagggatatggaatcattttggaaactaaatcgttccccagggtcgcgactcggaccgatg

SEQ ID NO: 2600 - DNA, 203 bp, synthetic construct
  source 1..203: mol_type = other DNA
ggcgcgccagtcctatttctcaaccctggctggcctctcaccaggagtttaggctgaatgccttccacgtgatggaggaaaaggccaactctgtcctggtcttgctgtggcaccccatcgccccacagctcgtaccttctcaccagattcccctgaatccaaactcgtggtgcaaacctctaccttttcgactcggaccgatg

SEQ ID NO: 2601 - DNA, 203 bp, synthetic construct
  source 1..203: mol_type = other DNA
ggcgcgccagtccttttacctgggacaaatacctaaaagaaacatgttcagtcccagcgcctgtccattgcttcaagcagtcctacacacctccaagcaacgagttcaagatcagtatgaaattggaagcacaggaccccaggaacaccacatccacctgtattgccacagtagttggactgacaggtcgactcggaccgatg

SEQ ID NO: 2602 - DNA, 203 bp, synthetic construct
  source 1..203: mol_type = other DNA
ggcgcgccagtcctgcccgccttcgcctgcgccttgatgggagcgacaacaaaaatgacttctggcggctggttgactcagctgaaatccagcctattgggaactgtgaaaagaatgggggtatgctacagccacctcttggatttcggctgaatgcgtcttcttggcccatgttccttttgaagacgcgactcggaccgatg

SEQ ID NO: 2603 - DNA, 203 bp, synthetic construct
  source 1..203: mol_type = other DNA
ggcgcgccagtcctagcagcaccaaaactgtcttggaacatcaaccagggcagagggggcgtaaaccaggaaagaagcggggccggacacccaagaccctaatttcccatcccatctctgccccatccaagacagctgaacctttgaaattcccaaagaagagaggtcccaaacctggcagcaagaggcgactcggaccgatg

SEQ ID NO: 2604 - DNA, 203 bp, synthetic construct
  source 1..203: mol_type = other DNA
ggcgcgccagtcctaagaaggtccagcaactccctgaccattttggaccagcccgtgcctctgtggtgttgcagcaggctgtccaggcctgtatcgactgtgcttatcaccagaaaaccgtcttcagcttcctcaagcaaggccatggtggtgaggttatctcagccgtgtttgaccgggaacagcatcgactcggaccgatg

SEQ ID NO: 2605 - DNA, 203 bp, synthetic construct
  source 1..203: mol_type = other DNA
ggcgcgccagtcctaccctcaacctcccagcagtcaacagcatcacctacgtcctccgcttcctggagaaactctgccacaaccttcgtagtgacaatctgtttggcaaccagccctttacacagactcacttgtcactcactgccatagagtacagccacagccacgacaggtacctaccaggtgaacgactcggaccgatg

SEQ ID NO: 2606 - DNA, 203 bp, synthetic construct
  source 1..203: mol_type = other DNA
ggcgcgccagtcctacctttgtcctggggaatagtctggcccgctccttggaaccacactcagactcaatggactctgcctcaaatcccaccaaccttgtcagcacctcccaaaggcaccggcccttgctttcatcctgtggcctcccaccaagcactgcctcagctgtgcgcaggctatgctccaggcgactcggaccgatg

SEQ ID NO: 2607 - DNA, 203 bp, synthetic construct
  source 1..203: mol_type = other DNA
ggcgcgccagtcctccctagggcactttctctttgaggtggagagacccataaagccttgaccacatcactccatatggggaggagaaggatccctgtcaccttctcctctcttcacggggcccttttgcagccctaggcctcatctgtgggaagggagtccctggcttatactgcccccaccacagccgactcggaccgatg

SEQ ID NO: 2608 - DNA, 203 bp, synthetic construct
  source 1..203: mol_type = other DNA
ggcgcgccagtccttccttgccctggccagaactgctgtcgaagaaaatcaggccggaaggccaagaaggcgctaagggggatgggagggcaggttttccaggctggagtcggttccacccactcgcctgtccacaggcttccttgtaagcaagtcagcagcacagctactcacgctgccatctggaccgactcggaccgatg

SEQ ID NO: 2609 - DNA, 203 bp, synthetic construct
  source 1..203: mol_type = other DNA
ggcgcgccagtccttgaccctacttatataggaaatattggaagattccttaatcattcttgtgagccaaaccttttgatgattcctgtccgaattgactcaatggtacctaagttggcactttttgcagccaaagatattgtgccagaagaagaactctcttatgattattcaggaagatatcttaacgactcggaccgatg

SEQ ID NO: 2610 - DNA, 203 bp, synthetic construct
  source 1..203: mol_type = other DNA
ggcgcgccagtccttttatatgacaaccggcgacgatcagctcagtggttggatcaagaagaagctccaaagcacttcccaaagccaatcttgcacccaaaaaaggtcatggtcactatttggtggtctgctgctggtctgatccactacagctttctgaatcccggtgaaaccattacatctgagaacgactcggaccgatg

SEQ ID NO: 2611 - DNA, 203 bp, synthetic construct
  source 1..203: mol_type = other DNA
ggcgcgccagtcctgtatgctcaggaaatcgatgagatgaaccaaaaactgcaacgcctgcagctggcattggtcaacagaaagggcccaattcttctccacgacaatgcccgaccgcatgttgcacaacccacacttcaaaagttgaatgaattgggctatgaagttttgcctcatccaccgtattccgactcggaccgatg

SEQ ID NO: 2612 - DNA, 203 bp, synthetic construct
  source 1..203: mol_type = other DNA
ggcgcgccagtcctacctgacctcttgccaaccaactaccacgtctttaagcatctcaacaactttttgcagggaaaacgcttccacaaccagcaggatgcagaaaatgctttccaagagttcgtcgaatcccaaagcacggatttttacgctacaggaataaaccaacttatttctcgttggcaaaacgactcggaccgatg

SEQ ID NO: 2613 - DNA, 203 bp, synthetic construct
  source 1..203: mol_type = other DNA
ggcgcgccagtccttgaggcatgagtaggggctgtatttgcgtgcaggcgggcccccaaagcttccactcgctgccttaaaacgccaacccagcctctcagacaatgctgccctcccactatgtactctaccacctatgaagagaggaatatcaccggaaccagggtgaaggtgcccgtggggcaggacgactcggaccgatg

SEQ ID NO: 2614 - DNA, 203 bp, synthetic construct
  source 1..203: mol_type = other DNA
ggcgcgccagtcctggtggaggggatgaacatcctgggcttggtagtgtttgccatcgtctttggtgtggcgctgcggaagctggggcctgaaggggagctgcttatccgcttcttcaactccttcaatgaggccaccatggttctggtctcctggatcatgtggtacgcccctgtgggcatcatgttcgactcggaccgatg

SEQ ID NO: 2615 - DNA, 203 bp, synthetic construct
  source 1..203: mol_type = other DNA
ggcgcgccagtcctcctggtggctggcaagatcgtggagatggaggatgtgggtttactctttgcccgccttggcaagtacattctgtgctgcctgctgggtcacgccatccatgggctcctggtactgcccctcatctacttcctcttcacccgcaaaaacccctaccgcttcctgtggggcatcgtcgactcggaccgatg

SEQ ID NO: 2616 - DNA, 203 bp, synthetic construct
  source 1..203: mol_type = other DNA
ggcgcgccagtcctggctgtggactggctagtcgaccggtcctgtaccgtcctcaatgtagaaggtgacgctctgggggcaggactcctccaaaattacgtggaccgtacggagtcgagaagcacagagcctgagttgatacaagtgaagagtgagctgcccctggatccgctgccagtccccactgacgactcggaccgatg

SEQ ID NO: 2617 - DNA, 203 bp, synthetic construct
  source 1..203: mol_type = other DNA
ggcgcgccagtcctgtctgcctgcacactctggggagccaggggccccagcaccctccaggacaggagatctgggatgcctggctgctggagtacatgtgttcacaagggttactcctcaaaacccccagttctcactcatgtccccaactcaaggctagaaaacagcaagatggagaaataatgttccgactcggaccgatg

SEQ ID NO: 2618 - DNA, 203 bp, synthetic construct
  source 1..203: mol_type = other DNA
ggcgcgccagtccttgtgtgtgtgtgtgtgttctgtgacctcctgtccccatggtacgtcccaccctgtccccagatcccctattccctccacaataacagaaacactcccagggactctggggagaggctgaggacaaatacctgctgtcactccagaggacattttttttagcaataaaattgagtcgactcggaccgatg

SEQ ID NO: 2619 - DNA, 203 bp, synthetic construct
  source 1..203: mol_type = other DNA
ggcgcgccagtcctcggcacgcccgggaggctttctctggctggtaaccgctactcccggacaccagaccaccgccttccgtacacaggggcccgcatcccaccctcccggacctaagagcctgggtcccctgtttccggaggtccgcttcccggcccccagattctggcatcccagccctcagtgtccgactcggaccgatg

SEQ ID NO: 2620 - DNA, 203 bp, synthetic construct
  source 1..203: mol_type = other DNA
ggcgcgccagtcctcaagacccaggcagcccgggtccccgcctcccggatccaggcgtccgggatctgcgccaccagaacctagcctcctgcagacctccgccatctgggggcactcaacctcctggagccaagggccccacgtcccacccagagaaactctcgtattcccagctcctagggccaaggcgactcggaccgatg

SEQ ID NO: 2621 - DNA, 203 bp, synthetic construct
  source 1..203: mol_type = other DNA
ggcgcgccagtcctcctccatcgaggaccaaggcgcggcagcaggcggctactgcggttcccgggaccaggtgcgccgctgccttcgagccaacctgcttgtgctgctgacagtggtggccgtggtggccggcgtggcgctgggactgggggtgtcgggggccgggggtgcgctggcgttgggcccggcgactcggaccgatg

SEQ ID NO: 2622 - DNA, 203 bp, synthetic construct
  source 1..203: mol_type = other DNA
ggcgcgccagtcctagcgcttgagcgccttcgtcttcccgggcgagctgctgctgcgtctgctgcggatgatcatcttgccgctggtggtgtgcagcttgatcggcggcgccgccagcctggaccccggcgcgctcggccgtctgggcgcctgggcgctgctctttttcctggtcaccacgctgctggcgactcggaccgatg

SEQ ID NO: 2623 - DNA, 203 bp, synthetic construct
  source 1..203: mol_type = other DNA
ggcgcgccagtccttcagccgtttcatcctgcccatcggcgccaccgtcaacatggacggtgccgcgctcttccagtgcgtggccgcagtgttcattgcacagctcagccagcagtccttggacttcgtaaagatcatcaccatcctggtcacggccacagcgtccagcgtgggggcagcgggcatcccgactcggaccgatg

SEQ ID NO: 2624 - DNA, 203 bp, synthetic construct
  source 1..203: mol_type = other DNA
ggcgcgccagtcctctgctggaggtgtcctcactctggccatcatcctcgaagcagtcaacctcccggtcgaccatatctccttgatcctggctgtggactggctagtcgaccggtcctgtaccgtcctcaatgtagaaggtgacgctctgggggcaggactcctccaaaattacgtggaccgtacggcgactcggaccgatg

SEQ ID NO: 2625 - DNA, 203 bp, synthetic construct
  source 1..203: mol_type = other DNA
ggcgcgccagtccttccctgccctgctgggggtgctctttggacactggattatgaggaatggataaatggatgagctagggctctgggggtctgcctgcacactctggggagccaggggccccagcaccctccaggacaggagatctgggatgcctggctgctggagtacatgtgttcacaagggttcgactcggaccgatg

SEQ ID NO: 2626 - DNA, 203 bp, synthetic construct
  source 1..203: mol_type = other DNA
ggcgcgccagtcctaacaccatgctggttattttggcggctgtagttgtggggggatgtgtgtgtgcacgtgtgtgtgtgtgtgtgtgtgtgtgtgtgtgtgtgtgttctgtgacctcctgtccccatggtacgtcccaccctgtccccagatcccctattccctccacaataacagaaacactcccacgactcggaccgatg

SEQ ID NO: 2627 - DNA, 203 bp, synthetic construct
  source 1..203: mol_type = other DNA
ggcgcgccagtcctaccgcatcggcgaccttcaggccttccagggccacggcgcgggcaacctggcgggtctgaaggggcgtctcgattacctgagctctctgaaggtgaagggccttgtgctgggtccaattcacaagaaccagaaggatgatgtcgctcagactgacttgctgcagatcgaccccacgactcggaccgatg

SEQ ID NO: 2628 - DNA, 203 bp, synthetic construct
  source 1..203: mol_type = other DNA
ggcgcgccagtcctattttggctccaaggaagattttgacagtctcttgcaatcggctaaaaaaaagagcatccgtgtcattctggaccttactcccaactaccggggtgagaactcgtggttctccactcaggttgacactgtggccaccaaggtgaaggatgctctggagttttggctgcaagctgcgactcggaccgatg

SEQ ID NO: 2629 - DNA, 203 bp, synthetic construct
  source 1..203: mol_type = other DNA
ggcgcgccagtccttcttcaccctgccagggacccctgttttcagctacggggatgagattggcctggatgcagctgcccttcctggacagcctatggaggctccagtcatgctgtgggatgagtccagcttccctgacatcccaggggctgtaagtgccaacatgactgtgaagggccagagtgaagcgactcggaccgatg

SEQ ID NO: 2630 - DNA, 203 bp, synthetic construct
  source 1..203: mol_type = other DNA
ggcgcgccagtcctgacttcagcctgacatggacccactacccttctcctttccttcccaggccctttggcttctgatttttctcttttttaaaaacaaacaaacaaactgttgcagattatgagtgaacccccaaatagggtgttttctgccttcaaataaaagtcacccctgcatggtgaagtcttcgactcggaccgatg

SEQ ID NO: 2631 - DNA, 203 bp, synthetic construct
  source 1..203: mol_type = other DNA
ggcgcgccagtcctagttccagggaaggagggcgtagacaaagcgccacctgaacttgcggcgcgaaaaaggcgcgcatgcgtcctacgggagcgtgctggctcaccgaccgcattgcggcttggttttctcacccagtgcatgtggcaggagcggtgagatcactgcctcacggcgatcctggactgcgactcggaccgatg

SEQ ID NO: 2632 - DNA, 203 bp, synthetic construct
  source 1..203: mol_type = other DNA
ggcgcgccagtcctacggtcacgactgcctaccctctaaccctgttctgagctgccccttgcccacacaccccaaacctgtgtgcaggatccgcctccatggagctacagcctcctgaagcctcgatcgccgtcgtgtcgattccgcgccagttgcctggctcacattcggaggctggtgtccagggtcgactcggaccgatg

SEQ ID NO: 2633 - DNA, 203 bp, synthetic construct
  source 1..203: mol_type = other DNA
ggcgcgccagtcctctcagcgcgggggacgactcagagacggggtctgactgtgttacccaggctggtcttcaactcttggcctcaagtgatcctcctgccttagcttccaagaatgctgaggttacagtagaaacggggtttcaccatgttagccaggctgatattgaattcctgacctcaattgatcgactcggaccgatg

SEQ ID NO: 2634 - DNA, 203 bp, synthetic construct
  source 1..203: mol_type = other DNA
ggcgcgccagtcctatcaaggtggcggaagacgaggcggaggcggcagccgcggctaagttcacgggcctgtccaaggaggagctgctgaaggtggcaggcagccccggctgggtacgcacccgctgggcactgctgctgctcttctggctcggctggctcggcatgcttgctggtgccgtggtcatacgactcggaccgatg

SEQ ID NO: 2635 - DNA, 203 bp, synthetic construct
  source 1..203: mol_type = other DNA
ggcgcgccagtcctatcgtgcgagcgccgcgttgtcgcgagctaccggcgcagaagtggtggcacacgggcgccctctaccgcatcggcgaccttcaggccttccagggccacggcgcgggcaacctggcgggtctgaaggggcgtctcgattacctgagctctctgaaggtgaagggccttgtgctgcgactcggaccgatg

SEQ ID NO: 2636 - DNA, 203 bp, synthetic construct
  source 1..203: mol_type = other DNA
ggcgcgccagtcctaatgctgctgcccccacgagcacccctcagaagctgattcccccgcagccaacgggccgcccttcccccgcgccccctgccgtcccacccgccgcctcgcccgtgatgccaccgcagacccagtcccccgggcagccggcccagcccgcgcccatggtgccactgcaccagaagcgactcggaccgatg

SEQ ID NO: 2637 - DNA, 203 bp, synthetic construct
  source 1..203: mol_type = other DNA
ggcgcgccagtcctcagagccgcatcacccccatccagaagccgcggggcctcgaccctgtggagatcctgcaggagcgcgagtacaggctgcaggctcgcatcgcacaccgaattcaggaacttgaaaaccttcccgggtccctggccggggatttgcgaaccaaagcgaccattgagctcaaggcccgactcggaccgatg

SEQ ID NO: 2638 - DNA, 203 bp, synthetic construct
  source 1..203: mol_type = other DNA
ggcgcgccagtcctgagcgcaagcgccggcagaagcaccaggaatacctcaatagcattctccagcatgccaaggatttcaaggaatatcacagatccgtcacaggcaaaatccagaagctgaccaaggcagtggccacgtaccatgccaacacggagcgggagcagaagaaagagaacgagcggatccgactcggaccgatg

SEQ ID NO: 2639 - DNA, 203 bp, synthetic construct
  source 1..203: mol_type = other DNA
ggcgcgccagtcctgagaaggagcgcatgcggaggctcatggctgaagatgaggaggggtaccgcaagctcatcgaccagaagaaggacaagcgcctggcctacctcttgcagcagacagacgagtacgtggctaacctcacggagctggtgcggcagcacaaggctgcccaggtcgccaaggagaaacgactcggaccgatg

SEQ ID NO: 2640 - DNA, 203 bp, synthetic construct
  source 1..203: mol_type = other DNA
ggcgcgccagtcctaaacagtaccagatcaaaggtttggagtggctggtgtccctgtacaacaacaacctgaacggcatcctggccgacgagatgggcctggggaagaccatccagaccatcgcgctcatcacgtacctcatggagcacaaacgcatcaatgggcccttcctcatcatcgtgcctctccgactcggaccgatg

SEQ ID NO: 2641 - DNA, 203 bp, synthetic construct
  source 1..203: mol_type = other DNA
ggcgcgccagtcctatcaagcttggccggaaggagaaggcacaggaccggctgaagggcggccggcggcggccgagccgagggtcccgagccaagccggtcgtgagtgacgatgacagtgaggaggaacaagaggaggaccgctcaggaagtggcagcgaagaagactgagccccgacattccagtctcgactcggaccgatg

SEQ ID NO: 2642 - DNA, 203 bp, synthetic construct
  source 1..203: mol_type = other DNA
ggcgcgccagtcctgcatctgtaacagcattaactgtcttaaagagagagagagagaattccgaattggggaacacacgatacctgtttttcttttccgttgctggcagtactgttgcgccgcagtttggagtcactgtagttaagtgtggatgcatgtgcgtcaccgtccactcctcctactgtattcgactcggaccgatg

SEQ ID NO: 2643 - DNA, 203 bp, synthetic construct
  source 1..203: mol_type = other DNA
ggcgcgccagtcctcgagacgcccattctgcccccggccccgcgcggaggggcgggggaggcgccgggaagtcgacggcgccggcggctcctgcgtctcgcccttttgcccaggctagagtgcagtggtgcggtcatggttcactgcagcctcaacctcctggactcagcaggaggccactgtctgcacgactcggaccgatg

SEQ ID NO: 2644 - DNA, 203 bp, synthetic construct
  source 1..203: mol_type = other DNA
ggcgcgccagtcctggacccatggcgaatgctgctgcccccacgagcacccctcagaagctgattcccccgcagccaacgggccgcccttcccccgcgccccctgccgtcccacccgccgcctcgcccgtgatgccaccgcagacccagtcccccgggcagccggcccagcccgcgcccatggtgccacgactcggaccgatg

SEQ ID NO: 2645 - DNA, 203 bp, synthetic construct
  source 1..203: mol_type = other DNA
ggcgcgccagtcctaatggtgtcctcaaacagtaccagatcaaaggtttggagtggctggtgtccctgtacaacaacaacctgaacggcatcctggccgacgagatgggcctggggaagaccatccagaccatcgcgctcatcacgtacctcatggagcacaaacgcatcaatgggcccttcctcatccgactcggaccgatg

SEQ ID NO: 2646 - DNA, 203 bp, synthetic construct
  source 1..203: mol_type = other DNA
ggcgcgccagtcctatcgtgcctctctcaacgctgtccaactgggcgtacgagtttgacaagtgggccccctccgtggtgaaggtgtcttacaagggatccccagcagcaagacgggcctttgtcccccagctccggagtgggaagttcaacgtcttgctgacgacgtacgagtacatcatcaaagaccgactcggaccgatg

SEQ ID NO: 2647 - DNA, 203 bp, synthetic construct
  source 1..203: mol_type = other DNA
ggcgcgccagtcctcagctgcggaagatctgcaaccacccctacatgttccagcacatcgaggagtccttttccgagcacttggggttcactggcggcattgtccaagggctggacctgtaccgagcctcgggtaaatttgagcttcttgatagaattcttcccaaactccgagcaaccaaccacaaacgactcggaccgatg

SEQ ID NO: 2648 - DNA, 203 bp, synthetic construct
  source 1..203: mol_type = other DNA
ggcgcgccagtcctcacactgcccctccgccagcgggcgtcaaccccgacttggaggagccacctctaaaggaggaagacgaggtgcccgacgacgagaccgtcaaccagatgatcgcccggcacgaggaggagtttgatctgttcatgcgcatggacctggaccgcaggcgcgaggaggcccgcaaccgactcggaccgatg

SEQ ID NO: 2649 - DNA, 203 bp, synthetic construct
  source 1..203: mol_type = other DNA
ggcgcgccagtcctcgagccaagccggtcgtgagtgacgatgacagtgaggaggaacaagaggaggaccgctcaggaagtggcagcgaagaagactgagccccgacattccagtctcgaccccgagcccctcgttccagagctgagatggcataggccttagcagtaacgggtagcagcagatgtagtcgactcggaccgatg

SEQ ID NO: 2650 - DNA, 203 bp, synthetic construct
  source 1..203: mol_type = other DNA
ggcgcgccagtccttttttcttttccgttgctggcagtactgttgcgccgcagtttggagtcactgtagttaagtgtggatgcatgtgcgtcaccgtccactcctcctactgtattttattggacaggtcagactcgccgggggcccggcgagggtatgtcagtgtcactggatgtcaaacagtaatacgactcggaccgatg

SEQ ID NO: 2651 - DNA, 203 bp, synthetic construct
  source 1..203: mol_type = other DNA
ggcgcgccagtcctcccccggcccccgggggacaagggctccgagagccgtatccggcggcccatgaacgccttcatggtttgggccaaggacgagaggaaacggctggcagtgcagaacccggacctgcacaacgccgagctcagcaagatgctgggaaagtcgtggaaggcgctgacgctgtcccacgactcggaccgatg

SEQ ID NO: 2652 - DNA, 203 bp, synthetic construct
  source 1..203: mol_type = other DNA
ggcgcgccagtcctgaagaggccgtacgtggacgaggcggagcggctgcgcctgcagcacatgcaggactaccccaactacaagtaccggccgcgcaggaagaagcaggccaagcggctgtgcaagcgcgtggacccgggcttccttctgagctccctctcccgggaccagaacgccctgccggagaacgactcggaccgatg

SEQ ID NO: 2653 - DNA, 203 bp, synthetic construct
  source 1..203: mol_type = other DNA
ggcgcgccagtcctaatgtctcccctggacgtgctggagccggagcagaccttcttctcctccccctgccaggaggagcatggccatccccgccgcatcccccacctgccagggcacccgtactcaccggagtacgccccaagccctctccactgtagccaccccctgggctccctggcccttggccacgactcggaccgatg

SEQ ID NO: 2654 - DNA, 203 bp, synthetic construct
  source 1..203: mol_type = other DNA
ggcgcgccagtcctctggactctccttatccgagtgccgcctctatccccttccccacgttccagcccctgcagcccacattttaagtatattccttcaagtgagttttcctccagcccctgagagttgctgtctcccagtggaatgttcactgacgtcttttcttggtagccatcatcgaaactaatcgactcggaccgatg

SEQ ID NO: 2655 - DNA, 203 bp, synthetic construct
  source 1..203: mol_type = other DNA
ggcgcgccagtcctgcaaagtcactgtcttcaaatctggatacacactttcccctctgtagattcaaaaggtgcttccttcccggctgtctccagcttccttactctcttttctgggatttctttttctcttctttctgctcttcctccactgctgaactggtccctaactgaaacagcccctgacttcgactcggaccgatg

SEQ ID NO: 2656 - DNA, 203 bp, synthetic construct
  source 1..203: mol_type = other DNA
ggcgcgccagtcctatcccaagcatgcttcctttagctgctgtgagaatttgtcttcctcaccagccaggtcctcaggcaaagtcctcagccagtgctttagagcaacttcccgcaaatcagaaactcactgtgattccaaaaatgtttctgagccctggacccctgcccccaaaatattttcatcttcgactcggaccgatg

SEQ ID NO: 2657 - DNA, 203 bp, synthetic construct
  source 1..203: mol_type = other DNA
ggcgcgccagtcctaacagctctgcgcggctttttgagcggtcccgcatcaaggctctggcagatgagcgtgaagccgtgcagaagaagaccttcaccaagtgggtcaattcccaccttgcccgtgtgtcctgccggatcacagacctgtacactgaccttcgagatggacggatgctcatcaagctgcgactcggaccgatg

SEQ ID NO: 2658 - DNA, 203 bp, synthetic construct
  source 1..203: mol_type = other DNA
ggcgcgccagtcctttcaatgcactgatacacaaacaccggcctgacctgatagattttgacaaactaaagaaatctaacgcacactacaacctgcagaatgcatttaatctggcagaacagcacctcggcctcactaaactgttggaccccgaagacatcagcgtggaccatcctgatgagaagtcccgactcggaccgatg

SEQ ID NO: 2659 - DNA, 203 bp, synthetic construct
  source 1..203: mol_type = other DNA
ggcgcgccagtcctatgccccgggaggggaagctcatctctgacatcaacaaggcctgggaaagactggaaaaagcggaacacgaaagagaactggctttgcggaatgagctcataagacaggagaaactggaacagctcgcccgcagatttgatcgcaaggcagctatgagggagacttggctgagccgactcggaccgatg

SEQ ID NO: 2660 - DNA, 203 bp, synthetic construct
  source 1..203: mol_type = other DNA
ggcgcgccagtcctgaaaaccagcgtctggtgtctcaggacaactttgggtttgaccttcctgcagttgaggccgccacaaaaaagcacgaggccattgagacagacattgccgcatacgaggagcgtgtgcaggctgtggtagccgtggccagggagctcgaggccgagaattaccacgacatcaagcgactcggaccgatg

SEQ ID NO: 2661 - DNA, 203 bp, synthetic construct
  source 1..203: mol_type = other DNA
ggcgcgccagtcctcgcatcacagcgaggaaggacaatgtcatccggctctgggaatacctactggaactgctcagggcccggagacagcggctcgagatgaacctggggctgcagaagatattccaggaaatgctctacattatggactggatggatgaaatgaaggtgctagtattgtctcaagaccgactcggaccgatg

SEQ ID NO: 2662 - DNA, 203 bp, synthetic construct
  source 1..203: mol_type = other DNA
ggcgcgccagtcctgcccacatggagttctgttatcaagagctttgccagctggcggctgagcgcagggcccgtctggaagagtcccgccgcctctggaagttcttctgggagatggcagaagaggaaggctggatacgggagaaggagaagatcctgtcctcggacgattacgggaaagacctgacccgactcggaccgatg

SEQ ID NO: 2663 - DNA, 203 bp, synthetic construct
  source 1..203: mol_type = other DNA
ggcgcgccagtcctagcgtcatgcgcctgctcagcaagcaccgggcgttcgaggacgagatgagcggccgcagtggccactttgagcaggccatcaaggaaggcgaagacatgatcgcggaggagcacttcgggtcggagaagatccgtgagaggatcatttacatccgggagcagtgggccaacctacgactcggaccgatg

SEQ ID NO: 2664 - DNA, 203 bp, synthetic construct
  source 1..203: mol_type = other DNA
ggcgcgccagtcctgagcagctctcggccattcggaagaagcgcctggaggaggcctccctgctgcaccagttccaggcagatgctgatgacattgatgcctggatgctggacatcctcaagattgtctccagcagcgacgtgggccacgatgagtattccacacagtctctggtcaagaaacacaagcgactcggaccgatg

SEQ ID NO: 2665 - DNA, 203 bp, synthetic construct
  source 1..203: mol_type = other DNA
ggcgcgccagtcctgacgtggcggaagagatcgccaattacaggcccacccttgacacgctgcacgaacaagccagcgccctcccccaggagcatgccgagtctccagacgtgaggggcaggctgtcgggcatcgaggagcggtataaggaggtggcagagctgacgcggctgcggaagcaggcactccgactcggaccgatg

SEQ ID NO: 2666 - DNA, 203 bp, synthetic construct
  source 1..203: mol_type = other DNA
ggcgcgccagtcctcaggacactctggccctgtacaagatgttcagcgaggctgatgcctgtgagctctggatcgacgagaaggagcagtggctcaacaacatgcagatcccagagaagctggaggatctggaggtcatccagcacagatttgagagcctagaaccagaaatgaacaaccaggcttcccgactcggaccgatg

SEQ ID NO: 2667 - DNA, 203 bp, synthetic construct
  source 1..203: mol_type = other DNA
ggcgcgccagtcctcgggttgcagtggtgaaccagattgcacgccagctgatgcacagcggccacccaagtgagaaggaaatcaaagcccagcaggacaaactcaacacaaggtggagccagttcagagaactggttgacaggaagaaggatgccctcctgtctgccctgagcatccagaactaccaccgactcggaccgatg

SEQ ID NO: 2668 - DNA, 203 bp, synthetic construct
  source 1..203: mol_type = other DNA
ggcgcgccagtcctctcgagtgcaatgaaaccaaatcctggattcgggaaaagaccaaggtcatcgagtccacccaggacctgggcaatgacctggctggcgtcatggccctgcagcgcaagctgaccggcatggagcgggacttggtggccattgaggcaaagctgagtgacctgcagaaggaggcgcgactcggaccgatg

SEQ ID NO: 2669 - DNA, 203 bp, synthetic construct
  source 1..203: mol_type = other DNA
ggcgcgccagtcctgagaagctggagtccgagcaccccgaccaggcccaggccatcctgtctcggctggccgagatcagcgacgtgtgggaggagatgaagaccaccctgaaaaaccgagaggcctccctgggagaggccagcaagctgcagcagttcctacgggacttggacgacttccagtcctggcgactcggaccgatg

SEQ ID NO: 2670 - DNA, 203 bp, synthetic construct
  source 1..203: mol_type = other DNA
ggcgcgccagtcctctctctaggacccagacagcgatcgcctcggaggacatgccaaacaccctgaccgaggctgagaagctgctcacgcagcacgagaacatcaagaacgagatcgacaactacgaggaggactaccagaagatgagggacatgggcgagatggtcacccaggggcagaccgatgcccgactcggaccgatg

SEQ ID NO: 2671 - DNA, 203 bp, synthetic construct
  source 1..203: mol_type = other DNA
ggcgcgccagtcctcagtacatgtttctgcggcagcggctgcaggccctggacactggatggaacgagctccacaagatgtgggagaacagacaaaatctcctatcccagtcacatgcctaccagcagttcctcagagacacgaagcaagccgaagcctttcttaacaaccaggagtatgttctggctcgactcggaccgatg

SEQ ID NO: 2672 - DNA, 203 bp, synthetic construct
  source 1..203: mol_type = other DNA
ggcgcgccagtcctgagaatcagatggaagtgcggaagaaggagatcgaagagctccaaagccaagcccaggccctgagtcaggaagggaagagcaccgacgaggtagacagcaagcgcctcaccgtgcagaccaagttcatggagttgctggagcccttgaacgagaggaagcataacctgctggcccgactcggaccgatg

SEQ ID NO: 2673 - DNA, 203 bp, synthetic construct
  source 1..203: mol_type = other DNA
ggcgcgccagtcctgacgacatctttgagaggagccaaaacatcgtcactgacagcagcagcctcagcgctgaggccatcagacagaggcttgccgacctgaagcagctgtggggtctcctcattgaggagacagagaaacgccacaggcggctggaggaggcgcacagggcccagcagtactactttcgactcggaccgatg

SEQ ID NO: 2674 - DNA, 203 bp, synthetic construct
  source 1..203: mol_type = other DNA
ggcgcgccagtcctctggtggccgacagccatcctgaaagtgagcgcattagcatgcggcagtccaaagtggataaactgtacgctggtctgaaagaccttgctgaagagagaagaggcaagctggatgagagacacaggttattccagctcaaccgggaggtggacgacctggagcagtggatcgctcgactcggaccgatg

SEQ ID NO: 2675 - DNA, 203 bp, synthetic construct
  source 1..203: mol_type = other DNA
ggcgcgccagtcctgagagggaggtggtcgcagggtcccatgaactgggacaggactatgagcatgtcacgatgttacaagaacgattccgggagtttgcccgagacaccgggaacattgggcaggagcgcgtggacacggtcaatcacctggcagatgagctcatcaactctggacattcagatgcccgactcggaccgatg

SEQ ID NO: 2676 - DNA, 203 bp, synthetic construct
  source 1..203: mol_type = other DNA
ggcgcgccagtcctcttgggagagatcagaacacagtggagaccttacagagaatgcacactacatttgagcatgacatccaggctctgggcacacaggtgaggcagctgcaggaggatgcagcccgcctccaggcggcctatgcgggtgacaaggccgacgatatccagaagcgcgagaacgaggtccgactcggaccgatg

SEQ ID NO: 2677 - DNA, 203 bp, synthetic construct
  source 1..203: mol_type = other DNA
ggcgcgccagtccttgggaagaccgatgggaatggttaagactgattctggaggtccatcagttctcaagagacgccagtgtggccgaggcctggctgcttggacaggagccgtacctatccagccgagagataggccagagcgtggacgaggtggagaagctcatcaagcgccacgaggcatttgaacgactcggaccgatg

SEQ ID NO: 2678 - DNA, 203 bp, synthetic construct
  source 1..203: mol_type = other DNA
ggcgcgccagtccttcaaaaggagaacaagtttcccaaaacggtttgccagctgaacagggatctccacggatggcagaaacggtggacacaagcgaaatggtcaacggcgctacagaacaaaggacgagctctaaagagtccagccccatcccctccccgacctctgatcgtaaagccaagactgcccgactcggaccgatg

SEQ ID NO: 2679 - DNA, 203 bp, synthetic construct
  source 1..203: mol_type = other DNA
ggcgcgccagtccttatgatcttgctgcagccacagtgcagctccacattaactctacagaccaaaccatttgtatctggcatcacttactaacacacgacatgcggcttttctgcatcaactgctatgacggttaagaatgtcagtatacaagaaggaatagaaaactgatactgttttaaataatccgactcggaccgatg

SEQ ID NO: 2680 - DNA, 203 bp, synthetic construct
  source 1..203: mol_type = other DNA
ggcgcgccagtcctatcaaagctttctcttaactctcttacctctaggcaaactgagacctcaccatcctctcccctgcttcccacgacagtcctttgcccttgccatgctcagggttggaatcaagttgttctattctcaacagaccaaaatgtttagttaaggcaaagtatcttggaaacaattgtcgactcggaccgatg

SEQ ID NO: 2681 - DNA, 203 bp, synthetic construct
  source 1..203: mol_type = other DNA
ggcgcgccagtcctgattaattacagtcttgtactcttgacaaagctgtgcagatggcaataagttcataccagcaatcctggagtcccataataaatacgtacatgtggaacatcgtgcacataatttcaacagttcgcagatctgtagttatgaagccagggtttggtggtatttgctctctcttgcgactcggaccgatg

SEQ ID NO: 2682 - DNA, 203 bp, synthetic construct
  source 1..203: mol_type = other DNA
ggcgcgccagtcctttcttccactatcatgttttttgaggattttgcatatttcttgttgccataatgctgtgctattttaccctgattttcagtgatacaatatgggtgacaatactggcccctccataaatctgaagagtaagaagtagtgaaaataaggcttaggatatgaaatggcgttgtcaccgactcggaccgatg

SEQ ID NO: 2683 - DNA, 203 bp, synthetic construct
  source 1..203: mol_type = other DNA
ggcgcgccagtcctttgaatcaaggccactttttgtcctacttgagcatctcaagttgggatgcatcttctgatggcacttccggaactggctgtggtttttttgggtgtaccgagagtgccagtgactgtgcttcttacaattcctggcatcttgagtaggtgaaacactgtatcagactgggtgatcgactcggaccgatg

SEQ ID NO: 2684 - DNA, 203 bp, synthetic construct
  source 1..203: mol_type = other DNA
ggcgcgccagtcctggtgtgcgcgctgcgcccgcgagctcccgggctcggcaaccgtggcatgcttaggattggccatatttaaaagttctgaagtagaacctgcgcctcctctctgcttctccctcctcctcagtaatttatttcgagcttccaggcaagggccacggaagaagggaaagcaagaaacgactcggaccgatg

SEQ ID NO: 2685 - DNA, 203 bp, synthetic construct
  source 1..203: mol_type = other DNA
ggcgcgccagtcctttagatgcctgtgtggtaactcctcgcggagctaaggtggactctcttgcagccaacttcccatcagatcaccctgctggacttgcagaccggaatggggctcgcctaaggagccgagcgctgcggaggctgctgcgtgttggatgggagtgggagggggctggagcgagatttcgactcggaccgatg

SEQ ID NO: 2686 - DNA, 203 bp, synthetic construct
  source 1..203: mol_type = other DNA
ggcgcgccagtcctccagggcgcagtcctccggggcgttacgccgggcataatggaattgcagaggacgtctagtatctccgggccgctgtcgccggcgtacacggggcaggtgccttacaactacaaccagctggaaggcagattcaagcagctgcaagatgagcgtgaagccgtgcagaagaagaccgactcggaccgatg

SEQ ID NO: 2687 - DNA, 203 bp, synthetic construct
  source 1..203: mol_type = other DNA
ggcgcgccagtcctcttcaccaagtgggtcaattcccaccttgcccgtgtgtcctgccggatcacagacctgtacactgaccttcgagatggacggatgctcatcaagctgctggaggtcctctctggagagaggctgcctaaacccaccaagggacgaatgcgcatccactgcttagagaatgtggacgactcggaccgatg

SEQ ID NO: 2688 - DNA, 203 bp, synthetic construct
  source 1..203: mol_type = other DNA
ggcgcgccagtccttgtggagaaaccacccaaatttactgagaaggggaacttggaagtgctgctcttcaccattcagagcaagatgagggccaacaaccagaaggtctacatgccccgggaggggaagctcatctctgacatcaacaaggcctgggaaagactggaaaaagcggaacacgaaagagacgactcggaccgatg

SEQ ID NO: 2689 - DNA, 203 bp, synthetic construct
  source 1..203: mol_type = other DNA
ggcgcgccagtcctactggctttgcggaatgagctcataagacaggagaaactggaacagctcgcccgcagatttgatcgcaaggcagctatgagggagacttggctgagcgaaaaccagcgtctggtgtctcaggacaactttgggtttgaccttcctgcagttgaggccgccacaaaaaagcacgacgactcggaccgatg

SEQ ID NO: 2690 - DNA, 203 bp, synthetic construct
  source 1..203: mol_type = other DNA
ggcgcgccagtcctggccattgagacagacattgccgcatacgaggagcgtgtgcaggctgtggtagccgtggccagggagctcgaggccgagaattaccacgacatcaagcgcatcacagcgaggaaggacaatgtcatccggctctgggaatacctactggaactgctcagggcccggagacagcgcgactcggaccgatg

SEQ ID NO: 2691 - DNA, 203 bp, synthetic construct
  source 1..203: mol_type = other DNA
ggcgcgccagtcctagagcgggtgagaggtgtcaatgcctccgcccagaagttcgcaacagacggggaaggttacaagccctgtgacccccaggtgatccgagaccgcgtggcccacatggagttctgttatcaagagctttgccagctggcggctgagcgcagggcccgtctggaagagtcccgccgcgactcggaccgatg

SEQ ID NO: 2692 - DNA, 203 bp, synthetic construct
  source 1..203: mol_type = other DNA
ggcgcgccagtcctcctctggaagttcttctgggagatggcagaagaggaaggctggatacgggagaaggagaagatcctgtcctcggacgattacgggaaagacctgaccagcgtcatgcgcctgctcagcaagcaccgggcgttcgaggacgagatgagcggccgcagtggccactttgagcaggccgactcggaccgatg

SEQ ID NO: 2693 - DNA, 203 bp, synthetic construct
  source 1..203: mol_type = other DNA
ggcgcgccagtcctgcatgccgagtctccagacgtgaggggcaggctgtcgggcatcgaggagcggtataaggaggtggcagagctgacgcggctgcggaagcaggcactccaggacactctggccctgtacaagatgttcagcgaggctgatgcctgtgagctctggatcgacgagaaggagcagtgcgactcggaccgatg

SEQ ID NO: 2694 - DNA, 203 bp, synthetic construct
  source 1..203: mol_type = other DNA
ggcgcgccagtcctgcaggacaaactcaacacaaggtggagccagttcagagaactggttgacaggaagaaggatgccctcctgtctgccctgagcatccagaactaccacctcgagtgcaatgaaaccaaatcctggattcgggaaaagaccaaggtcatcgagtccacccaggacctgggcaatgacgactcggaccgatg

SEQ ID NO: 2695 - DNA, 203 bp, synthetic construct
  source 1..203: mol_type = other DNA
ggcgcgccagtcctcgccaatgaggagaagatcaatgctgtggtggagactggccggaggctggtgagcgatgggaacatcaactcagatcgcatccaggagaaggtggactctattgatgacagacataggaagaatcgtgagacagccagtgaacttttgatgaggttgaaggacaacagggatctcgactcggaccgatg

SEQ ID NO: 2696 - DNA, 203 bp, synthetic construct
  source 1..203: mol_type = other DNA
ggcgcgccagtcctggaaggaatgcagctcatttcagaaaagcctgagacggaagctgtggtgaaggagaaactcactggtttacataaaatgtgggaagtccttgaatccactacccagacaaaggcccagcggctctttgatgcaaacaaggccgaacttttcacccagagctgtgcagatctagacgactcggaccgatg

SEQ ID NO: 2697 - DNA, 203 bp, synthetic construct
  source 1..203: mol_type = other DNA
ggcgcgccagtcctttccacggatcatggccacaacctccagactgtgcagctgttaataaagaaaaatcagaccctccagaaagaaatccaggggcaccagcctcgcattgacgacatctttgagaggagccaaaacatcgtcactgacagcagcagcctcagcgctgaggccatcagacagaggctcgactcggaccgatg

SEQ ID NO: 2698 - DNA, 203 bp, synthetic construct
  source 1..203: mol_type = other DNA
ggcgcgccagtcctgaaagaccttgctgaagagagaagaggcaagctggatgagagacacaggttattccagctcaaccgggaggtggacgacctggagcagtggatcgctgagagggaggtggtcgcagggtcccatgaactgggacaggactatgagcatgtcacgatgttacaagaacgattccgcgactcggaccgatg

SEQ ID NO: 2699 - DNA, 203 bp, synthetic construct
  source 1..203: mol_type = other DNA
ggcgcgccagtcctctggctgcttggacaggagccgtacctatccagccgagagataggccagagcgtggacgaggtggagaagctcatcaagcgccacgaggcatttgaaaagtctgcagcaacctgggatgagaggttctctgccctggaaaggctgactacattggagttactggaagtgcgcagcgactcggaccgatg

SEQ ID NO: 2700 - DNA, 203 bp, synthetic construct
  source 1..203: mol_type = other DNA
ggcgcgccagtcctacagcaagaggaagaggagaggaagaggcggccgccttctcccgagccgagcacgaaggtttcagaggaagccgagtcccagcagcagtgggatacttcaaaaggagaacaagtttcccaaaacggtttgccagctgaacagggatctccacgggttagttaccgctctcaaaccgactcggaccgatg

SEQ ID NO: 2701 - DNA, 203 bp, synthetic construct
  source 1..203: mol_type = other DNA
ggcgcgccagtccttttttttctgccaagtcctgaattgaaaactgtaggcttccttgcacagatgttgcagccagcctcaggagtaaagtgcccgctgactgctgccgccacctctgtctcgctccctgtcagtgctgctggcacgtgggacgcggcaggtgacagccgttctcagcatgttttagacgactcggaccgatg

SEQ ID NO: 2702 - DNA, 203 bp, synthetic construct
  source 1..203: mol_type = other DNA
ggcgcgccagtcctgtcatgtcagtgtctctgtagacaaactccactgtacatcttggattaatcttctgattcattgttcattttctcaagactttttgtggaattctctgataaaggaagcttttaggatggtatctatcaggccaccagcaggaattgaaaatgttttcacaaaaatccttttcccgactcggaccgatg

SEQ ID NO: 2703 - DNA, 203 bp, synthetic construct
  source 1..203: mol_type = other DNA
ggcgcgccagtcctgggtgtgcccagccactaaagcactctggactaatcgctaaagagaagcaacgtggggggtggggttgcgagggatgtgttcacatgtacccatcatttgatcatagcactgtgattgcttttgatgtgtgtctctagtggtgtgctgtctgttggcatgcttaaagcacatgtcgactcggaccgatg

SEQ ID NO: 2704 - DNA, 203 bp, synthetic construct
  source 1..203: mol_type = other DNA
ggcgcgccagtcctagagctccagggagggacctgggtagaaggagaagccggaaacagcgggctggggcagccactgcttacactgaagagggaggacgggagaggagtgtgtgtgtgtgtgtgtgtgtgtgtgtgtatgtatgtgtgtgctttatcttatttttctttttggtggtggtggtggaacgactcggaccgatg

SEQ ID NO: 2705 - DNA, 203 bp, synthetic construct
  source 1..203: mol_type = other DNA
ggcgcgccagtcctggggggaggtgctagcagggccagccttgaactcgctggacagagctacagacctatggggcctggaagtgcccgctgagaaagggagaagacagcagaggggttgccgaggtgaggggttgcctccgaggcaacctccaagtcccagatcatgtctctgtggggtctggtctccgactcggaccgatg

SEQ ID NO: 2706 - DNA, 203 bp, synthetic construct
  source 1..203: mol_type = other DNA
ggcgcgccagtcctcaagatgcccccagaaaaagtgcagcggctctatgtcgactttccccaacacctgcggcatcttctgggtgactggctggagagccagccctgggagttcctggtcggctccgacgccttctgctgcaacttggctagtgccctactttcagacactgtccagcaccttcaggccgactcggaccgatg

SEQ ID NO: 2707 - DNA, 203 bp, synthetic construct
  source 1..203: mol_type = other DNA
ggcgcgccagtcctctcggtgggagagcagggggaggggagcaccatcttgcaacacatcagcacccttgagagcatatatcagagggaccccctgaagctggtggccactttcagacaaatacttcaaggagagaaaaaagctgttatggaacagttccgccacttgccaatgcctttccactggaacgactcggaccgatg

SEQ ID NO: 2708 - DNA, 203 bp, synthetic construct
  source 1..203: mol_type = other DNA
ggcgcgccagtcctactgcaggagaccactggagagctagaggcagccaaagccctagtgctgaagaggatccagatttggaaacggcagcagcagctggcagggaatggcgcaccgtttgaggagagcctggccccactccaggagaggtgtgaaagcctggtggacatttattcccagctacagcacgactcggaccgatg

SEQ ID NO: 2709 - DNA, 203 bp, synthetic construct
  source 1..203: mol_type = other DNA
ggcgcgccagtcctggaggtaggggcggctggtggggagcttgagcccaagacccgggcatcgctgactggccggctggatgaagtcctgagaaccctcgtcaccagttgcttcctggtggagaagcagcccccccaggtactgaagactcagaccaagttccaggctggagttcgattcctgttgggcgactcggaccgatg

SEQ ID NO: 2710 - DNA, 203 bp, synthetic construct
  source 1..203: mol_type = other DNA
ggcgcgccagtcctctctgccctgttcaagaacctgcttctcaagaagatcaagcggtgtgagcggaagggcactgagtctgtcacagaggagaagtgcgctgtgctcttctctgccagcttcacacttggccccggcaaactccccatccagctccaggccctgtctctgcccctggtggtcatcgtcgactcggaccgatg

SEQ ID NO: 2711 - DNA, 203 bp, synthetic construct
  source 1..203: mol_type = other DNA
ggcgcgccagtcctgagctactggtctgaccggctgatcattggcttcatcagcaaacagtacgttactagccttcttctcaatgagcccgacggaacctttctcctccgcttcagcgactcagagattgggggcatcaccattgcccatgtcatccggggccaggatggctctccacagatagagaacgactcggaccgatg

SEQ ID NO: 2712 - DNA, 203 bp, synthetic construct
  source 1..203: mol_type = other DNA
ggcgcgccagtcctcatccagccattctctgccaaagacctgtccattcgctcactgggggaccgaatccgggatcttgctcagctcaaaaatctctatcccaagaagcccaaggatgaggctttccggagccactacaagcctgaacagatgggtaaggatggcaggggttatgtcccagctaccatcgactcggaccgatg

SEQ ID NO: 2713 - DNA, 203 bp, synthetic construct
  source 1..203: mol_type = other DNA
ggcgcgccagtcctaggcctctccccagaagaatcagtcaacgtgttgtcagccttccaggagcctcacctgcagatgccccccagcctgggccagatgagcctgccctttgaccagcctcacccccagggcctgctgccgtgccagcctcaggagcatgctgtgtccagccctgaccccctgctctgcgactcggaccgatg

SEQ ID NO: 2714 - DNA, 203 bp, synthetic construct
  source 1..203: mol_type = other DNA
ggcgcgccagtcctctcagatgtgaccatggtggaagacagctgcctgagccagccagtgacagcgtttcctcagggcacttggattggtgaagacatattccctcctctgctgcctcccactgaacaggacctcactaagcttctcctggaggggcaaggggagtcggggggagggtccttgggggccgactcggaccgatg

SEQ ID NO: 2715 - DNA, 203 bp, synthetic construct
  source 1..203: mol_type = other DNA
ggcgcgccagtcctacagcccctcctgcagccctcccactatgggcaatctgggatctcaatgtcccacatggacctaagggccaaccccagttggtgatcccagctggagggagaacccaaagagacagctcttctactacccccacagacctgctctggacacttgctcatgccctgccaagcagccgactcggaccgatg

SEQ ID NO: 2716 - DNA, 203 bp, synthetic construct
  source 1..203: mol_type = other DNA
ggcgcgccagtcctagatggggagggtgccctcctatccccacctactcctgggtcaggaggaaaagactaacaggagaatgcacagtgggtggagccaatccactccttcctttctatcattcccctgcccacctccttccagcactgactggaagggaagttcaggctctgagacacaccccaacacgactcggaccgatg

SEQ ID NO: 2717 - DNA, 203 bp, synthetic construct
  source 1..203: mol_type = other DNA
ggcgcgccagtccttgcctgcacctgcagcgcgcacacgcacgcacacacacatacagagctctctgagggtgatggggctgagcaggaggggggctgggtaagagcacaggttagggcatggaaggcttctccgcccattctgacccagggcctaggacggataggcaggaacatacagacacatttcgactcggaccgatg

SEQ ID NO: 2718 - DNA, 203 bp, synthetic construct
  source 1..203: mol_type = other DNA
ggcgcgccagtccttgggtccaggcctggccatgtggccctccagtgtatgagagggccctgcctgctgcatcttttctgttgccccatccaccgccagcttcccttcactcccctatcccattctccctctcaaggcaggggtcatagatcctaagccataaaataaattttattccaaaataacaacgactcggaccgatg

SEQ ID NO: 2719 - DNA, 203 bp, synthetic construct
  source 1..203: mol_type = other DNA
ggcgcgccagtcctttattcccagctacagcaggaggtaggggcggctggtggggagcttgagcccaagacccgggcatcgctgactggccggctggatgaagtcctgagaaccctcgtcaccagttgcttcctggtggagaagcagcccccccaggtactgaagactcagaccaagttccaggctggcgactcggaccgatg

SEQ ID NO: 2720 - DNA, 203 bp, synthetic construct
  source 1..203: mol_type = other DNA
ggcgcgccagtcctagttcgattcctgttgggcttgaggttcctgggggccccagccaagcctccgctggtcagggccgacatggtgacagagaagcaggcgcgggagctgagtgtgcctcagggtcctggggctggagcagaaagcactggagaaatcatcaacaacactgtgcccttggagaacagcgactcggaccgatg

SEQ ID NO: 2721 - DNA, 203 bp, synthetic construct
  source 1..203: mol_type = other DNA
ggcgcgccagtcctccgggggctgctcccagagcacttcctcttcctggcccagaagatcttcaatgacaacagcctcagtatggaggccttccagcaccgttctgtgtcctggtcgcagttcaacaaggagatcctgctgggccgtggcttcaccttttggcagtggtttgatggtgtcctggacctcgactcggaccgatg

SEQ ID NO: 2722 - DNA, 203 bp, synthetic construct
  source 1..203: mol_type = other DNA
ggcgcgccagtcctttatgtcccagctaccatcaagatgaccgtggaaagggaccaaccacttcctaccccagagctccagatgcctaccatggtgccttcttatgaccttggaatggcccctgattcctccatgagcatgcagcttggcccagatatggtgccccaggtgtacccaccacactctcacgactcggaccgatg

SEQ ID NO: 2723 - DNA, 203 bp, synthetic construct
  source 1..203: mol_type = other DNA
ggcgcgccagtcctctccatccccccgtatcaaggcctctccccagaagaatcagtcaacgtgttgtcagccttccaggagcctcacctgcagatgccccccagcctgggccagatgagcctgccctttgaccagcctcacccccagggcctgctgccgtgccagcctcaggagcatgctgtgtccagcgactcggaccgatg

SEQ ID NO: 2724 - DNA, 203 bp, synthetic construct
  source 1..203: mol_type = other DNA
ggcgcgccagtcctctgagacacaccccaacatgcctgcacctgcagcgcgcacacgcacgcacacacacatacagagctctctgagggtgatggggctgagcaggaggggggctgggtaagagcacaggttagggcatggaaggcttctccgcccattctgacccagggcctaggacggataggcagcgactcggaccgatg

SEQ ID NO: 2725 - DNA, 203 bp, synthetic construct
  source 1..203: mol_type = other DNA
ggcgcgccagtcctctgttagccaggtggaggcttctgatacgtgtatgagactatgcaaaagtacaagggctgagattcttcgtgtatagctgtgtgaacgtgtatgtacctaggatatgttaaatgtatagctggcaccttagttgcatgaccacatagaacatgtgtctatctgcttttgcctaccgactcggaccgatg

SEQ ID NO: 2726 - DNA, 203 bp, synthetic construct
  source 1..203: mol_type = other DNA
ggcgcgccagtccttttctccttccctccacgggccgggtgagaaagtagccgggggctatcccgacccggcggttcttggggagggggccgaacaagaaaagggaggagatggagataacttccccggatttagcttttttgtctttgtttttgttctcaccacttccatcggatgactggagagtacgactcggaccgatg

SEQ ID NO: 2727 - DNA, 203 bp, synthetic construct
  source 1..203: mol_type = other DNA
ggcgcgccagtccttggccgccgccaggtcggcaactttgtccggcgctcccagcggcgctcggcttcctcctgtagtagttgagcgcaggccccgcctcccggccgtgttgtcaaaagggccggggtctcggattggtccagccgccgggacaacacctgctcgactccttcattcaagtgacaccacgactcggaccgatg

SEQ ID NO: 2728 - DNA, 203 bp, synthetic construct
  source 1..203: mol_type = other DNA
ggcgcgccagtcctgtgagcgaggtagcaagagccacccaaacgcccatgcccgaggcagagtcgggggccttggggctcagggaccttccggaagcagcgagtgggaagacgaacagtctgagtattctgatatccggaggtgaaatgaaaggcctggccacgaaatctttcctccacgccgtccatcgactcggaccgatg

SEQ ID NO: 2729 - DNA, 203 bp, synthetic construct
  source 1..203: mol_type = other DNA
ggcgcgccagtccttttcttatctatggacattccaaaacatttaccattagagaggggggatgtcacacgcaggattctgtggggactgtggacttcatcgaggtgtgtgttcgcggaacggacaggtgagatggagacccctggggccgtggggtctcaggggtgcctggtgaattctgcacttaccgactcggaccgatg

SEQ ID NO: 2730 - DNA, 203 bp, synthetic construct
  source 1..203: mol_type = other DNA
ggcgcgccagtccttgcggttcagagctcttggcgagggtggagggaggagtgtcatttctatgtgtaatttctgagccattgtactgtctgggctgggggggacactgtccaagggagtggcccctatgagtttatattttaaccactgcttcaaatctcgatttcactttttttatttatccagttcgactcggaccgatg

SEQ ID NO: 2731 - DNA, 203 bp, synthetic construct
  source 1..203: mol_type = other DNA
ggcgcgccagtcctagctggtattgtagggagtggccgggtattctgggctgggctcttctggagtagggggtcagcaaacattgtctgcaaagggccagatactgaatccagtactttcagtttggcgagccgtgaggtctctgtcgaaactactcaactctgccgtcctagcacaaaagcagccatcgactcggaccgatg

SEQ ID NO: 2732 - DNA, 203 bp, synthetic construct
  source 1..203: mol_type = other DNA
ggcgcgccagtcctggccagacaccaagaaaccaagcgtatctgctctaaaatgacttgttcctggggaatgccttcaaccaaaacacagctagtatttctatgccccaaatccaatcccagtctttcatgatccatgccggcggttgggtggggaggggaatcattggttgggggaagggaggaaaccgactcggaccgatg

SEQ ID NO: 2733 - DNA, 203 bp, synthetic construct
  source 1..203: mol_type = other DNA
ggcgcgccagtcctcccacctccagcccccgccaccgggctccctgggcacccagcaagatctggggctgcagagaacagaagagctggtgcacttaatccagctctgcccttggggggaggaggacctgtgtgtcaggctctgccatgggaacgagtgtaaaccgtggctgtctcctgcagtgagcccgactcggaccgatg

SEQ ID NO: 2734 - DNA, 203 bp, synthetic construct
  source 1..203: mol_type = other DNA
ggcgcgccagtcctaccgcggcaggcacgttgactgttttactgacatcactcaaaagctaaagcaataacattctcctgcgttgctgagtcagctgttcatttgtccgccagctcctggactggatgtgtgaaaggcatcacatttccattttcctccgtgtaaatgttttatgtgttcgcctactgcgactcggaccgatg

SEQ ID NO: 2735 - DNA, 203 bp, synthetic construct
  source 1..203: mol_type = other DNA
ggcgcgccagtcctaatagctctcagttcatgaagcacaccaaacgccggaagctgacggttgaggacttcaacagggccctcagatggagcagcgtggaggctgtgtgtggttacggatcacaggaggcactgcccatgcgccccgccagggagggtgaactctactttcctgaggatcgagaggtgcgactcggaccgatg

SEQ ID NO: 2736 - DNA, 203 bp, synthetic construct
  source 1..203: mol_type = other DNA
ggcgcgccagtcctaacctggtggagctggccctggctaccaacatccccaaaggctgtgctgagacagctgtcagagttcatgtctcctacctggatggcaaagggaacctggcacctcaaggatcggtgcccagtgctgtgtcttcactgacagatgaccttctcaagtactatcaccaggtgactcgactcggaccgatg

SEQ ID NO: 2737 - DNA, 203 bp, synthetic construct
  source 1..203: mol_type = other DNA
ggcgcgccagtcctcgtgctgtgctaggggatgatccgcaactgatgaaggttgcactccaggacttgcagacgaactccaagattggggcactcctgccttactttgtttatgtggtcagtggggtgaaatctgtaagccatgacctggagcaactgcaccggctgctgcaggtggcacggagcctacgactcggaccgatg

SEQ ID NO: 2738 - DNA, 203 bp, synthetic construct
  source 1..203: mol_type = other DNA
ggcgcgccagtccttttcgtaatccgcacctgtgcttggggccctatgtccgctgtctggtgggcagtgtcctctactgtgtcctggagccactggctgcctccatcaaccccctgaatgaccactggactctgcgggatggggctgccctcctgctcagccacatcttctggactcatggggaccttcgactcggaccgatg

SEQ ID NO: 2739 - DNA, 203 bp, synthetic construct
  source 1..203: mol_type = other DNA
ggcgcgccagtccttttggcaccggccagcctgcacccacggctccgcggccgcccggggacaagaaggagccggcggcagccccggactcggtgcggaagatgccgcagctgacggcaagcgccatagtcagcccgcacggcgacgagagcccccggggcagcggcggaggcggccccgcgtcggcccgactcggaccgatg

SEQ ID NO: 2740 - DNA, 203 bp, synthetic construct
  source 1..203: mol_type = other DNA
ggcgcgccagtcctcgctgccgcgggcgccttttccagactgccttccccgcgccgtacgggcctagcccggcctcgcgctacgtgcagaaactgcccatgatcggccgtaccagccgccccgcccgccggtgggcgctctcggactactcgctgtacttgccgctctgagtcagtggccccttcgttcgactcggaccgatg

SEQ ID NO: 2741 - DNA, 203 bp, synthetic construct
  source 1..203: mol_type = other DNA
ggcgcgccagtcctgcatccaggacagaagccaaggcgcttggcttggttgaaggccagtgcgcatgcgcgagtttacccttcgcggactgggcgagctcttgccactcctacctccgggcttcagtcttcgccgcctgttctggtcctttcccgggccgctattggaagaaccgtgaactatggaagcgactcggaccgatg

SEQ ID NO: 2742 - DNA, 203 bp, synthetic construct
  source 1..203: mol_type = other DNA
ggcgcgccagtcctaatgccaggccaagtatggcgcctttgtcaagccagcagtcgtgacggtgggggacttcccggaggaggactacgggttggacgagatatgacacctaaggaattcccctgcttcagctcctagctcagccactgactgcccctcctgtgtgtgcccatggcccttttctcctgcgactcggaccgatg

SEQ ID NO: 2743 - DNA, 203 bp, synthetic construct
  source 1..203: mol_type = other DNA
ggcgcgccagtcctgagatatgacacctaaggaattcccctgcttcagctcctagctcagccactgactgcccctcctgtgtgtgcccatggcccttttctcctgaccccattttaattttattcattttttcctttgccattgatttttgagactcatgcattaaattcactagaaacccagaaagtcgactcggaccgatg

SEQ ID NO: 2744 - DNA, 203 bp, synthetic construct
  source 1..203: mol_type = other DNA
ggcgcgccagtcctgacagaagcaatggccgaggcagaagacaagccgaggtgctggtgaccctgggcgtctgagtggatgattggggctgctgcgctcagaggcctgcctccctgccttccaatgcatataaccccacaccccagccaatgaagacgagaggcagcgtgaacaaagtcatttagaaacgactcggaccgatg

SEQ ID NO: 2745 - DNA, 203 bp, synthetic construct
  source 1..203: mol_type = other DNA
ggcgcgccagtcctgcccccgaggaagtgtaaacaaaagagaaagcatgaatggagtgcctgagagacaagtgtgtcctgtactgcccccacctttagctgggccagcaactgcccggccctgcttctccccacctactcactggtgatctttttttttttacttttttttcccttttcttttccattcgactcggaccgatg

SEQ ID NO: 2746 - DNA, 203 bp, synthetic construct
  source 1..203: mol_type = other DNA
ggcgcgccagtcctccactcccagctgccttgccacccctcccagccctctgcttgccctccacctggcctgctgggagtcagagcccagcaaaacctgtttagacacatggacaagaatcccagcgctacaaggcacacagtccgcttcttcgtcctcagggttgccagcgcttcctggaagtcctgcgactcggaccgatg

SEQ ID NO: 2747 - DNA, 203 bp, synthetic construct
  source 1..203: mol_type = other DNA
ggcgcgccagtcctccacgtcccctatcaggtcctggccctttacaacagcacccgggagctgctggaggagatgcatggggagagggaggaaggctgcacccaggaaaacaccgagtcggaatactatgccaaagaaatccataaattcgacatgatccaggggctggcggagcacaacgaactggccgactcggaccgatg

SEQ ID NO: 2748 - DNA, 203 bp, synthetic construct
  source 1..203: mol_type = other DNA
ggcgcgccagtcctcattgccaaacagcgctatatcggtggcaagaatctgcccacacggggcactgccgagtggctgtcctttgatgtcactgacactgtgcgtgagtggctgttgagaagagagtccaacttaggtctagaaatcagcattcactgtccatgtcacacctttcagcccaatggagacgactcggaccgatg

SEQ ID NO: 2749 - DNA, 203 bp, synthetic construct
  source 1..203: mol_type = other DNA
ggcgcgccagtccttgcagacacaacccacagcacggtgctgggactgtacaacactctgaaccctgaagcatctgcctcgccttgctgcgtgccccaggacctggagcccctgaccatcctgtactatgttgggaggacccccaaagtggagcagctctccaacatggtggtgaagtcttgtaaatgcgactcggaccgatg

SEQ ID NO: 2750 - DNA, 203 bp, synthetic construct
  source 1..203: mol_type = other DNA
ggcgcgccagtccttagctgagaccccacgtgcgacagagagaggggagagagaaccaccactgcctgactgcccgctcctcgggaaacacacaagcaacaaacctcactgagaggcctggagcccacaaccttcggctccgggcaaatggctgagatggaggtttccttttggaacatttctttcttcgactcggaccgatg

SEQ ID NO: 2751 - DNA, 203 bp, synthetic construct
  source 1..203: mol_type = other DNA
ggcgcgccagtcctaggaagggcagagaatggctgggtcagggccagactggaagacacttcagatctgaggttggatttgctcattgctgtaccacatctgctctagggaatctggattatgttatacaaggcaagcattttttttttttttttaaagacaggttacgaagacaaagtcccagaattcgactcggaccgatg

SEQ ID NO: 2752 - DNA, 203 bp, synthetic construct
  source 1..203: mol_type = other DNA
ggcgcgccagtccttctttaagatttgtagctactaagaaagaaaggagctttttttccttgggccttcaaactgaaagaaccgcatgagcctgaagctgcgcatggtcttaacatcaggctgtgcaggaagaagctatctgcagatggatgccagcacacacaaggaagcagagctctggcaacattcgactcggaccgatg

SEQ ID NO: 2753 - DNA, 203 bp, synthetic construct
  source 1..203: mol_type = other DNA
ggcgcgccagtcctactgggctgccacaggaggtgcatgtcctgaatctccgcactgcaggccaggggcctggccagctacagagagaggtcacacttcacctgaatcccatctcctcagtccacatccaccacaagtctgttgtgttcctgctcaactccccacaccccctggtgtggcatctgaagcgactcggaccgatg

SEQ ID NO: 2754 - DNA, 203 bp, synthetic construct
  source 1..203: mol_type = other DNA
ggcgcgccagtcctgtacacatcatcgagctaatcacccccaactctaacccctacagtgctttccaggtggatataacaattgatataagaccttctcaagaggatcttgaagtggtcaaaaatctcatcctgatcttgaagtgcaaaaagtctgtcaactgggtgatcaaatcttttgatgttaagcgactcggaccgatg

SEQ ID NO: 2755 - DNA, 203 bp, synthetic construct
  source 1..203: mol_type = other DNA
ggcgcgccagtcctgatatttccaggagagtctggaatgaagagggagaagatgggctccctcggccaaaggaccctgtcattcccagcatacaactgtttcctggtctcagagagccagaagaggtgcaagggagcgtggatattgccctgtctgtcaaatgtgacaatgagaagatgatcgtggctcgactcggaccgatg

SEQ ID NO: 2756 - DNA, 203 bp, synthetic construct
  source 1..203: mol_type = other DNA
ggcgcgccagtccttgctttatctctccatattcgaaccctgataggatgtctcattacaccattattgagaatatttgtcctaaagatgaatctgtgaaattctacagtcccaagagagtgcactttcctatcccgcaagctgacatggataagaagcgattcagctttgtcttcaagcctgtcttccgactcggaccgatg

SEQ ID NO: 2757 - DNA, 203 bp, synthetic construct
  source 1..203: mol_type = other DNA
ggcgcgccagtcctaacacctcactgctctttctacagtgtgagctgacgctgtgtacgaagatggagaagcacccccagaagttgcctaagtgtgtgcctcctgacgaagcctgcacctcgctggacgcctcgataatctgggccatgatgcagaataagaagacgttcactaagccccttgctgtgcgactcggaccgatg

SEQ ID NO: 2758 - DNA, 203 bp, synthetic construct
  source 1..203: mol_type = other DNA
ggcgcgccagtcctatccaccatgaagcagaatctaaagaaaaaggtccaagcatgaaggaaccaaatccaatttctccaccaattttccatggtctggacaccctaaccgtgatgggcattgcgtttgcagcctttgtgatcggagcactcctgacgggggccttgtggtacatctattctcacacacgactcggaccgatg

SEQ ID NO: 2759 - DNA, 203 bp, synthetic construct
  source 1..203: mol_type = other DNA
ggcgcgccagtcctgagaaagctaaaatggtggtcttctccaccagcccctcacaggcttgggggttttcaatgtgaaacacatgccagtttttaaaatgctgctttgtccaggtgagaacatccataatttggggccctgagttttacccagactcaaggagttggtaaagggttaatagccagatacgactcggaccgatg

SEQ ID NO: 2760 - DNA, 203 bp, synthetic construct
  source 1..203: mol_type = other DNA
ggcgcgccagtcctgtagaaccagtgaggagatgcggccaaagattctttatatctgaaccaagatgtaaaacaagaaatgctttgaggctttctaagcgatcctcctgtctaatttgcacctttgtctggatgcacacttctgaccttgctgccacaacctgtggggtctgatgtgtcccttgatggcgactcggaccgatg

SEQ ID NO: 2761 - DNA, 203 bp, synthetic construct
  source 1..203: mol_type = other DNA
ggcgcgccagtcctgtcggtctccagttggttatctgaatagtgtcaccaattccaccaagacagtgctgagattggaaaagggcactcatttggattgccttacttctcttgccttaaatatatcccatatatttaatatgtcaaaaagggcttgaggtgaatttcattaaatggaataatatgatgcgactcggaccgatg

SEQ ID NO: 2762 - DNA, 203 bp, synthetic construct
  source 1..203: mol_type = other DNA
ggcgcgccagtcctccactttgcagctaaaataagctcagtgatacctccttgttaaaaaaaaaaaaaaaaaaaaagaatgccaggggggaattatcatgctaaattattttactgctgaagatagcttcattgcaaattattctttttccagaatttcccccaaacaacttagaattccataagtagcgactcggaccgatg

SEQ ID NO: 2763 - DNA, 203 bp, synthetic construct
  source 1..203: mol_type = other DNA
ggcgcgccagtcctaacaagatagattctacccccaaaatattcataagcaaatcccactgcccttaaaataaggaagttatgcctggttgtctgtgaatggaacctcagtaggtaatcctgatgaagcttaaaaccttagggcagtgtctacatgggaaacaagtatgtggaaattgacaatcatttcgactcggaccgatg

SEQ ID NO: 2764 - DNA, 203 bp, synthetic construct
  source 1..203: mol_type = other DNA
ggcgcgccagtcctggctacacccttaatttgcagaggccattttgttgtttgtttgatgctgaagctgttgttaaaatgccccaaactccaaggcagattgtctgtataatacgctatagcttttcaccatgtggtgtttaccagctgttactctgtattttaaaaagccagagatttcttctgtctcgactcggaccgatg

SEQ ID NO: 2765 - DNA, 203 bp, synthetic construct
  source 1..203: mol_type = other DNA
ggcgcgccagtcctatgattgtactgctggttgtgttaacagagcacattttgttgggtgagtcctatgtgatttttttcatgtttgttttatctgggggttgttcatgaaactgacagatgtttttctaaaaaggactattatcagtttccaaatacaatacttctctcttctggtttttcctgaatcgactcggaccgatg

SEQ ID NO: 2766 - DNA, 203 bp, synthetic construct
  source 1..203: mol_type = other DNA
ggcgcgccagtcctgagcctgattttgttgctggttttcatcatctatgagggtaaaacgagtacccttaaaatccctgtggccagtttgaacacccctgttgtattcttttctctgttcagtgtgtcagctattttgtgaagatgcttagatgtatagttttgataaccacagttttaaatcttttacgactcggaccgatg

SEQ ID NO: 2767 - DNA, 203 bp, synthetic construct
  source 1..203: mol_type = other DNA
ggcgcgccagtcctgagagcccccggtggggccggcggaggagcgcccttccccccgcgcgctgattgctgtggcgtcctgcccgtccccgcccgcgtgtgtgcgagggagggcgagtgcgccgggtcggcctgatgggggtaatcgagggtttcggggacgccgagcggcactttcctcttcccagccgactcggaccgatg

SEQ ID NO: 2768 - DNA, 203 bp, synthetic construct
  source 1..203: mol_type = other DNA
ggcgcgccagtcctcccattatgtgattgccatctttgccctgatgagctcctgtttagccactgcaggtccagagcctggtgcactgtgtgaactgtcacctgtcagtgcctcccatcctgtccaggccttgatggagagcttcactgttttgtcaggctgtgccagcagaggcacaactgggctgccgactcggaccgatg

SEQ ID NO: 2769 - DNA, 203 bp, synthetic construct
  source 1..203: mol_type = other DNA
ggcgcgccagtcctttgccactggggtctccagactgtttttggtgtctgagggttctgtggtccagttttcatcagcaaacttctccttgacagcagaaacagaagaaaggaacttcccccatggaaatgaacatctgttaaattgggcccgaaaagagtatggagcagttacttcattcaccgaaccgactcggaccgatg

SEQ ID NO: 2770 - DNA, 203 bp, synthetic construct
  source 1..203: mol_type = other DNA
ggcgcgccagtcctaagcagaatctaaagaaaaaggtccaagcatgaaggaaccaaatccaatttctccaccaattttccatggtctggacaccctaaccgtgatgggcattgcgtttgcagcctttgtgatcggagcactcctgacgggggccttgtggtacatctattctcacacaggggagacagcgactcggaccgatg

SEQ ID NO: 2771 - DNA, 203 bp, synthetic construct
  source 1..203: mol_type = other DNA
ggcgcgccagtcctcaggaaggcagcaagtccccacctccccgccagcctcggaaaacagcagtgctgcccacagcatcggcagcacgcagagcacgccttgctccagcagcagcacggcctagcccaacccagcccaacccggcccaacccagcccagcccagctcagctcagctactgccaagggccgactcggaccgatg

SEQ ID NO: 2772 - DNA, 203 bp, synthetic construct
  source 1..203: mol_type = other DNA
ggcgcgccagtcctttttctccctagcttctcattacagtatttctaattgcttcacactttacagttttaatacaaagtacaagctctacttttataacgtgtactacaagtttctttaaaagtattgttgtatttcagctgaactcttgtatctgcagtcttttgttatttctgcaggctacaccccgactcggaccgatg

SEQ ID NO: 2773 - DNA, 203 bp, synthetic construct
  source 1..203: mol_type = other DNA
ggcgcgccagtccttttccgtctgggcttcttgcattctgggacagccaagtctgtgacttgcacgtactcccctgccctcaacaagatgttttgccaactggccaagacctgccctgtgcagctgtgggttgattccacacccccgcccggcacccgcgtccgcgccatggccatctacaagcagtccgactcggaccgatg

SEQ ID NO: 2774 - DNA, 203 bp, synthetic construct
  source 1..203: mol_type = other DNA
ggcgcgccagtcctacagcacatgacggaggttgtgaggcgctgcccccaccatgagcgctgctcagatagcgatggtctggcccctcctcagcatcttatccgagtggaaggaaatttgcgtgtggagtatttggatgacagaaacacttttcgacatagtgtggtggtgccctatgagccgcctgacgactcggaccgatg

SEQ ID NO: 2775 - DNA, 203 bp, synthetic construct
  source 1..203: mol_type = other DNA
ggcgcgccagtcctggttggctctgactgtaccaccatccactacaactacatgtgtaacagttcctgcatgggcggcatgaaccggaggcccatcctcaccatcatcacactggaagactccagtggtaatctactgggacggaacagctttgaggtgcgtgtttgtgcctgtcctgggagagaccgcgactcggaccgatg

SEQ ID NO: 2776 - DNA, 203 bp, synthetic construct
  source 1..203: mol_type = other DNA
ggcgcgccagtcctaattttctctaacttcaaggcccatatctgtgaaatgctggcatttgcacctacctcacagagtgcattgtgagggttaatgaaataatgtacatctggccttgaaaccaccttttattacatggggtctagaacttgacccccttgagggtgcttgttccctctccctgttggcgactcggaccgatg

SEQ ID NO: 2777 - DNA, 203 bp, synthetic construct
  source 1..203: mol_type = other DNA
ggcgcgccagtccttggatccaccaagacttgttttatgctcagggtcaatttcttttttcttttttttttttttttttctttttctttgagactgggtctcgctttgttgcccaggctggagtggagtggcgtgatcttggcttactgcagcctttgcctccccggctcgagcagtcctgcctcagccgactcggaccgatg

SEQ ID NO: 2778 - DNA, 203 bp, synthetic construct
  source 1..203: mol_type = other DNA
ggcgcgccagtcctctccggagtagctgggaccacaggttcatgccaccatggccagccaacttttgcatgttttgtagagatggggtctcacagtgttgcccaggctggtctcaaactcctgggctcaggcgatccacctgtctcagcctcccagagtgctgggattacaattgtgagccaccacgtcgactcggaccgatg

SEQ ID NO: 2779 - DNA, 203 bp, synthetic construct
  source 1..203: mol_type = other DNA
ggcgcgccagtcctctcccctgccctcaacaagatgttttgccaactggccaagacctgccctgtgcagctgtgggttgattccacacccccgcccggcacccgcgtccgcgccatggccatctacaagcagtcacagcacatgacggaggttgtgaggcgctgcccccaccatgagcgctgctcagacgactcggaccgatg

SEQ ID NO: 2780 - DNA, 203 bp, synthetic construct
  source 1..203: mol_type = other DNA
ggcgcgccagtcctgccaggggggagcagggctcactccagccacctgaagtccaaaaagggtcagtctacctcccgccataaaaaactcatgttcaagacagaagggcctgactcagactgacattctccacttcttgttccccactgacagcctcccacccccatctctccctcccctgccattttcgactcggaccgatg

SEQ ID NO: 2781 - DNA, 203 bp, synthetic construct
  source 1..203: mol_type = other DNA
ggcgcgccagtcctgggttttgggtctttgaacccttgcttgcaataggtgtgcgtcagaagcacccaggacttccatttgctttgtcccggggctccactgaacaagttggcctgcactggtgttttgttgtggggaggaggatggggagtaggacataccagcttagattttaaggtttttactgtcgactcggaccgatg

SEQ ID NO: 2782 - DNA, 203 bp, synthetic construct
  source 1..203: mol_type = other DNA
ggcgcgccagtcctcaagtctctgctggcccagccaaaccctgtctgacaacctcttggtgaaccttagtacctaaaaggaaatctcaccccatcccacaccctggaggatttcatctcttgtatatgatgatctggatccaccaagacttgttttatgctcagggtcaatttcttttttctttttttcgactcggaccgatg

SEQ ID NO: 2783 - DNA, 203 bp, synthetic construct
  source 1..203: mol_type = other DNA
ggcgcgccagtccttttttttttttctttttctttgagactgggtctcgctttgttgcccaggctggagtggagtggcgtgatcttggcttactgcagcctttgcctccccggctcgagcagtcctgcctcagcctccggagtagctgggaccacaggttcatgccaccatggccagccaacttttgccgactcggaccgatg

SEQ ID NO: 2784 - DNA, 203 bp, synthetic construct
  source 1..203: mol_type = other DNA
ggcgcgccagtcctatctccgtccctcagccgctcacagcctcctcccagcgcccatcgccttgagctgcccactacctctagactgccctcccgggctggcgtcccacggagtctcagccgcgcaccccttcctcgcgttaccctccttccggacagcaccccctcccttctccggtagctcctacccgactcggaccgatg

SEQ ID NO: 2785 - DNA, 203 bp, synthetic construct
  source 1..203: mol_type = other DNA
ggcgcgccagtcctcctgcctgtgcgggcctcgtccccgcgcccagccctcggtgctgcctccgacagcgccgcgctctctcagccgcccccctgcccctcgggcccccctctctgctgcccctggcgccatggcgtgcagcctcaaggacgagctgctgtgctccatctgcctgagcatctaccaggcgactcggaccgatg

SEQ ID NO: 2786 - DNA, 203 bp, synthetic construct
  source 1..203: mol_type = other DNA
ggcgcgccagtcctacccggtgagcctgggctgcgagcattacttctgccgccgctgcatcacggagcactgggtgcggcaggaggcgcagggcgcccgcgactgccccgagtgccggcgcacgttcgccgagcccgcgctggcgcccagcctcaagctggccaacatcgtggagcgctacagctcctcgactcggaccgatg

SEQ ID NO: 2787 - DNA, 203 bp, synthetic construct
  source 1..203: mol_type = other DNA
ggcgcgccagtccttcccgctggacgccatcctcaacgcgcgccgcgccgcgcgaccctgccaggcgcacgacaaggtcaagctcttctgcctcagggaccgcgcgcttctctgcttcttctgcgacgagcctgcactgcacgagcagcatcaggtcaccggcatcgacgacgccttcgacgagctgccgactcggaccgatg

SEQ ID NO: 2788 - DNA, 203 bp, synthetic construct
  source 1..203: mol_type = other DNA
ggcgcgccagtcctagagggagctgaaggaccaacttcaggcccttcaagacagcgagcgggaacacaccgaagcgctgcagctgctcaagcgacaactggcggagaccaagtcttccaccaagagcctgcggaccactatcggcgaggccttcgagcggctgcaccggctgctgcgtgaacgccagacgactcggaccgatg

SEQ ID NO: 2789 - DNA, 203 bp, synthetic construct
  source 1..203: mol_type = other DNA
ggcgcgccagtcctaggccatgctagaggagctggaggcggacacggcccgcacgctgaccgacatcgagcagaaagtccagcgctacagccagcagctgcgcaaggtccaggagggagcccagatcctgcaggagcggctggctgaaaccgaccggcacaccttcctggctggggtggcctcactgtcgactcggaccgatg

SEQ ID NO: 2790 - DNA, 203 bp, synthetic construct
  source 1..203: mol_type = other DNA
ggcgcgccagtcctccgagcggctcaagggaaaaatccatgagaccaacctcacatatgaagacttcccgacctccaagtacacaggccccctgcagtacaccatctggaagtccctgttccaggacatccacccagtgccagccgccctaaccctggacccgggcacagcccaccagcgcctgatcccgactcggaccgatg

SEQ ID NO: 2791 - DNA, 203 bp, synthetic construct
  source 1..203: mol_type = other DNA
ggcgcgccagtcctcacacgaagccgcaagccgcaagggcagcatccagatccagcccagccgcggcttctactgcatcgtgatgcacgatggcaaccagtacagcgcctgcacggagccctggacgcggcttaacgtccgggacaagcttgacaaggtgggtgtcttcctggactatgaccaaggctcgactcggaccgatg

SEQ ID NO: 2792 - DNA, 203 bp, synthetic construct
  source 1..203: mol_type = other DNA
ggcgcgccagtcctcctcctgggaccactgccacctgcaagagccctgcccaggagatagaagacctggactccagcccaccgtggccactggagacctcaggccagttgtttaccctccagcctccagtctgtaaaatggaggttgcattccctacttcctaaactctcttccagcatcgatgttctcgactcggaccgatg

SEQ ID NO: 2793 - DNA, 203 bp, synthetic construct
  source 1..203: mol_type = other DNA
ggcgcgccagtcctaaaagcaactgcaggacaagcctccctggatgatcgaggtccccagtagctctgaacaagagtccagccaaccctcttcagccaggcctctgtgacctgctagggtgcaggaggcttccagaagcagttgttgtaattaggacccaagcactgggaggggctgttggctggacccgactcggaccgatg

SEQ ID NO: 2794 - DNA, 203 bp, synthetic construct
  source 1..203: mol_type = other DNA
ggcgcgccagtcctttcatcatgtctgttgtgaccaggaaagctgcccccatctgcaggaagccactatgccagaaagctgctgactgcagaactaggctccctctgccagggtccgtgccagccaatagatgtcctgaggcctgcccctctcccacttcactcagttcccaaatctaaatttttacacgactcggaccgatg

SEQ ID NO: 2795 - DNA, 203 bp, synthetic construct
  source 1..203: mol_type = other DNA
ggcgcgccagtcctattagggctgccgttttctgtttctccctgggctgcggaaagccagaagattttatctagcttatacaaggctgctggtgttccctctttttttccacgagggtgtttttggctgcaattgcatgaaatcccaatggtgtagaccagtggcgatggatctaggagtttaccaaccgactcggaccgatg

SEQ ID NO: 2796 - DNA, 203 bp, synthetic construct
  source 1..203: mol_type = other DNA
ggcgcgccagtcctcggctccctacccctcacttccaagggttctctctcctgcttgcgcttagtgtcctacatggggttgtgaagcgatggagctcctcactggactcgcctctctcctctcctccccccaggaggaacttgaaaggagggtaaaaagactaaaatgagggggaacagagttcactgcgactcggaccgatg

SEQ ID NO: 2797 - DNA, 203 bp, synthetic construct
  source 1..203: mol_type = other DNA
ggcgcgccagtccttacaaatttgacaactgtcaccaaaattcataaaaaacaatagtactgtgcctctttcttctcaaacaatggatgacacaaaactatgagagtgacaaaatggtgacaggtagctgggacctaggctatcttaccatgaaggttgttttgcttattgtatatttgtgtatgtagcgactcggaccgatg

SEQ ID NO: 2798 - DNA, 203 bp, synthetic construct
  source 1..203: mol_type = other DNA
ggcgcgccagtcctctcactttgtgtaatctgaaatctagctgctgaatacgctgaagtaaatccttgttcactgaagtctttcaattgagctggttgaatactttgaaaaatgctcagttctaactaatgaaatggatttcccagtaggggtttctgcatatcacctgtatagtagttatatgcatacgactcggaccgatg

SEQ ID NO: 2799 - DNA, 203 bp, synthetic construct
  source 1..203: mol_type = other DNA
ggcgcgccagtccttagtaaaatcctgaagggcagtggaatgattggaaaagtaggggcgtgatttgactgcatgaagtaaaaggaaattgacacattgagttgttcagcaggtaagagaagagacagtggaggagtccagctcaattctaactactgtgtgacttggacaggttgcttcactcctggcgactcggaccgatg

SEQ ID NO: 2800 - DNA, 203 bp, synthetic construct
  source 1..203: mol_type = other DNA
ggcgcgccagtcctcctttggctgaggaggaggagaaggaggaatcgcgccaggcggagcgtcaggtcccgttttcctctccggcgtctccaatacaaagattacggtgcagaaggaaattgcactcgtctcctccgcgcccccggtacccaacacaatgcaccagccgcctgagtccaccgccgcggcgactcggaccgatg

SEQ ID NO: 2801 - DNA, 203 bp, synthetic construct
  source 1..203: mol_type = other DNA
ggcgcgccagtcctccgccgccgctgcagacattagcgctaggaagatggcgcacccggcaatgttccctcgaaggggcagcggtagtggcagcgcctctgctctcaatgcagcaggtaccggcgtcggtagtaatgccacatcttccgaggattttccgcctccgtcgctgcttcagccgccgcccccgactcggaccgatg

SEQ ID NO: 2802 - DNA, 203 bp, synthetic construct
  source 1..203: mol_type = other DNA
ggcgcgccagtcctctgcagcatcttctacgtcgggaccacagcctccgcctccacaaagcctgaacctcctttcgcaggctcagctgcaggcacagcctcttgcgccaggcggaactcaaatgaaaaagaaaagtggcttccagataactagcgttactcctgctcagatctccgctagtatcagctcgactcggaccgatg

SEQ ID NO: 2803 - DNA, 203 bp, synthetic construct
  source 1..203: mol_type = other DNA
ggcgcgccagtcctctgtggccagtgcatccattactggtgggccaccctcaagcccagtatctagaaaactctctacaactggaagctctgacagtatcacaccagttgcaccaacttctgctgtatcatccagtggttcacctgcatctgtaatgactaatatgcgtgctccaagtactacaggtgcgactcggaccgatg

SEQ ID NO: 2804 - DNA, 203 bp, synthetic construct
  source 1..203: mol_type = other DNA
ggcgcgccagtccttaggtcagcagccttccatttccagtttggctcaaccccagctaccatattctcaggcggctcctccagtgcaaactccccttccaggggcaccaccaccccaacagttacagtatggacaacagcaaccaatggtttctacacagatggccccaggccatgtcaaatcagtgacgactcggaccgatg

SEQ ID NO: 2805 - DNA, 203 bp, synthetic construct
  source 1..203: mol_type = other DNA
ggcgcgccagtcctctcaaaatcctgcttcagagtatgtacaacagcagccaattcttcaaacagcaatgtcctccggacagcccagttctgcaggagtaggagcaggaacaacagtgattcctgtggctcagccacagggtatccagctgccagtgcagcccacagcagtcccagcacaacctgcagcgactcggaccgatg

SEQ ID NO: 2806 - DNA, 203 bp, synthetic construct
  source 1..203: mol_type = other DNA
ggcgcgccagtcctcagatgggagtagcagcagcctagcagcctctgcttctcttttcccgttgaaggtgctaccgctgacgacacccctggtggatggcgaggatgagagctcctctggtgcaagtgtggtagctattgacaacaaaatcgagcaagctatggatctagtgaaaagccatttgatgtcgactcggaccgatg

SEQ ID NO: 2807 - DNA, 203 bp, synthetic construct
  source 1..203: mol_type = other DNA
ggcgcgccagtcctatgcggtcagagaagaagtggaggtcctcaaagagcaaatcaaagaactaatagagaaaaattcccagctggagcaggagaacaatctgctgaagacactggccagtcctgagcagcttgcccagtttcaggcccagctgcagactggctccccccctgccaccacccagccaccgactcggaccgatg

SEQ ID NO: 2808 - DNA, 203 bp, synthetic construct
  source 1..203: mol_type = other DNA
ggcgcgccagtcctagggcaccacacagccccccgcccagccagcatcgcagggctcaggaccaaccgcatagctgcctatgcccccgcagaactggctgctgcgtgtgaactgaacagacggagaagatgtgctagggagaatctgcctccacagtcacccatttcattgctcgctgcgaaagagaccgactcggaccgatg

SEQ ID NO: 2809 - DNA, 203 bp, synthetic construct
  source 1..203: mol_type = other DNA
ggcgcgccagtccttccaggtaaagttaacaatttgactagtaaaatcctgaagggcagtggaatgattggaaaagtaggggcgtgatttgactgcatgaagtaaaaggaaattgacacattgagttgttcagcaggtaagagaagagacagtggaggagtccagctcaattctaactactgtgtgaccgactcggaccgatg

SEQ ID NO: 2810 - DNA, 203 bp, synthetic construct
  source 1..203: mol_type = other DNA
ggcgcgccagtcctttggacaggttgcttcactcctggacggatgtaggggtttgaaagagatgatctcttacattcccctttggctttaaaattctaggagtccttgaaaatcttaattttttactgaactgagaggaagaaggagccttattctgtgtataattggaataagcagatctaggatcacgactcggaccgatg

SEQ ID NO: 2811 - DNA, 203 bp, synthetic construct
  source 1..203: mol_type = other DNA
ggcgcgccagtcctagtggccccctgcccagtaggaattggaccaatcccaagttctaaggcttgtcttaagtccttgcagaacaaggacaaactttctgaatcattcatttctctcatctagagctggtgggagattgagaggtgaatgggacatccaagatccctaaaaagaattgttcgatagcgcgactcggaccgatg

SEQ ID NO: 2812 - DNA, 203 bp, synthetic construct
  source 1..203: mol_type = other DNA
ggcgcgccagtccttgcatgtgttataaagtggtgacacgggcatcctgttgaaatgatggatggctcactgccataggctgatagcagttgtcataaagatattttgggggaatttgaaaaggacgtaaagaaaaatctttcatattggcttgttggttatataacttcaaatttaataaaggaatacgactcggaccgatg

SEQ ID NO: 2813 - DNA, 203 bp, synthetic construct
  source 1..203: mol_type = other DNA
ggcgcgccagtcctgccactgcagactccagagccctgcttcaggcctatatagatggtcactctgtggtcatcttcagtaggtccacatgcacacgctgtactgaggtaaagaagttatttaaatctctgtgtgttccttattttgtgcttgaacttgatcaaacagaggacggtcgggccctggaacgactcggaccgatg

SEQ ID NO: 2814 - DNA, 203 bp, synthetic construct
  source 1..203: mol_type = other DNA
ggcgcgccagtcctagacagttcgtaccaattaaagttgaacaaattgaagcagggacaccaggccgactcagagtagtagctcagtccaccaatagtgaggaaatcattgaaggagaatataatacggtgatgctggcaataggaagagatgcttgcacaagaaaaattggcttagaaaccgtagggcgactcggaccgatg

SEQ ID NO: 2815 - DNA, 203 bp, synthetic construct
  source 1..203: mol_type = other DNA
ggcgcgccagtcctgtgaagataaatgaaaagactggaaaaatacctgtcacagatgaagaacagaccaatgtgccttacatctatgccattggcgatatattggaggataaggtggagctcaccccagttgcaatccaggcaggaagattgctggctcagaggctctatgcaggttccactgtcaagcgactcggaccgatg

SEQ ID NO: 2816 - DNA, 203 bp, synthetic construct
  source 1..203: mol_type = other DNA
ggcgcgccagtcctgcaaaaataatctgtaatactaaagacaatgaacgtgttgtgggctttcacgtactgggtccaaatgctggagaagttacacaaggctttgcagctgcgctcaaatgtggactgaccaaaaagcagctggacagcacaattggaatccaccctgtctgtgcagaggtattcacacgactcggaccgatg

SEQ ID NO: 2817 - DNA, 203 bp, synthetic construct
  source 1..203: mol_type = other DNA
ggcgcgccagtcctacattgtctgtgaccaagcgctctggggcaagcatcctccaggctggctgctgaggttaagccccagtgtggatgctgttgccaagactgcaaaccactggctcgtttccgtgcccaaatccaaggcgaagttttctagagggttcttgggctcttggcacctgcgtgtcctgtcgactcggaccgatg

SEQ ID NO: 2818 - DNA, 203 bp, synthetic construct
  source 1..203: mol_type = other DNA
ggcgcgccagtcctgcaaggtgtcttgttgcatggaagggatagtttggctcccttggaggctatgtaggcttgtcccgggaaagagaactgtcctgcagctgaaatggactgttctttactgacctgctcagcagtttcttctctcatatattcccaaaacaagtacatctgcgatcaactctagcccgactcggaccgatg

SEQ ID NO: 2819 - DNA, 203 bp, synthetic construct
  source 1..203: mol_type = other DNA
ggcgcgccagtcctaaatttgcccctgtgtgctacatgatggatgattattattttaaggtctgtttaggaagggaaatggctacttggccagccattgcctggcatttggtagtatagtatgattctcaccattatttgtcatggaggcagacatacaccagaaatgggggagaaacagtacatatccgactcggaccgatg

SEQ ID NO: 2820 - DNA, 203 bp, synthetic construct
  source 1..203: mol_type = other DNA
ggcgcgccagtcctcttgaagcttctttttcattcctgctactctacctgtatttctcagttgcagcactgagtggtcaaaatacatttctgggccacctcagggaacccatgcatctgcctggcatttaggcagcagagcccctgaccgtcccccacagggctctgcctcacgtcctcatctcatttcgactcggaccgatg

SEQ ID NO: 2821 - DNA, 203 bp, synthetic construct
  source 1..203: mol_type = other DNA
ggcgcgccagtccttcacccaattaggagctctcagcttacgaggcaattagcataggttgccagggctgcacgaggagtggatttctgctttgtcattctgactctggcagttagcccgcccgctcggcgcagggcgtggcttctcgtagccattaggaaacagcaaccctttcacctcagttttctcgactcggaccgatg

SEQ ID NO: 2822 - DNA, 203 bp, synthetic construct
  source 1..203: mol_type = other DNA
ggcgcgccagtccttcactccggcatttgcagcagagcgaaaggtggtcgagtcctgaaggagggcctgatgtcttcatcattctcaaattcttaggacggtcgggccctggaaggaacgctctcggaattggccgcggaaaccgatctgcccgttgtgtttgtgaaacagagaaagataggcggccacgactcggaccgatg

SEQ ID NO: 2823 - DNA, 203 bp, synthetic construct
  source 1..203: mol_type = other DNA
ggcgcgccagtcctcgtcactgttatggttaggtccattcttcttagaggatttgaccaggacatggccaacaaaattggtgaacacatggaagaacatggcatcaagtttataagacagttcgtaccaattaaagttgaacaaattgaagcagggacaccaggccgactcagagtagtagctcagtccgactcggaccgatg

SEQ ID NO: 2824 - DNA, 203 bp, synthetic construct
  source 1..203: mol_type = other DNA
ggcgcgccagtcctagctgtggagaagtttggggaagaaaatattgaggtttaccatagttacttttggccattggaatggacgattccgtcaagagataacaacaaatgttatgcaaaaataatctgtaatactaaagacaatgaacgtgttgtgggctttcacgtactgggtccaaatgctggagacgactcggaccgatg

SEQ ID NO: 2825 - DNA, 203 bp, synthetic construct
  source 1..203: mol_type = other DNA
ggcgcgccagtcctagttacacaaggctttgcagctgcgctcaaatgtggactgaccaaaaagcagctggacagcacaattggaatccaccctgtctgtgcagaggtattcacaacattgtctgtgaccaagcgctctggggcaagcatcctccaggctggctgctgaggttaagccccagtgtggatcgactcggaccgatg

SEQ ID NO: 2826 - DNA, 203 bp, synthetic construct
  source 1..203: mol_type = other DNA
ggcgcgccagtcctgctgttgccaagactgcaaaccactggctcgtttccgtgcccaaatccaaggcgaagttttctagagggttcttgggctcttggcacctgcgtgtcctgtgcttaccaccgcccaaggcccccttggatctcttggataggagttggtgaatagaaggcaggcagcatcacactcgactcggaccgatg

SEQ ID NO: 2827 - DNA, 203 bp, synthetic construct
  source 1..203: mol_type = other DNA
ggcgcgccagtcctgccagccattgcctggcatttggtagtatagtatgattctcaccattatttgtcatggaggcagacatacaccagaaatgggggagaaacagtacatatctttctgtctttagtttattgtgtgctggtctaagcaagctgagatcatttgcaatggaaaacacgtaacttgttcgactcggaccgatg

SEQ ID NO: 2828 - DNA, 203 bp, synthetic construct
  source 1..203: mol_type = other DNA
ggcgcgccagtccttctgggccacctcagggaacccatgcatctgcctggcatttaggcagcagagcccctgaccgtcccccacagggctctgcctcacgtcctcatctcatttggctgtgtaaagaaatgggaaaagggaaaaggagagagcaattgaggcagttgaccatattcagttttatttatcgactcggaccgatg

SEQ ID NO: 2829 - DNA, 203 bp, synthetic construct
  source 1..203: mol_type = other DNA
ggcgcgccagtcctttatttttaatttgtttttttctccaagtccaccagtctctgaaattagaacagtaggcggtatgagataatcaggcctaatcatgttgtgattctcttttcttagtggagtggaatgttctatccccacaagaaggattatatcttatagacttgtcttgttcagattctgtacgactcggaccgatg

SEQ ID NO: 2830 - DNA, 203 bp, synthetic construct
  source 1..203: mol_type = other DNA
ggcgcgccagtcctttccctccatatgtgtgaataattgagttgattttatagtgaagtaccttatgagccatacttaagggtttctgagagggactatgaagtttttcctggcttaaattcaattaagttttcattatagggtcactatgacatgaaaaggaaccagtatgaacacttttatacttacgactcggaccgatg

SEQ ID NO: 2831 - DNA, 203 bp, synthetic construct
  source 1..203: mol_type = other DNA
ggcgcgccagtcctaccacctacagttagatttgtctctaagatgttccatccaaatgtctatgcagatggtagtatatgtctggacatacttcagaaccgttggagtccaacctatgatgtgtcttccattctaacatccatacagtctctgttggatgaacccaatcccaatagtccagcaaacagcgactcggaccgatg

SEQ ID NO: 2832 - DNA, 203 bp, synthetic construct
  source 1..203: mol_type = other DNA
ggcgcgccagtccttaactgacacatcctctctttgcaagctgctgactgggcacactcatgccaagtttcagaattattggtcttctgggtttttgctttttaaaagaggtgtgggagcagaggaatggaaacaatcgtgagtttttgagctagggaaagttggagctcctttaatctttttaaaggcgactcggaccgatg

SEQ ID NO: 2833 - DNA, 203 bp, synthetic construct
  source 1..203: mol_type = other DNA
ggcgcgccagtcctccaatcccaatagtccagcaaacagccaggctgctcagctgtaccaggagaacaaacgggaatatgaaaagcgtgtttctgcaatagtagaacaaagctggcgtgattgttgaccccgggtacagtttaaagaagctggccataagaaaaatatatattgatgtgtttgtcacccgactcggaccgatg

SEQ ID NO: 2834 - DNA, 203 bp, synthetic construct
  source 1..203: mol_type = other DNA
ggcgcgccagtcctggagctcctttaatctttttaaaggatcagtgctgccctaagtgaataaactcaattgtccatctttattttagagttttaatgaattcaaggaagggagcatagcatatctgtggcaaactattttccactcaaatcctgagttattgctgcatgctttaatttcttccctttcgactcggaccgatg

SEQ ID NO: 2835 - DNA, 203 bp, synthetic construct
  source 1..203: mol_type = other DNA
ggcgcgccagtcctaatttcccaaattcaacaaatcttccaagaaatccatccatggcagattatgaagcacggatctttacttttgggacatggatatactcagttaacaaggagcagcttgcaagagctggattttatgctttaggtgaaggtgataaagtaaagtgctttcactgtggaggagggcgactcggaccgatg

SEQ ID NO: 2836 - DNA, 203 bp, synthetic construct
  source 1..203: mol_type = other DNA
ggcgcgccagtcctctaactgattggaagcccagtgaagacccttgggaacaacatgctaaatggtatccagggtgcaaatatctgttagaacagaagggacaagaatatataaacaatattcatttaactcattcacttgaggagtgtctggtaagaactactgagaaaacaccatcactaactagacgactcggaccgatg

SEQ ID NO: 2837 - DNA, 203 bp, synthetic construct
  source 1..203: mol_type = other DNA
ggcgcgccagtcctagaattgatgataccatcttccaaaatcctatggtacaagaagctatacgaatggggttcagtttcaaggacattaagaaaataatggaggaaaaaattcagatatctgggagcaactataaatcacttgaggttctggttgcagatctagtgaatgctcagaaagacagtatgcgactcggaccgatg

SEQ ID NO: 2838 - DNA, 203 bp, synthetic construct
  source 1..203: mol_type = other DNA
ggcgcgccagtccttgtcccatgtgctacacagtcattactttcaagcaaaaaatttttatgtcttaatctaactctatagtaggcatgttatgttgttcttattaccctgattgaatgtgtgatgtgaactgactttaagtaatcaggattgaattccattagcatttgctaccaagtaggaaaaaacgactcggaccgatg

SEQ ID NO: 2839 - DNA, 203 bp, synthetic construct
  source 1..203: mol_type = other DNA
ggcgcgccagtccttttctaagtgtaagtgaattaatcatctggattttttattcttttcagataggcttaacaaatggagctttctgtatataaatgtggagattagagttaatctccccaatcacataatttgttttgtgtgaaaaaggaataaattgttccatgctggtggaaagatagagattgcgactcggaccgatg

SEQ ID NO: 2840 - DNA, 203 bp, synthetic construct
  source 1..203: mol_type = other DNA
ggcgcgccagtccttttttagaggttggttgttgtgttttaggattctgtccattttcttttaaagttataaacacgtacttgtgcgaattatttttttaaagtgatttgccatttttgaaagcgtatttaatgatagaatactatcgagccaacatgtactgacatggaaagatgtcaaagatatgtcgactcggaccgatg

SEQ ID NO: 2841 - DNA, 203 bp, synthetic construct
  source 1..203: mol_type = other DNA
ggcgcgccagtcctgggccttttcactttctacttttttcattttgttctgttcgaattttttataagtatgtattacttttgtaatcagaatttttagaaagtattttgctgatttaaaggcttaggcatgttcaaacgcctgcaaaactacttatcactcagctttagtttttctaatccaagaagcgactcggaccgatg

SEQ ID NO: 2842 - DNA, 203 bp, synthetic construct
  source 1..203: mol_type = other DNA
ggcgcgccagtcctaaacctcttggaaattataaaaatattggcaagaaaagaagaatagttgtttaaatattttttaaaaaacacttgaataagaatcagtagggtataaactagaagtttaaaaatgcttcatagaacgtccagggtttacattacaagattctcacaacaaacctattgtagaggcgactcggaccgatg

SEQ ID NO: 2843 - DNA, 203 bp, synthetic construct
  source 1..203: mol_type = other DNA
ggcgcgccagtcctcaagtcaggtaggtagttcaatctagttgttagccaaggactcaaggactgaattgttttaacataaggcttttcctgttctgggagccgcacttcattaaaattcttctaaaacttgtatgtttagagttaagcaagactttttttcttcctctccatgagttgtgaaatttacgactcggaccgatg

SEQ ID NO: 2844 - DNA, 203 bp, synthetic construct
  source 1..203: mol_type = other DNA
ggcgcgccagtcctcttacatgataactcagtgatgcttactcatagtttttggtgtttctcatagataagatataaatcagctgggcgcggtggctcatgcctgtaatcccagcactttgggaggccgaggcgggcagatcacctgaggtcgggaggtcgagaccagcctgaccaacatggagaaaccgactcggaccgatg

SEQ ID NO: 2845 - DNA, 203 bp, synthetic construct
  source 1..203: mol_type = other DNA
ggcgcgccagtcctcccgtctctactaaaaatacaaaattagctgggcgtggtggctcatgcctgtaatcccagctacttgggaggctgaggcaggagaatcgcttgaacccaggaggcggaggttgtggtgagcgaagatcgtgccattgcactccagcctgggcaacaagagcaaaactctgtctccgactcggaccgatg

SEQ ID NO: 2846 - DNA, 203 bp, synthetic construct
  source 1..203: mol_type = other DNA
ggcgcgccagtcctcaaaaaaaaaaaaagcaattatttttaaaccaacctaatatattgtattaggtattaaagtcatctggacatgaattaaagtatatgatgccagcctggacaaaaggcaaaaccctgtctctacaaaaaatacaaaaattagctgggcatggtggtgtgtgcctgtagtcctggcgactcggaccgatg

SEQ ID NO: 2847 - DNA, 203 bp, synthetic construct
  source 1..203: mol_type = other DNA
ggcgcgccagtcctggaagcagagatcattttgccttagacaggccatctgagacacatgcagactatcttttgagaactgggcaggttgtagatatatcagacaccatatacccgaggaaccctgccatgtatagtgaagaagctagattaaagtcctttcagaactggccagactatgctcacctacgactcggaccgatg

SEQ ID NO: 2848 - DNA, 203 bp, synthetic construct
  source 1..203: mol_type = other DNA
ggcgcgccagtcctcgaagtgaatctgatgctgtgagttctgataggaatttcccaaattcaacaaatcttccaagaaatccatccatggcagattatgaagcacggatctttacttttgggacatggatatactcagttaacaaggagcagcttgcaagagctggattttatgctttaggtgaaggtcgactcggaccgatg

SEQ ID NO: 2849 - DNA, 203 bp, synthetic construct
  source 1..203: mol_type = other DNA
ggcgcgccagtcctgcagatctagtgaatgctcagaaagacagtatgcaagatgagtcaagtcagacttcattacagaaagagattagtactgaagagcagctaaggcgcctgcaagaggagaagctttgcaaaatctgtatggatagaaatattgctatcgtttttgttccttgtggacatctagtccgactcggaccgatg

SEQ ID NO: 2850 - DNA, 203 bp, synthetic construct
  source 1..203: mol_type = other DNA
ggcgcgccagtcctgtacactgcttgtagttatagtgacagctttccatgttgagattctcatatcatcttgtatcttaaagtttcatgtgagtttttaccgttaggatgattaagatgtatataggacaaaatgttaagtctttcctctacctacatttgttttcttggctagtaatagtagtagatcgactcggaccgatg

SEQ ID NO: 2851 - DNA, 203 bp, synthetic construct
  source 1..203: mol_type = other DNA
ggcgcgccagtcctacttctgaaataaatgttctctcaagatccttaaaacctcttggaaattataaaaatattggcaagaaaagaagaatagttgtttaaatattttttaaaaaacacttgaataagaatcagtagggtataaactagaagtttaaaaatgcttcatagaacgtccagggtttacatcgactcggaccgatg

SEQ ID NO: 2852 - DNA, 203 bp, synthetic construct
  source 1..203: mol_type = other DNA
ggcgcgccagtcctcatgcccgactaatttttttttatttttagtagagacggggtttcaccatgttggccaggctggtatcaaactcctgacctcaagagatccactcgccttgccctcccaaagtgctgggattacaggcttgagccaccacgcccggctaaaacattgcaaatttaaatgagagtcgactcggaccgatg

SEQ ID NO: 2853 - DNA, 203 bp, synthetic construct
  source 1..203: mol_type = other DNA
ggcgcgccagtcctataaaaagcaccggatcttttccatctaattccgcaaaaattgatcatttgcaaagtcaaaactatagccatatccaaatcttttccccctcccaagagttctcagtgtctacatgtagactattccttttctgtataaagttcactctaggatttcaagtcaccacttattttcgactcggaccgatg

SEQ ID NO: 2854 - DNA, 203 bp, synthetic construct
  source 1..203: mol_type = other DNA
ggcgcgccagtccttttggttttttcccctgtccctttgattacgggctaaggtagggtagagtgggtgtagtgagtgtatataatgtgatttggccctgtgtattatgatattttgttatttttgttgttatattatttacatttcagtagttgttttttgtgtttccattttagtggataaaatttcgactcggaccgatg

SEQ ID NO: 2855 - DNA, 203 bp, synthetic construct
  source 1..203: mol_type = other DNA
ggcgcgccagtcctgtattttgaactatgaatggagactaccgccccagcattagtttcacatgatataccctttaaacccgaatcattgttttatttcctgattacacaggtgttgaatggggaaaggggctagtatatcagtaggatatactatgggatgtatatatatcattgctgttagagaaacgactcggaccgatg

SEQ ID NO: 2856 - DNA, 203 bp, synthetic construct
  source 1..203: mol_type = other DNA
ggcgcgccagtccttttagtcaaatctacttgttaaaaaaagggtagcagtttattcatctgtgaaaggaaaataatacttatcttacaaggttgcaagagctcaaggagaccatgtatgtaaagttcctgctgtaaatatgaactcccatcctaatacccttttacctctctgtgggtttgtcttgacgactcggaccgatg

SEQ ID NO: 2857 - DNA, 203 bp, synthetic construct
  source 1..203: mol_type = other DNA
ggcgcgccagtcctaggtcgagaccagcctgaccaacatggagaaaccccgtctctactaaaaatacaaaattagctgggcgtggtggctcatgcctgtaatcccagctacttgggaggctgaggcaggagaatcgcttgaacccaggaggcggaggttgtggtgagcgaagatcgtgccattgcactcgactcggaccgatg

SEQ ID NO: 2858 - DNA, 203 bp, synthetic construct
  source 1..203: mol_type = other DNA
ggcgcgccagtcctagtgagctatgattgtgccactgtactccagtctgggtgacagagtgagaccccatctctaaataaataggtcaaacccttaaaaatatttaaattcttaaaaaattgaaaagattattcttctcaaatttagttgagctttctaagagaagcaattggctttttcccacttcacgactcggaccgatg

SEQ ID NO: 2859 - DNA, 203 bp, synthetic construct
  source 1..203: mol_type = other DNA
ggcgcgccagtcctataatcattttcagtttgactcatacagttaacacaatgtgaatttcttcctcagcataacagagttatagaatgacagggctggaagtgaccttagagagtatccagttctttcattttacaggtgaggcaactgagactcaaaggtgatgtaatttgtgcaaagattatagccgactcggaccgatg

SEQ ID NO: 2860 - DNA, 203 bp, synthetic construct
  source 1..203: mol_type = other DNA
ggcgcgccagtccttaattagtagcagagccctgactgggacatagtttgaaggtgaaaaacttcaccaagctacctttcttgaaaggtccaaatgtttatgttttcaactactctttccactgtaccataactttcactacatattaaatgacactttataactaatataataggacaatcatcaatcgactcggaccgatg

SEQ ID NO: 2861 - DNA, 203 bp, synthetic construct
  source 1..203: mol_type = other DNA
ggcgcgccagtccttatttacatagcattaaggttggtgcaaaaatgcaaaaaaaaaaaaagcaattatttttaaaccaacctaatatattgtattaggtattaaagtcatctggacatgaattaaagtatatgatgccagcctggacaaaaggcaaaaccctgtctctacaaaaaatacaaaaattacgactcggaccgatg

SEQ ID NO: 2862 - DNA, 203 bp, synthetic construct
  source 1..203: mol_type = other DNA
ggcgcgccagtcctgctgggcatggtggtgtgtgcctgtagtcctggctactccggagcctgaggtgggaggatcgcttgagtctgggaggcagaggctgcattgagctatgatcatggcactgcattccagcctgggtgacagtgcaagaccttgtctcagaataaataaagtatgtgatgaagatgcgactcggaccgatg

SEQ ID NO: 2863 - DNA, 203 bp, synthetic construct
  source 1..203: mol_type = other DNA
ggcgcgccagtcctgtagagacagggtttcaccatgttggccaggctagtcttgaatttctgacctcaagtgattcatctcccaaagtgctgggattacaggcgtgagccaccacggccggctaatttttgtattttttagtagtgactggtttcgcggtgttgaccaggctggtctcgaactcctgacgactcggaccgatg

SEQ ID NO: 2864 - DNA, 203 bp, synthetic construct
  source 1..203: mol_type = other DNA
ggcgcgccagtccttgacctgggccactgatgtagccaaaggaatgcattatttacatatggaggctcctgtcaaggtgattcacagagacctcaagtcaagaaacgttgttatagctgctgatggagtattgaagatctgtgactttggtgcctctcggttccataaccatacaacacacatgtcctcgactcggaccgatg

SEQ ID NO: 2865 - DNA, 203 bp, synthetic construct
  source 1..203: mol_type = other DNA
ggcgcgccagtcctctgggatgcagataaacatgcaagccaagcagaattcttccaaaaccacatctaagagaagggggaagaaagtcaacatggctctggggttcagtgattttgacttgtcagaaggtgacgatgatgatgatgatgacggtgaggaggaggataatgacatggataatagtgaatcgactcggaccgatg

SEQ ID NO: 2866 - DNA, 203 bp, synthetic construct
  source 1..203: mol_type = other DNA
ggcgcgccagtcctcttttttcaaactaaattagaaaggagtgtcattatttgactgttaaaccaaaatatttttggtgggtctttttatggaagtttaaagaaaggacatcatcatagatatgatctaacagtatttctaactatatttgatcattaaaagcctcttggaatttgaagcgtgacgtgcgactcggaccgatg

SEQ ID NO: 2867 - DNA, 203 bp, synthetic construct
  source 1..203: mol_type = other DNA
ggcgcgccagtccttagtcattcattcaacacatattcatagagctccttctctgtgccagacactgttctggaagatagctagatgaaaatctttgcactcacagagcttacatgccagtgagtgaagatcgatgataaataaagcaaatgcatcatatgttcacatttgataagtatatgccaaaacgactcggaccgatg

SEQ ID NO: 2868 - DNA, 203 bp, synthetic construct
  source 1..203: mol_type = other DNA
ggcgcgccagtccttcatttaagaatgatcagcaatacgtttagaacatatgaactgaatgaaatggacattttttcttaatttatgtataaatccatatgattatacataaagttctgatgcattaataaaagcagccaaatagggccaaagagaaaaataacaggactctgtactggacctaacttcgactcggaccgatg

SEQ ID NO: 2869 - DNA, 203 bp, synthetic construct
  source 1..203: mol_type = other DNA
ggcgcgccagtccttatcattaattaggtaatattttcctcatttctttactgctgccattttcctcaccagtattccagagatggtcatagctcattactctaccaccaagaacctaaaaggaattagaatacagcagaattggcctcagtgaagagcttaaaattgttctcctcgtagaactggaccgactcggaccgatg

SEQ ID NO: 2870 - DNA, 203 bp, synthetic construct
  source 1..203: mol_type = other DNA
ggcgcgccagtccttattgatcattaccacgtgacgttggctctattactttctgttcccaatgtccttctagtggtttgaaaatgttaaaacatccctaaaatctaaatcatataatcagaattctatagtgtcccactctatctgtaaagatcatttggaagactttagactctattaattttaaacgactcggaccgatg

SEQ ID NO: 2871 - DNA, 203 bp, synthetic construct
  source 1..203: mol_type = other DNA
ggcgcgccagtcctttgcagtgagctgagattgcaccactacactccagcctggatgacagagtgagacttcatctcaaaaaaaaaaaaaaacaaaaaaaaacaacccggtagcattgtcccttccccactgacaaacttatcaaatccagaagctttagagtttcgtctctaattatttttctcctgcgactcggaccgatg

SEQ ID NO: 2872 - DNA, 203 bp, synthetic construct
  source 1..203: mol_type = other DNA
ggcgcgccagtcctaacaaaattacccaagtcaaaacaaaatgtatttttagaattacggcagcatacgacctgaattttgtgagtttcgtggctttatcttaaatcaccatttccctaaaaatggtttctttctccttagaaatgctggtggcaacttgatgaaacagccaaatgcaccagggcaggcgactcggaccgatg

SEQ ID NO: 2873 - DNA, 203 bp, synthetic construct
  source 1..203: mol_type = other DNA
ggcgcgccagtcctcccagaattactgtgcgtacaactttatttttcagagttttcattggaatggtaagagttttatgaaagacagttttaaaacttattctgagttaaatattaatactttaaaaaattattgtactagacttattgcagccttttgaaagtagcagagtttcatcataccacatacgactcggaccgatg

SEQ ID NO: 2874 - DNA, 203 bp, synthetic construct
  source 1..203: mol_type = other DNA
ggcgcgccagtcctggctggacaacgttcatggctctcgggtagaacctagtgaaacggccagaatgaattctatggacaggcacatccagcagaccaatgaccgactgcagtgcatcaagcagcacttacagaatcctgccaacttccacaatgccgccacggagctgctggactggtgcggagacccgactcggaccgatg

SEQ ID NO: 2875 - DNA, 203 bp, synthetic construct
  source 1..203: mol_type = other DNA
ggcgcgccagtcctgcgaagagctcggccgcctgctgctgctccgacatcagaagagccgccagagcgatccccctgggaaactccccatgcagccccctctcagctccatgagctccatgaaacccactctgtcgcacagtgatgggtcgttcccctatgactctgtcccttggcagcagaacaccacgactcggaccgatg

SEQ ID NO: 2876 - DNA, 203 bp, synthetic construct
  source 1..203: mol_type = other DNA
ggcgcgccagtcctttgcggggcagcagcagcagttctcagccaaggctggccccgctcagccctacatccagcagagcatgtatggccggcccaactaccccggcagcgggggctttggggccagttaccctgggggtcctaacgcccccgcaggcatgggcatccctccgcacaccaggccgcctgcgactcggaccgatg

SEQ ID NO: 2877 - DNA, 203 bp, synthetic construct
  source 1..203: mol_type = other DNA
ggcgcgccagtcctaccagcccgggccgcgggggcctgcctccatggggggcagcatgaaccccgcgagcatggcggctggcatgacgccctcggggatgagcggccctcccatgggcatgaaccagccccggccgcccggcatcagcccctttggcacacacgggcagcggatgccccagcagacctcgactcggaccgatg

SEQ ID NO: 2878 - DNA, 203 bp, synthetic construct
  source 1..203: mol_type = other DNA
ggcgcgccagtcctacccgggcccccggccccagtcccttcctattcagaacataaagaggccataccctggagagcccaactatggaaaccagcaatatggaccaaacagccagttccccacccagccaggccagtacccagcccccaaccccccgaggccactcacctcccccaactacccaggaccgactcggaccgatg

SEQ ID NO: 2879 - DNA, 203 bp, synthetic construct
  source 1..203: mol_type = other DNA
ggcgcgccagtcctagaggatgcccagccagccgagctccgggcagtacccgccccccacggtcaacatggggcagtattacaagccagaacagtttaatggacaaaataacacgttctcgggaagcagctacagtaactacagccaagggaatgtcaacaggcctcccaggccggttcctgtggcaacgactcggaccgatg

SEQ ID NO: 2880 - DNA, 203 bp, synthetic construct
  source 1..203: mol_type = other DNA
ggcgcgccagtcctattacccccactcacctgttccagggaaccccacaccccccatgacccctgggagcagcatccctccatacctgtcccccagccaagacgtcaaaccacccttcccgcctgacatcaagccaaatatgagcgctctgccaccacccccagccaaccacaatgacgagctgcggccgactcggaccgatg

SEQ ID NO: 2881 - DNA, 203 bp, synthetic construct
  source 1..203: mol_type = other DNA
ggcgcgccagtccttcacattccctgtgcgggatggcgtggtgctggagcccttccgcctggagcacaacctggcggtcagcaaccatgtgttccacctgcggcccacggtccaccagacgctgatgtggaggtctgacctggagctgcagttcaagtgctaccaccacgaggaccggcagatgaacacgactcggaccgatg

SEQ ID NO: 2882 - DNA, 203 bp, synthetic construct
  source 1..203: mol_type = other DNA
ggcgcgccagtcctagctggtacaccggccctccgtccgctctgtgctgcaaggactcctcaagaagcgcctcctgcccgcagagcactgtatcacgaaaatcaagcggaatttcagcagcgtggctgcctcctcgggcaacacgaccctcaacggggaggatggggtggagcagacggccatcaaggcgactcggaccgatg

SEQ ID NO: 2883 - DNA, 203 bp, synthetic construct
  source 1..203: mol_type = other DNA
ggcgcgccagtcctagccttcgctggatctccttcccgaactcacaaatcctgacgagctcctgtcttatctggacccccccgacctgccgagcaatagtaacgatgacctcctgtctctatttgagaacaactgagggccacccggtcggggccatccctccacactctgcatcctaccccacctaccgactcggaccgatg

SEQ ID NO: 2884 - DNA, 203 bp, synthetic construct
  source 1..203: mol_type = other DNA
ggcgcgccagtcctctctcgggggccaggggtcatcggtttgacccctgacctataagccaagataccccataaacacactcagaaagcagagaaaaaggacaagagtctgtgtttgagagggggtctgccattcctgcttggggactggtggggaagagggccaggacatcttctgagccaggacgtcgactcggaccgatg

SEQ ID NO: 2885 - DNA, 203 bp, synthetic construct
  source 1..203: mol_type = other DNA
ggcgcgccagtcctccctgaggctccacctccaagctcagacagggcccaggcttggggaacagagagagcaggtgtacacccaaccaaagtgattgtgcccttggttggggggcgcgggcatataacctgtcagaagcaaacaggagcggcaacttctaactttgctccaagccactctctttttaacgactcggaccgatg

SEQ ID NO: 2886 - DNA, 203 bp, synthetic construct
  source 1..203: mol_type = other DNA
ggcgcgccagtcctcagatggcaagggcagtgcgtggaaaggccggggaggtgcagaaaccagagcccagggcaatggtgtctgtccagcccctccctctgtccctgtgctccaagctgcccccggctgcagcccaggccatggacatgtgcaccagtatgtacctgcaggcatgggggggaggggggcgactcggaccgatg

SEQ ID NO: 2887 - DNA, 203 bp, synthetic construct
  source 1..203: mol_type = other DNA
ggcgcgccagtcctcgtgtttctgggcctgccccagacactgcccttggctgccagcctaccctgcctgcactcctccaccatcacaatctcacccaaactcctgctcactcaagcaaaagcagcctctggccttccctccaccgctttgctccatctggcttaccactctccagggcctcctggggacgactcggaccgatg

SEQ ID NO: 2888 - DNA, 203 bp, synthetic construct
  source 1..203: mol_type = other DNA
ggcgcgccagtcctgcctgtcctgtgttcactttgtttcaggctggtctgtgccccgtgagccacatggcctagggtgatgccaggttgtcccgtcactggggtcccatctgtaaattctttgcgcccttcccggctgctgcctggggccctttcctgctctcccgtccgctgtgggtggtccccagccgactcggaccgatg

SEQ ID NO: 2889 - DNA, 203 bp, synthetic construct
  source 1..203: mol_type = other DNA
ggcgcgccagtccttctcctctgtgggttttaccggaaaggtggccccagctgttgacttccagtcactgtcccagacggcacaaggttttctgtaggaaagctgccattgccccggccccttttcttcctttgtcccgttgtcgaggttttttcaaatagcgtgttgttcagtatgcaaatcaattacgactcggaccgatg

SEQ ID NO: 2890 - DNA, 203 bp, synthetic construct
  source 1..203: mol_type = other DNA
ggcgcgccagtcctgtgtcagaccatctgggaattaagctccagacagacttacagatgccttccttaggagttcttgcttcttgcgttgatactttgccccagaaaggcctgggattcattctggttcttatcagggtgtgtccacactctgctcacaggtggatccacggctttccagtgcggagacgactcggaccgatg

SEQ ID NO: 2891 - DNA, 203 bp, synthetic construct
  source 1..203: mol_type = other DNA
ggcgcgccagtcctgtcgagatgctccctgcagcccaggccccgggcacctcctgcaaccatctctgggctcagcacctgaggcgggtttcctgggtcccctctccagcaagcctccaccagcaagctcggcccagagcttcccttccggctggctctgaaccgtgcgtggtgcctacagcctgcagtcgactcggaccgatg

SEQ ID NO: 2892 - DNA, 203 bp, synthetic construct
  source 1..203: mol_type = other DNA
ggcgcgccagtccttacttggagccataagtaacctcagcaaaaacgaggcctctgcaagccacttttccatgccaagcatccacccggcccacaggcatgtttctgccgccactccgcaagatggacagggagccagcaggcaggcgggaagggccaagtacaggcaatcacccccatcttcttggtcgactcggaccgatg

SEQ ID NO: 2893 - DNA, 203 bp, synthetic construct
  source 1..203: mol_type = other DNA
ggcgcgccagtcctttgaagctttatccatgtatcatgttccgtgtagccattttattttttaagaaactgctaatactttctccctaatggaagccctgatcccccagagagctacaggtctgctcccgacgggcctcgggcctgacccgtccacacagggccgtgtcaacagcagcgactcaagggcgactcggaccgatg

SEQ ID NO: 2894 - DNA, 203 bp, synthetic construct
  source 1..203: mol_type = other DNA
ggcgcgccagtccttgccaaaaacctgtggattttctctacaaaaattatcatgactgttatctttttgatggaaaagatgaagttcagcgaagaacaaatctacaacttggccagaagactgtagactttgccttcaaagagtgagcaaccctaattaacctgattttttgctgataatcactctcacgactcggaccgatg

SEQ ID NO: 2895 - DNA, 203 bp, synthetic construct
  source 1..203: mol_type = other DNA
ggcgcgccagtcctattcagccccgtgctcagcagacatcagggatcaccgactctgtgccaggagctgttcttgatgctgggaacgcaggggtggacaaaacagagaaagccctgccctcagtgagaaatatgctgtcatgtaaattgctttttcccctatagaatgccagcagttactctgcagagcgactcggaccgatg

SEQ ID NO: 2896 - DNA, 203 bp, synthetic construct
  source 1..203: mol_type = other DNA
ggcgcgccagtcctctcaaccacaacttctgacctcccagggtgtctgaggcctctaaagagcttagtttgcccctctgggaagtgaatccttggcttatggtgccggggggaccctggaggccccctcacacgaaggctgcttcttgcagagtcgctcaaaagtagggccccagggctcgcagcagccgactcggaccgatg

SEQ ID NO: 2897 - DNA, 203 bp, synthetic construct
  source 1..203: mol_type = other DNA
ggcgcgccagtcctggcaagatggctcccctgcatgtctccggctgatcgctgccgctccgccaatacaatagagccagccactaccagcagcctggccctcttcctccttctccagagagaccaatccagccgaactcggggtttgccaaagggataaacagcacttccagggggagaaaaaaaatccgactcggaccgatg

SEQ ID NO: 2898 - DNA, 203 bp, synthetic construct
  source 1..203: mol_type = other DNA
ggcgcgccagtccttaagcacctcgtgtgtgttcttcggcctcactgctctgtggcttaggtatctgtgctgtggggtttgagaaacatggtgaaggtgtatgaacagagcttgacatttgtgctctgctgtgtgcgtgcaccagctgcctccaggccaactacacgtgtgagacagatggggcctgccgactcggaccgatg

SEQ ID NO: 2899 - DNA, 203 bp, synthetic construct
  source 1..203: mol_type = other DNA
ggcgcgccagtccttcagaagatcttcttgagccttttattgcagtctcagctcaggcttggaaccagcacagcggagtggtaagaccagacagtcatagccaaggatccccaaactcagacccaggtttggaacctgaagacagcaactccacatctgccttggaagatcctcttgagtttttagaccgactcggaccgatg

SEQ ID NO: 2900 - DNA, 203 bp, synthetic construct
  source 1..203: mol_type = other DNA
ggcgcgccagtccttatagcaagcaagaagtggcagggcgcgcaccggctgtcgccaagtgctgttcaactcagggagccggggcttcgctccgtccctcccccggcttccagagctttttggggttggagggtgggaggccaggggcgttctcacagctgtgtgtcctctttcccatcctgcgcagacgactcggaccgatg

SEQ ID NO: 2901 - DNA, 203 bp, synthetic construct
  source 1..203: mol_type = other DNA
ggcgcgccagtcctagctaagatgccgcgcaggagtttccacctggatgtttgaggttgtgtagatgtggccggcacccttgagagtggagctagggggtgcagactgagcagtgaacagaaggagccttggacagggctgggccagcctcccgagttccaggagcgaattgcaaacccaccgggaaacgactcggaccgatg

SEQ ID NO: 2902 - DNA, 203 bp, synthetic construct
  source 1..203: mol_type = other DNA
ggcgcgccagtcctgagagaaagaaaaggaacgggagctgagagctgatcacctgcctttccagaccggagacgggcggcaagtttgaagtcgacacccagaggccagtttgtcccccttcccgcgcgcgggcggcccgagcctcggcggcggcggtagcggcggcggcgacgctgacacctcccacccgactcggaccgatg

SEQ ID NO: 2903 - DNA, 203 bp, synthetic construct
  source 1..203: mol_type = other DNA
ggcgcgccagtcctagaacttaagaaacttgagacagggaaggagagccgggagcagccaaaacctgctaagtctcagaagactggtttctgcacaagggaatggaagaagtgactggaggtggctgtggattcaactctggcctgagattgattcccttgagataacaaatccagtttgctgatgaccgactcggaccgatg

SEQ ID NO: 2904 - DNA, 203 bp, synthetic construct
  source 1..203: mol_type = other DNA
ggcgcgccagtcctaggccacagtaccctattcacgctctgtgcttgtgccaaggtttcaagtgatcctcccgcctcagcctgcccaggtgctgagattacatgtatgagccactgcacctggaaaggagccagaaatgtgaagtgctagctgaaggatgagcagcagctagccaggcaaagggggcacgactcggaccgatg

SEQ ID NO: 2905 - DNA, 203 bp, synthetic construct
  source 1..203: mol_type = other DNA
ggcgcgccagtcctaggcggtccaccctgcgcgtgatcctttatgcccggcccctgcccctccctccgggtggaacttccccctcaccgccagacttaagctgaggatcgttggatctctggcggggtgcagaactgagcccaggccacagtaccctattcacgctctgtgcttgtgccaagggggcacgactcggaccgatg

SEQ ID NO: 2906 - DNA, 203 bp, synthetic construct
  source 1..203: mol_type = other DNA
ggcgcgccagtcctcccggcccgccaccatgacttccagcaagatagagatgcccggcgaggtgaaggccgaccccgccgccctcatggcgtcgctgcacctcctgccgtcgcccacgcccaatctcgaaattaagtacaccaaggtgtgaaaattggacttgctggcagaatcctttttgggagaagcgactcggaccgatg

SEQ ID NO: 2907 - DNA, 203 bp, synthetic construct
  source 1..203: mol_type = other DNA
ggcgcgccagtcctcccacttgtgatgcttcaagacccctggagcacgtcaggttcttagatctcgttttgaggagtgatgtggagtgacgcatccttacagatcccaaagcgttgaataaacggttgtacaaagagatccaggatgagaagactgataaaagaagaagctagctgaacagctgtaaacgactcggaccgatg

SEQ ID NO: 2908 - DNA, 203 bp, synthetic construct
  source 1..203: mol_type = other DNA
ggcgcgccagtcctaaacgtattttggcatctctgggagacaggctgcacgacgatcccccacagaagccccctcggtccatcaccctcagggaacccagtggtaatcacactcctcctcagttgtctccatcacttagccaaagcacttacaccactggtggctccctagacgttcctcacattatccgactcggaccgatg

SEQ ID NO: 2909 - DNA, 203 bp, synthetic construct
  source 1..203: mol_type = other DNA
ggcgcgccagtcctagcggagcgcggaggccgctgggacgcggttcagctcattccctgaggccggcccgcgtcccgtcaggcgccgcgcggggttagcgcggggtcagcggaggtcagcgggggtcagcagcagcggctccgagggcgcggcggacgcagggcaggatgtacacgctgctgtcgggccgactcggaccgatg

SEQ ID NO: 2910 - DNA, 203 bp, synthetic construct
  source 1..203: mol_type = other DNA
ggcgcgccagtcctgagccgtccgtccggagccaggagaggtagccgagggagcctgacgggtgacgccagcggccacggggccccgaacgagcaggacatgaggggcgactaggcgcgaggacgagcaaaagcaagtggatgacagcatgaacggccctgcggggctggccggacggctgcaagaaccgactcggaccgatg

SEQ ID NO: 2911 - DNA, 203 bp, synthetic construct
  source 1..203: mol_type = other DNA
ggcgcgccagtcctcctgaagatgtagctcctactgttggattttcaaaaattaaccttagacaaggaaagtttgaagtcaccatctttgacttgggaggtggaataagaattcggggaatctggaagaattactatgctgaatcctatggggtaatatttgttgtggattccagtgatgaagagagacgactcggaccgatg

SEQ ID NO: 2912 - DNA, 203 bp, synthetic construct
  source 1..203: mol_type = other DNA
ggcgcgccagtcctcctaccttgagtgagcttcctctgcatgttttctatatcactggcagagcctgtagttggaaaggggacagagtgactactggactttgtgtgaaaacaccaaccgggacaaaacttcagtcaaggctgagacgggtgggggtatataacttgtccttacgttaaacttggaaccgactcggaccgatg

SEQ ID NO: 2913 - DNA, 203 bp, synthetic construct
  source 1..203: mol_type = other DNA
ggcgcgccagtcctagatgggcattccgaactgttaatggggacatgggactccagttgtctctgatcacttgtgtggattttcctggcgtagaacgacagaagccgctagtaagtcgccaagacctacagcaggaattctgcaccaaagggcataaaatcttgttattttaatttgcatctgggagacgactcggaccgatg

SEQ ID NO: 2914 - DNA, 203 bp, synthetic construct
  source 1..203: mol_type = other DNA
ggcgcgccagtcctttatatggtcatttaaatctcccagggcttcctccaagggccaaaaataatccggagacacagcagctgtgtccagcacacagaggacccggccatctgctttggttcagagccctgtgtctgtcagtcagtctctccctggctctccctccatcctcattcctgcctgaagcccgactcggaccgatg

SEQ ID NO: 2915 - DNA, 203 bp, synthetic construct
  source 1..203: mol_type = other DNA
ggcgcgccagtcctagggttcttgtggcctctggcgggcctccagccagttagaccatttgaccagaacgtgtgcagctcagccagccacagaactggaatttttcaggagcagggggagcatggagtttggactttgctgagcaactgaagtggagcgcagagcttgctcgcttaggagagagcatccgactcggaccgatg

SEQ ID NO: 2916 - DNA, 203 bp, synthetic construct
  source 1..203: mol_type = other DNA
ggcgcgccagtcctgcgtcggggagcggcggtaccgggcggctgcggggctggctcgacccagcttgaggtctcggcgtccgcgtcctgcggtgccctggggtctcccgaggaccttgtacccgcgcggcttccttgggctggctttggacgacgctttcgccttcctgctgcctaggatccgccgaccgactcggaccgatg

SEQ ID NO: 2917 - DNA, 203 bp, synthetic construct
  source 1..203: mol_type = other DNA
ggcgcgccagtcctctcgcaccgctgccccgcgagcagctcctcttctcccgaggcgcgcggggcgcccccgcgagccccgcggctgagaccccgcagcctggaggagggctgtccggggctttggtgtggccgtggctgacactaaagactttgtagccatcaacccgagtgcagtttcgatggaaacgactcggaccgatg

SEQ ID NO: 2918 - DNA, 203 bp, synthetic construct
  source 1..203: mol_type = other DNA
ggcgcgccagtcctcagactgcgggacggacggtggacgctgggacgcgtttgtagctccggccccgccgttccgacccccgccgccgtcgccgccatgacggggctagcactgctctactccggggtcttcgtggccttctgggcctgcgcgctggccgtgggttcctgacggagacttcgcccttccgactcggaccgatg

SEQ ID NO: 2919 - DNA, 203 bp, synthetic construct
  source 1..203: mol_type = other DNA
ggcgcgccagtcctcactgctcagacctctggacctgacaggagacgcctacttggctctgacgcggcgccccagcccggctgtgtccccggcgccccggaccaccctccctgccggctttgggtgcgttgtggggtcccgaggattcgcgagatttgttgaaagacattcaagattacgaagtttagcgactcggaccgatg

SEQ ID NO: 2920 - DNA, 203 bp, synthetic construct
  source 1..203: mol_type = other DNA
ggcgcgccagtccttcttggtcttggactgagccacactcctggcatcccagcgtctccagcttgcatggcctgtcacgagaaccctgactaatacacctggagtgcagaatctgctggagaaactgccattccgttattgactggctggtcaggccatacagcctggtggtctagatgtgtttggagcgactcggaccgatg

SEQ ID NO: 2921 - DNA, 203 bp, synthetic construct
  source 1..203: mol_type = other DNA
ggcgcgccagtcctaaggccgcgaggttggagggcacggggacacagcatagcgaggaaggaacgctcgagatttctgtggctcctcaagatattggtcataatcctggtacttggcattgttggatttatgttcggaagcatgttccttcaagcagtgttcagcagccccaagccagaactcccaagcgactcggaccgatg

SEQ ID NO: 2922 - DNA, 203 bp, synthetic construct
  source 1..203: mol_type = other DNA
ggcgcgccagtccttgtgtcatccccggtagagggtgcccgtcacggccaaccacagagatcccggtcctccgggattctagagcgtccggccgaaccctccactgacttccggtggctgagcctctccgcagcttccggccaagttggactgcagctcgcggtttcctggcttctagtttccagagtcgactcggaccgatg

SEQ ID NO: 2923 - DNA, 203 bp, synthetic construct
  source 1..203: mol_type = other DNA
ggcgcgccagtcctctgcgcctgcgcatgccacacgcgcactcgcgtggccttcgcgaaggtgtcgctgccaagaaacgtgtcctgcgcgctacgccgtctgtttctagggcaacgccggcgtctcttagcaaccgcgcgcggcctaggtgggtccccccggcacccccagacctgccatggcgaccgcgactcggaccgatg

SEQ ID NO: 2924 - DNA, 203 bp, synthetic construct
  source 1..203: mol_type = other DNA
ggcgcgccagtcctggtctgcaatccagcccgccacgtgtactcgccgccgcctcgggcactgccccaggtcttgctgcagccgggaccgcgctctgcagccgcagacccggtccacacggccaggggctacgacccttgggatctgccctccgctcagctcgagcttccctcgtggccgacggaacacgactcggaccgatg

SEQ ID NO: 2925 - DNA, 203 bp, synthetic construct
  source 1..203: mol_type = other DNA
ggcgcgccagtcctaggttcggctcacactgagatcggggctggagagagagtcagattttggagcggagcgtttggaaagcgagccccagtttggtcccctcattgagctcgctgaagttggcttcctagcggtgtaggctggaatagactcttggcaagctccggttccaccaggtgagaagagtgcgactcggaccgatg

SEQ ID NO: 2926 - DNA, 203 bp, synthetic construct
  source 1..203: mol_type = other DNA
ggcgcgccagtcctgtaaaccaatagcccccatgctctgtgcgatttcattgtgtgctcgcgttcgcaagctccgtagtgcaggaagttccaccaggtgagaagagtgatgaccatccttttccttactatggttatttcatactttggttgcatgaaggctgcccccatgaaagaagcaaacatccgcgactcggaccgatg

SEQ ID NO: 2927 - DNA, 203 bp, synthetic construct
  source 1..203: mol_type = other DNA
ggcgcgccagtcctcagccggggtttctgcagagggcgcgggacgcggggttccccggggctgaggctggggctggaacacccctcgaagccgcgggcgtcctgtccaaggcgccccaggagggcgcaggactcgcagggcgatgtcgcggggccctaggggaggagttccaccaggtgagaagagtgcgactcggaccgatg

SEQ ID NO: 2928 - DNA, 203 bp, synthetic construct
  source 1..203: mol_type = other DNA
ggcgcgccagtccttgtgactccgccgccggggacccgtgaggtttgtgtggaccccgagcatgagcagagatcattaaaaattaaacttacaaagctgctaaagtgggaagaaggagaacttgaagccacaatttttgcacttgcttagaagccatctaatctcagttccaccaggtgagaagagtgcgactcggaccgatg

SEQ ID NO: 2929 - DNA, 203 bp, synthetic construct
  source 1..203: mol_type = other DNA
ggcgcgccagtcctatcaccatcattgtgggcagcatccgcagggacaggcaggcccggcttcagcggcaccgccaccgccaccaccgccaccaccaccaccatcatcaccaccgccggcgtcgacaccgagagtacgagcacggctacgtgtcggacgagcacacatacagccgctcaagccgcaggcgactcggaccgatg

SEQ ID NO: 2930 - DNA, 203 bp, synthetic construct
  source 1..203: mol_type = other DNA
ggcgcgccagtcctaccgaggccacagctgcgatttcatagtgtgggaccccactggcaaagacacgctggctgctgtggccgtggtttctgtcccagccgtctgtttccatagaaaaagacccgtgcctgtatattccacgctttgcgcacctgctggaattcggggagaagaaccacgaggtgtcccgactcggaccgatg

SEQ ID NO: 2931 - DNA, 203 bp, synthetic construct
  source 1..203: mol_type = other DNA
ggcgcgccagtcctctttttcctttcttccggatgagaggctaagccataatagaaagaatggagaattattgattgaccgtctttattctgtgggctctgattctccaatgggaataccaagggctcagttttctgtgcttggaccctctgggcccatcctggccatggtgggtgaagacgctgatccgactcggaccgatg

SEQ ID NO: 2932 - DNA, 203 bp, synthetic construct
  source 1..203: mol_type = other DNA
ggcgcgccagtcctggagcaaaggaggaaaactagggaatgggaggtgagagtggctgacaccgacccaacgtccgggttgccggaaggctgcagcgcccggagcggtgtcgggcaaaccgctaccctggtattgctggagcctctcctggggacttttgaacagatactgtggcctcatgaataggacgactcggaccgatg

SEQ ID NO: 2933 - DNA, 203 bp, synthetic construct
  source 1..203: mol_type = other DNA
ggcgcgccagtcctaaagctgacaagcaggtggcattcttcttcagagcagggcaagtgtaattctggaccaatgtgtgattctgagaccagaccaaccaactgaaggagccaagttacaccctgtttaaccctgccttcaaagggacgactctgtaagattctctgctacttattcaagttgacacgcgactcggaccgatg

SEQ ID NO: 2934 - DNA, 203 bp, synthetic construct
  source 1..203: mol_type = other DNA
ggcgcgccagtcctcgactaggcctagtcgtagcggcggccagcgggagggcgtagccgtagtcttggcccacgtcattctgtgccccgggtcaggtcaccgcccggagggtatgggaagagaaatgaagaagactggtactcccagacccttccgtatcgaggaccccaatcaacaacccacctgagcgactcggaccgatg

SEQ ID NO: 2935 - DNA, 203 bp, synthetic construct
  source 1..203: mol_type = other DNA
ggcgcgccagtcctccccacctcctgctcccatccccctggctcccgccgccctgtagctcggcagccctgccaggagcccggaagtgggtccgcacgagacagaatagactacactcaaactccaggggaaccgttcattgggcttggacacgaaggcgggaccctgccgacgcagtgattggatgccgactcggaccgatg

SEQ ID NO: 2936 - DNA, 203 bp, synthetic construct
  source 1..203: mol_type = other DNA
ggcgcgccagtcctaaggaagctgtaaatgtatttgagttaagcttttgcgagaaaccctacagcttggggcctgggctcctctgaccatcctcattgagaaaggaaagtgagtccagagaagttgatgcttcctacctgttggagcggcccagcagtgtaagcgtggttgttactgccccatccgcccgactcggaccgatg

SEQ ID NO: 2937 - DNA, 203 bp, synthetic construct
  source 1..203: mol_type = other DNA
ggcgcgccagtcctggagactcgagacttgaagccagcttattctggacccacgcaggcgactgaagacgatgggacccactgccctgcattcggtaagtcccgggtctaacggatgatccatatatttcaggtgaggagcaaaagaagggatccacctattcagttccaaaatctaaggagaagttgcgactcggaccgatg

SEQ ID NO: 2938 - DNA, 203 bp, synthetic construct
  source 1..203: mol_type = other DNA
ggcgcgccagtcctaggcgacatgtgagggccctgagccccctgactggaagcaggggctgtttttcaactcctggactaaagcccagaagcagctggggaagctccaggctacctacacaacctggcccaggctggtcacggtgtcccccctccctgctctgtgccctctccttccagaaatccacccgactcggaccgatg

SEQ ID NO: 2939 - DNA, 203 bp, synthetic construct
  source 1..203: mol_type = other DNA
ggcgcgccagtcctctgaaatgctggtttttgtttttgtttttttattttacgagtggacacaattctcacctgagtccttggccacgtggcgctatggcggtcactaccgggaattaaccacggccaccctctcagagcgccgggcgcggactcagggacacgccggctaccacctgagccggcccccgactcggaccgatg

SEQ ID NO: 2940 - DNA, 203 bp, synthetic construct
  source 1..203: mol_type = other DNA
ggcgcgccagtcctctctactcaaggaaatctttgtttccactgggacggaatcggagctctggaggctgggctggccaagcgccccgaaggcccgatgcctgacggctcatgcggcctccttgtttgcagggcctgggcaaaaatttacactgagtcccactcttcgctccagggcccggcaggaagcgactcggaccgatg

SEQ ID NO: 2941 - DNA, 203 bp, synthetic construct
  source 1..203: mol_type = other DNA
ggcgcgccagtcctccatgcactgagctggggacatgcaacaataacaggccatacaatgaaagtcgctgaagaagaatatgaattttgcctgcggatttgctaacactcgacaatcctaggaggtgagttccaacaaattggttcaaaaagaggggggataaacacgctggcccatgctgggcaagccgactcggaccgatg

SEQ ID NO: 2942 - DNA, 203 bp, synthetic construct
  source 1..203: mol_type = other DNA
ggcgcgccagtcctggcgaggcctcacggtggaactctcagatgacagcatgcaggcaccaagagagtggacgcacatacagaagacagccatgcactgagctggggacatgcaacaataacaggtgagttccaacaaattggttcaaaaagaggggggataaacacgctggcccatgctgggcaagccgactcggaccgatg

SEQ ID NO: 2943 - DNA, 203 bp, synthetic construct
  source 1..203: mol_type = other DNA
ggcgcgccagtccttagatacgtaaacacccaggaaggcagggggctccctttatccaaggaggtggctgtgcaggtggccaccacaggtggcaggaaccacaggctggggcactccggagtcaggagtgagtgggcaggttgactggcatcaggcagcctctcagccagggccctctccgcatcagccgactcggaccgatg

SEQ ID NO: 2944 - DNA, 203 bp, synthetic construct
  source 1..203: mol_type = other DNA
ggcgcgccagtcctacgtgatgcaggaggtgcccgaggcggcggggctcgcgcgggtggagccgcctcggcgttcgagcggggtgggggctgcccggttgagatttcccggcgggtcccggcctctgcgtgcacgcgcctgcgtgctcgcgctcgcggttctggcgctgccggaataatgctgacagccgactcggaccgatg

SEQ ID NO: 2945 - DNA, 203 bp, synthetic construct
  source 1..203: mol_type = other DNA
ggcgcgccagtcctcgctccgcactcacccgccctctgggcctcccacaggaatcaaagatcaactcccactgaggacaaatggacctgtaattccgggtgtgacgagagaacgagatttaccttcctgaattaaaaaacaggtcattaagcttgggccctgactcttctttgtgagaaggtacagagcgactcggaccgatg

SEQ ID NO: 2946 - DNA, 203 bp, synthetic construct
  source 1..203: mol_type = other DNA
ggcgcgccagtccttctgcccaggcagggagcggctgggatgggactgaggaatcaaagatcaactcccactgaggacaaatggacctgtaattccgggtgtgacgagagaacgagatttaccttcctgaattaaaaaacaggtcattaagcttgggccctgactcttctttgtgagaaggtacagagcgactcggaccgatg

SEQ ID NO: 2947 - DNA, 203 bp, synthetic construct
  source 1..203: mol_type = other DNA
ggcgcgccagtcctggatgggagtcctctggggcagggagtgaaagccccggaggcagaaagggacggagaacaggggcttgcccagagcatggataggaaaggagctggggttctccggggctcagcgcgcactgagaacctgtgcccggggctgcagctgcggacgataaaggcgctgtctggctccgactcggaccgatg

SEQ ID NO: 2948 - DNA, 203 bp, synthetic construct
  source 1..203: mol_type = other DNA
ggcgcgccagtcctataacctcaccctgtgggatgtgaatgaatagcatcttgcctggtaaatccacaggaattgataaggcaggcgcagttctcccaaacaggccttttctctttaagctgtagctgtggtttctgcagcaattttgtttttgccttgaaagaggtgctctggattatcacacctcccgactcggaccgatg

SEQ ID NO: 2949 - DNA, 203 bp, synthetic construct
  source 1..203: mol_type = other DNA
ggcgcgccagtcctaacacctccctccagtggtcaaatccagctcaacagactctgtactttgacgacaagaaagctttaagggacaataggatcgagctggttcgcgcttcctggcatgaattgagtattagtgtcagtgatgtgtctctctctgatgaaggacagtacacctgttctttatttacacgactcggaccgatg

SEQ ID NO: 2950 - DNA, 203 bp, synthetic construct
  source 1..203: mol_type = other DNA
ggcgcgccagtcctgggtcccaaagcaaaaaaggaacactgtcatcacaaacaggcttcagtggccaaagatctggcagtaagaaaaagaaagtcaccaaagctgaacgattgaagctgctacaagaggaggaggagagacgactgaaagaggaagaggaagcccgtttgaaatatgagaaagaagaacgactcggaccgatg

SEQ ID NO: 2951 - DNA, 203 bp, synthetic construct
  source 1..203: mol_type = other DNA
ggcgcgccagtcctcagtgatcggcttaggaccgctttctaggtggtgaggacaagagtgatggctgttttagtacttcaggtggaattcgtccttttcatcttcagaactggaagcagaaagttaatcagactaagaaagcagaatttgtacgcacagcagaaaaatttaaaaatcaagtaattaaccgactcggaccgatg

SEQ ID NO: 2952 - DNA, 203 bp, synthetic construct
  source 1..203: mol_type = other DNA
ggcgcgccagtcctccgaccctggggcgtcgggtccggtggtcttgcagcctccaaaccccgagtgctataccgaactgcgcgccaagggtgggagagctgacggcctgggccacccttcttccttcactgggcaggctttgaggtgcttgtcggtctggactgatgaaaatccatatgacctgaaagcgactcggaccgatg

SEQ ID NO: 2953 - DNA, 203 bp, synthetic construct
  source 1..203: mol_type = other DNA
ggcgcgccagtcctgggagagttgcatcgccctccacagagcaggcttgcatctgactgacccaccatgacacccacagacttcacatctcctccaggccccgctccagatcaccttccctcgctggcccaggaatccatctccttccaggaccttagcccaggactaacacaagccctattcctaaccgactcggaccgatg

SEQ ID NO: 2954 - DNA, 203 bp, synthetic construct
  source 1..203: mol_type = other DNA
ggcgcgccagtcctgggttcacagaggagggaactgaatgacatcccaggattacataaactgtcagaggcagccgaagagttcacaagtgtgaagcctggaagccggcgggtgccgctgtgtaggaaagaagctaaagcacttccagagcctgtccggagctcagaggttcggaagacttatcgacccgactcggaccgatg

SEQ ID NO: 2955 - DNA, 203 bp, synthetic construct
  source 1..203: mol_type = other DNA
ggcgcgccagtcctggctgccagcttcctttcggcccctgcttttgtgctccctccgctcccaaactgtacctgtcacagaccaggaaaaatgtttgctgtgctgcgtctgttggcgagtcccctcctcacccggttcccttcctctgcatcctttcctcagcttgagaaacacctctttgccccgtccgactcggaccgatg

SEQ ID NO: 2956 - DNA, 203 bp, synthetic construct
  source 1..203: mol_type = other DNA
ggcgcgccagtcctagtcctggcattatttctctctctacaaggagccttaggaggtacggggagctcgcaaatactccttttggtttattcttaccaccttgcttctgtgttccttgggaatgctgctgtgcttatgcatctggtctctttttggagctacagtggacaggcatttgtgacagcactcgactcggaccgatg

SEQ ID NO: 2957 - DNA, 203 bp, synthetic construct
  source 1..203: mol_type = other DNA
ggcgcgccagtcctcacccttctcctcctccgcccagtactcgtggccagggtcgtatcagttctccgtcaacttgcttggggccttggacgagcctcctggcgcttcctgtcagtggcgaaaagctgctttgctccccctgtggatgtaaccccttagctggcattttgcatctcaattggcttgtgcgactcggaccgatg

SEQ ID NO: 2958 - DNA, 203 bp, synthetic construct
  source 1..203: mol_type = other DNA
ggcgcgccagtccttagagccgctctctctcactggcacagcgaggttttgctcagcccttgtctcgggaccgcaggtacgtgcctggcgacttcttcgggtggtccccgtccgccctcctcgtccctacccagtttcttgcttccctgccccatctccgccgctccccgcagcctccgccgagcgcccgactcggaccgatg

SEQ ID NO: 2959 - DNA, 203 bp, synthetic construct
  source 1..203: mol_type = other DNA
ggcgcgccagtcctgagcaatcttctcagccgtgcactcacagcttggaaaataaagggaggaaggagtcccagccacagggtagaggaacggcctctccacagagaagctgctgctgctgagctgaagtgacagtcaagttcagcagctgtgtggggaccaaggggacacaatatgagaccaacagccgactcggaccgatg

SEQ ID NO: 2960 - DNA, 203 bp, synthetic construct
  source 1..203: mol_type = other DNA
ggcgcgccagtccttggcggagccagatctggagtgcgagcagatccgtctgaagtgtattcctgggacgatgccggagtgtgaaggagtttgagaagctgaaccgcattggagagggtacctacggcattgtgtatcgggcccgggacacccagacagatgagattgtcgcactgaagaaggtgcggcgactcggaccgatg

SEQ ID NO: 2961 - DNA, 203 bp, synthetic construct
  source 1..203: mol_type = other DNA
ggcgcgccagtccttttccggagcaggggaagctgccccgtgcccgggagggagcgggcgcaccgcggcccccaggacacgcgctgtgagtcccgcgggcggtgcgcctgggaggaagggggaggtcggaggagggggcaccgcggcgccgggtataaggagcaaaggacccggctgcccagtccctccgactcggaccgatg

SEQ ID NO: 2962 - DNA, 203 bp, synthetic construct
  source 1..203: mol_type = other DNA
ggcgcgccagtccttctcccaacaatgctaggaaacaaatctccagatccaccaacagcaacttttctaagacctctcctaaggcactcgtgattgggaaagaccacgaatccaaaaacagccagctgtttgctgccagccagaagttcaggaagaacacagctccatctctctccagccggaagaaccgactcggaccgatg

SEQ ID NO: 2963 - DNA, 203 bp, synthetic construct
  source 1..203: mol_type = other DNA
ggcgcgccagtcctgagctagacctgcacttaacttgcagctgcctcccgagcctccaagatgtccacgccctgggtgacaggcggcagggcgctgccccgtgctcccccggctctgctcgacagcagcacgcagtgagagcctcgccgccgccgaggagcaactcatgtaacggcacagccaacaagcgactcggaccgatg

SEQ ID NO: 2964 - DNA, 203 bp, synthetic construct
  source 1..203: mol_type = other DNA
ggcgcgccagtcctcaagccggggaccaagccggggaccaagccggggactaaggcgagccggagaccgagcccgaacagcagtcccgcagcgtggacaagcagcatgccgtcatcaactacgaccaggacagggacgagcactgggtgaaggacctgggcagcctcaatgggacgtttgtgaatgaccgactcggaccgatg

SEQ ID NO: 2965 - DNA, 203 bp, synthetic construct
  source 1..203: mol_type = other DNA
ggcgcgccagtcctgctcccagctttgaaggtcttgcggtgaagcatcaagtgtacctgatttgtgaacctatcttgcttcagttggtttcctcctaaatattaggcagatgggattggctggtctgtgctctgctaggtgaaaaattagacgatttcaagaattggagctgaatctgatgttaagtacgactcggaccgatg

SEQ ID NO: 2966 - DNA, 203 bp, synthetic construct
  source 1..203: mol_type = other DNA
ggcgcgccagtcctaagtcggtaggacgtcttcgcgttgacttgtggggaatgtagtttcgatgctgccggcgcgttttgtttgcgacagaaactacaacccccaggggccaccgcgacgttgcctgtgggtgcccgcgaaccaacggttagcggtggcaggggctgactgagagcgtctgcttgatacgactcggaccgatg

SEQ ID NO: 2967 - DNA, 203 bp, synthetic construct
  source 1..203: mol_type = other DNA
ggcgcgccagtcctcattcccgcgcctccaaaacctaggccgggggcgctggaaacccttaccggcacccggccaccgcggcagacgcttgctcctgccacgccccccccccctcccccgcatcacgtgtctgcactcgctttcctcggattcccggatgtggttgccaaaacaaaggggatttggtgcgactcggaccgatg

SEQ ID NO: 2968 - DNA, 203 bp, synthetic construct
  source 1..203: mol_type = other DNA
ggcgcgccagtcctacgctcttaccagctggagggagtaaactggctcgcccagcgcttccattgtcagaatggctgtatcctgggagatgagatgggcctggggaagacctgccaggaagattaaatgatgaagggccatttctgattctttgtcccttgtctgttttgagcaactggaaagaagaacgactcggaccgatg

SEQ ID NO: 2969 - DNA, 203 bp, synthetic construct
  source 1..203: mol_type = other DNA
ggcgcgccagtccttgataaccacagaatcagaacatataaaaagctctgcgggactggtgctgactgcaaccatgacaaagcttattctcctcacaggtcttgtccttatactgaatttgcagctcggaacagccagctgaaaactctcctggccattggaggctggaacttcgggactgccccgaacgactcggaccgatg

SEQ ID NO: 2970 - DNA, 203 bp, synthetic construct
  source 1..203: mol_type = other DNA
ggcgcgccagtcctctgaaagccggaaggggcaagacgggttcagttcgtcatggggctgtttggaaagacccaggagaagccgcccaaagaactgatatccaaagagaagaagaaaaagtgaaacgatctgtgaaagatgctgccaagaagggccagaaggatgtctgcatagttctggccaaggagcgactcggaccgatg

SEQ ID NO: 2971 - DNA, 203 bp, synthetic construct
  source 1..203: mol_type = other DNA
ggcgcgccagtcctgccacattccacactaacgtgttggtgaattcttctgggcattgccagtacctgcctccaggcatattcaagagttcctgctacatcgatgtacgctggtttccctttgatgtgcagcactgcaaactgaagtttgggtcctggtcttacggaggctggtccttggatctgcagcgactcggaccgatg

SEQ ID NO: 2972 - DNA, 203 bp, synthetic construct
  source 1..203: mol_type = other DNA
ggcgcgccagtcctcacggggcgctggctccgggtctggcggccgctgatgggagtcggagcccgggcgggcgagcggcggcgcggcggccaccatggggaacaagcagaccatcttcaccgaagagcagctagacaactaccaggctgcattcgcgattctatgagctggcccccaacctcgtcccacgactcggaccgatg

SEQ ID NO: 2973 - DNA, 203 bp, synthetic construct
  source 1..203: mol_type = other DNA
ggcgcgccagtcctagaatgttcttttggccactgtgaagcctcaggaaggggctcggattgctcaaggacccatgggagagaggaggctttgactgggctgcctgcctgtgaggtctctggactagaggtccaacgcagtccagctgacaaggatggaatacgccatgaagtcccttagccttctctcgactcggaccgatg

SEQ ID NO: 2974 - DNA, 203 bp, synthetic construct
  source 1..203: mol_type = other DNA
ggcgcgccagtcctactgttgaagccgcagtctccactctcctactgacaccagagaccacccagcccagccaaaccatatggcctcttgttttcctgatgtatgagggctccggctggcacctgaggagcggcgtgaccccgagggcccagggagctgcccggctggcctaggcaggcagccgcacccgactcggaccgatg

SEQ ID NO: 2975 - DNA, 203 bp, synthetic construct
  source 1..203: mol_type = other DNA
ggcgcgccagtccttccctatggttgcccaagatccagttgcgcggaggccacccggggccctggaagctcctaggggcttggaccctggagcctgccgggcaccctctccagctgacctctgcctccaggatttgcctgaaggctgcccccaactctgcacccgccccccgagggccaccgaggacccgactcggaccgatg

SEQ ID NO: 2976 - DNA, 203 bp, synthetic construct
  source 1..203: mol_type = other DNA
ggcgcgccagtccttctcccgccacccacaccagctgtcccactcaccatggagaagatcctgatcctcctgcttgtcgccctctctgtggcctatgcagctcctggcccccgggggatcattatcaacctggctggagtgtagtggcacaatctcggctcactgcaatctctgcttcccgggttcaacgactcggaccgatg

SEQ ID NO: 2977 - DNA, 203 bp, synthetic construct
  source 1..203: mol_type = other DNA
ggcgcgccagtccttctgaaactatcttgttgttgatgcaggctattttcttgaccccttcatgggactcccaacaggggtaccccatttactcagcctgccctgctcaacctcttgcaggagggagcacacgagtgaacgagtgcaggaaccagctggctgctttagtgctgtgaggagtaaactcccgactcggaccgatg

SEQ ID NO: 2978 - DNA, 203 bp, synthetic construct
  source 1..203: mol_type = other DNA
ggcgcgccagtcctacctgcaggcccgggccgcggggttggtttccaccctggaggttgctgacaccctgtgccctcggctgacttccagccggtggcacagacgcctccagggggcagcactcaagcgcatcttaggaatgacagtaacagcgggaacatgaagccgccactcttggtgtttattgtcgactcggaccgatg

SEQ ID NO: 2979 - DNA, 203 bp, synthetic construct
  source 1..203: mol_type = other DNA
ggcgcgccagtccttagctctcgtcacttcctcagcccgccgtctgcccactcctctagccggaacctgggggcccggagccggggtaggcacagagttgtcctcggaggtccaggacagcggccagcccggcggcgggagtcagggccacgccacctgcagggaagaacccgagtcgaagcgggaagcgactcggaccgatg

SEQ ID NO: 2980 - DNA, 203 bp, synthetic construct
  source 1..203: mol_type = other DNA
ggcgcgccagtcctttgcggctggggaggtctacgcttctagagcttgagccagcggggcgaccctgcagtggcaggactcggcaccgcgccctccaccgccggttggtggcctgcgtgacagtttcctcccgtcgacatcgaaaggaagccggacgtgggcgggcagagagcttcatcgcagtaggacgactcggaccgatg

SEQ ID NO: 2981 - DNA, 203 bp, synthetic construct
  source 1..203: mol_type = other DNA
ggcgcgccagtcctcaggcgcggcggcggcgcggcgggcggacttcgtccctcctcctgctcccccccacaccggagcgggcactcttcgcttcgccatcccccgacccttcaccccgaggactgggcgcctcctccggcgcagctgagggagcgggggccggtctcctgctcggttgtcgagcctcccgactcggaccgatg

SEQ ID NO: 2982 - DNA, 203 bp, synthetic construct
  source 1..203: mol_type = other DNA
ggcgcgccagtcctggcagtgtcctcgcgggccagcgacgggcaggacgccccgttcgcctagcgcgtgctcaggagttggtgtcctgcctgcgctcaggatgagggggaatctggccctggtgggcgttctaatcagcctggccttcctgtcactgctgccatctggacatcctcagccggctggcgcgactcggaccgatg

SEQ ID NO: 2983 - DNA, 203 bp, synthetic construct
  source 1..203: mol_type = other DNA
ggcgcgccagtcctagcggctgcagcatccagccagcttggatgtctggcctgtgagcctggggaaactattattaataatatttactgttgataatattggggaaaacagcccttaactctgaggtttctgctgtgctcctttccaaaacagacttccaggactctgaagaaacagttacaagcaggcgactcggaccgatg

SEQ ID NO: 2984 - DNA, 203 bp, synthetic construct
  source 1..203: mol_type = other DNA
ggcgcgccagtcctcgggcagcgaagatgttagccttcgctgccaggaccgtggaccgatcccagggctgtggtgtaacctcagcggccaggcagtctctgtcctccagccaagttttccctcatcaaaacgatcttcgcagattctgacaggtgaagcctctgggcttcctgaagcccttctccttgcgactcggaccgatg

SEQ ID NO: 2985 - DNA, 203 bp, synthetic construct
  source 1..203: mol_type = other DNA
ggcgcgccagtcctgatgaatctgcagaatcagaaggtgtaattgattctcataaacgtagagaaatcctttcacgaagaccctcttataggaaaatactgaatgaactgtcctctgatgtgcctggtgttcccaagattgaagaagagagatcagaggaagaaggaacaccacctagtattgctacccgactcggaccgatg

SEQ ID NO: 2986 - DNA, 203 bp, synthetic construct
  source 1..203: mol_type = other DNA
ggcgcgccagtcctgaggccgcggctaccgcatcacagctgacgtgaggactacgtggggccgctgccggctccgggttgctgggcggcggcgccgctgctgagcggcggtcgggctcgccgtctccacctcctcgcgtccgtaatcagtgacgaggtccgctacgtaaatccctttgcggcggacaacgactcggaccgatg

SEQ ID NO: 2987 - DNA, 203 bp, synthetic construct
  source 1..203: mol_type = other DNA
ggcgcgccagtcctgtaaaatgctgctgacagatttagagttaactagctcaccactgcctctgcctccaagctgccttttagactgaatagcttttcttgttagccctactttaacatttcttttgaagtggttgtctgcttgaagagggaaacacgtcatgaaactgtaatgcatgaacagaactccgactcggaccgatg

SEQ ID NO: 2988 - DNA, 203 bp, synthetic construct
  source 1..203: mol_type = other DNA
ggcgcgccagtcctgtcgcagtcatcatcaactacctgggccactgtatctccctggtggccctcctggtggcctttgtcctctttctgcggctcaggagcatccggtgcctgcgaaacatcatccactggaacctcatctccgccttcatcctgcgcaacgccacctggttcgtggtccagctaacccgactcggaccgatg

SEQ ID NO: 2989 - DNA, 203 bp, synthetic construct
  source 1..203: mol_type = other DNA
ggcgcgccagtcctttgacagctctgggcgaccggaggtggcgcccaaaggctgcccgggagatcggggctgggctggcgggggccaggaccccgcgccctctcggccgctcactctcgcgtccactccctcgcagtcacgccgggcgcgcactcccactccctctccgcacgcggctgcgggacgcgcgactcggaccgatg

SEQ ID NO: 2990 - DNA, 203 bp, synthetic construct
  source 1..203: mol_type = other DNA
ggcgcgccagtcctctctgaagggagctactcagaagcgggagtctccgagagaagaaaagcaggtggaaggagaggaagcggatgccgtggggtttacagcaggaaaatccgtggagacagcagatccgagaagcggcgatgtttgcgtagaaccctctcttcccttctctctgaccagcaccatgccgactcggaccgatg

SEQ ID NO: 2991 - DNA, 203 bp, synthetic construct
  source 1..203: mol_type = other DNA
ggcgcgccagtcctaagcgggagtctccgagagaagaaaagcaggtggaaggagaggaagcggatgccgtggggtttacagcaggaaaatccgtggagacagcagatccgagaagcggcgatgtttgcgtagaaccctgtacgtgcttccttcggcctgtcgctcttcccttctctctgaccagcacccgactcggaccgatg

SEQ ID NO: 2992 - DNA, 203 bp, synthetic construct
  source 1..203: mol_type = other DNA
ggcgcgccagtcctagcatcccaaggcccgactccccgcaccactcagggtcctgtggacagctcacctagcggcaatggctgcaggaagaagcctatatcacaaaggaacagaagtattcattcctgcatgactcccagacctccttctgcttctcagactctattccgacatcctccaacatggagcgactcggaccgatg

SEQ ID NO: 2993 - DNA, 203 bp, synthetic construct
  source 1..203: mol_type = other DNA
ggcgcgccagtcctgcaaggtgctacttttagctcctcttctcggaggaaaacagcacgcaccgcgccaggccaaggtccacggggatttgatttagcatttgggtaactggccgctaatggaactgaagacagctgggcctaacaagtgcccaggtgactcaggttgtggcagcactgcctgaaggtcgactcggaccgatg

SEQ ID NO: 2994 - DNA, 203 bp, synthetic construct
  source 1..203: mol_type = other DNA
ggcgcgccagtcctcagtatctcagtgcctcctgtgggccctcctcccctccttatccattccccctcagatctcccaggccccctgcaggccctcgtgccctccttacttcccccccgggtctcccagcgccccctgcggggccctcctcccttcctcatccacttcaaccccaaggccaagtcattcgactcggaccgatg

SEQ ID NO: 2995 - DNA, 203 bp, synthetic construct
  source 1..203: mol_type = other DNA
ggcgcgccagtccttcccttccccttccctgcccccttcccccacccccgactcgggcttggcgcggcggccagaggaaccccgagcccgcatttgctgcatcgagcagttggtttagtatcagccaaacttgcagctgttcagaccgcgctccgccgagtcccggcccaggcccctgagctggagggcgactcggaccgatg

SEQ ID NO: 2996 - DNA, 203 bp, synthetic construct
  source 1..203: mol_type = other DNA
ggcgcgccagtccttgcggggctccgggggactgagcagcacgagaccccatcctcccctccgggttttcacactgggcgaagggaggactcctgagctctgcctcttccagtaacattgaggattactgtgttttgtgagagctcgctaggcgccctaagcaacagagttctgagaaatcgagaaaccgactcggaccgatg

SEQ ID NO: 2997 - DNA, 203 bp, synthetic construct
  source 1..203: mol_type = other DNA
ggcgcgccagtcctagaggacgcggtcgagtaggtgtgcaccagccctggcaacgagagcgtctaccccgaactctgctggccttgaggtggggaagccggggagggcagttgaggaccccgcggaggcgcgtgactggttgagcgggcaggccagcctccgagccgggtggacacaggttttaaaaccgactcggaccgatg

SEQ ID NO: 2998 - DNA, 203 bp, synthetic construct
  source 1..203: mol_type = other DNA
ggcgcgccagtcctgtaatggcagcgctgtgagcaggggaacgcgagctgacagccgccgccgccgccgcctccgcccaccttcctcgccggggcttcgtctttcactccttcgggctgcctccccctccccttgtcccctgccccttgccctgcttctgcagaagatttcaacactacacttgcacacgactcggaccgatg

SEQ ID NO: 2999 - DNA, 203 bp, synthetic construct
  source 1..203: mol_type = other DNA
ggcgcgccagtcctctcacgcgggtgcagctctgttccgcggaggcacgccccctcccgtctctccgtctcgaccccctcgcggggcccaggtggggcccaagtcgccgccagcgtctgtgccgcgtcccttgctctgtgaaggacaggcctcgcgccaggaccccggtggacttctgaggtgccaggcgactcggaccgatg

SEQ ID NO: 3000 - DNA, 203 bp, synthetic construct
  source 1..203: mol_type = other DNA
ggcgcgccagtcctctcggtggcggcggcggcggccggctccaggccgggttttggcgccgcccgcctgctgcctcctggcggctcctgaactccagccccctctctatcagccgctcactccgtctcaatatgtctcaagatggcggccaatgtgggatcgatgtttcaatattggaagcgctttgacgactcggaccgatg

SEQ ID NO: 3001 - DNA, 203 bp, synthetic construct
  source 1..203: mol_type = other DNA
ggcgcgccagtcctcccagtgtggtccagtgagtactctgggctccctctcgtgggcagggaagctgagggccccatgagctctcccagcttcctgaaggctccccattaatgagagctgactgtgctgtgctttgctgactgcagggcctgctccctgccccccacctccaggttggggccttcacccgactcggaccgatg

SEQ ID NO: 3002 - DNA, 203 bp, synthetic construct
  source 1..203: mol_type = other DNA
ggcgcgccagtcctccatgtttactactgtttgtgcggccagatggtcctagtgctgggtgagtagccgggaactgcgggggcgtctgcaaggagccagacttcgggttcttgaaggcgaatttcctctggctgtgatctgggagccacttctcaacgaagattgactgccagttagagaaattgccccgactcggaccgatg

SEQ ID NO: 3003 - DNA, 203 bp, synthetic construct
  source 1..203: mol_type = other DNA
ggcgcgccagtcctgtcatcgaccctgaagatgtggcccttctctttaagtccgagggccccaacccagaacgattcctcatcccgccctgggtcgcctatcaccagtattaccagagacccataggagtcctgttgaagaagtcggcagcctggaagaaagaccgggtggccctgaaccaggaggtgcgactcggaccgatg

SEQ ID NO: 3004 - DNA, 203 bp, synthetic construct
  source 1..203: mol_type = other DNA
ggcgcgccagtcctgagaaggaagctccctcctggccccactcctcttcctattattggaaatatgctacagatagatgttaaggacatctgcaaatctttcaccaatgtaagtctgccttatgttcctccagccaattgcaaaggttctcaaaagtctatggtcctgtgttcaccgtgtattttggccgactcggaccgatg

SEQ ID NO: 3005 - DNA, 203 bp, synthetic construct
  source 1..203: mol_type = other DNA
ggcgcgccagtccttttagatccagatatacattgggtaaaatctacttcataggttttcaaaggagcattcttctgagcaaatctgaaaactctctaaactctattgcaaaggagacagaagaaggaagagagacggtaacaaggaaagaaggatggaagagaaggcatgaggacggctatttggaacgactcggaccgatg

SEQ ID NO: 3006 - DNA, 203 bp, synthetic construct
  source 1..203: mol_type = other DNA
ggcgcgccagtcctcctctgggtggacgcctaggcgcacggccgttacttctctttcacctgtggattcgtcagtttctcgttcgtttcaggaggcgatcccgcgccctgggtgcggtgaggccgctgggacagcggaggtgcctcccgacgcgaagcagcgagctgaggcggcggccagcggggaagcgactcggaccgatg

SEQ ID NO: 3007 - DNA, 203 bp, synthetic construct
  source 1..203: mol_type = other DNA
ggcgcgccagtcctcctgtgactaaggagttgttgttaacgagcccgaaatacagattttggaagaaacgaattatatctattgaaatcgagactcctacccagatatctttagtggatgaagcatcaggagagaaggaagagattgttgtgactctcttaccagctggtcactgtccgggatcagttcgactcggaccgatg

SEQ ID NO: 3008 - DNA, 203 bp, synthetic construct
  source 1..203: mol_type = other DNA
ggcgcgccagtcctgaagagaagcagaggccagctgtttttgaggatcctgctccacagagaatgctctgcacccgttgatatgcctcccaggacccagagggagactgtagcctcatttctgtggagacctttggctggactctcctggctctcccagagactccagttccaacaccatcttctgagcgactcggaccgatg

SEQ ID NO: 3009 - DNA, 203 bp, synthetic construct
  source 1..203: mol_type = other DNA
ggcgcgccagtcctgattcccggggcctggctttcagcgtagcaattctgccggcgaagaaggtgagcgcagtgctgtgtggcagcagagctccttaggacgaggagcagcgggacgaggaagggcagactggtgaaatcgcaaactgggcgtctgttccggcgccggacccctatttgcaaaggtcccgactcggaccgatg

SEQ ID NO: 3010 - DNA, 203 bp, synthetic construct
  source 1..203: mol_type = other DNA
ggcgcgccagtcctaacagcgcgggccgcgcgggcgtaggcggggtatctggaggaggcgcagggaacctggagagggtccagccctcagtgccccggccagaggcgggaaggggctctagagcttcgggaggcaagatgacttctctgccccaagcttggaacagctaaagggaaaaacagtgcaagcgactcggaccgatg

SEQ ID NO: 3011 - DNA, 203 bp, synthetic construct
  source 1..203: mol_type = other DNA
ggcgcgccagtcctgagctcatctgagagttgtaagactctaaggcagcccctgcatctcagtcctgacatcgctgtccctggagcatcctccgctggagctggagcttgacagagtctccatctgtcgctcaggttggagtgcagtggcgtgatcttggctcactgcaagctccgcatcccgtgttccgactcggaccgatg

SEQ ID NO: 3012 - DNA, 203 bp, synthetic construct
  source 1..203: mol_type = other DNA
ggcgcgccagtcctctcagtgccttcaagacatgtcgttttgtagtcagagaaaacagagatcaatgcattttcaaactgacagagggaacggatgctctttagtagcacatgcccaggatcgtgtgtgtggggcttgcgctgtgctgagaagctgaataccggtccatatgctccttatttactgcacgactcggaccgatg

SEQ ID NO: 3013 - DNA, 203 bp, synthetic construct
  source 1..203: mol_type = other DNA
ggcgcgccagtcctaaaggatccacaagagttcatgccctgaacaatgtcaacaaggcactgcgggttttgcagaacaataatgttgatttagtgaatattggaagtactgacatcgtagatggaaatcataaactgactcttggtttgatttggaatataatcctccactggcaggtcaaaaatgtacgactcggaccgatg

SEQ ID NO: 3014 - DNA, 203 bp, synthetic construct
  source 1..203: mol_type = other DNA
ggcgcgccagtcctcgctcactctcattggtcagttgctcgctgtggtcccatcccacatgcttccattgcttgattcctcgaaaagggcggggactctgggcagcggttgtggagtgccgcgggtccacagtgctgcactgagcagagaggaaggggcgtcccgggatatttggaggataaagggtgcgactcggaccgatg

SEQ ID NO: 3015 - DNA, 203 bp, synthetic construct
  source 1..203: mol_type = other DNA
ggcgcgccagtcctcgctggacctgcaggctgaaagtcctcctgtggacccagactcccaggccgatacagtgcacagcaaccccgagctagatgtgctgcttctgggctctgtggatggacggcacctgctgcggaccctgtcccgagcgaagttctggcctcgcaggaggttcaacgtgagctgggcgactcggaccgatg

SEQ ID NO: 3016 - DNA, 203 bp, synthetic construct
  source 1..203: mol_type = other DNA
ggcgcgccagtcctctctcttgggggtttgtgtttttacatcgtctttctgcacggttctccagcttcttgtccgcacgggctctgcaggtgttgcttgcctggaactcctgtaaggccagtacagtggtagcagttggactgaccattgctgctgcaggatttgcaggccgttacgttttgcaagcccgactcggaccgatg

SEQ ID NO: 3017 - DNA, 203 bp, synthetic construct
  source 1..203: mol_type = other DNA
ggcgcgccagtcctccgagcgggccatggccaccgccattcagaacccgctcaagtcgcgaggacttctaccgcgaggccatcgagcactgccgcagttacaacgcgcgcctgtgcgccgagcgcagcctgcgactgcccttcctcgactcgcagaccggcgtggcccagaacaactgctacatctggcgactcggaccgatg

SEQ ID NO: 3018 - DNA, 203 bp, synthetic construct
  source 1..203: mol_type = other DNA
ggcgcgccagtcctggcggcgcagcatgaagcggcgcaggcccgctccatagcgcacgtcgggagggtccgggcggggccggggggaaggctttgatggtgaggaaaggaaagattcctgtgagaagagcaggatgagcagagggattctatgcttgaagtcgagtcacttgaaaaagatctctttgacgactcggaccgatg

SEQ ID NO: 3019 - DNA, 203 bp, synthetic construct
  source 1..203: mol_type = other DNA
ggcgcgccagtcctctcgacccgccgcagccccggccccgaccgtggacactgggggtccccgagggcgctgcgacctcctcccgggtgaaatgaaacccgagggcagtcccccttaccgaccccattagagacgtatctgccgtgccaggggtctaggctccagaaacagggagtttaccacctaggcgactcggaccgatg

SEQ ID NO: 3020 - DNA, 203 bp, synthetic construct
  source 1..203: mol_type = other DNA
ggcgcgccagtcctttctaagagtttggcgagtcagtgactgaagcgcccgtccattccaagataaataggatttaccaatccttggatgaagtgcttgggaagtctttaagtgccataatcaactgccatttcaaagaatatagatggttttgaaaagttcatgctgtcccttcattgaattttagacgactcggaccgatg

SEQ ID NO: 3021 - DNA, 203 bp, synthetic construct
  source 1..203: mol_type = other DNA
ggcgcgccagtcctggcgcttcgtgtgaggttccacgggggaaggcgagaggcgcaggctgccacacacgcactgtttggaagaggggaagggctgcacttcctgctttcatccagaccaagttcggatcaagtgggagttcttcaaagagagagtttgcattgccccccctgcaccacctcaccaagcgactcggaccgatg

SEQ ID NO: 3022 - DNA, 203 bp, synthetic construct
  source 1..203: mol_type = other DNA
ggcgcgccagtcctggtggcccgttcccctttaagagcaactgctctaagccaggagccagagattcgagccggcctcgcccagccagccctctccagcgaggggacccacaagcggcgcctcggccctcccgacctttccgagccctctttgcgccctgggcgcacggggccctacacgcgccaagccgactcggaccgatg

SEQ ID NO: 3023 - DNA, 203 bp, synthetic construct
  source 1..203: mol_type = other DNA
ggcgcgccagtcctggtaagcttaccgtgaaaggagggtttgggctgttgttgctacacgtggatgtgaaatgagtcaagcggaactttgattacaaggaatttcatatactccttcccaccatggattgccaagaaaatgagtactgggaccaatggggacggtgtgtcacctgccaacggtgtggtcgactcggaccgatg

SEQ ID NO: 3024 - DNA, 203 bp, synthetic construct
  source 1..203: mol_type = other DNA
ggcgcgccagtcctgtcctctggtgttgagtggtcggcttggtgtggtgtgcggaggagctccaggcccgtcggcgcggagggtcttgctgtgttgcccagcctggtcttgaattcctggactcaagtgatgctcctgccttggcttcccaaactcctggaattacaacttggtctcacgtgtgaaaccgactcggaccgatg

SEQ ID NO: 3025 - DNA, 203 bp, synthetic construct
  source 1..203: mol_type = other DNA
ggcgcgccagtcctcttgagcctggcttaggccaccacctactccagctctctccaccccctattttactgcagctcagggggtaggctctaggctccaaagtacctgggtattgtcccttcatcaagaaagccccacagctctggagggctctgataatcccgttgtcagctctctgaaaagacagccgactcggaccgatg

SEQ ID NO: 3026 - DNA, 203 bp, synthetic construct
  source 1..203: mol_type = other DNA
ggcgcgccagtcctggggggcttgtgggtcctcctccccctcccactgacaactgccccaactgctcttcccgccccggtcacagtgaaaatgtagacggggtcgttgtccactatgttaggtcttaatggtgggaggacgcccgagtgctcggcccgtttcaccccgaggaggaaggacactgggtccgactcggaccgatg

SEQ ID NO: 3027 - DNA, 203 bp, synthetic construct
  source 1..203: mol_type = other DNA
ggcgcgccagtcctagggtttgaggttccttccgaaacggggccggctaatttagcccctcccacgagcccaagggtctgttatatctctgtttccttgaggacctctctcacggagacggaccacagcaagcagaggctgggggggggaaagacgaggaaagaggaggaaaacaaaagctgctacttcgactcggaccgatg

SEQ ID NO: 3028 - DNA, 203 bp, synthetic construct
  source 1..203: mol_type = other DNA
ggcgcgccagtcctctcgctcgctccctccctccgctggtgcgtttagtcagtcagccagcagcagccggcgggcccgcgagccgcagagggcccgagcctcggacgccggcgcctcctcctgccattgttcgtcgggctgcagcagtggcgggcgcaggagcccggccccggagccaccgcaacatccgactcggaccgatg

SEQ ID NO: 3029 - DNA, 203 bp, synthetic construct
  source 1..203: mol_type = other DNA
ggcgcgccagtcctagggaataaggggtgcgtcttgacagagtacgtggaggtcggcagaagtacaagcgcaggatagatgcggagaacagcccatacctgaaccctcagctggttcagccagccaaaaagccatataacaagattgtctcacatttgttggtggctgaaccggagaagatctatgcccgactcggaccgatg

SEQ ID NO: 3030 - DNA, 203 bp, synthetic construct
  source 1..203: mol_type = other DNA
ggcgcgccagtcctttctgttcttggagtctagacagcatcaggagttgggctcagtgaacaaaactttaatgtctagagcatttatgagggttttaatgattggaaaatctatcctgagaatgtggtcaccatatgtgacagccttgctttctatcttgtcttcagtttctggggcttctctgcagacgactcggaccgatg

SEQ ID NO: 3031 - DNA, 203 bp, synthetic construct
  source 1..203: mol_type = other DNA
ggcgcgccagtcctcggcttcggcttctttaaaatccccgacgactcacctgattaacctgctgcagttctgaccctgccaagagctgacaatttactggttcatcaatgaaacaatattaaattatgaagatgtaaggaaaaaatcctacgctaacactgtcgcagtttgaaaggcttctctgcagacgactcggaccgatg

SEQ ID NO: 3032 - DNA, 203 bp, synthetic construct
  source 1..203: mol_type = other DNA
ggcgcgccagtcctccccagcagccacagccaggggagcgctcaagacagaaagccggtggcttcctcacctccacctgtaatgcaggcatccagcccgcactgtggagcagggaggacgtgctgcactggctgcgctgggcagagcaggagtactctctgccatgcaccgcggagcacgggttcgagcgactcggaccgatg

SEQ ID NO: 3033 - DNA, 203 bp, synthetic construct
  source 1..203: mol_type = other DNA
ggcgcgccagtcctggcttcctcacctccacctgtaatgcaggtgacgtcctgtatgagctgctccagtacatcaagacccagcggcgagccctggtgtgtgggcccttttttggagggatcttcaggctgaagacgcccacccagcactctccagtccccccggaagaggtgactggcccctctcagcgactcggaccgatg

SEQ ID NO: 3034 - DNA, 203 bp, synthetic construct
  source 1..203: mol_type = other DNA
ggcgcgccagtcctgatctcggggctcagggcggaaacgcagcggatatgtattttcttccggggttggtggcgctcggctctcatgacctgcaggtgacagtgttggccggtggcgcggccctgcttgcctcgtgccccgcccttcgtgcttgaaaaaaaatcccgcgaagccttctccgaaagaaccgactcggaccgatg

SEQ ID NO: 3035 - DNA, 203 bp, synthetic construct
  source 1..203: mol_type = other DNA
ggcgcgccagtcctggacttcccggtggagtgaggaacccagcaacacgctcctgacttcccttcccaaggactcgacctgagaaggacacagcagtctctgaatttcatgctctcctctttgatgtgaagaaaatgaaaagctgaacagttgtggaactgtggatagagttagacaataaggccgcccgactcggaccgatg

SEQ ID NO: 3036 - DNA, 203 bp, synthetic construct
  source 1..203: mol_type = other DNA
ggcgcgccagtcctagcaagcatgttctgcctggatgacctagggccccacattgaactggggcctgggggatgcataagtttgtcacgtaaggggcatgtgcaagaatggaagatgtgcaaaaaagggaggaggaggcatttcacggagaaggaaacggagtggaagcagcctgaggccctcatccacgactcggaccgatg

SEQ ID NO: 3037 - DNA, 203 bp, synthetic construct
  source 1..203: mol_type = other DNA
ggcgcgccagtcctcctgtacgtagtcacggtcttgtgctctaaggtgagtggaggacgagcttgggcttagcggcagcccgtatcacatcctagactttttacttcgaggagaagagtctcacgagttgtcctggaagaaaacgacagcacgtgttctttttcactagtagaagtgacgttggtttccgactcggaccgatg

SEQ ID NO: 3038 - DNA, 203 bp, synthetic construct
  source 1..203: mol_type = other DNA
ggcgcgccagtcctttggctcggagtcacttggctgtgacccagcccttcggtcaaagatggacaaacagagatccgaaccatggtctctatcctaaaccgagaacaaaaagagggagtaggggtcagggaagtcaaagatgcatccctgagttcttcctagcaggcaagcagccgtgcaccaatgaccgactcggaccgatg

SEQ ID NO: 3039 - DNA, 203 bp, synthetic construct
  source 1..203: mol_type = other DNA
ggcgcgccagtcctgtggcagagctacgccttgcaccccgaccttccgttgctagctccagctgctttccaaaataccaccttgacttctcagtctccaggtttaaaggagagcaactagaagtcgtccaaacacctgcatctcataaggagaagaaaagtccacctggatcttgtttctggactgagcgactcggaccgatg

SEQ ID NO: 3040 - DNA, 203 bp, synthetic construct
  source 1..203: mol_type = other DNA
ggcgcgccagtcctactgaggcacggagctggacagtgactcagacaccaggagctgcctggagtggagctgagagctcaggtctgggctcagccagtccagagtgcaaatctactgtcccttcctagctgtgtgatcttgacaggcactggacggggcctgcaggggtctccacagagaccatcaggcgactcggaccgatg

SEQ ID NO: 3041 - DNA, 203 bp, synthetic construct
  source 1..203: mol_type = other DNA
ggcgcgccagtcctttagcggggagcagctagagggacaggagggagggaaggaaggaaggaggaaacctggaagatgaggtcagccacgagagataaggggtaagaatatccggcagacttagcgttccggaggtggccctggagaggacatcgtgacccagagtgaaggatctgtcgcaggaaagacgactcggaccgatg

SEQ ID NO: 3042 - DNA, 203 bp, synthetic construct
  source 1..203: mol_type = other DNA
ggcgcgccagtccttttgaaaaggaggatcgagctcactgtggagtatccatggagatgtggagccttgtcaccaacctctaactgcagaactgggatgtggagctggaagtgcctcctcttctgggctgtgctggtcacagccacactctgcaccgctaggccgtccccgaccttgcctgaacaaggcgactcggaccgatg

SEQ ID NO: 3043 - DNA, 203 bp, synthetic construct
  source 1..203: mol_type = other DNA
ggcgcgccagtcctcgccgcgcctcggcctcggtgcaggcagcggccgccgccgccgagacagctgcgcgggcgagcatccccacgcagcaccttggaagttgttttcaaccatatccagcctttgccgaatacatcctatctgccacacatccagcgtgaggtccctccagctacaaggtgggcacccgactcggaccgatg

SEQ ID NO: 3044 - DNA, 203 bp, synthetic construct
  source 1..203: mol_type = other DNA
ggcgcgccagtcctctcggctgcagacttggccaaatggacgggactattaaggaattctttctctgggtcatccactgctgagccccctccccaggaagtggaattgaggctctgtcggtggtgagcgacgaccagtccctctttgactcagcgtacggagcggcagcccatctccccaaggccgaccgactcggaccgatg

SEQ ID NO: 3045 - DNA, 203 bp, synthetic construct
  source 1..203: mol_type = other DNA
ggcgcgccagtcctagacatgagtctagcacctgggactcatgaagttctgaaaagaggggtgtcctgaaggtccaaggcgcctttgttgggggtcccggaatccgcggtgtgccaggtcggaaaaggcgtccgctttcctggagaggaggctaaggtgccgggcgcttcgattctctttgtggccagcgactcggaccgatg

SEQ ID NO: 3046 - DNA, 203 bp, synthetic construct
  source 1..203: mol_type = other DNA
ggcgcgccagtcctgtgaggcagacgaactcgcggctctccggcttccgaggcttccgagttgtcggaggaagggggcggcgagcaataagaacccgccgcacccggtcctcagcgactcttctgacctccgcgcgacgtacccgccgccgccgttggctggagcatttgacattgtgcagcaaagaacgactcggaccgatg

SEQ ID NO: 3047 - DNA, 203 bp, synthetic construct
  source 1..203: mol_type = other DNA
ggcgcgccagtcctctgcgcgcccccgggcacgaccccggagtctccgcgggcggccagggcgcgcgtgcgcggaggttctcctcgtccgcccgttgttcagcgagggaggctctgcgcgtgccgcagctgacggggaaactgaggcacggagcgggcctgtaggagctgtccaggccatctccaacccgactcggaccgatg

SEQ ID NO: 3048 - DNA, 203 bp, synthetic construct
  source 1..203: mol_type = other DNA
ggcgcgccagtcctcgcgggggccgtaggaagccaaccttccctgcttctccggggccctcgccccctcctccccacaaaatcagggatggaggcgcctccccggcaccctcttagcagccctccccaggaaaagtgtcccccctgagctcctaacgctccccaacagctacccctgccccccacgcccgactcggaccgatg

SEQ ID NO: 3049 - DNA, 203 bp, synthetic construct
  source 1..203: mol_type = other DNA
ggcgcgccagtcctggtgctgcaggtctcagccgaagggcgtcggaaactgcgctcgcatcgagcagtttccagcctcctgggtaaaggagcagtctcctcccttgcttgggactctggacgcatctcattccggtgaaagtaagggacagcttaggaccagaagcctttcgcggagaaaaggctgaccgactcggaccgatg

SEQ ID NO: 3050 - DNA, 203 bp, synthetic construct
  source 1..203: mol_type = other DNA
ggcgcgccagtcctttggggctgctgtttctcttcgccgacggtgcccgcccctgcatccctaaaagcttcggctacagctcggtggtgtgtgtctgcaatgccacatactgtgactcctttgaccccccgacctttcctgcccttggtaccttcagccgctatgagagtacacgcagtgggcgacggcgactcggaccgatg

SEQ ID NO: 3051 - DNA, 203 bp, synthetic construct
  source 1..203: mol_type = other DNA
ggcgcgccagtcctcttctcttacactgcatacctgtgtctgagtactcttttcatcagtcactcagccagggtctgcagcatgaacccagcagctggtgtcccctatgaggaactcagcaacagattgcgacagaacccttgagaacaaaggagagaggaggtgctgcaagactctctggtagaaaacgactcggaccgatg

SEQ ID NO: 3052 - DNA, 203 bp, synthetic construct
  source 1..203: mol_type = other DNA
ggcgcgccagtcctaggaaaactaggcccctgcgcggccaacgcccaggatccgcaagctgcgcgcccacgagctccaccagcccattggagaaaagttactgttcagtccctgaaggcttgtgccataaaagagtgggagacattcccagggagtttcagcacccatttggactttcacaatcagagcgactcggaccgatg

SEQ ID NO: 3053 - DNA, 203 bp, synthetic construct
  source 1..203: mol_type = other DNA
ggcgcgccagtcctgcctgcagctcggtgcgctctgggcacccgggcgccttgcccggtgcacggcggctggcgcaccgcggctagattggctacaggagcggggtgcaggactggctagaggtgggtgtgtgcgcgcgttggactggagatccgagcagaagcagaaccaggcggctctgagcagcccgactcggaccgatg

SEQ ID NO: 3054 - DNA, 203 bp, synthetic construct
  source 1..203: mol_type = other DNA
ggcgcgccagtcctggcggtggctgctgccagacccggagtttcctctttcactggatggagctgaactttgggcggccagagcagcacagctgtccggggatcgctgcacgctgagctccctcggcaagacccagcggcggctcgggatttttttgggggggcggggaccagccccgcgccggcacccgactcggaccgatg

SEQ ID NO: 3055 - DNA, 203 bp, synthetic construct
  source 1..203: mol_type = other DNA
ggcgcgccagtcctagtaggacaatatgagactctggggcagtgaaagacttaccaggattccttctggaactgactcgtcagctcattcatgtcttacccagtctttaaacagtatttcatgataatggtctgcttttaattgctgggctttaccttaccctttttgtgattgcaggtcctacaggtcgactcggaccgatg

SEQ ID NO: 3056 - DNA, 203 bp, synthetic construct
  source 1..203: mol_type = other DNA
ggcgcgccagtcctaacctcagtgcgtgaactctgttatccagaaggcctcgccctgccgccgccgaagctggaattcgtcggctagtagttctcgccggcaactagaggaacctgttggcgtggcccagaaggcttagcgggattgcacgagccctcagattcatcgctaccccgaggctaagcgcccgactcggaccgatg

SEQ ID NO: 3057 - DNA, 203 bp, synthetic construct
  source 1..203: mol_type = other DNA
ggcgcgccagtcctagtcgtctacccgcgcgcccgagcgcggaaaccgaggggcaggctcgcgctctgcctgcttcgtggcgcttggttcgtccctcgcccgaggagcgcggtggcggcgtgggagggagcctctgacggcgtctggaactctattttaagaacctctcaaaacgaaacaagcaaatccgactcggaccgatg

SEQ ID NO: 3058 - DNA, 203 bp, synthetic construct
  source 1..203: mol_type = other DNA
ggcgcgccagtcctggaggcaggttgatgtgtttgtgcttccttctacagccaatatgaaaaggcctagtaagtggggtcgggaggcgggcgtggagggacccacgtctggaagttgctgcagccaccacgacgctcttctacggctacggctttgtctctgctgagttaaagaaagcaagtaaacgccgactcggaccgatg

SEQ ID NO: 3059 - DNA, 203 bp, synthetic construct
  source 1..203: mol_type = other DNA
ggcgcgccagtcctggggacacctcccgcgccatctcgggggcactggagataaggaaaggaacctcctccctggctgggatggctgcccgggcgcgggaggagggccggggacccggtgagggaggaccgtagggcccgtgggggcttcacgcctggcaggcggccggccaggcctccctccctgaccgactcggaccgatg

SEQ ID NO: 3060 - DNA, 203 bp, synthetic construct
  source 1..203: mol_type = other DNA
ggcgcgccagtcctggaaggaggctgagtgactactggactggatattgactctaactcttgtttccaagcttatatcctcaatcacctaaagatcagagtgtgaagaaacaaacctgtgacagatctgtggttgaggtttagactgggggaggagtatagtactggactttctttgtaacttgtacccgactcggaccgatg

SEQ ID NO: 3061 - DNA, 203 bp, synthetic construct
  source 1..203: mol_type = other DNA
ggcgcgccagtcctaaaaaaggtctttgccaatcctgattcccggaagagagtcggcagaattccttcctttaggcccctctggagccttggccgaccagccacttctgtggtctggggacagtcaccgagggtatcaaaaagccattcacagaggtcatccgagccaacatcggggacgcccaggctcgactcggaccgatg

SEQ ID NO: 3062 - DNA, 203 bp, synthetic construct
  source 1..203: mol_type = other DNA
ggcgcgccagtcctagacacaaagcctgcgaaagtgctcgggaagagggagagcaaacttggctcagcccactcagaggctgagaatggtgtggaggagaaaaagaaagcctgcaggtcgccaacagcccaatcccctaccccatctgtggaggcggactccccagaccagaagaaaatcattagcctcgactcggaccgatg

SEQ ID NO: 3063 - DNA, 203 bp, synthetic construct
  source 1..203: mol_type = other DNA
ggcgcgccagtcctgccctcccgaattctctgctcctctccccaccccactgttggtctgtgatttcgaggcaggcgtggccccctgcagcctggaatgaagtcactggggctgtttggagaccggggctgtttggaggacaagggcacacaactggttccgttaagcccctctctcgctcagacgcccgactcggaccgatg

SEQ ID NO: 3064 - DNA, 203 bp, synthetic construct
  source 1..203: mol_type = other DNA
ggcgcgccagtccttcggattccaagggaaacagacaaacctcacgaaaggaaggaagcaagcaagcaaggaaggaactgcaggaggaaaagaacaggcagaacagcgagaagaataaagggaaagggggggaaacaccaaatctatgattggacctgggcttctttttcgccaatgcaaaaaggaatcgactcggaccgatg

SEQ ID NO: 3065 - DNA, 203 bp, synthetic construct
  source 1..203: mol_type = other DNA
ggcgcgccagtcctgctccctcctttgtgctcccagggcccacaactgcttgaatgactattggtgttcctgtttgtgtgccctctgggccgggaagtcagagaaagaaaggagacaatttgtgattgaacagccactgtggccatcattctccttacctgtctgatgagagctgatcttcatgccaccgactcggaccgatg

SEQ ID NO: 3066 - DNA, 203 bp, synthetic construct
  source 1..203: mol_type = other DNA
ggcgcgccagtcctccgccccgccgcccggaaccagctgagcgcagctggacccagcagccgctgtctccagtgccgcagcagcaggtagtgctcatagctctctttgtccagtgcttcggccttggtcccagcgccttcccacggagcagcactcttcaccctgcacagccttgttagcccaacagccgactcggaccgatg

SEQ ID NO: 3067 - DNA, 203 bp, synthetic construct
  source 1..203: mol_type = other DNA
ggcgcgccagtcctagtgttgcctgactcagtttccaagcttgactcttccctttggcatagtgagtttggagtcaagagatttttattttcccttcacaagctgaacaggagcctttggagagaacgctctggaccggaagcgcgcccccggggccggtcccggagggctcgatccgcatctacagccgactcggaccgatg

SEQ ID NO: 3068 - DNA, 203 bp, synthetic construct
  source 1..203: mol_type = other DNA
ggcgcgccagtcctccatctttactttctccacaaaagcccatcctctattcctatttccgaagctcctgctcatggagagttcgaattgctctggccttgaaaggcatcgactacgagacggtgcccatcaatctcataaaggatgggggccaacagttttctaaggacttccaggcactgaatcctcgactcggaccgatg

SEQ ID NO: 3069 - DNA, 203 bp, synthetic construct
  source 1..203: mol_type = other DNA
ggcgcgccagtcctactttactagtcaagccgcggagtgggcggggccccctgcccagacttgaagccacacaggcaggtcgggcaggcgggtcgcaggttgtaaatccatgtggcgggggctttggaccctggcggcccaagcggcacgtgggcctcgcagattgtgcacgcgccggagcagcggcgcgactcggaccgatg

SEQ ID NO: 3070 - DNA, 203 bp, synthetic construct
  source 1..203: mol_type = other DNA
ggcgcgccagtcctggccaccgcggtctccgcgcctgtctgcaccctgtcgcctgagctgcctgacagtgacaatgacatcccagttaccagtgtccttgaattgatagtggcttctgtttgtcagtctcatataagaactacagctcatcaggaggagatcgcagcagggtaagagacaccaacacccgactcggaccgatg

SEQ ID NO: 3071 - DNA, 203 bp, synthetic construct
  source 1..203: mol_type = other DNA
ggcgcgccagtcctgaagcaggaaaaaggggcaggcttgaggacgcctccattctatgcctggataaggaggatgattttctacatgtttactacttcttccctaagagaaccacctccctgattcttcccggcatcataaaggcagctgctcacgtattatatgaaacggaagtggaagtgtcgttacgactcggaccgatg

SEQ ID NO: 3072 - DNA, 203 bp, synthetic construct
  source 1..203: mol_type = other DNA
ggcgcgccagtcctcttgggaaagggacgctacaaaataaagctcaccccaacagctgagaagagggtgcagaaatccagggaggtcatagatagcatcataaaagagaaaacagggagcttcaggtcaacttagtacgctcacattcttcaggtgttgggaaaccactaagtcctgagaggtgtcggcgactcggaccgatg

SEQ ID NO: 3073 - DNA, 203 bp, synthetic construct
  source 1..203: mol_type = other DNA
ggcgcgccagtcctaagactgtcagctacgattttctctagcctcaagaagactgagaccgagccaaactcctggccaacgtgctttgtggattcacagtgtagcttgagaaaaatgtggatgtgaagtcagaagttcctgtgggcctggagcccatctcacctttagacctaaggacagacctcaggcgactcggaccgatg

SEQ ID NO: 3074 - DNA, 203 bp, synthetic construct
  source 1..203: mol_type = other DNA
ggcgcgccagtcctgttccgctgattcctttcgtaaccgcaccacacccgagctacaatctctggacaaaattttaagagaaactccctcagaactcctaaaggtaaacaaaagcaggcagattgaggatggcagtcagaatatgaagtgaccatatatggacgtgggttggcaataagagaagaaagcgactcggaccgatg

SEQ ID NO: 3075 - DNA, 203 bp, synthetic construct
  source 1..203: mol_type = other DNA
ggcgcgccagtcctcttggctcaggcttggaggcctccgagcagcaacatcgtcccaattataccccgttggagcatcttcagatcttccactcttttcacaacgcaatcaaaatcttcgtacccattttgcagtagtgatctctaaactctcagcgtaggcatcgggaaccttcgtgccaaggagcccgactcggaccgatg

SEQ ID NO: 3076 - DNA, 203 bp, synthetic construct
  source 1..203: mol_type = other DNA
ggcgcgccagtcctgagggtggcgtcccggggaagcccgcagccgccgccgatgtcgctgggactcggaagtgccgaaagaggggtgttgggaactcgcggcgcgcgtgaacgttgccgtcgccgccgcccgggacagcccggagaaactctcagcgtaggcatcgggaaccttcgtgccaaggagcccgactcggaccgatg

SEQ ID NO: 3077 - DNA, 203 bp, synthetic construct
  source 1..203: mol_type = other DNA
ggcgcgccagtcctacccaaggccggccctttcctgtggagtcatctcaccgccgtgcgcacccactcgtaactcgcacccgggtcctggctgcaccgcatcccctcctgcaccccctggatggcccttcagccaacgggggcctgggcgatggtcgaccacggagctgcgcaaggaaaagtcccgggcgactcggaccgatg

SEQ ID NO: 3078 - DNA, 203 bp, synthetic construct
  source 1..203: mol_type = other DNA
ggcgcgccagtcctgagggacatcttttcaagtagaggctgtgttggggcatggtgagagagggtcttagcaggtaaccttcctttcctctccagactgaggaatcagagttctgattgtggagtgcctctctctaggacggggctgcagcataggagtctcagctgcttacatccaggtccaggattcgactcggaccgatg

SEQ ID NO: 3079 - DNA, 203 bp, synthetic construct
  source 1..203: mol_type = other DNA
ggcgcgccagtcctccactcacagccagtgacacttgcaaaaaactcccaaagccgtcttgggtttggctcccacagctcttgaccaatgtggccaaagctggacacctccttgggacactgggattattcataaatgcagcccgccctgactctccctgaatagcatctgaagtctttgtgaaggtccgactcggaccgatg

SEQ ID NO: 3080 - DNA, 203 bp, synthetic construct
  source 1..203: mol_type = other DNA
ggcgcgccagtcctccggttgtagatgtatctctccaggaagcgctgtgtcccattaaacgcgtagcattcctgccgtccctggaaaagtgctagaggcccacagtttcagtctcatctgcctccactcggcctcagttcctcatcactgttcctgtgctcacagtcatcaattatagaccccacaaccgactcggaccgatg

SEQ ID NO: 3081 - DNA, 203 bp, synthetic construct
  source 1..203: mol_type = other DNA
ggcgcgccagtcctgcacccttgtggcccaggcactttatggatgatcccttttagtgctcccagtaaccttccaagattgtcaagtggtcagactgttgtttgccattagcttgcagacctggggatccttatcggctaattgctgaagcaagtgtggacaacttcagcaagctgggggtggcgttccgactcggaccgatg

SEQ ID NO: 3082 - DNA, 203 bp, synthetic construct
  source 1..203: mol_type = other DNA
ggcgcgccagtcctcgggggccttcggggtgggcgcccagggtagggcaggtggccgcggcgtggaggcagggagaatgcgactctccaaaaccctcgtcgacatggacatggccgactacagtgctgcactggacccagcctacaccaccctggaatttgagaatgtgcaggtgttgacgatgggcacgactcggaccgatg

SEQ ID NO: 3083 - DNA, 203 bp, synthetic construct
  source 1..203: mol_type = other DNA
ggcgcgccagtcctggtttgaaaggaaggcagagagggcactgggaggaggcagtgggagggcggagggcgggggccttcggggtgggcgcccagggtagggcaggtggccgcggcgtggaggcagggagaatgcgactctccaaaaccctcgtcgacatggacatggccgactacagtgctgcactgcgactcggaccgatg

SEQ ID NO: 3084 - DNA, 203 bp, synthetic construct
  source 1..203: mol_type = other DNA
ggcgcgccagtcctgcgcgagtgctgctgacaggggccaacgctggtgttggtgaggagctggcctatcactacgcgcgtctgggctcccacctggtgctcactgcccacactgaggctctcctgcagaaggtggtagggaactgccggaagctgggcgcccccaaggtcttctacatcgcgggggaccgactcggaccgatg

SEQ ID NO: 3085 - DNA, 203 bp, synthetic construct
  source 1..203: mol_type = other DNA
ggcgcgccagtcctcctagaacgagctggtgcacgtggcttcccaaagatctctcagataatgagaggaaatgcagtcatcagtttgcagaaggctagggattctgggccatagctcagacctgcgcccaccatctccctccaggcagcccttggctggtccctgcgagcccgtggagactgccagagcgactcggaccgatg

SEQ ID NO: 3086 - DNA, 203 bp, synthetic construct
  source 1..203: mol_type = other DNA
ggcgcgccagtcctacagtaaacacaaacaaaagggtgatgggattattttactgcatgcactgctgagcccgacattgtcacctcctctttgaggggttagaagaagctgagatctcccgacagagctggaaatggtgatgaatcttttttaatcaaaggacaatttcttttcattgcactttgactcgactcggaccgatg

SEQ ID NO: 3087 - DNA, 203 bp, synthetic construct
  source 1..203: mol_type = other DNA
ggcgcgccagtcctcaagtggatccgagccgcagagagggctggagagagtctgctctccgatgactttgcccactctcttcgcagtggggacacgggaccgagtgcacactggaggtcccagagcacgacgagcgcggaggaccgggaggctcccgggcttgcgtgggcatcacgtgccctcccccccgactcggaccgatg

SEQ ID NO: 3088 - DNA, 203 bp, synthetic construct
  source 1..203: mol_type = other DNA
ggcgcgccagtcctcgagggctcctgctggtactgtgttcgctgctgcacagcaaggccctgccacccaccttcaggccatgcagccatgttccgggagccctaattgcacagaagcccatggggagctccagactggcagccctgctcctgcctctcctcctcatagtcatcgacctctctgactctcgactcggaccgatg

SEQ ID NO: 3089 - DNA, 203 bp, synthetic construct
  source 1..203: mol_type = other DNA
ggcgcgccagtcctgccagaggcgcggaaggaagcagtgcccggcgacactgcacccatcccggctgcttttgctgcgccctctcagcttcccaagaaaggcatcgtcatgtgatcatcacctaagaactagaacatcagcaggccctagaagcctcactcttgcccctccctttaatatctcaaaggcgactcggaccgatg

SEQ ID NO: 3090 - DNA, 203 bp, synthetic construct
  source 1..203: mol_type = other DNA
ggcgcgccagtccttggacctgtgggctgggcagcagctgctgtggaagggctccttcaagcccagcgagcatgtgaaacccagggccccaggaaacctgacagttcacaccaatgtctccgacactctgctgctgacctggagcaacccgtatccccctgacaattacctgtataatcatctcacctcgactcggaccgatg

SEQ ID NO: 3091 - DNA, 203 bp, synthetic construct
  source 1..203: mol_type = other DNA
ggcgcgccagtcctcccggaggcggcggacgggctcggcagatgtagccgccgggccgaagcaggagccggcgggggggcgccgggagagcgagggctttgcattttgcagtgctattttttgaggggggcggggggtggaggaagcggaaagccgcgccgagtcgccggggacctccggggtgaacccgactcggaccgatg

SEQ ID NO: 3092 - DNA, 203 bp, synthetic construct
  source 1..203: mol_type = other DNA
ggcgcgccagtcctctaggtgacagacaggtacactgtatgctagccctgtatctgtctgagcagtggaatgtgccaggaaagaaggagcaaccactgactgatgaacctttgccagtctcccttccaagagggatgccagagccttctgtaagctcctgagatgtcactggtatctaggcaacagggcgactcggaccgatg

SEQ ID NO: 3093 - DNA, 203 bp, synthetic construct
  source 1..203: mol_type = other DNA
ggcgcgccagtccttaattaggaagctgtcagattttattgatcctcaagaaggatggaagaagttagctgtagctattaaaaaaccatctggtgatgatagatacaatcagtttcacataagatgctgttcccaaaactgctaatacactaccttctaaagaagctataacagttcagcaaaaacagcgactcggaccgatg

SEQ ID NO: 3094 - DNA, 203 bp, synthetic construct
  source 1..203: mol_type = other DNA
ggcgcgccagtcctgcccggcaggttgggggaccggcgggaggcgcagcctgggcagagctcagcttggtcccgccgcccggccggtgctccctggcgcagccacgcaggcgcaccgcagacagacccctctgccatgaaccagtccatcccagtggctcccaccccaccccgccgcgtgcggctgaacgactcggaccgatg

SEQ ID NO: 3095 - DNA, 203 bp, synthetic construct
  source 1..203: mol_type = other DNA
ggcgcgccagtcctggcggctctgggccgccgagtcccctcctcccgcccctgaggaggaggagccgccgccacccgccgcgcccgacacccgggaggccccgccagcccgcgggagaggcccagcgggagtcgcggaacagcaggcccgagcccaccgcgccgggccccggacgccgcgcggaaaagcgactcggaccgatg

SEQ ID NO: 3096 - DNA, 203 bp, synthetic construct
  source 1..203: mol_type = other DNA
ggcgcgccagtccttgctggcgtcctcccttctctttgctgggttgtcagctgttcctcaaagcttctcgccatctctgaggccatggtaagtgtgactgtggcaagtgcaagtgtgaccagggatggtatggggatgcttgccagtacccaactaactgtgacttgacaaagaagaaaagtaaccaacgactcggaccgatg

SEQ ID NO: 3097 - DNA, 203 bp, synthetic construct
  source 1..203: mol_type = other DNA
ggcgcgccagtcctcagcctgaggcttccttttggttcccgccccgggacgggaggctccgtccgctccctggacagccggggtgctccctccttctccctcccgcgctctcctcccccgtccgtttgcagggaggtgctctcctcgggcggcggggaaggcggggctggcctgccactcctcctgctcgactcggaccgatg

SEQ ID NO: 3098 - DNA, 203 bp, synthetic construct
  source 1..203: mol_type = other DNA
ggcgcgccagtcctgagggaattactaagacttcttgctcatttctgagtattgtctttatatcctgacactatgaatgctacttggatgcctcttaagtctgttctctggggaggcagtaaggggccgtggagctggcctcggcctcggcatcgggagaggctggacttcctgtctctctgtgctgacgactcggaccgatg

SEQ ID NO: 3099 - DNA, 203 bp, synthetic construct
  source 1..203: mol_type = other DNA
ggcgcgccagtcctcaccaacttcctgttgggtgctgtggtcccaaggcgcgtgctttgcagcagatgtgtgacctggcgttcccctgagtgctcggaaaatggccttgtctccggtcgttcccgttcaggagcagaattttcccactgtaaaaaaccgagcaagtctggataagtgaggctggctcccgactcggaccgatg

SEQ ID NO: 3100 - DNA, 203 bp, synthetic construct
  source 1..203: mol_type = other DNA
ggcgcgccagtcctgctcccagcgccacggacgcccccgggccgagcggcggtgcgctcccgtgcagacccgtggacagacgcccctggccggtggactctcgagtctcgcttctgcaccctgcgtccctagacatgaatgtgaggagggtggaaagcatttcggctcagctggaggaggccagctctcgactcggaccgatg

SEQ ID NO: 3101 - DNA, 203 bp, synthetic construct
  source 1..203: mol_type = other DNA
ggcgcgccagtcctgcatttcggctcagctggaggaggccagctctacaggcgaagcggttattgagcattcgctgtgtaccaagtgctgtccttgacaagaagacttacacccagtggtcccagagggagacttcggaagtgggagcacctgtcagatcatcatacagcgtggaagatgaactggagcgactcggaccgatg

SEQ ID NO: 3102 - DNA, 203 bp, synthetic construct
  source 1..203: mol_type = other DNA
ggcgcgccagtcctccttcatccccatcctgggccctgacaaagacagtgtgacaagttctgagccccacaggtggaatcccaaaccaagcagctcttgctggtcaccccaagatctacttatacatgaagttttgaaaatcatctcctgaacctcttctgacagagatcagggtgttgacagaaagtcgactcggaccgatg

SEQ ID NO: 3103 - DNA, 203 bp, synthetic construct
  source 1..203: mol_type = other DNA
ggcgcgccagtcctgtctggagccggtgctctgcggcggggcgggagggctcgcatccccatagtgctgggttacagtgaaggtacgccccgcgctctgctctggagaggcagggtgggatagggaacgtctcgagtggcgcccgcagtcatggtggtgttcgttggccgccgcctcccggcgctcctcgactcggaccgatg

SEQ ID NO: 3104 - DNA, 203 bp, synthetic construct
  source 1..203: mol_type = other DNA
ggcgcgccagtcctacccttcaaggacctgctacaccctgaccaccccctgccgcccccacaggcagagctgacctgtccggtaatcaaggcaatgcagccggccgcctagctacagttcacgagccagttgtcacccagtgggcggtgcatcctccagcccccgctcaccccagtctcctggacaaacgactcggaccgatg

SEQ ID NO: 3105 - DNA, 203 bp, synthetic construct
  source 1..203: mol_type = other DNA
ggcgcgccagtcctgcgcctgggaagccttcttggcaccgggacccggagaatccccacggaagccagttccaaaagggatgaaaagggggcgtttcgggcactgggagaagcctgtattccagggcccctcccagagcaggaatctgggacccaggagtgccagcctcacccacgcagatcctggcccgactcggaccgatg

SEQ ID NO: 3106 - DNA, 203 bp, synthetic construct
  source 1..203: mol_type = other DNA
ggcgcgccagtcctccacctggccgtggacacctgtgtcagcatgtgggacctggttctctccatcgccttgtctgtggggtgcactggaatagccaggtctggctgggtcggcacaacctgtttgagcctgaagacacaggccagagggtccctgtcagccacagcttcccacacccgctctacaatcgactcggaccgatg

SEQ ID NO: 3107 - DNA, 203 bp, synthetic construct
  source 1..203: mol_type = other DNA
ggcgcgccagtcctgtccttatccatccactgtgggtcctcacagctgcccactgcaaaaaaccgaatcttcaggtcttcctggggaagcataaccttcggcaaagggagagttcccaggagcagagttctgttgtccgggctgtgatccaccctgactatgatgccgccagccatgaccaggacatccgactcggaccgatg

SEQ ID NO: 3108 - DNA, 203 bp, synthetic construct
  source 1..203: mol_type = other DNA
ggcgcgccagtcctcggaacttggatcacatcagatcctctcgagcccagggtgacaagattattgatggcgccccatgtgcaagaggctcccacccatggcaggtggccctgctcagtggcaatcagctccactgcggaggcgtcctggtcaatgagcgctgggtgctcactgccgcccactgcaagcgactcggaccgatg

SEQ ID NO: 3109 - DNA, 203 bp, synthetic construct
  source 1..203: mol_type = other DNA
ggcgcgccagtccttcctttcccggccgcacagggtagattttcgttccgtcacccaggctggagtgcagtggtgtgaccttggcttgctgcaaccctttgcctcctgggttcaagtgattctcattgcctcagcctcctaagtagctgggattacaggttttataggatcacattgacaaaagtacccgactcggaccgatg

SEQ ID NO: 3110 - DNA, 203 bp, synthetic construct
  source 1..203: mol_type = other DNA
ggcgcgccagtcctaactgggcggtaaaatagcccttctgttactgtccggggctgcggggtgagaggccagggccgagaagggcttcaggacgcgggaggcgcacttgcttcaagtcgcgggcgtgggaacggggttgcaaaacggggcctctttgtccgggcttgcttccggcgtcatggctcaaacgactcggaccgatg

SEQ ID NO: 3111 - DNA, 203 bp, synthetic construct
  source 1..203: mol_type = other DNA
ggcgcgccagtcctagactaagctgcaacactggcagagcctcccaaggaagggaggagggaggacagaggccaaggcggctcctggccaccctcgcagcttcctccctccctggccacaaggacccaaagctcagagggatggatgaacagacaggaaggctcaggctggacacgtattgtatgagtcgactcggaccgatg

SEQ ID NO: 3112 - DNA, 203 bp, synthetic construct
  source 1..203: mol_type = other DNA
ggcgcgccagtcctggccagaaaagccaaacttaagaaatctgcctatgtacagaacaagtcaactaaggggttctcattaatctaccgtctgtgaatatcgttatttttcaggagaagcgctacaaagcagccactgtgcttactgaacggcctccccctgtatcgcttaattgagaaggtatacaacgactcggaccgatg

SEQ ID NO: 3113 - DNA, 203 bp, synthetic construct
  source 1..203: mol_type = other DNA
ggcgcgccagtccttgggagcgatctggaaagctgcacttgtgctcccttcctcgtaggtttgctgtggaacgttgtggcttctgtggctcctcaggcccgggggcgccccttgaaccctccactcttggctccaagcaccttccctgggaagctgtatctgctgggttcgcagacaggaacagaaaccgactcggaccgatg

SEQ ID NO: 3114 - DNA, 203 bp, synthetic construct
  source 1..203: mol_type = other DNA
ggcgcgccagtcctcggggccagccatgcctgtcctaacagcagccacccagcagtggcccagcctgctgagaactagaaaatcagaagaaaaaggagaatccaccaggagacccaggtaactctgaagcgtgagctgccagaattcaaggccacctgcttaacagaagacaactagaaacctcatcccgactcggaccgatg

SEQ ID NO: 3115 - DNA, 203 bp, synthetic construct
  source 1..203: mol_type = other DNA
ggcgcgccagtcctaagcagtccttccacctcggcctcccaaagagctgggattacaggtgaaaattctggatctgttatctgtgaggaggccactccgttgacagttgtgtaaaactctgctgctttccccagctccaacctctctggtcttcaacaacactatcatcagggaaaacgtgggggaagcgactcggaccgatg

SEQ ID NO: 3116 - DNA, 203 bp, synthetic construct
  source 1..203: mol_type = other DNA
ggcgcgccagtcctaagcagctgaaagaagtctttaaggagcgaagcaccattcttcgtcagctgacaaagacatcaagagaacttgatggaattaaagtcaatcttcagtccttaaaaaacgatgagcagtctgccaaaactgatgttcagaaacttctggaattaggacagaaacaaagagaagaacgactcggaccgatg

SEQ ID NO: 3117 - DNA, 203 bp, synthetic construct
  source 1..203: mol_type = other DNA
ggcgcgccagtcctttgcgcatcccagtgattcttgggttccgcgtgtagtttcggaaggagacatcgaagcagggcgaggcgcagagggcgttgcggactcatgccccagtcggcagtgcggggtcccaagccctgcagtgctacagctttgagcacacctactttggcccctttgacctcagggcccgactcggaccgatg

SEQ ID NO: 3118 - DNA, 203 bp, synthetic construct
  source 1..203: mol_type = other DNA
ggcgcgccagtcctgagcagaaagggcccagacagtgccaggagtcaaggttctcaggggacagggagagcaagaggtcaagagctgtgggacaccacagagcagcactgaaggagaagacctgcctgtgggtccccatcgcccaagtcctgcccacactcccacctgctaccctgatcagagtcatccgactcggaccgatg

SEQ ID NO: 3119 - DNA, 203 bp, synthetic construct
  source 1..203: mol_type = other DNA
ggcgcgccagtcctggagttgaggaccttttcttcagagggtgactcaggtcaacacaggggcccccatgtagtcgacagacacagtggtcctaagatctaccaagcatccaggttctgaggagacaggccccggagcagcactagctcctgcccacactcctacctgctgccctgaccagagtcatccgactcggaccgatg

SEQ ID NO: 3120 - DNA, 203 bp, synthetic construct
  source 1..203: mol_type = other DNA
ggcgcgccagtcctaagtctgaggttgcaaaaggactgtgatcatatgaagatcatccaggagtacaactcgaaattctcagaaaacaggaccttgatgtgagaggagcaggttcaggtaaacaaagggtgccacatctcctgcctttctgctcactttcctgcctgttttgcctgaccacagccatccgactcggaccgatg

SEQ ID NO: 3121 - DNA, 203 bp, synthetic construct
  source 1..203: mol_type = other DNA
ggcgcgccagtcctttagaaagagaagagcgagccaggcagcactacgagaagcacctggaagagcggaagaagaggttggaggagcagaggcagaaggaggagcggaggagggctgctgtggaggagaagcggaggcagagacttgaggaggacaaagaacgccacgaagctgttgtacggcgcacacgactcggaccgatg

SEQ ID NO: 3122 - DNA, 203 bp, synthetic construct
  source 1..203: mol_type = other DNA
ggcgcgccagtccttagagatggggtcttgctgtgttgcccagactggtctcaaactcctggcctcaagtgatccttctgcctcagcttcccaaagtactgggattacagcttgaaatccatggcccaaaatgactctaccagtggagactctcttctgtgaagaagacgaccagataagaggttgggcgactcggaccgatg

SEQ ID NO: 3123 - DNA, 203 bp, synthetic construct
  source 1..203: mol_type = other DNA
ggcgcgccagtccttacaatgtgaagttctgcatagatgccagtcaaccagatgttggaagctggctcaagtacattagattcgctggctgttatgatcagcacaaccttgttgcatgccagataaatgatcagatattctatagagtagttgcagacattgcgccgggagaggagcttctgctgttccgactcggaccgatg

SEQ ID NO: 3124 - DNA, 203 bp, synthetic construct
  source 1..203: mol_type = other DNA
ggcgcgccagtccttgtacggagaccctcacgcgccgcggccgatccccccggttcaccacctgaaccacgggccgccgctccacgccacacagcactacggcgcgcacgccccgcaccccaatgtcatgccggccagtatgggatccgctgtcaacgacgccttgaagcgggacaaggacgcgatctcgactcggaccgatg

SEQ ID NO: 3125 - DNA, 203 bp, synthetic construct
  source 1..203: mol_type = other DNA
ggcgcgccagtcctcctggaggtccacgtcccgcaggtgcgtgcagcagcacccgccaggaggcgcctgagattggagctggagtgagccttccaggaattttggctgccaaatgtggtgcagaagtaatactgtcagacagctcagaactgcctcactgtctggaagtctgtcggcaaagctgccaacgactcggaccgatg

SEQ ID NO: 3126 - DNA, 203 bp, synthetic construct
  source 1..203: mol_type = other DNA
ggcgcgccagtcctggaccctcctgtgggcccagggggacaaaagtggctctcaatccagcacatgcacattgaagcaagttaaaggatttaatatgaagcacagaagcagatagtgccaaatagcaagcagtagttgttacacatttggtgagcagggcagcatttccttctcccactgctgctgagcgactcggaccgatg

SEQ ID NO: 3127 - DNA, 203 bp, synthetic construct
  source 1..203: mol_type = other DNA
ggcgcgccagtcctctgcgggccgctccgccggtgctgtccctgggcgcctccgtgctctcagccaaccgcctctgagagcgcccactcgagcgccccgggagccagagggcgggggtcctcgccgggaccctcctgtgggcccagggggtgagcagggcagcatttccttctcccactgctgctgagcgactcggaccgatg

SEQ ID NO: 3128 - DNA, 203 bp, synthetic construct
  source 1..203: mol_type = other DNA
ggcgcgccagtcctcgtcctggcggtggggactccccgcggagcgcttgcgcgtgccaggccacccgggactacgtttcccagcgggccgagcggccggcgccgcggctgcggtcaggattgtcagtggcttcgccccgaggagagctgactgccctgggctgctgcctccggcagagctgagccaaacgactcggaccgatg

SEQ ID NO: 3129 - DNA, 203 bp, synthetic construct
  source 1..203: mol_type = other DNA
ggcgcgccagtccttggggatttgatgatctcctggagagcaactgagacaagagaagaaaggtgcatggctgcctcctaatcccatagtccagaggaggcatccctaggactgcgggcaagggagccgggcaagcccagggcagccttgaaccgtcccctggcctgccctccccggtgggggccaggcgactcggaccgatg

SEQ ID NO: 3130 - DNA, 203 bp, synthetic construct
  source 1..203: mol_type = other DNA
ggcgcgccagtcctgtgttgagagaaggtgcacgtaagcgtgtggcagaacgtctgcaatcgcatctttgtaataatctcctttctgagacggttcagtggactcaatgttccgccaaagggccaaggcagccctgcagttccgccgagcatcctggggcctccaagcctccgataagctcctccagtcgactcggaccgatg

SEQ ID NO: 3131 - DNA, 203 bp, synthetic construct
  source 1..203: mol_type = other DNA
ggcgcgccagtcctagcagttttgaggatgaccccttcttctcgtgagttacgggagccaggagtccggggtcgcgcgggaattaagacatacaggtggtcttactctgcagcagctgaaactgaagcacaagaagcccttggaactatcatcaggacattgagtccattcttgcacaccgagaaaatcgactcggaccgatg

SEQ ID NO: 3132 - DNA, 203 bp, synthetic construct
  source 1..203: mol_type = other DNA
ggcgcgccagtcctgacgtcctagccaatgacagaggccgtacggcggaagtatagaaaaggactctctggaacatggcaacattaatctgaccacaagctgactggcaggtgctttaaccacaagctctgactccaggccctgtcccctgagctctgccctcggatgtccgaccgcccagagcctgccgactcggaccgatg

SEQ ID NO: 3133 - DNA, 203 bp, synthetic construct
  source 1..203: mol_type = other DNA
ggcgcgccagtcctggcctgggtctgcgggagccccatctagcggggttccaaggcggcggcggcatcagtcgaggccctgctccgggagctcatcttgtcccctttcgcccctcacgccccccagctctgactccaggccctgtcccctgagctctgccctcggatgtccgaccgcccagagcctgccgactcggaccgatg

SEQ ID NO: 3134 - DNA, 203 bp, synthetic construct
  source 1..203: mol_type = other DNA
ggcgcgccagtcctgcctttcctcatctccgctggcggggatccccgttcgcctcaggaggcttccgaccccacagcatcccgccgctctgggcgcccgtcctctgtgaggtctctccggtgacaccagcccctcttcccgccctcactttgtgtgtttacgccgagcagctgccaagtcgtctctcccgactcggaccgatg

SEQ ID NO: 3135 - DNA, 203 bp, synthetic construct
  source 1..203: mol_type = other DNA
ggcgcgccagtcctaggagaataactcagttttagacagggtctcgcactgtcacccaggctggagtgcagtggtgcaaccccacctcccgggttcaagcaattctcatgcctcagcctcccaagtagctgggattacagggtcctcctgccgcaggagtatcttgcagtccaactcccacgattgtccgactcggaccgatg

SEQ ID NO: 3136 - DNA, 203 bp, synthetic construct
  source 1..203: mol_type = other DNA
ggcgcgccagtcctctacacatctcattatagtttagggagtctcgctctatcccctaggctggagtgcattggcgccatctcggctcatttgcaacctctgtctcccgggttcaagcgattctcctgcctcagcttcccgaggagctgggattacaggtcctgagggagtctaacaagttagcagaacgactcggaccgatg

SEQ ID NO: 3137 - DNA, 203 bp, synthetic construct
  source 1..203: mol_type = other DNA
ggcgcgccagtcctggagctttctattggtcctgggtaccgagcatgggcgctgcgtcagtgcgcgctggcgcaaggttggtggaagtcgcgttgtgcaggttcgtgcccggctggcgcggcgtggtttcactgttacatgccttgaagtgatgaggaggtttctgttactatatgctacacagcaggcgactcggaccgatg

SEQ ID NO: 3138 - DNA, 203 bp, synthetic construct
  source 1..203: mol_type = other DNA
ggcgcgccagtcctggagctggtggcggcgctccgcaggggctcggctgttttccgcgcggcaggcgcggccatggcgcagctgggaaagctgctcaaggagcagaagtacgaccggcagctgaggcgattcctccatacatttgacagctgtctgggcccttatggagcatacagtggagtggaaagcgactcggaccgatg

SEQ ID NO: 3139 - DNA, 203 bp, synthetic construct
  source 1..203: mol_type = other DNA
ggcgcgccagtcctgagtctagggtacaggtccgaaagtagaagaacacagaaggcaggccaggggcactgtgagatggtaaaagagatctgaagggatccagaattcaagccaggaagaagcagcaatctgtcttctggattaaaactgaagatcaacctactttcaacttactaagaaaggggatccgactcggaccgatg

SEQ ID NO: 3140 - DNA, 203 bp, synthetic construct
  source 1..203: mol_type = other DNA
ggcgcgccagtccttggcctgggaagtgggaagccagattggaccctactgactggggaccctcagccttggggctcctctggagaagtgatcagttgccctgctggaaactcacatccagggggcagtggctggagagcaagagcgaacggtcaggaagaggaggcctcctgctccacgacgtgacccgactcggaccgatg

SEQ ID NO: 3141 - DNA, 203 bp, synthetic construct
  source 1..203: mol_type = other DNA
ggcgcgccagtcctccgacgctgagcgccggcctcgccctcggcggcccctccctcctccttaccccgcctcccccggcccgcccctccctccccggaggagcagtctctccgcgcgtctcccggagctttctccattgtctctgcctttacaacagagggagacgatggactgagctgatccgcacccgactcggaccgatg

SEQ ID NO: 3142 - DNA, 203 bp, synthetic construct
  source 1..203: mol_type = other DNA
ggcgcgccagtccttgctgcctgcggctctcagaagcctctgctccaccgcggcgagaggcatgggcacgtggctgccgagggtggccgagctctgggaagaaaagcccgtgtgcctctgcatagcgtcgctacagcgctgactcggtgtggattgattggaaaggtttgagggagtacttgggaagccgactcggaccgatg

SEQ ID NO: 3143 - DNA, 203 bp, synthetic construct
  source 1..203: mol_type = other DNA
ggcgcgccagtcctatctagagaaacatctgtagcatcaatgagtcagacaagcggtggtgaggcaggctcgcctcctccagctgttgttgctgctggatttgcctctgaagcagggagtgtctgcattaaaaatgacctgtagttctctgcttcatagatgcttcttcagctccctcctcttcctcccgactcggaccgatg

SEQ ID NO: 3144 - DNA, 203 bp, synthetic construct
  source 1..203: mol_type = other DNA
ggcgcgccagtcctccggccccgcagccttcccgccctgcgcgccatgaacgcccccgagcggcagccccaacccgacggcggggacgccccaggccacgagcctgggggcagcccccaagacgagcttgacttctccatcctcttcgactatgagtatttgaatccgaacgaagaacctcgccaatacgactcggaccgatg

SEQ ID NO: 3145 - DNA, 203 bp, synthetic construct
  source 1..203: mol_type = other DNA
ggcgcgccagtccttggttttggctatatcttcatgtaggacctactccctatcccgtcggccgcggtgaatcccacctgcggctgggcttcatcaccaggcctcctcacagattcctgtcccttctgtgtcctggactccggatacctcaactctcagtactttgtgctcagcccaggcccagagcccgactcggaccgatg

SEQ ID NO: 3146 - DNA, 203 bp, synthetic construct
  source 1..203: mol_type = other DNA
ggcgcgccagtcctggcaggcggcgggggcggggcctggaggagcctacaccgactctggaggaagactggagcctttgcggcggcgctgcccctcccctggtccccgcgagctcggagggcccggctggtgctgcgggggccccgggaggttgaaaactaagcatggggaagagctgcaaggtggtccgactcggaccgatg

SEQ ID NO: 3147 - DNA, 203 bp, synthetic construct
  source 1..203: mol_type = other DNA
ggcgcgccagtcctaggacaaaagccagacacatttcaacatgagggacccactgacagattgtccgggcaaacctggaaattagctatgccaaaggacttcagaaactggcaagcaagctgagcaaagcattacagaacacgagaaaaagttgtgttagcagtgcctgggcctgggcctcagagggacgactcggaccgatg

SEQ ID NO: 3148 - DNA, 203 bp, synthetic construct
  source 1..203: mol_type = other DNA
ggcgcgccagtcctagagggaaagggagagagagagactcttagagaaagagagagacacacacactcttggagagagagcgcgaggtgtagagaggagagagagtgaacagggagcggggcttttgtctgttggtctccctggactgaagagagggagaatagaagcccaagactaagattctcaaacgactcggaccgatg

SEQ ID NO: 3149 - DNA, 203 bp, synthetic construct
  source 1..203: mol_type = other DNA
ggcgcgccagtcctgatccactcacttcccatcaggcctcacttccaacattgggaatcacatttcagcatgagatttggaggggagaaacatccacaccataccacaaataaaaagtcccagagttgtctactttcagactttttaaaaaagtagattggggtcaactggactacttagttgtagaccgactcggaccgatg

SEQ ID NO: 3150 - DNA, 203 bp, synthetic construct
  source 1..203: mol_type = other DNA
ggcgcgccagtcctggagcctgagggacccggcggctggtgagcgcccgctggaggctggagcttccgggccctggaaaggggtccccgcgcgccccgggtcggaggcagacccctgggtttgggggacatgggcatttggggcgcctgaacccaagacctctggatgagctgccccgttcagaccatcgactcggaccgatg

SEQ ID NO: 3151 - DNA, 203 bp, synthetic construct
  source 1..203: mol_type = other DNA
ggcgcgccagtccttaaggcggcgtttctgggcgcagccgtgtcgctcctggtttccatcgtgtgggaagaacggagtaacgagtctcacgcagaaaaaggtcttgagagcaccttgtggcgcacccagtgtaactgtgacgatcaaccatttttgtgttgtcctcccccacctgccagaagccaacccgactcggaccgatg

SEQ ID NO: 3152 - DNA, 203 bp, synthetic construct
  source 1..203: mol_type = other DNA
ggcgcgccagtcctgcctcccaagttttcatccaactgccaaccccaaagcttccacccttctcccctcagagaggacgtttgatgccgggccccttgagaggctcattgacaagcctgcccctctgggtccccctgagcagagcctgctgacccaattgcccacctttgcggctttgatgcctagcccgactcggaccgatg

SEQ ID NO: 3153 - DNA, 203 bp, synthetic construct
  source 1..203: mol_type = other DNA
ggcgcgccagtcctaggtaactgtgatgcgggggtcagcgggagaggcacccggaagctcccggcgtctgcaccccggcagcgcgaggaaatgcccaaagaaactatagtgacactgaaactgaaggagagatttttaattccttagtgcaatactttggtgacaacttggggcgaaaagttaaagcgcgactcggaccgatg

SEQ ID NO: 3154 - DNA, 203 bp, synthetic construct
  source 1..203: mol_type = other DNA
ggcgcgccagtcctatgggccgcggagcccgagcggcggctgcgcagtcccgctgggggagggcgtcgcgggcatcggtctcacctggacggacgatccgctcagcgcccgcagtcggtggttagcccacggcgatgcctctcccggcctcagcccctgctgaggctacacccatgccttcttcagaacgactcggaccgatg

SEQ ID NO: 3155 - DNA, 203 bp, synthetic construct
  source 1..203: mol_type = other DNA
ggcgcgccagtcctcgctctctgccaagccggcttgcttcctgatctgttgctagggccgctggaccccgttgctaaggacccttgagatcgtgagcgcttggagtgtacccctcctttcctggggtagagggtcagtcgagagtagccttcgttaaccttaattgaaactggagtgaaagggaagcacgactcggaccgatg

SEQ ID NO: 3156 - DNA, 203 bp, synthetic construct
  source 1..203: mol_type = other DNA
ggcgcgccagtcctgcttaggagcacccaccaagctctggcagggtctccagcacccatctcgggcagaggctgggggagtgactgctggtgcaagccccaaagtgcatgcggcaaaaacatggatgcagagctggtggcaagaagaggggctaagttatagagtcaacgtggaggtaccaggccacccgactcggaccgatg

SEQ ID NO: 3157 - DNA, 203 bp, synthetic construct
  source 1..203: mol_type = other DNA
ggcgcgccagtcctctcagcctctacagtctggtttcctggagctggaaagccctgggctcagtaaggtcctccgcacaggagccttcgcctatccattcctgttcgacaacctcccactcttttatcggctcgggctgtgctggggcaggggccacggctgtgggcaggaggccctgagcaccagcccgactcggaccgatg

SEQ ID NO: 3158 - DNA, 203 bp, synthetic construct
  source 1..203: mol_type = other DNA
ggcgcgccagtcctgctgaatagaacgggcgtggaggcaggaggaggagcaggacgccgggcactgctgatgctgctttcgctggggtgagtgacctgcaggaagaaggcaagaatgccatcaactcaccgatgtcccccgccctggtggatgttcaccctgaagacacccagcttgaggagaacgagcgactcggaccgatg

SEQ ID NO: 3159 - DNA, 203 bp, synthetic construct
  source 1..203: mol_type = other DNA
ggcgcgccagtcctaactcttgacagaagctgtgacaaccagaaaggatgcctcataaagggggaagactttaactaggggcgcgcagatgtgtgaggccttttattgtgagagtggacagacatccgagatttcagagccccatattcgagccccgtggaatcccgcggcccccagccagagccagccgactcggaccgatg

SEQ ID NO: 3160 - DNA, 203 bp, synthetic construct
  source 1..203: mol_type = other DNA
ggcgcgccagtcctagagtgtcaattatgctaacatctcatttactgattttaatttaaaacagtttttgttaacatgcatgtttagggttggcttcttaataatttcttcttcctcttctctctctcctcttcttttggtcagtgttgtgcgggttaatacaacaaactgtaacaagtgtacctggtcgactcggaccgatg

SEQ ID NO: 3161 - DNA, 203 bp, synthetic construct
  source 1..203: mol_type = other DNA
ggcgcgccagtcctacactggccctcggccgggagctccgagtctcaggcggtcccggttgtcttcctgtcggtgccgcttccgcctgcccttcttgaaaacccacccccagctttgacctggaaaatgggctctcgtgtgggaggagggccctggaccctcagtccagccctggcctgggccggattcgactcggaccgatg

SEQ ID NO: 3162 - DNA, 203 bp, synthetic construct
  source 1..203: mol_type = other DNA
ggcgcgccagtcctcccgttgcactgccgggctgggcaatatgaaggagcagccctcatgtgccggcaccgggcatccgagcatggcgggaggaggcctaccagaaactggccagcgagaccctggaggagctggactggtgtctggaccagctagagaccctacagaccaggcactccgtcagtgagcgactcggaccgatg

SEQ ID NO: 3163 - DNA, 203 bp, synthetic construct
  source 1..203: mol_type = other DNA
ggcgcgccagtcctagtcgcatagtggtttttccgctcgcgtcgctgtgtgaaagttggctcgccgctctttgcacgccctccctggaggccgacccgagacgccaagctggagagaccgtgcctccccgaggccggccgccccgcgagcacagcctccgcccccgttgcactgccgggctgggcaatcgactcggaccgatg

SEQ ID NO: 3164 - DNA, 203 bp, synthetic construct
  source 1..203: mol_type = other DNA
ggcgcgccagtcctcggctcctccagctaccggcccaaggccatctacctggacatcgatggacgcattcagaagcactccgtacaaagtgagacctgtggccatcaagcaactctccgagcattcaaaatcaatgaactgaaagctgaagttgcaaatcacttggctgtcctagagaaacgcgtggacgactcggaccgatg

SEQ ID NO: 3165 - DNA, 203 bp, synthetic construct
  source 1..203: mol_type = other DNA
ggcgcgccagtcctgcccagagagccccagggctgctaccaggaaggccagcgcatccctccagagcattcaaaatcaatgaactgaaagctgaagttgcaaatcacttggctgtcctagagaaacgcgtggaattggaaggactaaaagtggtggagattgagaaatgcaagagtgacattaagaagcgactcggaccgatg

SEQ ID NO: 3166 - DNA, 203 bp, synthetic construct
  source 1..203: mol_type = other DNA
ggcgcgccagtccttggagaggacatggcactgcttcagagacacgaaccaccttgagtggatgtgattggcgatccccgtagagcaggaaagctcgtctgctgtgcagccggcgcagaggattctgtggcaggaaattagacactaggaaattcagtagcgatttgaaggaaacctcgaccttgaagcgactcggaccgatg

SEQ ID NO: 3167 - DNA, 203 bp, synthetic construct
  source 1..203: mol_type = other DNA
ggcgcgccagtcctttccggcctggcagcctctccccagctgggcaggggccccaggcaccgtgatgtggagtcaagccgcctatacctcccttggctgccccagggctgctaggatccagcaatgcctgtgagaaaacctccttcaccttcctcaggcaggagctgcctgtgcgcctggccaacatccgactcggaccgatg

SEQ ID NO: 3168 - DNA, 203 bp, synthetic construct
  source 1..203: mol_type = other DNA
ggcgcgccagtcctgtgggcaggccgggggtgagggctcgcgctccgggagctgcacggggctgcgtggaaagagcgccgagcggtggcgtcgttgtcgccccctcctcgtcgggaagaatcgtttggtctcctgccgtgcccggaatcccagtcagaagttccagcctgccactgttctctgatgcccgactcggaccgatg

SEQ ID NO: 3169 - DNA, 203 bp, synthetic construct
  source 1..203: mol_type = other DNA
ggcgcgccagtcctcaggatccaggcctccatccccacagaagtgaagctacagctgggaggtctcctcccaccccaaccgtcaccctgggtcccgactgcccacctcctcctcctccccctccccccaacaacaacaacaacaacaactccaagcacaccggccataagagtgcgtgtgtccccaaccgactcggaccgatg

SEQ ID NO: 3170 - DNA, 203 bp, synthetic construct
  source 1..203: mol_type = other DNA
ggcgcgccagtcctggctcaggtgtgggaccccatccttcctgtcttcgcagaggagtcctcgcgtgaaataagcgggttttgaaaacaaaaaaaagaaggagtggaagagggggccaggatccaggcctccatccccacagaagtgaagctacagctgggaggtctcctcccaccccaaccgtcacccgactcggaccgatg

SEQ ID NO: 3171 - DNA, 203 bp, synthetic construct
  source 1..203: mol_type = other DNA
ggcgcgccagtcctacagagcgctgctcccgagaaccctgcacccctcaatggagtaaattaccataaagcctcttccttacccatgctttggggtgttaacagctgaggctattcgtcggtgacctgtgggactcgagctattcctgcagctcagcagacctcctggccgtggcagacttctgcgttcgactcggaccgatg

SEQ ID NO: 3172 - DNA, 203 bp, synthetic construct
  source 1..203: mol_type = other DNA
ggcgcgccagtcctttagccaacctgaaccgtgtgatttatttcatctgtgacaccatcctctgggtgaggagcgtaggtctcacctctggcatcaacaaagagaaatggcgaacgagggctgctcaccactactactattctcttctgctgagcctggtcagggatctgtatgaaatctccctgcagcgactcggaccgatg

SEQ ID NO: 3173 - DNA, 203 bp, synthetic construct
  source 1..203: mol_type = other DNA
ggcgcgccagtccttcatccctcaagaaaaaggccgatggatctgacctcatcagcacggatgctgagcagagaggccagcctctcagagtcccggagacttcatccttagatctagacattcaaacacaactggaaaaatgggacgatgttaagtttcatggagatcgaaataccaagggacatccacgactcggaccgatg

SEQ ID NO: 3174 - DNA, 203 bp, synthetic construct
  source 1..203: mol_type = other DNA
ggcgcgccagtcctgtggggcaaccctctggaggcagcgcgcccgcgggcagcctcgttgtggctccttgggctctgttggcggcggcgctagcttcggagtctcccgcgcgcacctcagccgcctcctagcggcgcggcgctcgctcctacgcctaaaatgaccaatgtgtgatttcagtggaataacgactcggaccgatg

SEQ ID NO: 3175 - DNA, 203 bp, synthetic construct
  source 1..203: mol_type = other DNA
ggcgcgccagtccttgtgggaccaacgcttccggtgagcgacagaggcagctccccagggcctggagacccgtggggcggactctgggatctgagcctatcgccctggcctggagcccccctttgtacctattccccattcccctaccgagctgggcagttagccagcccactccaactctcggaacccgactcggaccgatg

SEQ ID NO: 3176 - DNA, 203 bp, synthetic construct
  source 1..203: mol_type = other DNA
ggcgcgccagtcctgaggtggaggaggacttggaaactgacgggcactgtgccgagagagattccctgctctccaccagctctttggcgtcccatgactccaccttgtcccttgcatcctcccaggcctcggggccggccctctcgcgccatctgctgacttcctttgtctcaggcctctctgatggccgactcggaccgatg

SEQ ID NO: 3177 - DNA, 203 bp, synthetic construct
  source 1..203: mol_type = other DNA
ggcgcgccagtcctcctcattccccatgaatgctgtgggaagtcctgaggggcaggagctgcaaaagctggggagtggagcctgggacaaccccgcctacagtggtcccccttccccacacgggacgctgagagtctgcaccatctccagcacggggcctctccagccccaacccaagaagcctgaagcgactcggaccgatg

SEQ ID NO: 3178 - DNA, 203 bp, synthetic construct
  source 1..203: mol_type = other DNA
ggcgcgccagtcctactttaaccagtctgcagaactgatccccagcccagctgggcctcatgcctctgacaacccaacagtgtggagcagacccacagagagggagacccagagaggtgtgcagtggcatggaagggccagcggggtatctgcggcgggccagtgtggcccaactgacccaggagctgcgactcggaccgatg

SEQ ID NO: 3179 - DNA, 203 bp, synthetic construct
  source 1..203: mol_type = other DNA
ggcgcgccagtcctagatgtgtcgggcctggtgagagggtgaggcgagacggcccgatcgcccagggccccggaagctgcggaggtcacccccgcctggccttagctcagggacaccctggattcacgtgggagcccctgctcctgcctcccccgtcccaccactgaggctgttgggccaggccagtccgactcggaccgatg

SEQ ID NO: 3180 - DNA, 203 bp, synthetic construct
  source 1..203: mol_type = other DNA
ggcgcgccagtcctcagggggacagcggctggtcggaggctcgcagtgctgtcggcgagaagcagtcgggtttggagcgcttgggtcgcgttggtgcgcggtggaacgcgcccagggaccccagttcccgcgagcagctccgcgccgcgcctgagagactaagctgaaactgctgctcagctcccaagcgactcggaccgatg

SEQ ID NO: 3181 - DNA, 203 bp, synthetic construct
  source 1..203: mol_type = other DNA
ggcgcgccagtcctagctgagaggtccatgtctgggtagaaccaggcccacgatgctgcctctcccgtggtctggagttcagctgcagggactctgctgatgtgcccagcaccatcgttctgtttgtgcttaaatggcacagcatttggtcagcacatctgaaaaggaaggtgtgagaagcaaagccccgactcggaccgatg

SEQ ID NO: 3182 - DNA, 203 bp, synthetic construct
  source 1..203: mol_type = other DNA
ggcgcgccagtcctccgaggccgcctggcccttgtttactaaccctccctcaaacgtttcctgggtggctccccagggacggcagggctgggggcttctctccagggagctgctgctgaggcctgtgtctcccgtggctcctctgacaggtcccgcctgactccgctctggaaagtccttttgaagaacgactcggaccgatg

SEQ ID NO: 3183 - DNA, 203 bp, synthetic construct
  source 1..203: mol_type = other DNA
ggcgcgccagtcctagacacaaaatcagccagggggagcccacattggagggcagtccacaatggaaggcttcttggaggaggagatgattgagctgcttctactaagatgagtatctcagagtcctcaacgtgggtgtggccgaggtgaagaaatccttcctggggcccttgtccccgtcctgtaagcgactcggaccgatg

SEQ ID NO: 3184 - DNA, 203 bp, synthetic construct
  source 1..203: mol_type = other DNA
ggcgcgccagtcctggtaccaacccctgccgcaggactttcctgggccggctcgcggagagcgtagcgcggccttggtggcggaatggcgttgagtgacggcccggccccgccatctggttaaagggactcgttcaacacggaagtgtcccggggctgcattgtgctacagctagaatgaagcacatccgactcggaccgatg

SEQ ID NO: 3185 - DNA, 203 bp, synthetic construct
  source 1..203: mol_type = other DNA
ggcgcgccagtcctcacatcagtctacaaagaggttttcatacaaacataataagatgtaaatggaccaaaagtgaagcacattcttgcagtaagcactgttactctccaagcaaccatggtttacatattgggattttgaaacttagcacttctgctcccaagggacttacaaaagtgaacatttgtcgactcggaccgatg

SEQ ID NO: 3186 - DNA, 203 bp, synthetic construct
  source 1..203: mol_type = other DNA
ggcgcgccagtcctctgcgcggaagagtgctggccctggggaagccccttcctcacccaggcttcacacatttgaccctggctctctctcaggaggacccctcgctggaaaggcattttaagggccaccgagatgcagttacctgtgtggacttcagtatcaacacaaagcagctggccagtggctcccgactcggaccgatg

SEQ ID NO: 3187 - DNA, 203 bp, synthetic construct
  source 1..203: mol_type = other DNA
ggcgcgccagtcctatcccagccgccagaattcgaggtctgcggcggctttcaaaacttgacaactttcctttccaggaggaccccgttctggagcgttatttcaaaggccacaaagctgcgatcacctccttggacctcagccccaacggcaagcaacttgctactgcttcttgggatacctttctccgactcggaccgatg

SEQ ID NO: 3188 - DNA, 203 bp, synthetic construct
  source 1..203: mol_type = other DNA
ggcgcgccagtcctggacgcgacgggacgcgctgggaccggcgtcgggggtcgcggggaccatgcagcggagcctccctgcccttcgctatcctgacgctggtgaacgccccgtacaagcgaggattttactgcggggatgactccatccggtacccctaccgtccagataccatcacccacgggctccgactcggaccgatg

SEQ ID NO: 3189 - DNA, 203 bp, synthetic construct
  source 1..203: mol_type = other DNA
ggcgcgccagtcctgttttgggcatgcacgtgatactcacacagtggcttctgctcaccaacagatgaagacagatgcaccaacgaggctgatgggaaccaccctgtagaggtccatctgcgttcagacccagacgatgccagagctatgactgggcctgcaggtgtggcgccgaggggagatcagcccgactcggaccgatg

SEQ ID NO: 3190 - DNA, 203 bp, synthetic construct
  source 1..203: mol_type = other DNA
ggcgcgccagtcctgcacgttccgggagggcgccggggcacgcgtgtgtctgagctgcctttctcctcccgttgctagggaaatggtccaggagtgctgggtgtgagcctcccttctcctcaagccggagactgcggttgtcattgatcaattgaagaagcaaggacccgaaatcacagacattagcacgactcggaccgatg

SEQ ID NO: 3191 - DNA, 203 bp, synthetic construct
  source 1..203: mol_type = other DNA
ggcgcgccagtccttttcaaatgtagaagaacaattcaaaatgctatcactgtgtatgtaagaaggatggggcagatttcattttaccctctagtctccctcaatgcatgcacggatttatctgtacgctaagctctctgctctgcatctgtagctccttgtggattatattgtctcagtgatcagaacgactcggaccgatg

SEQ ID NO: 3192 - DNA, 203 bp, synthetic construct
  source 1..203: mol_type = other DNA
ggcgcgccagtcctaaaatagagtggctagtgtgagcctcgaaggcctgaatttggcaagggtccacccagccaagtgatctgaggaaacatcggagaaagattgcagttgtggaagaagatggtcgagaggacaaagcaacaattaaatgtgaaacttctcctcctcctacccctagagccctcagacgactcggaccgatg

SEQ ID NO: 3193 - DNA, 203 bp, synthetic construct
  source 1..203: mol_type = other DNA
ggcgcgccagtcctgtaaccactccaggacgctgccagggcctgagaagggacaaactccaattgctccagttcaaactggtcctggcctggtcaaacggaggagacagagcagtgattcacagcaggacgtggtacttgcagactgaccgtcctctcaggactcactagggtctcttctctgacgagcgactcggaccgatg

SEQ ID NO: 3194 - DNA, 203 bp, synthetic construct
  source 1..203: mol_type = other DNA
ggcgcgccagtcctgtgccagctcaatggggccgccgacctcgaagtttccgaagaagtaaaatagaaagaagaccttttttgaaatgacctgtgttagtcacctctctcaggatgcgtgaggcggacacgttgaggccacctcagctgatggaagtttccgctgacatcatctctaccgttgagttccgactcggaccgatg

SEQ ID NO: 3195 - DNA, 203 bp, synthetic construct
  source 1..203: mol_type = other DNA
ggcgcgccagtccttcaggcacatcgaggagaaccagctgcccaagctcttggctgctgcccttctgaggcctgcctgatttgggccacatagatctggttttggccattgactggcaacatggcagtagccaactgcagagccaccagggagcagcctcattctgattgagtataacgaagacgctgcgactcggaccgatg

SEQ ID NO: 3196 - DNA, 203 bp, synthetic construct
  source 1..203: mol_type = other DNA
ggcgcgccagtcctctcgctcaccccgcctgctcctgcggagtgactgccgcagcggggccggaagacaggtgcgccccagcctcgccagctctggccctggcctccggggaactcggcgcctccctcgtcaccgtcggtggcggttaaaactggcctctacgcttctgcttcaatctccaatttggccgactcggaccgatg

SEQ ID NO: 3197 - DNA, 203 bp, synthetic construct
  source 1..203: mol_type = other DNA
ggcgcgccagtcctgtcggcggccgctgcgcgcgctcgttgcccaacccggtccccgcccccagacacgccgggctctcggggcaccacagccatgtgctcgttagcgtcaggcgctaccggttattcacatctgctgaagaaacattttcacactgtaagtctgagcatcagtttaatattgacagccgactcggaccgatg

SEQ ID NO: 3198 - DNA, 203 bp, synthetic construct
  source 1..203: mol_type = other DNA
ggcgcgccagtccttatcaaggaatcccggcgtggacagcgcgaggagaaagatggcggcgatggcggtcgggggtgctggtgggagccgcgtgtccagcgggagggacctgaattgcgtccccgaaatagctgacacactaggggctgtggccaagcaggggtgagggccggacctccacgagcggacgactcggaccgatg

SEQ ID NO: 3199 - DNA, 203 bp, synthetic construct
  source 1..203: mol_type = other DNA
ggcgcgccagtcctgagtcctctcggcacccagcaagcatccacaacggggtgatcgccgtcttccagcgcaaggggctgcccgaccaggagctcttcagcctcaacgagggcgtccggcagctgttgaagacagagctggggtccttcttcacggagtacctgcagaaccagctgctgacaaaaggccgactcggaccgatg

SEQ ID NO: 3200 - DNA, 203 bp, synthetic construct
  source 1..203: mol_type = other DNA
ggcgcgccagtcctgctcccaggatgtgttcgggaacctacagcgggaacacggactgggcaaggcggtggtggtgaagacgctggagcagctggcgcaacaaggcaagatcaaagagaagatgtacggcaagcagaagatctattttgcggatcagaccctctggagactttggggaccagtttgaccgactcggaccgatg

SEQ ID NO: 3201 - DNA, 203 bp, synthetic construct
  source 1..203: mol_type = other DNA
ggcgcgccagtccttggcctgccggaagttcccagggagaaggcagcgcgttgtacccgagttacctgtagtcaaccacagtctgaaaatattaaggtattttaagacagaaagagagagaggagagaaaccgcattcacaaaaaagaaatcctctttttagaacatctcttggtggtaccatcagaacgactcggaccgatg

SEQ ID NO: 3202 - DNA, 203 bp, synthetic construct
  source 1..203: mol_type = other DNA
ggcgcgccagtcctgttttcctcctgtgaccctttcggggccgggctctcaccctaaagaagcagccccgccctggggtggccccaccctctcttgggacctgtcataagtcggaccccgggcgcccggctgcgcagtcccagccgccttccccaggcagtggaaccttcgggctcctgagcttcaggcgactcggaccgatg

SEQ ID NO: 3203 - DNA, 203 bp, synthetic construct
  source 1..203: mol_type = other DNA
ggcgcgccagtcctgaccgctaccagtgtgactgcacccgcacgggctattccggccccaactgcaccatccctggcctgtggacctggctccggaattcactgcggcccagcccctctttcacccacttcctgctcactcacgggcgctggttctgggagtttgtcaatgccaccttcatccgagagcgactcggaccgatg

SEQ ID NO: 3204 - DNA, 203 bp, synthetic construct
  source 1..203: mol_type = other DNA
ggcgcgccagtcctcaccaattcggctggcgtctccgagaccgcggactcccgtagggtccccgtggccccgagttgtagtcgggacaccccggccgcgggtgatcgtcgggtctccacgcgcccgggtcgctgacgcggatccggcctcggcgccttctcagggcgccctgcaaggccgcaggcaggcgactcggaccgatg

SEQ ID NO: 3205 - DNA, 203 bp, synthetic construct
  source 1..203: mol_type = other DNA
ggcgcgccagtcctgcactccagcctgggcgacagagtgagaccctatctctaaacaaaagaaagaacgtcttcaagcatggagccatgaagctggatttggctttctgtcgctctctctacagggtacagacagtgacaataccctcccctcccttgggctggacccctctctacagctaggagccacgactcggaccgatg

SEQ ID NO: 3206 - DNA, 203 bp, synthetic construct
  source 1..203: mol_type = other DNA
ggcgcgccagtcctctgctgacaccttgatcttggacttcccatcttccaggaaggcctgacctcagttgttccagggtaaagaatttgggcagtgcccacacccacgctgttggataacatttcttcaccataccagtgagggtgaatgtgtacacgcccagcttcctgcctgttactctccacagtcgactcggaccgatg

SEQ ID NO: 3207 - DNA, 203 bp, synthetic construct
  source 1..203: mol_type = other DNA
ggcgcgccagtcctggaggaggaggtggaggaggtggaggaggtggaggaggcgcgggaccgggggggatagattcccagaagtgggataactggatcagagggtgattaccctgtgtataagagtatgtgtctcactgcaccttcaatggcattgagtagatcgtcagtatttaaacagatcacatccgactcggaccgatg

SEQ ID NO: 3208 - DNA, 203 bp, synthetic construct
  source 1..203: mol_type = other DNA
ggcgcgccagtcctaggacgcccccggcccaggcccttggggtggacaagtccttcacttctcgccggagtgtgtggaggagcgatgggcagaaccagcacttccctcaggcactagacctgtcacgagtgaacttagttccctcctatactccttcactctaccctaagaacacagatctatttgagcgactcggaccgatg

SEQ ID NO: 3209 - DNA, 203 bp, synthetic construct
  source 1..203: mol_type = other DNA
ggcgcgccagtcctctttcccctccccctcctgtaacttcctcttcttccccggttgggccctctgctcctctgcactctcctccccagttcgcagatttccgcccaccttccgcctcgtctagccgcgccacagctagcggggtgatctttccccccctctggtaggagttggtgaaggtgagactccgactcggaccgatg

SEQ ID NO: 3210 - DNA, 203 bp, synthetic construct
  source 1..203: mol_type = other DNA
ggcgcgccagtcctcggacttagacgcggggacttcagggcagggggcgccccctgcccgggtcaccagtcggggcgaggggacgtctcctctcccccagctgctctgctcggatggcgccgccggctgagtgacgggggcggcgcgcaggacttcccagctcggacctcttgccttcgaggggaaagcgactcggaccgatg

SEQ ID NO: 3211 - DNA, 203 bp, synthetic construct
  source 1..203: mol_type = other DNA
ggcgcgccagtcctcgcgcgctcgtctgcctggactgttgcgggccccgggacctgggctgggaacccgcggtggagcgggacacgaacgtggacgagcctgtggagtgggagacacctgacctttctcaagctgagattgagcagaagatcaaggagtacaatgcccagatcaacagcaacctcttccgactcggaccgatg

SEQ ID NO: 3212 - DNA, 203 bp, synthetic construct
  source 1..203: mol_type = other DNA
ggcgcgccagtccttgtgtggtgctgtccttcctcaagactacctcattctcactggctcggagactcctgcctgctgagctgactacacagacttagtcttctccactccgtgttcctgcagctagagacatgacctaacaccctgatgaccactctcagggaccttgagtgactggccggtgcacccgactcggaccgatg

SEQ ID NO: 3213 - DNA, 203 bp, synthetic construct
  source 1..203: mol_type = other DNA
ggcgcgccagtccttgttctttatgctggagccgagatggtcataaactcgtgagtgcttccactgataacatagtgtcacagtgggatgttctttcaggcgactgtgaccagaggtttcgattcccttcacccatcttaaaagtccaatatcatccacgagatcagaacaaggttctcgtgtgtccccgactcggaccgatg

SEQ ID NO: 3214 - DNA, 203 bp, synthetic construct
  source 1..203: mol_type = other DNA
ggcgcgccagtcctcacctgcagtgtagtggtttatactaaggaatacacacaaattacaggcctttgagcccagaatgcaacttgggaggtatttgacctgtccaaagacgacttgatacctctataatgtaacagaaaaggtcagaaaatattaagcaagtagaagtgtggagcatattaagcaagcgactcggaccgatg

SEQ ID NO: 3215 - DNA, 203 bp, synthetic construct
  source 1..203: mol_type = other DNA
ggcgcgccagtcctacaattgcattcccgggctggatgccggttgttaagcgcgctgttgctttgtaaaaatgcgtgtgttctggtgttttggctggggcagggaggggacaccccacgaggtctggggctgttgcccttgtgtcatccccccgccttttaactgcaaaggtcaccatggctgaccggcgactcggaccgatg

SEQ ID NO: 3216 - DNA, 203 bp, synthetic construct
  source 1..203: mol_type = other DNA
ggcgcgccagtcctcgcctgctcctacgtgggcagcctctacgtctggaagagcgaactgcccagggaccatcccgcggtcatcaagcgacgcttcaccagcgtcctggtggtgtccagtctctcacccctgtgcgtgctgctctggagggaactcacaggcatccaggcacatccctgctcaccctgcgactcggaccgatg

SEQ ID NO: 3217 - DNA, 203 bp, synthetic construct
  source 1..203: mol_type = other DNA
ggcgcgccagtcctgcggacaatgaattttactttcgctacccaaatggagtttcgctcttgttgcccaggctggagtgcaatggcacaatctcggctcaccacaacctctgcctcccgggttcaagcgattctcctgcctcagtctcctgagtagctgggattacaggcttccaggacgtgcatgcccgactcggaccgatg

SEQ ID NO: 3218 - DNA, 203 bp, synthetic construct
  source 1..203: mol_type = other DNA
ggcgcgccagtcctcagcccaacccatggccgggtctcctagccgcgccgcgggccggcgactgcagcttcccctgctgtgcctcttcctccagggcgccactgccgtcctctttgctgtctttgtccgctacaaccacaaaaccgacgctgccctctggcaccggagcaaccacagtaacgcggacacgactcggaccgatg

SEQ ID NO: 3219 - DNA, 203 bp, synthetic construct
  source 1..203: mol_type = other DNA
ggcgcgccagtcctacccaggatgcggaggcccttgtggggctgtggccactagggagtttcttggtcacaggacgtgaccccagccaggccctggtgttgaggtcaggacctttaccaggagaagtcaatacctaccagatccagaagattcccagaggtgtgtccctggaatcctccaacctctgccgactcggaccgatg

SEQ ID NO: 3220 - DNA, 203 bp, synthetic construct
  source 1..203: mol_type = other DNA
ggcgcgccagtcctgtatttacgatggagatgaatttagaaaagcagagtctgtccaaggtggagaaaccaggatctatttggatttgccacagaatttcaagatatttgtgagcgctatctgctctatgcaagcacttagacaacctatgggaagaacaccgtggcagcgtggtcctgtttgcctggcgactcggaccgatg

SEQ ID NO: 3221 - DNA, 203 bp, synthetic construct
  source 1..203: mol_type = other DNA
ggcgcgccagtcctcgggaactggcgaggtagttccttcgcggtggagagacctggaatggccaaatatcaagaaatgtacatcaaaacattcacccagaaaaccaggagctagtaagggtacttcgagaacagcttcaaacagaacaggatgcacctgctgccactcgacagcagttctacactgaccgactcggaccgatg

SEQ ID NO: 3222 - DNA, 203 bp, synthetic construct
  source 1..203: mol_type = other DNA
ggcgcgccagtcctagagttatatgcagaagttgaaaatgcctggaagatttctggtttctttcactacttatcctgcctttttgcatcgctgccagatttggatgatatgatattcagaggggcaccttaatcaaagccattcttcaacaagacccacctggcataagattgcacacataattcaagcgactcggaccgatg

SEQ ID NO: 3223 - DNA, 203 bp, synthetic construct
  source 1..203: mol_type = other DNA
ggcgcgccagtcctcacactctcccggcgcctcggccggccgggcgcggtgtgcaggggtgaggcggtgtctccaggctgaggagggacgcggaggagggtccggcgcggccccgggactggagggtgagtccctcacaaagggcggagcggggctgtcacctggagatcacggagggaagttcatcccgactcggaccgatg

SEQ ID NO: 3224 - DNA, 203 bp, synthetic construct
  source 1..203: mol_type = other DNA
ggcgcgccagtcctgtgagacttcagagcctgttccctctcctcccaagtgatcagaacactaccgttcaagaggatgctcacttcaaagctttcttccagagtgaagatagtccaagtcctaagagacagcgcctctctcattcagtctttgattatacatcagcatcaccagctccctcaccaccacgactcggaccgatg

SEQ ID NO: 3225 - DNA, 203 bp, synthetic construct
  source 1..203: mol_type = other DNA
ggcgcgccagtccttcggcagaactccgccaccaggcgcgatgccggaactacatgtcccatgacgctctgggaggccgcagctttccaccggaaagagggtggctgaggtgggggaggagcccaaaaggcattgtgggagtacagctctttcctttccgtctggcggcagccatcaggtaagccaagcgactcggaccgatg

SEQ ID NO: 3226 - DNA, 203 bp, synthetic construct
  source 1..203: mol_type = other DNA
ggcgcgccagtcctgtctgcaggtatggatgttgttctcttttccctgtctttatttccttaccaatcggctgccatccgaggagctgaggaagcctagagctctcagaagcagtcctttgagctggtgtaggggcactcagaatggtccagcgtttgacataccgacgtaggctttcctacaatacacgactcggaccgatg

SEQ ID NO: 3227 - DNA, 203 bp, synthetic construct
  source 1..203: mol_type = other DNA
ggcgcgccagtcctgactacttacctgcgaatcccggttgcccgcccgccagcacgtccgttccctaagcagaccgcctggcctcctgcctgacccgtcttctcaccgttgcccggagtctgacctccccacgctcagtccactaacgaagctatccctgctcctgccccacagcttctaagtgccagcgactcggaccgatg

SEQ ID NO: 3228 - DNA, 203 bp, synthetic construct
  source 1..203: mol_type = other DNA
ggcgcgccagtcctctcaggtgagaacttctcaggtggaaagcaggaagagggtggctagtgcaaggatcagatagcacctgcttggaagttcactgattaatgatttaacaagggcggtcacatgggacaactgctgcttttctctgccctcatttttcttactaacaggtctgaaaattgaacaagcgactcggaccgatg

SEQ ID NO: 3229 - DNA, 203 bp, synthetic construct
  source 1..203: mol_type = other DNA
ggcgcgccagtcctgaagtggagcctgggagccttgacgttaggaacgaagtctaacctggatctggagccgggagataatctgaatgctggctggggcagaaaattactaagatcctgtggaagtgtgaggattattaaactgatcactgtctgataaggtgagatcaaattgggaatgctttcatacgactcggaccgatg

SEQ ID NO: 3230 - DNA, 203 bp, synthetic construct
  source 1..203: mol_type = other DNA
ggcgcgccagtcctcagcagtacttctgtgccccagcccctctcagcccatctgccaggccccgcagcccatggggcaagcttgatccctatgattcctctgaggatgacaaggagtatgtgggctttgcaaccctccccaaccaagtccaccgaaagtccgtgaagaaaggctttgactttaccctccgactcggaccgatg

SEQ ID NO: 3231 - DNA, 203 bp, synthetic construct
  source 1..203: mol_type = other DNA
ggcgcgccagtcctctcccgcagcttgtccacactctgaatgcagagccagagccccggagcctctccctgggcggccatgtgggtttcgacagcctccccgaccagctggtcagcaagtcggtcactcagggcttcagcttcaacatcctctgtgtgggggagaccggcattggcaaatccacactgcgactcggaccgatg

SEQ ID NO: 3232 - DNA, 203 bp, synthetic construct
  source 1..203: mol_type = other DNA
ggcgcgccagtcctgacttggaggcagagacccaagcagctggaggctctgtgtgtgggtcgctgatttcttggagcctgaaaagaaagtaacacagcagggatgaggacagatggtgtgagtcagtgagagcagcgactggacccagagccatgtggctgtgccctctggccctcaacctcatcttgcgactcggaccgatg

SEQ ID NO: 3233 - DNA, 203 bp, synthetic construct
  source 1..203: mol_type = other DNA
ggcgcgccagtccttggaccaccgggcccggagggtccgagccgagagcggagcctgcaccctccacctcccgcccttcgggaaatatcagaactgagccaggagctgctgccgcccacccctcgtcttctggctgcctccctctttgtgccccacaggctccccctctccacctcctggggcccatccgactcggaccgatg

SEQ ID NO: 3234 - DNA, 203 bp, synthetic construct
  source 1..203: mol_type = other DNA
ggcgcgccagtcctatgttgagtgacagctgtccaatggaggccctccgtgctagtacggcttgcggcttaagcgccgccgcggtctgcggaatgtcaactattcaacatggaggcggaggtcgataagctggaactgatggtgagtgcaaagtgaaggagatctactgggtagtttatttttccccccgactcggaccgatg

SEQ ID NO: 3235 - DNA, 203 bp, synthetic construct
  source 1..203: mol_type = other DNA
ggcgcgccagtcctagtcaagttgacctacatagaagagaaggaactggaagtgcatgtctgtgttctggctccgattgggaaaagctgcttaaccactgttacacttccaggggctccccactcagtccccagtcatctatcgacagtgagctgagtacttcagaattggaggatgattctatctcccgactcggaccgatg

SEQ ID NO: 3236 - DNA, 203 bp, synthetic construct
  source 1..203: mol_type = other DNA
ggcgcgccagtcctcacccccaccgacctctcggagacaggaatccgctctgcccctgcatcctcctctgctcacccttctctcagtagtgtttgtcagacaccagtccggacctcagctctcgatctagttcccgagtaagatttagctcccgggaaagcgtgcctgaaacaagccggagtgagcctcgactcggaccgatg

SEQ ID NO: 3237 - DNA, 203 bp, synthetic construct
  source 1..203: mol_type = other DNA
ggcgcgccagtcctgcagtcccgggccggcccgtaccgccaggcgatcgcgctgatggcggcgctggcagcagcggccaagaaggtgtggagcgcgcggcggctgctggtgctgctgttcacgccgctcgcgctgctgccggtggtcttcgccctcccgcccaagtgggctgatcatggccagcgccacgactcggaccgatg

SEQ ID NO: 3238 - DNA, 203 bp, synthetic construct
  source 1..203: mol_type = other DNA
ggcgcgccagtcctcctccttcttcattagcggtctcccatgtggggccacatcttccctcaccaggaacccagtgggcgcgctccagcccccctcagcttgccttttgcgtggtcattagagctagggcacacgtcatgctgattcacatatttttgccctttgtcatgtattgagaaaaagtaaggcgactcggaccgatg

SEQ ID NO: 3239 - DNA, 203 bp, synthetic construct
  source 1..203: mol_type = other DNA
ggcgcgccagtcctaacaaatctcctaaccttcagaggctcggatttcttgtctatgagatgaagtgagtttccttcgtctgggcagactccctcccctcttccataaaggctgcaggagacctgtagctgtcacaggaccttccctaagagcccgcaggggaagactgccccagtccggccatcacccgactcggaccgatg

SEQ ID NO: 3240 - DNA, 203 bp, synthetic construct
  source 1..203: mol_type = other DNA
ggcgcgccagtcctacacggagccgtgtgtggatggctgggtctatgaccgcagcatcttcacctccacaatcgtggccaagtggaacctcgtgtgtgactctcatgctctgaagcccatggcccagtccatctacctggctgggattctggtgggagctgctgcgtgcggccctgcctcagacagtgcgactcggaccgatg

SEQ ID NO: 3241 - DNA, 203 bp, synthetic construct
  source 1..203: mol_type = other DNA
ggcgcgccagtcctaggaagccgaggaaggctgtgtttctgactcacacgggggagtcgggggagtcgtaaacaaccctgaagagaacagccaggcctggcgctctgggcttggtcctgggacacccgtttgacactgtaaaggtgaggctgcagacccagaccacctaccggggcatcgttgattgccgactcggaccgatg

SEQ ID NO: 3242 - DNA, 203 bp, synthetic construct
  source 1..203: mol_type = other DNA
ggcgcgccagtcctgatgcagcacggggtcgcggggcgggcgcccagtgcaccggaggaggtgagcgccaggtcgccttcgcggcccggggacacaggcagggacgcgggagctgatgcggctggaccggccggggaaacagtattttctggaagggggcccctctgaagcggtccaggatcctgcaccgactcggaccgatg

SEQ ID NO: 3243 - DNA, 203 bp, synthetic construct
  source 1..203: mol_type = other DNA
ggcgcgccagtcctttggctgcaaagagagaggatcccgggtatctccctccttacaaccaccgccacctcctagtgccttagaagccactgacagcccccagggcaggtgagccctgcatctggaataagtccacagtgaagaccaaaagagacacagtgaaaggctacttcctggctggaggggaccgactcggaccgatg

SEQ ID NO: 3244 - DNA, 203 bp, synthetic construct
  source 1..203: mol_type = other DNA
ggcgcgccagtcctgctgaccacaggagccggtgctggggactgagggaaacttagagttcagagagggggtgtgatttgcctgaggtcacacagcaagttagagacccagctccacgactcattgtcttggctttggccctcgtcatcctgcccacccagcggggcttcccaacccaccacacagcccgactcggaccgatg

SEQ ID NO: 3245 - DNA, 203 bp, synthetic construct
  source 1..203: mol_type = other DNA
ggcgcgccagtcctcctcagtttcctctttcagtctgtggtgtgtggtccatcctcttgctgagcacattgaaaggaactggctatctttgatctcttcctccagggaatctcttagttataacatttgttagctactttggagccaaacttcacaggccaaaaataattggagcagggtgtgtaatccgactcggaccgatg

SEQ ID NO: 3246 - DNA, 203 bp, synthetic construct
  source 1..203: mol_type = other DNA
ggcgcgccagtccttgcactgggcgcctcgcagctggtgaggatgccctgctgcgcggccctgcgcccccagccccagtcccaggtgggcaagactgactgggcccggcttcggcccctcgtgccggtggatgaaacgtgccggagtgcttgggtgccatcagctatcaaatctgaattctaagcgcccgactcggaccgatg

SEQ ID NO: 3247 - DNA, 203 bp, synthetic construct
  source 1..203: mol_type = other DNA
ggcgcgccagtcctagagatagcaggtggtgctaattcactgtgttggtgggaactctggctacactgaaaggctggagtgcagtggcacgatcttggttcaccacaatctcgtctcgaaggctcaggtgattctctcacctcagccgcctgagtagctgggaccacagtttcagctgtgagttcaaccgactcggaccgatg

SEQ ID NO: 3248 - DNA, 203 bp, synthetic construct
  source 1..203: mol_type = other DNA
ggcgcgccagtccttacaggacttgacccaatgaaagaagcatatggcacttgtgaagataaatgttactcctccctttttaattggaacttctgcttaggacctgtgtatgacgtttcacctgtgatctgttctttcggtagccactgactttgagttacaggaaggtctccgaagatttgtgtcaacgactcggaccgatg

SEQ ID NO: 3249 - DNA, 203 bp, synthetic construct
  source 1..203: mol_type = other DNA
ggcgcgccagtcctaatcagagaatggagggatataatgagtggaactgagggccgcgatgggcctcttggaacattggtgtgttcatctgcattcgatgtgctggaatccacaggaatctgggggtgcacatatccagggtaaagtcagttaacctcgaccagtggactcaagaacagattcagtgccgactcggaccgatg

SEQ ID NO: 3250 - DNA, 203 bp, synthetic construct
  source 1..203: mol_type = other DNA
ggcgcgccagtcctcccgcagggtggccttagcggccggtcgtaccacggcagccccgccgatcaggttcctttgggagacttcgacttgttggcgaaatgaaccggagaagaatcccaattgggaattgcggaaaacaggactctagggtagagaaaggttgtagaaccaatagggtttgagacctgcgactcggaccgatg

SEQ ID NO: 3251 - DNA, 203 bp, synthetic construct
  source 1..203: mol_type = other DNA
ggcgcgccagtcctcgcggtgccgcggggccgctccgaggagcctgagagacccacggaggcttcgcgggaagacgcggcggcggcggcggaggatgagcctgcagagcgcgcagtacctccgattctaagctgggtccagctgaagtctggacatccaggcaggctctgcaggacctgtaccagaaacgactcggaccgatg

SEQ ID NO: 3252 - DNA, 203 bp, synthetic construct
  source 1..203: mol_type = other DNA
ggcgcgccagtccttccgtcctccaggatctggggagaaagagccccatcccttctctctctgccaccatttcggacaccccgcagggactcgttttgggattcgcactgacttcaaggaaggacgcgaacccttctctgaccccagctcgggcggccacctgtctttgccgcggtgacccttctctccgactcggaccgatg

SEQ ID NO: 3253 - DNA, 203 bp, synthetic construct
  source 1..203: mol_type = other DNA
ggcgcgccagtcctagaggaggagggcacttttgtgtgatggcaacttcacttctagggcgtggtgcttgctcccgaatcagacgccggcagccaaacttgtcccctcctgtagagtaggaagcggccgggcgccggggctgttgggggtgccaggaagaaccgaggttgggatcgactcctctggcccgactcggaccgatg

SEQ ID NO: 3254 - DNA, 203 bp, synthetic construct
  source 1..203: mol_type = other DNA
ggcgcgccagtcctaaacatgaaacaagaataataatatttaaatgtaacttaatcattatacctctttatccatcaaagtgaattcattccattccctttcatctgtgctcatactttgcatcagatattgggtaaaccaaagtgtgtaggaagaaataaatgttttcatagtcattactctttacacgactcggaccgatg

SEQ ID NO: 3255 - DNA, 203 bp, synthetic construct
  source 1..203: mol_type = other DNA
ggcgcgccagtccttcgccgcgagccgcaggtctgcctgcagtcccacttccaggctgaactccctgaggtctctgattccctaggtgtcctggagtctggcccaggacctggccccacaggagtcccagcaggggtagctcctcccgggacaaggaccgaagtgcgacggtcagtagttcagtgccccgactcggaccgatg

SEQ ID NO: 3256 - DNA, 203 bp, synthetic construct
  source 1..203: mol_type = other DNA
ggcgcgccagtcctaagagtcggagttttggcgttagacctaggttcagagctcagatccacttcttcctagccttacgacttaggagcactccgctggtccaggcggcaacatgtccatgcttttagtgatgtccctgcctctaatccagaagccatggaggagataaggtagcccccctcgatcggcgactcggaccgatg

SEQ ID NO: 3257 - DNA, 203 bp, synthetic construct
  source 1..203: mol_type = other DNA
ggcgcgccagtcctaccgtctgaggccaggagcgctgcgacggagccttgaccgccgttgcccggccctctcccgcgcagccccgggcttccgcagtccttccttcagaagggaaatttctgagggtcaggaaggggaatctgtacctcactccttgaacaccaaggaaggaatattgggaaaccaaacgactcggaccgatg

SEQ ID NO: 3258 - DNA, 203 bp, synthetic construct
  source 1..203: mol_type = other DNA
ggcgcgccagtcctacgcaccgcgcagcctgctgtgcccgtgggtcccgagtgctccgccgcccgccccgacccgggcccagccgcctccacggcccgcgctcgtactggagcgaagagcggcctcctgaaggaggggaagggacgtgggggcggccacggcaggattaacctccatttcagctaatccgactcggaccgatg

SEQ ID NO: 3259 - DNA, 203 bp, synthetic construct
  source 1..203: mol_type = other DNA
ggcgcgccagtccttgacagggcccgggtcccttctcagtggtgctctgtgcttcagggcaagctccccgtctccgggcgcacttccctcgcctgtgttcggtccatcctcctttctccagcctcctcccctcgcaggtgggatcgtcggtgggaccggagcgcgggcgggcgcggccccccgggacccgactcggaccgatg

SEQ ID NO: 3260 - DNA, 203 bp, synthetic construct
  source 1..203: mol_type = other DNA
ggcgcgccagtcctcgtgcgagtcggcctcagtgtctgcgagattaatctctcatggccgctgcacaagaacctggcttttagctgaactaaggagaaagtcctacaacagtttggcgtgcaacatggggcttgagaaaggatgaggacggggacttggttgccttttccagtgacgaggaattgacacgactcggaccgatg

SEQ ID NO: 3261 - DNA, 203 bp, synthetic construct
  source 1..203: mol_type = other DNA
ggcgcgccagtcctcctctctgctgagtcagagctctgcatatattttaagaaaaggcattgaggaactcaatcaaaccagtattcttttcacacaggtttcatcagtttcacccttttctgtgtgcggctgattttagaaagattgcttccttgtatggtagcgataagtttgatttgccctatgggcgactcggaccgatg

SEQ ID NO: 3262 - DNA, 203 bp, synthetic construct
  source 1..203: mol_type = other DNA
ggcgcgccagtcctaacaaaccagggcgggatgggagtgtcttcttggctgtggaaatcgatcctcctaccttgtcctgaagccacccgccgcctttcctcgtccctcccttcgcggtgattttccggtcccggcgcccggcgagggcgcgcggctggtgtccgccccgcccgaaaggtgagccagcccgactcggaccgatg

SEQ ID NO: 3263 - DNA, 203 bp, synthetic construct
  source 1..203: mol_type = other DNA
ggcgcgccagtcctctccccacgcgccaccatgcctctgctggacgttttctggtcttgcttcaggaaggtgaagtgcttcccattgctgcaggtgaagaagaacgctgaagccgaggccaaaagagcatgtgagtggcttcaagcaacaggattccctcagtatgtgcagctttttgaaggaggctgcgactcggaccgatg

SEQ ID NO: 3264 - DNA, 203 bp, synthetic construct
  source 1..203: mol_type = other DNA
ggcgcgccagtcctagaggcagttctagtctcagatcgtggggcagagaaagctccttgggaacatgggagaggaacgagttggtgcattgtagaaactgcccgaaggccagcagggctggtgcttaggagaacatgcagtagaacttttcatcaaacaaatggaacacgtcacagaattttgctaaccgactcggaccgatg

SEQ ID NO: 3265 - DNA, 203 bp, synthetic construct
  source 1..203: mol_type = other DNA
ggcgcgccagtcctattccttttaaatctcaagcttcagtaatcccagaatcagaaaaaaaaggattcaatagtcaagccaagagatttcctcataagaagaatgatatcccaggacctgggttctacaatgttattcaccagtcaccggtgtccaacagtgtctcattgtccaagaaaggaacttgccgactcggaccgatg

SEQ ID NO: 3266 - DNA, 203 bp, synthetic construct
  source 1..203: mol_type = other DNA
ggcgcgccagtcctactgaagtaggcctacacagtaggaactcatgtcatttcttgtaagtaaaccagagcgaatcaggcggtgggtctcggaaaagttcattgttgagggcttaagagatttggaactatttggagaccaatgatgcgagctcagagtcaatagcatccttctctaaacaggaggtccgactcggaccgatg

SEQ ID NO: 3267 - DNA, 203 bp, synthetic construct
  source 1..203: mol_type = other DNA
ggcgcgccagtcctaggtgggcggtggcggtaggtgggtggccagcgactggcaacgcggtggcttagacgcgcgagatccggccagggtcagagtactgtaagattgatgttaaaggcatggtgttcaccccacttcatcagcgtacataagttatctcttcttttggacccttattttatgccatacgactcggaccgatg

SEQ ID NO: 3268 - DNA, 203 bp, synthetic construct
  source 1..203: mol_type = other DNA
ggcgcgccagtcctgcaagctgctgaagtttctcagctgcggggagcaagggtaatcactcctgaagatcttctgtttttgatgcgcaaagataagacaaattgagtggcagcaataatgcgaacaaaagacaaaagattgctcaggacttcctcaactctattgaccagacaggagaacttttagcacgactcggaccgatg

SEQ ID NO: 3269 - DNA, 203 bp, synthetic construct
  source 1..203: mol_type = other DNA
ggcgcgccagtccttggctgctgaagatcatctgcggggtggtcaccatccgcaccgtgtatgcctcccacaagcaggccaaggcctgcctcgtctctcgcgttagctgtgagcgcacaggcactcgcttccacacccgtggcgtgaacgacgacggccatgtgtccaacttcgtggagacagagcagcgactcggaccgatg

SEQ ID NO: 3270 - DNA, 203 bp, synthetic construct
  source 1..203: mol_type = other DNA
ggcgcgccagtcctgagagccacggccagaggggacagaagcccagccaggagtccctcagagtgctcccttcaagcctcccaggccatgcaccggggctcagcctgagttccacctcgctgccggagccaggccctccacggcaccccagtccccagagccccgacagaggggtccctggccacagccgactcggaccgatg

SEQ ID NO: 3271 - DNA, 203 bp, synthetic construct
  source 1..203: mol_type = other DNA
ggcgcgccagtcctcgaatctccatccctaatccatctgcccctaatctctgtcccctttgcccatccttccttttctcggtgtctctttccacccttatctccacacctgcccaccctgcactcccattctgtttcccatctgcacccttgccccatccctcccacacacaggaccagacggccacccgactcggaccgatg

SEQ ID NO: 3272 - DNA, 203 bp, synthetic construct
  source 1..203: mol_type = other DNA
ggcgcgccagtcctgaacctgaacatgattttagcaaaatttccatcgtgaggccattttcaatagaaacgaaggattccacggatatctcggcagtcctcggaacaaaagcagctcatggctgtgtaactgcagtctcaggcaaggctctgccttccagcccgccagacgccctccaggacgaggcgcgactcggaccgatg

SEQ ID NO: 3273 - DNA, 203 bp, synthetic construct
  source 1..203: mol_type = other DNA
ggcgcgccagtcctccttctgcgccacagagatggggtctcactctgtcatccaggctggaatatagtggcacaatcatagcccattgtagcctccatctcaaggactcaggggatcctcccttctaggcctcccaagtagctgggattacaggtagttacttttggtgacgctgtccagttcccacacgactcggaccgatg

SEQ ID NO: 3274 - DNA, 203 bp, synthetic construct
  source 1..203: mol_type = other DNA
ggcgcgccagtcctggcctcttttgtaggagcacctgaaatgcagcgtctggtgcactaagccgtagcggcagcagcagccacagcgacagcgctggggccctgtgtagaagctccatcccccttgtctttgtgcttgcctgcgtccccagactcagagattatcttagaagacctaggactccaaaacgactcggaccgatg

SEQ ID NO: 3275 - DNA, 203 bp, synthetic construct
  source 1..203: mol_type = other DNA
ggcgcgccagtccttgcttagaacagagcttggtgagcatccggtcaacagctggtccctgcagacggcttcccatttttatgaccggatgctgggaagcctgctggtccacaggtccatacatgaagtcaccataagagggtggttcccacttcatcaacacctcatcgccgcgaggtgaggctaagcgactcggaccgatg

SEQ ID NO: 3276 - DNA, 203 bp, synthetic construct
  source 1..203: mol_type = other DNA
ggcgcgccagtcctctgatgtgagctagtttgtctggttgagttggatgtttaaatagaaggcagaacaacaacaggtactccacatcagcattctcaagactggagaagttaggcctcagacatcccaagccttctcctttcattggaaacttgacatttttccgccagggtttttgggaaagccaacgactcggaccgatg

SEQ ID NO: 3277 - DNA, 203 bp, synthetic construct
  source 1..203: mol_type = other DNA
ggcgcgccagtcctccgaggacccccctccctagaacgtaactagtcatcaaactgaggagctgtccgtgtgcaacaactcaagataaaattcttgactattgaaatgcgaaaaattagattgaggctttgcggctgaattagattggtttttcttgtggccacatgaggtcgctgctggttaactgacgactcggaccgatg

SEQ ID NO: 3278 - DNA, 203 bp, synthetic construct
  source 1..203: mol_type = other DNA
ggcgcgccagtcctggacgggcgggctgggactggtgctggccattggctgcctcaaggctcccaccccgcctgcctccctagcctgcggctggcggcccctgcctctccagctgcctctgaactccctggagcaagcacctcctgctgggctgtgtgagctgcgactggttctcagtggcccctgcccgactcggaccgatg

SEQ ID NO: 3279 - DNA, 203 bp, synthetic construct
  source 1..203: mol_type = other DNA
ggcgcgccagtcctccctggaaagcggcctacagttccttggacacctccaagttcaagaaccagggtctgtcatccccacagcccctgcccctgggagccagcgctcaaggcagctccctagggcagtgccacttgaaggagattccccctccacccccgactgctgccagcagggattctctgggccgactcggaccgatg

SEQ ID NO: 3280 - DNA, 203 bp, synthetic construct
  source 1..203: mol_type = other DNA
ggcgcgccagtcctggttcttcagctttggaacttgactggctctccttgctcctcagcctgcagacagcctattgtgggaccttttgatcgtgaccaccaaggatccagatataattctttcctcagtaatagaaaaaagaatctgggatctaagaagatacctactcattttctaagtgactggcccgactcggaccgatg

SEQ ID NO: 3281 - DNA, 203 bp, synthetic construct
  source 1..203: mol_type = other DNA
ggcgcgccagtcctgcgggggtcgcgctgcacagcctgcggcgcagcggagggggaccgcagtcgagtctgcagagtgttgggtctgtagccagcaaattacttcatcatctagattatccattcagttgatcctaattagcaaggataacaagaatcgtccgcactaaagtcccctgcagcgtgacccgactcggaccgatg

SEQ ID NO: 3282 - DNA, 203 bp, synthetic construct
  source 1..203: mol_type = other DNA
ggcgcgccagtcctcaggatgtggcagaacatcacaagcagataggaaacgtcttacagattgtggagagctgcagccaactccagggtttccagtctgaggaggtctcacctgctgaaccagccagccctgggacgccccagcaggtgaaggacaagaccctgcaggagtcgagctttgaggacatccgactcggaccgatg

SEQ ID NO: 3283 - DNA, 203 bp, synthetic construct
  source 1..203: mol_type = other DNA
ggcgcgccagtccttgtgcactttctccctccacctggagcatgggctaacaccggaggaaaggaaaagacagagtcagacaggggcctgccccatcacctgaattccagagatgccagtgtgcactgaagccccaggcagggcgtgcccaggaccggatcctggatggtggagcctggggaggggcccgactcggaccgatg

SEQ ID NO: 3284 - DNA, 203 bp, synthetic construct
  source 1..203: mol_type = other DNA
ggcgcgccagtcctcccctacttcatcacctacaagtgcagcggcctgtgagtgcgggaagggcgcggggcggagagggcgcggggcccgggccgaccctcacctcccgcttctccaggtccgagtacaacgccttctggaaatgcgtccaggctggagtcacctacctctttgtccaactctgcaagcgactcggaccgatg

SEQ ID NO: 3285 - DNA, 203 bp, synthetic construct
  source 1..203: mol_type = other DNA
ggcgcgccagtcctgacaactgccgctcaggccatctctggcttcttcgtgtggacggccctgctcatcacatgccaccagcccagggctcggctgggccaagtgtgatgtcatgagagctgggacgagacacccaggggctgcctggactgaggactgtggtagagcagctcttggcatttatctaccgactcggaccgatg

SEQ ID NO: 3286 - DNA, 203 bp, synthetic construct
  source 1..203: mol_type = other DNA
ggcgcgccagtcctcgtctaaattcgcgtcggttcttatttctctccctggcaaggtctgaagacggatggagtctagttctgtcgcccaggctggagcccagtggtgtgatctcagctcactgcaatctccacctcctggcttcaagcgattcttctgcttcagcctcccgactgtgtcagcgtgttcgactcggaccgatg

SEQ ID NO: 3287 - DNA, 203 bp, synthetic construct
  source 1..203: mol_type = other DNA
ggcgcgccagtcctcacttcgactgctcagggaagtacagatgtcgctcatcctttaagtgtatcgagctgatagctcgatgtgacggagtctcggattgcaaagacggggaggacgagtaccgctgtgtccgggtgggtggtcagaatgccgtgctccaggtgttcacagctgcttcgtggaagacccgactcggaccgatg

SEQ ID NO: 3288 - DNA, 203 bp, synthetic construct
  source 1..203: mol_type = other DNA
ggcgcgccagtcctgagagaaagcccgggcaggagagcacagagccggcgactggacgcgagcgcggggcgggtggagagcgtctctccgggcgccgctgctgttgtcccgggtgctgaaaagccgggaacttcccgggaagcagcggcacttttctccctggaaggctaaacatatttttgactggtcgactcggaccgatg

SEQ ID NO: 3289 - DNA, 203 bp, synthetic construct
  source 1..203: mol_type = other DNA
ggcgcgccagtcctcctcgtcctcggcccgggtgccctgcccccgtccaggagccctaggagtgctacggggggccggagccttgcccgggccgctgccccgtccctggattcggggctggacgcagcaagcggggcgctgtgtccccaagctccccgtcctcgggggagcttttggaagagtcccagcgactcggaccgatg

SEQ ID NO: 3290 - DNA, 203 bp, synthetic construct
  source 1..203: mol_type = other DNA
ggcgcgccagtcctcggcagcgggttcggttgcgcgtggcgcacggggtgggagcggagcccaggccgggagcaggcgccgccgccagtgagaaccggggccggagccgggtgcggatttgctggggctgagtcgggggcgcgcgggccctgacctctgccctctgacctctcccctagcaggcgacccgactcggaccgatg

SEQ ID NO: 3291 - DNA, 203 bp, synthetic construct
  source 1..203: mol_type = other DNA
ggcgcgccagtcctggctgctcgggctggtctcggccgcggccgccgcctgggacctggcttccctgcgctgcaccttgggcgccttttgcgaatgcgacttccggcccgacttgccggaaggatctgaagagctgggtccaagggaacctcactgcctgtggccgctccctcttcctcttcgatgagcgactcggaccgatg

SEQ ID NO: 3292 - DNA, 203 bp, synthetic construct
  source 1..203: mol_type = other DNA
ggcgcgccagtcctatacacacagtgacttggaggaatctcaaaggcattctgctcaatgacaggagccagcctcaaaagatttggctgactgaggacgcgacaggtactcagcttctttctgcatctcagttgcccagcacaggggctggcacgcacccttctgcagaggccgggctggaggagaagcgactcggaccgatg

SEQ ID NO: 3293 - DNA, 203 bp, synthetic construct
  source 1..203: mol_type = other DNA
ggcgcgccagtcctccgcatgttccccagcatcctcggctcctgcctcactagctgcggagcctctcccgctcggtccacgctgccgggcggccacgaccgtgacccttcccctcgggccgcccagatccatgcctcgtcccacgggacaccagttccctggcgtgtgcagaccccccggcgcctacccgactcggaccgatg

SEQ ID NO: 3294 - DNA, 203 bp, synthetic construct
  source 1..203: mol_type = other DNA
ggcgcgccagtcctcctggtctcccgcgtccatcggtccattcctgcgtcgttctgtccttccgaacgcacacttcaggagcagccgcgaggagtgagcactgcacgcaggatccgcccagtgcttgggccaagcaccctgtggcatccaagctcccctggacgttacccttggtgaaccaaggtggccgactcggaccgatg

SEQ ID NO: 3295 - DNA, 203 bp, synthetic construct
  source 1..203: mol_type = other DNA
ggcgcgccagtcctgtcactctaagttggtggtatccaatcccttaggaacgaacctctgaggttttccatttatgagactctcctactactagagtgggccaaagggagagagaatcctatttggagcaatgaggaggtaacagtccacccacaaatgaattatcaggagtgaacccagaggcacgtcgactcggaccgatg

SEQ ID NO: 3296 - DNA, 203 bp, synthetic construct
  source 1..203: mol_type = other DNA
ggcgcgccagtcctgaggggctttcagctggtcgcctgcttgtcacctctcgctgcctgaaaggcagctctcagagccctttcctgtccttctaattacagcggcgggggcagtgcgcgcttcgggacgcaattggaaaccagcgtgcagggtcaaagacagccggccccccatgtcagtggtctaggcgactcggaccgatg

SEQ ID NO: 3297 - DNA, 203 bp, synthetic construct
  source 1..203: mol_type = other DNA
ggcgcgccagtcctcgagaccttcagagtcacctcgcagtgtaacctgtagcctgtagagatgacttctacccggcctccccctcagagctcttggagtccaggctgagggtcttgaagaaggaactggaggactgtgaggtgttccggtccacggaaaagaaggagagcaaggagctgctgaaacagcgactcggaccgatg

SEQ ID NO: 3298 - DNA, 203 bp, synthetic construct
  source 1..203: mol_type = other DNA
ggcgcgccagtcctagtgtgatggagagtctctgccgtgccatctgggatgcaaaccgtccctgtgttccccacgtccaggccgtagatgctccccgccggtcagtcacttagtcgtcagatcgcccgtcctggtatcacagtgcttctgttcaggttgcacactgggccacagaggatccagcaaggcgactcggaccgatg

SEQ ID NO: 3299 - DNA, 203 bp, synthetic construct
  source 1..203: mol_type = other DNA
ggcgcgccagtcctagggaccctgagcaccgcctggtctctttcctgtggccagcccagctgggaggctgtggcgtgctgggtgtcggcatctggctggccgccacacaggggagcttcgccacgctgtcctcttccttcccgtccctgtcggctgccaacttgctcatcatcaccggcgcctttgtccgactcggaccgatg

SEQ ID NO: 3300 - DNA, 203 bp, synthetic construct
  source 1..203: mol_type = other DNA
ggcgcgccagtccttttgaaagcgtgggctgaatgctgacctcccggacatcatgagtgttgttctacctgcgccccctggacatcctggcggaagtggtcccttctgatggcgccacaagcgggatcaggatagttcaggttcacggtgcacggggactccagctctcagtagccgccccccgcacccgactcggaccgatg

SEQ ID NO: 3301 - DNA, 203 bp, synthetic construct
  source 1..203: mol_type = other DNA
ggcgcgccagtcctattggcagttgtgattcagagacctagaaagctgaacccacggctggcaagaagaggatggtttgtgggacctgggctgatgtctgatgaaattttaagccccagctatagctactacaaagaaaagtggctgatgataagcatgtaactcaaaaagacaatgtatataaaaatcgactcggaccgatg

SEQ ID NO: 3302 - DNA, 203 bp, synthetic construct
  source 1..203: mol_type = other DNA
ggcgcgccagtcctgtgggccaagcgggagttcagattggcaatgcctgctgggagctcttctgcctggaacacggcatccaggcagacggcacttttgatgctcaagctagcaagatcaacgatgatgactccttcaccacctttttcagcgagactggcaatgggaagcatgtgccccgggccgtccgactcggaccgatg

SEQ ID NO: 3303 - DNA, 203 bp, synthetic construct
  source 1..203: mol_type = other DNA
ggcgcgccagtcctcacaggcgtccacagttctgggaagtcatcagtgatgagcatggcatcgaccccagcggcaactacgtgggcgactcggacttgcagctggagcggatcagcgtctactacaacgaggcctcttctcacaagtacgtgcctcgagccattctggtggacctggaacccggaacccgactcggaccgatg

SEQ ID NO: 3304 - DNA, 203 bp, synthetic construct
  source 1..203: mol_type = other DNA
ggcgcgccagtcctcactggcggtggctacggtgacggcctggcccggagcgggcagagttggaggtggtggcgttcgctctccctaggggctgtcgggagctcagcggggaccgagcctgggaggccggccggtgccagcacctttcggcttctgagacggcggcagcagcggcattcaggttctaacgactcggaccgatg

SEQ ID NO: 3305 - DNA, 203 bp, synthetic construct
  source 1..203: mol_type = other DNA
ggcgcgccagtcctcctgtaccataaccaggaggctgatggttgctcaggcctccctcaaactagccaatgagaagtgcacgggtcctggtcgcctaggaaaccgcgtgacaacaagatggcggcgctgcgggacggctagcggccctgcgtgggagttcctgacagctggattctagaagtagaactcgactcggaccgatg

SEQ ID NO: 3306 - DNA, 203 bp, synthetic construct
  source 1..203: mol_type = other DNA
ggcgcgccagtcctgcgggggcggggcacctctgtgcagggttcccagtcaccgcgacgctcctcgggaagccatagggcgcctcccagcccgtctccccgctccagtttagaacctaattcccaattccgggaccgggcccagccctgggctcttactgtccgcttttgctgggacctgttccacaacgactcggaccgatg

SEQ ID NO: 3307 - DNA, 203 bp, synthetic construct
  source 1..203: mol_type = other DNA
ggcgcgccagtcctttcctcggatgtgccccctcacagagagatgaaggggcagcagaaaacagctgaaacggaagaggggacagtgcagattcaggaaggtgcagtggctactggggaagacccaaccagtgtggctattgccagcatccagtcagctgccaccttccctgaccccaacgtcaagtgcgactcggaccgatg

SEQ ID NO: 3308 - DNA, 203 bp, synthetic construct
  source 1..203: mol_type = other DNA
ggcgcgccagtcctagtgggaatccttaaccccgccccctgctcaggtcaatcccccacccaccgcccccactgtccctcccagtcttccttcccagaggagaaggctgggtatgaggaaactgctgtcttttcactggatcagacgtaaatattaactggacctctctttagattctttgctcaatacgactcggaccgatg

SEQ ID NO: 3309 - DNA, 203 bp, synthetic construct
  source 1..203: mol_type = other DNA
ggcgcgccagtcctgactggaggagcacaggccttggaaaggaaagcagctgagatccagaggagtggaaggctcccccttgactaaagctaaacaccagtttctcaggaggatgccttgaatctcatgaacgagaatatagacattctggagacagcgatcaagcaggcagctgagcagggtgctcgcgactcggaccgatg

SEQ ID NO: 3310 - DNA, 203 bp, synthetic construct
  source 1..203: mol_type = other DNA
ggcgcgccagtcctaggagtcaaacttgcgggaattttgcagtttatctgcagggctgttgtttccagcaagacccaaagctagaaaaggaggaggaagaaactgacccgatcagtgccagtcattgtattcaaagaagaataagcaagaaagaaaagaaggaaggaagagaggtagacagatacaagcgactcggaccgatg

SEQ ID NO: 3311 - DNA, 203 bp, synthetic construct
  source 1..203: mol_type = other DNA
ggcgcgccagtcctaaactggtcactgcagtttctaataatactattcaagtccacacatttcctgaaggagttccagatggtatattgactcgcttcactacaaatgcaaaccatgtggtctttaatggggatggtactaaaattgctgctggatctagtgattttctagtcaaaattgtggatgtgcgactcggaccgatg

SEQ ID NO: 3312 - DNA, 203 bp, synthetic construct
  source 1..203: mol_type = other DNA
ggcgcgccagtccttcctctttcctctgcccagtcctggggtcccgcggccgcctaggagggagcccgccggggcggggcggggccgggtgcccatgaacagcggggtcccggccacgctggccgtgcggagagtgaaattcttcggccagcacggcggggaggtcaactcttctgccttctcccctgcgactcggaccgatg

SEQ ID NO: 3313 - DNA, 203 bp, synthetic construct
  source 1..203: mol_type = other DNA
ggcgcgccagtccttgggcttaggaaggaagaggtcatctcgctcggagcttcgctcggaagggtctttgttccctgcagccctcccacggcagagtctccagagatttgggccgctacaaaaagtgcattttgcccattcggctgtggatagagaagcaggaagagcactggacttggagtcagggacgactcggaccgatg

SEQ ID NO: 3314 - DNA, 203 bp, synthetic construct
  source 1..203: mol_type = other DNA
ggcgcgccagtcctttcttcttgttgggggactcccagccttccgcgcgtccggaggaggagaagcggcggcgccgggaagcagtgtctgttgacttcacttggcactgtttaacattccacctctggaaattgtaaagatggagagatgaggggaagggacaaggggatgaagaaagaggaaagggccgactcggaccgatg

SEQ ID NO: 3315 - DNA, 203 bp, synthetic construct
  source 1..203: mol_type = other DNA
ggcgcgccagtcctcgaacaaccaaacagaaaagtttaataaacagcggacggaggggccggcggtggcggagccggagcaagcaggggttcggcggcattacctgtacccattcaccggcggctaccggcggcggcgcgcagcgtgtcaggcggagagacccgccgccaggtgtgcaactgaggaaccgactcggaccgatg

SEQ ID NO: 3316 - DNA, 203 bp, synthetic construct
  source 1..203: mol_type = other DNA
ggcgcgccagtcctatctgaagtctgctgcagtaaaacacagaaggctttaaaatgttttcttgcataaaattcaaaacttttaagtagctgcttatgagaatagggaaggcagaaagctaatgtctgtctcaagatacaggacagctgtttgctcatcaacctcaactgtgtgtgcaactgaggaaccgactcggaccgatg

SEQ ID NO: 3317 - DNA, 203 bp, synthetic construct
  source 1..203: mol_type = other DNA
ggcgcgccagtcctccagttgccttcttcctcatctctgcagtaactgtcttcatggtttcatagccttctccctgatacccctccccagtgtcacatttgaagacgagcactgaggatgaggaaccaactgaagaatatgaaaatgttggaaatgcagcatctaagtggccaaaagtggaggatcctcgactcggaccgatg

SEQ ID NO: 3318 - DNA, 203 bp, synthetic construct
  source 1..203: mol_type = other DNA
ggcgcgccagtccttggaggtcggatccgcagctgcttgcccggttctactatgccgacgaggagctgaaccaggtggccgcggagctggacagcctggatgggcggaaggacccccagcggtgcacgctgctggtcagccagttccgctcctgtcaggacaatgtgttgaacatcattaaccagatccgactcggaccgatg

SEQ ID NO: 3319 - DNA, 203 bp, synthetic construct
  source 1..203: mol_type = other DNA
ggcgcgccagtcctgccaacaataagctctttacttgattgcaccatgagaaagctgctaatgagacttgttgagcacaaaaatggacttgaagaaccaaaagccattgttttcaaatgaagaacactgaacagttttaagcctcgatgctttttaatcaccactgagcttttcctcataacatcagacgactcggaccgatg

SEQ ID NO: 3320 - DNA, 203 bp, synthetic construct
  source 1..203: mol_type = other DNA
ggcgcgccagtcctaacctctgcctcgattggttgcagccggagacccgcaccaaggaggagatcatcgagctcttggtccttgagcagtacctgaccatcatccctgaaaagctcaagccttgggtgcgagcaaaaaagccggagaactgtgagaagctcgtcactctgctggagaattacaaggagcgactcggaccgatg

SEQ ID NO: 3321 - DNA, 203 bp, synthetic construct
  source 1..203: mol_type = other DNA
ggcgcgccagtcctgcggcgggaaggaggcggcaccggaggggagggccgggcgcggcggcggcggcggtggaggagccggagcataatgctaaagaagtaaacaggtcatggcacgtttaacaaaaagacgacaggcggatacaaaagctatccagcatctttgggcagccattgagattatacggacgactcggaccgatg

SEQ ID NO: 3322 - DNA, 203 bp, synthetic construct
  source 1..203: mol_type = other DNA
ggcgcgccagtcctcctcgcgccccggcctcggcgcccgctcccggctccagcgcgcctgcacgtacgtagccttcacgtgtgtgtggatacggagtgcatgtgtggagacagaggaatatgctccaacaaatttcggatagaggcgccgaagacaggacgtggggaagctaaagaagtaaacaggtccgactcggaccgatg

SEQ ID NO: 3323 - DNA, 203 bp, synthetic construct
  source 1..203: mol_type = other DNA
ggcgcgccagtcctggtttgagccaagtatgtgtcttgcgggtctttgcgaaagtgaaccagttattaggggcgcctaacgacctggggggtcaactaaggggactgtggcacgtttcaggcaggattcctccttcattcaaactgcatcacccaggagtctgcaaattccccaaagtaggaggaaaacgactcggaccgatg

SEQ ID NO: 3324 - DNA, 203 bp, synthetic construct
  source 1..203: mol_type = other DNA
ggcgcgccagtcctctgtgtcccctgctagccgtaggtcgtgtgacccgcaggcaccgggagatccagaagtgaaacgccaggctctctggaggccaggagatggcatattctcacgatgcaggtgtgatttgtccagagaatctttcctaagaggaaatcccagagaagcaggagaaagagaaagaacgactcggaccgatg

SEQ ID NO: 3325 - DNA, 203 bp, synthetic construct
  source 1..203: mol_type = other DNA
ggcgcgccagtcctagaaagctccaaggtcaggaatccatcttgggccaagggactcctggtctgcaacctctccctggaacacccaggcagaagcagaagagtcgcagaatagagaaagtcctagagtggctgtttatttcccaagagcagccaaaaatcaccaagtcctggggacctttgtcattccgactcggaccgatg

SEQ ID NO: 3326 - DNA, 203 bp, synthetic construct
  source 1..203: mol_type = other DNA
ggcgcgccagtcctatggctgttgaacatccacaaggcacctgcaagggaggaaatttggacacacagagagatgccaaggatacacacagaggaaagaccatgtgagtgcatagcaagaaagtgaccatctgcaagccaagactatgaatcaaagttgagaccaagaaattatttctgaaaaaggatcgactcggaccgatg

SEQ ID NO: 3327 - DNA, 203 bp, synthetic construct
  source 1..203: mol_type = other DNA
ggcgcgccagtcctatgtgcactgagggtgacacttctgagtgtgggggccctggctagggagtgggactggcaggcttgggtggggttcccaagctttaatcttcctaccccacagaatgttttctctgcccttcaggcagcctgagccgggcagggcccctgcctctgctacggcagcccccgatccgactcggaccgatg

SEQ ID NO: 3328 - DNA, 203 bp, synthetic construct
  source 1..203: mol_type = other DNA
ggcgcgccagtccttctctcaaacctgaaggcatccagaactgggatgacttatgggtccagagagagggtctaggaaagcctcagcctcgggacagaggcccccggctcctgggtgaaccacgctggggccaggctagtagtgatcgggccgctgtgtgtggtgagtgtggcaaaagcttcaggcagcgactcggaccgatg

SEQ ID NO: 3329 - DNA, 203 bp, synthetic construct
  source 1..203: mol_type = other DNA
ggcgcgccagtcctagtccgtggatctcacaaaaatgtttgctgacccttgacattgacaaactgctgacagctcagatgatccatgattggaaggatgtggtcatcaccaagatgtctttctttctccggttcccagttttccagacctgaagtgttttccaatcaaagcgaagagacgatctgtggcgactcggaccgatg

SEQ ID NO: 3330 - DNA, 203 bp, synthetic construct
  source 1..203: mol_type = other DNA
ggcgcgccagtcctgagtgatgtcttccagactcggtgctgtacccgcccaggacccagtgctccataaaggataatagtttccagtacactatccctcatgatgactccttaagtggttcatcgtctgcatcttcgtgtgaaccagtgagtgattttccagcatctttccgaaaatctacctactggcgactcggaccgatg

SEQ ID NO: 3331 - DNA, 203 bp, synthetic construct
  source 1..203: mol_type = other DNA
ggcgcgccagtcctggaccccggctcccttttccgttgacctggtgttcgttttccatgtgttgctgagagatggatgttaaaaatcaacaccaggactacagtaaggctgaaatcattgaagtgcttggagtgcagaactgaaagagtttcattggggatcatgtccatggagctcctcatgctgtccgactcggaccgatg

SEQ ID NO: 3332 - DNA, 203 bp, synthetic construct
  source 1..203: mol_type = other DNA
ggcgcgccagtcctctcactgcaagctctgcctcccggttgctgaacctgtttgcatgagttgctcctgacggccctttaggatacttccatgtctgtagggtctagagtgacatctcctcccctcccctgacgagatctgccctccttggcactgtgcttccccagaggggtggcctcgctgttccccgactcggaccgatg

SEQ ID NO: 3333 - DNA, 203 bp, synthetic construct
  source 1..203: mol_type = other DNA
ggcgcgccagtccttacatttcccagagggcctggtggcctgccacttttctcgcaggaattcgaacgtttcgtcactcctggcgggacccttagatctgggaggaaacctctctgaggtctggtcagattccaaccctggacagcagtgaacacaacctttcccctgagccactggaattggacagacgactcggaccgatg

SEQ ID NO: 3334 - DNA, 203 bp, synthetic construct
  source 1..203: mol_type = other DNA
ggcgcgccagtcctgaaatattccagacagtaatgttggaaagacatgaaagccacgacatacaagatttttgcttcagagaaacccagaaaaatgtacatgactctcagtgtctgtggaaacatgattgaagacattataagcgagtgcgtgtgacctataaggaaagtctcattggtagaagagaccgactcggaccgatg

SEQ ID NO: 3335 - DNA, 203 bp, synthetic construct
  source 1..203: mol_type = other DNA
ggcgcgccagtcctgatacaagccatctctaaactgtgggccattcagtggacaagagaaaatttatgacattgtgtcagaaacgattgagaaagactttcctgtgtggtttggctccgtggttggacacatcagtagccccgtggtcatcctgcccgcagtactcctgcttttcatgctcatctattcgactcggaccgatg

SEQ ID NO: 3336 - DNA, 203 bp, synthetic construct
  source 1..203: mol_type = other DNA
ggcgcgccagtcctcagccgcctctgcagcccgagatgcctgacctcagccacctcacggaggaggagaggaaaatcatcctggccgtcatggataggcagaagaaagaagaggagaaggagcagtccgtgctcaaaaaactgcatcagcagtttgaaatgtataaagagcaggtaaagaagatgggacgactcggaccgatg

SEQ ID NO: 3337 - DNA, 203 bp, synthetic construct
  source 1..203: mol_type = other DNA
ggcgcgccagtcctgcctgcacctgcagcacagagactttcctctggagacccttctacaagtccatctttgtcccagactacaccaagtaaagatactgatgatcagtccaggaaaaacatgactagcaagaaccggggcaagaggaaagctgatgccacttcttcccaagacagtgaattagaacgcgactcggaccgatg

SEQ ID NO: 3338 - DNA, 203 bp, synthetic construct
  source 1..203: mol_type = other DNA
ggcgcgccagtcctcagattttcctcagtgtcatagtaggagctttaaatcttggcaatgcctctccttgtttggaagcctttgcaactggacgtgcagcagccaccagcatttttgagacaatagacaggaaacccatcattgactgcatgtcagaagatggttacaagttggatcgaatcaagggtcgactcggaccgatg

SEQ ID NO: 3339 - DNA, 203 bp, synthetic construct
  source 1..203: mol_type = other DNA
ggcgcgccagtcctaacgaagactgagtgaatctgcatgtcggttttatagtcagcaaatgaaggggaaacaactagcaatcaagaagatgaacgagattcagaagaatattgatggttgggagggaaaagacattggacagtgttgtaatgaatttataatggaaggaactcttacacgtgtaggagcgactcggaccgatg

SEQ ID NO: 3340 - DNA, 203 bp, synthetic construct
  source 1..203: mol_type = other DNA
ggcgcgccagtcctagaacagggcagttatccattatagggatgatgagaccatgtatgttgagtctaaaaaggacagagtcacagtagtcttcagcacagtgtttaaggatgacgacgatgtggtcattggaaaggtgttcatgcaggagttcaaagaaggacgcagagccagccacacagccccaccgactcggaccgatg

SEQ ID NO: 3341 - DNA, 203 bp, synthetic construct
  source 1..203: mol_type = other DNA
ggcgcgccagtcctaagacagaactcaactcatcagctgaaagtgaacaacctttggacaaaacaggacatgttaaggatacaaatcaagaagatggagttatcatcagtgaacatggtgaagatgaaatggatatggaaagtgaaaaagaggaagaaaagccaaagactggtggagctttttcaaatcgactcggaccgatg

SEQ ID NO: 3342 - DNA, 203 bp, synthetic construct
  source 1..203: mol_type = other DNA
ggcgcgccagtcctccgcagacttgagcgatgcatcaaagagctgacctatcaggcagaggaagacaagaagaatctgagcaggatgcaaactcagatggataaacttcagctaaaagtgcaaaattacaagcagcaagtcgaggtggcggaaacacaagccaatcaatacctttccaagtataagaacgactcggaccgatg

SEQ ID NO: 3343 - DNA, 203 bp, synthetic construct
  source 1..203: mol_type = other DNA
ggcgcgccagtccttcagccttctgaagtgaatcagaacacagcagagaatattgagaaagaaagatctatgcttccttcagaaaataacattgaaaacagcttactagcagatagaagtgatgcttgggataaaagcaaagcagaatcagctgtgaccaaacaagaccagatttctgcctctgagctcgactcggaccgatg

SEQ ID NO: 3344 - DNA, 203 bp, synthetic construct
  source 1..203: mol_type = other DNA
ggcgcgccagtcctgtgtgctcttctacacagcttgtctcgatcccaattttccagccacgctattcaaagacaagatgaaatgcactgtgaataaccagcaatcaaagaaaatcatggtggcagcagatattgtgacgatattcaacctgatccaaatgaatggcggggctgccaaggagaagctgccgactcggaccgatg

SEQ ID NO: 3345 - DNA, 203 bp, synthetic construct
  source 1..203: mol_type = other DNA
ggcgcgccagtcctacaccagtgacaatctcgttgggaacggccccatccttgcagaacaatcaacctgtggagtttaatcatgccatcaactatgttaataagatcaagaacagatttcagggccaaccagacatctacaaagcattcctggagattttgcacacatatcagaaagagcagagaaatcgactcggaccgatg

SEQ ID NO: 3346 - DNA, 203 bp, synthetic construct
  source 1..203: mol_type = other DNA
ggcgcgccagtcctagcagacagagctaaatccgagatggccaccatgaaagtgagatctggacgatatgattgtaagacaactatgaccaaggttaaatttaaagctgcgaagaaaaattgctctgtgggtcgtcaccacactgttctcaatcattccatcaaggttatgagcaatgtgtttgagaacgactcggaccgatg

SEQ ID NO: 3347 - DNA, 203 bp, synthetic construct
  source 1..203: mol_type = other DNA
ggcgcgccagtcctgcaggagcaaacccccagaagaggaagaacgaaagaaacgaggaagaaagagggaagacaaagaggacaagtcagagaaagcagtgaaagattatgaacaggaaaagtcttggcaagactcagagagattaaaaggaatcttagagcgtggaaaagaagaattggctgaagctgcgactcggaccgatg

SEQ ID NO: 3348 - DNA, 203 bp, synthetic construct
  source 1..203: mol_type = other DNA
ggcgcgccagtcctgtaaaacagaagataatggcccaaaggaggatagcagcctgcctacatttaaaactgcaaaagaacaattatgggtagatcagcaaaaaaagtaccaccaacctcagcgtgcatcagggtcttcatatggtggtgtaaaaaagtctctaggagctagtagatcccgagggataccgactcggaccgatg

SEQ ID NO: 3349 - DNA, 203 bp, synthetic construct
  source 1..203: mol_type = other DNA
ggcgcgccagtccttcatccaggagtatggagcccagagtgggggcctggagaaattgctggaaatcatcaccacgacaattgaagaaacagagacgcaaaaccaaggcatcaaagtggcggccatcagaggggaggtgacagctgcagacctgttcaactccagggtcatcgatcagaagaccctgccgactcggaccgatg

SEQ ID NO: 3350 - DNA, 203 bp, synthetic construct
  source 1..203: mol_type = other DNA
ggcgcgccagtcctgattacactactagacgttgtgtttgtgctggatcattcaggtagcataaaaaaacaatatcaagatcacatgattaacctaactatccatttggtgaagaaagcagatgttggcagggaccgagttcagtttggagccctcaaatactctgaccaacctaacatccttttctacgactcggaccgatg

SEQ ID NO: 3351 - DNA, 203 bp, synthetic construct
  source 1..203: mol_type = other DNA
ggcgcgccagtccttgaagatgatgtagatcaggaacttgcgaacatagaccctacgtggatagaatcacctaaaaccaatggccatattgagaatggcccattctcactggagcagcaactggacgatgaagatgatgatgaagaagactgcccaaatcctgaggaatataatcttgatgagccaaacgactcggaccgatg

SEQ ID NO: 3352 - DNA, 203 bp, synthetic construct
  source 1..203: mol_type = other DNA
ggcgcgccagtcctgaacgggggtttgcctccccgtcatgcaagaccccgcttgcaaattcctccggaaacagggacgagccccttttttgcttttcccagatgcatccggtgctgcggcagatgcgcccccctcctcagcagcggcaagagcaagagcagcggcagacatgcagggcaccctcccctcgactcggaccgatg

SEQ ID NO: 3353 - DNA, 203 bp, synthetic construct
  source 1..203: mol_type = other DNA
ggcgcgccagtcctcgctgacctgcgctgggccccaagccgacgcgccctggaggcagctggggccggacctgggctggcggtggcacccgcgcgcgctggcaacgtcggcggcgtggaggaatatgacgaggacgatgagtacgagccagaggacggcgagtactaagcggtgatgtttctgatcagcgactcggaccgatg

SEQ ID NO: 3354 - DNA, 203 bp, synthetic construct
  source 1..203: mol_type = other DNA
ggcgcgccagtcctagtgaaaacgttcctgctctcacagatcacgggacgctaccgctgcgcaacagcatcggaggagtccagcgagtgaccattactgacgccagacgccgcacctgcccctacgtttacaaggccctgggcatagtctcgccgcgcgtcctatcgagccgcactttttgagcaaaccgactcggaccgatg

SEQ ID NO: 3355 - DNA, 203 bp, synthetic construct
  source 1..203: mol_type = other DNA
ggcgcgccagtcctgccattagtgctatgactcagggtcgcaggggcaacgtgtactgggtgcgcgactcggttagcggcctgcgcgtgcccgtgcgcacccgccccccgcgcaactagattgcaagaaaaaactacttagactcgtactgttgtatgtatccagcggcggcggcgcgcaacgaagctcgactcggaccgatg

SEQ ID NO: 3356 - DNA, 203 bp, synthetic construct
  source 1..203: mol_type = other DNA
ggcgcgccagtccttaaatagctaacgtgtcgtatgtgtcatgtatgcgtccatgtcgccgccagaggagctgctgagccgccgtgcgcccgctttccaagatggctaccccttcgatgatgccgcagtggtcttacatgcacatctcgggccaggacgcctcggagtacctgagccccgggctggtgcgactcggaccgatg

SEQ ID NO: 3357 - DNA, 203 bp, synthetic construct
  source 1..203: mol_type = other DNA
ggcgcgccagtcctggaggattacaagtgggaatttgaagagcttttgaaatcctgtggtgagctgtttgattctttgaatctgggtcaccaggcgcttttccaagagaaggtcatcaagactttggatttttccacaccggggcgcgctgcggctgctgttgcttttttgagttttataaaggataacgactcggaccgatg

SEQ ID NO: 3358 - DNA, 203 bp, synthetic construct
  source 1..203: mol_type = other DNA
ggcgcgccagtcctcgcctcagccgcttttttgggggcgcgcggggaggcggcggcgacggcgacggggacgacacgtcctccatggttggtggacgtcgcgccgcaccgcgtccgcgctcgggggtggtttcgcgctgctcctcttcccgactggccatttccttctcctataggcagaaaaagatccgactcggaccgatg

SEQ ID NO: 3359 - DNA, 203 bp, synthetic construct
  source 1..203: mol_type = other DNA
ggcgcgccagtcctgccgcaccgcgtccgcgctcgggggtggtttcgcgctgctcctcttcccgactggccatttccttctcctataggcagaaaaagatcatggagtcagtcgagaaggaggacagcctaaccgccccctttgagttcgccaccaccgcctccaccgatgccgccaacgcgcctacccgactcggaccgatg

SEQ ID NO: 3360 - DNA, 203 bp, synthetic construct
  source 1..203: mol_type = other DNA
ggcgcgccagtccttcattacccagggccacatccttggccaattgcaagccatcaacaaagcccgccaagagtttctgctacgaaagggacggggggtttacctggacccccagtccggcgaggagctcaacccaatccccccgccgccgcagccctatcagcagccgcgggcccttgcttcccaggcgactcggaccgatg

SEQ ID NO: 3361 - DNA, 203 bp, synthetic construct
  source 1..203: mol_type = other DNA
ggcgcgccagtcctcccttttctggacctcccggccactacccggaccagtttattcccaactttgacgcggtgaaagactcggcggacggctacgactgaatgaccagtggagaggcagagcgactgcgcctgacacacctcgaccactgccgccgccacaagtgctttgcccgcggctccggtgagcgactcggaccgatg

SEQ ID NO: 3362 - DNA, 203 bp, synthetic construct
  source 1..203: mol_type = other DNA
ggcgcgccagtcctagcacttctgtgccttagggttgccgcctgctgcacgcacgtttgtacctattgtcagctttttaaacgctgggggcaacatccaagatgaggtacatgattttaggcttgctcgcccttgcggcagtctgcagcgctgccaaaaaggttgagtttaaggaaccagcttgcaatcgactcggaccgatg

SEQ ID NO: 3363 - DNA, 203 bp, synthetic construct
  source 1..203: mol_type = other DNA
ggcgcgccagtcctttccgcttgcttgtattcccctggacaatttactctatgtgggatatgctccaggcgggcaagattatacccacaaccttcaaatcaaactttcctggacgttagcgcctgatttctgccagcgcctgcactgcaaatttgatcaaacccagcttcagcttgcctgctccagagcgactcggaccgatg

SEQ ID NO: 3364 - DNA, 203 bp, synthetic construct
  source 1..203: mol_type = other DNA
ggcgcgccagtcctcacagtttacctgctttacggatttgtcacccttatcctcatctgcagcctcgtcactgtagtcatcgccttcattcagttcattgactgggtttgtgtgcgcattgcgtacctcaggcaccatccgcaatacagagacaggactatagctgatcttctcagaattctttaattcgactcggaccgatg

SEQ ID NO: 3365 - DNA, 203 bp, synthetic construct
  source 1..203: mol_type = other DNA
ggcgcgccagtccttagccatatatccataccttgacattggctggaatgccatagatgccatgaaccaccctactttcccagtgcccgctgtcataccactgcaacaggttattgccccaatcaatcagcctcgccccccttctcccacccccactgagattagctactttaatttgacaggtggagcgactcggaccgatg

SEQ ID NO: 3366 - DNA, 203 bp, synthetic construct
  source 1..203: mol_type = other DNA
ggcgcgccagtccttgtgggttcttttgtcatggttcctggcggggaagtggccgcgctggtccgtgcagacctgcacgattatgttcagctggccctgcgaagggacctacgggatcgcggtatttttgttaatgttccgcttttgaatcttatacaggtctgtgaggaacctgaatttttgcaatccgactcggaccgatg

SEQ ID NO: 3367 - DNA, 203 bp, synthetic construct
  source 1..203: mol_type = other DNA
ggcgcgccagtcctactgtcggtggtgctttttaatcacggtgaccagtttttttacggtcacgccggcatggccgtagtccgtcttatgcttataagggttgtttttcctgttgtaagacaggcttctaatgtttaaatgtttttttttgttattttattttgtgtttaatgcaggaacccgcagaccgactcggaccgatg

SEQ ID NO: 3368 - DNA, 203 bp, synthetic construct
  source 1..203: mol_type = other DNA
ggcgcgccagtcctggccctttttacactgtgactgattgagctggtgccgtgtcgagtggtgttttttaataggtttttttactggtaaggctgactgttatggctgccgctgtggaagcgctgtatgttgttctggagcgggagggtgctattttgcctaggcaggagggtttttcaggtgtttatcgactcggaccgatg

SEQ ID NO: 3369 - DNA, 203 bp, synthetic construct
  source 1..203: mol_type = other DNA
ggcgcgccagtcctcgctacccctcccacttagcctccttcgtgctggcctggacgcgagccttcgtctcagagtggtccgagtttctatacgaggaggaccgcggaacaccgctcgaggacaggcctctcaagtctgtatacggggacacggacagccttttcgtcaccgagcgtggacaccggctccgactcggaccgatg

SEQ ID NO: 3370 - DNA, 203 bp, synthetic construct
  source 1..203: mol_type = other DNA
ggcgcgccagtcctcgcggaacaccgctcgaggacaggcctctcaagtctgtatacggggacacggacagccttttcgtcaccgagcgtggacaccggctcatggaaaccagaggtaagaaacgcatcaaaaagcatgggggaaacctggtttttgaccccgaacggccagagctcacctggctcgtgcgactcggaccgatg

SEQ ID NO: 3371 - DNA, 203 bp, synthetic construct
  source 1..203: mol_type = other DNA
ggcgcgccagtcctatacccggtgagttcctcaagaggccactcttgagtgccagcgagtagagttttctcctccgagccgctccgacaccgggactgaaaatgagacatattatctgccacggaggtgttattaccgaagaaatggccgccagtcttttggaccagctgatcgaagaggtactggctcgactcggaccgatg

SEQ ID NO: 3372 - DNA, 203 bp, synthetic construct
  source 1..203: mol_type = other DNA
ggcgcgccagtcctaatagctaacgtgtcgtatgtgtgtcatgtatgcgtccatgtcgccgccagaggagctgctgagccgccgcgcgcccgctttccaagatggctaccccttcgatgatgccgcagtggtcttacatgcacatctcgggccaggacgcctcggagtacctgagccccgggctggtgcgactcggaccgatg

SEQ ID NO: 3373 - DNA, 203 bp, synthetic construct
  source 1..203: mol_type = other DNA
ggcgcgccagtcctcatcgaaaccgtgtacctgcgcacgcccttctcggccggcaacgccacaacataaagaagcaagcaacatcaacaacagctgccgccatgggctccagtgagcaggaactgaaagccattgtcaaagatcttggttgtgggccatattttttgggcacctatgacaagcgctttcgactcggaccgatg

SEQ ID NO: 3374 - DNA, 203 bp, synthetic construct
  source 1..203: mol_type = other DNA
ggcgcgccagtcctcaactctacgggctattctaattcaggtttctctagaatcggggttggggttattctctgtcttgtgattctctttattcttatactaacgcttctctgcctaaggctcgccgcctgctgtgtgcacatttgcatttattgtcagctttttaaacgctggggtcgccacccaagcgactcggaccgatg

SEQ ID NO: 3375 - DNA, 203 bp, synthetic construct
  source 1..203: mol_type = other DNA
ggcgcgccagtcctaacgcttctctgcctaaggctcgccgcctgctgtgtgcacatttgcatttattgtcagctttttaaacgctggggtcgccacccaagatgattaggtacataatcctaggtttactcacccttgcgtcagcccacggtaccacccaaaaggtggattttaaggagccagcctgtcgactcggaccgatg

SEQ ID NO: 3376 - DNA, 203 bp, synthetic construct
  source 1..203: mol_type = other DNA
ggcgcgccagtcctcctaccttgacattggctggaaacgaatagatgccatgaaccacccaactttccccgcgcccgctatgcttccactgcaacaagttgttgccggcggctttgtcccagccaatcagcctcgccccacttctcccacccccactgaaatcagctactttaatctaacaggaggagcgactcggaccgatg

SEQ ID NO: 3377 - DNA, 203 bp, synthetic construct
  source 1..203: mol_type = other DNA
ggcgcgccagtcctgctgcaaactttctccacaatctaaatggaatgtcagtttcctcctgttcctgtccatccgcacccactatcttcatgttgttgcagatgaagcgcgcaagaccgtctgaagataccttcaaccccgtgtatccatatgacacggaaaccggtcctccaactgtgccttttcttcgactcggaccgatg

SEQ ID NO: 3378 - DNA, 203 bp, synthetic construct
  source 1..203: mol_type = other DNA
ggcgcgccagtccttccacttggacgtgagggccgtttgccttttggaagccattgtgcaacatcttacaaatgccattatctgttctttggctgtagagtttgaccacgccaccggaggggagcgcgttcacttaatagatcttcattttgaggttttggataatcttttggaataaaaaaaaaaaccgactcggaccgatg

SEQ ID NO: 3379 - DNA, 203 bp, synthetic construct
  source 1..203: mol_type = other DNA
ggcgcgccagtcctttgaccacgccaccggaggggagcgcgttcacttaatagatcttcattttgaggttttggataatcttttggaataaaaaaaaaaacatggttcttccagctcttcccgctcctcccgtgtgtgactcgcagaacgaatgtgtaggttggctgggtgtggcttattctgcggtgcgactcggaccgatg

SEQ ID NO: 3380 - DNA, 203 bp, synthetic construct
  source 1..203: mol_type = other DNA
ggcgcgccagtcctcgcgtgcggttttctgggtgttttttgtggactttaaccgttacgtcattttttagtcctatatatactcgctctgcacttggcccttttttacactgtgactgattgagctggtgccgtgtcgagtggtgtttttttaataggttttcttttttactggtaaggctgactgttcgactcggaccgatg

SEQ ID NO: 3381 - DNA, 203 bp, synthetic construct
  source 1..203: mol_type = other DNA
ggcgcgccagtccttgtgggcgtggcttaagggtgggaaagaatatataaggtgggggtcttatgtagttttgtatctgttttgcagcagccgccgccgccatgagcaccaactcgtttgatggaagcattgtgagctcatatttgacaacgcgcatgcccccatgggccggggtgcgtcagaatgtgcgactcggaccgatg

SEQ ID NO: 3382 - DNA, 203 bp, synthetic construct
  source 1..203: mol_type = other DNA
ggcgcgccagtccttactgcggctgcagccgtcagcggcgcgggacagcccgcctatgatctggaattggaagagggcgagggactcgcgcgcctgggcgcaccatcgcccgagcggcacccgcccagccgacttctccagtttacgggagcgagccctcttttttttttttgttttttgttgcccagcgactcggaccgatg

SEQ ID NO: 3383 - DNA, 203 bp, synthetic construct
  source 1..203: mol_type = other DNA
ggcgcgccagtcctgatgatagcagcgtgttggacttgggtggaagaggagggggcaacccgttcgctcatctgcgtcccagattcgggcgcatgttgtaaaagtgaaagtaaaataaaaatgcaactcaccaaggccatggcgaccgagcgtgcgttcgttcttttttgttatctgtgtctagtacgcgactcggaccgatg

SEQ ID NO: 3384 - DNA, 203 bp, synthetic construct
  source 1..203: mol_type = other DNA
ggcgcgccagtcctaagtgaaagtaaaataaaaatgcaactcaccaaggccatggcgaccgagcgtgcgttcgttcttttttgttatctgtgtctagtacgatgaggagacgagccgtgctaggcggagcggtggtgtatccggagggtcctcctccttcttacgagagcgtgatgcagcaacaggcgcgactcggaccgatg

SEQ ID NO: 3385 - DNA, 203 bp, synthetic construct
  source 1..203: mol_type = other DNA
ggcgcgccagtcctagacgccgcacctgtccctacgtttacaaggccctgggcatagtcgcgccgcgcgttctttcaagccgcactttctaaaaaaaaaaaatgtccattctcatctcgcccagtaataataccggttggggactgtatgcgcccaccaagatgtatggaggcgcccgcaaacgctctcgactcggaccgatg

SEQ ID NO: 3386 - DNA, 203 bp, synthetic construct
  source 1..203: mol_type = other DNA
ggcgcgccagtcctagtacccggaaactgccaaggcaataagtgccctgcagctgtgtttatttaatgtgacgtcatgtaataaaattatgtcagctgctgagtgttttattacttcttgggtggggacttggatatataagtaggagcagatctgtgtggttagctcacagcaacctgctgccatcccgactcggaccgatg

SEQ ID NO: 3387 - DNA, 203 bp, synthetic construct
  source 1..203: mol_type = other DNA
ggcgcgccagtcctctgcaagtcgcactcgccgtcgccgccgccgcaacactgccagcaaattgactcccgccgccctggtgcggagagtgtaccgcgatggtcgcgctgaacctctgacgctgccgcgcgcgcgctaccatccaagcatcaccacttaatgactgttgacgctgcctccttgcagatcgactcggaccgatg

SEQ ID NO: 3388 - DNA, 203 bp, synthetic construct
  source 1..203: mol_type = other DNA
ggcgcgccagtcctgcagcgccactaacattggaaaaacttataaataaaaaatagaatggactctgacgctcctggtcctgtgactatgtttttgtagagatggaagacatcaatttttcatccctggctccgcgacacggcacgaggccgtacatgggcacctggagcgacatcggcacgagccaacgactcggaccgatg

SEQ ID NO: 3389 - DNA, 203 bp, synthetic construct
  source 1..203: mol_type = other DNA
ggcgcgccagtcctgcttgtctgtgtgtatgtatcatcaccacgccgccgcagcagaggagaaaggaagaggtcgcgcgccgaggctgagttgctttcaagatggccaccccatcgatgatgccccaatgggcatacatgcacatcgccggacaggatgcttcggagtacctgagtccgggtctggtgcgactcggaccgatg

SEQ ID NO: 3390 - DNA, 203 bp, synthetic construct
  source 1..203: mol_type = other DNA
ggcgcgccagtcctgttcctcttcgggggcagaggtggaggcgactgagatgggctgcggtctggccttggaagcggatggctggcagagcccattccgcgttcgggggtgtgctcccgttggcggtcgcttgactgatttcctccgcggctggccattgtgttctcctaggcagagaaacaacagaccgactcggaccgatg

SEQ ID NO: 3391 - DNA, 203 bp, synthetic construct
  source 1..203: mol_type = other DNA
ggcgcgccagtccttttggagagttcgtcctcgcagccccgctcgggcggcatcggaactctccagttcgtggaggagtttactccctctgtctacttcaaccccttctccggctctcctggccagtacccagacgagttcataccgaacttcgacgcaatcagcgagtcagtggatggctatgattgcgactcggaccgatg

SEQ ID NO: 3392 - DNA, 203 bp, synthetic construct
  source 1..203: mol_type = other DNA
ggcgcgccagtccttcgaactccccgaggagcaccctcagggtccggcccacggagtgcggattaccatcgaagggggaatagactctcgcctgcatcgaatcttctcccagcgacccgtgctgattgagcgcgaccagggaaatacaaccatctccatttactgcatctgtaaccaccccggattgccgactcggaccgatg

SEQ ID NO: 3393 - DNA, 203 bp, synthetic construct
  source 1..203: mol_type = other DNA
ggcgcgccagtcctcttgcttatagttattcgccctagacaaagcaataaggaaaaagagaaaatgccttaacctttttactcataccttttctttacagcatggcttttgttacagctctaattattgccaacattgtcactgtcgctcacgggcaaacaattatccatattaccttaggacataatcgactcggaccgatg

SEQ ID NO: 3394 - DNA, 203 bp, synthetic construct
  source 1..203: mol_type = other DNA
ggcgcgccagtccttctcctatgattagtcgtccccatatggctttgaatgaaatctaagatcttttttttttttctcttacagtatggtgaacaccaatcatgatccctagaaatttcttcttcaccatactcatctgtgctttcaatgtctgtgctactttcacagcagtagccactgcaagcccacgactcggaccgatg

SEQ ID NO: 3395 - DNA, 203 bp, synthetic construct
  source 1..203: mol_type = other DNA
ggcgcgccagtcctcttcctatgcactttttgccttcgttacttgcatctgcgtgtgtagcatagtctgcctggttattaattttttccaactggtagactggatctttgtacgaattgcctacctacgtcaccatcccgaataccgcaatcaaaatgttgcggcacttcttaggcttatttaaaacccgactcggaccgatg

SEQ ID NO: 3396 - DNA, 203 bp, synthetic construct
  source 1..203: mol_type = other DNA
ggcgcgccagtcctggatctttgtacgaattgcctacctacgtcaccatcccgaataccgcaatcaaaatgttgcggcacttcttaggcttatttaaaaccatgcaggctatgctaccagtcattttaattctgctactaccctgcattgccctagcttccaccgccactcgcgctacacctgaacaacgactcggaccgatg

SEQ ID NO: 3397 - DNA, 203 bp, synthetic construct
  source 1..203: mol_type = other DNA
ggcgcgccagtccttgaaatcagcaataaggtctctgttgaaattttctcccagcagcacctcacttccctcttcccaactctggtattctaaaccccgttcagcggcatactttctccatactttaaaggggatgtcaaattttaactcctgtcctgtacccacaatcttcatgtctttcttcccagcgactcggaccgatg

SEQ ID NO: 3398 - DNA, 203 bp, synthetic construct
  source 1..203: mol_type = other DNA
ggcgcgccagtccttgtagcgtcccctgctattgttcccggggggcttctggctaagcagtttggtgataatatgaaagagtatttacaactagaacttagagaagaacttagagccaagggcatgtcaattgatgatgccattcttaatttgctacaggtgacacaggagcaagatattttgacattcgactcggaccgatg

SEQ ID NO: 3399 - DNA, 203 bp, synthetic construct
  source 1..203: mol_type = other DNA
ggcgcgccagtcctccgcgaggaactttcggtgctgttgtttaatcacgatgacaggttttacgagggtcgagctggagaccctgtggcttgtcttgtaatggaaagactgatttatccacctgttcgacaggctactatgatatgacgcttgtttcttttattttacagactaattcaaaactaatacgactcggaccgatg

SEQ ID NO: 3400 - DNA, 203 bp, synthetic construct
  source 1..203: mol_type = other DNA
ggcgcgccagtcctctgaagacctgagacccgatcatttggtgcttgcctgcactggagcggagttcggttccagtggtgaagaaactgactaaagtgagtagtgggggcaagatgtggatggggactttcaggttggtaaggtggacagattgggtaaattttgttaatttctgtcttgcagctgcccgactcggaccgatg

SEQ ID NO: 3401 - DNA, 203 bp, synthetic construct
  source 1..203: mol_type = other DNA
ggcgcgccagtcctgggtacgaagggaacctccagtgggggctgtatcatcgccgcctgttgctgcatcacgctctcgtaagaaggaggaggaccctccggatacaccaccgctccgcctagcacggctcgtctcctcatcgtactagacacagataacaaaaaagaacgaacgcacgctcggtcgcccgactcggaccgatg

SEQ ID NO: 3402 - DNA, 203 bp, synthetic construct
  source 1..203: mol_type = other DNA
ggcgcgccagtcctatacaccaccgctccgcctagcacggctcgtctcctcatcgtactagacacagataacaaaaaagaacgaacgcacgctcggtcgccatggccttggtgagttgcatttttattttactttcacttttacaacatgcgcccgaatctgggacgcagatgagcgaacgggttgcccgactcggaccgatg

SEQ ID NO: 3403 - DNA, 203 bp, synthetic construct
  source 1..203: mol_type = other DNA
ggcgcgccagtcctaccgtgtttttcacctaaatttccgcgtacggtgtcaaagtcctgtgtttttacgtaggtgtcagctgatcgctagggtatttaaacctgacgagttccgtcaagaggccactcttgagtgccagcgagaagagttttctccttcgcgccgcaagtcagttctgcgctttgaaacgactcggaccgatg

SEQ ID NO: 3404 - DNA, 203 bp, synthetic construct
  source 1..203: mol_type = other DNA
ggcgcgccagtcctctgacgagttccgtcaagaggccactcttgagtgccagcgagaagagttttctccttcgcgccgcaagtcagttctgcgctttgaaaatgagacacctgcgtttcctgccacaggagattatcttcagtgagaccgggatcgaaatactggagtttgtggtaaataccctaatgcgactcggaccgatg

SEQ ID NO: 3405 - DNA, 203 bp, synthetic construct
  source 1..203: mol_type = other DNA
ggcgcgccagtcctcttctataaaagcgctcggtttaaaaagcttctatgcctgaataggtgaccggaggtcggcacctttcctttacaattaatgaccctatgaatacaactgactgttttatcgctgtggtaaacgccatcaaagaggtaagagcacttttcctaccacggactgcaggaaaaatgcgactcggaccgatg

SEQ ID NO: 3406 - DNA, 203 bp, synthetic construct
  source 1..203: mol_type = other DNA
ggcgcgccagtcctgttgggatggttggggttagccatccataccgtactgcctgatagggtccttgcgaggggatctgggagtctcgtagaccgtagcacatgcctgttatttctactcaaacaagtcctgtacctgcgcccagaacgcgcaagaacaagcagacgcaggcttcatatcctgtgtcccgactcggaccgatg

SEQ ID NO: 3407 - DNA, 203 bp, synthetic construct
  source 1..203: mol_type = other DNA
ggcgcgccagtccttattatatatctctttgttgggtttataccacttagcttgaaagaggttaaaacattacaattcattgttaagttgaatacagcaaaatgggagctcaagtatcaacgcaaaagactggggcacatgagaccaggctgaatgctagcggcaattccatcattcactacacaaatcgactcggaccgatg

SEQ ID NO: 3408 - DNA, 203 bp, synthetic construct
  source 1..203: mol_type = other DNA
ggcgcgccagtcctctcgcccaggagagtagagcggagagaggaagtaagaagacgcctccgggtaagggacgcccgcctttggggaaaaaccaatgcgcgtactgtaaggaggagggacattggaagaagaactgtccaaaactcgtaagcggggcaaccccagtgttggtagaagaattacaatagcgactcggaccgatg

SEQ ID NO: 3409 - DNA, 203 bp, synthetic construct
  source 1..203: mol_type = other DNA
ggcgcgccagtccttactgtaaggaggagggacattggaagaagaactgtccaaaactcgtaagcggggcaaccccagtgttggtagaagaattacaatagggccgtcagggttcttccgccctccgtgaacccaggctaaaagttaaagtaggggggcaaataatagattttctagtagatacgggacgactcggaccgatg

SEQ ID NO: 3410 - DNA, 203 bp, synthetic construct
  source 1..203: mol_type = other DNA
ggcgcgccagtcctcagcacccccaccgcggtaaaggtcgctgggaagaccccgtggatccaccactctcgactcaagaaagctcctgacaaccaagaagaatggactgtctcaccaacctccgatccgctgagggtaaagttgaccaggcgggcaaaaccctaattcttcttgtggtttggtgggggcgactcggaccgatg

SEQ ID NO: 3411 - DNA, 203 bp, synthetic construct
  source 1..203: mol_type = other DNA
ggcgcgccagtcctcgcgcggcttgcgaataatactttggagagtcttttgcctccagtgtcttccgtttgtactcgtcctcctctccctctccggccgggatgggacaggcaggatcgaaggggcttttaacccctctagagtgcattctgaagaacttctctgactttaagaagagggcgggagaccgactcggaccgatg

SEQ ID NO: 3412 - DNA, 203 bp, synthetic construct
  source 1..203: mol_type = other DNA
ggcgcgccagtccttaataataataatcttagtataaaaaagtagggagtgaccgaaagtggtgaaccgaaaacggttggtatataaagcacatagtattttgtgcaaacctacagacgccatgttcaaaaatcctgcagaaagacctcggaaattgcatgaactaagctcggcattggaaataccctcgactcggaccgatg

SEQ ID NO: 3413 - DNA, 203 bp, synthetic construct
  source 1..203: mol_type = other DNA
ggcgcgccagtcctaatttatatacctatgtatagatggccaatgtactgttgtggaagggcaagttaattgtaagggcatttattatgtacatgaaggacatataacatattttgtaaattttacagaagaggcaaaaaaatatgggactggtaaaaaatgggaagtgcatgcgggtggtcaggtaacgactcggaccgatg

SEQ ID NO: 3414 - DNA, 203 bp, synthetic construct
  source 1..203: mol_type = other DNA
ggcgcgccagtccttattttctgggcctgatgtacctatagagcatgcacctacacaggttttcccatttcctttggcccctacaacgccacaagtgtctatttttgttgatgggggtgatttttatttgcaccctagttattatatgttaaaacgtcgacgtaaacgtgtatcatatttttttacagcgactcggaccgatg

SEQ ID NO: 3415 - DNA, 203 bp, synthetic construct
  source 1..203: mol_type = other DNA
ggcgcgccagtcctacaagcagaaccggacacatccaattacaatatcgttaccttttgttgtcagtgtaagtctacacttcgtttgtgtgtacagagcacacaagtagatattcgcatattgcaagagctgttaatgggctcatttggaatcgtgtgccccaactgttctactagactgtaactacacgactcggaccgatg

SEQ ID NO: 3416 - DNA, 203 bp, synthetic construct
  source 1..203: mol_type = other DNA
ggcgcgccagtcctttactcccttgtttgttggatccactcccgaaacgttttactccttaacttattgaaattgtttgaagacaggatttcagtgtcacaatgggagctcaagtatcatcccaaaaagtaggcgctcacgagaattctaaccgagcctacggtggttctacgatcaactacaccacacgactcggaccgatg

SEQ ID NO: 3417 - DNA, 203 bp, synthetic construct
  source 1..203: mol_type = other DNA
ggcgcgccagtcctccaatttggtctgttctgaactacaccatttactgctgtgaagaatgccctggaggcaagctggttacagccctgaccaggccctgcccgtgactctcgaccggcgcagggtcaaaaattgtctaagcagcagcaggaacgcgggagcgtttcttttccttttgtactgacatgcgactcggaccgatg

SEQ ID NO: 3418 - DNA, 203 bp, synthetic construct
  source 1..203: mol_type = other DNA
ggcgcgccagtcctccgtgactctcgaccggcgcagggtcaaaaattgtctaagcagcagcaggaacgcgggagcgtttcttttccttttgtactgacatgatggcggcgtctaaggtgtatagagtttgcgagcagactctgctggcaggtgccgttcgcatgatggacaaattcttgcaaaagagacgactcggaccgatg

SEQ ID NO: 3419 - DNA, 203 bp, synthetic construct
  source 1..203: mol_type = other DNA
ggcgcgccagtcctaagaggagaaatacaaatatttacatagtagagttaccacatttacatttccaaatccattcccctttgacagaaatgggaatgcagtatatgaactatcagatgcaaactggaaatgtttctttgaaagactgtcgtccagcctagacattgaggattcagaggacgaggaagcgactcggaccgatg

SEQ ID NO: 3420 - DNA, 203 bp, synthetic construct
  source 1..203: mol_type = other DNA
ggcgcgccagtcctccctttgcaattctttttactaacactgtgtgtgtgctattttcctgccttttatatacacatatacattgtgcaaacgcaacaataatggtgatgttaacctgtcacttaaatgatggtgatacatggttgtttctgtggttgtttactgcatttgttgtagctgtacttggacgactcggaccgatg

SEQ ID NO: 3421 - DNA, 203 bp, synthetic construct
  source 1..203: mol_type = other DNA
ggcgcgccagtccttgcagtctgggcctgacataacttttcctactgcatctatgggaacaccctttagtcctgtaactcctgctttacctacaggccctgtttttattacaggttctgacttctatttgcatcctacatggtactttgcacgcagacgccgtaaacgtattcccttattttttacagcgactcggaccgatg

SEQ ID NO: 3422 - DNA, 203 bp, synthetic construct
  source 1..203: mol_type = other DNA
ggcgcgccagtcctagacgcacaacctttaacacaacattaccaaatactgacctgttgctgtggatgtgacagcaacgtccgactggttgtggagtgcacagacggagacatcagacaactacaagaccttttgctgggcacactaaatattgtgtgtcccatctgcgcaccaaaaccataacaaggcgactcggaccgatg

SEQ ID NO: 3423 - DNA, 203 bp, synthetic construct
  source 1..203: mol_type = other DNA
ggcgcgccagtcctcagctggactgttctttggggccttatgtggtgtttgcctctgaggtactcaggggcatttaggtttttcctcattcttaaataataatgaacatgtctagacaaggtattttccagactgttgggagtggtcttgaccacatcctgtctttggcagacattgaggaagagcaacgactcggaccgatg

SEQ ID NO: 3424 - DNA, 203 bp, synthetic construct
  source 1..203: mol_type = other DNA
ggcgcgccagtcctgactgttctttggggccttatgtggtgtttgcctctgaggtactcaggggcatttaggtttttcctcattcttaaataataatgaacatgtctagacaaggtattttccagactgttgggagtggtcttgaccacatcctgtctttggcagacattgaggaagagcaaatgattcgactcggaccgatg

SEQ ID NO: 3425 - DNA, 203 bp, synthetic construct
  source 1..203: mol_type = other DNA
ggcgcgccagtcctcggcaggaacaaaccacgacggagtgctcctagaaaggcgcgggccgaggtaccaaaggcagcgtgtggagcgggaggagaagaggcctccgggtgaaggtaagtacctacaccaaaaactgtagccgaaagggcttgctatcctacctttagacaggtagaagattgtgggagcgactcggaccgatg

SEQ ID NO: 3426 - DNA, 203 bp, synthetic construct
  source 1..203: mol_type = other DNA
ggcgcgccagtcctccttttcacgcacttcagagcaggatgtggccactcaagaattggccagacaaggggaggaaatcctctctcagctataccgacccctagaaacatgcaataactcatgctattgtaagcgatgctgctaccattgtcagatgtgttttctaaacaaggggctcgggatatgttcgactcggaccgatg

SEQ ID NO: 3427 - DNA, 203 bp, synthetic construct
  source 1..203: mol_type = other DNA
ggcgcgccagtcctgatactggccctggccgatagcatatatacatttcctgatccgccagctgattcgcctcttgaccagactatacagcatctgcagggacttactatccaggagcttcctgaccctccaactcatctaccagaatctcagagactggctgagacttagaacagccttcttgcaatcgactcggaccgatg

SEQ ID NO: 3428 - DNA, 203 bp, synthetic construct
  source 1..203: mol_type = other DNA
ggcgcgccagtcctccacaacagtgtaattacggccccggcactagatacgcctggaaagtactaccccaagggtttaaaaacagtcccaccctgttcgagatgcagctggcccatatcctgcagcccattcggcaagctttttcccaatgcactattcttcagtacatggatgacatcctcctagcacgactcggaccgatg

SEQ ID NO: 3429 - DNA, 203 bp, synthetic construct
  source 1..203: mol_type = other DNA
ggcgcgccagtcctacccagagaacctctaagaccctcaaggtccttaccccgccgaccactcatacaacccccaacattccaccctccttcctccaggccatgcgcaagtactcccccttccgaaacggatacatggaacccacccttgggcaacacctcccaaccctgtcttttccagaccccggccgactcggaccgatg

SEQ ID NO: 3430 - DNA, 203 bp, synthetic construct
  source 1..203: mol_type = other DNA
ggcgcgccagtcctccacccctttccctttcattcacgactgactgccggcttggcccacggcaagtaccgcggactctactggctcggagccagcagcagcctattctataacactctccaggagagaaatttagtacacaggtgggggctcgtccgggatacgagcgcccctttattccctaggcacgactcggaccgatg

SEQ ID NO: 3431 - DNA, 203 bp, synthetic construct
  source 1..203: mol_type = other DNA
ggcgcgccagtcctaacagtggcttacatggtgtaatgcacaaagctgggaccactatgaaaactgggcaataaactacacttttgatttccctggaattaatgcagatgccctccacccagacctccaaaccaccccaattgtcacagacaccagtatcagcagcagtggtggtgaaagctctgaagcgactcggaccgatg

SEQ ID NO: 3432 - DNA, 203 bp, synthetic construct
  source 1..203: mol_type = other DNA
ggcgcgccagtccttgggactttgtccccattgcattaatgtaggggcttggtataatggatggaaatttcgagaatttaccccagatttggtgcgatgtagctgccatgtgggagcttctaatcccttttctgtgctaacctgcaaaaaatgtgcttacctgtctggattgcaaagctttgtagattcgactcggaccgatg

SEQ ID NO: 3433 - DNA, 203 bp, synthetic construct
  source 1..203: mol_type = other DNA
ggcgcgccagtcctacccatcctctctgtttgacttagttgctcgcattaaaaataaccttaaaaattctccagacttatatagtcatcattttcaaagtcatggacagttatctgaccacccccatgccttatcatccagtagcagtcatgcagaacctagaggagaagatgcagtattatctagtgcgactcggaccgatg

SEQ ID NO: 3434 - DNA, 203 bp, synthetic construct
  source 1..203: mol_type = other DNA
ggcgcgccagtcctaatcaatgggaattactaccttagttcagtatgccgtgggaattatgacagtaaccatgacatttaaattggggccccgtaaagctacgggacggtggaatcctcaacctggagtatatcccccgcacgcagcaggtcatttaccatatgtactatatgaccctacagctacagcgactcggaccgatg

SEQ ID NO: 3435 - DNA, 203 bp, synthetic construct
  source 1..203: mol_type = other DNA
ggcgcgccagtcctatgcggtttttacgaactcaactttcaataagattcctttgacgacgataagtcggctttttgttcagttgattataggaggacacgctaaaggaacgatttatgacagcaatgtaattcgcgtcagtcgtcggaaacgagaagacagtttactaaaaaagatgagattggagtcgactcggaccgatg

SEQ ID NO: 3436 - DNA, 203 bp, synthetic construct
  source 1..203: mol_type = other DNA
ggcgcgccagtccttcacagaatgtatatagaggttttacctgttggttatatgaatgggcaaacccgagttctggcgtgagcattataaaacgcttcttatagaagatggcactgttggggtatttggtagatatcgtagagcagtttctttcgcctttccatatgatcgcttcatagttgttttttcgactcggaccgatg

SEQ ID NO: 3437 - DNA, 203 bp, synthetic construct
  source 1..203: mol_type = other DNA
ggcgcgccagtccttagaagatggcactgttggggtatttggtagatatcgtagagcagtttctttcgcctttccatatgatcgcttcatagttgttttttatgtgggttatgtcgcaggtacgtagcatggagcccgaccttacgttggcggcggtctatcaggcggcggcgaatctcacagagcagcgactcggaccgatg

SEQ ID NO: 3438 - DNA, 203 bp, synthetic construct
  source 1..203: mol_type = other DNA
ggcgcgccagtcctgagctcagcgatatttccggtatatgaccttcgtaagctgctcagtgcacttgtcatttcggaaggtagcgtcagattcgatatataatgtctttgaaggactatctgagacagtcaatttctaaagatttggaggtgagacatcgagattctttaaagattagattaggggagcgactcggaccgatg

SEQ ID NO: 3439 - DNA, 203 bp, synthetic construct
  source 1..203: mol_type = other DNA
ggcgcgccagtcctggaagaaaggagtttgcatttggtgattgatgagacggaatatatagaagaagaaatacctttggccttgattgtgactccggtggcaccgaatccggaatttacttgtcgtgttataacagacatatgcaatctgtgggaaaataatatttgcaagcagaccagtttacaagtcgactcggaccgatg

SEQ ID NO: 3440 - DNA, 203 bp, synthetic construct
  source 1..203: mol_type = other DNA
ggcgcgccagtcctcatcgctgcgcgaaccagttttatcggctgcctgacgttttcaaaactcaccgccgagtcggcttgagaataaacggtgacattgtccggaaatcttacatcggacaaactctggccgaaccactctgagaacagagtatcgttctgaaacctgttctccatcacagagctggtcgactcggaccgatg

SEQ ID NO: 3441 - DNA, 203 bp, synthetic construct
  source 1..203: mol_type = other DNA
ggcgcgccagtcctaaaaaaaacgatattattgttgccgttgtcgtgtgatcatccatatcgttctttttgggtgtacattgtgacaagtttcttttgtgactatattatctttcattttttttttgcgagttgcaacttttgcttactaagttttgagtgctatttctctgtcgctgtgagcccgtacgactcggaccgatg

SEQ ID NO: 3442 - DNA, 203 bp, synthetic construct
  source 1..203: mol_type = other DNA
ggcgcgccagtcctgcgttgtggattgtttgacctttgaaaaaatttttgtgtccgtgtagcatttcaataaaagtcattatctgctcagagggataaatcatgtctatctcttcgttgttcggaggtagatacgataataagtttttgcttaacatgtcttcggctcccaaaatagagttgattgtacgactcggaccgatg

SEQ ID NO: 3443 - DNA, 203 bp, synthetic construct
  source 1..203: mol_type = other DNA
ggcgcgccagtcctaagctacaacaggtcaacgttcgagtagacgtaaattccatatgtcgaatgcgctgtaaactttttcacggaacatcaaaaacaccgaatttattcacgtttacataagcatgaatctgcaattttaatagtcccataaagctttcatttcgatctaactacattttagtatttcgactcggaccgatg

SEQ ID NO: 3444 - DNA, 203 bp, synthetic construct
  source 1..203: mol_type = other DNA
ggcgcgccagtcctccgtctcctgcaatttgaattctgctcgtttgtttttttctgcgacaaaaaaataaacgctgtctcagatatatacttacttgagtgatggagttattggaccacgacatttataagggacccgttcgagaacgggtcacgtataccattcccaaccatccctatctctcgctgcgactcggaccgatg

SEQ ID NO: 3445 - DNA, 203 bp, synthetic construct
  source 1..203: mol_type = other DNA
ggcgcgccagtcctatctattaagcttgaattttataaacatgttttccagaacaaaaatccaaacaagcaaatgctcataacgacgttgtccaccaagccatgaaattatccggactataccatgatgcggacgtcacacatagacaaccattgagtgagaatacgcatcaagatcccatatcttctcgactcggaccgatg

SEQ ID NO: 3446 - DNA, 203 bp, synthetic construct
  source 1..203: mol_type = other DNA
ggcgcgccagtcctgtgctggtgaagctgggcgattgtctactgacttttttgcgtgtgggatttgccagactttttgcggactgcggttatgagaagattggaaaaatatccatgcgcttcggacggatgtcgacgttgggcatgtcggagacttatcaatcgtgcatgagcctcagtaagtagttccgactcggaccgatg

SEQ ID NO: 3447 - DNA, 203 bp, synthetic construct
  source 1..203: mol_type = other DNA
ggcgcgccagtccttcgttattcgtaagtgggtacaatgaaaaaaaatcaacactgccttaatgtatgcaccctcaagagtgctgattggatagagatataatgatatataaaaaagtgcatgatgaacaaaaaagtttgtttttccataaatttaaatgtcagtgggtgccgcggttagggtctttccgactcggaccgatg

SEQ ID NO: 3448 - DNA, 203 bp, synthetic construct
  source 1..203: mol_type = other DNA
ggcgcgccagtcctagacggtgaaatgtaagtgtcgttctatctactcggggaaaatgtcaccacgggtaaacttgaatgattaatacaccattttctcgtgtgtgcgtgtatgtggatgtatacgcgtatagtatgcgtaataacacaggacatcgccggttaatctataacttgatatttgttcagcgactcggaccgatg

SEQ ID NO: 3449 - DNA, 203 bp, synthetic construct
  source 1..203: mol_type = other DNA
ggcgcgccagtcctgtgtgcgtgtatgtggatgtatacgcgtatagtatgcgtaataacacaggacatcgccggttaatctataacttgatatttgttcagtctgtttcaaaatgcaggccagaaattttgtcgacctttcacggacaatagaacaattgtatatactatgcaagaccaagttcaaagcgactcggaccgatg

SEQ ID NO: 3450 - DNA, 203 bp, synthetic construct
  source 1..203: mol_type = other DNA
ggcgcgccagtccttggccctaccgctacccctctttcaacccctcaccatcacccaacccgctgccccacccacatcccccccaccgccaccgctaccgtcacctctgaacttcacctttttcctccatctcgccccacttctctctacatttctccgcccctctattcttactcctgttttctaggcgactcggaccgatg

SEQ ID NO: 3451 - DNA, 203 bp, synthetic construct
  source 1..203: mol_type = other DNA
ggcgcgccagtcctcacctctgaacttcacctttttcctccatctcgccccacttctctctacatttctccgcccctctattcttactcctgttttctaggatgccgctgacggcgcgtgccggccacaccctgcatcgtcttccgctctcccactattggtggcttctgttgggtcgacactcccttcgactcggaccgatg

SEQ ID NO: 3452 - DNA, 203 bp, synthetic construct
  source 1..203: mol_type = other DNA
ggcgcgccagtcctagtttagtgatgcactgccacttctcatcaaaattgtccataaatttcaagtttttcaccatgtcagcaatctgatcggctctgacgtaggtggaaggatacttgtaagtttcatactcataatctatcagtctgttccacactacgcagtccgaagagggatgtagtcctttacgactcggaccgatg

SEQ ID NO: 3453 - DNA, 203 bp, synthetic construct
  source 1..203: mol_type = other DNA
ggcgcgccagtccttaggtggaaggatacttgtaagtttcatactcataatctatcagtctgttccacactacgcagtccgaagagggatgtagtcctttaatgccaaatctagctgctgcggttccctgcagaccgttcgtcaacctagcgcaggagacgggaacgacaaacctgctggtagcgggccgactcggaccgatg

SEQ ID NO: 3454 - DNA, 203 bp, synthetic construct
  source 1..203: mol_type = other DNA
ggcgcgccagtcctcggatagcaggagtcggtcgatcgtctcgctccgcttggttttccgtgtcacggcgcgcgcatagactccgttaatctcggcggccgatgtctcgcgtgttctcgtgcgtgctccgcgcgtgtgtatgtgccggcctctgctgctgggtgtgtatgggggtgatatgcggtgaccgactcggaccgatg

SEQ ID NO: 3455 - DNA, 203 bp, synthetic construct
  source 1..203: mol_type = other DNA
ggcgcgccagtccttcatgacaaggatctcgaaatataaaaccaaaaaaaaagtgaggagtgcgtaatcgcaagaaaagaaaaaacagagccgcggtggaaatgtctatccgcctgcgtgtatgtgtggggtgtgtatatgtgcgcgtgaccgtatccctccctgcctttaacccgatgagaaataaacgactcggaccgatg

SEQ ID NO: 3456 - DNA, 203 bp, synthetic construct
  source 1..203: mol_type = other DNA
ggcgcgccagtcctaggaagattttcataattccgaggaaatgaaggtgtttgttgtccaacattcgcaggaaatcgttggtggaacggatttttctgtacatgcggaggaaagcgtgtgagtcaaaacgggggttgaaatttaataaagtttgtcacaccactctcttttttccaatttcctgtcatcgactcggaccgatg

SEQ ID NO: 3457 - DNA, 203 bp, synthetic construct
  source 1..203: mol_type = other DNA
ggcgcgccagtcctgatctcgctgaagccgtcttgtatgtgactatttccatctgtttttagtggcgcttcgagttcgttttttctgaagtggatctgccgatggctgttagaaagttatggaagacagtcgtacagctgttttctaaatcgaaatccgaggagtgcaatacagaagccggaacgatgcgactcggaccgatg

SEQ ID NO: 3458 - DNA, 203 bp, synthetic construct
  source 1..203: mol_type = other DNA
ggcgcgccagtcctgaaaatttgtaagacgctgaactttgtctcgatctagccacgcaaacgggatcgactgcgctttcaaatccatcttttagaaaacaaactcaaaaacaaaactgctcgtcttcgccaagactcaatgtttaatagtcctttttttacccacacagaaagctgacaagcgacgagcgactcggaccgatg

SEQ ID NO: 3459 - DNA, 203 bp, synthetic construct
  source 1..203: mol_type = other DNA
ggcgcgccagtcctactcaaaaacaaaactgctcgtcttcgccaagactcaatgtttaatagtcctttttttacccacacagaaagctgacaagcgacgagatggacactgtcattgagctgtccaaactcctggtaagtctccagagatcattgttaccgaatattttattgtagcgtaccatgacacgactcggaccgatg

SEQ ID NO: 3460 - DNA, 203 bp, synthetic construct
  source 1..203: mol_type = other DNA
ggcgcgccagtcctaattcttaaagcgtgtgattcagtatctgtttttataatacggagagctgccgagctgagcggaacagagctttggctgtgacgaggatggatgtgtggaagcgtcaacggcttcaagaatgccgtgaactgtgtcctttgcctgcattaatgtcactgtcgaatatcttgtcacgactcggaccgatg

SEQ ID NO: 3461 - DNA, 203 bp, synthetic construct
  source 1..203: mol_type = other DNA
ggcgcgccagtcctagtttcaaatttgtttctattgtattccacagagatgcggcagattttttggaagaaattgcaaacgatctgtgaattctaaatatcatgaagaagttaactatggagtccttgttagtttatacctttgtaatgggagtctgctttacatcgaatctcacatgcgagcaaaaacgactcggaccgatg

SEQ ID NO: 3462 - DNA, 203 bp, synthetic construct
  source 1..203: mol_type = other DNA
ggcgcgccagtcctgtaatgtttcctttccgagcggtgtgcagttacaattactaaatcaatcggtgatggagtcaattagaactaaaacgtatgtagtggattacgctaggaaaactacagagagaggtgattgcttcatttctgtagcattctgccgaaaagaaagaagacgctttttaccccgctcgactcggaccgatg

SEQ ID NO: 3463 - DNA, 203 bp, synthetic construct
  source 1..203: mol_type = other DNA
ggcgcgccagtccttgggatgaagagaataaaccggatgtgcaaatcaggagggatgcaaagacttgcagatgaggctcccatagattgttactagtgattatggtgcctcagggttggagtttagcatgggtgagtgtattatacgtgtcggtgataccgtctttgcatattattaacaatgaaaatcgactcggaccgatg

SEQ ID NO: 3464 - DNA, 203 bp, synthetic construct
  source 1..203: mol_type = other DNA
ggcgcgccagtcctactctattccccattcctagaagtgccgaggaactctgggaaggaacatacactctcgtagtcgcatttgtgctcgcatttctcgtctactccgattatcttagtaatttaagtccgtttggagaaattttgtcctcgccgtgtatttcaacgtgaatcttcgtcgggaagaggcgactcggaccgatg

SEQ ID NO: 3465 - DNA, 203 bp, synthetic construct
  source 1..203: mol_type = other DNA
ggcgcgccagtcctgaacgaagacggaagtgcgttggcatcaaaacaggaaacgcaatataaaataaccaactacatggttcccactaaaaacgggactgcgggctctagcttatttaatgagaaagaagatagcgagagcgacgattccatgcattttgaatacagctccaatcctaagagacagagcgactcggaccgatg

SEQ ID NO: 3466 - DNA, 203 bp, synthetic construct
  source 1..203: mol_type = other DNA
ggcgcgccagtcctctatcggctgccagggataaaatctcgatttttgccgtagcggctagtaatgattctggggacgtgctgtttttgagtgaactaagaatgaactctaaatcgagtgcacgagctgccattgtggatactgtggaagctgtgaagaagagaaaatatatatctatcgaggcgggacgactcggaccgatg

SEQ ID NO: 3467 - DNA, 203 bp, synthetic construct
  source 1..203: mol_type = other DNA
ggcgcgccagtcctggttcccagtctggctctaggaaaatctcttttaataccgtaagcccgtgaatgttttctttgttagcgtcatagacatttccttgcatgacgcatgacaacagacaactgctgccgcaagaaactaagctcgtcacaccaaacaaagacactttgtcttccaggtacttacaccgactcggaccgatg

SEQ ID NO: 3468 - DNA, 203 bp, synthetic construct
  source 1..203: mol_type = other DNA
ggcgcgccagtcctctgtgcatctctacaacgtgaccgtcaagaagttgttacggcttgtttcacacggttctgattttcagtgtcagcattgtcagcattcgtttagagagacttgcttagatctggaagactgtgttaatatctgtcaaggttgtcagatttcccaaaacgtgaggtgtatttgaacgactcggaccgatg

SEQ ID NO: 3469 - DNA, 203 bp, synthetic construct
  source 1..203: mol_type = other DNA
ggcgcgccagtcctcgtttagagagacttgcttagatctggaagactgtgttaatatctgtcaaggttgtcagatttcccaaaacgtgaggtgtatttgaaatgacgaccatacgtggtgatgatttgtcgaatcagatcactcagatttcaggaagttcttcaaaaaaagaggaggaaaagaagaagcgactcggaccgatg

SEQ ID NO: 3470 - DNA, 203 bp, synthetic construct
  source 1..203: mol_type = other DNA
ggcgcgccagtcctccggtgtgaagttttcgagactaagtgaaaggcattgtcgggttgcgattgtcagcatctgctttcttttagccttgtatttttgttatgttctacttaaaaaaactcctacgccagcttctggccccgttgtgtaaacatgggccgtacactcatttgcaattgtttgtgatgcgactcggaccgatg

SEQ ID NO: 3471 - DNA, 203 bp, synthetic construct
  source 1..203: mol_type = other DNA
ggcgcgccagtccttaaaacacgacctcaaactcccttccctgctcacagacttgctcatacaaaagttcaagattcgtcttttcaggtgaggagtccatcatgtacaaaggatgggactcagaagcgttgtctatacaatctgagatagtaaacgagattctgttatattgctacctcactccccaacgactcggaccgatg

SEQ ID NO: 3472 - DNA, 203 bp, synthetic construct
  source 1..203: mol_type = other DNA
ggcgcgccagtcctgtcttctgagtctcatgcctcaaaacctagtttgatagacaggatcaggtatagaggttataagagtgtaaatgtagaagaagcgtgatggattcggtgtcattttttaatccatatttggaagcgaatcgcttaaagaaaaaaagcagatcgagttacattcgtatacttcctcgactcggaccgatg

SEQ ID NO: 3473 - DNA, 203 bp, synthetic construct
  source 1..203: mol_type = other DNA
ggcgcgccagtcctatcaagcaagcggtgtattaaaatgtgatgaaacggaaaccgaaacggatgagccgatgactaagaaaaaccgattataatcagagtatgaattcgttacaatctctgtgtgtgttgtgcgctaggcttaatgaatgtgctttggaccttgaatgtttaaagttttgtgatcctcgactcggaccgatg

SEQ ID NO: 3474 - DNA, 203 bp, synthetic construct
  source 1..203: mol_type = other DNA
ggcgcgccagtcctaatcgtcgaaaacaatttcccataacaccccaataccctaagggcatttaaagccaaattcatctgtaatcaacagagctctacacaatgaccatcgtagtgtttgcgactgaatacgatgccgcaaacgtcatttttagtatcctatgtagaagtcccagtgaacatttaatccgactcggaccgatg

SEQ ID NO: 3475 - DNA, 203 bp, synthetic construct
  source 1..203: mol_type = other DNA
ggcgcgccagtcctgatgtccacgtttcgaaagacgaaaaattcaatgtatcttgagctcgtttgtctctgtagggtaatcgtttcagagatcttttctgaaattacgctgtacatttttccaggtgacagagggctgtctgctgttaatcacgtcgacgcgaagactagttcaaaataacacttaagcgactcggaccgatg

SEQ ID NO: 3476 - DNA, 203 bp, synthetic construct
  source 1..203: mol_type = other DNA
ggcgcgccagtcctccgattagcgcccgataaattactagtaagaacattaagatagccagggcattcacaatcgcagtccagcacagcatgcatttggaggtcatcgtccaaccctataaaaaaagcaaatactattttagttacacattctccttgtaaaaattcactgtggtcaactcacccgaccgactcggaccgatg

SEQ ID NO: 3477 - DNA, 203 bp, synthetic construct
  source 1..203: mol_type = other DNA
ggcgcgccagtccttaatctatttaatatggaaagatcaaaaagtgttcaactttcaaagaatagcagaaccctttcacatttcatcgatgaagaacaactatgctcttccgactctgggtctttgttctgttgactccctgttacagttggagaccgtggaccatatcggacgagagccattgtaaacgactcggaccgatg

SEQ ID NO: 3478 - DNA, 203 bp, synthetic construct
  source 1..203: mol_type = other DNA
ggcgcgccagtcctctatttcgttcttggatcaatatttaattgcagacgaggttttgtggaacgttgttcccgtaatttgttttttcaggcagtggggactcaagttagatttttttaaaaagttttcggggaagaccaagcggttgtcattttcgtttatatgtgatttgttcgctaggtctcaggcgactcggaccgatg

SEQ ID NO: 3479 - DNA, 203 bp, synthetic construct
  source 1..203: mol_type = other DNA
ggcgcgccagtcctggacacgttgcgcgacggagatgcgggagttgacacttcgtgatcccgccctcgtctgttgctgtagttgatgctgttgctgttgttgtagtggtcgttttcgtggttgtctttgtcctatgttaacattgtgagaacagcgcataaataaaatggtttttttgtgtgtattttcgactcggaccgatg

SEQ ID NO: 3480 - DNA, 203 bp, synthetic construct
  source 1..203: mol_type = other DNA
ggcgcgccagtcctgtagtggtcgttttcgtggttgtctttgtcctatgttaacattgtgagaacagcgcataaataaaatggtttttttgtgtgtattttatgtgtgtatttttttgtgtgtgtatttttttgtgtgtgtatttttttgtgtgtatttttttgtgtgtatttttttgtgtgtgtattcgactcggaccgatg

SEQ ID NO: 3481 - DNA, 203 bp, synthetic construct
  source 1..203: mol_type = other DNA
ggcgcgccagtcctatgttttaatgtcattgaaaatatttagaggtgcttcgattttaggtaaaatttcggtcgcctgccaattttccatgtttcggcgttatgcagcacaccggtaattgtgaaactttaatagttaattcatgttttggttccacttgtgcacggtcgattccagtttttatagatcgactcggaccgatg

SEQ ID NO: 3482 - DNA, 203 bp, synthetic construct
  source 1..203: mol_type = other DNA
ggcgcgccagtcctaaatacacacaaaaaaatacacacacaaaaaaatacacacacaaaaaaatacacacataaaatacacacaaaaaaaccattttatttatgcgctgttctcacaatgttaacataggacaaagacaaccacgaaaacgaccactacaacaacagcaacagcatcaactacagcaacgactcggaccgatg

SEQ ID NO: 3483 - DNA, 203 bp, synthetic construct
  source 1..203: mol_type = other DNA
ggcgcgccagtccttatacccacgttttagtgggtgggacttaaaagaaatgggtggagggatataggggtgtgtcttcgttggtaccaattataaaaatgtactcgccacaactcacaatttagaacgcatggcagttctgctacgtgtttggatgcccggacattagaatacagccagttgttacccgactcggaccgatg

SEQ ID NO: 3484 - DNA, 203 bp, synthetic construct
  source 1..203: mol_type = other DNA
ggcgcgccagtcctttatcattaagaatatttacacggtgacgacacggggaggaaatatgcggtcgaggggggggcacaacacgttttaagtactgttggaactccctcaccaaccgcaatcgcaatcctttgaaggctgcgagagcgtttggaaaactcgggtacgtctaaattcaccccagtgcgcgactcggaccgatg

SEQ ID NO: 3485 - DNA, 203 bp, synthetic construct
  source 1..203: mol_type = other DNA
ggcgcgccagtcctaactccctcaccaaccgcaatcgcaatcctttgaaggctgcgagagcgtttggaaaactcgggtacgtctaaattcaccccagtgcgatggatacgccgccgatgcagcgctctacaccccaacgcgcggggtcgcctgatactttggagttaatggacctgttggacgcggcccgactcggaccgatg

SEQ ID NO: 3486 - DNA, 203 bp, synthetic construct
  source 1..203: mol_type = other DNA
ggcgcgccagtcctaaggggcaggcgtgtataagagggcccctgtttaatacgcggtctgccgtgtttggatatttcacgaccctatcgtttatttacgtaatggcatcttccgacggtgacagactttgtcgctctaatgcagtgcgtcgtaaaacaacgcctagttattccggacaatatcgaacccgactcggaccgatg

SEQ ID NO: 3487 - DNA, 203 bp, synthetic construct
  source 1..203: mol_type = other DNA
ggcgcgccagtcctcaacccaatcgaaggtctcccgccccggaatcccccattgccattttacccaagtagccttattcatagatgtaaacgtttgggtgtgtgttttgttgtgcagggttcgtccgattcataacgcgacagcgtcgagtcggttttaagggaaaaggttactacggccccaaggaccgactcggaccgatg

SEQ ID NO: 3488 - DNA, 203 bp, synthetic construct
  source 1..203: mol_type = other DNA
ggcgcgccagtcctgtgttttgttgtgcagggttcgtccgattcataacgcgacagcgtcgagtcggttttaagggaaaaggttactacggccccaaggacatgttttgcacctcaccggctacgcggggcgactcgtccgagtcaaaacccggggcatcggttgatgttaacggaaagatggaatatcgactcggaccgatg

SEQ ID NO: 3489 - DNA, 203 bp, synthetic construct
  source 1..203: mol_type = other DNA
ggcgcgccagtcctgatataccgcccccccatggcgtgtagtctttataaataaatacaatggtttggctcgtgtctttttttgatgtctgtctgtgggggagtggggtgttgtggatattagagggtagagggtgctggtttgaacgtctccattaacccacggggtccccacacgggccgtgtggtcgactcggaccgatg

SEQ ID NO: 3490 - DNA, 203 bp, synthetic construct
  source 1..203: mol_type = other DNA
ggcgcgccagtcctataaataacataaccaatagaaacttaatacagagtcacgccccattacaacaaggataaaacacgggatcattttcttaacattgtagtagcgctgaaaagcgtcccctcccccggctcacagagctgctcttcggtgtagttgggtatactggtgcgcctcatttaatcgcgcgactcggaccgatg

SEQ ID NO: 3491 - DNA, 203 bp, synthetic construct
  source 1..203: mol_type = other DNA
ggcgcgccagtcctctggtatacacgagagcagtccatggttttagacctcgggcgaattgcgtggttttaagtgactatattccgagggtcgcctgtaatatggggacagttaataaacctgtggtgggggtattgatggggttcggaattatcacgggaacgttgcgtataacgaatccggtcagacgactcggaccgatg

SEQ ID NO: 3492 - DNA, 203 bp, synthetic construct
  source 1..203: mol_type = other DNA
ggcgcgccagtcctaaaatattaagggttgtgatttttttcattaggatgaaaagaacgtttcctagccacacccacaaaggagtttgtaaaataaaatctctgtttagaccttaaaatttgttgtgtgtgttgtgtggggggtccgtgaggatcgacctttacaagatataatttgtccatatcgcacgactcggaccgatg

SEQ ID NO: 3493 - DNA, 203 bp, synthetic construct
  source 1..203: mol_type = other DNA
ggcgcgccagtcctggatgggattttttgccgggaaacccccccccgccagcctttaacaaaacccgcgccttttgcgtccacccctcgtttactgctcggatggcgaccgtgcactactcccgccgacctgggaccccgccggtcaccctcacgtcgtcccccagcatggatgacgttgcgaccccccgactcggaccgatg

SEQ ID NO: 3494 - DNA, 203 bp, synthetic construct
  source 1..203: mol_type = other DNA
ggcgcgccagtcctcggatcgggttaaacaaacatattaacgaaactcgtgtgtttacatatgattactttttctatagtaaacattttaagtagtaaattatggatttgaggtcgcgtacagacgatgctttggacatggaattgcatgcgggttttgacgccccagaaatcgccagagctgttttacgactcggaccgatg

SEQ ID NO: 3495 - DNA, 203 bp, synthetic construct
  source 1..203: mol_type = other DNA
ggcgcgccagtccttgtaattaacacaagatcacatcgaagaattactgaagccgctgtgaaacctttcacaagacgatataaacttggttaagtgtattgatggggctctttggactgacacgctttatccatgaacataaactggttaaacccagcatcatttcaacgccacccggagttttaacccgactcggaccgatg

SEQ ID NO: 3496 - DNA, 203 bp, synthetic construct
  source 1..203: mol_type = other DNA
ggcgcgccagtcctgcggggttgggtgagcctataaattctacaacattggcggaagatacaggcaactgcaaacacgcaattgtcagatattttgcagccatggcctctgcttcaattccaaccgacccagacgtgtctactatttgtgaagactttatgaatttgctaccagacgaaccttcggatcgactcggaccgatg

SEQ ID NO: 3497 - DNA, 203 bp, synthetic construct
  source 1..203: mol_type = other DNA
ggcgcgccagtccttttgtggtttttattgactgggcgtttcgtttgtataacgctgttgttgctagtattttcataacctcctaggtttttggagctacacgtgcttattcaacgctctttgggatttgaatcatcgtaaacgtagcgtccctaccagttgagcgcgtaattttcgtaagcaataaacgactcggaccgatg

SEQ ID NO: 3498 - DNA, 203 bp, synthetic construct
  source 1..203: mol_type = other DNA
ggcgcgccagtcctgaagtacctaattatccaaatttaacttcgagttaacaccaaccgtgtgatactacatcgtgcttgaattgccatcttccacgggtcatgcaggctttaggaatcaagacagaacattttataattatgtgtctacttagcggacatgctgtttttaccctatggtataccgctcgactcggaccgatg

SEQ ID NO: 3499 - DNA, 203 bp, synthetic construct
  source 1..203: mol_type = other DNA
ggcgcgccagtcctgtcatggccaaatttctagatttgcatgaaatattgaaggatgcttaatacatggggaaaataaacgcattaataagtcgtcagggggtggatcactccaaactcctcctatatcccacgataaatggtctaaatacttcacgcgtgtgccttggtttgcaaccttagatcaatcgactcggaccgatg

SEQ ID NO: 3500 - DNA, 203 bp, synthetic construct
  source 1..203: mol_type = other DNA
ggcgcgccagtcctataatccattcacagcggttaaagcctcttggaggcggagcagggcggctccttgggggtgcgtgtttacacgcacctcttcataagatggctcttcagttggtattcgagcatatccacataagctggcacacaccgtctgcatgattgactggctttccaacgtattgaactcgactcggaccgatg

SEQ ID NO: 3501 - DNA, 203 bp, synthetic construct
  source 1..203: mol_type = other DNA
ggcgcgccagtcctccgagaatgtaacgggggtgtaaatagccagggggtttgttttaatttattaataaaaatgtgtattacgttactcatgtgtctccattacgcatcacagggggtatttatacccgataatatacaaaacgcgttttgtacctctaccgcacccgatatcttaacggggttattcgactcggaccgatg

SEQ ID NO: 3502 - DNA, 203 bp, synthetic construct
  source 1..203: mol_type = other DNA
ggcgcgccagtcctgcgttgggtgttggggaatcaaatgaagattgtgaaaagactgttccgcatttaaaggttacgcagttgtgtaggaacgacagcgatatggcttctgtagcaggtaacgctagtaatatctcaccacagcccccgtcgggcgttccaaccggaggggaatttgtactgatacctcgactcggaccgatg

SEQ ID NO: 3503 - DNA, 203 bp, synthetic construct
  source 1..203: mol_type = other DNA
ggcgcgccagtccttcttctatattttgtctgtttgggtgtcattcctcagtttgcctccacaccgtgagtattcactatcgggtccgtggggtgtttataatggctgctgaagctgacgaagagaactgtgaagcgttatacgtggctgggtatttagccttatattcaaaggacgaaggggaattacgactcggaccgatg

SEQ ID NO: 3504 - DNA, 203 bp, synthetic construct
  source 1..203: mol_type = other DNA
ggcgcgccagtcctgggatgttttcccatgggtaagaaaacagcttttaaagcagtaccggtttatattcacgccagttgactttgtttgctgcagacaccatgacggcgagatatgggttcggatctatctcgtttccgaataaatgtgggatatttttgtctaccactaagaactttatagccccccgactcggaccgatg

SEQ ID NO: 3505 - DNA, 203 bp, synthetic construct
  source 1..203: mol_type = other DNA
ggcgcgccagtcctttggtgttattgcaaagtggtgtaaaaattcttcggcggcggttgtttttccaattccatacgccccgtccaaataaatacgcaaaacgcccatttttacatcggttttatccgttgacatgtttattgtagacaaacgcgtcttaggttatcttctgggacggaacttcaaatcgactcggaccgatg

SEQ ID NO: 3506 - DNA, 203 bp, synthetic construct
  source 1..203: mol_type = other DNA
ggcgcgccagtccttgaacgcgtccgcgaaacctcgacgtacgttatcaatatcctttttgagtacatcgtaaaaacgagtgtggcaacgttgtcccaaacgaaaacacttggcccgaattcgactagcggacatatttgaagttccgtcccagaagataacctaagacgcgtttgtctacaataaaccgactcggaccgatg

SEQ ID NO: 3507 - DNA, 203 bp, synthetic construct
  source 1..203: mol_type = other DNA
ggcgcgccagtcctgaaaacacttggcccgaattcgactagcggacatatttgaagttccgtcccagaagataacctaagacgcgtttgtctacaataaacatgtcaacggataaaaccgatgtaaaaatgggcgttttgcgtatttatttggacggggcgtatggaattggaaaaacaaccgccgcccgactcggaccgatg

SEQ ID NO: 3508 - DNA, 203 bp, synthetic construct
  source 1..203: mol_type = other DNA
ggcgcgccagtccttctcatattcggtgtggacctaaggttggcgatcacacgatcacgggacggcaagttcgaggttaatgttccgataaacgctttaatatggaatttccatatcattcaaccgtatcttataacggcgtaacgttttattttaacgagcgtgctaccagggcgtattttatatgccgactcggaccgatg

SEQ ID NO: 3509 - DNA, 203 bp, synthetic construct
  source 1..203: mol_type = other DNA
ggcgcgccagtccttttactttggactataaactgcgactgaacgttatgaacccaccccaagcccgcgtctcggaacagacaaaggacttgcttagcgttatggttaaccagcaccccgaagaggacgcaaaagtgtgtaaatccagtgataattcaccgctttataacaccatggttatgttatcgcgactcggaccgatg

SEQ ID NO: 3510 - DNA, 203 bp, synthetic construct
  source 1..203: mol_type = other DNA
ggcgcgccagtccttaaatgtactataattgttcagtctaaaaataatgttgggtatttataattaccgcccccgtgttacttggaaacacccatacatatgttccactctacatcaaacttctcgcagttttcttgttcccgcacacgtttacacgtccggattcaagtcgcaacgctgctgacaaacgactcggaccgatg

SEQ ID NO: 3511 - DNA, 203 bp, synthetic construct
  source 1..203: mol_type = other DNA
ggcgcgccagtcctccaatatctgattcgagacgcgtcgccccttaggggatgtcttcctcttccgcgataatttcaccacgcccacatacccactcccaataaaagccctgtagagcgcattggcatcttacttgagatttggatacgctcggccgacttggtctgtttcacgcttccttaaacaaccgactcggaccgatg

SEQ ID NO: 3512 - DNA, 203 bp, synthetic construct
  source 1..203: mol_type = other DNA
ggcgcgccagtccttgacacggttacgcctatgagaagcgtaggttggagtgtggcctgacatgaccaaagtgaatgaatgcggccctgaaaatgtttatgatatatacgtaacgagtacgtaagatgacgcggcttcctgttttactgcttacaagagatgaggcggattccgtgaattgatgttaacgactcggaccgatg

SEQ ID NO: 3513 - DNA, 203 bp, synthetic construct
  source 1..203: mol_type = other DNA
ggcgcgccagtccttgtatccttaaataccacgtacgtaaaaaatgtttgaatacgtacatatttcttttttttttccagtacaaccatatccggtgtataatggaagcccatttggcaaatgaaaccaaacatgcactttggcataatgatcacacaaaaggattactacacgttgtgatacctaaccgactcggaccgatg

SEQ ID NO: 3514 - DNA, 203 bp, synthetic construct
  source 1..203: mol_type = other DNA
ggcgcgccagtcctaacccccataaataaattagtgtcactataaaaacataacaccagaatctcttcatatgtaattttacgtcatttctcccgtttccaccccctcttaaaatataaaataaccgggtgggtggcattaaacccacaagtacccgggcggcaatccgctagactgtttttctgctccgactcggaccgatg

SEQ ID NO: 3515 - DNA, 203 bp, synthetic construct
  source 1..203: mol_type = other DNA
ggcgcgccagtcctatcttacagattcttcaccaagcgtacgaccaaacattatcaatgacatttaacatcaattcacggaatccgcctcatctcttgtaagcagtaaaacaggaagccgcgtcatcttacgtactcgttacgtatatatcataaacattttcagggccgcattcattcactttggtccgactcggaccgatg

SEQ ID NO: 3516 - DNA, 203 bp, synthetic construct
  source 1..203: mol_type = other DNA
ggcgcgccagtcctgcctatcgaagttgatgtgcctagagtgacacaaatacttaaagacacaggaaacaacgcgattacatcagcattgcggtcattgcgatgggacaatcttcatccagcggtcgaggaggaatctgtggattgtgcaaacggtacaacgagcttgttacgtgcaacggagaaacccgactcggaccgatg

SEQ ID NO: 3517 - DNA, 203 bp, synthetic construct
  source 1..203: mol_type = other DNA
ggcgcgccagtcctgtttgtgacataccaggttttattagttttactggaacatccaattgcagttccaggctaattcccgggtgggtgtgtttaatccacgaaaccagatcccctccatataacgcccgcgcgagctgtgtactggacgcatagacggcggcgttgctctccccggtgttgggagaccgactcggaccgatg

SEQ ID NO: 3518 - DNA, 203 bp, synthetic construct
  source 1..203: mol_type = other DNA
ggcgcgccagtcctgaaaccagatcccctccatataacgcccgcgcgagctgtgtactggacgcatagacggcggcgttgctctccccggtgttgggagacatgggaactcaaaagaaggggccgcgttctgaaaaagtctcgccgtacgacaccacgacacccgaggtggaagcgttagatcatcaacgactcggaccgatg

SEQ ID NO: 3519 - DNA, 203 bp, synthetic construct
  source 1..203: mol_type = other DNA
ggcgcgccagtcctatttgatgatctaacgcttccacctcgggtgtcgtggtgtcgtacggcgagactttttcagaacgcggccccttcttttgagttcccatgtctcccaacaccggggagagcaacgccgccgtctatgcgtccagtacacagctcgcgcgggcgttatatggaggggatctggttcgactcggaccgatg

SEQ ID NO: 3520 - DNA, 203 bp, synthetic construct
  source 1..203: mol_type = other DNA
ggcgcgccagtcctagcgctatcggaactgtccccgggatcgtggccgcggataaacggggcggtaaattttgaaagtttataacccgttaataccatatatggacatccatagggggggttacataaatactaagcctctgtacaacacaaagggcctctaacaatgcactgaaccacaaccaagctcgactcggaccgatg

SEQ ID NO: 3521 - DNA, 203 bp, synthetic construct
  source 1..203: mol_type = other DNA
ggcgcgccagtcctaaatgaatctaaaccctctacgggaacgatatgaaaaatccgcagaaattagcgatcacattcttgccgctctacgtgatcccaacgtacacgttgtgtattaaagcattgtataaaaacacgcatgcgggcttgctgttctcatttctaggttttgtcttaaatacacccgcccgactcggaccgatg

SEQ ID NO: 3522 - DNA, 203 bp, synthetic construct
  source 1..203: mol_type = other DNA
ggcgcgccagtcctgaattcaagatgtcatctggtgctaacacacgcgcatccgtcgccattgtcccgtgttccatttcggaattgtcgacatttcgttcaagccaatgagtattttacgcgtaaaggcgaacccgagatcgattggagtgttatataacactccaatcgaccctcttgcgtaccatacgactcggaccgatg

SEQ ID NO: 3523 - DNA, 203 bp, synthetic construct
  source 1..203: mol_type = other DNA
ggcgcgccagtcctcagggcaggtggacgaactgggattatattatgtgcacgatggtgtacgtgttaactatgtggactttggaacagagtccttgacctatggggtcaccgggacgtgggaggtgcacgtggctgggactgttattcaccatacatccgcatctgtgtctagcacccaggccagcgcgactcggaccgatg

SEQ ID NO: 3524 - DNA, 203 bp, synthetic construct
  source 1..203: mol_type = other DNA
ggcgcgccagtcctataaccatcaactgacagaaccagatgtgcaggcctacggggtggtaactacctgctgtaagtgtggcagaaccgtccggctggtggttgagtgcggacaagcagacctaagagagctggaacagctgttcttgaagacgctgactctagtgtgccctcactgcgcctagcgttcgactcggaccgatg

SEQ ID NO: 3525 - DNA, 203 bp, synthetic construct
  source 1..203: mol_type = other DNA
ggcgcgccagtcctcgccctttcgtgttatttcttgtaacgaattcgttacaaaacacacacacagtatataagatagaggaacggattggtacaccacagatggcatcaacaagcggtgtgggatccgtcgggcctgcaagctgttgcgagacgcagaagccacataccatacgggagttgtgtttgcgactcggaccgatg

SEQ ID NO: 3526 - DNA, 203 bp, synthetic construct
  source 1..203: mol_type = other DNA
ggcgcgccagtcctattgatggttatacatggaactctttttttaggaaattttggcgtcacctaaatctaaaagaccctgaggatgagtcagatggagagactcctggaacgattagactatatacaagagcagatactgacactatatgagaaagatagtgttgacctagaggatcatataaggctcgactcggaccgatg

SEQ ID NO: 3527 - DNA, 203 bp, synthetic construct
  source 1..203: mol_type = other DNA
ggcgcgccagtcctactttcacatggacggagtctgacgggacagaacggtgtgggtcggggcgctttttttgtgctttctctaatgaaacaaaaagagaaaagttcctcaaatctgtcaagattcctaaaaacattgggctgtttcgcgcacacgcagaaaagctgtgacctgtgtatcattaaacacgactcggaccgatg

SEQ ID NO: 3528 - DNA, 203 bp, synthetic construct
  source 1..203: mol_type = other DNA
ggcgcgccagtcctaagttcctcaaatctgtcaagattcctaaaaacattgggctgtttcgcgcacacgcagaaaagctgtgacctgtgtatcattaaacaatgcttgctaggcaaagggttaaacgcgctaatcctgaacaactgtataagacatgcaaagcaacggggggcgattgtccacccgatcgactcggaccgatg

SEQ ID NO: 3529 - DNA, 203 bp, synthetic construct
  source 1..203: mol_type = other DNA
ggcgcgccagtcctaagacataggactaaccgctttgggggacaacattgaaaatgaattgcaggaaatagatttattaactgcggatggtgaagaagaccaggagggcagagacctgcagttggtattttccactggcaatgatgaggtggttgatattatgactatacctatacgtgcaggcggggcgactcggaccgatg

SEQ ID NO: 3530 - DNA, 203 bp, synthetic construct
  source 1..203: mol_type = other DNA
ggcgcgccagtcctggattatgatatacatcctagcctgttgcgcaggaaacgtaaaaaacgcaaacgtgtttatttttcagatggccgtgtggcttccaggcccaaatagattttacttaccccctcaacctatacaacggacattgaacacagaggaatacgtgagacgcaccagtactttcctcccgactcggaccgatg

SEQ ID NO: 3531 - DNA, 203 bp, synthetic construct
  source 1..203: mol_type = other DNA
ggcgcgccagtcctatctgtggaaaaggattacatattgcgggaagacttgtctgtgcatagaattggcgggatctggaggggaacttgtgttcgatgtatggtaggactgtattagctgtgagactaatatactgtttgctgtattgtattgctgtaatcgtgcgtaaattgctataccctgtaatacgactcggaccgatg

SEQ ID NO: 3532 - DNA, 203 bp, synthetic construct
  source 1..203: mol_type = other DNA
ggcgcgccagtccttgcagcaagtccccacacccaggagaacattatacctggtagagagtcagtgtccattttgccaggctatcatacgatttgtatgcgtagcaagcaacactgggatacggaatctacaggcactcctggtcaacagtcaccttgacctcgcttgtcacgcctgtgtcgagcagacgactcggaccgatg

SEQ ID NO: 3533 - DNA, 203 bp, synthetic construct
  source 1..203: mol_type = other DNA
ggcgcgccagtccttagcaagcaacactgggatacggaatctacaggcactcctggtcaacagtcaccttgacctcgcttgtcacgcctgtgtcgagcagaatggcgtccagggtctcagacaccggcaatggcaatgaaaacaaagagaatgaaggtacagtggcatctgatcattctgaggcgcgtcgactcggaccgatg

SEQ ID NO: 3534 - DNA, 203 bp, synthetic construct
  source 1..203: mol_type = other DNA
ggcgcgccagtcctattatacctggtagagagtcagtgtccattttgccaggctatcatacgatttgtatgcgtagcaagcaacactgggatacggaatctacaggcactcctggtcaacagtcaccttgacctcgcttgtcacgcctgtgtcgagcagaatggcgtccagggtctcagacaccggcacgactcggaccgatg

SEQ ID NO: 3535 - DNA, 203 bp, synthetic construct
  source 1..203: mol_type = other DNA
ggcgcgccagtcctacaggcactcctggtcaacagtcaccttgacctcgcttgtcacgcctgtgtcgagcagaatggcgtccagggtctcagacaccggcaatggcaatgaaaacaaagagaatgaaggtacagtggcatctgatcattctgaggcgcgttgtagctatatattatttgaggctgaatcgactcggaccgatg

SEQ ID NO: 3536 - DNA, 203 bp, synthetic construct
  source 1..203: mol_type = other DNA
ggcgcgccagtcctgttaataacaatcttggtttaaaaaataggagggaccgaaaacggttcaaccgaaaacggttgtatataaaccagccctaaaatttagcaaacgaggcattatggaaagtgcaaatgcctccacgtctgcaacgaccatagaccagttgtgcaagacgtttaatctatctatgccgactcggaccgatg

SEQ ID NO: 3537 - DNA, 203 bp, synthetic construct
  source 1..203: mol_type = other DNA
ggcgcgccagtcctgccattgtaactgtaacatatgatagtgaggaacaaaggcaacagtttttagatgttgtaaaaataccccctaccattagccacaaactgggatttatgtcactgcacctattgtaatttgtatatatgtaaatgtgtaaatatatggtattggtgtaatacaactgtacatgtcgactcggaccgatg

SEQ ID NO: 3538 - DNA, 203 bp, synthetic construct
  source 1..203: mol_type = other DNA
ggcgcgccagtcctaacccccttgcaatttttcctactaactctacttgtgtgttactgtcccgcattgtatatacactactatattgttaccacacagcaatgatgctaacatgtcaatttaatgatggagatacctggctgggtttgtggttgttatgtgcctttattgtagggatgttggggttacgactcggaccgatg

SEQ ID NO: 3539 - DNA, 203 bp, synthetic construct
  source 1..203: mol_type = other DNA
ggcgcgccagtcctatgcattatactactgatggtgattatatatatatgaattagagtaaaccgttttttatatttgtaacagtgtatgctttgtataccatggcacatagtagggcccgacgacgcaagcgtgcgtcagctacacagctatatcaaacatgtaaactcactggaacatgccccccacgactcggaccgatg

SEQ ID NO: 3540 - DNA, 203 bp, synthetic construct
  source 1..203: mol_type = other DNA
ggcgcgccagtcctagaaaaggtaaaacatatactaaccaaggcgcggttcataaagctaaattgtacgtggaagggtcgctgcctacactgctggacaacatgcatggaagacatgttaccctaaaggatattgtattagacctgcaacctccagaccctgtagggttacattgctatgagcaattacgactcggaccgatg

SEQ ID NO: 3541 - DNA, 203 bp, synthetic construct
  source 1..203: mol_type = other DNA
ggcgcgccagtcctttttcattacaggttctggattttatttgcatcctgcatggtattttgcacgtaaacgccgtaaacgtattcccttatttttttcagatgtggcggcctagcgacagcacagtatatgtgcctcctcctaaccctgtatccaaagttgttgccacggatgcttatgttactcgccgactcggaccgatg

SEQ ID NO: 3542 - DNA, 203 bp, synthetic construct
  source 1..203: mol_type = other DNA
ggcgcgccagtcctagaaacagacatcagagaagtgcaacagcttctgttgggaacactaaacatagtgtgtcccatctgcgcaccgaagacctaacaacgatggcggacgattcaggtacagaaaatgaggggtctgggtgtacaggatggtttatggtagaagctatagtgcaacacccaacaggtcgactcggaccgatg

SEQ ID NO: 3543 - DNA, 203 bp, synthetic construct
  source 1..203: mol_type = other DNA
ggcgcgccagtcctcattattctagttacaacaagaacctaggagttatatgccagaagtaagcctataaaatacacaggtaagactctgcacaggaccagatggcgacaccaatcgggaccgtcagacagctttccgaaagcctctgtatcccatatattgatgttttattgccttgtaatttttgtcgactcggaccgatg

SEQ ID NO: 3544 - DNA, 203 bp, synthetic construct
  source 1..203: mol_type = other DNA
ggcgcgccagtcctttgattttgcttggacgtgtgtacatagtccctgtatatattcccctcctacccccacataccttgaagcttgcaacattgtaacaaatgtatcgcctacgtagaaaacgcgctgcccccaaagatatatacccctcatgcaaaatatcaaacacctgcccacctgacattcaacgactcggaccgatg

SEQ ID NO: 3545 - DNA, 203 bp, synthetic construct
  source 1..203: mol_type = other DNA
ggcgcgccagtcctttacacctttggttattatagctcttaacaactcaacaggggattttgagttacatcctagtcttagaaagcgtcgtaaaagagcttatgtataatgtttttcagatggctgtctggttaccagcgcagaataagttctatcttcctccccagcccatcactagaatcctgtcccgactcggaccgatg

SEQ ID NO: 3546 - DNA, 203 bp, synthetic construct
  source 1..203: mol_type = other DNA
ggcgcgccagtcctaggagttagtgtcgcctcagcaaccttatgctgtcgttgcttcctgtgcctattgcgagaaactggttcgattgaccgtcctcgcggatcacagcgccattagacagctggaggaactccttctgcgatctttgaacatcgtgtgcccactgtgcaccctacagcgacagtaaacgactcggaccgatg

SEQ ID NO: 3547 - DNA, 203 bp, synthetic construct
  source 1..203: mol_type = other DNA
ggcgcgccagtcctatcacagcgccattagacagctggaggaactccttctgcgatctttgaacatcgtgtgcccactgtgcaccctacagcgacagtaaaatggcagataataaaggtactgaaaacgattggtttttggtggaggcgacagattgtgaggaaacgttagaggaaacctcacttggtcgactcggaccgatg

SEQ ID NO: 3548 - DNA, 203 bp, synthetic construct
  source 1..203: mol_type = other DNA
ggcgcgccagtcctttgctggctactgtcgttagcgggcagagacaggatagacagggaggagagcgaaggaggccccaactcgaccacgaccagtgtgcctactgcaaagaaaagggacattgggctagagattgccccaagaagccaagaggaccccggggaccacgaccccaggcctccctcctgcgactcggaccgatg

SEQ ID NO: 3549 - DNA, 203 bp, synthetic construct
  source 1..203: mol_type = other DNA
ggcgcgccagtcctaaaccccaagaccaattcaggcaggttctggagtgcgtggcaatcagtcacaaacttacaagccagctgctggtcgcggaggaagaggcaatcaaaaccgaaaccaacgatcatccggtgctggtgactcacgcgcagttaatactgtaacacaaagtgccacgtcctccacagcgactcggaccgatg

SEQ ID NO: 3550 - DNA, 203 bp, synthetic construct
  source 1..203: mol_type = other DNA
ggcgcgccagtcctgcttgtgtttaaaaattgtcgcagcttccccaaaccaagtggtcttggttttctctttttattatattgtcaatatggcttgcaaacacggatacccagacgtgtgccctatttgcacagccgttgacgctactcccgactttgaatatttgctcatggcagacggagaatggtcgactcggaccgatg

SEQ ID NO: 3551 - DNA, 203 bp, synthetic construct
  source 1..203: mol_type = other DNA
ggcgcgccagtcctgaccggcagctcgacagcggagacaacccgtacctcaagtacaaccacgccgacgcggagtttcaggagcgccttaaagaagatacgtcttttgggggcaacctcggacgagcagtcttccaggcgaaaaagagggttcttgaacctctgggcctggttgaggaacctgttaagcgactcggaccgatg

SEQ ID NO: 3552 - DNA, 203 bp, synthetic construct
  source 1..203: mol_type = other DNA
ggcgcgccagtccttcttccaggcgaaaaagagggttcttgaacctctgggcctggttgaggaacctgttaagacggctccgggaaaaaagaggccggtagagcactctcctgtggagccagactcctcctcgggaaccggaaaggcgggccagcagcctgcaagaaaaagattgaattttggtcagacgactcggaccgatg

SEQ ID NO: 3553 - DNA, 203 bp, synthetic construct
  source 1..203: mol_type = other DNA
ggcgcgccagtcctccggtagagcactctcctgtggagccagactcctcctcgggaaccggaaaggcgggccagcagcctgcaagaaaaagattgaattttggtcagactggagacgcagactcagtacctgacccccagcctctcggacagccaccagcagccccctctggtctgggaactaatacgcgactcggaccgatg

SEQ ID NO: 3554 - DNA, 203 bp, synthetic construct
  source 1..203: mol_type = other DNA
ggcgcgccagtcctacaccatgtggtcacgctgggtatttaagcccgagtgagcacgcagggtctccattttgaagcgggaggtttgaacgcgcagccgccatgccggggttttacgagattgtgattaaggtccccagcgaccttgacgagcatctgcccggcatttctgacagctttgtgaactggcgactcggaccgatg

SEQ ID NO: 3555 - DNA, 203 bp, synthetic construct
  source 1..203: mol_type = other DNA
ggcgcgccagtcctgtgtcgcagacgcaggagcagaacaaagagaatcagaatcccaattctgatgcgccggtgatcagatcaaaaacttcagccaggtacatggagctggtcgggtggctcgtggacaaggggattacctcggagaagcagtggatccaggaggaccaggcctcatacatctccttccgactcggaccgatg

SEQ ID NO: 3556 - DNA, 203 bp, synthetic construct
  source 1..203: mol_type = other DNA
ggcgcgccagtcctctcagagagtcgttggaagacgggaaggaagcccaacgactgagcagtccaccccaggcgtgattctggtcgcccggtggatcaagcatggaagccgtcataaaggtgatttcgtccgcgtgtaaaacctattgcgggaaaacctctccttctaagaaggaaataggggccatgcgactcggaccgatg

SEQ ID NO: 3557 - DNA, 203 bp, synthetic construct
  source 1..203: mol_type = other DNA
ggcgcgccagtcctcatgaagggcacgagctgcttcccaaaggcccccatccaagtataggtctctacatcgtaggtgacaaagagacgctcggtgcgaggatgcgagccgatcgggaagaactggatctcccgccaccagttggaggagtggctgttgatgtggtgaaagtagaagtccctgcgacgcgactcggaccgatg

SEQ ID NO: 3558 - DNA, 203 bp, synthetic construct
  source 1..203: mol_type = other DNA
ggcgcgccagtcctctcggttgtaacgcgcttaggaagtcccctcgaggtatggcagatatgctcttgcatagggggaaaaaatgtagtcttaatattgtctgtgtgctgcaggagctaagctgactctgctggtggcctcgcgtaccactgtggccaggcggtagctgggacgtgcagccgaccacccgactcggaccgatg

SEQ ID NO: 3559 - DNA, 203 bp, synthetic construct
  source 1..203: mol_type = other DNA
ggcgcgccagtccttgtgtgctgcaggagctaagctgactctgctggtggcctcgcgtaccactgtggccaggcggtagctgggacgtgcagccgaccaccatggggagcagcaagagcaagcctaaggaccccagccagcgccggcacagcctggagccacccgacagcacccaccacgggggattccgactcggaccgatg

SEQ ID NO: 3560 - DNA, 203 bp, synthetic construct
  source 1..203: mol_type = other DNA
ggcgcgccagtcctgcgaaaatcccgggatatgatagaggtgggggttattaaccgagacgggtctttggagcgacccctgctcctcttccccgcagtagctatggttagagggagtatcctaggaagagattgtctgcagggcctagggctccgcttgacaaatttatagggagggccactgttcttcgactcggaccgatg

SEQ ID NO: 3561 - DNA, 203 bp, synthetic construct
  source 1..203: mol_type = other DNA
ggcgcgccagtccttgccgagaactcagagggtcgtcggaagacggagagtgagcccgacgaccaccccaggcacgtctttggtcggcctgcggatcaagcatggaagccgtcattaaggtgatttcgtccgcgtgtaaaacctattgcgggaaaatctctccttctaagaaggaaataggggccatgcgactcggaccgatg

SEQ ID NO: 3562 - DNA, 203 bp, synthetic construct
  source 1..203: mol_type = other DNA
ggcgcgccagtcctacataccaaataccaagaccaactagaacaacaattttcaaaacaaaaaattgaaaagtggtgttacgtaaggaacagaagaaaggaatggaaaggaccctacaaagtgttgtgggacggagacggggcagcagtaatagaggaagagggaaaaacagccttatatccacaccgcgactcggaccgatg

SEQ ID NO: 3563 - DNA, 203 bp, synthetic construct
  source 1..203: mol_type = other DNA
ggcgcgccagtcctcaacgcttagctgcacttcagctgtgcactaacgcatgtctctgttggtacccgttaggacgcatcaacgacaccaccccgttgtggttgaacttttcgtctgggaaggaaccaacgatccaacaactgagtggccacccctaactcgtcgtaacattcatagattgtggcaatcgactcggaccgatg

SEQ ID NO: 3564 - DNA, 203 bp, synthetic construct
  source 1..203: mol_type = other DNA
ggcgcgccagtcctgggtggcgatgataatgttgccacagcccaaagaaagctttggaggaaagccaattggctggcttttctggaacacgtgcaaaggacctaggcgggactgtccacattgttgttgtcccatatgtagttggcattgtcagctttgctttttgcagaaaaatctaggaatcaactcgactcggaccgatg

SEQ ID NO: 3565 - DNA, 203 bp, synthetic construct
  source 1..203: mol_type = other DNA
ggcgcgccagtcctctgtcttactttctgtttctcgcggcccgcgctctctccctcggcgccctctagcggccaggagagaccggcaaacaattgggggctcgtccgggattgatcaccccggaaccctaacgatcctctggacccaccccctcggcggcgttttgggtctttcctttaaattatatccgactcggaccgatg

SEQ ID NO: 3566 - DNA, 203 bp, synthetic construct
  source 1..203: mol_type = other DNA
ggcgcgccagtcctcgtccgggattgatcaccccggaaccctaacgatcctctggacccaccccctcggcggcgttttgggtctttcctttaaattatatcatgggaaattccccctcctataacccccccgctggtatctccccctcagactggctcaaccttcgtcaaagcgcgcaaaggctcaatcgactcggaccgatg

SEQ ID NO: 3567 - DNA, 203 bp, synthetic construct
  source 1..203: mol_type = other DNA
ggcgcgccagtcctagctccccgggcaaaacaatcgtcggtggctaggacctctcccggccctagtcgaagcctcgggaggcgccctcctggctactaacccccccgtgtgggttccctggcgtttgctaaaagccttcaaatgcccaaagaacgacggtcccgaagacgcccacaaccgatcatcagcgactcggaccgatg

SEQ ID NO: 3568 - DNA, 203 bp, synthetic construct
  source 1..203: mol_type = other DNA
ggcgcgccagtcctcccccgtgtgggttccctggcgtttgctaaaagccttcaaatgcccaaagaacgacggtcccgaagacgcccacaaccgatcatcagatgggtaagtctcactcttactctcctcgctctctgtcagcccatccagacttggagatgctccctgtccctaggaaatcaacaatgcgactcggaccgatg

SEQ ID NO: 3569 - DNA, 203 bp, synthetic construct
  source 1..203: mol_type = other DNA
ggcgcgccagtcctgccatggaggcccatcagtttattaaggctcctggcatcactactgctattgagcaggctgctctagcagcggccaactctgcccttgcgaatgctgtggtagttaggccttttctctctcaccagcagattgagatccttattaacctaatgcaacctcgccagcttgttttccgactcggaccgatg

SEQ ID NO: 3570 - DNA, 203 bp, synthetic construct
  source 1..203: mol_type = other DNA
ggcgcgccagtccttttcactgagtcagtgaagccagtgctcgacctgacaaattcaatcctgtgtcgggtggaatgaataacatgtcttctgctgcgcccatgggttcgcgaccatgcgccctcggcctattttgctgttgctcctcatgtttctgcctatgctgcccgcgccaccgcccggtcagccgactcggaccgatg

SEQ ID NO: 3571 - DNA, 203 bp, synthetic construct
  source 1..203: mol_type = other DNA
ggcgcgccagtccttgaagccagtgctcgacctgacaaattcaatcctgtgtcgggtggaatgaataacatgtcttctgctgcgcccatgggttcgcgaccatgcgccctcggcctattttgctgttgctcctcatgtttctgcctatgctgcccgcgccaccgcccggtcagccgtctggccgccgccgactcggaccgatg

SEQ ID NO: 3572 - DNA, 203 bp, synthetic construct
  source 1..203: mol_type = other DNA
ggcgcgccagtccttgtctctagtttgtctgttcgagatcctacagttggcgcccgaacagggacctgagaggggcgcagaccctacctgttgaacctggctgatcgtaggatccccgggacagcagaggagaacttacagaagtcttctggaggtgttcctggccagaacacaggaggacaggtaagcgactcggaccgatg

SEQ ID NO: 3573 - DNA, 203 bp, synthetic construct
  source 1..203: mol_type = other DNA
ggcgcgccagtccttgatcgtaggatccccgggacagcagaggagaacttacagaagtcttctggaggtgttcctggccagaacacaggaggacaggtaagatgggagaccctttgacatggagcaaggcgctcaagaagttagagaaggtgacggtacaagggtctcagaaattaactactggtaaccgactcggaccgatg

SEQ ID NO: 3574 - DNA, 203 bp, synthetic construct
  source 1..203: mol_type = other DNA
ggcgcgccagtcctatggctagctatgcttactaataatcagcttagaagacaagtaattagggaagcacagatctggatgtggaaacataagggagctgcagttagaagaaattgtggttgcaggctatgtaaccccggctggggaagccaagtaagaaatgttgaactgtgataagcctgtctaggcgactcggaccgatg

SEQ ID NO: 3575 - DNA, 203 bp, synthetic construct
  source 1..203: mol_type = other DNA
ggcgcgccagtcctgcgtccacgacggaaaccccgccgagacctagccgcggtccctggatctccagatacggaggggagtctttttgttgttttttgtagatgcatccggtgttgcgacagatgcgtccgacggcgcctccaacacagccgccgctcccgccccccactagcgcccctgcagccgttcgactcggaccgatg

SEQ ID NO: 3576 - DNA, 203 bp, synthetic construct
  source 1..203: mol_type = other DNA
ggcgcgccagtcctaagccgtccccctcggagttagaagacgcgttcacaaaatggacgaagactgagtttccctgtcgttgccagccggtccccgtcagcatgagcaagcgcaagttcaaagaagagctgctggaggcccttgtgcctgaaatctatggccctgccgcggacgtcaagcccgacattcgactcggaccgatg

SEQ ID NO: 3577 - DNA, 203 bp, synthetic construct
  source 1..203: mol_type = other DNA
ggcgcgccagtcctcaaacccagccgcactcgctccacccgccgtcgtcgctctgtccgccgccgctcaaggcgcacggcccccatctctgtgcgtcgcgtaacccgccgtggacgcacgctgacccttcccaacgcgcgttaccaccctagcattctcgtttaatccgtgcgctgccgttttttcagcgactcggaccgatg

SEQ ID NO: 3578 - DNA, 203 bp, synthetic construct
  source 1..203: mol_type = other DNA
ggcgcgccagtcctaacccgccgtggacgcacgctgacccttcccaacgcgcgttaccaccctagcattctcgtttaatccgtgcgctgccgttttttcagatggctttgacttgccggtttcgcattcccgttccgtcctaccgaggaagatctcgccgtaggagaggcatggcgggcagtggccgccgactcggaccgatg

SEQ ID NO: 3579 - DNA, 203 bp, synthetic construct
  source 1..203: mol_type = other DNA
ggcgcgccagtcctgcgctttgcgcaggcgaataaaaggcggatttttgcccgcgttgattcccatcatcgccgccgccataggcgcaatcccaggcgtggcctccgtggccttgcaagcagctcgcaaacaataaaagaaggcttaacactgacttcctggtcctgactattttatgcagacaagaccgactcggaccgatg

SEQ ID NO: 3580 - DNA, 203 bp, synthetic construct
  source 1..203: mol_type = other DNA
ggcgcgccagtcctccaccagccgcaccgcggcgtcatcgaggccgtctacctgcgtacgccgttctcggccggtaacgccaccacataagaagccagccaatgggctccagcgagcaggagttggtcgccatcgtgcgcgaactgggctgcggaccttactttctgggcacgtttgacaaacgctttcgactcggaccgatg

SEQ ID NO: 3581 - DNA, 203 bp, synthetic construct
  source 1..203: mol_type = other DNA
ggcgcgccagtcctccttgccgtcctcggggggcgttacatagcccggatcttgctccacttgctcattttcctcctcatgtttcactagctcgacggcgccgacctcagagttgggggtggttaaggtttcggagtctggctgcagcttaagatcctcctccatattttctcgcctaggagtaaagccgactcggaccgatg

SEQ ID NO: 3582 - DNA, 203 bp, synthetic construct
  source 1..203: mol_type = other DNA
ggcgcgccagtcctaggcactgttcaataaatattgctcggtgtctcttaaggactaaacacccgcgctttttttaggcgccaaattacgtcattgacattatgagcaaagacattcccacgccttacatgtggagctatcagccgcaaatgggcctggcagctggagcttctcaggattactccagtcgactcggaccgatg

SEQ ID NO: 3583 - DNA, 203 bp, synthetic construct
  source 1..203: mol_type = other DNA
ggcgcgccagtcctcagacgacttcatcccgaactacgacgcggtgagcgaatctgtggacggctacgactgaagaccgatagtacggccgtgactgcgcggctgtaacatctgcatcggtgccgtaaccttcgctgctttacttaaaaagcctgtgatttcatttaccaccccagcacttggattaccgactcggaccgatg

SEQ ID NO: 3584 - DNA, 203 bp, synthetic construct
  source 1..203: mol_type = other DNA
ggcgcgccagtccttcgctggactttacaaaaagagaatctaaccactaccaccctccttccccttactacttatactttttcccaaaaaaagaattactttttgcccattattgcacttttggcctttgtctgtgttattaccgctaattatattttaattttcaatcttgataatttttactaatccgactcggaccgatg

SEQ ID NO: 3585 - DNA, 203 bp, synthetic construct
  source 1..203: mol_type = other DNA
ggcgcgccagtcctcgccttgctgacttatctcatcttcacctctgtttgctgcactgccatctgcagcattgccactttttttgtggccattttccaaactgcggactacctatacgttagagtggcatactatcgtcatcatccccaatataggaaccacgaggtggctacccttctgtgcctgtccgactcggaccgatg

SEQ ID NO: 3586 - DNA, 203 bp, synthetic construct
  source 1..203: mol_type = other DNA
ggcgcgccagtcctgtttcctattacagcccccaccgcccccaccggctcctgtgcagcgcgctccatcagttattagctactttcatcttaactctgaagatgtctgaccaactagaaatcgacgggcagtgcactgagcagcttatccttgctcggcgaaaactcaaacaacaaaatcaggaactgcgactcggaccgatg

SEQ ID NO: 3587 - DNA, 203 bp, synthetic construct
  source 1..203: mol_type = other DNA
ggcgcgccagtcctacatagggaatgctgggagttgaggaggtgtcataggggtagacggggttgaagtcgtcttcaattctggttcttttcatctgcaagatgaagattgtgggtcagggtaaaaaggtgaacaccgatataccctttaggacgtggagaaagtttgccgcccgttggcacatcccgcgactcggaccgatg

SEQ ID NO: 3588 - DNA, 203 bp, synthetic construct
  source 1..203: mol_type = other DNA
ggcgcgccagtccttcgcctaacatcaccttcagtgtcgtctacaacgagataaacagtgggtatgcttttacgtttaaatggtcagccgaaccgggaaaaccttttcacccacccaccgctgtattttgctacataactgaacaataaaatcattgcaggcgcaatcttcgcatttcttttttccagcgactcggaccgatg

SEQ ID NO: 3589 - DNA, 203 bp, synthetic construct
  source 1..203: mol_type = other DNA
ggcgcgccagtccttgtaatttttcaccaacgcagcggtggggagaggtgtgatcttcgtgacttgcactttggctcgctttacaaccgtctggaataattatgcctcttccgtctctccctccacctccagtgagtcgggatcaaggcctttgtatttcttggttggagttggctttaacctgctgtcgactcggaccgatg

SEQ ID NO: 3590 - DNA, 203 bp, synthetic construct
  source 1..203: mol_type = other DNA
ggcgcgccagtcctggagggacgtggagcgcctgcagcgttgccggcaaatccgctgtttccatcacgctttcgtaagaaggaggaggaccctcggcgtacgccatcaccggcggcactcccaccgcacgtctcattttgactaccgggaagagggaaaaaacagacaaagggacggacgctgttgctcgactcggaccgatg

SEQ ID NO: 3591 - DNA, 203 bp, synthetic construct
  source 1..203: mol_type = other DNA
ggcgcgccagtcctggcgattctctagttctaacacgaacgtttacggtcgttgccagctttttccttataaaactctggtgggaatttctcttgggacagatggacctgacatctgtacattcggttcgggatctgagttctgctctccgtatcccatttattgatttggttgttccttgcaattttcgactcggaccgatg

SEQ ID NO: 3592 - DNA, 203 bp, synthetic construct
  source 1..203: mol_type = other DNA
ggcgcgccagtcctcaccaccagatcatacattcaaaaagggagggcaaacaattgaggtaatctatgatgaggatcccaataatagcaccagacatactgtatggcgccatatatattatcaaaacggtgataacagatggagaaaagcagctagtgatgtagatgttcatggtgtgttttatttagcgactcggaccgatg

SEQ ID NO: 3593 - DNA, 203 bp, synthetic construct
  source 1..203: mol_type = other DNA
ggcgcgccagtcctgtaagcgactcccttccgtggtttggtggaaaagtcacaagggtaccatagcgaggaaccccggttcgaaaccggcaggatccgctatgagcacaagtgaggcgcttgcgcgttgaacccggccaaggacccccagacacggagaggagtctttttttatttattttttcttagcgactcggaccgatg

SEQ ID NO: 3594 - DNA, 203 bp, synthetic construct
  source 1..203: mol_type = other DNA
ggcgcgccagtccttgagcacaagtgaggcgcttgcgcgttgaacccggccaaggacccccagacacggagaggagtctttttttatttattttttcttagatgcatcctgtcctgcgacaaatgcgacctcagcccagggcaaccacggcctcagcagcggtggcgctttcgggctctggcgaacagcgactcggaccgatg

SEQ ID NO: 3595 - DNA, 203 bp, synthetic construct
  source 1..203: mol_type = other DNA
ggcgcgccagtcctggcagctggagtggcgtctgctgacgtcactggcgatgacgatgacgaagaccagtacgaggactgatcggccgtaccttttgttagatgcagcgaccggcgatcatcgcggagagggctcctaacctggatcccgcggttttggcggccatgcaaagccagccttctggcgttcgactcggaccgatg

SEQ ID NO: 3596 - DNA, 203 bp, synthetic construct
  source 1..203: mol_type = other DNA
ggcgcgccagtccttatgcgcagacgcatgaagggtggggtgctgcccttcctaattccacttattgctgcggccattggagccgttcccggaattgcctcagtagccttgcaggcttctcgaaaaaattaaaataaaataaaacttccaacttattactggtactatgactgttttatgcagactaacgactcggaccgatg

SEQ ID NO: 3597 - DNA, 203 bp, synthetic construct
  source 1..203: mol_type = other DNA
ggcgcgccagtcctgcggcgtcattgaagcggtctacctgcgcacgcccttctcggcgggtaacgctaccacctaagaaggcaccctcccagactgctgtaatgggttcaagcgaacaggagctgacggccattgttcgagatctaggctgtggaccctattttttgggaacctttgacaaacgttttcgactcggaccgatg

SEQ ID NO: 3598 - DNA, 203 bp, synthetic construct
  source 1..203: mol_type = other DNA
ggcgcgccagtccttcctcggggggagtctcgtagcccaagttctgctcaaccggtgcgtcttggggtatgagtagacttttgtccttctccatgacagccgtagcgccaatggcgggagcggtgggggcggttaagctttcctgtggctccagatccatcatgtgtttctttgcctaggattaaatacgactcggaccgatg

SEQ ID NO: 3599 - DNA, 203 bp, synthetic construct
  source 1..203: mol_type = other DNA
ggcgcgccagtcctgtagcgccaatggcgggagcggtgggggcggttaagctttcctgtggctccagatccatcatgtgtttctttgcctaggattaaataatggccagcaatcagcactcacagagggagcgcaccccagaccgcagcgctcagccgccgccgccaaaaatgggcagatactttctgcgactcggaccgatg

SEQ ID NO: 3600 - DNA, 203 bp, synthetic construct
  source 1..203: mol_type = other DNA
ggcgcgccagtcctttcttgacttttttctttggaggtaaaggcacagcttccagttcttcttcgctttcggaatccagaaagtatctgcccatttttggcggcggcggctgagcgctgcggtctggggtgcgctccctctgtgagtgctgattgctggccattatttaatcctaggcaaagaaacaccgactcggaccgatg

SEQ ID NO: 3601 - DNA, 203 bp, synthetic construct
  source 1..203: mol_type = other DNA
ggcgcgccagtccttcctttttcgggctcgcctggacactatcctgacgccttcatacccaactttgacgcagtgagtgaatctgtggatggctatgattaatgtctaatggagcggctgacagagcgcggctgcgacatttagaccactgtcgccaacctcactgctttgctcgagacatctgtgtccgactcggaccgatg

SEQ ID NO: 3602 - DNA, 203 bp, synthetic construct
  source 1..203: mol_type = other DNA
ggcgcgccagtcctttgagcttccagaggagcacccccaggggccagctcacggtgtcagaataacagttgaaaaaggaattgatacacacctcattaaatttttcaccaaacgcccgctattggtggaaaaagatcaaggaaatactatattaactttatattgcatttgtcctgttcccggattaccgactcggaccgatg

SEQ ID NO: 3603 - DNA, 203 bp, synthetic construct
  source 1..203: mol_type = other DNA
ggcgcgccagtcctaacacagtttaacacatacagtaagcacagtaatctttttaggaataattggcttcagcattttgattattatagcagcctttatttatctgtgctggcatagaaaatctttgtgtgtttctaaaacagaacctcttatgccgattccttactagttttcttttttcttacagtcgactcggaccgatg

SEQ ID NO: 3604 - DNA, 203 bp, synthetic construct
  source 1..203: mol_type = other DNA
ggcgcgccagtcctaagtgctaatacacctggtggtttttcttgaagaccattggaagaagtaaaagggggtgtaacaaagggtacgtctgatgtgtcaaatgggtcaaaagggtaaacggggttgaagtcatcattttcttctgtttcttcagcatactgggttctgctgcgcttcatctagaaaagcgactcggaccgatg

SEQ ID NO: 3605 - DNA, 203 bp, synthetic construct
  source 1..203: mol_type = other DNA
ggcgcgccagtccttgggtcaaaagggtaaacggggttgaagtcatcattttcttctgtttcttcagcatactgggttctgctgcgcttcatctagaaaagatgaagatggtgggtagggattgggaagaagaatctgaccttccatttaagatttggagaaagtttgctgtttgcaagtctgtcaggcgactcggaccgatg

SEQ ID NO: 3606 - DNA, 203 bp, synthetic construct
  source 1..203: mol_type = other DNA
ggcgcgccagtccttgaagataacacctgaagctgaatacattttagcaagcctgcgagagtggttgtactttgcttttttgacggaacgccaacgctgcaaacaaaaaggacgaggtgcgataaccagtggtcgtacgtggttttgtttttttaagtacgaagacgctcgcaagtctgttgtttacgcgactcggaccgatg

SEQ ID NO: 3607 - DNA, 203 bp, synthetic construct
  source 1..203: mol_type = other DNA
ggcgcgccagtcctcttttgtttatcgaaatcagagctgtggctcttttagaagctgttgttgaacatttggaaaatcgcttacaatttgatctggctgtgatctttcaccagcacagcggaggcgatcgctgccacctgcgagatttacgcattcaaatccttgctgaccgtcttgattaagtttttcgactcggaccgatg

SEQ ID NO: 3608 - DNA, 203 bp, synthetic construct
  source 1..203: mol_type = other DNA
ggcgcgccagtcctatccaggctcaagaatggagctcagtgttttgttgtttaatcattccgacgtgttttgcgatgttcgcgcaaagcagccagtcgcgcgcttgcttttaagtagagttgtttttccacccgtttgccaggcatctttaatttaacatatttttatttttcaggctaacctaaagccgactcggaccgatg

SEQ ID NO: 3609 - DNA, 203 bp, synthetic construct
  source 1..203: mol_type = other DNA
ggcgcgccagtcctattgtgctaaatgtaactgaggagctgagaagtgaccaccttaccctgtcttgcctgcggactgactatgagtcaagtgatgaagacgacaactgaggtaagtgggtggagctaggtgggattataaaaggctggaagtcaactaaaaattgtttttgttcttttaacagcacgcgactcggaccgatg

SEQ ID NO: 3610 - DNA, 203 bp, synthetic construct
  source 1..203: mol_type = other DNA
ggcgcgccagtcctgtgtcctcactgcgggagcacctccaaaggaaaaatacgggctaaaggccacgctacagaggctttgtcttatgatcttatgttaaaatgctaccttgccgaagcacagggagaagacacgcgcttcagcaccagccgcctcagtttaaagcgcacactggccagcgctcaacccgactcggaccgatg

SEQ ID NO: 3611 - DNA, 203 bp, synthetic construct
  source 1..203: mol_type = other DNA
ggcgcgccagtcctgtttcttccctccgtaggacccaaatagcggggaggcacgtagggtggcgccgctgccatcacggtttcgtaagagggaggtggtgtctcaggaaaagccactgtctgcagttccaccgcgcgcctcatttcacagctaacggaagaaggaaaataagacgaacactggtcgcccgactcggaccgatg

SEQ ID NO: 3612 - DNA, 203 bp, synthetic construct
  source 1..203: mol_type = other DNA
ggcgcgccagtcctttttaaccgactgttacgaatacagcctgatagggtgctgcagaggcccactgtattgctactaaaaatctctgctgtacatggcacatggagttgatcacaaatgaacttttatacaaaacatacaaacaaaaacccgtcggggtggaggaacctgtttatgatcaggcaggtcgactcggaccgatg

SEQ ID NO: 3613 - DNA, 203 bp, synthetic construct
  source 1..203: mol_type = other DNA
ggcgcgccagtcctgtctggaaagactagtactgctacagatggtagaacagcatgtgtttcaagtattgccattgtggagagccaggagaagtagtacaacagatttcccatggtgcagggacacaacgggatacacgcatgcgtggtctgtccaggagtgctggttgatggaatatctcttagaggcgactcggaccgatg

SEQ ID NO: 3614 - DNA, 203 bp, synthetic construct
  source 1..203: mol_type = other DNA
ggcgcgccagtccttattaaaggatgaagagaagggatattttcttatacctaggagacacataaggagagttccagaaccctgcgctcttcctgaaggggatgagtgaagaagattggcaggtaagtagaagactctttgcagtgctccaaggaggagtaaatagcgctatgctatacatatctaggcgactcggaccgatg

SEQ ID NO: 3615 - DNA, 203 bp, synthetic construct
  source 1..203: mol_type = other DNA
ggcgcgccagtcctatccctccaggaagcggccggggcagccttgctctccatagacggctccccccggtggatcccgtggcgattcctgaaaaaagctgcatgcccaagaccagacgccagcgaactcgccgagcacgccgcaacagaccaccaacaccatgggtaatgttttcttcctacttttatcgactcggaccgatg

SEQ ID NO: 3616 - DNA, 203 bp, synthetic construct
  source 1..203: mol_type = other DNA
ggcgcgccagtcctctccggcccctgaatgcggctaaccttaaccctagagccttatgccacgatccagtggttgtaaggtcgtaatgagcaattccgggacgggaccgactactttgggtgtccgtgtttctcatttttcttcatattgtcttatggtcacagcatatatatacatatactgtgatccgactcggaccgatg

SEQ ID NO: 3617 - DNA, 203 bp, synthetic construct
  source 1..203: mol_type = other DNA
ggcgcgccagtccttgcagtatgccctcaaaaacatcaaacctctgttaatacccctaatttgtgcccacgctgtaaaaaaggaaagcattgggcacgagactgccgttccaagacagatgttcaaggcaatcctttgcccccggtttcgggaaactgggtgaggggccagcccctggccccgaaacacgactcggaccgatg

SEQ ID NO: 3618 - DNA, 203 bp, synthetic construct
  source 1..203: mol_type = other DNA
ggcgcgccagtcctctgccgttccaagacagatgttcaaggcaatcctttgcccccggtttcgggaaactgggtgaggggccagcccctggccccgaaacaatgttatggggcaacactgcaggttccaaaagaaccattgcagacctctgtcgagccacaagaggcagcgcgggattggacctctgtcgactcggaccgatg

SEQ ID NO: 3619 - DNA, 203 bp, synthetic construct
  source 1..203: mol_type = other DNA
ggcgcgccagtcctgtgcaggtgcgactcttgtttgtgctggtcgcggcaggtggcgcccaacgtggggctcgagctcgacagttttcttccgccactactctcattaattgaactaagtaagtatatggataaacaagtagcctaaattaaggaggagtagtaaggtatatagttgagagtataaatcgactcggaccgatg

SEQ ID NO: 3620 - DNA, 203 bp, synthetic construct
  source 1..203: mol_type = other DNA
ggcgcgccagtccttaaattttttaactttagacacagaaggcaattcagcagcccagcgtttttggggagaacgatcctcatgcaaaaaaccacttgtgcgatggaaggatccacttaccaatctgtggtatgggccagaccctgtattaatatggggacgagggcatgtttgtgtttttccacaggcgactcggaccgatg

SEQ ID NO: 3621 - DNA, 203 bp, synthetic construct
  source 1..203: mol_type = other DNA
ggcgcgccagtccttaccctccatcattgttataaaaaacttaggaaccaggtccacacagccgccagccaaccaaccatccactcccacgactggagccgatggcagaagagcaggcacgccatgtcaaaaacggactggaatgcatccgggctctcaaggccgagcccatcggctcactggccgtccgactcggaccgatg

SEQ ID NO: 3622 - DNA, 203 bp, synthetic construct
  source 1..203: mol_type = other DNA
ggcgcgccagtcctggtatacaatgacagagatcttctagactaggtgcgagaggccgaggaccagaacaacatccgcctaccctccatcattgttataaaaaacttaggaaccaggtccacacagccgccagccaaccaaccatccactcccacgactggagccgatggcagaagagcaggcacgcccgactcggaccgatg

SEQ ID NO: 3623 - DNA, 203 bp, synthetic construct
  source 1..203: mol_type = other DNA
ggcgcgccagtccttcaagcccacctgaaattgtctccggcttccctctggccgaacgatatcggtagttaattaaaacttagggtgcaagatcatccacaatgtcaccacaacgagaccgaataaatgccttctacaaagacaacccacatcctaagggaagtaggatagttattaacagagaacatcgactcggaccgatg

SEQ ID NO: 3624 - DNA, 203 bp, synthetic construct
  source 1..203: mol_type = other DNA
ggcgcgccagtccttgatgtcacccagacatcaggcatacccactagtgtgaaatagacatcagaattaagaaaaacgtagggtccaagtggtttcccgttatggactcgctatctgtcaaccagatcttataccctgaagttcacctagatagcccgatagttaccaataagatagtagctatcctgcgactcggaccgatg

SEQ ID NO: 3625 - DNA, 203 bp, synthetic construct
  source 1..203: mol_type = other DNA
ggcgcgccagtccttaggcctccaagggctccccaaaatctgaatttctgagtagtcttcatcccctctcctgctctaaggtcaggtccatcctctctggtccttaccttgatgacaaggatccagccttctggtgtttttgagcatttcaaaggtctgcatagaaaggaacagccactaggtccattcgactcggaccgatg

SEQ ID NO: 3626 - DNA, 203 bp, synthetic construct
  source 1..203: mol_type = other DNA
ggcgcgccagtcctccttaccttgatgacaaggatccagccttctggtgtttttgagcatttcaaaggtctgcatagaaaggaacagccactaggtccattatgggacccctcattgtactcctaatgattttgctcttcggaccctgcattcttaatcgattagtccaatttgttaaagacaggatacgactcggaccgatg

SEQ ID NO: 3627 - DNA, 203 bp, synthetic construct
  source 1..203: mol_type = other DNA
ggcgcgccagtccttcagcctttttagagagactcaaggaggcctatcgcagatacactccttatgaccctgaggacccagggcaagaaaccaatgtgtccatgtcattcatctggcagtccgccccggatatcgggcgaaagttagagcggttagaagatttaaagagcaagaccttaggagacttacgactcggaccgatg

SEQ ID NO: 3628 - DNA, 203 bp, synthetic construct
  source 1..203: mol_type = other DNA
ggcgcgccagtcctcaaagtagacggcatctctgcggggatacacgccgctcacgtaaaagcggcgacaacccctccggccggaacggcatcaggaccgacatgaaaggtccagcattctcaaaaccccttaaagataagattaacccgtggggccccctgatagtcctggggatcttaataagggcacgactcggaccgatg

SEQ ID NO: 3629 - DNA, 203 bp, synthetic construct
  source 1..203: mol_type = other DNA
ggcgcgccagtcctgaccgaagccgcgccgcgcgtcttgtctgctgcagcatcgttctgtgttgtctctgtctgactgtgtttctgtatttgtctgagaatatgggccagactgttaccactcccttaagtttgaccttaggtcactggaaagatgtcgagcggatcgctcacaaccagtcggtagatcgactcggaccgatg

SEQ ID NO: 3630 - DNA, 203 bp, synthetic construct
  source 1..203: mol_type = other DNA
ggcgcgccagtcctcctcaaagtagacggcatcgcagcttggatacacgccgcccacgtgaaggctgccgaccccgggggtggaccatcctctagactgacatggcgcgttcaacgctctcaaaaccccttaaaaataaggttaacccgcgaggccccctaatccccttaattcttctgatgctcagacgactcggaccgatg

SEQ ID NO: 3631 - DNA, 203 bp, synthetic construct
  source 1..203: mol_type = other DNA
ggcgcgccagtccttacaggctctctacttagtccagcacgaagtctggagacctctggcggcagcctaccaagaacaactggaccatcctctagactgacatggcgcattcaacgccatgctcccaaacttccctggctgttcctaatcatttctccctagtgtctcatgtgactgtcccatctgagcgactcggaccgatg

SEQ ID NO: 3632 - DNA, 203 bp, synthetic construct
  source 1..203: mol_type = other DNA
ggcgcgccagtcctcaaagggacctcaaggctttccgagggacactaggctgactccatcgagccagtgtagagataagcttttgtttctgtttattttttatgggaccccttattgtactcctaatgattttgctcttcggaccctgcattcttaatcgattagtccaatttgttaaagacaggatacgactcggaccgatg

SEQ ID NO: 3633 - DNA, 203 bp, synthetic construct
  source 1..203: mol_type = other DNA
ggcgcgccagtcctcgcccgaacagggaccctcggataagtgacccttgtctctatttctactattttgtgttcgtcttgttttgtctctatcttatctggctattatcacaagagcggaacggactcaccacagggaactgcagtctcgcctacagagaagaggtaggttacggtgagccattggaacgactcggaccgatg

SEQ ID NO: 3634 - DNA, 203 bp, synthetic construct
  source 1..203: mol_type = other DNA
ggcgcgccagtcctctattatcacaagagcggaacggactcaccacagggaactgcagtctcgcctacagagaagaggtaggttacggtgagccattggaaatgggggtctcgggatcaaaagggcagaaactctttgtttctgttctacaaagactcctctcagagaggggtcttcatgtgaaagagcgactcggaccgatg

SEQ ID NO: 3635 - DNA, 203 bp, synthetic construct
  source 1..203: mol_type = other DNA
ggcgcgccagtcctaggctttaaatccattagattggacacaatatttcatttttataggtgttggagccctgcttttagtcattgtacttatgattttccccattgttttccagtgccttgcgaagagccttgaccaagtgcagtcagatcttaacgtgcttcttttaaaaaagaaaaaagggggaacgactcggaccgatg

SEQ ID NO: 3636 - DNA, 203 bp, synthetic construct
  source 1..203: mol_type = other DNA
ggcgcgccagtcctttgtttttctgagaacatcagctctggtattttcccatgccttgcaaaatggcgttactgcagttagctggctaagccttatgaaggggtctttcattcccccctctttctgtaaactgaataaaatcttttattcacgtgatttttaatcttttactgtcttaagtagccaaccgactcggaccgatg

SEQ ID NO: 3637 - DNA, 203 bp, synthetic construct
  source 1..203: mol_type = other DNA
ggcgcgccagtcctgccgaaaccgcgccgcgcgtcttatctgtctcagtgttattttgtcatttgtctggttcgttattgttttggaccgtttctaaaaatatgggacagaccgtaaccactcctttgagtctgaccctagaacactggggagacgtccagcgcattgcgtccaaccagtccgtggaccgactcggaccgatg

SEQ ID NO: 3638 - DNA, 203 bp, synthetic construct
  source 1..203: mol_type = other DNA
ggcgcgccagtcctcctactgggaaaagtagggaaatacccttcacaggacgaaaaggcgctgctgggggacaggaggagggttcgcagccctgagacttaaagaaggggacgagccctccgcctgaacctgaggagtgcaaaggcagcgctagtaagaaaaccgccgtggtgaatctagatagagaccgactcggaccgatg

SEQ ID NO: 3639 - DNA, 203 bp, synthetic construct
  source 1..203: mol_type = other DNA
ggcgcgccagtcctaagaaggggacgagccctccgcctgaacctgaggagtgcaaaggcagcgctagtaagaaaaccgccgtggtgaatctagatagagacatggcgacgcaaggctcaaaggagaagaagggataccctgagctcaaagaggtcattaagacaacatgtaaaataaaggtggggccccgactcggaccgatg

SEQ ID NO: 3640 - DNA, 203 bp, synthetic construct
  source 1..203: mol_type = other DNA
ggcgcgccagtcctcaaaggttcccatggtccgggaccgaagggttatacgataccttggtctatacaggattgctgggacatggaatcaatatataattaatggaggaagcaccaagaagaaggccaggaggcagcagagaagctgaagggatatttcggtattatgaggattgggaatgctgggaccgactcggaccgatg

SEQ ID NO: 3641 - DNA, 203 bp, synthetic construct
  source 1..203: mol_type = other DNA
ggcgcgccagtccttctccatggaatactcctatattcatcattaagaaaaaatcaggtagctggcgtcttttacaggatctaagagccgttaataaggtaatggtccccatgggagcccttcagcctggtcttccctctcctgtagccatccccctaaactatcacaaaattgttattgaccttaagcgactcggaccgatg

SEQ ID NO: 3642 - DNA, 203 bp, synthetic construct
  source 1..203: mol_type = other DNA
ggcgcgccagtcctctcagcctgcatatacgatcaaaaggaggatggcccccgctggctccctgagcgactaattagacacatcaataatcagacagcccccttgtgtgacaggccaagtaacccaaatacagccccagggccaaaaggctcgccctgaggagctccttttctcttcttccaggaagacgactcggaccgatg

SEQ ID NO: 3643 - DNA, 203 bp, synthetic construct
  source 1..203: mol_type = other DNA
ggcgcgccagtcctcttgtgtgacaggccaagtaacccaaatacagccccagggccaaaaggctcgccctgaggagctccttttctcttcttccaggaagaatgctctgcatcctcatcctcctactgcacccacgcctctgcccagtcacaaagggaggacttggaaagccatccggagacatttaccgactcggaccgatg

SEQ ID NO: 3644 - DNA, 203 bp, synthetic construct
  source 1..203: mol_type = other DNA
ggcgcgccagtcctcgtggggctcgatgccggcctccgtggaccgccgtcccctgtaaccggttccctgcacggccgtcccgattaaccgattccccgcacggagcaccgcggaccacccgaccgcgagccgactcctggagttcgttcctcatttcgacggcggcattactcaagtaagacccaatccgactcggaccgatg

SEQ ID NO: 3645 - DNA, 203 bp, synthetic construct
  source 1..203: mol_type = other DNA
ggcgcgccagtcctggagcaccgcggaccacccgaccgcgagccgactcctggagttcgttcctcatttcgacggcggcattactcaagtaagacccaatcatgggacaagcatcttcacacagtgaaaatgatctctttataagtcacttaaaggaatctctcaaggtgcgtagaattcgggttcgccgactcggaccgatg

SEQ ID NO: 3646 - DNA, 203 bp, synthetic construct
  source 1..203: mol_type = other DNA
ggcgcgccagtcctatgagcttaatgataagaactggaaatcctttttctcaaggacgtggtccagattaagtttgcacgaggacgaggacaaggaaaacgatggagactctttgccaacgtttaaatgtgtgtcaggacaaaatactaacacattatgaaaatgatagtacagacctacgtgaccatcgactcggaccgatg

SEQ ID NO: 3647 - DNA, 203 bp, synthetic construct
  source 1..203: mol_type = other DNA
ggcgcgccagtccttacgaacatattttgtgcagtttaaagatgatgcagaaaaatatagtaaaaataaagtatgggaagttcatgcgggtggtcaggtaatattatgtcctacatctgtgtttagcagcaacgaagtatcctctcctgaaattattaggcagcacttggccaaccaccccgccgcgacgactcggaccgatg

SEQ ID NO: 3648 - DNA, 203 bp, synthetic construct
  source 1..203: mol_type = other DNA
ggcgcgccagtcctcaagcagaaccggacagagcccattacaatattgtaaccttttgttgcaagtgtgactctacgcttcggttgtgcgtacaaagcacacacgtagacattcgtactttggaagacctgttaatgggcacactaggaattgtgtgccccatctgttctcagaaaccataatctacccgactcggaccgatg

SEQ ID NO: 3649 - DNA, 203 bp, synthetic construct
  source 1..203: mol_type = other DNA
ggcgcgccagtcctattatttacaaggaacttttaaaaactattatgtactgtttgctgacgatgcgaaaagatatggtacaactggagaatgggaagtaaaagttaataaggaaactgtgtttgctcctgtcaccagctccacgcctccagggtcgccaggaggacaagcagacacaaacaccaccccgactcggaccgatg

SEQ ID NO: 3650 - DNA, 203 bp, synthetic construct
  source 1..203: mol_type = other DNA
ggcgcgccagtcctcagctccacgcctccagggtcgccaggaggacaagcagacacaaacaccacccccgcgacccccaccacctccacaaccgccgttgactccacgtccagacagctcaccacatcaaaacagccacaacaaaccgaaaccagaggaagaaggtacggacggaggccctccagcaacgactcggaccgatg

SEQ ID NO: 3651 - DNA, 203 bp, synthetic construct
  source 1..203: mol_type = other DNA
ggcgcgccagtcctagttagattgctgtggcagaggccttccctttcataaggtgaggaacgcctggaagggaatctgtaggcagtgtaagcatttttatcatgattggtaaagaggtcaccgtgcaagatattattctggagctcagtgaggtgcagcccgaagtgctaccagttgacctgttttgtcgactcggaccgatg

SEQ ID NO: 3652 - DNA, 203 bp, synthetic construct
  source 1..203: mol_type = other DNA
ggcgcgccagtcctccacagaatttggtattagagctttccaacagctactgaccggagatctgcagctcctgtgccctgactgtcgcggaaactgcaaacatgacggatcctaattctaaaggtagtacatctaaagaagggtttggtgattggtgtttattggaagctgactgtagtgatgtagaacgactcggaccgatg

SEQ ID NO: 3653 - DNA, 203 bp, synthetic construct
  source 1..203: mol_type = other DNA
ggcgcgccagtcctaggggaatgcagccaaaccatgacctcaggaaggaaagtgcatgactcacagggaggagctgcttacccatggaatgcagccaaaccatgacctcaggaaggaaagtgcatgacagacatgttttgcgagcctaggaatcttggccttgtccccagttaaactggacaaaggcccgactcggaccgatg

SEQ ID NO: 3654 - DNA, 203 bp, synthetic construct
  source 1..203: mol_type = other DNA
ggcgcgccagtcctcaaaagtaccactgctttacctgctgtaaaagactctgtaaaagactcctaggtaagtaatccctttttttttgtatttccaggttcatgggtgctgctctagcacttttgggggacctagttgccagtgtatctgaggctgctgctgccacaggattttcagtggctgaaattcgactcggaccgatg

SEQ ID NO: 3655 - DNA, 203 bp, synthetic construct
  source 1..203: mol_type = other DNA
ggcgcgccagtcctggcctaactcctcaaacatatgctgtaattgctggtgctcctggggctattgctgggtttgctgctttaattcaaactgttagtggtattagttccttagctcaagtagggtataagttctttgatgattgggatcacaaagtttccactgtaggcctctatcagcaatcaggccgactcggaccgatg

SEQ ID NO: 3656 - DNA, 203 bp, synthetic construct
  source 1..203: mol_type = other DNA
ggcgcgccagtcctcgaacctctccactcagtccctctagacaataaagtccgagatgtcctaaagtcaacatgaaaaaaacaggcaacaccactgataaaatgaactttctacgtaagatagtgaaaaattgcagggacgaggacactcaaaaaccctctcccgtgtcagcccctctggatgacgatcgactcggaccgatg

SEQ ID NO: 3657 - DNA, 203 bp, synthetic construct
  source 1..203: mol_type = other DNA
ggcgcgccagtcctgagaggcaatcttcctcccgtgaaggacacaagcagtagctcacaatcatctcgtgtttcagcaaagtgtgcataattataaagtgctgggtcatctaagcttttcagtcgagaaaaaaacagtagatcagaagaacaactggcaacacttctcatcctgagacctacttcaagcgactcggaccgatg

SEQ ID NO: 3658 - DNA, 203 bp, synthetic construct
  source 1..203: mol_type = other DNA
ggcgcgccagtccttgggtcatctaagcttttcagtcgagaaaaaaacagtagatcagaagaacaactggcaacacttctcatcctgagacctacttcaagatgctcgatcctggagaggtctatgatgaccctattgacccaatcgagttagaggctgaacccagaggaacccccactgtccccaaccgactcggaccgatg

SEQ ID NO: 3659 - DNA, 203 bp, synthetic construct
  source 1..203: mol_type = other DNA
ggcgcgccagtcctggacttgcataggccattacaaccatgtactaataaatgctattgcaaaaaatgctgttatcactgtgagctttgcttcctgcagaagggcttaggagtgcgttatcatgtctctaggaaaagaagaaaaacaagcactcaagataatcaagaccctatacggcagcagtaagtcgactcggaccgatg

SEQ ID NO: 3660 - DNA, 203 bp, synthetic construct
  source 1..203: mol_type = other DNA
ggcgcgccagtcctgctgcagcttgagaataaggacttggtgttacaacatctgcctgaccctcctcatattcatcaggacagcagtgggatacctgcagtatgggctccagcaactccaagaggcagcaacagggcttgctcaagctctggcgagggctgcgagggaagcctggggcagactgggtgcgactcggaccgatg

SEQ ID NO: 3661 - DNA, 203 bp, synthetic construct
  source 1..203: mol_type = other DNA
ggcgcgccagtcctgcaccgaccgctgagttgctgagcgtcggagagggacgactcaggtagggtgagagcctacgagttttttgctacctagtcagcgagaaaggctaggccgcgacaggggcgcgggtcccattagtggcaaccaacccagttggacgaagggttggtaggggacgggtcggagcacgactcggaccgatg

SEQ ID NO: 3662 - DNA, 203 bp, synthetic construct
  source 1..203: mol_type = other DNA
ggcgcgccagtccttgtttgtgttatatagacatcttggtgtattgtaacataatatgtggtagcctgtacggatcccacatagggggttgtatatcatatgttgttgttgtgtgtaccctagtgtgctattgtggcaccattctttttctatttttgtttttttttttacagttaaataaagcaacccgactcggaccgatg

SEQ ID NO: 3663 - DNA, 203 bp, synthetic construct
  source 1..203: mol_type = other DNA
ggcgcgccagtcctgttgttgttgtgtgtaccctagtgtgctattgtggcaccattctttttctatttttgtttttttttttacagttaaataaagcaaccatggtggcacaacgtgcaaggcgtcgcaagcgtgcatccgccacacagctttataggacctgcaaggcctcaggcacatgccccccacgactcggaccgatg

SEQ ID NO: 3664 - DNA, 203 bp, synthetic construct
  source 1..203: mol_type = other DNA
ggcgcgccagtcctagaaaaagacagacatcgtaacgaacggcgacgactgcacaaaatatcagggtactggagaggtagttgtgagtattgctggtcacgatgcagggtccgcatcccacagtaaaagatatcgaattgagtcttgcaccagaggatatccctgtatgcaatgtgcaattagatgaacgactcggaccgatg

SEQ ID NO: 3665 - DNA, 203 bp, synthetic construct
  source 1..203: mol_type = other DNA
ggcgcgccagtcctccacttcccctttgtcttctacactttccactaagtatggaaatgtaacaattccctttgtgtctcctgttgatgtaactttacatactgggcctgatattgtactacctacttcagcacagtggccatatgtgcccctgtcacctgctgacaccacccattatgtgtacatagcgactcggaccgatg

SEQ ID NO: 3666 - DNA, 203 bp, synthetic construct
  source 1..203: mol_type = other DNA
ggcgcgccagtcctctgggcctgatattgtactacctacttcagcacagtggccatatgtgcccctgtcacctgctgacaccacccattatgtgtacatagatggcggggatttctatctttggcctgttacctttcacttctcccgacatcgtcgccgtaaacgtgtctcatatttttttgcagatgcgactcggaccgatg

SEQ ID NO: 3667 - DNA, 203 bp, synthetic construct
  source 1..203: mol_type = other DNA
ggcgcgccagtccttagatggcggggatttctatctttggcctgttacctttcacttctcccgacatcgtcgccgtaaacgtgtctcatatttttttgcagatggcactctggcgctctagtgacaacttggtgtacctgcctcccactcccgtgtctaaagttctcagcacggacgactatgtgacacgactcggaccgatg

SEQ ID NO: 3668 - DNA, 203 bp, synthetic construct
  source 1..203: mol_type = other DNA
ggcgcgccagtcctgagtgcagccacgcagatataagggcactggaacagctgctactaggcacattgaagctcgtgtgtcctcgctgcgtgtaacaggacatggacgataatacaggtacagaggggggcgcatgttccgaatcggaacgggcgggtggatggtttatagtggaagccattgtagatcgactcggaccgatg

SEQ ID NO: 3669 - DNA, 203 bp, synthetic construct
  source 1..203: mol_type = other DNA
ggcgcgccagtccttttgcttattttttatacctgcttgttttttacatttttatactgtaatggtaattgctacttagtccctttaataaacgtgttacaatggtagctgtccgtgcccctcgacgcaaacgagcatcagctacagacttatacaaaacatgtaaggccgctggtacgtgccctcctcgactcggaccgatg

SEQ ID NO: 3670 - DNA, 203 bp, synthetic construct
  source 1..203: mol_type = other DNA
ggcgcgccagtcctccagacaagctggacaagaagtgtgttacagaattgaagcacaatgttgtatgtgtaatagtatagtgcagctagctgtgcagagcagtcgacagaacgttcgagtgctggagcagatgttaatggaagacgtgtccttggtgtgccatcagtgtgctgcacagtaaacctgcacgactcggaccgatg

SEQ ID NO: 3671 - DNA, 203 bp, synthetic construct
  source 1..203: mol_type = other DNA
ggcgcgccagtcctctacaaatattaatgtaggccctgacctttcacctcctgagtctccgccctttattagtacacgtcctgtatcaccttcttttgactctgttatggtattaggatgggattttatattgcatcccagttatatgtggcgtaagcgccgtaaacctgtaccatatttttttgcagcgactcggaccgatg

SEQ ID NO: 3672 - DNA, 203 bp, synthetic construct
  source 1..203: mol_type = other DNA
ggcgcgccagtcctacctataaaacaggacatacaacgttacagaatagtgtgtggttgtacacagtgtggacggtcagttaaacttgttgtcagtagtacaggcgcggacatacaacagctgcatcagatgcttctggacacactgggcattgtgtgtccattgtgtgcctgcgtggagtgactgcacgactcggaccgatg

SEQ ID NO: 3673 - DNA, 203 bp, synthetic construct
  source 1..203: mol_type = other DNA
ggcgcgccagtcctaggcgcggacatacaacagctgcatcagatgcttctggacacactgggcattgtgtgtccattgtgtgcctgcgtggagtgactgcaatggcggatgatacaggtacagaggaggggctagggtgttctggttggttttctgtagaagcaatagtagaaaggactacagaaaatcgactcggaccgatg

SEQ ID NO: 3674 - DNA, 203 bp, synthetic construct
  source 1..203: mol_type = other DNA
ggcgcgccagtcctgccctgatattgctttacctgtacctactgcagaaaccatttttaccccaactgtacctgtacagccttctggtcctatatatatatatgggtccgattttatattgcatcctagcttgtatgtcattccacgcaaacgtaaacgtttgtcatatttttttgcagatgtggcgacgactcggaccgatg

SEQ ID NO: 3675 - DNA, 203 bp, synthetic construct
  source 1..203: mol_type = other DNA
ggcgcgccagtcctgaaagtaacaatcctacttttatagacagggagtaaccgaaataggtttaggaccgaaaacggtacatataaaagcactgtgtacaacacccaggacatccatggatcgtcagttatttgaaaatacagaagagcgaccacgtacattgcaccagctatgtgaagttgtgaatacgactcggaccgatg

SEQ ID NO: 3676 - DNA, 203 bp, synthetic construct
  source 1..203: mol_type = other DNA
ggcgcgccagtccttacttttatagacagggagtaaccgaaataggtttaggaccgaaaacggtacatataaaagcactgtgtacaacacccaggacatccatggatcgtcagttatttgaaaatacagaagagcgaccacgtacattgcaccagctatgtgaagttgtgaataaaccattgctggagcgactcggaccgatg

SEQ ID NO: 3677 - DNA, 203 bp, synthetic construct
  source 1..203: mol_type = other DNA
ggcgcgccagtcctagggaggcaagtggcgggaaagagcaaaatggaggctcacaacatagtgtgtgtagcagagatgggagcatagggtcaggaagtgatatggatgtggatagacaggatataatgccactgcaacaaatacaagatatattaaaatgtagtaatgtgcaggccaagctatattgtcgactcggaccgatg

SEQ ID NO: 3678 - DNA, 203 bp, synthetic construct
  source 1..203: mol_type = other DNA
ggcgcgccagtcctaccaattaaataatgcaaactggaaatgtttttttgaaaggacatggtccagattagatttggataacgacgaagacaaggaaaacgatggagacgctatgccaacgtttagatgcgtgccaggagaaaattctagactgttttgaaagagatagcaaaaatattacagaccatcgactcggaccgatg

SEQ ID NO: 3679 - DNA, 203 bp, synthetic construct
  source 1..203: mol_type = other DNA
ggcgcgccagtccttacttatacttttattttggtttgttgtggcatcatcctacataaccacatttacactatatatactttttttttacttccctttattatgtttctatagccatgctgtgtggttaattaacacacaataaatcacagtttttttgtattgtatgtatttgtgtgttatatatacgactcggaccgatg

SEQ ID NO: 3680 - DNA, 203 bp, synthetic construct
  source 1..203: mol_type = other DNA
ggcgcgccagtccttatgtttctatagccatgctgtgtggttaattaacacacaataaatcacagtttttttgtattgtatgtatttgtgtgttatatataatggttgcccaccgggcacgcagacgtaagcgggcatcagcaacgcagctatatcaaacatgtaaacaatctggcacatgtcctgagcgactcggaccgatg

SEQ ID NO: 3681 - DNA, 203 bp, synthetic construct
  source 1..203: mol_type = other DNA
ggcgcgccagtccttagttatacagggctccacatttgcgttatggcctgtttattttttgaaacgtaggcgtcgtaaacgtattccctattttcttgcagatggcggtgtggcggcctagtgacagcaaggtttatctgcctcctacccctgtatcaaaggtcattacaacggatgcctatgtaaaacgactcggaccgatg

SEQ ID NO: 3682 - DNA, 203 bp, synthetic construct
  source 1..203: mol_type = other DNA
ggcgcgccagtcctacggtttcacaaaatttcacatatgtggaccgggtcgtgcctgacatgctggagacacacaacagcaactgaatcagcagtataatcatgcacggtaacgtaccaacacttccacaatatattatagaacttataccacaaactgagattgacctgcaatgccatgagcaattgcgactcggaccgatg

SEQ ID NO: 3683 - DNA, 203 bp, synthetic construct
  source 1..203: mol_type = other DNA
ggcgcgccagtccttagacgggacgaacaacatccttgttacctaattgaaacacagtgttgtaggtgtgagtcgttggtgcagttggctgttcagagttcaacaaaagagctgcgtattttacaacaaatgcttatgggcacagtggagcttgtgtgccccctctgcgcaacaaggcgataactgcacgactcggaccgatg

SEQ ID NO: 3684 - DNA, 203 bp, synthetic construct
  source 1..203: mol_type = other DNA
ggcgcgccagtccttgtttaataattgtacagttactaaagggcgtaaccgaaaagggtccgaccgaaaacggtacatataaaaaccaacccaaaaaacctgatctggggccactatgtctgcacgttgcggctccacagctagaactttatttgaattatgtgaccagtgcaatataacattgcctacgactcggaccgatg

SEQ ID NO: 3685 - DNA, 203 bp, synthetic construct
  source 1..203: mol_type = other DNA
ggcgcgccagtcctcattcttaacatctggtcctgacatagtgtttccttctgttcctgcaggtacaccatatttgcctgtgtcaccttctatacctgccatatctgtactgattcgcggtactgattattatttgaatcctgcatactatttcagaaaacgccgaaagcgcatattagcatattaggcgactcggaccgatg

SEQ ID NO: 3686 - DNA, 203 bp, synthetic construct
  source 1..203: mol_type = other DNA
ggcgcgccagtccttatctgtactgattcgcggtactgattattatttgaatcctgcatactatttcagaaaacgccgaaagcgcatattagcatattaggatgtggcaacttaatgaaaaccaagtgtatttaccaccgcccacgcctgttgctacaattgttagcacagatgagtacgtgcaacgccgactcggaccgatg

SEQ ID NO: 3687 - DNA, 203 bp, synthetic construct
  source 1..203: mol_type = other DNA
ggcgcgccagtcctggacttgcaagtaaatttgcaatcatttaaaatagtaacacattgtgtattttgtcactgtttagttcgcctagtagtccattgtactgctactgatataaggcaggttcatcagttgctgatgggcacactaaatatagtgtgccccaactgtgcagctacagcgtgacaacacgactcggaccgatg

SEQ ID NO: 3688 - DNA, 203 bp, synthetic construct
  source 1..203: mol_type = other DNA
ggcgcgccagtcctgaaatgttgatgatctgtaagctttactaacgctaacgctggcattgctactaacccatactaactaacaaacccatactaactaacatggttcgtgcaaaacgtactaaacgtgcctctgttacagatatatacagaggctgcaaagctgctggtacatgtccaccagatgtacgactcggaccgatg

SEQ ID NO: 3689 - DNA, 203 bp, synthetic construct
  source 1..203: mol_type = other DNA
ggcgcgccagtcctaacctgcagaggaggagcagtgtctcactccctacaagatcgtagctggctgtggttgcggtgcaagacttcgtttatacgtgcttgctacaaatttaggaattcgagcgcaacaggaacttttgctgggtgatatacaactggtgtgtccggagtgccgaggcagacttcgcccgactcggaccgatg

SEQ ID NO: 3690 - DNA, 203 bp, synthetic construct
  source 1..203: mol_type = other DNA
ggcgcgccagtcctcctaaattttcaatcatacacataataaccattttagtagcgttgcctttcagtacagtctaggtgattgttgaaagacttccaagcatggcagaattatcaacgcgttacaacttgcctgcaaatgttacggaaaatagtataaatcttgaccttaattccacagcacgatggcgactcggaccgatg

SEQ ID NO: 3691 - DNA, 203 bp, synthetic construct
  source 1..203: mol_type = other DNA
ggcgcgccagtcctttaatttctttaaatttgaccagaataatattttgtcagtgaatatattctcatatcacttgattaaaaacagaaaattaccctaacatgaagaccacatgtttccttatcagtcttatcttaattcaagggacaaaaaatctccccattttagagatagctagtaataatcaacgactcggaccgatg

SEQ ID NO: 3692 - DNA, 203 bp, synthetic construct
  source 1..203: mol_type = other DNA
ggcgcgccagtccttccggcccctgaatgtggctaaccttaaccctgcagccgttgcccataatccaatgggtttgcggtcgtaatgcgtaagtgcgggatgggaccaactactttgggtgtccgtgtttcctgtttttcttttgattgcattttatggtgacaatttatagtgtatagattgtcatccgactcggaccgatg

SEQ ID NO: 3693 - DNA, 203 bp, synthetic construct
  source 1..203: mol_type = other DNA
ggcgcgccagtcctggaacacccacctgctagccccgctgctctctttgctttcctcctcgcttcggtctcccccaactcctagcatcccctcctatcgctatggtctactccctctcgcgatgcgctctctgttcgctgaaggggtcctctggaggtgatttctctgttctactccgtgtggcttcccgactcggaccgatg

SEQ ID NO: 3694 - DNA, 203 bp, synthetic construct
  source 1..203: mol_type = other DNA
ggcgcgccagtcctttctgtgactatattatctttcatttttttgcaacttttgcttagtctgtaagttttgggtgctatttctgttactgcgagcccgtaatggaaacgacaaagaaccggcgtgtgcgatttactggaggccttcatgagccagcgcaagattctacgatgtgtgggaatgctgagcgactcggaccgatg

SEQ ID NO: 3695 - DNA, 203 bp, synthetic construct
  source 1..203: mol_type = other DNA
ggcgcgccagtcctgaatgacaaggctgcacagattatagagaccagccagatccgtaaattaatggtgtctacacgactggaggccataccagctctgtgatggagaacaggtttcagaacgatactctgttctcagagtggttcggtcagagtttgtccgatgtaagatttccggacaatgtcacccgactcggaccgatg

SEQ ID NO: 3696 - DNA, 203 bp, synthetic construct
  source 1..203: mol_type = other DNA
ggcgcgccagtccttatcagaagtgtttaatttaacccaaacgcaccccgaaaacagcgaaccgattttcgattcgaacattttctccccaaacccggagaatgaaatccttgaaaaaattaaaagaattagaaacctcagacgtattcaacatcttacacgtccgaactatcctaaaggtgatcaagcgactcggaccgatg

SEQ ID NO: 3697 - DNA, 203 bp, synthetic construct
  source 1..203: mol_type = other DNA
ggcgcgccagtcctggcaaaaaaggcagaggttgagcgaattcatcaatacctatgcacagagcatcagcaaattcgctgttgaactcggtttcgggatccatgatgtggcgaaaccaatcttccggcagacgcccctccaagcgtctttctgataacgaagccaccttatctacaatcaactctattcgactcggaccgatg

SEQ ID NO: 3698 - DNA, 203 bp, synthetic construct
  source 1..203: mol_type = other DNA
ggcgcgccagtccttcatttgtgttagatgagcggcaaatgactcatctttctgggatttatatgggaatattctggtaaaagtgcatgtatcaattttagtcgtttttggatttctgtaatgttacgatttgctatgtgtattttcatgatgtcgagcatgtttattttattttttacacagataagcgactcggaccgatg

SEQ ID NO: 3699 - DNA, 203 bp, synthetic construct
  source 1..203: mol_type = other DNA
ggcgcgccagtcctcgaatggacatttcgacaagtctttttccctactatatataagatgttgttcccgtcgtgttaacttttccaaataaaaaaataaccatggaacttttactatttgtaatgtcactcatattactaaccttctcaaaagcaatacctcttttcaaccataattctttctattttcgactcggaccgatg

SEQ ID NO: 3700 - DNA, 203 bp, synthetic construct
  source 1..203: mol_type = other DNA
ggcgcgccagtcctactgtctattaagcttcaattttataaacatgttttccagaacaaaaatgcaaacaaggaaatgataacgacgtcattcaaagcgccatgaaattatccggactatactgtgatgcggacatcacacacacacaaccgttgagtgataatacgcatcaagatcctatatattctcgactcggaccgatg

SEQ ID NO: 3701 - DNA, 203 bp, synthetic construct
  source 1..203: mol_type = other DNA
ggcgcgccagtcctgatgtgcagacatctagaggtgacaagccaggggaattaccttattttccgtatacaactataaaaaacttgggaggcgcaaacggtatgttttccataataaatccgagtgatgatttctggactaaggacaaatatatcatgttgactatcaaaggccccatggagtgggagcgactcggaccgatg

SEQ ID NO: 3702 - DNA, 203 bp, synthetic construct
  source 1..203: mol_type = other DNA
ggcgcgccagtcctaaccctagccataaccgcataactctgttcacaaccctaacactaatcctcgcatccgcacctaacgctgcccctctttcacaccatcaccccctgccgcttcaacttcaccttcttcctccatctcgccccgcttgtttctacacttgtccgcccctctattcttactctaggcgactcggaccgatg

SEQ ID NO: 3703 - DNA, 203 bp, synthetic construct
  source 1..203: mol_type = other DNA
ggcgcgccagtcctcaccccctgccgcttcaacttcaccttcttcctccatctcgccccgcttgtttctacacttgtccgcccctctattcttactctaggatgccgctaacggtgcgtgccgggcacgcgccatatcgtcttccgctctccaattattggtggctactcttgggtcgacattcccttcgactcggaccgatg

SEQ ID NO: 3704 - DNA, 203 bp, synthetic construct
  source 1..203: mol_type = other DNA
ggcgcgccagtcctccacccctccccgtcacagaccagcaaacaccttgccacatcgacatcgcgggcggcaaattaaaaaaaaaaataacataaatatagtgaaagagaggcccccgtcccacataaggacagaagaacaggcaaaaaaaaaaacccgtccgttattcacacagcattcggaaagcccgactcggaccgatg

SEQ ID NO: 3705 - DNA, 203 bp, synthetic construct
  source 1..203: mol_type = other DNA
ggcgcgccagtcctcaaacctcgcactccgtactttaagaaggaaacctccatcgttccggcttctgtattgcactcctcggatttcgatttagaaaacagctgtacgactgtcttccataactttctaacagccatatcggcagatccacttcagagaaaacgaactcgaaacaccactaaaaacagcgactcggaccgatg

SEQ ID NO: 3706 - DNA, 203 bp, synthetic construct
  source 1..203: mol_type = other DNA
ggcgcgccagtcctcggtttacctttttgctgttgtggttctttgttcttgctggtttgctttggatccgttgtttaatatgtgggcgtaacccttcgacgttgtggtatgacggcgatcttatattaaagatcgcctcgctggacttagtggacgctagtgatcacaaaagagaaggaaaacccagccgactcggaccgatg

SEQ ID NO: 3707 - DNA, 203 bp, synthetic construct
  source 1..203: mol_type = other DNA
ggcgcgccagtcctggcgggattagttttatcggggcgttcgtaattctgatagtcattttgtgtaattggtataagaaagacaagcagaggtctttgttttgggatgaagagaaaaaaccggatgtacaaatgaggagggatgtaaagacttgcagatgaggttctcatagattgttattagtgattcgactcggaccgatg

SEQ ID NO: 3708 - DNA, 203 bp, synthetic construct
  source 1..203: mol_type = other DNA
ggcgcgccagtcctcgacggaagtgcgttggcatcaaaacaggaaatgcaatataaaataaccaactacatggtccccgctaaaaacggaactgcgggctctagcttatttaacgagaaggaagatagcgaaagtgacgattccatgcattttgactacagctctaatcccaatcccaagaggcagagcgactcggaccgatg

SEQ ID NO: 3709 - DNA, 203 bp, synthetic construct
  source 1..203: mol_type = other DNA
ggcgcgccagtcctaataccgcatactgtctgatgaggtcaaagtgatattttttcggggttagtcgattaataaaagctattactctgttgtgtgttacgctatcggctgccagggataaaagttcgatttttgccgtagcggctagtaatgattctggagacgtgctgtttttgagtgaactaaggcgactcggaccgatg

SEQ ID NO: 3710 - DNA, 203 bp, synthetic construct
  source 1..203: mol_type = other DNA
ggcgcgccagtcctttcctttctttttctacaacattatttaaggttccctcatcgatagatatatattttctcttcttcacagcttccacagtatccacaatggcagctcgtgcactcgatttagagttcatccttagttcactcaaaaacagcacgtctccagaatcattactagccgctacggcacgactcggaccgatg

SEQ ID NO: 3711 - DNA, 203 bp, synthetic construct
  source 1..203: mol_type = other DNA
ggcgcgccagtcctgcgggaaagttgtaaataaagcttctgcggttgtgacatcacaggagagtataaagcagttctatgaaaaagagaagtcattactgtccggtgtgaagttttggagactaagtgaaagacattgtcggtttgcgcttgtcggcatctgttttcttttagccttgtatttttgttcgactcggaccgatg

SEQ ID NO: 3712 - DNA, 203 bp, synthetic construct
  source 1..203: mol_type = other DNA
ggcgcgccagtccttaactaatctgcagtcggtattcgagacggtgtcttcaaacgatgctccggtctatgacttttctgaaattctagcggaggaggacgatcaaggaaacggtgtattaaaatgtgatgaaacggaaaccgaaacagatgagccgatgactaagaaaaaccgattataatcggagtcgactcggaccgatg

SEQ ID NO: 3713 - DNA, 203 bp, synthetic construct
  source 1..203: mol_type = other DNA
ggcgcgccagtcctttatatttaacaataatcggaaagattaaatgttcactgggacttctacataggatactaaaaattacgttggcggcatcgtattcagtcgcaaacactacgatggtcattgtgtagagctctgttgattacagatgaatttagctttaaatgtccttggggtattggggtgttcgactcggaccgatg

SEQ ID NO: 3714 - DNA, 203 bp, synthetic construct
  source 1..203: mol_type = other DNA
ggcgcgccagtccttggagaataaaagtccacttccgtagcggccgcaaaaacaagaatgtaaaagaggcagagactgacatataagctttgccttgcgcttttcttacaactcatcttaagcgttattttcaactagtcttcgcgtcgacgtgattaacagcagacagctctctgtcacctggaaaacgactcggaccgatg

SEQ ID NO: 3715 - DNA, 203 bp, synthetic construct
  source 1..203: mol_type = other DNA
ggcgcgccagtcctagcatgtcgggtgagttgaccacaatgaatttgtacaagtagaatgtgtgactaaaatagtatttgctttttttataggattggacgatgacctccaaatgcatgctgtgttggaccgcgattacgaatgccctggctattttaatgttattactagtaatttaccgggcgatacgactcggaccgatg

SEQ ID NO: 3716 - DNA, 203 bp, synthetic construct
  source 1..203: mol_type = other DNA
ggcgcgccagtcctataacgtcgggaatgtgtcagttcaacgctgtcttttttccctaacagtcgtagtatccttaacgcgatcgtagacgtttatgcgagactgccggtaacgctgtcgttatcgttatattttttatttttgttttccatttttaattttatctcggattccgcacagaaaataaacgactcggaccgatg

SEQ ID NO: 3717 - DNA, 203 bp, synthetic construct
  source 1..203: mol_type = other DNA
ggcgcgccagtcctactgccggtaacgctgtcgttatcgttatattttttatttttgttttccatttttaattttatctcggattccgcacagaaaataaaatgttttgtggctctccgtttctcggcatatcttcttggagtctggcatctgcggctctgtgtcctccttcgtgctctttctctgcgcgactcggaccgatg

SEQ ID NO: 3718 - DNA, 203 bp, synthetic construct
  source 1..203: mol_type = other DNA
ggcgcgccagtcctccatccgtcatacaaaatgacctcatcccttaaaaaaacacagtatttaaaaagggagatgaaacataaaatgttttttgtaccagcatgttttctcctcaactaaaccatgtcttgcaactcgtttttgattgcaatcacatagtttcgaattcttaccaagaaatcattttgcgactcggaccgatg

SEQ ID NO: 3719 - DNA, 203 bp, synthetic construct
  source 1..203: mol_type = other DNA
ggcgcgccagtcctttcagcaagtaactgagaggtgggaagctcaaagccaaagtcctaatgtgcagtcaggtgaatttattgaaaaatttgaggctcctggtggtgcaaatcaaagaactgctcctcagtggatgttgcctttacttctaggcctgtacggaagtgttacttctgctctaaaagcttcgactcggaccgatg

SEQ ID NO: 3720 - DNA, 203 bp, synthetic construct
  source 1..203: mol_type = other DNA
ggcgcgccagtcctaccctaactgacacacattccacagctggttctttccgcctcagaaggtacctaaccaagttcctctttcagaggttatttcaggccatggtgctgcgccggctgtcacgccaggcctccgttaaggttcgtaggtcatggactgaaagtaaaaaaacagctcaacgcctttttcgactcggaccgatg

SEQ ID NO: 3721 - DNA, 203 bp, synthetic construct
  source 1..203: mol_type = other DNA
ggcgcgccagtcctcgggaaacgcaaaaaaccagaaaggttaactgaaaaaccagaaagttaactggtaagtttagtctttttgtcttttatttcaggtccatgggtgctgctttaacactgttgggggacctaattgctactgtgtctgaagctgctgctgctactggattttcagtagctgaaattcgactcggaccgatg

SEQ ID NO: 3722 - DNA, 203 bp, synthetic construct
  source 1..203: mol_type = other DNA
ggcgcgccagtcctagattttcttgcacgtgcatgcgtttgcttcggacagcattagcagcggttggtttgaaagagatattcttttgtttctaccagtcgtgaacgtgttgagaaaaagacagcttaggagaacaagagctggggatggtcaagaaggccatcctgaaaggtaaggggggcggtccccgactcggaccgatg

SEQ ID NO: 3723 - DNA, 203 bp, synthetic construct
  source 1..203: mol_type = other DNA
ggcgcgccagtcctctgaatttggaatacgttgttttgagcaactgttactgaaagagctttgtttattttgtcctgcgtgctccagacaacttccccgcaatggcagatcataaaggtactgataatattgatcataatgatgttttagatgggtcttggtgtttaataactgaagctgaatgtgagcgactcggaccgatg

SEQ ID NO: 3724 - DNA, 203 bp, synthetic construct
  source 1..203: mol_type = other DNA
ggcgcgccagtcctaagcttacttgctatctgatttgattggtagacctttgagtgaaatcgcaattcgctgtgaaaattgtatgtgtttgttggattatattgaaaagtacgattgtatttgtcacggtggttattttcatttagttagaggtaattggaggggctgttgtagaaattgttacgaaccgactcggaccgatg

SEQ ID NO: 3725 - DNA, 203 bp, synthetic construct
  source 1..203: mol_type = other DNA
ggcgcgccagtcctacatagcagaatctgaaaggtcaccattcaagattgattctacgtgtaagcattgtcattgtcgcgttagactgtgttgtgtcgccaccgacgcagctatccgtgtgtttgagtgccttcttcaatcagaattttcttttctgtgtcttaagtgctccaaagaattgctacgaacgactcggaccgatg

SEQ ID NO: 3726 - DNA, 203 bp, synthetic construct
  source 1..203: mol_type = other DNA
ggcgcgccagtcctcagctttgcaagtatcagagtacaaagccaagcaggcaatcgaaatgggattgttattaaccagtttaagcaaatcccaatatgcttcagaactatggggtttaacagatacaagtgcagaattgttattaacccctccaagaaatacatttaaaaagaagggatatactgtaacgactcggaccgatg

SEQ ID NO: 3727 - DNA, 203 bp, synthetic construct
  source 1..203: mol_type = other DNA
ggcgcgccagtcctttttatgaaattagtaactttgccaagaggttgtacatatacatttggaacattaaactctttgtaatatttgtaaaacaaaacaaaatgtatgctagagtaaagcgtgttaaaagagactctgttgaaaacttatataaacaatgtcaacttggtgctgactgccctcctgatcgactcggaccgatg

SEQ ID NO: 3728 - DNA, 203 bp, synthetic construct
  source 1..203: mol_type = other DNA
ggcgcgccagtcctaggagaagtattagaagttctaactcgtattcctttgagttctctttctgtacgctgttttgattgccttacattgttatcttttgcagaaaaaatagattgtataattagtggtcaaaacttttatcttgtaaggggtcgctggagatcatattgtagaaattgcattgagaacgactcggaccgatg

SEQ ID NO: 3729 - DNA, 203 bp, synthetic construct
  source 1..203: mol_type = other DNA
ggcgcgccagtccttagatgtttatgatgacttttatttacatcctcatcttcttaggcgacgcaaacgaaaacggttggattttttttaatgttttacagatggctctttggttgcagacagctggacaattgtatcttccaccaagcaagcctgttgctcgtgtactcagtacggatgaatatgtacgactcggaccgatg

SEQ ID NO: 3730 - DNA, 203 bp, synthetic construct
  source 1..203: mol_type = other DNA
ggcgcgccagtcctctccttctgctgtaataactcttcgtcaactattgcttcaagaagtgttcctgacctgtttgaggtgctccagatccctttttcgacatggcagatcctaataaaggtattaattctcttgaattaaatgaggggcatagcgaatggtatgttgtgacagaagctgagtgtattcgactcggaccgatg

SEQ ID NO: 3731 - DNA, 203 bp, synthetic construct
  source 1..203: mol_type = other DNA
ggcgcgccagtcctttcaagaagttacccaaaggctagatttaaaaaccccaaatgtgcaatctggtgaatttatagaaagaagtattgcaccaggaggtgcaaatcaaagatctgctcctcaatggatgttgcctttacttttagggttgtacgggactgtaacacctgctcttgaagcatatgaagcgactcggaccgatg

SEQ ID NO: 3732 - DNA, 203 bp, synthetic construct
  source 1..203: mol_type = other DNA
ggcgcgccagtcctcacaaggctgtatatataaaaaaaagggaagggatggctgccagccaagcatgagctcatacctagggagccaaccagctaacagccagtaaacaaagcacaaggggaagtggaaagcagccaagggaacatgttttgcgagccagagctgttttggcttgtcaccagctggcccgactcggaccgatg

SEQ ID NO: 3733 - DNA, 203 bp, synthetic construct
  source 1..203: mol_type = other DNA
ggcgcgccagtcctggtagtgctattgctcagttgggatatagattttttgctgactgggatcataaagtttcaacagttgggctttttcagcagccagctatggctttacaattatttaatccagaagactactatgatattttatttcctggagtgaatgcctttgttaacaatattcactatttacgactcggaccgatg

SEQ ID NO: 3734 - DNA, 203 bp, synthetic construct
  source 1..203: mol_type = other DNA
ggcgcgccagtcctccccaccgctctcaaagttgacggcatctctgcgtggatacacgccgctcacgtaaaggcggcgacaactcctccggccggagcagcatggaaggtccagcgttctcaaaaccccttaaagataagattaacccgtggggccccctaatagttatagggatcttggtgagggcacgactcggaccgatg

SEQ ID NO: 3735 - DNA, 203 bp, synthetic construct
  source 1..203: mol_type = other DNA
ggcgcgccagtccttagccggcgagttgacaaggaccagtgggggccgggggcttggagagggactccaagtcccgcccttcccggtgggccgggaaatgcatggggccacccagctccgcggcggcctgcagccggggtagcccaagaatccttcgggtgagggcgggtggcatttcctttttctatcgactcggaccgatg

SEQ ID NO: 3736 - DNA, 203 bp, synthetic construct
  source 1..203: mol_type = other DNA
ggcgcgccagtcctttctttgacaaaaatgttaaaggatcaaaagctgcagctgaaagcgcaaaggaaaaatgctgctcagctagaatgtgtagatttggatgacattttggatacggcagcggaagtgaaatccgtcaccgacaatataaaagaaactttactggccggattagaatcagactaaatcgactcggaccgatg

SEQ ID NO: 3737 - DNA, 203 bp, synthetic construct
  source 1..203: mol_type = other DNA
ggcgcgccagtcctaagtggcaatccaacaaattttgtccaaaccattccaaaaataattgatcattttgaagctgagtttccatttgacagatccccacaatggcattgagcagagtagatgtgattaatatgagaatttgggtcttaagtataatctgtgcttgtttaacgtatgtcaacgtcacacgactcggaccgatg

SEQ ID NO: 3738 - DNA, 203 bp, synthetic construct
  source 1..203: mol_type = other DNA
ggcgcgccagtcctaaatagaaactttacttgacatgtggcacgtatcaagaaccaatctgaaaacctacaaagagttacgtaaggctctgacagaagcttcaaaaaaaagacaaagaaaaaaaatttataaattactaggtcacaatataagttcttatatcagtgaaactggttgtctcttccagccgactcggaccgatg

SEQ ID NO: 3739 - DNA, 203 bp, synthetic construct
  source 1..203: mol_type = other DNA
ggcgcgccagtcctcccgttaattcaagaaatggaaaaatataatgaagtgcttccattccgaagcgagttttcgaatttgctcattagaacttactgacgcatgctttatagatcgctcaacttatgtgtcacgtgttcaggcaacattaataaaaagcccatgaacactgcttctcccattcaatacgactcggaccgatg

SEQ ID NO: 3740 - DNA, 203 bp, synthetic construct
  source 1..203: mol_type = other DNA
ggcgcgccagtcctcatgctttatagatcgctcaacttatgtgtcacgtgttcaggcaacattaataaaaagcccatgaacactgcttctcccattcaataatggcattactacagtggatgctggaaaacatttcagatgacaactcaataaaaatgtctcttgaagaacaacatgaaacgtttcaacgactcggaccgatg

SEQ ID NO: 3741 - DNA, 203 bp, synthetic construct
  source 1..203: mol_type = other DNA
ggcgcgccagtcctctgcttttcgttataatagcttcaacccttctgtgtaaactaggaactcatcaacattgaaaattttgaaagcttcagtacttgaatatgaggggcaaaaaacgtaaaactgtttgtaaggccaaaggtaaactcacttctaaaagctgcatgtgtactaaagccaatgctcgacgactcggaccgatg

SEQ ID NO: 3742 - DNA, 203 bp, synthetic construct
  source 1..203: mol_type = other DNA
ggcgcgccagtccttgacgacggaaacatgtgagtttttactgtatgggacaatacttttcgtcttagaaacaaactcatttcttaatttctcgttcgcagcatatatcaggccggaggtattacatactgcactcctatatatacgagtacaacaatcatacatgaaattaaacctacgcctaacaacgactcggaccgatg

SEQ ID NO: 3743 - DNA, 203 bp, synthetic construct
  source 1..203: mol_type = other DNA
ggcgcgccagtccttgacctactgggagcgccgccaaatctgttttgccccgcccctgcgcgcgcgggaactgtcggcgccgcgctgctgctagcccgccttccagagctccctccctccgtctgcctcctcacccttgccactcacccttccatctcttctatcacagactctgtgttacaccacctcgactcggaccgatg

SEQ ID NO: 3744 - DNA, 203 bp, synthetic construct
  source 1..203: mol_type = other DNA
ggcgcgccagtccttccagagctccctccctccgtctgcctcctcacccttgccactcacccttccatctcttctatcacagactctgtgttacaccacctatgactgctgcaaccacagaacattttgctctccgcgcggcactcaatcgttactggtggctgcttctgggacgacacaagctcagtcgactcggaccgatg

SEQ ID NO: 3745 - DNA, 203 bp, synthetic construct
  source 1..203: mol_type = other DNA
ggcgcgccagtcctctgtagagacacttcctttaagtagaccttagagacacaccaaatacaaccacaaccaaaaaaaaaacagaaaacaacacaaagccaatgagtgcagaaatgctccgcgctgttcagctccagccaagacgccggggacattcctcatctcccacttcccctccactcgaaggacgactcggaccgatg

SEQ ID NO: 3746 - DNA, 203 bp, synthetic construct
  source 1..203: mol_type = other DNA
ggcgcgccagtcctcatttttagcaaagctgtagcaaatcataacattagattatcataccaggattttttggaaatcaattagagtgtccatgtcggcagcgcatgtatctaatcaaagagaaaatagagactattaaactaattttttaagaagtgttcaataatgctcaacagaaaaaacgagtccgactcggaccgatg

SEQ ID NO: 3747 - DNA, 203 bp, synthetic construct
  source 1..203: mol_type = other DNA
ggcgcgccagtcctcttaagcataaagcgacgtcatgcttcagtaatatataaaaacctagtcacaactgctgttttcataagcttagagtgtgcttcaacatggccgaaagtgaacaaaaagttcgatttaggcatgcactcgcaaatttaagccttgttaaacaagccttttatcgcgattctcttcgactcggaccgatg

SEQ ID NO: 3748 - DNA, 203 bp, synthetic construct
  source 1..203: mol_type = other DNA
ggcgcgccagtcctcaacacaattttcacatctagagtatcttttcaaaggaaaaatttcttcggggtatgtatggcaatgcattggaaaaatgctgcaatgttcatcaatagttaattgtgttttttttgttttatagaagtaccgtggactttcttgaagaaattgtgaagtctttataaaggacccgactcggaccgatg

SEQ ID NO: 3749 - DNA, 203 bp, synthetic construct
  source 1..203: mol_type = other DNA
ggcgcgccagtccttcggttatcttatgtctgattcttattctacacatcttcaatgttcgatatgggggtacgaagccctgaattttacaccgattccagcacttttttgcgttgcttaaaaacagtaatttagtcggcacacgtacaatattaaactaggcttcttctaattgcgcagtgtttaaacgactcggaccgatg

SEQ ID NO: 3750 - DNA, 203 bp, synthetic construct
  source 1..203: mol_type = other DNA
ggcgcgccagtcctatgttttataagtacaaccattttttcccagagacctatgaagattgttggaaagggatttattatttgtttgttctgtttattttggcttgcattgcatatcatgattatataagtccttcaatagcagagaatatgttatcatttatcaggtgctctaaatatccctagaagcgactcggaccgatg

SEQ ID NO: 3751 - DNA, 203 bp, synthetic construct
  source 1..203: mol_type = other DNA
ggcgcgccagtcctttgatttgctgagtggtttttctgatggtgtggtgatgagtactatgcatgtatttcagtgatgtaataaaaatttggcgccaaaaaaacacagtatataatggtttgaatatctctgtgattttttagtattctcatacaactcttcctgttaatatctatttttggtgcagccgactcggaccgatg

SEQ ID NO: 3752 - DNA, 203 bp, synthetic construct
  source 1..203: mol_type = other DNA
ggcgcgccagtcctcagtattcccagttactgttcctatttttgcacggagaaataatattctttgtggttttttggttgccgccttactaattgtatgctatgtcatctttaaggaatttgctttgtcggctgatttctccgctgtgtaaacatggttcgtacagtcatttgcagttatttcttattcgactcggaccgatg

SEQ ID NO: 3753 - DNA, 203 bp, synthetic construct
  source 1..203: mol_type = other DNA
ggcgcgccagtcctcttgaatctaagtgtgcatataaaagaatttcattaaaaagttctgagttcatagaaaaggaatcggagttccatcccttataagccatgtctaacgacaatgccaaaacagatatagaaattctttatgaacaattatcttcccgagttgaaattgaaatagcttttctccctcgactcggaccgatg

SEQ ID NO: 3754 - DNA, 203 bp, synthetic construct
  source 1..203: mol_type = other DNA
ggcgcgccagtcctttgaaaaacatgtttggttagccattcatttttttaaagcatttcaggtttcaaaattaaaccacaaaaataaaacgcttatatctgatttcttaaaggatttcacacagctcttagcagatcaaaactttgaaattgtcgatcctacatttaccattcattattacgtttagccgactcggaccgatg

SEQ ID NO: 3755 - DNA, 203 bp, synthetic construct
  source 1..203: mol_type = other DNA
ggcgcgccagtccttaaaaaccacagaggcgtcaccgctacacgagacaaaaataatataaaaggccgtttatgaacaaggttctcattttcgacagaaacatgtatccacgcggggttaaaaagaatgtattagggcggcaacgatatggtttgaaaaccattaaacgaactcttgttcataaacctcgactcggaccgatg

SEQ ID NO: 3756 - DNA, 203 bp, synthetic construct
  source 1..203: mol_type = other DNA
ggcgcgccagtcctttgatggtttatatttaacgattattggaaaaattaaatgttcactagggttcttacataagatatttactatcacgtgcgcggggtcatattccgttgcaaacacagtaatagtcattgtgaatgtctttcagtttatcttccaacagcttttaatataagacaataggaatccgactcggaccgatg

SEQ ID NO: 3757 - DNA, 203 bp, synthetic construct
  source 1..203: mol_type = other DNA
ggcgcgccagtcctactgtgcctataacggcattttcattgtggtttatattcaatggaatattcaaaccatttccggaattgatttcttcttgtatcgtcctccttggcagataaaagttatcatttatatcattatcatcatacacacataggaagcctgccactagcacagtttccattattacgcgactcggaccgatg

SEQ ID NO: 3758 - DNA, 203 bp, synthetic construct
  source 1..203: mol_type = other DNA
ggcgcgccagtccttcacaagatgattgcgcagtccatgcaccagatttgataagtacgatttgctcgacaacgcacacaacgcatcacgacctagtcagaatgaatggctcagctactggcaactcagctagtcttcccgctcctcagttttccgaatgtgtttttttaccgaaagatacattttgccgactcggaccgatg

SEQ ID NO: 3759 - DNA, 203 bp, synthetic construct
  source 1..203: mol_type = other DNA
ggcgcgccagtcctagactctctcccaattttgacagttcatcccatgacagactttccctacgaacaaatacaagagacagaaaacattagacataactctatgaacataacaccccgcttcaaacgtatgcaattgtaatatcaactatttaagtattttacaacaataaaagatttaaagtaagacgactcggaccgatg

SEQ ID NO: 3760 - DNA, 203 bp, synthetic construct
  source 1..203: mol_type = other DNA
ggcgcgccagtcctaaattaaaacggttttcaccatgattaaccaaatcaattcccttacacaagaaaaaacgtttttcattgtggctgatgtttctgctgacaataggctggcaacttgtatatttaaagagtgaataaaaagttctttgaaatagtgtctgttgtaacagattttatttcagctcccgactcggaccgatg

SEQ ID NO: 3761 - DNA, 203 bp, synthetic construct
  source 1..203: mol_type = other DNA
ggcgcgccagtcctaactggatcatttgggtcgaaacgcaaacgctttaaccgttttacgttttattgtagaaaatggttattataaaaggaagacaatttttcgcaaacttttgaagtatttagctactacatcttttaatgctcatgttcaaactgaaagtaatcgtttactcaacttgatgcacacgactcggaccgatg

SEQ ID NO: 3762 - DNA, 203 bp, synthetic construct
  source 1..203: mol_type = other DNA
ggcgcgccagtcctaaactctgagggaaataaaggaagaagccttaagacattttgatccccgcttgctaattgctcttggctactatatccataatagacatggagacacccttgaaggcgccagagagctcattaaaaccctacaacgagccctcttcgtgcacttcagagcgggatgtaaccgctcgactcggaccgatg

SEQ ID NO: 3763 - DNA, 203 bp, synthetic construct
  source 1..203: mol_type = other DNA
ggcgcgccagtcctcttggccaataaactatgtgcagttcctgatccacctactgactcgcctcttgatcgggctatacaacatctgcagagacttactatccaagaactccccgacccgccgactgatctcccagagtctaacagcaatcagggactggctgagacttaaggcggcccaactgcaatcgactcggaccgatg

SEQ ID NO: 3764 - DNA, 203 bp, synthetic construct
  source 1..203: mol_type = other DNA
ggcgcgccagtcctcagccaggagccttttcttcataaagagattcgagaaacgaagcgtcaaccccggggagaaacgacaggaggaagcgcgcctggaacatgaagctggttcttctgttcagcctcagcgttctacttgggtgagttcgttctaatctatttatcggaaagaatacaaggctacaacgactcggaccgatg

SEQ ID NO: 3765 - DNA, 203 bp, synthetic construct
  source 1..203: mol_type = other DNA
ggcgcgccagtcctgtgcaaaatataaagttctcagagcaggaccaccaatgggcgtaggacgatcggctgaagggccctgccaaaaactacaggtagaccatgtgggacctttgggacctggtacccatggatacaggtacctcacaaccatggttgatgtgtacacaggttggttctgggccaaaccgactcggaccgatg

SEQ ID NO: 3766 - DNA, 203 bp, synthetic construct
  source 1..203: mol_type = other DNA
ggcgcgccagtcctatggggtaaatagacattagttagagttcaatcaatctcaacaaccatttataccgccaattcaatacatatactataaatcttaaaatgggaaatacatccatcacaatagaattcacaagcaaattttggccctattttacactaatacatatgatcttaactctaatctctcgactcggaccgatg

SEQ ID NO: 3767 - DNA, 203 bp, synthetic construct
  source 1..203: mol_type = other DNA
ggcgcgccagtcctttaactcatagttacataaaaacctcaagtatcacaatcaaacactaaatcaacacatcattcacaaaattaacagctggggcaaatatgtcgcgaagaaatccttgtaaatttgagattagaggtcattgcttgaatggtagaagatgtcactacagtcataattactttgaacgactcggaccgatg

SEQ ID NO: 3768 - DNA, 203 bp, synthetic construct
  source 1..203: mol_type = other DNA
ggcgcgccagtccttaatacaagtatatgataagtaatcagcaatcagacaatggacaaaaggaaaatataaaaaacttaggagcaaagcgtgctcggaaaatggacactgaatctaacaatggcactgtatctgacatactctatcctgagtgtcaccttaactctcctatcgttaaaggtaaaatacgactcggaccgatg

SEQ ID NO: 3769 - DNA, 203 bp, synthetic construct
  source 1..203: mol_type = other DNA
ggcgcgccagtcctcccttgttggagcggtcgcgttttctctgttcccgtcgtgccggttcctaccccccgctccctgggaccgccccctaccccccacctccccgtttgggcctcccccctcgcaccacccctttcctcgtccgtctgcggggagggcgtgtgtaaaaaatcgggcctccggccacccgactcggaccgatg

SEQ ID NO: 3770 - DNA, 203 bp, synthetic construct
  source 1..203: mol_type = other DNA
ggcgcgccagtcctccccgtttgggcctcccccctcgcaccacccctttcctcgtccgtctgcggggagggcgtgtgtaaaaaatcgggcctccggccaccatgtccgtgcgcgggcatgccgtacgccggacgcgcgcctccacccggtcccatgccccgtccgcgcatcgcgccgactcgcccgtgcgactcggaccgatg

SEQ ID NO: 3771 - DNA, 203 bp, synthetic construct
  source 1..203: mol_type = other DNA
ggcgcgccagtcctggacgcgagatgtcagtcctcggggacgcacggcacccccggcgattcccttcgcgagggccccggcctttttctgtcgcgggtcccggatccctccccccctctccgccgccgggcgctcgggcacgtctcattcgcctctcgagatcgttattcccggacccaaccgccccccgactcggaccgatg

SEQ ID NO: 3772 - DNA, 203 bp, synthetic construct
  source 1..203: mol_type = other DNA
ggcgcgccagtcctaacccgcagggagccactcccgcggcccccgtgggttacgcaggccctcgctgctctcccgtaccccgccggtctccctctttccctccctcgccgccttccgacgctctctgcctccttcgccgacgccttccctgtgatccgcacgggcgtccccggtgtctccgatagacccgactcggaccgatg

SEQ ID NO: 3773 - DNA, 203 bp, synthetic construct
  source 1..203: mol_type = other DNA
ggcgcgccagtcctggctccccgggcacgcccgcgacgagcgcgacgaacaacagcaccacccagcggcccagtcttgcgggtttccccgtcatcgcggcgatgagtcagtgggggcccagggcgatccttgtccagacggacagcaccaaccggaatgccgatggggactggcaagcggccgtagctcgactcggaccgatg

SEQ ID NO: 3774 - DNA, 203 bp, synthetic construct
  source 1..203: mol_type = other DNA
ggcgcgccagtccttcgcagtcttccgtccccatcgcccctgcgaacccggagggggtggggtgggggaaagccggcgcagagccgcgcgcgtgttccgggatggcgtccctgctcggggtgctgtgcggttggggaacgcgccccgaggaacaacaatatgagatgattcgggccgcggctccgccccgactcggaccgatg

SEQ ID NO: 3775 - DNA, 203 bp, synthetic construct
  source 1..203: mol_type = other DNA
ggcgcgccagtcctaccccgagcagggacgccatcccggaacacgcgcgcggctctgcgccggctttcccccaccccaccccctccgggttcgcaggggcgatggggacggaagactgcgatcacgaagggcggtcggttgcggctcccgtggaggttacggcgctgtatgcgaccgacgggtgcgttcgactcggaccgatg

SEQ ID NO: 3776 - DNA, 203 bp, synthetic construct
  source 1..203: mol_type = other DNA
ggcgcgccagtcctctcaagttttctcacccgtcgcccctctccaaggtcccgtttgggacgtgccagcatttcctcgccgcgaatcgctacctcgaaacccgggacattatgccgatcgactggtcggtataagatgccgacatccggggtcttgatttacgagggggcaattaataaagactgttgcgactcggaccgatg

SEQ ID NO: 3777 - DNA, 203 bp, synthetic construct
  source 1..203: mol_type = other DNA
ggcgcgccagtcctataaatgtggggccccggcccggcccgcttcatagcgcgtccaggaactcacggcagacgcgtattcaccgacccccccctcgcaacatgacaacgacgcccctctcgaacctgtttttacgggccccggacatcacccacgtcgcccccccgtactgtctgaatgccacgtggcgactcggaccgatg

SEQ ID NO: 3778 - DNA, 203 bp, synthetic construct
  source 1..203: mol_type = other DNA
ggcgcgccagtccttaattagcaacccctggggctataaaaggcgcggtctgtgcacggggacctcggttgggcgacgtctgcggtctagtggtcggcgtggggaccggctgtgtggtgggtgggggaggcacgttggactacgaccgaccacacgacatgcaggcttctgagccgcgaatccccacccgactcggaccgatg

SEQ ID NO: 3779 - DNA, 203 bp, synthetic construct
  source 1..203: mol_type = other DNA
ggcgcgccagtcctctgcacatgaatctaaacccgctccgggagcgccacgaacgcgatgacgtcattagcgagcacatactatctgctctacgcgatccgaatgtggtcattgtctattaaccctccattccctcgcgttcccaccgcacccgggccgggtgacattcacccccacccccccgagaccgactcggaccgatg

SEQ ID NO: 3780 - DNA, 203 bp, synthetic construct
  source 1..203: mol_type = other DNA
ggcgcgccagtccttgccgccgccccttaagagggcccgcaacacggcccgggctgcgcacgccagccgggacgggtgagttcgctaggcaagcacggactggcggttacacgtgcatgcgtgccgagtgaactctcccgccccgacgcgctccggctccgggcctacgccgagcccagccgcccgcccgactcggaccgatg

SEQ ID NO: 3781 - DNA, 203 bp, synthetic construct
  source 1..203: mol_type = other DNA
ggcgcgccagtccttcccaacatccgcgctttctcgcaggccgggcgccgccttcgtggacgggacaccggtgtggtaactggcgacaaggcgttgccactatggcagacatccccccggacccgcccgcgctcaacacgacgcctgcgaatcatgctcccccatccccacccccgggttcacggaagcgactcggaccgatg

SEQ ID NO: 3782 - DNA, 203 bp, synthetic construct
  source 1..203: mol_type = other DNA
ggcgcgccagtcctggggggtgtgtcgacaaactgccgcttcttaaaacaccggggcccgtcgctcggggtgctcgttggttggcacgcgcgacgcggcaaatggcctgtcgtaagttctgtggggtctaccgtagacccgacaagagacaggaggcgtccgtcccgccggagacaaacacggccccgcgactcggaccgatg

SEQ ID NO: 3783 - DNA, 203 bp, synthetic construct
  source 1..203: mol_type = other DNA
ggcgcgccagtccttaaaacccggggtcggtgtggtgttcggtcataagctgcattgcgaacgactagtcgccgtttttcgtgtgcatcgcgtatcacggcatggggcgtttgacctccggcgtcgggacggcggccctgctagttgtcgcggtgggactccgcgtcgtctgcgccaaatacgccttacgactcggaccgatg

SEQ ID NO: 3784 - DNA, 203 bp, synthetic construct
  source 1..203: mol_type = other DNA
ggcgcgccagtcctctggccccttgatacgatctcgtcgaccggggactcccctctacccccacccaaccagcgcgccggcgcttagggtgtgacccccccatggcatccggggtttccccggcccacccccaaaccccggttggggcgggcagccgagacctttccttaaaaggcaccccatccgaccgactcggaccgatg

SEQ ID NO: 3785 - DNA, 203 bp, synthetic construct
  source 1..203: mol_type = other DNA
ggcgcgccagtcctagctgctgctgcgagagctctcggatgcgtgcgatgattggttggaccccgtgcatggacgtaaaatttaaaaacgcctcgtccctgaaccgcacggcgggtctggccccgggctgctgtgggggcggacctggtgcccggacgtcccgcgagccctccccgccggacgccgcccgactcggaccgatg

SEQ ID NO: 3786 - DNA, 203 bp, synthetic construct
  source 1..203: mol_type = other DNA
ggcgcgccagtcctgcttgcgcacgcacgcctccggcgcccagcccaacactgacatcattctcgaggcggctctgtcggagcttcccaccgaggcctggcccatgatgcagggggcggtgaactttagcaccctataagtctggggccgcgctcgttcgatacacggcaacccccgggcgtcgtggccgactcggaccgatg

SEQ ID NO: 3787 - DNA, 203 bp, synthetic construct
  source 1..203: mol_type = other DNA
ggcgcgccagtcctccatgatgcagggggcggtgaactttagcaccctataagtctggggccgcgctcgttcgatacacggcaacccccgggcgtcgtggcatggaagcccccggcatcgtttgggtggaggagagcgtcagcgccattaccctatacgcggtatggctgcccccgcgcacgcgcgaccgactcggaccgatg

SEQ ID NO: 3788 - DNA, 203 bp, synthetic construct
  source 1..203: mol_type = other DNA
ggcgcgccagtccttacgtggccagcaggctctgcgtgtccaaccggagggggacggctacacccccgcgcacctcgaccgtggcgttcgccttcgcataagaggtcgcgggggcgtaaaggcagggaaacctgtcccggaacacagaggccagcaccaggagccccacgacgcagatggccgagacgcgactcggaccgatg

SEQ ID NO: 3789 - DNA, 203 bp, synthetic construct
  source 1..203: mol_type = other DNA
ggcgcgccagtcctgaggtcgcgggggcgtaaaggcagggaaacctgtcccggaacacagaggccagcaccaggagccccacgacgcagatggccgagacgatgaacgtcgccacctgcacacaccagacccaccacgccgcccgcgccccgggcgcgacgtcggcgcccggcgcggcctcgggggatcgactcggaccgatg

SEQ ID NO: 3790 - DNA, 203 bp, synthetic construct
  source 1..203: mol_type = other DNA
ggcgcgccagtcctataggcgccgggtataaggcagccccgtgtgacggtcgggccgcattcgcaccccggcactgcgagcgacggagcggcggcccggcgggaggaggagacccggagagacagagactaaaacccggcaagagagagaccgcgggccgccgtctcgagtctaccctaccccggctccgactcggaccgatg

SEQ ID NO: 3791 - DNA, 203 bp, synthetic construct
  source 1..203: mol_type = other DNA
ggcgcgccagtcctagtgtataaattaccagcgcacgcacaaggccgtcctgtcgtcggtgtcgctgccgcccgagctgaggccgctgctggtgctggtctcccgcctctgtcacgccaacccggccgcgcgccactctctgtcgtgaggatcccttccgccctcgagctcttcggctgctcgtaaaacgactcggaccgatg

SEQ ID NO: 3792 - DNA, 203 bp, synthetic construct
  source 1..203: mol_type = other DNA
ggcgcgccagtcctgcgcccgcgggccccgaggacgcgcacacgcaccccccacccacgccccttccggcaccgggaagggctcgcaccgccggccgggccatgaacgcgcactttgccaacgaggtccaatacgatctcacccgggacccgagcagccccgcctcgctgattcacgtcatcatctcccgactcggaccgatg

SEQ ID NO: 3793 - DNA, 203 bp, synthetic construct
  source 1..203: mol_type = other DNA
ggcgcgccagtcctctcacctggggctcctgcgcacgacagacctccccgtgcgtgctgctgagccctgccccgccccctctcccacacggtcggtgccccccatctctgtttcatcatcgtcccggttgcgttgcgctttccggccctcccgcacccccgcgttccggtgtctcgcggcccggcgcccgactcggaccgatg

SEQ ID NO: 3794 - DNA, 203 bp, synthetic construct
  source 1..203: mol_type = other DNA
ggcgcgccagtcctaacgccccctttacgcctttcctcccctcgcctgttgttggtcgggttgccccttggggttttggcggcccgtgggttgttagtcgcgtccgccggcggtgaggcgttgtgcgggaggggcttggccttcccgagctcggcttgatggagcctgcgaatcccccaaggaacccacgactcggaccgatg

SEQ ID NO: 3795 - DNA, 203 bp, synthetic construct
  source 1..203: mol_type = other DNA
ggcgcgccagtcctgtccgccggcggtgaggcgttgtgcgggaggggcttggccttcccgagctcggcttgatggagcctgcgaatcccccaaggaacccaatggccgctcctgcccgcgaccccccgggttaccggtacgccgcggccatcctgcccaccggctccatcctgagtacgatcgaggtgcgactcggaccgatg

SEQ ID NO: 3796 - DNA, 203 bp, synthetic construct
  source 1..203: mol_type = other DNA
ggcgcgccagtcctgccaggcactcgcatccgcggatactacccgggtgggggttgtgtgtagaacccgcgcggtgcttgtttgattttggcctccgccccccatccctgaagcttgggtccggacccgggcccgcgccgccagcactactttcggttttgctgcctcgccggctccccgcaccgacccgactcggaccgatg

SEQ ID NO: 3797 - DNA, 203 bp, synthetic construct
  source 1..203: mol_type = other DNA
ggcgcgccagtcctccatccctgaagcttgggtccggacccgggcccgcgccgccagcactactttcggttttgctgcctcgccggctccccgcaccgaccatgacaatgcgggatgatgttcctttgttggatcgcgagctggtagacgaggccgcgtgtggcggggaggacggagaactgccgctccgactcggaccgatg

SEQ ID NO: 3798 - DNA, 203 bp, synthetic construct
  source 1..203: mol_type = other DNA
ggcgcgccagtcctcgcgccaccgccagcccttgctcccaccaccctcctcccaccaccccactattcccccccccaagtccgccccgtggctcgccggccatggagctcagctatgccaccaccctgcaccaccgggacgttgtgttttacgtcacggcagacagaaaccgcgcctactttgtgtgccgactcggaccgatg

SEQ ID NO: 3799 - DNA, 203 bp, synthetic construct
  source 1..203: mol_type = other DNA
ggcgcgccagtccttccttgttttcggtctggtactccctttgtgcttttaccctcaccccaccccatcctttggcccgcgcttacggcaacaaagggcctccgatagcctccgaggtgcggagcctctttgggccgtgggtacggacacccccccccatctgcggactggcagccgggacgacgacccgactcggaccgatg

SEQ ID NO: 3800 - DNA, 203 bp, synthetic construct
  source 1..203: mol_type = other DNA
ggcgcgccagtcctcttccccaccccgtggggtccgtctatataaacccgcagcagcgtgggcagctccggatccccgcgggctccggaggccccctggcgatggctaggacgggacgccgcgcggccgtcggtaggcccgctcgcacgagcagcctgaccgaacgcaggcgcgtgctgttggccggccgactcggaccgatg

SEQ ID NO: 3801 - DNA, 203 bp, synthetic construct
  source 1..203: mol_type = other DNA
ggcgcgccagtcctgcgcggggactcatttgtcgccggcgacacccacccgacaacagcccctgggtgtcgaccgctgtcgcccccgtctgtcgcctctcccttttttccccccctcaaagaacgtggtgttgggcgccggccaattcttcccggagcgccgtcgtcgcccgcccgccgccctcgaaccgactcggaccgatg

SEQ ID NO: 3802 - DNA, 203 bp, synthetic construct
  source 1..203: mol_type = other DNA
ggcgcgccagtcctgccgccgcatcagtccgcgcggcgcgcgcctctgacccacccccccccaaaccttaactaaaccacagcacggccgggtgactcgccatggcggccgcgcccccggccgcggtttccgagcccactgcggcccgacagaaactgttggccctgctcgggcaggtacagacgtaccgactcggaccgatg

SEQ ID NO: 3803 - DNA, 203 bp, synthetic construct
  source 1..203: mol_type = other DNA
ggcgcgccagtcctacgagttcgaggggcgggtctgtatagccctgcgggccctcatctacaccttcaagacgtaccaggtatttgtgccgaagcccaccgcgctggccacatttgtccgcgaggccggcgcgctgctcagacgacactcgatctctctcctgtccctggagcacaccctctgtacctcgactcggaccgatg

SEQ ID NO: 3804 - DNA, 203 bp, synthetic construct
  source 1..203: mol_type = other DNA
ggcgcgccagtcctcgcgcttcggcggggcaccggcaccgggaccgacttgttttacataacagtagggggtgggggaacgcgcacccttgcccggtcgcgatggcggggatggggaagccctacggcggccgcccgggggacgcgttcgagggtctcgttcagcgcatcaggctcattgttcccgcccgactcggaccgatg

SEQ ID NO: 3805 - DNA, 203 bp, synthetic construct
  source 1..203: mol_type = other DNA
ggcgcgccagtcctcttcatggggtgggatgtgtcttcccgggaaaccacacacacgcgataccgggtgtgtggttagggggacgaacaggcggttgatgggcgggggggttcgggcggcggaaacaacagtactcatcgggacgcccggcccataaacaggccccgctcgtggcgggcgcggcacaccgactcggaccgatg

SEQ ID NO: 3806 - DNA, 203 bp, synthetic construct
  source 1..203: mol_type = other DNA
ggcgcgccagtcctaccgattcctgttgcgttcctgtcggccggtgctgtcctgtcgacagattgttggcgactgcccgggtgattcgtcggccggtgcgtcctttcggtcgtaccgcccaccccgcctcccacgggcccgccgctgtttccgttcatcgcgtccgagccaccgtcaccttggttccacgactcggaccgatg

SEQ ID NO: 3807 - DNA, 203 bp, synthetic construct
  source 1..203: mol_type = other DNA
ggcgcgccagtcctcctttcggtcgtaccgcccaccccgcctcccacgggcccgccgctgtttccgttcatcgcgtccgagccaccgtcaccttggttccaatggccaaccgccctgccgcatccgccctcgccggagcgcggtctccgtccgaacgacaggaaccccgggagcccgaggtcgccccccgactcggaccgatg

SEQ ID NO: 3808 - DNA, 203 bp, synthetic construct
  source 1..203: mol_type = other DNA
ggcgcgccagtcctacgacaacatcgtctgcacaagctgcgcgctgtaagcaacagcgctccgatcggggtcaggcgtcgctctcggtcccgcatatcgccatggatcccgccgtctcccccgcgagcaccgaccccctagatacccacgcgtcgggggccggggcggccccgattccggtgtgcccccgactcggaccgatg

SEQ ID NO: 3809 - DNA, 203 bp, synthetic construct
  source 1..203: mol_type = other DNA
ggcgcgccagtcctcacaggggcggcgggcttgggtgtccgggaccgtcacacctatacagctctgtagagagacctatccgcacctacaatcgtgccggaatgggtctgtttggcatgatgaagtttgcccagactcaccatctggtgaagcgccggggcctccgggccccggagggctactttacccgactcggaccgatg

SEQ ID NO: 3810 - DNA, 203 bp, synthetic construct
  source 1..203: mol_type = other DNA
ggcgcgccagtcctccgtagtccttggctcgggtagccactgctctgtggctcgggtcccccggcccccctaacccccatcgggtccgcgtcatccgccccctccgcctgcgacacaaacggccgcgcctccgggcccggtgacacgacgcgcctcgtctctgcggattgtcccgggagcgtcgcggccgactcggaccgatg

SEQ ID NO: 3811 - DNA, 203 bp, synthetic construct
  source 1..203: mol_type = other DNA
ggcgcgccagtcctcgcgtgattcggttgctcgcggttgtcttgtttggacgttttttatgcgggaacaagggggcttaccggttacactgtccgctcgctatggggttcgtctgtctgtttgggcttgtcgttatgggagcctggggggcgtggggtgggtcacaggcaaccgaatatgttcttcgtcgactcggaccgatg

SEQ ID NO: 3812 - DNA, 203 bp, synthetic construct
  source 1..203: mol_type = other DNA
ggcgcgccagtcctaaggccaggggggcaggcgggcccatcactgttagggtgttaggttgggaggtggcacaaaaagcgacactcccgtgttgtagttgtccgcgggaggcggtggtttccggcaaccctcctcgctgcgccgcgcgcgcccaccggtccttcgcgggggccggggctcttctggtccgactcggaccgatg

SEQ ID NO: 3813 - DNA, 203 bp, synthetic construct
  source 1..203: mol_type = other DNA
ggcgcgccagtcctcccgatccgaacggcgcacgccgcgtgggctccaaacgcctccggaagagagcgccccgccccgatattcaagcccgcggtggtgctatggctttccgtgcttcgggacccgcctaccagcccctcgcccccgcggcctccccggcgcgggctcgtgttccggccgtggcctggcgactcggaccgatg

SEQ ID NO: 3814 - DNA, 203 bp, synthetic construct
  source 1..203: mol_type = other DNA
ggcgcgccagtcctactcacgcactcgccgctgcgtcgggcgacgcgatttacggcctgccaacaccacgtcaacgtgggaaccgcctgtgtcgtcggacgatgaagcgagctcgcagtcgaagcccctcgccacccagccgcccgtcctcgccctttcgaacgcccccccacggcgggtctccccgacgactcggaccgatg

SEQ ID NO: 3815 - DNA, 203 bp, synthetic construct
  source 1..203: mol_type = other DNA
ggcgcgccagtcctttgctgaagcgcgcacggcaagaggcgaggggcggcgactggtgagtacgccaaaaattttgactagcggaggctagaaggagagagatgggtgcgagagcgtcagtattaagcgggggagaattagatcgatgggaaaaaattcggttaaggccagggggaaagaaaaaatatcgactcggaccgatg

SEQ ID NO: 3816 - DNA, 203 bp, synthetic construct
  source 1..203: mol_type = other DNA
ggcgcgccagtccttctggaaaggtgaaggggcagtagtaatacaagataatagtgacataaaagtagtgccaagaagaaaagcaaagatcattagggattatggaaaacagatggcaggtgatgattgtgtggcaagtagacaggatgaggattagaacatggaaaagtttagtaaaacaccatatgcgactcggaccgatg

SEQ ID NO: 3817 - DNA, 203 bp, synthetic construct
  source 1..203: mol_type = other DNA
ggcgcgccagtcctttcagactctgctataagaaaggccttattaggacacatagttagccctaggtgtgaatatcaagcaggacataacaaggtaggatctctacaatacttggcactagcagcattaataacaccaaaaaagataaagccacctttgcctagtgttacgaaactgacagaggatagcgactcggaccgatg

SEQ ID NO: 3818 - DNA, 203 bp, synthetic construct
  source 1..203: mol_type = other DNA
ggcgcgccagtccttctacaatacttggcactagcagcattaataacaccaaaaaagataaagccacctttgcctagtgttacgaaactgacagaggatagatggaacaagccccagaagaccaagggccacagagggagccacacaatgaatggacactagagcttttagaggagcttaagaatgaacgactcggaccgatg

SEQ ID NO: 3819 - DNA, 203 bp, synthetic construct
  source 1..203: mol_type = other DNA
ggcgcgccagtcctcagaataggcgttactcgacagaggagagcaagaaatggagccagtagatcctagactagagccctggaagcatccaggaagtcagcctaaaactgcttgtaccaattgctattgtaaaaagtgttgctttcattgccaagtttgtttcataacaaaagccttaggcatctcctcgactcggaccgatg

SEQ ID NO: 3820 - DNA, 203 bp, synthetic construct
  source 1..203: mol_type = other DNA
ggcgcgccagtcctttatagaagtagtacaaggagcttgtagagctattcgccacatacctagaagaataagacagggcttggaaaggattttgctataagatgggtggcaagtggtcaaaaagtagtgtgattggatggcctactgtaagggaaagaatgagacgagctgagccagcagcagataggcgactcggaccgatg

SEQ ID NO: 3821 - DNA, 203 bp, synthetic construct
  source 1..203: mol_type = other DNA
ggcgcgccagtcctatcaaacaaaacccatctggagcctcagatcatcccaagtcattgttcatcagatctagtactcaaataagttaataaaaatatccacatggggcaaataatcattggaggaaatccaactaatcacaatatctgtcaacatagacaagtcaacacgccaggcaaaatcaaccacgactcggaccgatg

SEQ ID NO: 3822 - DNA, 203 bp, synthetic construct
  source 1..203: mol_type = other DNA
ggcgcgccagtcctaatgaaatccattggacctctcaagacttgattgatgcaattcaaaattttctacaacatctaggtattactgatgatatatacacaatatatatattagtgtcataacactcaatcctaatgcttaccacatcatcaaactattaactcaaacaattcaagccatgggacaaacgactcggaccgatg

SEQ ID NO: 3823 - DNA, 203 bp, synthetic construct
  source 1..203: mol_type = other DNA
ggcgcgccagtcctcggcgggtagccttcgcgggagatactgcgtttttttgcgccggccccgtcgctcccgtccattcccatcgcgagggggtccggcggcacctaccccggcctccatccgcgctgtggggtctttttcttttttggggggtagcggacatccgataacccgcgtctatcgccacccgactcggaccgatg

SEQ ID NO: 3824 - DNA, 203 bp, synthetic construct
  source 1..203: mol_type = other DNA
ggcgcgccagtcctctcgacctctccacacctgcaccacccccgccgtccgaacccaggcctaattgtccgcgcatccgaccctagcgtgttcgtggaaccatgacctctcgccgctccgtgaagtcgggtccgcgggaggttccgcgcgatgagtacgaggatctgtactacaccccgtcttcaggtcgactcggaccgatg

SEQ ID NO: 3825 - DNA, 203 bp, synthetic construct
  source 1..203: mol_type = other DNA
ggcgcgccagtcctctaaccttcggcataaaagccaccgcgcgcctgttgaccaggttcagttgcacgactccgcccccgcgagtagcgacggccgtgtgccagtcgccatcgtacccccgacccaagctgtccggctggacaaggatcgccccggatccccactgactcatcttcctgttagggacgcgactcggaccgatg

SEQ ID NO: 3826 - DNA, 203 bp, synthetic construct
  source 1..203: mol_type = other DNA
ggcgcgccagtccttggccagtgttttgggtctcgcaccgcgcgcccccgatcccatcgcgcccgccctcctcgccgggcggctccccgcgcgggcccgcgtctcccgccgctaaggcgacgagcaagacaaacaacaggcccgcccgacagacccttctgggggggcccatcgtccctaacaggaagcgactcggaccgatg

SEQ ID NO: 3827 - DNA, 203 bp, synthetic construct
  source 1..203: mol_type = other DNA
ggcgcgccagtcctgggagtcccggccgcccgcctctccccgcggttcccgtcttcctgccccattgcgtccgcgcgcccaagggccagtacccgcccgcgatggcttctcttctcggggctatatgtggctggggagcgcgccccgaggaacaatatgagatgatccgcgcggccgttccgccctcgcgactcggaccgatg

SEQ ID NO: 3828 - DNA, 203 bp, synthetic construct
  source 1..203: mol_type = other DNA
ggcgcgccagtcctttcctcggggcgcgctccccagccacatatagccccgagaagagaagccatcgcgggcgggtactggcccttgggcgcgcggacgcaatggggcaggaagacgggaaccgcggggagaggcgggcggccgggactcccgtggaggtgaccgcgctttatgcgaccgacgggtgccgactcggaccgatg

SEQ ID NO: 3829 - DNA, 203 bp, synthetic construct
  source 1..203: mol_type = other DNA
ggcgcgccagtcctcccgtcgcccctctccaaggttccgttcggaacctgccagcatttcctcgtggcgaaccgatacctcgagacccggtcgatttcacccatcgactggtcggtttgaaaggcatcgacgtccggggtttttgtcggtgggggcttttgggtatttccgatgaataaagacggttacgactcggaccgatg

SEQ ID NO: 3830 - DNA, 203 bp, synthetic construct
  source 1..203: mol_type = other DNA
ggcgcgccagtcctgtgcgtgtccttgtgtcagcagtgctttgccgccaaatgcgacagcaaccgcctgcacacgctgtttaccattgacgccggcacgccatgctcgccgtccgttccctgcagcacctctcaaccgtcgtcttgataacggcgtacggcctcgtgctcgtgtggtacaccgtcttccgactcggaccgatg

SEQ ID NO: 3831 - DNA, 203 bp, synthetic construct
  source 1..203: mol_type = other DNA
ggcgcgccagtcctaccacgggtataaggacatccaccacccggccggtggtggtgtgcagccgtgttccaaccacggtcacgcttcggtgcctctccccgattcgggcccggtcgctcgctaccggtgcgccaccaccagaggccatatccgacaccccagccccgacggcagccgacagccgggtccgactcggaccgatg

SEQ ID NO: 3832 - DNA, 203 bp, synthetic construct
  source 1..203: mol_type = other DNA
ggcgcgccagtcctcgtggacgcggccctcggttgggcgacgcatgccagcccaacaaaatccgccggggtgccagtcccattcccgaaggcgtagcccgttaacttggctggcttggatggggagtagggccttttccattaccccaaggacctagcgcgcgggagtcgtggctttggggcgcatcccgactcggaccgatg

SEQ ID NO: 3833 - DNA, 203 bp, synthetic construct
  source 1..203: mol_type = other DNA
ggcgcgccagtcctccccccccaaaacacaccccccgggggtcgcgcgcggccctttaaagcggtggcggcgggcagcccgggccccccgcggccgagactagcgagttagacaggcaagcactactcgcctctgcacgcacatgcttgcctgtcaaactctaccaccccggcacgctctctgtctcccgactcggaccgatg

SEQ ID NO: 3834 - DNA, 203 bp, synthetic construct
  source 1..203: mol_type = other DNA
ggcgcgccagtcctcctgtcctttttcccacccaagcatcgacgggtccgcgctagttccgcgtcgacggcgggggtcgtcggggtccgtgggtctcgccccctccccccatcgagagtccgtaggtgacctaccgtgctacgtccgccgtcgcagccgtatccccggaggatcgccccgcatcggcgcgactcggaccgatg

SEQ ID NO: 3835 - DNA, 203 bp, synthetic construct
  source 1..203: mol_type = other DNA
ggcgcgccagtcctcccccgcgtcggcctgtctccccgccgtgcgtggccttacaaatctgcaagtgccccaaatcggacacgggcctgtaatataccaacatgggcgttgttgtcgtcaacgtaatgaccctccttgaccagaacaacgccctgccccggacttccgtcgacgcaagcccggccctgcgactcggaccgatg

SEQ ID NO: 3836 - DNA, 203 bp, synthetic construct
  source 1..203: mol_type = other DNA
ggcgcgccagtcctacgtcgaatatctggtttgcaaagccctcaccttcgacggcgcgcttcgccccagcgccgcagagctgctttgtttgccgctgtttcaacagaaatgaccgccccctgggggcggtgctgtttgcgggttggcacaaaaagaccccgatccgcgtctgtggtgtttttggcatccgactcggaccgatg

SEQ ID NO: 3837 - DNA, 203 bp, synthetic construct
  source 1..203: mol_type = other DNA
ggcgcgccagtcctaacagaaatgaccgccccctgggggcggtgctgtttgcgggttggcacaaaaagaccccgatccgcgtctgtggtgtttttggcatcatgtcgcagggcgccatgcgtgccgttgttcccattatcccattccttttggttcttgtcggtgtatcgggggttcccaccaacgtccgactcggaccgatg

SEQ ID NO: 3838 - DNA, 203 bp, synthetic construct
  source 1..203: mol_type = other DNA
ggcgcgccagtcctgtgtggcggacgcggggcggtcattggacggggtgcagttaaatacatgcccgggacccatgaagcatgcgcgacttccgggcctcagaacccacccgaaacggccaacggacgtctgagccaggcctggctatccggagaaacagcacacgacttggcgttctgtgtgtcgcgcgactcggaccgatg

SEQ ID NO: 3839 - DNA, 203 bp, synthetic construct
  source 1..203: mol_type = other DNA
ggcgcgccagtcctgaacccacccgaaacggccaacggacgtctgagccaggcctggctatccggagaaacagcacacgacttggcgttctgtgtgtcgcgatgtctctgcgcgcagtctggcatctggggcttttgggaagcctcgtgggggctgttcttgccgccacccatcggggacctgcggcccgactcggaccgatg

SEQ ID NO: 3840 - DNA, 203 bp, synthetic construct
  source 1..203: mol_type = other DNA
ggcgcgccagtcctttgttcggtcataagcttcagcgcgaacgaccaactaccccgatcatcagttatccttaaggtctcttttgtgtggtgcgttccggtatggggggggctgccgccaggttgggggccgtgattttgtttgtcgtcatagtgggcctccatggggtccgcagcaaatatgccttgcgactcggaccgatg

SEQ ID NO: 3841 - DNA, 203 bp, synthetic construct
  source 1..203: mol_type = other DNA
ggcgcgccagtcctccggaaaccaaagaaggaagcaaagaatggatgggaggagttcaggaagccggggagagggcccgcggcgcatttaaggcgttgttgtgttgactttgcctcttctggcgggttggtgcggtgctgtttgttgggctcccattttacccgaagatcggctgctatccccgggaccgactcggaccgatg

SEQ ID NO: 3842 - DNA, 203 bp, synthetic construct
  source 1..203: mol_type = other DNA
ggcgcgccagtccttgttgactttgcctcttctggcgggttggtgcggtgctgtttgttgggctcccattttacccgaagatcggctgctatccccgggacatggatcgcggggcggtggtggggtttcttctcggtgtttgtgttgtatcgtgcttggcgggaacgcccaaaacgtcctggagacggcgactcggaccgatg

SEQ ID NO: 3843 - DNA, 203 bp, synthetic construct
  source 1..203: mol_type = other DNA
ggcgcgccagtccttcggtggctccggggggcttccggcctgggggccgtcctgtgtgggattgcgtggtatgtgacgtcaattgcccgaggcgcataaagggccggtggtccgcctagccgcagcaaattaaaaatcgtgagtcacagcgaccgcaacttcccacccggagctttcttccggcctcgcgactcggaccgatg

SEQ ID NO: 3844 - DNA, 203 bp, synthetic construct
  source 1..203: mol_type = other DNA
ggcgcgccagtcctgctctcccgggctgctgcccgaaatcgcccccaacgcatccttgggtgtggcacatcgaagaaccggcgggaccgtgaccgacagtccccgtaatccggtaacccgttgagtcccgggtacgaccatcacccgagtctctgggcggagggtggttcccccccgtggctctcgagcgactcggaccgatg

SEQ ID NO: 3845 - DNA, 203 bp, synthetic construct
  source 1..203: mol_type = other DNA
ggcgcgccagtcctcccgtaatccggtaacccgttgagtcccgggtacgaccatcacccgagtctctgggcggagggtggttcccccccgtggctctcgagatgagccagacccaacccccggccccagttgggccgggcgacccagatgtttacttaaaaggcgtgccgtccgccggcatgcacccccgactcggaccgatg

SEQ ID NO: 3846 - DNA, 203 bp, synthetic construct
  source 1..203: mol_type = other DNA
ggcgcgccagtccttcgtgccttcccgcaggaggaacgtcctcgtcgaggcgaccggcggcgaccgttgcgtggaccgcttcctgctcgtcgggggggagcatgtcgtgggccctggaaatggcggacaccttcctggacaccatgcgggttgggcccaggacgtacgccgacgtacgcgatgagatccgactcggaccgatg

SEQ ID NO: 3847 - DNA, 203 bp, synthetic construct
  source 1..203: mol_type = other DNA
ggcgcgccagtcctcgtcaccggtttccgcgacccaccgggcccggccaggcacggcagcatgggacccacagaccgcccgtgatccttaggggccgtgcgatggacaccgcagatatcgtgtgggtggaggagagcgtcagcgccattaccctttacgcggtatggctgcccccccgcgctcgcgagcgactcggaccgatg

SEQ ID NO: 3848 - DNA, 203 bp, synthetic construct
  source 1..203: mol_type = other DNA
ggcgcgccagtcctataagttagccctggcccgacagtctggtcgcatttgcacctcggcactcggagcgagacgcagcagccaggcagactcgggccgccccctctccgcatcaccacagaagccccgcctacgttgcgacccccagggaccctccgtccgcgaccctccagccgcatacgaccccccgactcggaccgatg

SEQ ID NO: 3849 - DNA, 203 bp, synthetic construct
  source 1..203: mol_type = other DNA
ggcgcgccagtcctcctggaggacggcgccggggctctcggggccgcaggacccagcaaggcgtccattctcccgaaccaggccgttccgatcgccctgatcattacccccgtccgcatcgatccggagatctataaggccatccagcgaagcagccgcctggcattcgacgacacgctcgccgagctcgactcggaccgatg

SEQ ID NO: 3850 - DNA, 203 bp, synthetic construct
  source 1..203: mol_type = other DNA
ggcgcgccagtcctcattacccccgtccgcatcgatccggagatctataaggccatccagcgaagcagccgcctggcattcgacgacacgctcgccgagctatgggcctctcgttctccggggcccggccctgctgctgccgaaacaacgtcctcatcaccgacgacggggaggtcgtctcgctgacccgactcggaccgatg

SEQ ID NO: 3851 - DNA, 203 bp, synthetic construct
  source 1..203: mol_type = other DNA
ggcgcgccagtcctacacacacaaggcgatactgtcgtcggtggcgctgcctcccgagcttaagcctctcctggtgctggtgtcccgcctgtgtcacaccaacccgtgcgcgcggcacgcgctgtcgtgagaatcagcgttcacccggcggcgcgctcaaccaccgctccccccacgtcgtctcggaacgactcggaccgatg

SEQ ID NO: 3852 - DNA, 203 bp, synthetic construct
  source 1..203: mol_type = other DNA
ggcgcgccagtcctacccgtgcgcgcggcacgcgctgtcgtgagaatcagcgttcacccggcggcgcgctcaaccaccgctccccccacgtcgtctcggaaatggagtccacggtaggcccagcatgtccgccgggacgcaccgtgactaagcgtccctgggccctggccgaggacacccctcgtggccgactcggaccgatg

SEQ ID NO: 3853 - DNA, 203 bp, synthetic construct
  source 1..203: mol_type = other DNA
ggcgcgccagtcctgggtcgcggcggcgaagtaccccgatcacgggccttgggcacgcgagactatcagagcaccccccgggtcgcccgcagggtggcggaatggaccgagatgccgcccacgcggccctgcgccgacgcctggccgagacgcacctccgagccgagatttacaaggaccagaccctgcgactcggaccgatg

SEQ ID NO: 3854 - DNA, 203 bp, synthetic construct
  source 1..203: mol_type = other DNA
ggcgcgccagtcctgacccggggggtgctctgatagtctcgcgtgcccaaggcccgtgatcggggtacttcgccgccgcgacccgccacccggtgtgcgcgatgtttggtcagcagctggcgtccgacgtccagcagtacctggagcgcctcgagaaacagaggcaacttaaggtgggcgcggacgagcgactcggaccgatg

SEQ ID NO: 3855 - DNA, 203 bp, synthetic construct
  source 1..203: mol_type = other DNA
ggcgcgccagtcctcttagcctctcggaccccgtcgcgcgggccgctgtccttaggttttgtcgcaaggtgtcgtccgggaacggccggtctcgctagcgggcgccttcccccggccacctcgcccacccactcctccccgcgccgttggcccccgcctctggggtttgccctccccccgcccccggccgactcggaccgatg

SEQ ID NO: 3856 - DNA, 203 bp, synthetic construct
  source 1..203: mol_type = other DNA
ggcgcgccagtcctgaatacgcatacgcgcgccaaacccacgcccttcccgcggactcgggggacccgcatcgcctacacacccacacccacccccgaaccatgaacgcgcacttggccaacgaggtccagacgatctcggccacggcccgggtcggccctcggtctttggttcacgtcatcatatcccgactcggaccgatg

SEQ ID NO: 3857 - DNA, 203 bp, synthetic construct
  source 1..203: mol_type = other DNA
ggcgcgccagtcctccgaccggcacccggcctctcacacagcatcccccgcctttttgggtccgggcccgtcgtgtctttcggtggaccttgggccgtcgggcacgtacacgggtggccgggcgttggggtggatcttagcctccccgggccaatatcgctagagacagccgatctccacgcgacccccgactcggaccgatg

SEQ ID NO: 3858 - DNA, 203 bp, synthetic construct
  source 1..203: mol_type = other DNA
ggcgcgccagtcctgcacgtacacgggtggccgggcgttggggtggatcttagcctccccgggccaatatcgctagagacagccgatctccacgcgaccccatggccgctcccaaccgcgaccctccgggataccggtatgccgcggccatggtgccgaccgggtccctccttagcacgatcgaggtgcgactcggaccgatg

SEQ ID NO: 3859 - DNA, 203 bp, synthetic construct
  source 1..203: mol_type = other DNA
ggcgcgccagtccttggtcaacatcaaaggttatatcaaggcgcggaacggccttatcaaaacactcgcctccgcggatgcaacccgggtggtgtttgtgcaagaacccgggtgtctttgatctcgggatcctgctgacgtaagcgaccctttgcggtttcggtctccccacctccaccgcacacccccgactcggaccgatg

SEQ ID NO: 3860 - DNA, 203 bp, synthetic construct
  source 1..203: mol_type = other DNA
ggcgcgccagtcctaagaacccgggtgtctttgatctcgggatcctgctgacgtaagcgaccctttgcggtttcggtctccccacctccaccgcacaccccatgaccatgcgggatgaccttcctctggtggatcgagatctggtcgacgaggccgccttcgggggggaggagggagaactgccgctgcgactcggaccgatg

SEQ ID NO: 3861 - DNA, 203 bp, synthetic construct
  source 1..203: mol_type = other DNA
ggcgcgccagtcctgggttgcctgtgtccggttcggcccccaccgcgtgcggcacgcacgaggacgagtccgcgtgctttattggcgttccaagcgttgccctccagtttctgttgtcggtgttcccccatacccacgcccacatccaccgtagggggcctctgggccgtgttacgtcgccgcccgcgcgactcggaccgatg

SEQ ID NO: 3862 - DNA, 203 bp, synthetic construct
  source 1..203: mol_type = other DNA
ggcgcgccagtcctctccagtttctgttgtcggtgttcccccatacccacgcccacatccaccgtagggggcctctgggccgtgttacgtcgccgcccgcgatggagcttagctacgccaccaccatgcactaccgggacgttgtgttttacgtcacaagggaccgaaaccgggcctactttgtgtgccgactcggaccgatg

SEQ ID NO: 3863 - DNA, 203 bp, synthetic construct
  source 1..203: mol_type = other DNA
ggcgcgccagtcctctggcactctgtcgataccccaccgagaccccattgggaccaatacgcccgcgtttcttccttttccccaccccaacccccaagttcgggtgaaggcccagggctcgcagccaacgtcggggcggcaagccctgccatagccacgggccccgtgggttagggacggggtccccccgactcggaccgatg

SEQ ID NO: 3864 - DNA, 203 bp, synthetic construct
  source 1..203: mol_type = other DNA
ggcgcgccagtcctgggtgaaggcccagggctcgcagccaacgtcggggcggcaagccctgccatagccacgggccccgtgggttagggacggggtcccccatggggaatggtttatggttcgtgggggttattattttgggcgttgcgtggggtcaggtccacgactggactgagcagacagacccacgactcggaccgatg

SEQ ID NO: 3865 - DNA, 203 bp, synthetic construct
  source 1..203: mol_type = other DNA
ggcgcgccagtcctcccgcttaacagcgtcaacagcgtgccgcagatcttggtggcgtgaaactcccgcacctcttcggccagcgccttgtagaagcgcgtatggcttcgtacccctgccatcaacacgcgtctgcgttcgaccaggctgcgcgttctcgcggccataacaaccgacgtacggcgttgcgactcggaccgatg

SEQ ID NO: 3866 - DNA, 203 bp, synthetic construct
  source 1..203: mol_type = other DNA
ggcgcgccagtcctcggcgggagccacccgacaacagcccccgggttttcccacgccagacgcgggtccgctgtgccatcgcgccccctcatcccaccccccatcttgtccccaaataaaacaaggtctggtagttaggacaacgaccgcagttctcgtgtgttattttcgctctccgcctctcgcagcgactcggaccgatg

SEQ ID NO: 3867 - DNA, 203 bp, synthetic construct
  source 1..203: mol_type = other DNA
ggcgcgccagtcctaaaaggtcataccccgtaaacggcgggctccagtcccggcccggcggttggcgtgaacgcaacggcgggagctgggttagcgtttagtttagcattcgctctcgcctttccgcccgccccccgaccgttgcgcctttttttttttcgtccaccaaagtctctgtgggtgcgcgccgactcggaccgatg

SEQ ID NO: 3868 - DNA, 203 bp, synthetic construct
  source 1..203: mol_type = other DNA
ggcgcgccagtccttacccggggggttgtcggtgaaggggagggattcattccccaaccccggtctccaaccctccccttgaccgtcgccgcccccccccggattttgacgctcgggagacataccttgtcgggcgtccgtcgtcgtgccgggattacctccgttcggggaccgattgacaaaaggaccgactcggaccgatg

SEQ ID NO: 3869 - DNA, 203 bp, synthetic construct
  source 1..203: mol_type = other DNA
ggcgcgccagtcctgattttgacgctcgggagacataccttgtcgggcgtccgtcgtcgtgccgggattacctccgttcggggaccgattgacaaaaggacatggagacaaagcccaagacggcaaccaccatcaaggtcccccccgggcccctgggatacgtgtacgctcgcgcgtgtccgtccgaacgactcggaccgatg

SEQ ID NO: 3870 - DNA, 203 bp, synthetic construct
  source 1..203: mol_type = other DNA
ggcgcgccagtcctacacctatcacgtgactggccgtcaggagctcggcgcagagagcctcgttaagagccaggaggctgggatcgaaggccacatacgcgcgctcgaacgcccccgccttccagctgctgccgggggactcttcgcacaccgcgacgctcgccaggaccccggggggcgaagttgcccgactcggaccgatg

SEQ ID NO: 3871 - DNA, 203 bp, synthetic construct
  source 1..203: mol_type = other DNA
ggcgcgccagtcctggggctgacgcgcgtgctgttgggcgggacggttcgcgaaccctttggtgggtttacgcgggcacgcacgctcccatcgcgggcgccatggcgggactgggcaagccctacaccggccacccaggtgacgccttcgagggtctcgttcagcgaattcggcttatcgtcccatctcgactcggaccgatg

SEQ ID NO: 3872 - DNA, 203 bp, synthetic construct
  source 1..203: mol_type = other DNA
ggcgcgccagtcctcctaatcgccagtgcgttccggacgccttcgccccacacagccctcccgaccgacacccccatatcgcttcccgacctccggtcccgatggccgtcccgcaatttcaccgccccagcaccgttaccaccgatagcgtccgggcgcttggcatgcgcgggctcgtcttggccacccgactcggaccgatg

SEQ ID NO: 3873 - DNA, 203 bp, synthetic construct
  source 1..203: mol_type = other DNA
ggcgcgccagtcctacttaagtggccgtataacaccccgcgaagacgcggggtactcgcaacgcctgcgggggtcctggagggccgcgggggatcgataattcgccgctccctacagcgcacgacagtcattcccgcccggtctcgtcgttggtctacgctgtcccccacccacgcgagccgggcgtccgactcggaccgatg

SEQ ID NO: 3874 - DNA, 203 bp, synthetic construct
  source 1..203: mol_type = other DNA
ggcgcgccagtccttcgccgctccctacagcgcacgacagtcattcccgcccggtctcgtcgttggtctacgctgtcccccacccacgcgagccgggcgtcatggcagaccgcggtctcccgtccgaggcccccgtcgtcacgacctcacccgcgggtccgccctcggacggacctatgcagcgcctacgactcggaccgatg

SEQ ID NO: 3875 - DNA, 203 bp, synthetic construct
  source 1..203: mol_type = other DNA
ggcgcgccagtcctcgtccctccccggtttcctttgcgctcccgccttccggacctgctctcgcctactcttctttggctctcggtgcgattcgtcaggcagcggccttgtcgaatctcgaccccaccactcgccggacccgccgacgtcccctctcgagcccgccgaaacccgccgcgtctgttgaacgactcggaccgatg

SEQ ID NO: 3876 - DNA, 203 bp, synthetic construct
  source 1..203: mol_type = other DNA
ggcgcgccagtcctgcggccttgtcgaatctcgaccccaccactcgccggacccgccgacgtcccctctcgagcccgccgaaacccgccgcgtctgttgaaatggccagccgcccagccgcatcctctcccgtcgaagcgcgggccccggttgggggacaggaggccggcggccccagcgcagccacccgactcggaccgatg

SEQ ID NO: 3877 - DNA, 203 bp, synthetic construct
  source 1..203: mol_type = other DNA
ggcgcgccagtcctcatgagctgcgcgctgtgaccgacaaaccccctccgcgccaggcccgccgccactgtcgtcgccgtcccacgctctcccctgctgccatggattccgcggccccagccctctcccccgctctgacggcccttacggaccagagcgcgacggcggacctggcgatccagattccacgactcggaccgatg

SEQ ID NO: 3878 - DNA, 203 bp, synthetic construct
  source 1..203: mol_type = other DNA
ggcgcgccagtcctccgcgtggagttgggccatcgaaattataaagagcgtcccctaacggattattgtcctcttgtgtcggtgttgttgtctgggtcaccatacacagagagacaggctcgggtgtccgggaccgtcgcaccaaccacgccttagttaggccgatccgcagttacaattgacctgaccgactcggaccgatg

SEQ ID NO: 3879 - DNA, 203 bp, synthetic construct
  source 1..203: mol_type = other DNA
ggcgcgccagtcctatacacagagagacaggctcgggtgtccgggaccgtcgcaccaaccacgccttagttaggccgatccgcagttacaattgacctgacatgggtttgttcgggatgatgaagtttgcccacacacaccatctggtcaagcgccggggccttggggccccggccgggtacttcacccgactcggaccgatg

SEQ ID NO: 3880 - DNA, 203 bp, synthetic construct
  source 1..203: mol_type = other DNA
ggcgcgccagtcctgtttctggctcggtgagcgagggtccggttgcttgggtcccctggctgccatcaaaaccccaccctcgcagcggcatacgccccctccgcgtcccgcacccgagaccccggcccggctgccctcaccaccgaagcccacctcgtcactgtggggtgttcccagcccgcgttgggcgactcggaccgatg

SEQ ID NO: 3881 - DNA, 203 bp, synthetic construct
  source 1..203: mol_type = other DNA
ggcgcgccagtcctcgcgtcccgcacccgagaccccggcccggctgccctcaccaccgaagcccacctcgtcactgtggggtgttcccagcccgcgttgggatgacggattcccctggcggtgtggcccccgcctcccccgtggaggacgcgtcggacgcgtccctcgggcagccggaggagggggcgcgactcggaccgatg

SEQ ID NO: 3882 - DNA, 203 bp, synthetic construct
  source 1..203: mol_type = other DNA
ggcgcgccagtcctcccgttacctttttaatatctatatagtttggtcccccctctatcccgcccaccgctgggcgctataaagccgccaccctctcttccctcaggtcatccttggtcgatcccgaacgacacacggcgtggagcaaaacgcctccccctgagccgctttcctaccaacacaacggccgactcggaccgatg

SEQ ID NO: 3883 - DNA, 203 bp, synthetic construct
  source 1..203: mol_type = other DNA
ggcgcgccagtcctctcaggtcatccttggtcgatcccgaacgacacacggcgtggagcaaaacgcctccccctgagccgctttcctaccaacacaacggcatgcctctgcgggcatcggaacacgcctaccggcccctgggccccgggacaccccccatgcgggctcggctccccgccgcggcctggcgactcggaccgatg

SEQ ID NO: 3884 - DNA, 203 bp, synthetic construct
  source 1..203: mol_type = other DNA
ggcgcgccagtcctattcgcgcacccgccgctgtgtagggcgacaggatttgggacctaccaacggaacgtctggacggaccccggttctgccgccggacgatgaagcgggcctgcagccgaagcccctcaccacgccgccgcccatcatcgccacgtcggaccccaccccgcgacgggacgccgccacgactcggaccgatg

SEQ ID NO: 3885 - DNA, 203 bp, synthetic construct
  source 1..203: mol_type = other DNA
ggcgcgccagtcctaacacctcggccttctagggcacccacgaattggtactattacaaactccctggtcttaccaatcagcggtggaaaggacctttgcaatctctccaggaagctgcaggagcagccttactctcgatagacggctcccctcagtggatcccgtggcggctcctgaaaaagactgtcgactcggaccgatg

SEQ ID NO: 3886 - DNA, 203 bp, synthetic construct
  source 1..203: mol_type = other DNA
ggcgcgccagtcctacccagccacttcgggtccttgttctctccgggagagacaaacaagtgggggctcgtccgggatacctacccctgccctctcgcattatgggacaaacctacggcctctcgtccagcccaatccccaaggcccccagggggttatcaacccaccattggttaaacttcctccaacgactcggaccgatg

SEQ ID NO: 3887 - DNA, 203 bp, synthetic construct
  source 1..203: mol_type = other DNA
ggcgcgccagtcctagccgaagccgcgccgcgtgtcttgtctgctgcagcatcgttctgtgttgtctctgtttgactgtttttctgtatttgtctgaaagcatgggccagactgttaccacccccttaagtttgactttagaccactggaaagatgtcgaacggacagcccacaaccagttggtggagcgactcggaccgatg

SEQ ID NO: 3888 - DNA, 203 bp, synthetic construct
  source 1..203: mol_type = other DNA
ggcgcgccagtcctctaggacaaaaccttttcaatccagttctagcctccaccccaacctcgtcacggagaatccaagaggcactggaggaggaacacccggacagcatacactcggtggagaccaggacatgcgggtcgatacttccggtattaagcccttatcctctttgtgccaatgtgccagggcgactcggaccgatg

SEQ ID NO: 3889 - DNA, 203 bp, synthetic construct
  source 1..203: mol_type = other DNA
ggcgcgccagtcctgacagcatacactcggtggagaccaggacatgcgggtcgatacttccggtattaagcccttatcctctttgtgccaatgtgccagggatgaccctggacgcagtgataacccactggaaatggcagaaccagtacagccctggtggaccgacagttctctggagccagagatcacgactcggaccgatg

SEQ ID NO: 3890 - DNA, 203 bp, synthetic construct
  source 1..203: mol_type = other DNA
ggcgcgccagtcctggtggtatctactggaaccttatagagttatctggaatccactaaagattggagaaggtcacaacaattggcgcccaacgtggggctcgagttttcttctgaccaagataactaagaggggagtgagaaggctcttgcttactatccctagggaactgaggcaccgtctcaggacgactcggaccgatg

SEQ ID NO: 3891 - DNA, 203 bp, synthetic construct
  source 1..203: mol_type = other DNA
ggcgcgccagtcctcgagttttcttctgaccaagataactaagaggggagtgagaaggctcttgcttactatccctagggaactgaggcaccgtctcaggaatggctcttaatgacttcgaccctatagctctccaggggtatttacccgcaccacgagttttgcaacataatgatattataatatgtcgactcggaccgatg

SEQ ID NO: 3892 - DNA, 203 bp, synthetic construct
  source 1..203: mol_type = other DNA
ggcgcgccagtcctgacagccaacccctggaaacgggaaccaaaacaggaatttcagccggggtcccgcccccgtcaacgagcaaagtcgcggacgtgggagaagcagccaaggaacaaacaacacaggaagttctgcggtccacagtgtgagattaacatctgctgctccacccatacccccacaagcgactcggaccgatg

SEQ ID NO: 3893 - DNA, 203 bp, synthetic construct
  source 1..203: mol_type = other DNA
ggcgcgccagtcctgaagcagccaaggaacaaacaacacaggaagttctgcggtccacagtgtgagattaacatctgctgctccacccatacccccacaagatgccggcactccgcccacttcaagtggaaatcaagggcaatcatcttaaaggctactgggactctggggctgaaatcacttgtgtccgactcggaccgatg

SEQ ID NO: 3894 - DNA, 203 bp, synthetic construct
  source 1..203: mol_type = other DNA
ggcgcgccagtcctacaaatatcatcaaccgcagtgtacatggtcctgtgaagatcgttgtgggcatcgttggaaggagtgcgggaattgtattccacaggatggctcctccgatgacgcttcagcagtggctgcagtggagatataacctagagacgaccaacctcttacagatgaaccctaaaatgcgactcggaccgatg

SEQ ID NO: 3895 - DNA, 203 bp, synthetic construct
  source 1..203: mol_type = other DNA
ggcgcgccagtccttgttttcagcatactagcctatgctaaaccggtcattattgggataatacttatcattttacttttgttagtcatcagaatattgagatggctagcggtggaacgccggagaaagcaagagtagcctgcagacgagtggatctctcctccttcttggcccagcccgatgactaccgactcggaccgatg

SEQ ID NO: 3896 - DNA, 203 bp, synthetic construct
  source 1..203: mol_type = other DNA
ggcgcgccagtcctcgcacatttagttcccagagggcgttgtcgtctccccctaagcaagggagaaacacgtggcacatgatcttgcgcttaacgataaaaatggaatctgataaaagtatggcctgtttaaatagaattttgatgaataagatgatgtttgtggaagataagatctctacccttaagcgactcggaccgatg

SEQ ID NO: 3897 - DNA, 203 bp, synthetic construct
  source 1..203: mol_type = other DNA
ggcgcgccagtcctgggggccgggcccactattgttgtgggctccgagttcctctagggatggccgaaaggcagccatggggccacccaggcggcgccgtgctacaggcggcaaggggaaaaatccttcgggtgaccccgggtggcattccctcccttagcagcatgagtgtggtggtagctgcaacccgactcggaccgatg

SEQ ID NO: 3898 - DNA, 203 bp, synthetic construct
  source 1..203: mol_type = other DNA
ggcgcgccagtcctcttattattttatacaacaatttatggtgacattgactgatactattgagttcgcccgcttgccattgaatattgccttgtattaccttatagcatttcaaaaagccacagatctcaccctcgagctcattcactttgcagtttgtttgaatcgcatacacaagacatttgaaccgactcggaccgatg

SEQ ID NO: 3899 - DNA, 203 bp, synthetic construct
  source 1..203: mol_type = other DNA
ggcgcgccagtcctttatagcatttcaaaaagccacagatctcaccctcgagctcattcactttgcagtttgtttgaatcgcatacacaagacatttgaacatgggagcccagttgagcagaaatactgccgggagccacactactggaacctacgctaccggaggctcaaccattaattataacaaccgactcggaccgatg

SEQ ID NO: 3900 - DNA, 203 bp, synthetic construct
  source 1..203: mol_type = other DNA
ggcgcgccagtcctcacgataaccacagccactgaaggcacggacgctgaagacacgagtgaggtcgacgtcatcaacgtcgtcgatccaataggataactatgttttcagactcagattcctcggacgaggaactaagcagaataattactgacattgacgagagcccccaggatatccagcaaagtcgactcggaccgatg

SEQ ID NO: 3901 - DNA, 203 bp, synthetic construct
  source 1..203: mol_type = other DNA
ggcgcgccagtcctgtcagcatatcatcaacaggttgtggaccagtggccttctacaagcctccccccaggcccagagcccggatcctggtgtatgcttagaaacccaaagaaatcatctaattgggaaggaccttttctgatcctcctctctacaccaacggcggtaaaagttgaaggacgaccaaccgactcggaccgatg

SEQ ID NO: 3902 - DNA, 203 bp, synthetic construct
  source 1..203: mol_type = other DNA
ggcgcgccagtcctaaacccaaagaaatcatctaattgggaaggaccttttctgatcctcctctctacaccaacggcggtaaaagttgaaggacgaccaacatggatacacctggatcattgcaagttattgcgatcatctctctcctcctcgttgggggggccagtcaaccagctactttcttagagcgactcggaccgatg

SEQ ID NO: 3903 - DNA, 203 bp, synthetic construct
  source 1..203: mol_type = other DNA
ggcgcgccagtcctttggccagctggtccaggagagggtgtacaggccgtcacaattaaggcctaagtggaggaagcctacaaaggtcttggaaatattgaatcctagaactgtgattatagtggaccatctaggccaacggaaatctgtgagtattgacaatttaaaacctacagcacaccagcatacgactcggaccgatg

SEQ ID NO: 3904 - DNA, 203 bp, synthetic construct
  source 1..203: mol_type = other DNA
ggcgcgccagtcctatcctagaactgtgattatagtggaccatctaggccaacggaaatctgtgagtattgacaatttaaaacctacagcacaccagcataatggaacaagaacatgtgatgaccctgaaggaatggatggaatggaatgctcacaaacaactacagaaacttcagtcgactcatcctcgactcggaccgatg

SEQ ID NO: 3905 - DNA, 203 bp, synthetic construct
  source 1..203: mol_type = other DNA
ggcgcgccagtcctactaatcaagacgccgtcgtgcagcccacaaaagtctagatacgtcacaggagagcatacgctaggtcgcgttgactatccttatatatgacctgcaaatataaacgaaaacactacaacaaaaatacaacagcaaatcctttcttttagttcggaaggtgaatccccgtcgtccgactcggaccgatg

SEQ ID NO: 3906 - DNA, 203 bp, synthetic construct
  source 1..203: mol_type = other DNA
ggcgcgccagtcctacaggtaggcagacagggaacctgagcaaccaggcaaagaagacacctagggatggaagacctccactagacaaagaccagtgcgcatactgtaaagagaagggccattgggcaagagaatgtccccgaaaaaaacacgtcagagaagccaaggttctagccctagataactagcgactcggaccgatg

SEQ ID NO: 3907 - DNA, 203 bp, synthetic construct
  source 1..203: mol_type = other DNA
ggcgcgccagtcctcccaaatctgggaccagatcaaagaggtgtataagcctggtaccgtaacaatccctcacccgttccaggtcggggatcaagtgcttgtcagacgccatcgacccagcagccttgagcctcggtggaaaggcccatacctggtgttgctgactaccccgaccgcggtaaaagtcgcgactcggaccgatg

SEQ ID NO: 3908 - DNA, 203 bp, synthetic construct
  source 1..203: mol_type = other DNA
ggcgcgccagtcctcggtcgcctcgccgccgtctctggtttctttttgtttcgtttctggaaagcctctgtgtcacagtctttctctcccaaatcatcaatatgggacaagataattctacccctatctccctcactctaaatcactggagagatgtgagaacaagggctcacaatctatccgtggaacgactcggaccgatg

SEQ ID NO: 3909 - DNA, 203 bp, synthetic construct
  source 1..203: mol_type = other DNA
ggcgcgccagtcctgtgttaaaaaactgcgtatgtttaaaacttaggaaccaagacagtgacaattggtcttggtattggacaattgttcaaggttccaaaatgagtgatatatttgacgaggcggctagtttcagaagctatcaatcgaaactcggtcgagatgggcgggcaagtgcggcaacagctcgactcggaccgatg

SEQ ID NO: 3910 - DNA, 203 bp, synthetic construct
  source 1..203: mol_type = other DNA
ggcgcgccagtcctgaccctggtgcaaggttatatatagagcccaattctcctaattaaacagtgtctcaggttgacaaatggacaagttggatctagtcaatgatggcctcgatattattgactttattcagaagaaccaaaaagaaatacaaaagacatacggacgatcaagcatccaacaaccaacgactcggaccgatg

SEQ ID NO: 3911 - DNA, 203 bp, synthetic construct
  source 1..203: mol_type = other DNA
ggcgcgccagtcctaatattctcatacctgtccattcaccttggacttaaagagagacaatcattcagccccgtccaagacacacctgagtggccagaaccatggattttagtgtgagtgataaccttgatgatccaatagaaggtgtttcagattttagtcccacctcatgggagaatggagggtatcgactcggaccgatg

SEQ ID NO: 3912 - DNA, 203 bp, synthetic construct
  source 1..203: mol_type = other DNA
ggcgcgccagtcctaatatcttggcaaacactacactaacctcgtctgtactgtctgaaagtggtcaggattgattgacagttattatttatctttaagcaatggctacacaagaggtcaggctaaagtgtttgctctgtgggatcatagttctggttttgtcattagaagggctagggatactacatcgactcggaccgatg

SEQ ID NO: 3913 - DNA, 203 bp, synthetic construct
  source 1..203: mol_type = other DNA
ggcgcgccagtcctaggcaggtaccccacctccgggtgggatctgagcctgggctaattgtctacgggtagtttcatttccaatccttttatgtcggagtcatggctgcaacacgggtttcacgatctgtgctcgctgctgtggctcactctgccgctcaccgcacctaccacactgtccttgactgccgactcggaccgatg

SEQ ID NO: 3914 - DNA, 203 bp, synthetic construct
  source 1..203: mol_type = other DNA
ggcgcgccagtcctaaccaagaacctcgagccacggtggaaaggaccacatatcgtcctcctgaccacccccacagccttaaaggtagacggagttgctgcctggattcacgcctctcacgtgaaagctgcaggaccaaccaccaatcaagacctctcggacagccccagctcagacgatccatcaagcgactcggaccgatg

SEQ ID NO: 3915 - DNA, 203 bp, synthetic construct
  source 1..203: mol_type = other DNA
ggcgcgccagtcctctggattcacgcctctcacgtgaaagctgcaggaccaaccaccaatcaagacctctcggacagccccagctcagacgatccatcaagatggaaagtccaacgcacccaaaaccctctaaagataagactctctcgtggaacttagcgtttctggtggggatcttattcacaatacgactcggaccgatg

SEQ ID NO: 3916 - DNA, 203 bp, synthetic construct
  source 1..203: mol_type = other DNA
ggcgcgccagtcctcccgacccccgggaccaccgacccaccatcaggaggtaagctggccggcgaccatacctgttgtccttgtataagtgtctctgtcaattgatctgattttggcggtgggatcgaaggagctgacgagctcgtacttcgcccccgcaaccctggaagacgttccacgggtgtctgcgactcggaccgatg

SEQ ID NO: 3917 - DNA, 203 bp, synthetic construct
  source 1..203: mol_type = other DNA
ggcgcgccagtcctcaggatggcaggccatgttccgctggatgcgcttccatgacctcggattgtggacaggagatcgcgatcttctgcccgaattcgtaaatgatgatggcgtctaaggacgctacatcaagcgtggatggcgctagtggcgctggtcagttggtaccggaggttaatgcttctgaccgactcggaccgatg

SEQ ID NO: 3918 - DNA, 203 bp, synthetic construct
  source 1..203: mol_type = other DNA
ggcgcgccagtcctgtgaatgatgatggcgtcaaaagacgtcgttcctactgctgctagcagtgaaaatgctaacaacaatagtagtattaagtctcgtctattggcgagactcaagggttcaggtggggctacgtccccacccaactcgataaagataaccaaccaagatatggctctggggctgatcgactcggaccgatg

SEQ ID NO: 3919 - DNA, 203 bp, synthetic construct
  source 1..203: mol_type = other DNA
ggcgcgccagtcctcaaagcataccctgatggtttcctcacttgtgtccccaatggggctagctcgggtccacaacagctgccgatcaatggggtctttgtctttgtttcatgggtgtccagattttatcaattaaagcctgtgggaactgccagctcggcaagaggtaggcttggtctgcgccgatacgactcggaccgatg

SEQ ID NO: 3920 - DNA, 203 bp, synthetic construct
  source 1..203: mol_type = other DNA
ggcgcgccagtcctagcaaaagcaggggaaaataaaaacaaccaaaatgaaggcaaacctactggtcctgttatgtgcacttgcagctgcagatgcagacacaatatgtataggctaccatgcgaacaattcaaccgacactgttgacacagtgctcgagaagaatgtgacagtgacacactctgttacgactcggaccgatg

SEQ ID NO: 3921 - DNA, 203 bp, synthetic construct
  source 1..203: mol_type = other DNA
ggcgcgccagtccttcaatccgaccttacttttcttaaaagtgccagcacaaaatgctataagcacaactttcccttataccggagaccctccttacagccatgggacaggaacaggatacaccatggatactgtcaacaggacacatcagtactcagaaaaggcaagatggacaacaaacaccgaaacgactcggaccgatg

SEQ ID NO: 3922 - DNA, 203 bp, synthetic construct
  source 1..203: mol_type = other DNA
ggcgcgccagtcctagtaaatcctgtgtgctaattgaggtgcattggtctgcaaatcgagttgctaggcaataaacacatttggattaattttaatcgttcgttgagcgattagcagagaactgaccagaacatgtctggtcgtaaagctcagggaaaaaccctgggcgtcaatatggtacgacgaggcgactcggaccgatg

SEQ ID NO: 3923 - DNA, 203 bp, synthetic construct
  source 1..203: mol_type = other DNA
ggcgcgccagtcctcattagtcgaggagtctcgagatgccatgtggacgagggcatgcccacggcacatcttaacccacgcgggggttgcatgggtgaaagcgctattcgtggcgttatggacacagcctgatagggtgtagcagagacctgctattccgctagtaaaaactctgctgtacatggcaccgactcggaccgatg

SEQ ID NO: 3924 - DNA, 203 bp, synthetic construct
  source 1..203: mol_type = other DNA
ggcgcgccagtcctgcttccccggcgtgtcagaatctcaaccggtcgtcagaaagaggacgtatcggaaactctgtgccattcatcatctgctggggcgggctcccgagattgcttgctcggcctgcgatctggtcaacgtggacctggatgactgtgtttctgagcaataaatgacttaaaccaggtcgactcggaccgatg

SEQ ID NO: 3925 - DNA, 203 bp, synthetic construct
  source 1..203: mol_type = other DNA
ggcgcgccagtcctgacaccacgtggccatttagggtatatatggccgagtgagcgagcaggatctccattttgaccgcgaaatttgaacgagcagcagccatgccgggcttctacgagatcgtgatcaaggtgccgagcgacctggacgagcacctgccgggcatttctgactcgtttgtgagctggcgactcggaccgatg

SEQ ID NO: 3926 - DNA, 203 bp, synthetic construct
  source 1..203: mol_type = other DNA
ggcgcgccagtcctcccggaagtggtgttttgcgatttcgaggccgggctcgatcctcacctttcattgtcgataggggacattttgacactacctggaaaatgtcgtctgtgctcaaagcatttgagcgattcacaatagaacaggaacttcaagacaggggtgaggagggttcaattccgccggagcgactcggaccgatg

SEQ ID NO: 3927 - DNA, 203 bp, synthetic construct
  source 1..203: mol_type = other DNA
ggcgcgccagtcctaaggccagcaccgaggatgctctgaatgatatcaagcgagacatcataagaagcgccatatgaactcaccaggaacaccagactcacgggaaaatccacaaactgaaagccacaatgattccctgtttaataaaaaataagcacgaacacaagtccaatccaaccatagcagcacgactcggaccgatg

SEQ ID NO: 3928 - DNA, 203 bp, synthetic construct
  source 1..203: mol_type = other DNA
ggcgcgccagtcctgaaaaaatcaagccagaacaagcttaggatcacaatacaacacagaaccccagctgctatcataactgttctctggccgctcgaaagatggagccctccaaactcttcacaatgtcagacaatgccacctttgcacctgggcctgttatcaatgcggctgacaagaagacattccgactcggaccgatg

SEQ ID NO: 3929 - DNA, 203 bp, synthetic construct
  source 1..203: mol_type = other DNA
ggcgcgccagtcctttgctagttaccagatgcaaggatctggtgggaagcgaagagcgaccgaacggaccatatctcccggtcatcagcctattcccaatcaacagccggagccccagagcagcttgtcaacagattctacacttctacaggacccaggagaaggacaatcatccagagatcatttggcgactcggaccgatg

SEQ ID NO: 3930 - DNA, 203 bp, synthetic construct
  source 1..203: mol_type = other DNA
ggcgcgccagtccttaccttcagcttattaacctatgccaaaccagtaattattggcatagttgttatcgttctccttatccttattattaggatattatcatggctagcagctcttggaccccgtcgccgtcgccgagaggacaaaggagaataaccagaaaagaactctgggaagtggacttatcccgactcggaccgatg

SEQ ID NO: 3931 - DNA, 203 bp, synthetic construct
  source 1..203: mol_type = other DNA
ggcgcgccagtcctagcagaagcacgcactttcttaaaatgtcgctgtttggagacacaattgcctacctgctttcactaatagaagatggagaaggcaaagcagaactagctgaaaaattacactgttggttcggtgggaaagaatttgacctagattctgctttggaatggataaaaaacaaaaggcgactcggaccgatg

SEQ ID NO: 3932 - DNA, 203 bp, synthetic construct
  source 1..203: mol_type = other DNA
ggcgcgccagtcctaaaaccttcatcatccttacgtcaattgaattctctagcactcgaagcttattgtcttcaatgtaaaagaaaagctggtctaacaagatgacaactagaacaaagggcaggggccatactgcggccacgactcaaaacgacagaatgccaggccctgagctttcgggctggatccgactcggaccgatg

SEQ ID NO: 3933 - DNA, 203 bp, synthetic construct
  source 1..203: mol_type = other DNA
ggcgcgccagtcctacagacattgcccttctaattaagaaaaaatcggcgatgaagattaagccgacagtgagcgtaatcttcatctctcttagattatttgttttccagagtaggggtcgtcaggtccttttcaatcgtgtaaccaaaataaactccactagaaggatattgtggggcaacaacacacgactcggaccgatg

SEQ ID NO: 3934 - DNA, 203 bp, synthetic construct
  source 1..203: mol_type = other DNA
ggcgcgccagtcctgttttccagagtaggggtcgtcaggtccttttcaatcgtgtaaccaaaataaactccactagaaggatattgtggggcaacaacacaatgggcgttacaggaatattgcagttacctcgtgatcgattcaagaggacatcattctttctttgggtaattatccttttccaaagacgactcggaccgatg

SEQ ID NO: 3935 - DNA, 203 bp, synthetic construct
  source 1..203: mol_type = other DNA
ggcgcgccagtccttccttgattctacaatcatgacagttgtctttagtgacaagggaaagaagcctttttattaagttgtaataatcagatctgcgaaccggtagagtttagttgcaacctaacacacataaagcattggtcaaaaagtcaatagaaatttaaacagtgagtggagacaacttttaacgactcggaccgatg

SEQ ID NO: 3936 - DNA, 203 bp, synthetic construct
  source 1..203: mol_type = other DNA
ggcgcgccagtcctcattctacaaacgccttactcgaggttccgtctcgtgtttgtgtggaagcaaagttctgtctttgtggaaaccagtaactgttcctaatggcctgcaaccgtgtgacacttgccgtagcaagtgattctgaaatttctgcaaatggctgttctactattgcgcaagccgtccgccgactcggaccgatg

SEQ ID NO: 3937 - DNA, 203 bp, synthetic construct
  source 1..203: mol_type = other DNA
ggcgcgccagtcctgttaaaatatataacgtatttttaaaacttaggaaccaagacaaacacttttggtcttggtattggatcctcaagaaatatatcatcatgagtgatatctttgaagaggcggctagttttaggagttatcaatctaagttagggagagatgggagggctagtgcagcaactgctcgactcggaccgatg

SEQ ID NO: 3938 - DNA, 203 bp, synthetic construct
  source 1..203: mol_type = other DNA
ggcgcgccagtcctcaaaggagagattgaatgcttttttggagatctagatcattactatatgtgtctcctataatcacatcataggagtgaaccataatacacatctttgggtaggggaaggaaagtattgttgacgtactgattgatctgcttgagtcaaataatcagtcataacaattcaagaaacgactcggaccgatg

SEQ ID NO: 3939 - DNA, 203 bp, synthetic construct
  source 1..203: mol_type = other DNA
ggcgcgccagtcctggctgccccgtcgtttccaagaccccataagccagccgacttctccagttacggagcgagcccctcttttgttttgttttttgccagatgcatcccgtactgcggcagatgcgcccccaccctccaccgcaacagcagccccctcctacgcaacagccggcgcttctgcctccgcgactcggaccgatg

SEQ ID NO: 3940 - DNA, 203 bp, synthetic construct
  source 1..203: mol_type = other DNA
ggcgcgccagtcctcctgaccggggccgggaccgagggggagagctactttgacatgggcgcggacctgcactggcagcccagccgccgggtcttggaagccgcggcggtcccttacgtagaagaggtggacgatgaggatgagggcgagtacctggaagactgatggcgcgaccgtatttttgctagcgactcggaccgatg

SEQ ID NO: 3941 - DNA, 203 bp, synthetic construct
  source 1..203: mol_type = other DNA
ggcgcgccagtcctcgcggcggtcccttacgtagaagaggtggacgatgaggatgagggcgagtacctggaagactgatggcgcgaccgtatttttgctagatgcagcaacagccacctcctgatcccgcaatgcgggcggcgctgcagagccagccgtccggcattaactcctcggacgattggacccgactcggaccgatg

SEQ ID NO: 3942 - DNA, 203 bp, synthetic construct
  source 1..203: mol_type = other DNA
ggcgcgccagtcctgattccgccgacgacagcagcgtgttggacttgggcgggagtggtggtggtaacccgttcgctcacctgcgcccccgcgtcgggcgcctgatgtaaaaagaaaccaaaaataaatggtactcaccaaggccatggcgaccagcgtgcgttcgtttcttctctgttgtatctagtcgactcggaccgatg

SEQ ID NO: 3943 - DNA, 203 bp, synthetic construct
  source 1..203: mol_type = other DNA
ggcgcgccagtcctctgatgtaaaaagaaaccaaaaataaatggtactcaccaaggccatggcgaccagcgtgcgttcgtttcttctctgttgtatctagtatgatgaggcgtgcgtacccggagggtcctcctccctcgtacgagagcgtgatgcagcaggcaatggcggcggcggcggcgatgcagcgactcggaccgatg

SEQ ID NO: 3944 - DNA, 203 bp, synthetic construct
  source 1..203: mol_type = other DNA
ggcgcgccagtcctacgccccaggcattaagtgccacacatgtgtgtttacttgaggtgatgtcagtatttatagggtgtggagtgcaataaaatatgtgttgactttaagtgcgtggtttatgactcaggggaggggactttgggtatataagcaggtgcagacctgtgtggttagctcagagcggtcgactcggaccgatg

SEQ ID NO: 3945 - DNA, 203 bp, synthetic construct
  source 1..203: mol_type = other DNA
ggcgcgccagtccttgtgcgcgtgcccgtgcgcacccgcccccctcgcacttgaagatgttcacttcgcgatgttgatgtgtcccagcggcgaggagaaggatgtccaagcgcaaattcaaggaagagatgctccaggtcatcgcgcctgagatctacggccccgcggcggcggtgaaggatgaaagacgactcggaccgatg

SEQ ID NO: 3946 - DNA, 203 bp, synthetic construct
  source 1..203: mol_type = other DNA
ggcgcgccagtcctaccgccgcggccgcgcgcctctgaccctgccgcgggcgcgctaccacccgagcattaccatttaactttgccgtcgcctttgcagatatggctctcacatgccgcattcgcgtccccattacgggctaccgaggaagaaaaccgcgccgtagaaggctggcgggaagcgggatgcgactcggaccgatg

SEQ ID NO: 3947 - DNA, 203 bp, synthetic construct
  source 1..203: mol_type = other DNA
ggcgcgccagtcctagcgccactgagacacacacttggaaattgtaataaacccgaatggactctgacgctcctggtcctgtgatgtgtttttgtagacagatggaagacatcaatttttcgtccctggctccgcgacacggcacgcggccgtttatgggcacctggagcgacatcggcaccagccaacgactcggaccgatg

SEQ ID NO: 3948 - DNA, 203 bp, synthetic construct
  source 1..203: mol_type = other DNA
ggcgcgccagtcctggcagagcactctgaacagcatcgtgggtctgggagtgcagagtgtgaagcgccgccgctgttattaaaaaacactgtagcgcttaacttgcttgtctgtgtatatgtgtatgtccgccgccgctgctgtccagaaggaggagtgaagagaaaggcgcgtcgtcgagttgcaagcgactcggaccgatg

SEQ ID NO: 3949 - DNA, 203 bp, synthetic construct
  source 1..203: mol_type = other DNA
ggcgcgccagtcctcttgcttgtctgtgtatatgtgtatgtccgccgccgctgctgtccagaaggaggagtgaagagaaaggcgcgtcgtcgagttgcaagatggccaccccatcgatgctgccccagtgggcgtacatgcacatcgccggacaggacgcttcggagtacctgagtccgggtctggtgcgactcggaccgatg

SEQ ID NO: 3950 - DNA, 203 bp, synthetic construct
  source 1..203: mol_type = other DNA
ggcgcgccagtcctccgcggcgtcattgaggccgtctacctgcgcacccccttctcagccggtaacgccaccacataaattcttgcttcttgcaagaagccatggccgcgggctccggcgagcaggagctcagggccatcatccgcgacctggggtgcgggccctacttcctgggcaccttcgataagcgactcggaccgatg

SEQ ID NO: 3951 - DNA, 203 bp, synthetic construct
  source 1..203: mol_type = other DNA
ggcgcgccagtcctccgcgatcgggggtgcgctcccggcggcgctctaactgacttcctccgcggccggccattgtgttctcctagggaacaacaacaagcatggagactcagccatcgtcgccaacctcgccatctgcccccaccgccgacaagaagcagcagcagaatgagagcttaaccgccccgcgactcggaccgatg

SEQ ID NO: 3952 - DNA, 203 bp, synthetic construct
  source 1..203: mol_type = other DNA
ggcgcgccagtcctcacccgcagttgtctgtatcacaagagcgaagaccaacttcagcgcacgcttgaggacgccgaggctctcttcaacaagtactgcgcactcactcttaaagagtagcccgcgcccgcccacacacggaaaaaggcgggaattacgtcacctgtgcacccccacccagcaccgctcgactcggaccgatg

SEQ ID NO: 3953 - DNA, 203 bp, synthetic construct
  source 1..203: mol_type = other DNA
ggcgcgccagtcctcccttctccggctcccccggccactatccggacgagttcatcccgaacttcgatgccatcagcgaatcggtagacggctacgattgaatgtcccatggtggcgcggctgacctagctcggcttcgacacctggaccactgccgccgctttcgctgcttcgctcgggacctcgcccgactcggaccgatg

SEQ ID NO: 3954 - DNA, 203 bp, synthetic construct
  source 1..203: mol_type = other DNA
ggcgcgccagtcctttgagctgtccgaggagcaccctcagggcccggcccacggagtgcggatcgtcgtcgaagggggcctagactcccacctgcttcgtatcttcagccagcgcccgatcctggtccagcgccaacagggcaacaccctcctgaccctttactgcatctgcaaccaccccggcctgccgactcggaccgatg

SEQ ID NO: 3955 - DNA, 203 bp, synthetic construct
  source 1..203: mol_type = other DNA
ggcgcgccagtcctacctgggaccgcaatgtccagggttagtagtcagcggcatcgtcggtgtgctttgtgggttagcagttataatcatctgcatgttcatttttgcttgctgctacagaaggcttcaccgacagaaatcagacccactgctgaacctctatgtttaatttttgattttccagagcccgactcggaccgatg

SEQ ID NO: 3956 - DNA, 203 bp, synthetic construct
  source 1..203: mol_type = other DNA
ggcgcgccagtcctcattgtgatcggggtggtcatcctagcgatgctgctctacttcatcttctgccgccgcatccccaacgcgaaaccggtctacaagcccatcgttatcgggcagccggagccgcttcaggtggagggaggtctaaggaatcttctcttctcttttacagtatggtgatttgaactcgactcggaccgatg

SEQ ID NO: 3957 - DNA, 203 bp, synthetic construct
  source 1..203: mol_type = other DNA
ggcgcgccagtcctcatcgttatcgggcagccggagccgcttcaggtggagggaggtctaaggaatcttctcttctcttttacagtatggtgatttgaactatgattcctagacagttctttatcattggtcttctctgcgcgctccaagtctgtgccaccctcgctctggtggctaatgcgagtccacgactcggaccgatg

SEQ ID NO: 3958 - DNA, 203 bp, synthetic construct
  source 1..203: mol_type = other DNA
ggcgcgccagtcctggtctttgtgcgcatcgcctacctgcgccaccacccccagtaccgcgaccaaagagtggcgcagctgctcaggctcatctgataagcatgcgggctttgctacttctcatgcttctactattgctagctcccctggtcgccccctttcccctcaaatcccccacccagtccccccgactcggaccgatg

SEQ ID NO: 3959 - DNA, 203 bp, synthetic construct
  source 1..203: mol_type = other DNA
ggcgcgccagtccttcggccagcctaagggacaacacccccaggggcttttcttggaatccatctgaagagacgaagggagggttgatgaagggcacggtcggtgcgttgtctgcatcgtagggatacacggggtcgaagccatcatccacccgcgcgcgctttttggacatctaatagaaataaaaacgactcggaccgatg

SEQ ID NO: 3960 - DNA, 203 bp, synthetic construct
  source 1..203: mol_type = other DNA
ggcgcgccagtcctggtgcgttgtctgcatcgtagggatacacggggtcgaagccatcatccacccgcgcgcgctttttggacatctaatagaaataaaaaatgaagattgagggacaggaggaatttgacatccccttcagagtgtggaggaagtttgcagcccgccggggcctgcagtaccagagccgactcggaccgatg

SEQ ID NO: 3961 - DNA, 203 bp, synthetic construct
  source 1..203: mol_type = other DNA
ggcgcgccagtcctccccggcgggctgcaaacttcctccacactctgaaggggatgtcaaattcctcctgtccctcaatcttcattttttatttctattagatgtccaaaaagcgcgcgcgggtggatgatggcttcgaccccgtgtatccctacgatgcagacaacgcaccgaccgtgcccttcatccgactcggaccgatg

SEQ ID NO: 3962 - DNA, 203 bp, synthetic construct
  source 1..203: mol_type = other DNA
ggcgcgccagtccttttccaccaacacagtgggggcgagaggtgccacctccgggacctgcattttgaagtgttccgagaccgtttggaataaagttaatcatggttcttcctgttcttccctcccccgccgtcaccgaaacccaacaaaattgcatcatctggctgggtttggcccattccaccgtgcgactcggaccgatg

SEQ ID NO: 3963 - DNA, 203 bp, synthetic construct
  source 1..203: mol_type = other DNA
ggcgcgccagtccttagagtgagtagtgttttggggagggagaggacctgcataaggggcagaatgattaaaatctgtgcttttctgtgtgttgcagcagcatgagcggaaacggctcctttgagggaggggtattcagcccttatctgacggggcgtctcccctcctgggcgggagtgcgtcaaaatcgactcggaccgatg

SEQ ID NO: 3964 - DNA, 203 bp, synthetic construct
  source 1..203: mol_type = other DNA
ggcgcgccagtccttgtggcttgcccttctcttgttcctggtggtcctatggctaaaaatttcggagaagatatgaatgagtacatacagttactgctaagggaggagcttagggattgcggcagagcaattgatattccacttgttaatctactacaggtgaaccaggagcagaatctgttggaattcgactcggaccgatg

SEQ ID NO: 3965 - DNA, 203 bp, synthetic construct
  source 1..203: mol_type = other DNA
ggcgcgccagtcctgaagtgcacgtatttttttagtgtgtcaccggtttctgggcgtgttggcgggtatttttagaccttggcctttacgtcagtgaggttagggctatatattgagtacagaagcgggcagttaggttagagctcagctttttctctgactcttgcgcctgccgtgctcggtaagctcgactcggaccgatg

SEQ ID NO: 3966 - DNA, 203 bp, synthetic construct
  source 1..203: mol_type = other DNA
ggcgcgccagtcctagggctatatattgagtacagaagcgggcagttaggttagagctcagctttttctctgactcttgcgcctgccgtgctcggtaagctatggacgctcaggttttgtatgtgtttctggagggagcgggggctttgctgcctgtgcagaaggggagtaattacattttttacgcacgactcggaccgatg

SEQ ID NO: 3967 - DNA, 203 bp, synthetic construct
  source 1..203: mol_type = other DNA
ggcgcgccagtcctcgcggcgtcccactcgaggaccgacccataaagtcggtttacggggacacggacagcctctttgtcacccagcggggacacgagctcatggagaccagaggtaagaaacgcatcaaaaagaacggcggaaaactggtttttgatcccaatcagcccgacctcacctggctcgtgcgactcggaccgatg

SEQ ID NO: 3968 - DNA, 203 bp, synthetic construct
  source 1..203: mol_type = other DNA
ggcgcgccagtcctgccgtgccaacggtcccattttagctggagggcgagatcaagggcgagctcaacgagccggtcgtccccggagagtttcatgaccagcatgaaggggacgagctgcttgccgaaggaccccatccaggtgtaggtttccacatcgtaggtgaggaagagcctttcggtgcgaggcgactcggaccgatg

SEQ ID NO: 3969 - DNA, 203 bp, synthetic construct
  source 1..203: mol_type = other DNA
ggcgcgccagtcctcatgaaggggacgagctgcttgccgaaggaccccatccaggtgtaggtttccacatcgtaggtgaggaagagcctttcggtgcgaggatgcgagccgatggggaagaactggatctcctgccaccagttggaggaatggctgttgatgtgatggaagtagaaatgccgacggcgcgactcggaccgatg

SEQ ID NO: 3970 - DNA, 203 bp, synthetic construct
  source 1..203: mol_type = other DNA
ggcgcgccagtcctatccctcaaggaagcagctggagcggctctcatcccagtaggtggaagccatctctggatcccgtggcgtctcctaaagaggggtatatgcccaagacccgaaagcaacgcagtcgccgacccagaaaccaaagaccatcaactccatgggtaagtccggtctttatttcagtccgactcggaccgatg

SEQ ID NO: 3971 - DNA, 203 bp, synthetic construct
  source 1..203: mol_type = other DNA
ggcgcgccagtccttgctgcctgcagcgaggcttggcccggggccaacgcctgtgagattacccagctcggagttgggcctcaagaaagtaagggctaaagctgctagccctaggggagaaagcaaacaggtgggggctcgtccgggatcgatcacctctctgtatctgcccttccccaatcagaacccgactcggaccgatg

SEQ ID NO: 3972 - DNA, 203 bp, synthetic construct
  source 1..203: mol_type = other DNA
ggcgcgccagtcctctgctagccctaggggagaaagcaaacaggtgggggctcgtccgggatcgatcacctctctgtatctgcccttccccaatcagaaccatgggaaagacttatagctctccggtaaaccctatccccaaagccccaaaagggctagcaattcaccactggctaaactttctccaacgactcggaccgatg

SEQ ID NO: 3973 - DNA, 203 bp, synthetic construct
  source 1..203: mol_type = other DNA
ggcgcgccagtccttagattcggtgccggtaacgattccagttttatactatctgatcattctctatctctattaaggatatttctagtctaaagttcaaaatgtcaagtgttttaaagacatttgaaagatttactatacaacaggagcttcaggagcaatctgatgacactccagtacctcttgagcgactcggaccgatg

SEQ ID NO: 3974 - DNA, 203 bp, synthetic construct
  source 1..203: mol_type = other DNA
ggcgcgccagtcctgacacaatagagaaaatctaggtccgaaagcttgcctctcagacagatcccaaaatcatagtccaaaccccaaacacagcagcagacatgcctataatatcattaccagcagatccaacttcacccagtcaatcccttactccgtttccaatacaacttgacaccaaagatggccgactcggaccgatg

SEQ ID NO: 3975 - DNA, 203 bp, synthetic construct
  source 1..203: mol_type = other DNA
ggcgcgccagtcctgatgttatcataggtccgaactgatcaatctaacaaaaaaactaaacgttccacaataaatcaacgttcaggccaaaatattcagccatgcatcacctgcatccaatgatagtatgcatctttgttatgtacactggaattgtaggttcagatgccattgctggagatcaactacgactcggaccgatg

SEQ ID NO: 3976 - DNA, 203 bp, synthetic construct
  source 1..203: mol_type = other DNA
ggcgcgccagtcctctcaaccagacaccaccagcatacacgaaaccaaccttcacagtggatacctcagcatccaaaactctccttcccgaatggatcaggatgccttcttttttgagagggatcctgaagccgaaggagaggcaccacgaaaacaagaatcactctcagatgtcatcggactccttgcgactcggaccgatg

SEQ ID NO: 3977 - DNA, 203 bp, synthetic construct
  source 1..203: mol_type = other DNA
ggcgcgccagtcctcttcccgaatggatcaggatgccttcttttttgagagggatcctgaagccgaaggagaggcaccacgaaaacaagaatcactctcagatgtcatcggactccttgacgtcgtcttatcctacaagcccacagaaattggagaagacagaagctggctccatggtatcatcgacacgactcggaccgatg

SEQ ID NO: 3978 - DNA, 203 bp, synthetic construct
  source 1..203: mol_type = other DNA
ggcgcgccagtcctccctacatgggtaacaactccaattaaaaaatcagatcaagtacattgtagcatacatacaacaatcaaatctatccacaacttcaccaatcaggtgtacaacaagtaagaaaaacttagggttaaagacaatccagtcaacctataaggcaacagcatccgattatacaaacgcgactcggaccgatg

SEQ ID NO: 3979 - DNA, 203 bp, synthetic construct
  source 1..203: mol_type = other DNA
ggcgcgccagtcctagttgatcctgccagcggtgggtcgctactgtttcgcgaaccagtcgttttgacagttggttgggatcaaatttgttctgtgcgcgtcacgccactttttgtggcgggaatgtgcgaaaataacaggaaaaagaaccctggaaagggttcaaagaagaaaaagaatgctggaagcgactcggaccgatg

SEQ ID NO: 3980 - DNA, 203 bp, synthetic construct
  source 1..203: mol_type = other DNA
ggcgcgccagtcctatggcggggaatttgaagaagaaatctgccaaacccaaggcccaaaggagaccacctcagggccgaggagggcaggtcaaacaaaaacccggtgctgctattgtgggagtcatgcattacgtgacccaccaggcgctgggcatgaagttaagtgggagacttaagaagttctggcgactcggaccgatg

SEQ ID NO: 3981 - DNA, 203 bp, synthetic construct
  source 1..203: mol_type = other DNA
ggcgcgccagtcctacctaacggtgttggggttacagcctgatagggtgctgcagaggcccacgaataggctagtataaaaatctctgctgtacatggcacatggagttgaacaagtttgaacttttatacaaaacaagtaaacaaaaaccagtgggggtgactgaacctatctacgactcagcgggtcgactcggaccgatg

SEQ ID NO: 3982 - DNA, 203 bp, synthetic construct
  source 1..203: mol_type = other DNA
ggcgcgccagtcctgtgctttagtcagtgtccgcagcgttctgttgaacgtgagtgtgttgagaaaaagacagcttaggagaacaagagctgggagtggttatgatgaccacttctaaaggaaaggggggcggtccccctaggcgcaagcttaaagtgaccgcaaataagtcgcgaccagcaacgagccgactcggaccgatg

SEQ ID NO: 3983 - DNA, 203 bp, synthetic construct
  source 1..203: mol_type = other DNA
ggcgcgccagtcctcagcgactgtgattgtggatattctttctgcaagttttgtcgtgaacgtgttgagaaaaagacagcttaggagaacaagagctgggaatggccgggaaggccgttctaaaaggaaagggggggggtccccctcgacgagcgtcgaaagtggccccaaagaagacgcgtcagttgcgactcggaccgatg

SEQ ID NO: 3984 - DNA, 203 bp, synthetic construct
  source 1..203: mol_type = other DNA
ggcgcgccagtcctcatccgtaatacaacccggaataacctccaaaccgagaagaactagtctatgaccagacgaaaaggaactagtccctgttcttttcttagggcctttttcacctgggtaaagtgtagttattgcgtataactctggtatcaataccacccggaagaaattatttatctgccatccgactcggaccgatg

SEQ ID NO: 3985 - DNA, 203 bp, synthetic construct
  source 1..203: mol_type = other DNA
ggcgcgccagtcctatagtctgtgtgacctgcaggcattttgtgaaaagggtaaagtatgaaagctactctcagaaaagtacttatgtattgatgagagccttaaaatgactttatattcacaaaactgctggaagacaatgatctggggtatcacattccctcttaggttaagtttcgcactactagcgactcggaccgatg

SEQ ID NO: 3986 - DNA, 203 bp, synthetic construct
  source 1..203: mol_type = other DNA
ggcgcgccagtcctttaaaatgactttatattcacaaaactgctggaagacaatgatctggggtatcacattccctcttaggttaagtttcgcactactaggaatttttgcgaaaattcttaattccattcttatggtgtagtgtttgttcttttcaattggggcgtatctctctttcgcagagaccccgactcggaccgatg

SEQ ID NO: 3987 - DNA, 203 bp, synthetic construct
  source 1..203: mol_type = other DNA
ggcgcgccagtcctacgggctgaaggatgccctgaaggtacccataggtaaccttaagcgactatggatctgatcaggggcccaccatgtaacacatgggtagaagtcttcggaccttgggttaaaaaacgtctaggcccgccccccacagggatgtggggtttcccttataaccccaatattgtatacgactcggaccgatg

SEQ ID NO: 3988 - DNA, 203 bp, synthetic construct
  source 1..203: mol_type = other DNA
ggcgcgccagtcctagaagtcttcggaccttgggttaaaaaacgtctaggcccgccccccacagggatgtggggtttcccttataaccccaatattgtataatggctgcatccaaaatgaatcccgttggcaacctgctctccacagtctcctcaaccgttggatctcttctacaaaacccctctgttcgactcggaccgatg

SEQ ID NO: 3989 - DNA, 203 bp, synthetic construct
  source 1..203: mol_type = other DNA
ggcgcgccagtcctcacgggttggggcttggccataggccatcggcgcatgcgtggaacctttgtggctcctctgccgatccatactgcggaactcctagcagcttgttttgctcgcagccggtctggagcgaaacttatcggaaccgacaactcagttgtcctctctcggaaatacacctcctttcccgactcggaccgatg

SEQ ID NO: 3990 - DNA, 203 bp, synthetic construct
  source 1..203: mol_type = other DNA
ggcgcgccagtcctctccacaacattccaccaagctctgctagatcccagagtgaggggcctatattttcctgctggtggctccagttccggaacagtaaaccctgttccgactactgcctcacccatatcgtcaatcttctcgaggactggggaccctgcaccgaacatggagagcacaacatcaggcgactcggaccgatg

SEQ ID NO: 3991 - DNA, 203 bp, synthetic construct
  source 1..203: mol_type = other DNA
ggcgcgccagtcctagactgggaggagttgggggaggagattaggttaaaggtctttgtactaggaggctgtaggcataaattggtctgttcaccagcaccatgcaactttttcccctctgcctaatcatctcatgttcatgtcctactgttcaagcctccaagctgtgccttgggtggctttggggccgactcggaccgatg

SEQ ID NO: 3992 - DNA, 203 bp, synthetic construct
  source 1..203: mol_type = other DNA
ggcgcgccagtccttgcccttggacaaaggcattaaaccgtattatcctgaatatgcagttaatcattacttcaaaactaggcattatttacatactctgtggaaggctggcattctatataagagagaaactacacgcagcgcctcattttgtgggtcaccatattcttgggaacaagagctacagccgactcggaccgatg

SEQ ID NO: 3993 - DNA, 203 bp, synthetic construct
  source 1..203: mol_type = other DNA
ggcgcgccagtcctgcatttggtccagggttcaccccaccacacggaggccttttggggtggagccctcaggctcagggcatattgacaacactgccagcagcacctcctcctgcctccaccaatcggcagtcaggaagacagcctactcccatctctccacctctaagagacagtcatcctcaggcccgactcggaccgatg

SEQ ID NO: 3994 - DNA, 203 bp, synthetic construct
  source 1..203: mol_type = other DNA
ggcgcgccagtccttccaatttggcctgttctgaactacaccatctactgctgtgaagaatgtcctgaaggcaagctggttacagccctgatcaggagccccgctcgtgactctcgatcgacgcggggtcaaaaactgtctaagcagcagcagaaacgcgggagcgtttctttttccttatttgtttccgactcggaccgatg

SEQ ID NO: 3995 - DNA, 203 bp, synthetic construct
  source 1..203: mol_type = other DNA
ggcgcgccagtcctcgctcgtgactctcgatcgacgcggggtcaaaaactgtctaagcagcagcagaaacgcgggagcgtttctttttccttatttgtttcatgatggcggcgtctaaggtatacagagtgtgcgagcagactctactagcaggcgctgttcggatgatggacaaattcttgcaaaagcgactcggaccgatg

SEQ ID NO: 3996 - DNA, 203 bp, synthetic construct
  source 1..203: mol_type = other DNA
ggcgcgccagtcctggttacagccctgatcaggagccccgctcgtgactctcgatcgacgcggggtcaaaaactgtctaagcagcagcagaaacgcgggagcgtttctttttccttatttgtttcatgatggcggcgtctaaggtatacagagtgtgcgagcagactctactagcaggcgctgttcggcgactcggaccgatg

SEQ ID NO: 3997 - DNA, 203 bp, synthetic construct
  source 1..203: mol_type = other DNA
ggcgcgccagtcctacagaagagcaagtactcctgactgggcaatgggactgcattgcatatccctaggcacctattgagatttctctggggcccaccagcatggagttcctgtatgggaatgcaggactggacttgtgctgcctgacagggtcgcggctggccgtctgtactttgtatagtcagttgcgactcggaccgatg

SEQ ID NO: 3998 - DNA, 203 bp, synthetic construct
  source 1..203: mol_type = other DNA
ggcgcgccagtcctaggttgggaaacctggactgggtctatactgcctgatagggtcgcggctggccgcctgtaactagtatagtcagttgaaaaccccccatggaatctactactactctttcattttgcaactggatccccaagaaacagagagcccgtgtgtaccttaccaccagtgtcacacaccgactcggaccgatg

SEQ ID NO: 3999 - DNA, 203 bp, synthetic construct
  source 1..203: mol_type = other DNA
ggcgcgccagtcctaagacaggtggaaatttttacgtagtagactgcagctgtttacctttcctaatgcatttcctgtaaatcagaaaggggatcccttgtatacactaaatgatgcaaactggaaatgcttcttccaaaggttgtgggctcggttagacttacacgagcaggacgaccaggaggacacgactcggaccgatg

SEQ ID NO: 4000 - DNA, 203 bp, synthetic construct
  source 1..203: mol_type = other DNA
ggcgcgccagtcctatgtacaaagcggtgatgatgatacatggaccaaggtgtctggccatgtggaccatgcaggactatactttacacacgaagggacacgtgtaacctatgttaggtttgcacaggaagcacagacatatgggaacactggcacctgggaggtgcatgtgggaggacagctaatttcgactcggaccgatg

SEQ ID NO: 4001 - DNA, 203 bp, synthetic construct
  source 1..203: mol_type = other DNA
ggcgcgccagtcctgtgtaacctatgttaggtttgcacaggaagcacagacatatgggaacactggcacctgggaggtgcatgtgggaggacagctaatttatgatgcattcgactcctctgtgtctagcacccaggacaccgaccaagaaccgctatcctctactagacctactgaccccccatacacgactcggaccgatg

SEQ ID NO: 4002 - DNA, 203 bp, synthetic construct
  source 1..203: mol_type = other DNA
ggcgcgccagtccttatatgtattgtatacacagtgtatgtagacacatgtagtgggtttgtgggtgtcatacatttattgggtgtggggtattcattatagtggtgtggtttggtgttttgtttttggctttttgtatggtttgtatttttcatttttttacattatattgctaaataaattttagtcgactcggaccgatg

SEQ ID NO: 4003 - DNA, 203 bp, synthetic construct
  source 1..203: mol_type = other DNA
ggcgcgccagtcctgtggtgtggtttggtgttttgtttttggctttttgtatggtttgtatttttcatttttttacattatattgctaaataaattttagtatgcatcgctctaaacgtcgcaagcgtgcctccgctacccaattatatcaaacctgcaaattggcaggtacctgtccctccgatgtgcgactcggaccgatg

SEQ ID NO: 4004 - DNA, 203 bp, synthetic construct
  source 1..203: mol_type = other DNA
ggcgcgccagtcctttcttgtaaatgggtccacatattatttgttgcccccattaggtttgctacctaaaaaacgtaaacgttttccatatttttttgcagatggcaatgtggaagcctagtgacaacaaggtatacctgcctcctgcccctgtgtccaaggtcctcagcaccgacgcctatgtatcccgactcggaccgatg

SEQ ID NO: 4005 - DNA, 203 bp, synthetic construct
  source 1..203: mol_type = other DNA
ggcgcgccagtcctacctacacaacctacagaaccagcacagcaagcatatagggtggtaacaagttgttgtaggtgttgctgtacagtaaggctggtggtggagagtggacacgcagaaataagacaactccaggagcttctgttgggcgcactgcatatagtgtgtccgctctgcgcataactgctcgactcggaccgatg

SEQ ID NO: 4006 - DNA, 203 bp, synthetic construct
  source 1..203: mol_type = other DNA
ggcgcgccagtcctcgatcctccgtaggaagcgttggtgtcttggacattgccgagttgaaaccttggtttccggctggaaaccacgtcgctcttcgtcaaatgacgaaaggcaaaatgaaaaacgcgaataaaaagaaagcaaaaaactctaagaccaatcctggtcgaagtggcagaagtaatggacgactcggaccgatg

SEQ ID NO: 4007 - DNA, 203 bp, synthetic construct
  source 1..203: mol_type = other DNA
ggcgcgccagtcctagaaaaagaggctgcagaacactttctaaatgtgagtgacgacagtcaaaatgattatgagtaattaaaaaagtgggacaagtcaaaatgtcattccctgaaggaaaagatattcttttcatgggtaatgaagcggcaaaattggcagaagctttccaaaaatcattaagaaaacgactcggaccgatg

SEQ ID NO: 4008 - DNA, 203 bp, synthetic construct
  source 1..203: mol_type = other DNA
ggcgcgccagtcctggagaaacttttgcccacatactaacaacatcacaaccatctcaagaaaagaaactgggcaaaacagcatccaagagacaaatagcaatggatcctcttaatgaatccactgttaatgtctatctccctgattcgtaccttaaaggagtaatttcttttagtgaaactaatgcacgactcggaccgatg

SEQ ID NO: 4009 - DNA, 203 bp, synthetic construct
  source 1..203: mol_type = other DNA
ggcgcgccagtcctgtgtcatcattgattgggaagatcaaggaaacaatttgttccaataatatcgtacatcttgactaagtcgaacaaggggaagtcgatatggatcgtgggaccagaagaatctgggtgtcgcaaaatcaaggtgatactgatttagattatcataaaattttgacagctggccttcgactcggaccgatg

SEQ ID NO: 4010 - DNA, 203 bp, synthetic construct
  source 1..203: mol_type = other DNA
ggcgcgccagtcctaattttaatctccagattaagaaaaagatatacgatgaagattaaggcgacaacgagccgaaacttcatctcttttaaagatctaacattatctgttccaaagtcatacaaggacacattcaaatcagggattgtaagctgctatttcttacctccccaaattacctatacaaccgactcggaccgatg

SEQ ID NO: 4011 - DNA, 203 bp, synthetic construct
  source 1..203: mol_type = other DNA
ggcgcgccagtcctgaagccacgttggtggtgcttgcagctgagaacaactccagagattgtaggtagaaaggaccaacatttataggtaggggtcagaaagcaacaataaccataaaaggagagcctgacattgctatttaatatcctagaacctgatttctaggttctagctttaaaatccggatgcgactcggaccgatg

SEQ ID NO: 4012 - DNA, 203 bp, synthetic construct
  source 1..203: mol_type = other DNA
ggcgcgccagtcctgtattaaaaattgatagcgcttgcgtaagagtaagatctcaagatggatcctgtatctgtagtacatagcttcgctaggagtcaaggcctgccacttaactttgaaactgtgggttgtgagggtccaagtcacgacccacgctttgtaattgaatgtaaatttcttgatttccacgactcggaccgatg

SEQ ID NO: 4013 - DNA, 203 bp, synthetic construct
  source 1..203: mol_type = other DNA
ggcgcgccagtcctgtattaaaattcagcaattgtccaatttaggaaacattctgtttaagagttgacaaggtctcaatgaataatggacaagcaacaattacaagaaatggaggaaggttcgaaatcaggtgtcgtcacttggaccgtgactacaccatgccactaccaaatgctactagtaatgatcgactcggaccgatg

SEQ ID NO: 4014 - DNA, 203 bp, synthetic construct
  source 1..203: mol_type = other DNA
ggcgcgccagtcctgtatttaaaattcatgtttttgcatcatggcgtgggttacgcaagcgtatagttcgggattgtcacagaacagtatcattagtctaacagggaatgacaggactgttgctgatggcacttttaattccatgattatgccaagagctgtaattgctaatgagcgtgaacattttacgactcggaccgatg

SEQ ID NO: 4015 - DNA, 203 bp, synthetic construct
  source 1..203: mol_type = other DNA
ggcgcgccagtcctaacaatggctaacttggtgtaatgcacaaagctggagccactatgaaaactgggcaataaactacacatttgatttccctggaataaatgcagatgccctccacccagatctccaaaccacccccattgtcccagacaccagtatcagcagcagtggtggtgaaagctctgaagcgactcggaccgatg

SEQ ID NO: 4016 - DNA, 203 bp, synthetic construct
  source 1..203: mol_type = other DNA
ggcgcgccagtcctgttgtcatgtaggagcctctaacccattttctgtgttaacttgtaaaaaatgtgcttacctgtctggattacaaagttttgtagattatgagtaaaaccactaacaaatggtgggaaagcagtgacaaatttgcccaggacgtgtataagcagtttgtgcaattttatgaaaaacgactcggaccgatg

SEQ ID NO: 4017 - DNA, 203 bp, synthetic construct
  source 1..203: mol_type = other DNA
ggcgcgccagtcctcattggacggtagcagatgaagaattgttaaaaaatataaaaaatgaaacagggtttcaagcacaagcagtaaaagattactttactttaaaaggtgcagctgcccctgtggcccattttcaaggaagtttaccggaagtgcccgcgtacaacgcctcagaaaaataccccagccgactcggaccgatg

SEQ ID NO: 4018 - DNA, 203 bp, synthetic construct
  source 1..203: mol_type = other DNA
ggcgcgccagtcctcacaaagtgggccaattggaggtattaaatccatgggaattactactttagttcaatatgctgtgggaataatgacagttaccatgacctttaaattgggacctcgaaaggctactggaaggtggaatccccagcctggcgtttatcctcctcatgcagctggtcatttaccatcgactcggaccgatg

SEQ ID NO: 4019 - DNA, 203 bp, synthetic construct
  source 1..203: mol_type = other DNA
ggcgcgccagtcctcgcaccgaggatcctaggcattaaggctatcttatttaattgtctttaattgcctcttgtgtcttctgtgcccctacgggaccctatcccatagcgaactgttgctctagcagaccacatgttctgagggttctgaacatcatacctgcagctaaacatggaggaagacatagccgactcggaccgatg

SEQ ID NO: 4020 - DNA, 203 bp, synthetic construct
  source 1..203: mol_type = other DNA
ggcgcgccagtcctatcaagatggccgttggcagccccacgaaatctagattagtccgaatgtcctattttgattaggtggtcagataggtcagaaactcacctgctaattttcaagaaacacaaatgacacatgaacaacaacaaattttaactttctcttctgaaggtatgaccccatccactagtcgactcggaccgatg

SEQ ID NO: 4021 - DNA, 203 bp, synthetic construct
  source 1..203: mol_type = other DNA
ggcgcgccagtccttctctgctctcactgccattctcaagtgttcacactgtccaagctcctttggttgttcgcttccacttgccactgtcaactcttgtcatggacccctcaaacttcaagctcttctccatctcccaccgcactgctaagcgctggtcgtggcgcagattccgtgtggagacacgtcgactcggaccgatg

SEQ ID NO: 4022 - DNA, 203 bp, synthetic construct
  source 1..203: mol_type = other DNA
ggcgcgccagtcctacaagccctatatttacttgttgcattttactcgtcagaagaaatcacagagtatcatttggatttgttactcacattaaggacaagatgggtatgcaaatgagtaagaacaccgctgggtctcacaccactgtgacccaagccagtggaggctcccacataaattacaccaaccgactcggaccgatg

SEQ ID NO: 4023 - DNA, 203 bp, synthetic construct
  source 1..203: mol_type = other DNA
ggcgcgccagtcctgagggactgtataagccctcgaaaaaagggatgcttcaagtgtggagatctaggacacataatgagaaattgcccaaagatggtgaattttttagggaataccccctggggcagtggcaaacccaggaacttcccggcgatgccattgaccccaacggcccctccaatgccaggcgactcggaccgatg

SEQ ID NO: 4024 - DNA, 203 bp, synthetic construct
  source 1..203: mol_type = other DNA
ggcgcgccagtcctatgcatagaacactggcatgacagacatcagagaagcttaagctatgcaaagtatagatacctgctgttgatgaataaagcaatgtttactcacatgcaacaagaatgtccttgtagaagtgggcatccgagaggacctcctcctccagggatggtctaacctctgtgttacagcgactcggaccgatg

SEQ ID NO: 4025 - DNA, 203 bp, synthetic construct
  source 1..203: mol_type = other DNA
ggcgcgccagtcctatccaaagtataaatatctgcatagtagaattaaagcatttgagtttgtaaataagtttccatttaaggacgatggcagtcccttgtttgaacttactgaccaaagctggaaatctttttttcaaaggctttggaggcaattagatctaagtgaccaagaagacgagggtgaggcgactcggaccgatg

SEQ ID NO: 4026 - DNA, 203 bp, synthetic construct
  source 1..203: mol_type = other DNA
ggcgcgccagtcctatatatattttgaagatgacgaaggcaactggcaaaagactgagggacatttggactatcatggtgcctattttatggatggattaaataaacaatactatatcagatttgctcaagacgcacgcagatttagtgaaactggagaatgggaagttaagtttaacaacgaaatttcgactcggaccgatg

SEQ ID NO: 4027 - DNA, 203 bp, synthetic construct
  source 1..203: mol_type = other DNA
ggcgcgccagtcctagagaaattggcagtttgtgcatcaggcattccttttgatagagttagaggagcttggaaggcagtgtgtaggttttgtacagagatatgattgggaaacaggctactataccagatattgtgctggatctgcaagaccttgtccagcccattgacctgcattgtgacgaagaccgactcggaccgatg

SEQ ID NO: 4028 - DNA, 203 bp, synthetic construct
  source 1..203: mol_type = other DNA
ggcgcgccagtcctcagaaaatcaggaggaggagcctgcacctcaaagaatagactacaagatagtttcctcgtgtggtggctgcggaattaagcttcgaatttttgcatcgtgtacccaatttggaattagaactctgcaagacctacttcttgaagaaatagcgttgctgtgtcctgactgcaaaacgactcggaccgatg

SEQ ID NO: 4029 - DNA, 203 bp, synthetic construct
  source 1..203: mol_type = other DNA
ggcgcgccagtcctaatttaaatatgttaataatgctgaagacaagtatttcgattattaacctctatatttctatataaagtatctgtgagtctcagtggacatcacagtaaggtcgcagttaacttgtaatcttttcattcctgtgtcggagcagtggtaatggagccggacgatttcgccaaaaccgactcggaccgatg

SEQ ID NO: 4030 - DNA, 203 bp, synthetic construct
  source 1..203: mol_type = other DNA
ggcgcgccagtcctagcagggttaataatcactcactgagtgacatcaacatcatggcgtcgcaaggcaccaaacgatcctatgaacagatggaaactggtggagaacgccagaatgccactgagatcagggcatctgttggaagaatggttggtggaattgggaggttttacgtacagatgtgcactcgactcggaccgatg

SEQ ID NO: 4031 - DNA, 203 bp, synthetic construct
  source 1..203: mol_type = other DNA
ggcgcgccagtcctggggaattccaaaagcaggtagatattgaaagatgagtcttctaaccgaggtcgaaacgtacgttctctctatcatcccatcaggccccctcaaagccgagatcgcgcagagacttgaggatgtttttgcagggaagaacacagatcttgaggctctcatggaatggctaaagacgactcggaccgatg

SEQ ID NO: 4032 - DNA, 203 bp, synthetic construct
  source 1..203: mol_type = other DNA
ggcgcgccagtcctaccacaaagatcaggtaattcgggttgttttgtttgtggacaacctggccatcgggctgcagtgtgccctcaaaaacaacaaaaccctgttaacactcctaatttgtgcccacgatgtaaaaaaggaaagcattgggcacgggattgccgttctaaaacggatgttcaaggtaacgactcggaccgatg

SEQ ID NO: 4033 - DNA, 203 bp, synthetic construct
  source 1..203: mol_type = other DNA
ggcgcgccagtccttttccttatacaggtgcattccttgtcagtgctggtcgcggcaggtggcgcccaacgtggggctcgacagttttcctcgccactactcttgtaaattggatagagtgagtatatgcgtgagtacgtaaattatattatagtggagtagtaaggtatattgttgagagtataaatcgactcggaccgatg

SEQ ID NO: 4034 - DNA, 203 bp, synthetic construct
  source 1..203: mol_type = other DNA
ggcgcgccagtcctgccccatctcccagttaatctatggggacgcgatatcttaagtaaaatgggtgtctatttatataatccttcacccaccgtaacagatttaatgttagatcaagggttactttcaaatcagggcttaggtaaacagcatcaaggtatcgtcttgccccttgatttaaaacctaacgactcggaccgatg

SEQ ID NO: 4035 - DNA, 203 bp, synthetic construct
  source 1..203: mol_type = other DNA
ggcgcgccagtccttttaatgttagatcaagggttactttcaaatcagggcttaggtaaacagcatcaaggtatcgtcttgccccttgatttaaaacctaatcaagaacgaagaggtttggggtgttttccctagggacctctgattctcctgtgacacatgccgaccccattgattggaaatctgggcgactcggaccgatg

SEQ ID NO: 4036 - DNA, 203 bp, synthetic construct
  source 1..203: mol_type = other DNA
ggcgcgccagtcctcatgtaaaaaaccacttgtacgatggaaggatccacttaccaatctgtggtatggaccagaccctgtattgatatggggacgagggcatgtttgtgtttttccacaggatgccgaagcaccgcgttggataccggaaaggctggtacgcgcggcagaggaattccctgacacatcgactcggaccgatg

SEQ ID NO: 4037 - DNA, 203 bp, synthetic construct
  source 1..203: mol_type = other DNA
ggcgcgccagtcctgcggcagggttggtggaaggaattgcccgcatcagccagtcgtgaacgtgttgagaaaaagacagcttaggagaacaagagctggggatggccgggaaggccattctgaaaggaaaggggggcggtccccctcgacgagtgtcgaaagagaccgctaagaagacgcgtcaacgccgactcggaccgatg

SEQ ID NO: 4038 - DNA, 203 bp, synthetic construct
  source 1..203: mol_type = other DNA
ggcgcgccagtcctcgcacatgtgatcctaggcgattcttgatcgcgcttattagctaaccaatttaatttggtgttgaagtgttgacacgctctctaacacatggggcagcttatcagcttctttcaggagattcctgtttttctacaggaagctctgaacatcgctttagtggctgttagtctcatcgactcggaccgatg

SEQ ID NO: 4039 - DNA, 203 bp, synthetic construct
  source 1..203: mol_type = other DNA
ggcgcgccagtcctgcacatgtgatcctaggcgattcttgatcgcgcttattagctaaccaatttaatttggtgttgaagtgttgacacgctctctaacacatggggcagcttatcagcttctttcaggagattcctgtttttctacaggaagctctgaacatcgctttagtggctgttagtctcatacgactcggaccgatg

SEQ ID NO: 4040 - DNA, 203 bp, synthetic construct
  source 1..203: mol_type = other DNA
ggcgcgccagtcctgcgcacagtggatcctaggcgtaactagatcaagttttgctgagtaaaattttaaacacattgagtatccgtgcaagacagcgcagagctccccacaatgggcaactgcaataagcctcccaagaggcctcccaacacacaaacatcatccaaccaaccctcagcagagttcagcgactcggaccgatg

SEQ ID NO: 4041 - DNA, 203 bp, synthetic construct
  source 1..203: mol_type = other DNA
ggcgcgccagtcctcgcacagtggatcctaggcggcacttgagcatggaggaatcagtaaatgaaataaaaagccttattagaaagcattttccagaaagacaggagctagcataccaaagggacatctttttatctcaacatcaccccagctctctgttgttggaagggttcaaacttctgtcaagtcgactcggaccgatg

SEQ ID NO: 4042 - DNA, 203 bp, synthetic construct
  source 1..203: mol_type = other DNA
ggcgcgccagtccttctacgtttctgctacacagtttggaattcgttctttagaagacttgctgctagaagaaccttctttgctgtgtcctgcttgcagaaatggcagataatagaggtattgatcctaaagaagggtgtagtaattggttttctcttgaagcagactgtagtgatttagatgatgatcgactcggaccgatg

SEQ ID NO: 4043 - DNA, 203 bp, synthetic construct
  source 1..203: mol_type = other DNA
ggcgcgccagtccttagaggttatttttgatgcagatcctgaaaatattatgttatacacatcctggcagttcatttactttgaagacactgatggacattggcaaaaaactgaagggcgtattgattatgctggtttatattatttggaagggcaattaagacattattacgtggaatttaaagtagcgactcggaccgatg

SEQ ID NO: 4044 - DNA, 203 bp, synthetic construct
  source 1..203: mol_type = other DNA
ggcgcgccagtccttggatattacatatcatatccagaaacaaggaatattccagaagttatatacactgagccagacacgactccaacaataataattcatacagaggatttcagtggtgattattatttacatccaagtttgagacgaagaaaaagaaaacgagcctatttgtaatttttttgcagcgactcggaccgatg

SEQ ID NO: 4045 - DNA, 203 bp, synthetic construct
  source 1..203: mol_type = other DNA
ggcgcgccagtccttgcgattgtaattattgtagttttgttgttatattttatggtggataatgttactaggctgcatgatgcttagaccataatctaaacatgtttttgatacttttaatttccttaccaacggcttttgctgttataggagatttaaagtgtacttcagatactagttatattaatcgactcggaccgatg

SEQ ID NO: 4046 - DNA, 203 bp, synthetic construct
  source 1..203: mol_type = other DNA
ggcgcgccagtccttaatagaggtaggcagttttatgagttttacaatgatgtaaaaccaccagtccttgatgtggatgacgtttaggtaatccaaacattatgagtagtaaaactacaccagcaccagtttatatctggactgctgatgaagctattaaattcctaaaggaatggaatttttctttgcgactcggaccgatg

SEQ ID NO: 4047 - DNA, 203 bp, synthetic construct
  source 1..203: mol_type = other DNA
ggcgcgccagtcctgctaaggttacacacctgtgcacatataagcgtggttttcttgacaggataagcgatactagtggttttgctgtttatgttaagtccaaagtcggtaattaccgactgccatcaacccaaaagggttctggcatggacaccgcattgttgagaaataatatctaaattttaaggcgactcggaccgatg

SEQ ID NO: 4048 - DNA, 203 bp, synthetic construct
  source 1..203: mol_type = other DNA
ggcgcgccagtcctggttttgagtttgattaagagtggtaggttgttgttacgcaataatggtcgttttggtggttttagtaatcatttagtctcaactaaatgaaacttttcttgattttgcttgttttgcccctggcctcttgctttttcacatgtaatagtaatgctaatctctctatgttacaacgactcggaccgatg

SEQ ID NO: 4049 - DNA, 203 bp, synthetic construct
  source 1..203: mol_type = other DNA
ggcgcgccagtcctgtgtaattgaaatttcgtcaagtttgtaaactggttaggcaagtgttgtattttctgtgtctaagcactggtgattctgttcactagtgcatacattgatatttaagtggtgttccgtcactgcttattgtggaagcaacgttctgtcgttgtggaaaccaataactgctaacccgactcggaccgatg

SEQ ID NO: 4050 - DNA, 203 bp, synthetic construct
  source 1..203: mol_type = other DNA
ggcgcgccagtcctgcgaacggagactacatgcaacaagtggtgaccccgacgtgatctgtctgctgagggtagctgcccggcatgcccgtgacgtggagaagagcctgtgaggtggcggcaggtcgcgcacggaagacgtattgcggttaagagcctgcgaggtggcggcaggtcgcatacgtaacacgactcggaccgatg

SEQ ID NO: 4051 - DNA, 203 bp, synthetic construct
  source 1..203: mol_type = other DNA
ggcgcgccagtcctgtccgagcacttttgcgtctgtaggcagaaataaacacgtcgcgagacctggtgtttgaccagcagggggaagacgcagtggtccgtcggtgtctgcgagagtacgttggcgactatatgagcagaatcatactctgttgcgaacagaacgagcgtcatcgtcgcgccggcacgcgactcggaccgatg

SEQ ID NO: 4052 - DNA, 203 bp, synthetic construct
  source 1..203: mol_type = other DNA
ggcgcgccagtcctctgaaaacgggagcgcggcagccgcgacagtaccagttgagagtcgattcggtcggttaacatcgtaagcatcgtggcggtggtgtgatggagtggaacacactagtattaggtcttttggttttatcggtagtggcaagttccaacaatacgtcgactgctagcacaccgcgtcgactcggaccgatg

SEQ ID NO: 4053 - DNA, 203 bp, synthetic construct
  source 1..203: mol_type = other DNA
ggcgcgccagtccttatcgggccctgtatacaagctcggtacacagccaaggtgcgggagactaggtcgtcttggaagccgatgcaacaacggtagatgagcagcaaaacgaccagaatcagcagtgagtacacgcaggcaaaccaaaccacaaggcagacggacggtgcggggtctcctcctctgtacgactcggaccgatg

SEQ ID NO: 4054 - DNA, 203 bp, synthetic construct
  source 1..203: mol_type = other DNA
ggcgcgccagtcctcagcaaaacgaccagaatcagcagtgagtacacgcaggcaaaccaaaccacaaggcagacggacggtgcggggtctcctcctctgtaatggggaaaaaagagatgataatggtgaaaggcattcctaaaattatgctcctgatctctataacgttcttgctcctttccctcatacgactcggaccgatg

SEQ ID NO: 4055 - DNA, 203 bp, synthetic construct
  source 1..203: mol_type = other DNA
ggcgcgccagtcctttcctgggatcctttctctccttctctcgggtgtaacgccaaccaccacctggatcacgccgctgaacccagcggcgcggccgcgctatgcggccaggcctcccctcctacctcatcatcctcgccgtctgtctcttcagccacctactttcgtcacgatatggcgcagaagcccgactcggaccgatg

SEQ ID NO: 4056 - DNA, 203 bp, synthetic construct
  source 1..203: mol_type = other DNA
ggcgcgccagtccttggactttgattttctgcgtctgccgcgcggtggcggtcaagtctggagcgtagtgcctagtttggttttttttcagcaaaaggccgatcgcccatctttttaccgggcttttcgctcgggccgtttcgacttgtgtaccgattctgttctggactatctgggacggcgtcaggcgactcggaccgatg

SEQ ID NO: 4057 - DNA, 203 bp, synthetic construct
  source 1..203: mol_type = other DNA
ggcgcgccagtcctatcgcccatctttttaccgggcttttcgctcgggccgtttcgacttgtgtaccgattctgttctggactatctgggacggcgtcaggatgagtctgttgcacaccttttggcggctacccgtcgccgtcttcttcgagccgcacgaggaaaacgtgctgcgctgccccgagcgccgactcggaccgatg

SEQ ID NO: 4058 - DNA, 203 bp, synthetic construct
  source 1..203: mol_type = other DNA
ggcgcgccagtcctttccaccacgtgtcgctcgctgcataaagggcgaacgtcctcggagagggtatattcgttcggcgagagcgggcggcggtggtgggtatgtccccttctgtggaggagactacctcagtcaccgagtccatcatgttcgctatcgtgagtttcaaacacatgggcccgttcgaacgactcggaccgatg

SEQ ID NO: 4059 - DNA, 203 bp, synthetic construct
  source 1..203: mol_type = other DNA
ggcgcgccagtcctcgcagtcaggccgccacgccggcggctggggcgcgcgttccctcttcgtccccgtcgcctccagtcgaaccgccatctcctgtacagccgcctgcgcttccagcgtcgccgtccgttcttcccgcggaatcaccgccgtcgctttctccctcggagccggcagaggcggcgtcccgactcggaccgatg

SEQ ID NO: 4060 - DNA, 203 bp, synthetic construct
  source 1..203: mol_type = other DNA
ggcgcgccagtcctacgcgcttaggacgactctataaaaacccacgtccactcagacacgcaacttttggccgccacacctgtcaccgctgctatatttgcgacagttgccggaacccttcccgacctcccacgaagacccgttcacctttgcgcatcccctgaccctccccccatcccgccttcgcacgactcggaccgatg

SEQ ID NO: 4061 - DNA, 203 bp, synthetic construct
  source 1..203: mol_type = other DNA
ggcgcgccagtcctgacagttgccggaacccttcccgacctcccacgaagacccgttcacctttgcgcatcccctgaccctccccccatcccgccttcgcaatgtctcaggcatcgtcctcgcccggtgagggaccctcgtcggaagcggccgcgatcagcgaggccgaagccgccagcggaagctttcgactcggaccgatg

SEQ ID NO: 4062 - DNA, 203 bp, synthetic construct
  source 1..203: mol_type = other DNA
ggcgcgccagtcctacggtggggctttgcctctttttttttgtaataaaaaaagacactcaataatccgcggttgtctctgtgtataacgtttttatttcgggttccgcgtttggtcgcctgcctatgtaaggcggcggccgcagagcgcgcgccgctcagtcgcctacacccgtacgcgcaggcagccgactcggaccgatg

SEQ ID NO: 4063 - DNA, 203 bp, synthetic construct
  source 1..203: mol_type = other DNA
ggcgcgccagtcctatttaactcgtgaggccgtccggtgaggaggacggcgacgaccgcaggttagcggcgagtcacctagacgcaaacgcgggcccggacgcgccacgctcgctctgacgccgcgcccggtgcagacgttgttcgtctccgcttctcctccgtcgcggccaggatttcaccgccgctcgactcggaccgatg

SEQ ID NO: 4064 - DNA, 203 bp, synthetic construct
  source 1..203: mol_type = other DNA
ggcgcgccagtcctgcgccacgctcgctctgacgccgcgcccggtgcagacgttgttcgtctccgcttctcctccgtcgcggccaggatttcaccgccgctatggcggccatggaggccaacatcttctgcactttcgaccacaagctcagcatcgccgacgtaggcaaactgaccaaactagtagcgcgactcggaccgatg

SEQ ID NO: 4065 - DNA, 203 bp, synthetic construct
  source 1..203: mol_type = other DNA
ggcgcgccagtcctcgaggcggcgcggcgcagcgccggccattctccgggtcgcgctgctttccccgagctccgacgcctcgcgctcacgccgccgccgcgatggagaactggtcggcgctcgagctcctgcctaaagtaggcattcccactgactttctgacgcacgtcaagaccagcgccggcgagcgactcggaccgatg

SEQ ID NO: 4066 - DNA, 203 bp, synthetic construct
  source 1..203: mol_type = other DNA
ggcgcgccagtcctgatccaccagacgttgtttcgattgtgctcggcggccgcagccacatcgggcctgtgttcatcccctcccccattgtgtgtgtcctcatcttcctccgtcccttctgtcccaacctccgtcagcgttgacggcagttctgaacccacgtcgccgcgagtgcggtttgcatcacgcgactcggaccgatg

SEQ ID NO: 4067 - DNA, 203 bp, synthetic construct
  source 1..203: mol_type = other DNA
ggcgcgccagtcctatcttcctccgtcccttctgtcccaacctccgtcagcgttgacggcagttctgaacccacgtcgccgcgagtgcggtttgcatcacgatgatggaagccgcggccgctgccgccgcggcgtttcgtccggaggagcgtccgacgccgggttggcacgacgcggcgttgttaatgcgactcggaccgatg

SEQ ID NO: 4068 - DNA, 203 bp, synthetic construct
  source 1..203: mol_type = other DNA
ggcgcgccagtcctgacgacaccactagggacgacgaagacgaacgagtgacggcgcccgtcccacaagccacgtccgcgacaacgtggttttcaggtggatcctccgtcgtcctcgcggacgccatctttttcctctcctctcgccgctgccgcctaacctccgctcgcaccaccgccgccgccatccgactcggaccgatg

SEQ ID NO: 4069 - DNA, 203 bp, synthetic construct
  source 1..203: mol_type = other DNA
ggcgcgccagtcctccgcttggaactggtcgcgtccgtgttcgagcacctgacggtggagtgcgtcaacgacatcctggacgcctgcagccacccggacgtgaacgtcgtggagacaagcaacacctgtcgtccctgcccttctcctgttccctccgcccccaaaactgtcagcgacgctcagacgtccgactcggaccgatg

SEQ ID NO: 4070 - DNA, 203 bp, synthetic construct
  source 1..203: mol_type = other DNA
ggcgcgccagtcctatagcacgttcctttttttttgtttttgcatcacttatcgccactatcagtgcaatattttgattgtgagactgaaagagtatcgttatgatgcttagaacgtggatatcattaccgatggtactgcttgacgcgtactgtttttgtatttttgtgagttgttcaatcagcacgcgactcggaccgatg

SEQ ID NO: 4071 - DNA, 203 bp, synthetic construct
  source 1..203: mol_type = other DNA
ggcgcgccagtcctgcctcgttgcacgagtgggccagcccgagttcggggtgcatcatctggtagcgcttgcggcacagcgccgccacattggtgaaggccgtggagatgcaggaggtggggtggctcttgcgcttctgcagctccgcgtagcgctcctggatcttggcggccgaatctccgcgcaaccgactcggaccgatg

SEQ ID NO: 4072 - DNA, 203 bp, synthetic construct
  source 1..203: mol_type = other DNA
ggcgcgccagtccttataacgcctttcggcgcaccaccagcataatctgcgaggaggaccttgacggtgactgccgtcaactgttccccgagtaacctggacgcggaacgtgacggttgccgaggggaaaggcgacagagaaggtacaaacccaccggcggggaaaatactgaggcgccgccatcatccgactcggaccgatg

SEQ ID NO: 4073 - DNA, 203 bp, synthetic construct
  source 1..203: mol_type = other DNA
ggcgcgccagtcctaagcgaactgggctgcgagttgctggccggcggtcgcgttttccactgcgaccacatcccgctcctgctcatcgtcacgcccgtggtctttgaccctcagtttacgcgccatgccgtctctaccgtgttagaccgttggagtcgcgacctgtcccgcaagacgaacctaccgatcgactcggaccgatg

SEQ ID NO: 4074 - DNA, 203 bp, synthetic construct
  source 1..203: mol_type = other DNA
ggcgcgccagtcctctttgaccctcagtttacgcgccatgccgtctctaccgtgttagaccgttggagtcgcgacctgtcccgcaagacgaacctaccgatatgggtgccgaactctgcaaacgaatatgttgtgagttcggtaccacgtccggtgagcccctgaaagatgctctgggtcgccaggtgcgactcggaccgatg

SEQ ID NO: 4075 - DNA, 203 bp, synthetic construct
  source 1..203: mol_type = other DNA
ggcgcgccagtccttcccatcgtagtatttaacgacccgcgagcctgtcgtcatccgcgcgcccccatcgcctcccgagcgagcgggccgccgctatcgccatggccccctcgcacgtggataaggtgaatacacggacatggagcgcttctatcgttttcatggtgctgacttttgtcaacgtcagccgactcggaccgatg

SEQ ID NO: 4076 - DNA, 203 bp, synthetic construct
  source 1..203: mol_type = other DNA
ggcgcgccagtcctgatagcggcggcccgctcgctcgggaggcgatgggcgcgcgccgatgacgacaggctcgcgggtcgttaaatactacgatgggagccgccgcggctcacgacgcggtttgagcacgtccgggcggtcggtgaaaaaagaccccgcgggccttcgcgactctcttctgtccgaggcgactcggaccgatg

SEQ ID NO: 4077 - DNA, 203 bp, synthetic construct
  source 1..203: mol_type = other DNA
ggcgcgccagtccttagaccgtctccgggacatcgcccgtcctctgaaataccgctatcaacgtcttgtcgctaccgtgtagctagttagccagctgtgtgtagttgtattttgcttttgcatatttgttttcagtcagagagtctgaaacggggtgggagggacttttgcgggtagtgcatgctaagcgactcggaccgatg

SEQ ID NO: 4078 - DNA, 203 bp, synthetic construct
  source 1..203: mol_type = other DNA
ggcgcgccagtccttagttgtattttgcttttgcatatttgttttcagtcagagagtctgaaacggggtgggagggacttttgcgggtagtgcatgctaagatgaacggatgggctggggtgtgcttgataactcactgtttgaatacgcgctcacgcacatatgtagcactcaacatgttagcttttcgactcggaccgatg

SEQ ID NO: 4079 - DNA, 203 bp, synthetic construct
  source 1..203: mol_type = other DNA
ggcgcgccagtcctcaggaacgcttgaaaggtccgcgccgcgccgcttgatcacggcagacgaggagcggcgcggcccagagcgtgtcggccgatttcgaaatggaggccctgatgatccgcggcgtgctggaggtccatacggatttcactagacagaatgtgatgatcatggagccgcaagtgctccgactcggaccgatg

SEQ ID NO: 4080 - DNA, 203 bp, synthetic construct
  source 1..203: mol_type = other DNA
ggcgcgccagtcctagcgcgcggaagggaaagaagggccaacggtcgacgcagggcacgcgcgtgccgccggcctcggacgaagcggcagcggcggcagaagaggagacggaggagtgaacggtcgccgttgccgcggcggtagttgcggcagaggggttgttatctgtcgttcgttcaacgcgactgcgactcggaccgatg

SEQ ID NO: 4081 - DNA, 203 bp, synthetic construct
  source 1..203: mol_type = other DNA
ggcgcgccagtccttcggccacgcgccgcaccgtgatggtgtcaaagagcgtcttgcacactccgtagagcagctgcttgcgcagcacgcacgggtcgcgcagcacctggtgcatgctctggccgcgacacgtccccagaaagccgtgcagcaaccgcaggaagctcatcgtctggcccgtggggaaacgactcggaccgatg

SEQ ID NO: 4082 - DNA, 203 bp, synthetic construct
  source 1..203: mol_type = other DNA
ggcgcgccagtcctaaaaaattgacaaaaacatcataacataaaggaccacctacctgggacgcgcagttgggcggcggattggggcggcatgctgcggcgatgctgtcggtgatggtctcttcctctctggtcctgatcgtcttttttctaggcgcttccgaggaggcgaagccggcaacgacgacgcgactcggaccgatg

SEQ ID NO: 4083 - DNA, 203 bp, synthetic construct
  source 1..203: mol_type = other DNA
ggcgcgccagtcctaacgtactgtttaaccacgttgcgtcgtgacgttgtttgtgggtgttgctaggcgggctggaaagatgatgtataaatagagtctgcgacggggttcggcgctctgccggctgcggcggcactcgctccacggcctccgacgagcgttgcgctcgcgctttgcgccgccgcgtccgactcggaccgatg

SEQ ID NO: 4084 - DNA, 203 bp, synthetic construct
  source 1..203: mol_type = other DNA
ggcgcgccagtcctcgctgctacgccacctagataaatactacgccggactgccgcccgagctgaagcagacgcgcgtcaacctgccggctcactcgcgctatggccctcaagcagtggatgctcgctaacattgctgataataaaggctctctgttaacccccgacgagcaggctcgcgtgttttgtcgactcggaccgatg

SEQ ID NO: 4085 - DNA, 203 bp, synthetic construct
  source 1..203: mol_type = other DNA
ggcgcgccagtccttaacgttttagggatcgaagacctgagtgccaacttttggcgccaactggctccttaccgtcacactctcatcgtgccgcagacttgatgtgccgccgcccggattgcggcttctctttctcacctggaccggtgatactgctgtggtgttgccttctgctgcccattgtttcccgactcggaccgatg

SEQ ID NO: 4086 - DNA, 203 bp, synthetic construct
  source 1..203: mol_type = other DNA
ggcgcgccagtcctggtctcgggcgccaccaagaaagacctgttcgacgccgtaaccctgtgcgcttccatcgtagaaaagcagccagacgtatttaatatcaacgtcagcttgttgacgtacccttcgatcgcggcgccccacttgccgctgtacaacgaattcaccagctttcgcctgcccacctccgactcggaccgatg

SEQ ID NO: 4087 - DNA, 203 bp, synthetic construct
  source 1..203: mol_type = other DNA
ggcgcgccagtcctcaacgtcagcttgttgacgtacccttcgatcgcggcgccccacttgccgctgtacaacgaattcaccagctttcgcctgcccacctcatgaagcggcggcggcgatggcggggctggttgcttttcctggccctgtgcttttgcttactgtgtgaagcggtggaaaccaacgcgcgactcggaccgatg

SEQ ID NO: 4088 - DNA, 203 bp, synthetic construct
  source 1..203: mol_type = other DNA
ggcgcgccagtccttgtgttgtttttatttcgctgacttctacggggtttcccctcagcctctgtgttcccaacccgtccccccgctgagcgttggcggcgatggtcatgttctcccaggaccacgtccagatcgtctacggctccacacgcatctgcaagtccctggccccggccaacaagagaaagcgactcggaccgatg

SEQ ID NO: 4089 - DNA, 203 bp, synthetic construct
  source 1..203: mol_type = other DNA
ggcgcgccagtccttggagctggacgtttaggcgtcacaagaggtgacgcgacctcctgccacatatagctcgtccacacgccgtctcgtcacacggcaacatgtgttccgtgctggcgatcgcgctcgtagttgcgctcttgggcgacatgcacccgggagtgaaaagtagcaccacaagcgccgtccgactcggaccgatg

SEQ ID NO: 4090 - DNA, 203 bp, synthetic construct
  source 1..203: mol_type = other DNA
ggcgcgccagtcctgtgatttcccgtgacagtattaacgtgtggtgagaatgctgtttaataaaagtagcttttttatacatctccgtctctggtctcctgatgtgggggtgcgggtggtcccggatacttgtccttctcctcctcatgtgtatggccctgatggcgagaggcacatacggggcttaccgactcggaccgatg

SEQ ID NO: 4091 - DNA, 203 bp, synthetic construct
  source 1..203: mol_type = other DNA
ggcgcgccagtcctaatcaacgtgaccgaggtgtcgttgctcatcagcgactttagacgtcagaaccgtcgcggcggcaccaacaaaaggaccacgttcaacgccgccggttcgctggcgccacacgcccggagcctcgagttcagcgtgcggctctttgccaactagcctgcgtcacgggaaataatcgactcggaccgatg

SEQ ID NO: 4092 - DNA, 203 bp, synthetic construct
  source 1..203: mol_type = other DNA
ggcgcgccagtcctgattcatcgtgcagtacctcaacacattgctgattacaatgatggcggcgatatgggctcgcgttttgataacctacctggtgtcgcggcgtcggtagaggcttgcggaaaccacgtcctcgtcacacgtcgttcgcggacatagcaagaaatccacgtcgccacgtctcgagacgactcggaccgatg

SEQ ID NO: 4093 - DNA, 203 bp, synthetic construct
  source 1..203: mol_type = other DNA
ggcgcgccagtcctggcgtcggtagaggcttgcggaaaccacgtcctcgtcacacgtcgttcgcggacatagcaagaaatccacgtcgccacgtctcgagaatgccggccccgcggggtccccttcgcgcaacattcctggccctggtcgcgttcgggttgctgcttcagatagacctcagcgacgttcgactcggaccgatg

SEQ ID NO: 4094 - DNA, 203 bp, synthetic construct
  source 1..203: mol_type = other DNA
ggcgcgccagtcctcgtcacttgtgtgatctgagacgtcatgctggtagcgtttatgagtcgggcggtggccggcacgccgcatttcctaacccgcgcagcatgttgcgcttgctgttcacgctcgtactgctggccctctagggaccgtctgtcgacgctagccgcgactatgtgcatgttcgactacgactcggaccgatg

SEQ ID NO: 4095 - DNA, 203 bp, synthetic construct
  source 1..203: mol_type = other DNA
ggcgcgccagtccttcacatcaaccggctattttttcggttagtcttagacgaggaacaacgcatttacgacgtagtgtctacaaatattgagttcggtgcctggccagtccctacggcctacaaagcctttctctggaaatacgccaagaaactgaattaccactactttagactgcgctggtgatccgactcggaccgatg

SEQ ID NO: 4096 - DNA, 203 bp, synthetic construct
  source 1..203: mol_type = other DNA
ggcgcgccagtccttcaaaatggctagacaaacgcaacgataacaggtggtataatgttaatgtaacaagacaaccggaacgagggccgggaaaaataactgtaaccctagtaggtctgaaggaataatatttagtatatattttaaacagacaagtttgttagagcagaaaatatcatgttttcaatcgactcggaccgatg

SEQ ID NO: 4097 - DNA, 203 bp, synthetic construct
  source 1..203: mol_type = other DNA
ggcgcgccagtccttactttttgccgacgtcaggaaaaataagctgtcgcctacataagagcccggtgctatcgtgctgtcactctttcttgttgccttcgatgtacggcgtcctggctcattactactccttcatcagtagtcccagcgttatggttaattttaagcatcataacgctgtgcagctgcgactcggaccgatg

SEQ ID NO: 4098 - DNA, 203 bp, synthetic construct
  source 1..203: mol_type = other DNA
ggcgcgccagtcctggctgactatcctgttctgtcctggaaaaactttcagcgtcgtaggtggactttgtagtatgcgggttagtgaagttatgtcatttatttacgtttacgatctcgtattacaaaccgcggagaggatgacaccgttcggccccatgagttatttttattcttccggtaggaggccgactcggaccgatg

SEQ ID NO: 4099 - DNA, 203 bp, synthetic construct
  source 1..203: mol_type = other DNA
ggcgcgccagtccttttacgtttacgatctcgtattacaaaccgcggagaggatgacaccgttcggccccatgagttatttttattcttccggtaggaggcatgaagcctctggtgatgctcatctgcttcggtgtgatattattgcagcttggggtgactaaagtgtgtcagcataatgaagtgcaacgactcggaccgatg

SEQ ID NO: 4100 - DNA, 203 bp, synthetic construct
  source 1..203: mol_type = other DNA
ggcgcgccagtcctagaggcagcaaaaaagacctgtaaaaaaaccggacgctcagttgcgggcatcccgggcgagaagctgcgtcgcacggtggtcaccaccacgccggcccgacgtttgagcggccgacacacggagcaggaacaggcgggcagcgtctctgcgaaaaagggaagaaaagaatcatccgactcggaccgatg

SEQ ID NO: 4101 - DNA, 203 bp, synthetic construct
  source 1..203: mol_type = other DNA
ggcgcgccagtcctcacgccggcccgacgtttgagcggccgacacacggagcaggaacaggcgggcagcgtctctgcgaaaaagggaagaaaagaatcatcatgtgccgccgggagtcgctccgaactctgccgtggctgttctgggtgctgttgagctgcccgcgactcctcgaatattcttcctctcgactcggaccgatg

SEQ ID NO: 4102 - DNA, 203 bp, synthetic construct
  source 1..203: mol_type = other DNA
ggcgcgccagtcctcggatatgttcggtttcaaactcactgtttgaatatagggacagtccctacggaacctgagaacatgtggaaatcacctgtggtagaatgctgttcaggtacattacctttcatcgcgaaaaggtactttacctaacggctgcatgcatctttggtgtctacatcagcctccaccgactcggaccgatg

SEQ ID NO: 4103 - DNA, 203 bp, synthetic construct
  source 1..203: mol_type = other DNA
ggcgcgccagtcctcctcgatggtcggacatcgaggaactcttggaaaaggcggtgcagagcgtcatgaaggacgccgagtcaatgcagatgacctgagaccgaaacagcgagcgcgtccgttgtacagttgtatagcagcacacgccttccctctttttcaccgcagctaagagagagaaagagagtcgactcggaccgatg

SEQ ID NO: 4104 - DNA, 203 bp, synthetic construct
  source 1..203: mol_type = other DNA
ggcgcgccagtcctcgaaacagcgagcgcgtccgttgtacagttgtatagcagcacacgccttccctctttttcaccgcagctaagagagagaaagagagtatgtcagtcaagggcgtggagatgccagaaatgacgtgggacttggacgttggaaataaatggcggcgtcgaaaggtcctgagtcgccgactcggaccgatg

SEQ ID NO: 4105 - DNA, 203 bp, synthetic construct
  source 1..203: mol_type = other DNA
ggcgcgccagtcctcgcccccggtgtgataaggaattttccgacttggctcacatctccttcctcagtgtttggacaataaacacattccttgccaaaaaatgacgtttccagaaatccaaggcataaatgtccgtacaccggcccttcccgacacggagtttgagattccaagcaggagagaagatccgactcggaccgatg

SEQ ID NO: 4106 - DNA, 203 bp, synthetic construct
  source 1..203: mol_type = other DNA
ggcgcgccagtcctgacggttcgtccacggagcaggagatctaccacacgcgactttaagtcacggaggaagttacgtgggtaggagggcaccgtgccccgaggcggcgacgggctagcgtataacaagccgcgcgacaacgggcgagcggcggtgagacacacgcgcgcacgtcggcggcgatagcccgactcggaccgatg

SEQ ID NO: 4107 - DNA, 203 bp, synthetic construct
  source 1..203: mol_type = other DNA
ggcgcgccagtcctccagcagcgcgcacgacgcgatcacggtaacccccatgactagacccacgcagatagccagccccgctagcgtatccagcgccatcccgttcgctcccgtcgtcgtctcctgaacaaagcaacaactccgcagtccccgttttcaaccgtttttgtttccttctccgcgagcaacgactcggaccgatg

SEQ ID NO: 4108 - DNA, 203 bp, synthetic construct
  source 1..203: mol_type = other DNA
ggcgcgccagtcctggggacgggggactcttgcggcggggacggggacgggggcctttcgcggcggacacggggaacacagacggcacgcacacgcagctcgcctcagcggtcgccctatcacaaccgccgctactctttattaacgtcttcatccccccgcttctacacgcaacgctgcatacagctcgactcggaccgatg

SEQ ID NO: 4109 - DNA, 203 bp, synthetic construct
  source 1..203: mol_type = other DNA
ggcgcgccagtcctgcctcagcggtcgccctatcacaaccgccgctactctttattaacgtcttcatccccccgcttctacacgcaacgctgcatacagctatgctcacactctatctcttcacagcgacatgttgcttcgtctgtgcactgccgcgacaagcacaagtggacaccgccatctgccaccgactcggaccgatg

SEQ ID NO: 4110 - DNA, 203 bp, synthetic construct
  source 1..203: mol_type = other DNA
ggcgcgccagtcctcgcgtgttattgtaggttcgttgccagatggcaagtgctgtcaacagcagacgttgtgggcggtcggtgtatttttgtgggttgcggtgagagtcggcactcggtgttttgtgagtgatctcaacagtttgtgttgcttttagcagcgtccaaaacagcgacgcgactttggggcgactcggaccgatg

SEQ ID NO: 4111 - DNA, 203 bp, synthetic construct
  source 1..203: mol_type = other DNA
ggcgcgccagtccttgagagtcggcactcggtgttttgtgagtgatctcaacagtttgtgttgcttttagcagcgtccaaaacagcgacgcgactttggggatggcctcgtgctcaccgccgcggagagtgtcgccggacctgctcgtcagcagcgagctacgcagacggaatatctggaggagagttcgactcggaccgatg

SEQ ID NO: 4112 - DNA, 203 bp, synthetic construct
  source 1..203: mol_type = other DNA
ggcgcgccagtcctcgacggagccgtccgcgtgtgtaaacggcgtggtcgctgacgcgggtttgcttcctatatagtggacgtcggaggtgtccggcggccatggcccagcgcaacggcatgtcgccgcgccccccgcccctcggtcgcggccgcggggccggagggccttcgggggttggttcctctcgactcggaccgatg

SEQ ID NO: 4113 - DNA, 203 bp, synthetic construct
  source 1..203: mol_type = other DNA
ggcgcgccagtcctaccgaaaggatccaagggggctttccaaagccgacgtccctgattcccttcataaagctgttgaccggccctagaaagaccaagagcatgctgtgggcccactgcggtcgcttcttgcgttatcatctgctcccgctgctactgtgtagactgccattcttactcttttttcagcgactcggaccgatg

SEQ ID NO: 4114 - DNA, 203 bp, synthetic construct
  source 1..203: mol_type = other DNA
ggcgcgccagtcctgttgagcggggtatgcgtgttcagttgggcggcaggggcatgcggccttagcggctcgggctggcgtgctgttttccgtgttgccgacggcggcggggtccgtcgagaccgggggaccgcggagcggaggaggtgacctggctgcttaatgacagcgacggagaggaagaagagcgactcggaccgatg

SEQ ID NO: 4115 - DNA, 203 bp, synthetic construct
  source 1..203: mol_type = other DNA
ggcgcgccagtcctcggcggcggggtccgtcgagaccgggggaccgcggagcggaggaggtgacctggctgcttaatgacagcgacggagaggaagaagagatggcgtccgggctcggtgacctctcggtcggcgtgtccagccttcccatgcgggaactggcctggcggcgggtagccgacgactcacgactcggaccgatg

SEQ ID NO: 4116 - DNA, 203 bp, synthetic construct
  source 1..203: mol_type = other DNA
ggcgcgccagtcctagtaccgtaacgcctcttttggcacgtagttgcctactacgtaggggaaacaacgtcaccaagaaacgctatatattcaaaaacaccgtgcagtccacacgctacttctcagcgaagcactgctgcagccagaccggagcggtgagcggagccgagcagcggaccttcggagcccgactcggaccgatg

SEQ ID NO: 4117 - DNA, 203 bp, synthetic construct
  source 1..203: mol_type = other DNA
ggcgcgccagtcctacgctctcgtcaggcttgtcatggtccgtaaaagctgcatgaaaaacacgacgaaagcgttcagtgttggatcagactcacgtcacacgttacatcatacaacgtagggcggtattgttgagaacatatataatcgccgtttcgtaagtacgtcgatatcgctccttcttcactcgactcggaccgatg

SEQ ID NO: 4118 - DNA, 203 bp, synthetic construct
  source 1..203: mol_type = other DNA
ggcgcgccagtcctcgttacatcatacaacgtagggcggtattgttgagaacatatataatcgccgtttcgtaagtacgtcgatatcgctccttcttcactatggacctcttgatccgtctcggttttctgttgatgtgtgcgttgccgacccccggtgagcggtcttcgcgtgacccgaaaacccttcgactcggaccgatg

SEQ ID NO: 4119 - DNA, 203 bp, synthetic construct
  source 1..203: mol_type = other DNA
ggcgcgccagtcctacgctgatgatggtggcagtgattcaagtgttttgggggctgtatgtgaaaggttggctgcaccgacattttccctggatgttttcggaccagtggtgatatatagactgaagcggagtgcatctcgagtcgctcggaaacgactcaccagactttttgctttaacccaaaacccgactcggaccgatg

SEQ ID NO: 4120 - DNA, 203 bp, synthetic construct
  source 1..203: mol_type = other DNA
ggcgcgccagtcctgaccagtggtgatatatagactgaagcggagtgcatctcgagtcgctcggaaacgactcaccagactttttgctttaacccaaaaccatgctacgccggggaagcctccggaaccctctggcgatctgcctgttgtggtggctgggagtggtggcggcagccacggaggagacgcgactcggaccgatg

SEQ ID NO: 4121 - DNA, 203 bp, synthetic construct
  source 1..203: mol_type = other DNA
ggcgcgccagtcctccccgtgacgtgcaagactacatgctataagatagccttacagcttttgagtctagacaggggaacagccttcccttgtaagacagaatgaatcttgtaatgcttattctagccctctgggccccggtcgcgggtagtatgcctgaattatccttgactcttttcgatgaacctcgactcggaccgatg

SEQ ID NO: 4122 - DNA, 203 bp, synthetic construct
  source 1..203: mol_type = other DNA
ggcgcgccagtccttgatcgtgctcagtcccaacctctggcgcctgccctggacgaccgtctttgccgccttcagatcctcgtattgcgaaggtggcggtggctcgtagccaccacccatcgtccccctttctctataaaacttgccgggtacctgaagccccgacgactgttcgtcgagcacccgtccgactcggaccgatg

SEQ ID NO: 4123 - DNA, 203 bp, synthetic construct
  source 1..203: mol_type = other DNA
ggcgcgccagtcctctacctggccaagctgggcacctatcatcattaccgggttgacaacggcacgctcagcgtcatcctcaacagcaccaccgcgacgttccagagcagggttgcttgagacccgctggtttataagaagactccaccgagacgctcacccgttcactcgggcgcatcacccgcctccgactcggaccgatg

SEQ ID NO: 4124 - DNA, 203 bp, synthetic construct
  source 1..203: mol_type = other DNA
ggcgcgccagtcctccagagcagggttgcttgagacccgctggtttataagaagactccaccgagacgctcacccgttcactcgggcgcatcacccgcctcatggacccgccgctgccgtcgctacattcgccgcaatgggcttccctcctgcagctgcaccacggccttatgtggctgcgccgttttcgactcggaccgatg

SEQ ID NO: 4125 - DNA, 203 bp, synthetic construct
  source 1..203: mol_type = other DNA
ggcgcgccagtcctgccgctggaacgcgcgcttttggcggccgtcaaggtgtttctcagcctggttttcactctgctgatggtgctgagaatcatgaccctgcgcacctttttgcaaacctacttttcctctgacaagctgtagcttcgagaccttgcggatacgccgccgggcgctgcggtcccgaccgactcggaccgatg

SEQ ID NO: 4126 - DNA, 203 bp, synthetic construct
  source 1..203: mol_type = other DNA
ggcgcgccagtcctgcgcacctttttgcaaacctacttttcctctgacaagctgtagcttcgagaccttgcggatacgccgccgggcgctgcggtcccgacatggagacagtttccacgcagcgggaaaccgcgtcgtcggaaacggagcgtaccagggaagccgcgtccgcggaaacgacggacgctcgactcggaccgatg

SEQ ID NO: 4127 - DNA, 203 bp, synthetic construct
  source 1..203: mol_type = other DNA
ggcgcgccagtcctaacgccgttgtccaccctctcgccctagattttcgttcggaactggttttcggacagagcagccgtttccagagaacgcagcgcaccatgagaagagaaaaagggtttcaagtacccaccgatggcacggtcatctacgtgccccccgggatccaagagacccggctggcgacccgactcggaccgatg

SEQ ID NO: 4128 - DNA, 203 bp, synthetic construct
  source 1..203: mol_type = other DNA
ggcgcgccagtcctacagaacaccgcaactcggtgttgtactcgtgttttttattcaacaataaagctttttcacgcttactcgagtgtgacgtgactttatgggggaacgccgtgtgggaatgacggtgattatattacactctataaacggtttctcatacgcgccttttgatagccaccgccgtccgactcggaccgatg

SEQ ID NO: 4129 - DNA, 203 bp, synthetic construct
  source 1..203: mol_type = other DNA
ggcgcgccagtcctgtaccatcttctgaggctctggttgtggagcccatgacgacgggtcggatacagggtgccgccacggtttgaccacactcgtgacgtcaatcaaatccgcggtaaccgggtgctgataagacggactgtttcatcgacgcctaccttagaccgacagcggtcgtaagcggcagccgactcggaccgatg

SEQ ID NO: 4130 - DNA, 203 bp, synthetic construct
  source 1..203: mol_type = other DNA
ggcgcgccagtcctacgggactttgacagccgccagtacgacggggaagtcctaatgcctataaaaccgcgcccgttttcacagcagccgcgcttgtcgccatgcttcatgtcgtcccgctagaatggaccgtcgaggaggtagtcccctacctagagaggctggcggtatggctgcgcgcctccgtccgactcggaccgatg

SEQ ID NO: 4131 - DNA, 203 bp, synthetic construct
  source 1..203: mol_type = other DNA
ggcgcgccagtcctctgctcagacgacggtcgctgcgacggtcgctgccacagcagcggcgtcgccccagttcgtctcctaatcgacgtgtccgcggcgtgaccacgtcaccgtgccccactcgctcgcttgtgtataagagaagggtaggtgcgccgcagcggctttgtgccgagaccgtcgccacccgactcggaccgatg

SEQ ID NO: 4132 - DNA, 203 bp, synthetic construct
  source 1..203: mol_type = other DNA
ggcgcgccagtcctcagccgcgattcgtctgacgctgctcctatattaagctttcgcgcagcgcgctttatccgactcgctgtcgagacggctttgccggcatgtccctactcaccaaagccgccgccgaagcctggggcacctatctccgacagcgcgacgagcgctgcgaagatgctatccgctgccgactcggaccgatg

SEQ ID NO: 4133 - DNA, 203 bp, synthetic construct
  source 1..203: mol_type = other DNA
ggcgcgccagtcctcggaggacgcggaataaaacgtgtcgcacaaagaactctctttctctgcttcttttctggggtgtctagctggcggcctcttttgacatgtggcgtacacgctgggaagacggagctcccacgtttacgcgaaacgatgaattcctctattgccacacgcgctacgaaacttttcgactcggaccgatg

SEQ ID NO: 4134 - DNA, 203 bp, synthetic construct
  source 1..203: mol_type = other DNA
ggcgcgccagtcctctttgcggtcgcacatgttccaaattacgtgagtctttgacgtcgatgtcagtcttttcgggtggtttacagaccggagctgccaaccgcagcccacgaacgacgtgaacaagccacgtcactgaagaaactccataaaataggctgccaagtgccgctccacgccgcggcacccgactcggaccgatg

SEQ ID NO: 4135 - DNA, 203 bp, synthetic construct
  source 1..203: mol_type = other DNA
ggcgcgccagtcctgccctgacctccctctgccacctgctgtgctactggtgttccgaatcgtaccggcgtctgaacaccgaagaggaaaacgaggcggcggaggaaactgccgcgggagaagcctctgcggtagcggcggcggccgtctctgaggaagagcagcagcgggagtaaacgaggagagcccgactcggaccgatg

SEQ ID NO: 4136 - DNA, 203 bp, synthetic construct
  source 1..203: mol_type = other DNA
ggcgcgccagtcctattataccgtaataaaaaagcgctacctcggccttttcatacaaaccccgtgtccgcccctcttttccccgtgcccgatatacacgatattaaacccacgaccatttccgtgcgattagcgaaccggaaaagtttatggggaaaaagacgtaggaaaggatcatgtagaaaaaccgactcggaccgatg

SEQ ID NO: 4137 - DNA, 203 bp, synthetic construct
  source 1..203: mol_type = other DNA
ggcgcgccagtcctggggcttcatgctgacgtaggtaccgactggggtcaaaagcctgggtacttatggggagcgcgcacaaaggaccgtcaggcgccggcatggagcgtcgccgaggtacggtaccgctgggatgggtgttttttgttctttgcttatctgcctcttccccgtgtgctgttgatctgcgactcggaccgatg

SEQ ID NO: 4138 - DNA, 203 bp, synthetic construct
  source 1..203: mol_type = other DNA
ggcgcgccagtccttagtgacggtacccacgctgctgttatatacgtcatccgacatcggtgacacagcttcagaaacaacgtgtgtggcgcacgctacttatggggaacccccggagcccgctcgatcgacggctacggttcaggaatgtaccgttcttaccgccccgaattgcggcatcgtcaacacgactcggaccgatg

SEQ ID NO: 4139 - DNA, 203 bp, synthetic construct
  source 1..203: mol_type = other DNA
ggcgcgccagtcctgctcctcctgcggttccctcgcagccccccgagtattcgtctgtgtttccgcctgtataaaaataaagagacgggaggctgatcgcggccttcagcgtctcatttgtctttactctcgagtgcggtcggtgtctcatcggtgagacgaggccgccgcccgacaagttcgatctccgactcggaccgatg

SEQ ID NO: 4140 - DNA, 203 bp, synthetic construct
  source 1..203: mol_type = other DNA
ggcgcgccagtcctgagagtaactgcagtctacgcacccacggcgtgtacacacggggtgaacaacactaatcgataagtcgcgtgtaggcgactggctacatcaaccggatatctgcggggatttaaaaagacgacccgttgtcatccggcttagagcaaaccgtccttttatcatcttccgtcgcccgactcggaccgatg

SEQ ID NO: 4141 - DNA, 203 bp, synthetic construct
  source 1..203: mol_type = other DNA
ggcgcgccagtcctccgtgacttggctgaacgttgaaacataaagccaaagcgccgtcggcacttggcttcagagcagcgcctcggggcgatgcgacggcgatgaacttagagcaactcatcaacgtccttggtctgctcgtctggattgccgctcgtgctgtcagccgcgttggtccgcatggctcccgactcggaccgatg

SEQ ID NO: 4142 - DNA, 203 bp, synthetic construct
  source 1..203: mol_type = other DNA
ggcgcgccagtcctgcgactgtgtcagcggctgcgcattcgcctgccgcatcgataccagcggttacgcaccgaggactgaacggataaccgcaaaggccacgtgcaacgttcacgctgctataagaaggccatgtcccccgtggacgggtctctttgacacgagcgcggcacgccgttgccacgagccgactcggaccgatg

SEQ ID NO: 4143 - DNA, 203 bp, synthetic construct
  source 1..203: mol_type = other DNA
ggcgcgccagtcctggtccctgatcacccgacagctaacaaacgctataacaccatgaccatcagcagtgtcctcctagccctgcttttatgcgctttgctattcgcgttcctgcactactttaccaccttgaaacaatacctacgtaacctggcctttgcgtggcgctatcgcaaggtccggtcgtccgactcggaccgatg

SEQ ID NO: 4144 - DNA, 203 bp, synthetic construct
  source 1..203: mol_type = other DNA
ggcgcgccagtcctattcgcgttcctgcactactttaccaccttgaaacaatacctacgtaacctggcctttgcgtggcgctatcgcaaggtccggtcgtcatgaccagcaacgccctgtatgagctgtttcgacgtcggttaccgcgtgcccccgtcaacacggtcatgtttctcacgcgacgcactcgactcggaccgatg

SEQ ID NO: 4145 - DNA, 203 bp, synthetic construct
  source 1..203: mol_type = other DNA
ggcgcgccagtcctcgggacgaaagacgacgtcaggggattcacggtatttagccatgcagcgtgcggcgcctctctcatggatccactgtcaccgtcgcgatgggaggtagccctgttccccagctcaccaccgtcactcaaggactcatgccatctgtgcgcatggactttcgggctcgccggccccgactcggaccgatg

SEQ ID NO: 4146 - DNA, 203 bp, synthetic construct
  source 1..203: mol_type = other DNA
ggcgcgccagtcctacatgacctcgagatgtcgtcacccaaggtatttaacggcacacagccagacgcgttcgtcagcagcgacgccgacaagacctcagcatggctcggaggctatggatcttgagcttactagccgtgaccttgacggtggctttggcggcaccttctcagaaatcgaagcgcaggcgactcggaccgatg

SEQ ID NO: 4147 - DNA, 203 bp, synthetic construct
  source 1..203: mol_type = other DNA
ggcgcgccagtcctgcgtgctcgtgaaaacgctgtcctccgcctcctcatccgccggcgtgtcctcgttgctcgaggggatataaatcaccgtcgagggttcgccagagcgacgtgacgagctgcgacgccgcgacgacatcctctcgtctgctgaggtgcgttcggctcagttgcttacctgcataccgactcggaccgatg

SEQ ID NO: 4148 - DNA, 203 bp, synthetic construct
  source 1..203: mol_type = other DNA
ggcgcgccagtcctcggccctcactatataacgtcccgcccgggtctcctccatgtatgcaggtaagcaactgagccgaacgcacctcagcagacgagaggatgtcgtcgcggcgtcgcagctcgtcacgtcgctctggcgaaccctcgacggtgatttatatcccctcgagcaacgaggacacgccgcgactcggaccgatg

SEQ ID NO: 4149 - DNA, 203 bp, synthetic construct
  source 1..203: mol_type = other DNA
ggcgcgccagtcctggcctcacgaggtcggaggtcacgccacatgaagccgcggcggcgcgttataagcaccgtggggtcatcgaccgacgaggcgcggcgatgacgagcaggcgcgcacccgacggcggtttgaatttagacgattttatgcgccgccagcgcggtcgccacctggatctgccctatcgactcggaccgatg

SEQ ID NO: 4150 - DNA, 203 bp, synthetic construct
  source 1..203: mol_type = other DNA
ggcgcgccagtcctctgtgatgactagctatatagccgctgtctggctttaccgccgtcgctccgcgtcgcttcgccgccaccttcttcttcctctcagtcatgaaccccgtggatcagccgccacctccaccgctaacccagcagccggaggagcaggctaaagaagaccatgacgacggtgacgagcgactcggaccgatg

SEQ ID NO: 4151 - DNA, 203 bp, synthetic construct
  source 1..203: mol_type = other DNA
ggcgcgccagtcctgtccgagacggtgtatataaaccgcgtcggcctcgccggcccgagcgcgccggggagaagaatctcttcccgggccctgcgttcaagacggcgtgccgtgacgctcgatgggtccgcttcatcagactgcgtacgctttggagcgtcagacccagggcgcatgtagccgacttgcgactcggaccgatg

SEQ ID NO: 4152 - DNA, 203 bp, synthetic construct
  source 1..203: mol_type = other DNA
ggcgcgccagtcctaagagattcttctccccggcgcgctcgggccggcgaggccgacgcggtttatatacaccgtctcggacggcgggacgccgagcccgcgccgcggccgctcatccggagacggcggaaaccgcggcgccggaggaaacggggaccggcaacgacggcggtggcggcgaccagattcgactcggaccgatg

SEQ ID NO: 4153 - DNA, 203 bp, synthetic construct
  source 1..203: mol_type = other DNA
ggcgcgccagtcctcagcggcgcccgggtgaaaaccgcgtatccgcctccgctattaaactaccccccctccctctaggtggggcgctcaccgtggtgttgtggatgatggtgtccatcgtggacgaatagcagaccgcgggcgcagtccggggcgacgacgcttccgggttctggagaaaagccagccgactcggaccgatg

SEQ ID NO: 4154 - DNA, 203 bp, synthetic construct
  source 1..203: mol_type = other DNA
ggcgcgccagtccttggatgatggtgtccatcgtggacgaatagcagaccgcgggcgcagtccggggcgacgacgcttccgggttctggagaaaagccagcatgagtttgcagtttatcggtctacagcggcgcgatgtggtagccctggtcaactttctgcgccatctcacgcaaaagcccgacgtgcgactcggaccgatg

SEQ ID NO: 4155 - DNA, 203 bp, synthetic construct
  source 1..203: mol_type = other DNA
ggcgcgccagtcctataaactgcaaactcatgctggcttttctccagaacccggaagcgtcgtcgccccggactgcgcccgcggtctgctattcgtccacgatggacaccatcatccacaacaccacggtgagcgccccacctagagggagggggggtagtttaatagcggaggcggatacgcggtttcgactcggaccgatg

SEQ ID NO: 4156 - DNA, 203 bp, synthetic construct
  source 1..203: mol_type = other DNA
ggcgcgccagtcctacgccgtccggcgcaacttctgtctcggcacggtacgataaaaacgacgtcccccgtcgacgttgttttctccgagcggtgatcgttcccgtccctctcctccctccgcggcccccacggcggcggcctgctcgcacggacctatactattaccgccccaccgccgtcgtcgtccgactcggaccgatg

SEQ ID NO: 4157 - DNA, 203 bp, synthetic construct
  source 1..203: mol_type = other DNA
ggcgcgccagtcctcccgtccctctcctccctccgcggcccccacggcggcggcctgctcgcacggacctatactattaccgccccaccgccgtcgtcgtcatgaacttcatcatcaccacccgagacttctccaacgacgattcagtcctgcgagccgccgagatgcgtgacaacgtggcaggctcgcgactcggaccgatg

SEQ ID NO: 4158 - DNA, 203 bp, synthetic construct
  source 1..203: mol_type = other DNA
ggcgcgccagtcctgaagttccagcacaaaaaacgacgttcattggatcgtctgacgtcaacgctgatagtgtctataaaggccgtgccgccgcgccgtagttctccgaaggcggacggaggagtctgtcgaccgcagcggtggctggagaagcgcagcgtcggcgagcgaaggtagaggagtccgtccgactcggaccgatg

SEQ ID NO: 4159 - DNA, 203 bp, synthetic construct
  source 1..203: mol_type = other DNA
ggcgcgccagtccttgcggaggcaccggttcctgtggcaacggcggcgacgagctcggctgctgcagcacaacggcccccagcagtctcaccagtaagcaggggtaaacaaaaaaaccacagactccgggatagtataagaagggactttaccgctattgctgctattcatagagaaggatagaaaggcgactcggaccgatg

SEQ ID NO: 4160 - DNA, 203 bp, synthetic construct
  source 1..203: mol_type = other DNA
ggcgcgccagtcctcatacgcaggggctggacgtggttaccggtcactggactcggtttcgctgtagctgtggttcaacctgaacatggctcccagagctgctaggaaccggtccagtcacattttttggtgggtggggggtactaaaaaagtatttaatattggggtttaatgataaaatccaggttcgactcggaccgatg

SEQ ID NO: 4161 - DNA, 203 bp, synthetic construct
  source 1..203: mol_type = other DNA
ggcgcgccagtcctcttgactgtaccatcattgctgctacggaataataactacgctacgacctggcctgtggtgtgtgttgttttttgtgcacgcacgacatgacactcttttgccgcaccgccaacagcaccgccggctacgtcgacatgaacgtctgcatcggcatgatcggcgtggtttgtttccgactcggaccgatg

SEQ ID NO: 4162 - DNA, 203 bp, synthetic construct
  source 1..203: mol_type = other DNA
ggcgcgccagtcctaaggggctctttgctcgaaggtgagccgcggacgccgtcggtaccgtctccaccacagttaccaccgtcgccgtcactgccaccgacatggagcccacgccgatgctccgcgaccgggatcacgacgacgcgccccccacctacgagcaggccatgggtctgtgcccgacgacgcgactcggaccgatg

SEQ ID NO: 4163 - DNA, 203 bp, synthetic construct
  source 1..203: mol_type = other DNA
ggcgcgccagtcctgaggaggaggcggcggtttggatcgcaactccggcaattacttcaacgacgcgaaagaggagagcgacagcgaggattctgtaacgttcgagttcgtccctaacaccaagaagcaaaagtgcggctagagcgtgggccgcgtgcctgggaacgtgcgcacggcgcggtcccgcgcgactcggaccgatg

SEQ ID NO: 4164 - DNA, 203 bp, synthetic construct
  source 1..203: mol_type = other DNA
ggcgcgccagtcctcagcgttcccggtcgtcgtgtgtgctctctataaaactttcgctcgctcgcgcccgctccttagtcgagacttgcacgctgtccgggatggatcgcaagacgcgcctctcggagccgccgacgctggcgctgcggctgaagccgtacaagacggctatccagcagctgcgatctcgactcggaccgatg

SEQ ID NO: 4165 - DNA, 203 bp, synthetic construct
  source 1..203: mol_type = other DNA
ggcgcgccagtccttcgaattgggagactttcgagaattcgtctgagcggcgctgacagcatacggggaggagacacagaagaaaaaaacacatcgcacacagactttataaaccgtagttgtcggcgccatctagactcactttattgaaatctacctgatttctttgttattttcctcgtaaacttcgactcggaccgatg

SEQ ID NO: 4166 - DNA, 203 bp, synthetic construct
  source 1..203: mol_type = other DNA
ggcgcgccagtcctagactttataaaccgtagttgtcggcgccatctagactcactttattgaaatctacctgatttctttgttattttcctcgtaaacttatgaatccggctgacgcggacgaggaacagcgggtgtcctcggtgcccgcacatcggtgccggccaggtaggattccaagccgcagccgactcggaccgatg

SEQ ID NO: 4167 - DNA, 203 bp, synthetic construct
  source 1..203: mol_type = other DNA
ggcgcgccagtccttgcctgggaacgctatggctataacgggaaagaaccggtttggcaacattccattgtggggggggggtacttatagcgtgcctagctatgacgttgatatatgtggatgcggataatactcgtaatgagctaaaagcgacgactgggagtaattttaccattacgcataggaaacgactcggaccgatg

SEQ ID NO: 4168 - DNA, 203 bp, synthetic construct
  source 1..203: mol_type = other DNA
ggcgcgccagtcctaactctaccaggccctcgggcacgaagaaacgcgccgtgagcgcctggtgatcggcgtggtagagatagcgaaccgatatagtatttacctcgcgtttggctttgagcgccgtcactagttcattgtcctcgtcggccgggtcgcgcggccgtttggccaccgcgcgcgcgtcccgactcggaccgatg

SEQ ID NO: 4169 - DNA, 203 bp, synthetic construct
  source 1..203: mol_type = other DNA
ggcgcgccagtcctccccgtaagccaggcgcagcaggacatcttgtcttcgatcgacccgcccgccggctcgacatcggtgtccctgccgccggcctcgccatgaaagtcacacaggccagctgccaccagggcgacatcgctcgctttggagcgcgagcgggcaatcaatgcgtctgcaacggcatccgactcggaccgatg

SEQ ID NO: 4170 - DNA, 203 bp, synthetic construct
  source 1..203: mol_type = other DNA
ggcgcgccagtcctgtcagacgggcgagtaccgcgacagctgtttggaaagcgaagacggcgccccgctgtgtcgaggctgcgcgctggttaaacagaccgcctgccacgtcggcggccacattgtgcagcaggcgcgcggcggtttagcagcgacgtcctcctcgtcctccccccacggcctgcccccgactcggaccgatg

SEQ ID NO: 4171 - DNA, 203 bp, synthetic construct
  source 1..203: mol_type = other DNA
ggcgcgccagtcctcgtgcacgccgtccttggagcggactggttatcgttgggcaccgtcatcgtggtggcgagcgcgctccgggccatcgcgaccgcagtctgggccgtggctgcccgcgcgctttgcgactctgggcccgctggtgctggctcttctgctggtgctggctctgctgtggcggggtccgactcggaccgatg

SEQ ID NO: 4172 - DNA, 203 bp, synthetic construct
  source 1..203: mol_type = other DNA
ggcgcgccagtcctctgggccgtggctgcccgcgcgctttgcgactctgggcccgctggtgctggctcttctgctggtgctggctctgctgtggcgcggtcatggccaatcgtcgtctccgacacgctccgcacaccgcgactgatgagttccaccaggctctgcgccgtctcttcgcgcccctctgccgactcggaccgatg

SEQ ID NO: 4173 - DNA, 203 bp, synthetic construct
  source 1..203: mol_type = other DNA
ggcgcgccagtcctgccttcctcaagtacgtgcacggcgactgcgcgacctgcagtcacggagagatcctccgtgagaagacgcaactattaacggcgatcgtcagcaagctcatggacattaacggaatcctggagggaaaagacgagccggcgccgggtaaataaatcggcggtggcgtcggtgcgcgactcggaccgatg

SEQ ID NO: 4174 - DNA, 203 bp, synthetic construct
  source 1..203: mol_type = other DNA
ggcgcgccagtcctgtcagcaagctcatggacattaacggaatcctggagggaaaagacgagccggcgccgggtaaataaatcggcggtggcgtcggtgcgatggagatgaacaaggttctccatcaggatctggtgcaggccacgcggcgtatcctcaagttgggtcctagcgagctgcgcgtcacccgactcggaccgatg

SEQ ID NO: 4175 - DNA, 203 bp, synthetic construct
  source 1..203: mol_type = other DNA
ggcgcgccagtccttgagggggagtcgttgggccgttactgctcacgtgggtactcggattcatggcgatcggcgccgctgattgaggacgcggaaaaagaatgtcctgggctaagcagcgggtgccgtttctggacgatgacgacggagaggaggaaaacgacgtgcaggatgacgtggattctccgcgactcggaccgatg

SEQ ID NO: 4176 - DNA, 203 bp, synthetic construct
  source 1..203: mol_type = other DNA
ggcgcgccagtcctccagccgcgggctccgcgtcctcgtcgatcaccagcggtcgcgtcggcaccggagaatccacgtcatcctgcacgtcgttttcctcctctccgtcgtcatcgtccagaaacggcacccgctgcttagcccaggacattctttttccgcgtcctcaatcagcggcgccgatcgcccgactcggaccgatg

SEQ ID NO: 4177 - DNA, 203 bp, synthetic construct
  source 1..203: mol_type = other DNA
ggcgcgccagtccttaagtcgacttccgcgacgtgtgtggctctgcatcacactcttcaaggcctttcagattacaaaacgcacctacaaaggcaaagtgcacctggcggactttatgcgcgatttcacgcagctgttggagaattgcgacatcaagctggtggaccccacgtacgtgatagacaagtcgactcggaccgatg

SEQ ID NO: 4178 - DNA, 203 bp, synthetic construct
  source 1..203: mol_type = other DNA
ggcgcgccagtcctacggcggctcttggattcggcattggtgcgccgcgtcttggcctgcatgatcatcgtcatcatgatcgccattagcatctggatcctgacctacgtgctgtttctctaataagaaccccggcccctgacggtaattttcctttcttctccgtttctcctcagctgccgtacgtgcgactcggaccgatg

SEQ ID NO: 4179 - DNA, 203 bp, synthetic construct
  source 1..203: mol_type = other DNA
ggcgcgccagtcctgacctacgtgctgtttctctaataagaaccccggcccctgacggtaattttcctttcttctccgtttctcctcagctgccgtacgtgatgcctcacggccatctccgacaggccctctccccgacctcctggacatgtgagggcttgttgctcctcctgggattgctggtgctccgactcggaccgatg

SEQ ID NO: 4180 - DNA, 203 bp, synthetic construct
  source 1..203: mol_type = other DNA
ggcgcgccagtcctcctccaccctgacggccgccgcggccgtctcgggtgccttcagggagcgggaccgaccttggctgccaagtccgtacccctcctcctcgaccgcgggcgtttcccggagggtccgcgcaacacgcaagagaccacgacgcgcctcatcgctgctggatttggcccgcgacgaaccgactcggaccgatg

SEQ ID NO: 4181 - DNA, 203 bp, synthetic construct
  source 1..203: mol_type = other DNA
ggcgcgccagtcctcttccggttcccatgtcctaatcataacaaaacaccgtgtcactgtccatctccctgtcttttcgcgccgccggtcccccccaaaccatgtctctagatgccgccagccaccaaccggcggcacggcggctcttggattcggcattggtgcgccgcgtcttggcctgcatgatccgactcggaccgatg

SEQ ID NO: 4182 - DNA, 203 bp, synthetic construct
  source 1..203: mol_type = other DNA
ggcgcgccagtcctacgtgagggagatcatgtcatgggcgggctgaagaccgtgcgggaaggattgacgtgtgcggtgcttgtggaacacggtgttttaatatgtatccgcgtgtaatgcacgcggtgtgctttttagcactcggtttgataagctacgtggccgtttgcgccgaaaacacggttacccgactcggaccgatg

SEQ ID NO: 4183 - DNA, 203 bp, synthetic construct
  source 1..203: mol_type = other DNA
ggcgcgccagtcctgaattgctgggatcgttgcggttgtcgcctttggtggtccgcaaccgcagccagaccgcagtggtggccacggtggtgtctcagacgtcgtgcgtcaaacatgacgtgctgaacttttccttggtataaaattcactcagtggcggcgtagccattgtcttccgttcatccacccgactcggaccgatg

SEQ ID NO: 4184 - DNA, 203 bp, synthetic construct
  source 1..203: mol_type = other DNA
ggcgcgccagtccttcgtgcgtcaaacatgacgtgctgaacttttccttggtataaaattcactcagtggcggcgtagccattgtcttccgttcatccaccatgagccacgaggaactaaccgcgctagcgccggtggggcccgcggcttttctctacttcagcaggttgaacgcagaaacgcaggagcgactcggaccgatg

SEQ ID NO: 4185 - DNA, 203 bp, synthetic construct
  source 1..203: mol_type = other DNA
ggcgcgccagtcctcacgcaaaaagctggaacaacacgcggctaaaaagcagaacatctacgaacggattccataccggccctccagacagaacgacaactccccgttgatcgaaccgacgggcacagacgacgaagaggacgaggacgacgacgtctgataaggaaggcgagaacgtcttttgcacccgactcggaccgatg

SEQ ID NO: 4186 - DNA, 203 bp, synthetic construct
  source 1..203: mol_type = other DNA
ggcgcgccagtcctccccgttgatcgaaccgacgggcacagacgacgaagaggacgaggacgacgacgtctgataaggaaggcgagaacgtcttttgcaccatgcagacctacagcacccccctcacgcttatcatagtcacgtcgctgtttttgttcacaactcagggaagttcatcgaacgccgtccgactcggaccgatg

SEQ ID NO: 4187 - DNA, 203 bp, synthetic construct
  source 1..203: mol_type = other DNA
ggcgcgccagtccttccggcctctcactccattgcgcctgggtttcgggactgatgatctttgttggtgcactggtcatctgctttctgcggtcgcaacgaatcggggaacaggacgctgaacagctgcggacggacctggatacggaacctctgttgttgacggtggacggagatttggaataaaagcgactcggaccgatg

SEQ ID NO: 4188 - DNA, 203 bp, synthetic construct
  source 1..203: mol_type = other DNA
ggcgcgccagtcctaacgccaaaaacgtccacatttccatcaaaatcagaccgcccgacgcgcccatgccgccggcgaccgccgtctgagcctcactttccacggcgccggtgacccgccccccggcagcggtctcatctatatatacatcagcgtgccagaacgtgaccttcctagcgacggcggcccgactcggaccgatg

SEQ ID NO: 4189 - DNA, 203 bp, synthetic construct
  source 1..203: mol_type = other DNA
ggcgcgccagtcctatgtcttttctattgacaatagcaaaggaatacaaaagactatgccaagatgctaaggcagctcaaatgatgacagtaggaactgtatcaaactacactacgttcaagaaatggactacatcaaggaaggaaaagaatccttcactaagaatgagatgggcaatgagcagcaaacgactcggaccgatg

SEQ ID NO: 4190 - DNA, 203 bp, synthetic construct
  source 1..203: mol_type = other DNA
ggcgcgccagtcctatattatgtaatcacacttttggaagtaatataatgagaccccacttggaaaaagcaataaaaggagttgaaggcagagttggagagatgggacgaatggcaatgaaatggttagttgttataatatgtttctctataacaagtcaacctgcttctgcttgcaatctaaagacccgactcggaccgatg

SEQ ID NO: 4191 - DNA, 203 bp, synthetic construct
  source 1..203: mol_type = other DNA
ggcgcgccagtcctcgcacagtggatcctaggcagaaccgtaacttaaacttctggcagtcatgcaagaccccctcttaggaaccctgtctgaattaaaggatttggttagaaaaaccataccagatgtaattgagcttgcatatcaaaaggacgcattactttcacaagtgcatccaagatcagtgtcgactcggaccgatg

SEQ ID NO: 4192 - DNA, 203 bp, synthetic construct
  source 1..203: mol_type = other DNA
ggcgcgccagtcctgcgcacagtggatcctaggcattgctttcacgctttgaggtgaaccacctcactggagcaccagatttcatctaatgggtaactccaagtcaaaatcaaagctgtctgctaaccagtatgaacagcaaacagtcaatagcaccaaacaggtagccattttaaagagacaggctgcgactcggaccgatg

SEQ ID NO: 4193 - DNA, 203 bp, synthetic construct
  source 1..203: mol_type = other DNA
ggcgcgccagtcctaccttcatctttttaccataatcttgttctcagtaccatttgataagggtacacttgccaatacgcccccatcctaagggtctcgcaatggggggtcttagcctactccaattgcccagggacaaatttcggaaaagctctttctttgtttgggtcatcatcttattccaaaagcgactcggaccgatg

SEQ ID NO: 4194 - DNA, 203 bp, synthetic construct
  source 1..203: mol_type = other DNA
ggcgcgccagtcctcgaggcggcaattcagttaatttcatatcaagataacatccatttccaagaccacagataactatattattaatctttaccacaaatatggagaggggtcgtgagcgcgggagatcaaggaattcacgtgccgaccagcaaaattcaacaggtcctcaatttaggacaagatcccgactcggaccgatg

SEQ ID NO: 4195 - DNA, 203 bp, synthetic construct
  source 1..203: mol_type = other DNA
ggcgcgccagtcctgtatggtggtcatcatgattttgttatcaaaacatctcatgatgattagaatctcttgtcagatctcattaaatctaaactttatttatggacgtttggagacctagctacacacattctcttgttattagagaatttggtgttacaaaccttgaagatttgtgtctaaagtatcgactcggaccgatg

SEQ ID NO: 4196 - DNA, 203 bp, synthetic construct
  source 1..203: mol_type = other DNA
ggcgcgccagtcctttggcaaatttgcttctcactttacattacgtagtcacgatatttcccatagtaataattttggtgttgtaactagttttactacttatggtaatactgtttctgaggctgtgtctagattagttgaatcagcttctgaatttattgtttggcgtgcagaggcacttaataagtcgactcggaccgatg

SEQ ID NO: 4197 - DNA, 203 bp, synthetic construct
  source 1..203: mol_type = other DNA
ggcgcgccagtcctatggtaatactgtttctgaggctgtgtctagattagttgaatcagcttctgaatttattgtttggcgtgcagaggcacttaataagtatggttgatttatttttcaatgatactgcttggtacataggacagattttagttttagttttattttgtcttatttctttaatctttcgactcggaccgatg

SEQ ID NO: 4198 - DNA, 203 bp, synthetic construct
  source 1..203: mol_type = other DNA
ggcgcgccagtcctgtacctataaacgtgcctttttagataagttagatgttaatagtggttttgctgtttttgttaagtctaaagttggtaactatcgtttaccgtctagtaaacctagtggtatggatactgccttgttaagagcttaaatctaaactattaggatgtcttatactcccggtcattcgactcggaccgatg

SEQ ID NO: 4199 - DNA, 203 bp, synthetic construct
  source 1..203: mol_type = other DNA
ggcgcgccagtcctaggaaaaagcataaaagaggtactcttccaacaacaagcccgaaacaagaggggacgtcaaaggtcaggaaattcgggttgttttgtttgtggccagcctggacatcgggctgcagtatgccctcaaaaacaacaaagtcctgttaacactcctaatttgtgcccgcgctgtaacgactcggaccgatg

SEQ ID NO: 4200 - DNA, 203 bp, synthetic construct
  source 1..203: mol_type = other DNA
ggcgcgccagtccttctccttatacaggtgtaacttttgtccgtgctggctgcggcaagtggcgcccaacgtggggctcgacagctttcctcgtcactactcttattatttgaacaaagtgagtatttgaatgaataagtgatttacattaaagaggagtagtaaggtatatagttgagagtataaatcgactcggaccgatg

SEQ ID NO: 4201 - DNA, 203 bp, synthetic construct
  source 1..203: mol_type = other DNA
ggcgcgccagtcctgtaaaattttcgaattttataataattaagaaaggagtttaatagtttatcacaacttaaaagtgaaatttatttaagaaaggaggactacttatgcaagtagcccctaatgtatggagtaaatattttaatattccaaatccaggattacgtgcttactttagcaatgtagtgcgactcggaccgatg

SEQ ID NO: 4202 - DNA, 203 bp, synthetic construct
  source 1..203: mol_type = other DNA
ggcgcgccagtcctttttcgaattttataataattaagaaaggagtttaatagtttatcacaacttaaaagtgaaatttatttaagaaaggaggactacttatgcaagtagcccctaatgtatggagtaaatattttaatattccaaatccaggattacgtgcttactttagcaatgtagtgtctggacgactcggaccgatg

SEQ ID NO: 4203 - DNA, 203 bp, synthetic construct
  source 1..203: mol_type = other DNA
ggcgcgccagtcctagcaaaagcaggagtaaagatgaatccaaatcaaaagataataacgattggctctgtttctctcaccatttccacaatatgcttcttcatgcaaattgccatcctgataaccactgtaacattgcatttcaagcaatatgaattcaactcccccccaaacaaccaagtgatgctcgactcggaccgatg

SEQ ID NO: 4204 - DNA, 203 bp, synthetic construct
  source 1..203: mol_type = other DNA
ggcgcgccagtccttcaatccgactctactgttcctaaaggttccagcgcaaaatgccataagcaccacattcccttatactggagatcctccatacagccatggaacaggaacaggatacaccatggacacagtcaacagaacacaccaatattcagagaaggggaagtggacgacaaatacagaaacgactcggaccgatg

SEQ ID NO: 4205 - DNA, 203 bp, synthetic construct
  source 1..203: mol_type = other DNA
ggcgcgccagtcctatggcgtcccaaggcaccaaacggtcttatgaacagatggaaactgatggggaacgccagaatgcaactgagatcagagcatccgtcgggaagatgattgatggaattggacgattctacatccaaatgtgcaccgaacttaaactcagtgattatgaggggcgactgatccagcgactcggaccgatg

SEQ ID NO: 4206 - DNA, 203 bp, synthetic construct
  source 1..203: mol_type = other DNA
ggcgcgccagtcctctccagcaagtcctccaaactcacctgcgagctctgtaagtactattactttctttaacacttggcacgcacagccacgtgacgaagatgagctcagggaatatgaaagacaagcatcgctcctacaaaagaaaagggagtccagaaagaggggagaggaagagacactggcagcgactcggaccgatg

SEQ ID NO: 4207 - DNA, 203 bp, synthetic construct
  source 1..203: mol_type = other DNA
ggcgcgccagtcctgacacttagctaatgtttcctcacagacagaagcagacgagataactgacgaggaaatgctttctgctgctgaaagcatggaagcagatgcctccaattaagagacagcctagagggtgggtgctgcctggatacagatatcttgggccatttaatccacttgataacggtgaacgactcggaccgatg

SEQ ID NO: 4208 - DNA, 203 bp, synthetic construct
  source 1..203: mol_type = other DNA
ggcgcgccagtcctggcttttaaattgcacgtcggtcccagctgatcactggtgccatggccgagctagcctgtttcgtttccttctcactgactgaagataaagtagtatggtatccaattaataaaaaagcagtacaaaccatgttgtgtgctaaagtggaaaaagatcagaggagtaattattatcgactcggaccgatg

SEQ ID NO: 4209 - DNA, 203 bp, synthetic construct
  source 1..203: mol_type = other DNA
ggcgcgccagtcctggctttaaaaattgcgacaatgtctgattttggaattaatcttgatgccatttgcgacaatgtaaaaaaaggccaaacagaatcaagaactggttctcaattatcaaatcggagttcacgaagaatggattttgttgatgatgaagagttaagtacttactttaactcaaaagccgactcggaccgatg

SEQ ID NO: 4210 - DNA, 203 bp, synthetic construct
  source 1..203: mol_type = other DNA
ggcgcgccagtcctgtctccatatccgggagttgttggacgcggcgcctagccagggtccctatcctcctgactatacgcctcacggaggcgtctgaggtcatgttcaacatgaacgtggacgagagcgcctctggcgccctcggctcctcggccattcctgttcaccccacgccggcctgggtccgacgactcggaccgatg

SEQ ID NO: 4211 - DNA, 203 bp, synthetic construct
  source 1..203: mol_type = other DNA
ggcgcgccagtcctacgagctctaccggagcagtcgcctggccatctacatcgaggacctcggtcgaaaatactgccccgcgagcgcgaccgggggagatcatggcatccggcaagcaccatcagcccggggggacacggagcctgaccatgcaaaaagtaagcctgcgcgtgaccccccgcctggtgcgactcggaccgatg

SEQ ID NO: 4212 - DNA, 203 bp, synthetic construct
  source 1..203: mol_type = other DNA
ggcgcgccagtccttaaacgctcagtataaaaggccggtggacacgtatgatccttgcctaattctaacgggagaggcagaaagatatatggtggacgctgtgggaaattaccgggaagcctccactggaactaccgtactctaccccacgtatgatctgggctccatagttgcggacatggtgacttcgactcggaccgatg

SEQ ID NO: 4213 - DNA, 203 bp, synthetic construct
  source 1..203: mol_type = other DNA
ggcgcgccagtccttgggaaattaccgggaagcctccactggaactaccgtactctaccccacgtatgatctgggctccatagttgcggacatggtgacttatgaagatgagtagttctaagcgagatctggtggcccagcaactaagagcctcggtagaaaagagagcggctgtgagcgcacgtgaccgactcggaccgatg

SEQ ID NO: 4214 - DNA, 203 bp, synthetic construct
  source 1..203: mol_type = other DNA
ggcgcgccagtccttataaattactggcgtgaattgtgcccaccagagggtgagcccacctgtctgacttggcccctgtgtacataatactcggggtctcggcacccaggcagccttgcgtggtgctgtcctgctgaagggcgtttcttaggttctcggtcagacggccgcgctgcgaggcatacagccgactcggaccgatg

SEQ ID NO: 4215 - DNA, 203 bp, synthetic construct
  source 1..203: mol_type = other DNA
ggcgcgccagtcctcgggtgggctggttggggctgcttcccagctagtagcccttggaactgacgggcactgcgtccacctggccaccacatcggacgggcaggcatttttggtgctgcctgggggctttgttattaaaggccaattggcactcacccccgaggagaggggatatattctggcacgtccgactcggaccgatg

SEQ ID NO: 4216 - DNA, 203 bp, synthetic construct
  source 1..203: mol_type = other DNA
ggcgcgccagtcctaactggtcaggggcagctggaggcatgaaacggaagcaatgtcgtgttgaccggctcagggaccgctcattccctgcatacctcgaggaggtcatgtatgtgatggttcagtagagtattgggtgtggagactagctataaaagaggccgggaggccttctgcgtccagacgcgcgactcggaccgatg

SEQ ID NO: 4217 - DNA, 203 bp, synthetic construct
  source 1..203: mol_type = other DNA
ggcgcgccagtcctgaggtcatgtatgtgatggttcagtagagtattgggtgtggagactagctataaaagaggccgggaggccttctgcgtccagacgcgatggcacacgccagagacaaggcaggcgctgttatggccatgatactcatctgtgagacaagccttatttggacatctagtggcagtcgactcggaccgatg

SEQ ID NO: 4218 - DNA, 203 bp, synthetic construct
  source 1..203: mol_type = other DNA
ggcgcgccagtcctcccggatagacctggatgacctgtcagtggcggatgatttatcacgcatgcgtgtgatgatgacctacctacagtctttggcatcactatttaatttggggcctcgcttggccacagcggcatactctcaagagaccctgacggccacttgctggttaagataaagggggtacccgactcggaccgatg

SEQ ID NO: 4219 - DNA, 203 bp, synthetic construct
  source 1..203: mol_type = other DNA
ggcgcgccagtcctgaggcattccccgcactctcagcctcctcccgggcactcatcgatgagtttatgtctgtcaaacagacccacgcccccatccattacggacactatataattgaagaggtggcgccggtacgaagaatattaaagtttggaaataaggtggttttttgataattgtcaataaagcgactcggaccgatg

SEQ ID NO: 4220 - DNA, 203 bp, synthetic construct
  source 1..203: mol_type = other DNA
ggcgcgccagtcctggacactatataattgaagaggtggcgccggtacgaagaatattaaagtttggaaataaggtggttttttgataattgtcaataaagatggatttgaaagtggtagtgtctctctcctctcgtctgtataccgatgagattgccaagatgcaacagaggattggctgcatcttacgactcggaccgatg

SEQ ID NO: 4221 - DNA, 203 bp, synthetic construct
  source 1..203: mol_type = other DNA
ggcgcgccagtcctcgacacgcgtaaaaggtggcctccctgcccagggccgtgtccaaccatttgattagaagggtagcatcctcgggaagtgtgggtgggctgcggttgcaggccagggcgtaaaagagacccagctgtgaagagaagccctcgagacctccccccatctccctcttaccttgtgtccgactcggaccgatg

SEQ ID NO: 4222 - DNA, 203 bp, synthetic construct
  source 1..203: mol_type = other DNA
ggcgcgccagtcctctgcggttgcaggccagggcgtaaaagagacccagctgtgaagagaagccctcgagacctccccccatctccctcttaccttgtgtcatggcctcaaatgagggtgtggaaaacagacccttcccctatctgacggtggatgccgacctgctctcgaacctgcggcagtcagcgcgactcggaccgatg

SEQ ID NO: 4223 - DNA, 203 bp, synthetic construct
  source 1..203: mol_type = other DNA
ggcgcgccagtccttagaccccgagtagcacctcaaacttgatgcccgcctctctggcatccttgcccaccagcaggtcaaagctatgaaacaacccctcagccgctgactgccgcaggttcgagagcaggtcggcatccaccgtcagataggggaagggtctgttttccacaccctcatttgaggcccgactcggaccgatg

SEQ ID NO: 4224 - DNA, 203 bp, synthetic construct
  source 1..203: mol_type = other DNA
ggcgcgccagtcctgccgctgactgccgcaggttcgagagcaggtcggcatccaccgtcagataggggaagggtctgttttccacaccctcatttgaggccatgacacaaggtaagagggagatggggggaggtctcgagggcttctcttcacagctgggtctcttttacgccctggcctgcaaccgccgactcggaccgatg

SEQ ID NO: 4225 - DNA, 203 bp, synthetic construct
  source 1..203: mol_type = other DNA
ggcgcgccagtcctgctggccgagcccgggtctgggaggtctggggtggcgagcctgctgtctcaggaggggcctggctccgccgggtggccctggggtaagtctgggaggcagagggtcggcctaggcccggggaagtggagggggatcgcccgggtctctgttggcagagtccgggcgatcctctgcgactcggaccgatg

SEQ ID NO: 4226 - DNA, 203 bp, synthetic construct
  source 1..203: mol_type = other DNA
ggcgcgccagtcctcctaccttcagtttgtgcttgtggacctctcagagtttcaggacgatttacctggatgctggacggagatttacatgcaggcattgaagaatccggcaatacgatctcagtttttcgattgggctggtctgagcaaggtgatctctgattttgagaggggaaatcgggactaggcgactcggaccgatg

SEQ ID NO: 4227 - DNA, 203 bp, synthetic construct
  source 1..203: mol_type = other DNA
ggcgcgccagtcctggtcccgggggcagagacaaaaaagaggccagttgctcccagctcttaagagagagcagcttggagtaacaccgaaggtgcgctcgcttacctgccgcctttctagccgggggaagactgtgaaattttgccaggtcgtgtgtggagagggcacacagaccccgggtgggatcccgactcggaccgatg

SEQ ID NO: 4228 - DNA, 203 bp, synthetic construct
  source 1..203: mol_type = other DNA
ggcgcgccagtccttcgtgtctttcgttttcaggggactcatcctcctgacattttcgccagccgccgggcgggccggcctcctttcctggaaatccagccatggatcccacccggggtctgtgtgccctctccacacacgacctggcaaaatttcacagtcttcccccggctagaaaggcggcaggtcgactcggaccgatg

SEQ ID NO: 4229 - DNA, 203 bp, synthetic construct
  source 1..203: mol_type = other DNA
ggcgcgccagtcctttcgcacgtcctgcccccccgtgctgggcagtcagggcctggaagtcttggcggcgttggtatttaaaaaccagcgatccctgagaacgctccaggtagagtttccagccctgggccaaaagaccctccccacctccaccaccggcctgctaaacctcctctcccgctggcaggcgactcggaccgatg

SEQ ID NO: 4230 - DNA, 203 bp, synthetic construct
  source 1..203: mol_type = other DNA
ggcgcgccagtcctcgctccaggtagagtttccagccctgggccaaaagaccctccccacctccaccaccggcctgctaaacctcctctcccgctggcaggatggcgctctccgggcacgtcttgatagaccccgcccgactgcccagggacacaggccccgaactcatgtgggccccaagccttcgccgactcggaccgatg

SEQ ID NO: 4231 - DNA, 203 bp, synthetic construct
  source 1..203: mol_type = other DNA
ggcgcgccagtcctccgaccggagcatccggcaggtgttccaccgtgagtggcaagggcttcttcagagggagctggctcttgacggtgaggggatccaggtgaaggcaggcgtccttgggtggggcgtccgggcgctccacgaagccgcagacgtatacagacggtgcctgcaccattgtgcccgctcgactcggaccgatg

SEQ ID NO: 4232 - DNA, 203 bp, synthetic construct
  source 1..203: mol_type = other DNA
ggcgcgccagtcctttaacacttagggtcagcagcttggtcagggataggtgcaaaaacctgagctcgtcctcgcgcagagcgcaaagcggccagttctttagcatcttcaggaggagcccgtgaatcccaggtgtcattcgcgcgtcatccccgcgcacccccagtcccattaacatagcgggcacacgactcggaccgatg

SEQ ID NO: 4233 - DNA, 203 bp, synthetic construct
  source 1..203: mol_type = other DNA
ggcgcgccagtcctagcatcttcaggaggagcccgtgaatcccaggtgtcattcgcgcgtcatccccgcgcacccccagtcccattaacatagcgggcacaatggtgcaggcaccgtctgtatacgtctgcggcttcgtggagcgcccggacgccccacccaaggacgcctgccttcacctggatccccgactcggaccgatg

SEQ ID NO: 4234 - DNA, 203 bp, synthetic construct
  source 1..203: mol_type = other DNA
ggcgcgccagtccttatttaaaggccagcgacgccccggacctacaaaagccggacaaggcacttcagagcccaccaccggcctccacagacccagccaccatgctatcaggtaacgcaggagaaggagcaacagcctgcggaggttcggccgccgcgggccaggacctcatcagcgtcccccgcaaccgactcggaccgatg

SEQ ID NO: 4235 - DNA, 203 bp, synthetic construct
  source 1..203: mol_type = other DNA
ggcgcgccagtccttgaattaaccaatgagaagccccccactcctgagcaaaccttaaggtattgcacagagaccccaaaaagaggataaaagaaggcgagctggcccggctcgccagcgtcgtccagacgctcggggggtgcacacctcccagccggcccggcgtccttgcggcggcctcccccccccgactcggaccgatg

SEQ ID NO: 4236 - DNA, 203 bp, synthetic construct
  source 1..203: mol_type = other DNA
ggcgcgccagtcctgctgcacatcggccccagcaccagacttggacttgcgctcttctggccggccgagcgaagtgacaacctagacgccgggcggatattctaccagctaacgagcggagagttgtattggggccgcaccgtcgcccgccccccgactctcaccttgcccgtcgacgagctccggcccgactcggaccgatg

SEQ ID NO: 4237 - DNA, 203 bp, synthetic construct
  source 1..203: mol_type = other DNA
ggcgcgccagtcctctaccagctaacgagcggagagttgtattggggccgcaccgtcgcccgccccccgactctcaccttgcccgtcgacgagctccggccatggccgaagcttaccccggaggagcccatgcagcactagcgtcccggcgctcgtcgttcaggaacagcctccgccgcctgcggccccgactcggaccgatg

SEQ ID NO: 4238 - DNA, 203 bp, synthetic construct
  source 1..203: mol_type = other DNA
ggcgcgccagtcctccattttatggactctctcaagaaccaggtgacagtcaccgccagatacttcagaagggtgcctagccagtccacctgagtgcgaggatggccctgcaaactgacacacaggcctggcgggtggagatagggaccagaggactaatgttctctaactgtgtcccactccacctgcgactcggaccgatg

SEQ ID NO: 4239 - DNA, 203 bp, synthetic construct
  source 1..203: mol_type = other DNA
ggcgcgccagtcctgtgggccgcaggcggcggaggctgttcctgaacgacgagcgccgggacgctagtgctgcatgggctcctccggggtaagcttcggccatggccggagctcgtcgacgggcaaggtgagagtcggggggcgggcgacggtgcggccccaatacaactctccgctcgttagctggtcgactcggaccgatg

SEQ ID NO: 4240 - DNA, 203 bp, synthetic construct
  source 1..203: mol_type = other DNA
ggcgcgccagtcctaactcacagtttattttctccaaatcgctccttgcaacaatggacacgcaagggcgaatgcagaaaatagtctggaagtccaccaggcagggaggtggcatgcaaaataactgactgcctgggcaagttcctcttttgctgcagacaccacccagtctggctctgaccagcaagcgactcggaccgatg

SEQ ID NO: 4241 - DNA, 203 bp, synthetic construct
  source 1..203: mol_type = other DNA
ggcgcgccagtcctcagggaggtggcatgcaaaataactgactgcctgggcaagttcctcttttgctgcagacaccacccagtctggctctgaccagcaagatgctctccaccatggcccccgggtccaccgtggggaccctggtggccaacatgacttccgtcaatgcaacggaagatgcgtgcactcgactcggaccgatg

SEQ ID NO: 4242 - DNA, 203 bp, synthetic construct
  source 1..203: mol_type = other DNA
ggcgcgccagtcctccgttttccaggcctacgcagaagacgctatcacgatccagagaccgccgccgcactgcttggggaggcagagactgagttttaaccatgtctgggggactcttctataaccctttcctaagacctaataaaggccttctgaaaaagcctgacaaggagtacctgcgtctcattcgactcggaccgatg

SEQ ID NO: 4243 - DNA, 203 bp, synthetic construct
  source 1..203: mol_type = other DNA
ggcgcgccagtcctggcggtccttgatcctgcgccgggcggacgcggtcagccccggccaggccctgcccccggatgggctttacctcacgtacgactctgaccgccccctaattcttctgtataagggcagggggtgggtatttaaggatctatatgcccttctctacctgcacctccaaatgagagcgactcggaccgatg

SEQ ID NO: 4244 - DNA, 203 bp, synthetic construct
  source 1..203: mol_type = other DNA
ggcgcgccagtcctaccgccccctaattcttctgtataagggcagggggtgggtatttaaggatctatatgcccttctctacctgcacctccaaatgagagatgactcggcgtagggtgctaagcgtggtcgtgctgctagccgccctggcgtgccgtctcggtgcgcagaccccagagcagcccgcacgactcggaccgatg

SEQ ID NO: 4245 - DNA, 203 bp, synthetic construct
  source 1..203: mol_type = other DNA
ggcgcgccagtcctaggagggcagggctccgggggcagacgcaagcgccgtctggccaccgttctccccggactcgaggtctagagacccctggggcggcgatgtcggggctgctggcggcggcgtacagccaggtgtacgccctggcggttgagctgagcgtgtgcacccggctggacccccggagtcgactcggaccgatg

SEQ ID NO: 4246 - DNA, 203 bp, synthetic construct
  source 1..203: mol_type = other DNA
ggcgcgccagtcctgcggtcagagtcgtacgtgaggtaaagcccatccgggggcagggcctggccggggctgaccgcgtccgcccggcgcaggatcaaggaccgcccccaggtcttgttgtagagggacacggttaggacggcctcgcgcagcgcccggcacagaatttgctggctagatgccagtgacgactcggaccgatg

SEQ ID NO: 4247 - DNA, 203 bp, synthetic construct
  source 1..203: mol_type = other DNA
ggcgcgccagtcctccgcccccaggtcttgttgtagagggacacggttaggacggcctcgcgcagcgcccggcacagaatttgctggctagatgccagtgagcccccgggtacgctgtagaagctgttgaaggaggtctctatccagtcgctcggctcgatgcctggccatatcagggaagtcaggaacgactcggaccgatg

SEQ ID NO: 4248 - DNA, 203 bp, synthetic construct
  source 1..203: mol_type = other DNA
ggcgcgccagtcctaggctgggcggcatgccaagatcgctgagacgtcagttccccgtgacgtgggccctggccagcctgactgacttcctgaaatctttgtaaatgaataaacagtgggtgttgcgtgatgagtaaagtgtaacatttaatgtgggactgggaggccggggcgataccttgggcatccgactcggaccgatg

SEQ ID NO: 4249 - DNA, 203 bp, synthetic construct
  source 1..203: mol_type = other DNA
ggcgcgccagtccttaaatgaataaacagtgggtgttgcgtgatgagtaaagtgtaacatttaatgtgggactgggaggccggggcgataccttgggcatcatgcagggtgcacagactagcgaggataatctgggcagccagagccagccgggtccgtgcggctacatctacttttaccccctggcccgactcggaccgatg

SEQ ID NO: 4250 - DNA, 203 bp, synthetic construct
  source 1..203: mol_type = other DNA
ggcgcgccagtcctaagaaagcggtgacagcctggccggcggccacacaggaggccaacaggaggagctgagcgatgaacctggccattgctctggactctcctcacccaggcctcgcgtcttatactattctgccacgcccattttatcatataagcctgaagcccgtgagctggcctgacgagacccgactcggaccgatg

SEQ ID NO: 4251 - DNA, 203 bp, synthetic construct
  source 1..203: mol_type = other DNA
ggcgcgccagtcctggcggcgagggcgcgacccacgcctcgaccggggtcctcacaaacacagaatctgtagacttggctggcctcatggtctcgtcaggccagctcacgggcttcaggcttatatgataaaatgggcgtggcagaatagtataagacgcgaggcctgggtgaggagagtccagagcacgactcggaccgatg

SEQ ID NO: 4252 - DNA, 203 bp, synthetic construct
  source 1..203: mol_type = other DNA
ggcgcgccagtcctgagacccctgggctctcaggaactccgcccaggtcttgccaattggggtgatcctgtagcgccgcggtttcagcatcacaggttattttgcctgaagcttgctggggcgtaaatccctctcgccttgtttctcagagagcatttcaggccggttttgcagtcgctgctgcagctcgactcggaccgatg

SEQ ID NO: 4253 - DNA, 203 bp, synthetic construct
  source 1..203: mol_type = other DNA
ggcgcgccagtcctccagacgtcagcagactaagactactcctggtggtactctgtgtcctgtttggacttttatgcctgctcctcatctaagaagccaccatgcgaccgggtagaccactggctggattctacgctactctccgccgttccttcagaagaatgtccaaaaggtcaaagaacaaggcccgactcggaccgatg

SEQ ID NO: 4254 - DNA, 203 bp, synthetic construct
  source 1..203: mol_type = other DNA
ggcgcgccagtcctttgctctcatgcttataattataattttgatcatctttatcttcagaagagaccttctctgtccacttggagccctttgtatactcctactgatgagtaagtattacaccctttgccccacaccccctttcccttactcttccttctctaacgcactttctcctctttccccagcgactcggaccgatg

SEQ ID NO: 4255 - DNA, 203 bp, synthetic construct
  source 1..203: mol_type = other DNA
ggcgcgccagtccttactgatgagtaagtattacaccctttgccccacaccccctttcccttactcttccttctctaacgcactttctcctctttccccagtcaccctcctgctcatcgctctctggaatttgcacggacaggcattgttccttggaattgtgctgttcatcttcgggtgcttacttgcgactcggaccgatg

SEQ ID NO: 4256 - DNA, 203 bp, synthetic construct
  source 1..203: mol_type = other DNA
ggcgcgccagtccttggcttttgtaggctttgccctctttggggtcattagatgctgccgctactgctgctactactgccttacactggaaagtgaggagcgcccaccgaccccatatcgcaacactgtataaaggtaagtattattaaattttagagacactatcacgtgtaacttgacgtgcaaggcgactcggaccgatg

SEQ ID NO: 4257 - DNA, 203 bp, synthetic construct
  source 1..203: mol_type = other DNA
ggcgcgccagtcctagttttgcctgaacctgtggttgggcaggtacatgccaacaaccttctaagcacccgcgcttgtgttttgctttatctgccgccatcatgcctacattctatcttgcgttacatgggggacaaacatatcatctaattgttgacacggatagtcttggaaacccgtcactctcacgactcggaccgatg

SEQ ID NO: 4258 - DNA, 203 bp, synthetic construct
  source 1..203: mol_type = other DNA
ggcgcgccagtcctcgggcccctggtggctcggccgcggtcctcccccgtgaacggggcgcgctgggccgcggctgccccctggacccctaggcctgtgccatggggaccccctgccagtcggcgcggggtcccaggaccacgcccctccctcactgcccccccccctgccttccaggtgcacgggaccgactcggaccgatg

SEQ ID NO: 4259 - DNA, 203 bp, synthetic construct
  source 1..203: mol_type = other DNA
ggcgcgccagtcctaattgctcccaccctcaattttcgcttgccttcttcccttgttaacctgatagcatagcctctaggtttccttgtaggtctgtttgggtttgttggttcacgtggtgctaacttgaattttttggttttctagttccctcttaattacatttgtgccagatcttgtagagcaagcgactcggaccgatg

SEQ ID NO: 4260 - DNA, 203 bp, synthetic construct
  source 1..203: mol_type = other DNA
ggcgcgccagtcctgtttgttggttcacgtggtgctaacttgaattttttggttttctagttccctcttaattacatttgtgccagatcttgtagagcaagatggcctattcaacaagggagatactgttagccctgtgtatacgggacagtcgtgtgcatggaaatggtaccctgcatcctgtgttgcgactcggaccgatg

SEQ ID NO: 4261 - DNA, 203 bp, synthetic construct
  source 1..203: mol_type = other DNA
ggcgcgccagtcctgaactggacgtggtcctgcgcatccacggccttgacctggtacagtcctatcaaacttcccaggtctacgtgtgaaaagtaaacccgatggccccggtcaccccagatgccgtgaatgcacgccaacagcgaccggcagatcccgcattgcgccgcctaatgcatccgcaccaccgactcggaccgatg

SEQ ID NO: 4262 - DNA, 203 bp, synthetic construct
  source 1..203: mol_type = other DNA
ggcgcgccagtcctccttgtccttgtggcggtgtcccagaaactggtgccgaccccggtattaaaaacccagaagacctcaccttgccacccagatgtgtcatggctcacaaagtcacgagcgcaaacgagccaaaccccctgaccggaaaaagactgtccagctgccccctcacgaggagtggcgtacgactcggaccgatg

SEQ ID NO: 4263 - DNA, 203 bp, synthetic construct
  source 1..203: mol_type = other DNA
ggcgcgccagtcctgttacgccactcctcgtgagggggcagctggacagtctttttccggtcagggggtttggctcgtttgcgctcgtgactttgtgagccatgacacatctgggtggcaaggtgaggtcttctgggtttttaataccggggtcggcaccagtttctgggacaccgccacaaggacaacgactcggaccgatg

SEQ ID NO: 4264 - DNA, 203 bp, synthetic construct
  source 1..203: mol_type = other DNA
ggcgcgccagtccttccttggagggacaaagactcgtggtcggaatccgaggcggcgccgtggaagaaggaactcgtgaggcaccccatccgcaggcaccggacacgcgagactcgccgtatgcgcgggagccattcacgggtggaacacgtgccccccgagacccgggagacggtggtggggggagccgactcggaccgatg

SEQ ID NO: 4265 - DNA, 203 bp, synthetic construct
  source 1..203: mol_type = other DNA
ggcgcgccagtcctgacacgcgagactcgccgtatgcgcgggagccattcacgggtggaacacgtgccccccgagacccgggagacggtggtggggggagcatggcgttattcttcgcgcgccacaccttatctggcacgggtgctggctgtcacggccgtggccctgctcctgatgtttctgaggtgcgactcggaccgatg

SEQ ID NO: 4266 - DNA, 203 bp, synthetic construct
  source 1..203: mol_type = other DNA
ggcgcgccagtcctggcagctcctgtatttaactttgcggacagaggccagagccgtttgctccatctgtcagcaacgccaagctccagaggacgcccgcgacgagcctcacctgttctcctcctgtttagaggtagaattgccacctggtgagcggtgtgcgggctgccgtctctatcagacgcgttcgactcggaccgatg

SEQ ID NO: 4267 - DNA, 203 bp, synthetic construct
  source 1..203: mol_type = other DNA
ggcgcgccagtcctatctctcggcggctgccgccgccagccgcgtaagaccccggaccagaaggggggcgacaaggcgtcctccccgccccaccgccgaagatgagtaacggcgactgggggcaaagccagcgcacccggggaaccggccccgtgcgcggaatcaggaccatggatgtgaatgccccccgactcggaccgatg

SEQ ID NO: 4268 - DNA, 203 bp, synthetic construct
  source 1..203: mol_type = other DNA
ggcgcgccagtcctagaattcgtcttgctctattcacccttacttttcttcttgcccgttctctttcttagtatgaatccagtatgcctgcctgtaattgttgcgccctacctcttttggctggcggctattgccgcctcgtgtttcacggcctcagttagtaccgttgtgaccgccaccggcttggccgactcggaccgatg

SEQ ID NO: 4269 - DNA, 203 bp, synthetic construct
  source 1..203: mol_type = other DNA
ggcgcgccagtcctcgccagacggccgccgcactcagcgaggaggcctgcgcgtgttcctcaaccagcccacgaacgtcccgcgtgaattcggacccccgggaaatatttagacgccgggccggagggggcagcagccccgcgattcggcgttgcagacggcggcgatcgacggacccctggaccttccgactcggaccgatg

SEQ ID NO: 4270 - DNA, 203 bp, synthetic construct
  source 1..203: mol_type = other DNA
ggcgcgccagtcctccaaagatccccagctccagaggcatcagcgcgcgcaggcgggcagcggggtcgtccccagacagcagcaactgacgcgtcacgcgggcgagccccccgtccacctctgccaggggtggctgggcgtctgcccctccgctaccgccgctgctgtcactctccatagcggacgcccgactcggaccgatg

SEQ ID NO: 4271 - DNA, 203 bp, synthetic construct
  source 1..203: mol_type = other DNA
ggcgcgccagtcctttggaggaggtctgccttcaattaccgtggctctagcctccccgtggtggagattgacagcttttattccaacgtctctgactgggaggtgattctctagacttaacgggaggaaacaggaggaggagggggacaagagcacaaaagtggttcagtggacacccaccacacagccgactcggaccgatg

SEQ ID NO: 4272 - DNA, 203 bp, synthetic construct
  source 1..203: mol_type = other DNA
ggcgcgccagtcctggtgattctctagacttaacgggaggaaacaggaggaggagggggacaagagcacaaaagtggttcagtggacacccaccacacagcatggcaacgaccagtcatgtcgagcatgagctcctctccaaattgattgatgagttaaaggtcaaggccaactcagaccccgaggctcgactcggaccgatg

SEQ ID NO: 4273 - DNA, 203 bp, synthetic construct
  source 1..203: mol_type = other DNA
ggcgcgccagtcctcgtcagctcttctcagaggatgatctgttggagactgacggttttactgaacgagcctgtgaatcttgccaataaacgtttattgccatgtccaagttgttgtacgtgcgtgatcatgagggctttgcctgcctaacggtcgaaacccaccgcaaccgctggttcgcggctcaccgactcggaccgatg

SEQ ID NO: 4274 - DNA, 203 bp, synthetic construct
  source 1..203: mol_type = other DNA
ggcgcgccagtcctacctacatgactagcatcaagcaaactaatttctttgagcaagagagttccgattacaccatgctggtggtagatgacctttgagtcagggtggctacttgctcaggtttctgggcataaattctcctgcctgcctctgctctggtacgttggcttctgctgctgcttgtgatccgactcggaccgatg

SEQ ID NO: 4275 - DNA, 203 bp, synthetic construct
  source 1..203: mol_type = other DNA
ggcgcgccagtcctgtccggcaaggccagagacaccctcgcctgccattcccagccactccagcaacaccgcactggagaggcctctggctgttcagctcgcgaggaaaaggacatcgtcggaggccaggcagaagcagaagcaccccaagaaagtgaagcaggcctttaaccccctcatttaacacccgactcggaccgatg

SEQ ID NO: 4276 - DNA, 203 bp, synthetic construct
  source 1..203: mol_type = other DNA
ggcgcgccagtcctcgaggaaaaggacatcgtcggaggccaggcagaagcagaagcaccccaagaaagtgaagcaggcctttaaccccctcatttaacaccatgttctcgtgcaagcagcacctgtccctgggggcctgtgtcttctgtctcggcctcctggccagcacccccttcatttggtgctttcgactcggaccgatg

SEQ ID NO: 4277 - DNA, 203 bp, synthetic construct
  source 1..203: mol_type = other DNA
ggcgcgccagtcctcatcacaggccatcacggtcaccttcatgagtcagtgcttcgccggtcgctgtggggccaatcaaccgaccgcccatttctccatcagcgtgcccgcctccagaatcataaatagggctgaggccagtcaagacagcactacatcccagctagcccgtcgtagagacagacaagcgactcggaccgatg

SEQ ID NO: 4278 - DNA, 203 bp, synthetic construct
  source 1..203: mol_type = other DNA
ggcgcgccagtcctgagccagagcccgcagcacgaccagtctgggagatagaaggccatcgttctgtttagcccgccgttggggcctcccggtcttaaataatgtccgcccccgtcgtcatcaaggcccttgtggcctcaaacactgacattgcggaggccatcctcgatgccatcctctcgcggcctcgactcggaccgatg

SEQ ID NO: 4279 - DNA, 203 bp, synthetic construct
  source 1..203: mol_type = other DNA
ggcgcgccagtcctgggcgaggcgttgtggcacaaacaaaacaggcggaagccctcgtcaggccgcgagaggatggcatcgaggatggcctccgcaatgtcagtgtttgaggccacaagggccttgatgacgacgggggcggacattatttaagaccgggaggccccaacggcgggctaaacagaacgcgactcggaccgatg

SEQ ID NO: 4280 - DNA, 203 bp, synthetic construct
  source 1..203: mol_type = other DNA
ggcgcgccagtcctagtgtttgaggccacaagggccttgatgacgacgggggcggacattatttaagaccgggaggccccaacggcgggctaaacagaacgatggccttctatctcccagactggtcgtgctgcgggctctggctctttggccggcccaggaatagatacagccagctccctgaggagcgactcggaccgatg

SEQ ID NO: 4281 - DNA, 203 bp, synthetic construct
  source 1..203: mol_type = other DNA
ggcgcgccagtcctacataacttcaagttcaacctcttccatgtcactgagacccagttcaaacccagagacactcagcccctccaccagtgacaattcaacgtcacatatgcctttactaacctccgctcacccaacaggtggtgaaaatataacacaggtgacaccagcctctatcagcacacatccgactcggaccgatg

SEQ ID NO: 4282 - DNA, 203 bp, synthetic construct
  source 1..203: mol_type = other DNA
ggcgcgccagtcctgacattgcagtttcttccccttcctcttctgaaacatcgaacgatgagtgatttcgcccatgtaacaagaactgggatgaaccctggggcaacagactgcggggaggaggggggcagtgataagtcatgacaattttagatgaggtagaaattttgcatattttcagacccacccgactcggaccgatg

SEQ ID NO: 4283 - DNA, 203 bp, synthetic construct
  source 1..203: mol_type = other DNA
ggcgcgccagtcctggcaacagactgcggggaggaggggggcagtgataagtcatgacaattttagatgaggtagaaattttgcatattttcagacccaccatggaatcatttgaaggacagggggactctagacagtcacccgacaatgagcggggagataatgtacagactaccggcgagcatgatcgactcggaccgatg

SEQ ID NO: 4284 - DNA, 203 bp, synthetic construct
  source 1..203: mol_type = other DNA
ggcgcgccagtccttatgcatgagccacaggcattgctaatgtacctcatagacacacctaaatttagcacgtcccaaaccatgacatcacagaggaggctggtgccttggctttaaaggggagatgttagacaggtaactcactaaacattgcaccttgccggccacctttgctatctttgctgaagcgactcggaccgatg

SEQ ID NO: 4285 - DNA, 203 bp, synthetic construct
  source 1..203: mol_type = other DNA
ggcgcgccagtcctggtgccttggctttaaaggggagatgttagacaggtaactcactaaacattgcaccttgccggccacctttgctatctttgctgaagatgatggacccaaactcgacttctgaagatgtaaaatttacacctgacccataccaggtgccttttgtacaagcttttgaccaagctcgactcggaccgatg

SEQ ID NO: 4286 - DNA, 203 bp, synthetic construct
  source 1..203: mol_type = other DNA
ggcgcgccagtcctgcctcatttataaatgccttgcatattttgtaggatctcagagtaatctccacactcccggctgtaaattccttgttgaggacgttgcagtagtcagagaccagagagcccagctgctttttgatttcaggagttagcctcagaaagtcttccaagccatcctttttaggcctccgactcggaccgatg

SEQ ID NO: 4287 - DNA, 203 bp, synthetic construct
  source 1..203: mol_type = other DNA
ggcgcgccagtcctgcgtctgtttgtgtagtgaggtgttgtgtcctgtatggtattctactttaaaaaggccggctgacatggattactggtcttttatgagccattggcatgggcgggacaatcgcaatataaaaccctgaccatcacatggggcattaggcgactctgcatcagcatcgcttaagtcgactcggaccgatg

SEQ ID NO: 4288 - DNA, 203 bp, synthetic construct
  source 1..203: mol_type = other DNA
ggcgcgccagtcctattacatgcactgccccgcgggaaatacgtcctacccaggaacccgaaacagtgtttcccagaagctgtaaaaatagaacgccctggaactgccccactgtgcaatgcagcttttagccatgccatgctctataaatcacttccctatctcaggtaggcctgcacaccttaggtcgactcggaccgatg

SEQ ID NO: 4289 - DNA, 203 bp, synthetic construct
  source 1..203: mol_type = other DNA
ggcgcgccagtcctggtcatcagccgctgcgcaaacggactcaacgtggtctccttctttatctccatcctgaagcgaagcagctccgccctcacgggccatctccgtgagttgttaaccaccctggagactctttacggttcattctcagtggaagacctgtttggtgccaacttaaacagatacgccgactcggaccgatg

SEQ ID NO: 4290 - DNA, 203 bp, synthetic construct
  source 1..203: mol_type = other DNA
ggcgcgccagtcctccaagaagcatctggttctgacctctcagcatccctctcccctggcccagaacagcacccgaaagagtgcccagcagaagttcctgggcaacaaccactttgtcctcgctaacaactttttgcgtgagaaggggctcggtgagatagattggaggctgtagaggggtcatcactcgactcggaccgatg

SEQ ID NO: 4291 - DNA, 203 bp, synthetic construct
  source 1..203: mol_type = other DNA
ggcgcgccagtcctgagtgagtatgggttttgtgtaaatttattgctaaaatttcattaagcagtgaagtaaaggaattgtgggaattctattgactgtgaatgcaatgtaatgtaacaaattgtatgattatttgggatactattcatagatgtcggcagcgtccgaatgaggaatagatccagtatcgactcggaccgatg

SEQ ID NO: 4292 - DNA, 203 bp, synthetic construct
  source 1..203: mol_type = other DNA
ggcgcgccagtcctgtgaaggaagttacttcacactcagtccaggtcaaaggtaaatcaggcgcaccttggcaccacctgacacattgtacaccagcaccagcacctgacagaacgctgacagaagtcagaagcgacttgatcgcctccaatttggctataaattctgagagccccgacaactgaagacgactcggaccgatg

SEQ ID NO: 4293 - DNA, 203 bp, synthetic construct
  source 1..203: mol_type = other DNA
ggcgcgccagtcctgcacctgacagaacgctgacagaagtcagaagcgacttgatcgcctccaatttggctataaattctgagagccccgacaactgaagaatgtggagacgactccattcctcagatgtccgggagggtcacccatggtccaggcgatgcagaacgccatggggtcgactgggatgtcgactcggaccgatg

SEQ ID NO: 4294 - DNA, 203 bp, synthetic construct
  source 1..203: mol_type = other DNA
ggcgcgccagtcctgccgtcataaaggagctgagctgactctgctggtggcctcgcgtaccactgtggccaggcggtagctgggacgtgcagcccaccaccatggggagcagcaagagcaagcccaaggaccccagccagcgccggcgcagcctggagccacccgacagcacccaccacgggggattccgactcggaccgatg

SEQ ID NO: 4295 - DNA, 203 bp, synthetic construct
  source 1..203: mol_type = other DNA
ggcgcgccagtccttaaagcaaaaacactattatgtgcattttaccaaggaagcagtaaaatatggacaaaaagggatgtggcaagtgaggactggaactgatgtattatttggtccttcttctatcgctagcacttcgacgggggccgagcaaggtgacaccaccgcacaagtcacccgaagcgccacgactcggaccgatg

SEQ ID NO: 4296 - DNA, 203 bp, synthetic construct
  source 1..203: mol_type = other DNA
ggcgcgccagtcctatatagactgggaaggaaataaacatttctatgtgcggtttgcagatgaggcaacacaatttgatgcagcaaatgaatggcaagtacgaactgaaagtgaaataatatctaattctgttaccagcacccccccacggagcgacccgaggcctactggatcttctgccatcacctcgactcggaccgatg

SEQ ID NO: 4297 - DNA, 203 bp, synthetic construct
  source 1..203: mol_type = other DNA
ggcgcgccagtcctgaactgaaagtgaaataatatctaattctgttaccagcacccccccacggagcgacccgaggcctactggatcttctgccatcacctatgaaacttccagacacgacacgaggaggactaggagatctactaaaagaccccgaccgtcccccagcccatccgcgacatcggcgacgactcggaccgatg

SEQ ID NO: 4298 - DNA, 203 bp, synthetic construct
  source 1..203: mol_type = other DNA
ggcgcgccagtcctctcgattgttacttacacctcaggcagttcctgctgttcaggtccctcctttggttcgtgtcctgacacttcctccaggcacagccctacaaatcttactctcagatgtagggggtcttgtacctttttctgtgccttctgtacatcctgttattcctggcactgtgtttccagcgactcggaccgatg

SEQ ID NO: 4299 - DNA, 203 bp, synthetic construct
  source 1..203: mol_type = other DNA
ggcgcgccagtccttacaaatcttactctcagatgtagggggtcttgtacctttttctgtgccttctgtacatcctgttattcctggcactgtgtttccagatgtgtctgaacctcctattgttgtggatggttttgatgcatttgatacattttatttgcatccaagtcacagacgcaaacgcaagccgactcggaccgatg

SEQ ID NO: 4300 - DNA, 203 bp, synthetic construct
  source 1..203: mol_type = other DNA
ggcgcgccagtcctagtatattctgcgtgctaatcgttcaacgttagtccgtggagtgagcttctgttaagttgttaacacgtttgaataatttctactgaaagggtagagaaaaggagttttgcttctcatggcaacaagaggagcaagcaagtctcgggtcacgacccggggcgtcaatatggtgacgactcggaccgatg

SEQ ID NO: 4301 - DNA, 203 bp, synthetic construct
  source 1..203: mol_type = other DNA
ggcgcgccagtcctttagtccgtggagtgagcttctgttaagttgttaacacgtttgaataatttctactgaaagggtagagaaaaggagttttgcttctcatggcaacaagaggagcaagcaagtctcgggtcacgacccggggcgtcaatatggtgacggccaaggccaagagtctggccgtcaaacgactcggaccgatg

SEQ ID NO: 4302 - DNA, 203 bp, synthetic construct
  source 1..203: mol_type = other DNA
ggcgcgccagtcctgaaatttccaataaactctggtgtaaggcttagagtgatggtcgaggtgccctatttagggtgaggagcctcggtggcagccccaccaaatcctctattggataggaacagctgtactgggcagttacagcagtcgtatggtaacacatgcggcgttccgaaataccatgcctgcgactcggaccgatg

SEQ ID NO: 4303 - DNA, 203 bp, synthetic construct
  source 1..203: mol_type = other DNA
ggcgcgccagtcctgcaacagtatttaaaaactgctctgttgtgctgctgtttaagagggcaggcaccggcagtcctcggagttgaaattccatcaacagctttgtctggtgaaggctcccgcctcccccactcaggcctttggtaagcttttcaagagcgtctgtgccgtccattgccggcgtggatcgactcggaccgatg

SEQ ID NO: 4304 - DNA, 203 bp, synthetic construct
  source 1..203: mol_type = other DNA
ggcgcgccagtccttttgtctggtgaaggctcccgcctcccccactcaggcctttggtaagcttttcaagagcgtctgtgccgtccattgccggcgtggatatgaaggtgcaggctgaaaatgcggctcgcctgggtaggcaagtgttgggtcttttacctccaccaactcaccgggtatccctcactcgactcggaccgatg

SEQ ID NO: 4305 - DNA, 203 bp, synthetic construct
  source 1..203: mol_type = other DNA
ggcgcgccagtcctccaaccgtgggtcgtgtggacgccgcatatttagagagtaaatcccgcacccccctggcaaactccggtcctctagtgagggatacccggtgagttggtggaggtaaaagacccaacacttgcctacccaggcgagccgcattttcagcctgcaccttcatatccacgccggcacgactcggaccgatg

SEQ ID NO: 4306 - DNA, 203 bp, synthetic construct
  source 1..203: mol_type = other DNA
ggcgcgccagtcctgtctgccttcgaggcaccggacgacgaactccgttttgtcccactgacgctggcaggcctccggaaactgtttgtcgaatagaggccatggcagcccagcctctgtacatggagggaatggcctccacccaccaagctaactgtatattcggagaacatgctggatcccagtgccgactcggaccgatg

SEQ ID NO: 4307 - DNA, 203 bp, synthetic construct
  source 1..203: mol_type = other DNA
ggcgcgccagtccttactaattttgaaaggcggggttctgccaggcatagtctttttttgtggcggcccttgtgtaaacctgtctttcagaccttgttggacatcccgtacaatcaagatgttcctgtatgttgtttgcagtctggcggtttgctttcgaggactattaagcctttctctgcaatcgtcgactcggaccgatg

SEQ ID NO: 4308 - DNA, 203 bp, synthetic construct
  source 1..203: mol_type = other DNA
ggcgcgccagtcctttgggcgggccaggggggtaggactgtgcggattctgggcgcctttcagtggagcttaggccgtgcggtcgcgctggtgagaaggtcatggccctggatcagcgctgggatcgctttcttgtgtcttggtttggtttggatgaggcccagctgacggcccaccgcgtgttcgagcgactcggaccgatg

SEQ ID NO: 4309 - DNA, 203 bp, synthetic construct
  source 1..203: mol_type = other DNA
ggcgcgccagtcctgccgtattctccgaggcgcgggcacggccctgattgactgcgggtgtcgcgctttgggggccttgccagccccaccccgctgtcgccatgagtgtcgttggtaagcgtgtagtggacgaactgtgtcgggtggtatcctcatacttgggacagtctggtcagtccctggatttgcgactcggaccgatg

SEQ ID NO: 4310 - DNA, 203 bp, synthetic construct
  source 1..203: mol_type = other DNA
ggcgcgccagtcctggtctttctctttaagggtctccaaaacgccagggtggggaaaaccacctcactagacattattcgggagctaaccgcacaactaaaaagacaccgcctagacctggcccacccctcacagacgtcacacttgtacgcttgagctggtcccgggccttcgcaccccatccaccgcgactcggaccgatg

SEQ ID NO: 4311 - DNA, 203 bp, synthetic construct
  source 1..203: mol_type = other DNA
ggcgcgccagtccttggtgccctcctccccgggaacctggtgccctcctccccgggaacctggtgccctcctccccgggaacctggtgccctcctccccgggaacctggtgccctcctccccgggaacctggtgccctcctccccgggaacctggtgccctcctccctcctcactccaatcccaatgccgactcggaccgatg

SEQ ID NO: 4312 - DNA, 203 bp, synthetic construct
  source 1..203: mol_type = other DNA
ggcgcgccagtccttgggatgcgatgtttccgttctacaggcggcagtggaacagatcctaacatctgtttcggactttgatctgcgcattctggacagctattaagcttgtgattttgtttagggcggaaaaataaattttcctttgtttttccacatcggtgccttcacatatacaagccggcacccgactcggaccgatg

SEQ ID NO: 4313 - DNA, 203 bp, synthetic construct
  source 1..203: mol_type = other DNA
ggcgcgccagtcctattaagcttgtgattttgtttagggcggaaaaataaattttcctttgtttttccacatcggtgccttcacatatacaagccggcaccatggccacttacgaggttctctgtgaggtggcgcggaaactgggcacggatgacagggaagtggtattgttcctcctaaacgtgttccgactcggaccgatg

SEQ ID NO: 4314 - DNA, 203 bp, synthetic construct
  source 1..203: mol_type = other DNA
ggcgcgccagtcctagtgtctgcgatctccatcctgtggccatgggcggtactgcagcctgctactgtgtgtaaccgcttaattgtctgagagctcccccttgtggtcactacgggtattgcataatgtgaatatactgccaccgcctccataattttactttggttgtcagaccagatttcccgaggcgactcggaccgatg

SEQ ID NO: 4315 - DNA, 203 bp, synthetic construct
  source 1..203: mol_type = other DNA
ggcgcgccagtccttcaagctactttctgattggtgccccaggcaggactgccataaaaactgaagaaggcgtgtctgctttgcagaatttaccccccactgtgctcccggttgctggcaccggttcagtggtccgacctgtcgtctgtgctcccccgtggacgacgccgagtgcctctcgggggtcccgactcggaccgatg

SEQ ID NO: 4316 - DNA, 203 bp, synthetic construct
  source 1..203: mol_type = other DNA
ggcgcgccagtcctctggcccaaacggaggatcctaggtgggtgtgcatttattagacgttggtgtgttgaaggacggatcaggcggggaggaggggtgggggagacttactgcagcactaggttaggttgaaagccggggtaaaaggcgtggctaaacaacacctatactacttgttattgtaggcccgactcggaccgatg

SEQ ID NO: 4317 - DNA, 203 bp, synthetic construct
  source 1..203: mol_type = other DNA
ggcgcgccagtcctgtttcctcttgcgctatgtgggacaactagagtccaacctggcaagcagtggagcaagacgccagacagccgatctcgaaaaaaataatgcagacagaggcaacgttcatcctaggtgactgggagataacggtgtctaactgccggtttacttgcagcagcctaacatgtggccgactcggaccgatg

SEQ ID NO: 4318 - DNA, 203 bp, synthetic construct
  source 1..203: mol_type = other DNA
ggcgcgccagtccttaaggcagccagccaggcaccatacagcttctacgactgcaaagaagagagctggcacgtggggctcttccagatcaaacacggacctggaggggtctgtacaccaccttgccacgtagcgattagggccgaccgccacgaggaacccatgcaatcgtgactgtccgagcacatcgactcggaccgatg

SEQ ID NO: 4319 - DNA, 203 bp, synthetic construct
  source 1..203: mol_type = other DNA
ggcgcgccagtcctaaggctggaccctcctctctagttgatatccttccacagggtttgcttgggggtggctatggttccatgggcgtgattaggaaacgttcggctgtttcgtctgcccttatgtttcattaaaagtatataagagcacactgtgtggttggtggtgtttacctataccctcgctgccgactcggaccgatg

SEQ ID NO: 4320 - DNA, 203 bp, synthetic construct
  source 1..203: mol_type = other DNA
ggcgcgccagtccttcggctgtttcgtctgcccttatgtttcattaaaagtatataagagcacactgtgtggttggtggtgtttacctataccctcgctgcatggatcctacactttactgtgtagttgcggttgataccaaactcgggatcggaaaaaacagatgtctcccgtggcctgcattgcggcgactcggaccgatg

SEQ ID NO: 4321 - DNA, 203 bp, synthetic construct
  source 1..203: mol_type = other DNA
ggcgcgccagtcctgaccccggttgcctggacgcgtgccctggtacggtcacttgttgcaggggttaatgccatgttttattgtgggttctctctcaggatatggaagatgaggatgttcctgtctgctggatttgcaacgaggagctcggaaatgagagatttagagcctgtggatgcacaggagagcgactcggaccgatg

SEQ ID NO: 4322 - DNA, 203 bp, synthetic construct
  source 1..203: mol_type = other DNA
ggcgcgccagtcctggattttttggggtgttggccttcgtaataaaagcccaggatcctggagtttacaggtaggcgtcgtagaaccagcactacatcacgtacgtgttttgaaccgagttgagctgtttaccgcgcctgacctaacatcgccgtttcgcatttacacgaggacacacgaggggagttcgactcggaccgatg

SEQ ID NO: 4323 - DNA, 203 bp, synthetic construct
  source 1..203: mol_type = other DNA
ggcgcgccagtcctcgcaatattttgggttatacataagttacatttggcaacgctggtctttatcgtcgcgtttggggaggaaaagcgcggcgacccctggtcgcctgggcttcaataatttataactaggctgggatttagggtaatgcacccctttgcgcatcatcgttgtggcgccagaactgtcgactcggaccgatg

SEQ ID NO: 4324 - DNA, 203 bp, synthetic construct
  source 1..203: mol_type = other DNA
ggcgcgccagtccttttccagggaaagcctggatgtaggaaaatagacacacatgtggcgtccgtgaatacgttagacatctgtcaaggcgggatagcgacagtagggcggacggcgggtcggagactaactgggcactctgctcacctcccctttccctttttcagacttccaccccagctgcagagcgactcggaccgatg

SEQ ID NO: 4325 - DNA, 203 bp, synthetic construct
  source 1..203: mol_type = other DNA
ggcgcgccagtcctagtagggcggacggcgggtcggagactaactgggcactctgctcacctcccctttccctttttcagacttccaccccagctgcagagatggcgtccaaggacgtagaagagggtgtagagggacccatctgctggatatgtagggaagaggtggggaacgagggcatacacccccgactcggaccgatg

SEQ ID NO: 4326 - DNA, 203 bp, synthetic construct
  source 1..203: mol_type = other DNA
ggcgcgccagtccttggattattaagggtcagcttgaaggatgatgttaatgacataaaggggcgtggcttccaaaaatgggtggctaacctgtccaaaatatgggaacactggagataaaaggggccagcttgagtcagtttagcactgggactgcccagtcaccttggctgccgcttcacctatggcgactcggaccgatg

SEQ ID NO: 4327 - DNA, 203 bp, synthetic construct
  source 1..203: mol_type = other DNA
ggcgcgccagtcctaagcagttgaggcgcattagatatataaaacttgggtacacacccttggtgctgtgcgcgtgctatgtgccctggtgaccgtccacaatggacgaggacgttttgcctggagaggtgttggccattgaagggatattcatggcctgtggattaaacgaacctgagtacctgtaccgactcggaccgatg

SEQ ID NO: 4328 - DNA, 203 bp, synthetic construct
  source 1..203: mol_type = other DNA
ggcgcgccagtcctttcgtcagtcccctggagaccttaatggcaaaagctatagatgccagcttcatacgggaccgcctcgacctattgaaaactgacagaggtgtggccagcatattgagcccggcgtatttaaaggccagccaattcccggtcggcatccaagccgtcacaccacccagaccagcccgactcggaccgatg

SEQ ID NO: 4329 - DNA, 203 bp, synthetic construct
  source 1..203: mol_type = other DNA
ggcgcgccagtcctggtgtggccagcatattgagcccggcgtatttaaaggccagccaattcccggtcggcatccaagccgtcacaccacccagaccagccatgaacagctctggtcaagaggatatcatatccatccccaaatccgccttcctgagcatgctacaaagcagcatcgatggaatgaagcgactcggaccgatg

SEQ ID NO: 4330 - DNA, 203 bp, synthetic construct
  source 1..203: mol_type = other DNA
ggcgcgccagtccttttccatatgaggccaagtgcattggctattttaggggcggtgaccacgcactatagtgcgcggtgtggcagaaaattcacaccgtatataaacaaggaaaggggactctgcgcgcttaagcgccaagccattatacacacgggttttttgttgtcttggccaatcgtgtctcccgactcggaccgatg

SEQ ID NO: 4331 - DNA, 203 bp, synthetic construct
  source 1..203: mol_type = other DNA
ggcgcgccagtccttataaacaaggaaaggggactctgcgcgcttaagcgccaagccattatacacacgggttttttgttgtcttggccaatcgtgtctccatggcgctaaagggaccacaaaccctcgaggaaaatattgggtctgcggcccccactggtccctgcgggtacctctatgcctatgtgcgactcggaccgatg

SEQ ID NO: 4332 - DNA, 203 bp, synthetic construct
  source 1..203: mol_type = other DNA
ggcgcgccagtcctacctgatccggatcgagatagagctcttgctccagcttggggcaggacacaacatctacaaaccctccgacgtacaggccctgtgccatgctcggaaaatacgtgtgtgagaccgagccgctgagcccggggcttaggaggctcatgtggcgctttttgcaaaataagaatttacgactcggaccgatg

SEQ ID NO: 4333 - DNA, 203 bp, synthetic construct
  source 1..203: mol_type = other DNA
ggcgcgccagtcctacagactttcccgttagtggtttcctctcctcagggaggtcgtccatatccgtgctggttgtggaggtgcttgattcgtcgtccgagctccccaagtcccacctgcctcccctagtcacagaggccttttctccgccgcgccccaccgagtccgctccaaaaccgccttctgcccgactcggaccgatg

SEQ ID NO: 4334 - DNA, 203 bp, synthetic construct
  source 1..203: mol_type = other DNA
ggcgcgccagtcctctccccaagtcccacctgcctcccctagtcacagaggccttttctccgccgcgccccaccgagtccgctccaaaaccgccttctgccatggtacgtccaaccgaggccgaggttaagaaatccctgagcaggcttccagcagcacgcaaaagagcaggtaaccgggcccacctgcgactcggaccgatg

SEQ ID NO: 4335 - DNA, 203 bp, synthetic construct
  source 1..203: mol_type = other DNA
ggcgcgccagtcctcactggcgccaccgaacggccgcgtccaacgagcagacaccgccagccgatccccgcgtacgttgcgtccgtccgctggtctaagctatgttacgagttccggacgtgaaggctagtctagtagagggcgccgcgcgcctgtcgacaggcgagcgcgtgtttcacgtcttgacccgactcggaccgatg

SEQ ID NO: 4336 - DNA, 203 bp, synthetic construct
  source 1..203: mol_type = other DNA
ggcgcgccagtcctttggtatatacgcccagtagcgcttcgaaacggacactgccttctctggcgtccttgccgagcaatagctgaaagctcttgaagagtccgtcggcagccgactccttaatctgcgttaggaggttggcctccgtggcgaggtacgggaaaggtcgttgctccaaggtcgcctcccgactcggaccgatg

SEQ ID NO: 4337 - DNA, 203 bp, synthetic construct
  source 1..203: mol_type = other DNA
ggcgcgccagtcctccgtcggcagccgactccttaatctgcgttaggaggttggcctccgtggcgaggtacgggaaaggtcgttgctccaaggtcgcctccatggcagcgctcgagggccccctactactgccaccgagcgcctccctgacgacgagtccgcagaccacgtgttatcaagcgacttggcgactcggaccgatg

SEQ ID NO: 4338 - DNA, 203 bp, synthetic construct
  source 1..203: mol_type = other DNA
ggcgcgccagtccttcattgaagaggtggcgccgatgaagagactattaaagctcggaaacaaggtggtgtattagctaacccttctagcgttggctagtcatggcactcgacaagagtatagtggttaacttcacctccagactcttcgctgatgaactggccgcccttcagtcaaaaatagggagccgactcggaccgatg

SEQ ID NO: 4339 - DNA, 203 bp, synthetic construct
  source 1..203: mol_type = other DNA
ggcgcgccagtcctgttgagcgtcccagatgacatcaccaggatgcgcgtcatgttctcctatcttcagagtctcagttctatatttaatcttggccccagactgcacgtgtatgcctactcggcagagactttggcggcctcctgttggtattccccacgctaacgatttgaagcgggggggggggtcgactcggaccgatg

SEQ ID NO: 4340 - DNA, 203 bp, synthetic construct
  source 1..203: mol_type = other DNA
ggcgcgccagtcctactgcacgtgtatgcctactcggcagagactttggcggcctcctgttggtattccccacgctaacgatttgaagcgggggggggggtatggcgtcatctgatattctgtcggttgcaaggacggatgacggctccgtctgtgaagtctccctgcgtggaggtaggaaaaaaactcgactcggaccgatg

SEQ ID NO: 4341 - DNA, 203 bp, synthetic construct
  source 1..203: mol_type = other DNA
ggcgcgccagtccttgaacaatttttcagtcaaccccttagggagcaagtggtcgcgggggtcagggcactcgacggcctcggtctcgctgactctctatgtcacaaaacagaaagactctgcctgctgatggacctggtgggcacggagtgctttgcgagggtgtgccgcctagacaccggtgcgaacgactcggaccgatg

SEQ ID NO: 4342 - DNA, 203 bp, synthetic construct
  source 1..203: mol_type = other DNA
ggcgcgccagtcctcggtgagtgtcttcccgtactgggggaggcccaaggcgggtacgccctggtctgtagcatgtatctgcacgttatcgtctccatctattcgacaaaaacggtgtacaacagtatgctatttaaatgcacaaagaataaaaagtacgactgcattgccaagcgggtgcggacaaacgactcggaccgatg

SEQ ID NO: 4343 - DNA, 203 bp, synthetic construct
  source 1..203: mol_type = other DNA
ggcgcgccagtcctactggttagagattttaaaacagcccgatgtgcaaaagacagtcagcgggagtcttgtggcatgcgtgatcgtcacacccgcattggaagcctggcttgtgttacctgggggttttgctattaaaggccgctatagggcgtcgaaggaggatctggtgttcattcgaggccgctcgactcggaccgatg

SEQ ID NO: 4344 - DNA, 203 bp, synthetic construct
  source 1..203: mol_type = other DNA
ggcgcgccagtcctaccgaactgtatgagtttattctgtgcaccacgccaataaaagggtgcgccatccgtgccgttttgggacagtgtcgcgtgaatgtcggggcactcagttcccacctctctccggcgtctttggcggtctcctgcaggttggcggcaaggcgctccctgtgacggctgagcagccgactcggaccgatg

SEQ ID NO: 4345 - DNA, 203 bp, synthetic construct
  source 1..203: mol_type = other DNA
ggcgcgccagtcctggggcactcagttcccacctctctccggcgtctttggcggtctcctgcaggttggcggcaaggcgctccctgtgacggctgagcagcatgtttgctttgagctcgctcgtgtccgagggtgacccggaggtgaccagtaggtacgtcaagggcgtacaacttgccctggaccttcgactcggaccgatg

SEQ ID NO: 4346 - DNA, 203 bp, synthetic construct
  source 1..203: mol_type = other DNA
ggcgcgccagtccttgaagcgcgaagccgagctcgggactctggtacgcaaggcgggccagaggtttgaggcgctgaaaagggaacggtcaattttgcgccagccgcgcgacctcccacgggtcgccgacattgacgccctggtcgacgccgtcgcggacctcaaagaagaggtggccgtgcgcctagcgactcggaccgatg

SEQ ID NO: 4347 - DNA, 203 bp, synthetic construct
  source 1..203: mol_type = other DNA
ggcgcgccagtcctagccgcgcgacctcccacgggtcgccgacattgacgccctggtcgacgccgtcgcggacctcaaagaagaggtggccgtgcgcctagatgcgctggaagagaatggagaggagacccccactcactcctcttcggagatcaaggacacaatcgtcaggtggaggcttgacgattcgactcggaccgatg

SEQ ID NO: 4348 - DNA, 203 bp, synthetic construct
  source 1..203: mol_type = other DNA
ggcgcgccagtccttcaggatcctgtcaactgtaccatcggtggcgatgctttagacccgcacgtggagattcctacgctgctaatcgtaacccccgtctactttccccgaggcgcaaagcatcgtctgcttcaccaagctgccaacttttggtcaagaagtgcgaaggacacctttccatatatcaacgactcggaccgatg

SEQ ID NO: 4349 - DNA, 203 bp, synthetic construct
  source 1..203: mol_type = other DNA
ggcgcgccagtccttttaaaagtcaaccgcgataggcagtggcatcagattggctctcccgccgcagcgccgcctggcgaaagttaaaaagaccgagaaacatgcgcgcttcaaagagcgaccgttttctcatgtcctcctgggtcaagctgttgtttgtggctgtaattatgtacatttgctctgcacgactcggaccgatg

SEQ ID NO: 4350 - DNA, 203 bp, synthetic construct
  source 1..203: mol_type = other DNA
ggcgcgccagtcctcggcctatttatatcagactagcagactctttgtgtatataaccgacgtgggacagaaatactgtctagttacaccacccttcgagaatgtccctggaaagggccctggcgagactgactggagtgccaatgagtactcatgccccgaagactcgcgagtcagaagaggcctgtcgactcggaccgatg

SEQ ID NO: 4351 - DNA, 203 bp, synthetic construct
  source 1..203: mol_type = other DNA
ggcgcgccagtcctttccccgctcctgcagtccccgttattacgtatgccgaaaacggcagaaaggggccttcgtcttccagtggatcgaactctaggtcataccagcccatctccgggggcgaggtagtgatatttgacaacctgtcaatctgttccactacgctcctgactttggcatccgatgtccgactcggaccgatg

SEQ ID NO: 4352 - DNA, 203 bp, synthetic construct
  source 1..203: mol_type = other DNA
ggcgcgccagtccttaccagcccatctccgggggcgaggtagtgatatttgacaacctgtcaatctgttccactacgctcctgactttggcatccgatgtcatgttgaggatgaacccggggctgggctcgtccatatcagtgcacccttccgagctgtccatctccctctttgagatcctgcaaggccgactcggaccgatg

SEQ ID NO: 4353 - DNA, 203 bp, synthetic construct
  source 1..203: mol_type = other DNA
ggcgcgccagtcctgactcgtatgtcctccagtcggacaagacgtggtcgtagctacagttggccaatgcattcttgtacaggtggataaatagctgtctgaaaaaaacacccgggtttcgcaggctgcagtgtagagtctgacctctgacataagaatacttgccttgcaggatctcaaagagggagcgactcggaccgatg

SEQ ID NO: 4354 - DNA, 203 bp, synthetic construct
  source 1..203: mol_type = other DNA
ggcgcgccagtcctaaaaaaacacccgggtttcgcaggctgcagtgtagagtctgacctctgacataagaatacttgccttgcaggatctcaaagagggagatggacagctcggaagggtgcactgatatggacgagcccagccccgggttcatcctcaacatgacatcggatgccaaagtcaggagccgactcggaccgatg

SEQ ID NO: 4355 - DNA, 203 bp, synthetic construct
  source 1..203: mol_type = other DNA
ggcgcgccagtccttagatgattgcgagttacagtttgtgggcccagaagagccttgccttatccaaggacagtcggtagtggaggagctttttccgtccccgggcgtcccaagcctgacagtgggtaaaaaacgaaaaatcgcatccctgctctctgacctggatttgtagttgtgtacccgtaacgcgactcggaccgatg

SEQ ID NO: 4356 - DNA, 203 bp, synthetic construct
  source 1..203: mol_type = other DNA
ggcgcgccagtcctgtggactggggcctgttggagcagtaaaggcaataactcgtgtgctttgtaaatttccgcccctagcggtcaaccccgtacaaggccatggcgatgtttgtgaggacctcgtctagcacacacgatgaagagagaatgcttccaattgaaggagcgcctcgcagacgacccccccgactcggaccgatg

SEQ ID NO: 4357 - DNA, 203 bp, synthetic construct
  source 1..203: mol_type = other DNA
ggcgcgccagtcctcgtgggaaatagacctcacccccgtgtcgcgaaaaggtcaatttcagtaattgtcctcattagtcgggactcgcgcatgcgtgaaccctcactatataaaacagatattacggaagggggctccctggggagcaccgaaccaggcaacacaagggtgaaacccggatttgcccccgactcggaccgatg

SEQ ID NO: 4358 - DNA, 203 bp, synthetic construct
  source 1..203: mol_type = other DNA
ggcgcgccagtcctccttgcggagtaaggttgactttttaaaggggacgtgtcattgccacccagctactggtttctgggcggggcttaatgagtcgccggtagctgcctggtatttagtggaggataagctgtagctgggtcctatgggggttgggtggggagaccctagcgtacatgtgactgaaccgactcggaccgatg

SEQ ID NO: 4359 - DNA, 203 bp, synthetic construct
  source 1..203: mol_type = other DNA
ggcgcgccagtccttagctgcctggtatttagtggaggataagctgtagctgggtcctatgggggttgggtggggagaccctagcgtacatgtgactgaacatggaggtgtgtatcccaattccgggtattggagatgaaaattgtgagagctggagggcacagattgtggcattcggtaccacatcgcgactcggaccgatg

SEQ ID NO: 4360 - DNA, 203 bp, synthetic construct
  source 1..203: mol_type = other DNA
ggcgcgccagtcctctatttgtgaaacaataatgattaaagggggtggtatttcctccgttgtcgactataacctggcgtgtaaacgtgtaaccctgccaaatgcccagaatgaaggacatacctactaagagttccccgggaacggacaattctgagaaagatgaagctgtcattgaggaagatctacgactcggaccgatg

SEQ ID NO: 4361 - DNA, 203 bp, synthetic construct
  source 1..203: mol_type = other DNA
ggcgcgccagtccttttgtcagtctgagtctggcttcatttgctctcgacgtcattctaaatttgcttgtttcgaacacatattccaccctgggtagaggggcagagtcggactgcattgcagagtgtatataagaggcgaacgcggaacgttggatagacggcttggagcctcggcggttgttcatacgactcggaccgatg

SEQ ID NO: 4362 - DNA, 203 bp, synthetic construct
  source 1..203: mol_type = other DNA
ggcgcgccagtcctgcagagtcggactgcattgcagagtgtatataagaggcgaacgcggaacgttggatagacggcttggagcctcggcggttgttcataatgacagcgtccacggtggccctggctttatttgtggcctcgatactaggtcactgctgggttacggccaactcgacaggtgtcgcacgactcggaccgatg

SEQ ID NO: 4363 - DNA, 203 bp, synthetic construct
  source 1..203: mol_type = other DNA
ggcgcgccagtcctgacagccttccagagggtcaccgaggcgcttgtaagcgtggttgccgcgtccaaaaaggtttataccgcaacacgtccaggtgtaccatggagacgacataccgccgcgaggcgctgacagtaagggttattttttgtacgagtggcgacagcgccgagacgatcgccgacgtccgactcggaccgatg

SEQ ID NO: 4364 - DNA, 203 bp, synthetic construct
  source 1..203: mol_type = other DNA
ggcgcgccagtcctcgctggtttttgactacccaggcaattctgcggctaggcccactaatatgtcagccacctagccgtgatatatagagagcctgtcgcctctctatatctgatggccggtggctccccggcatagctgtgcttaccactggacattgcggcgcgagctagtctggttgcgggacacgactcggaccgatg

SEQ ID NO: 4365 - DNA, 203 bp, synthetic construct
  source 1..203: mol_type = other DNA
ggcgcgccagtcctctctctatatctgatggccggtggctccccggcatagctgtgcttaccactggacattgcggcgcgagctagtctggttgcgggacaatggacccaggccaaagaccgaacccttttggggcgcctggggcgatacccaaaaaaccttgtttgtcacaagggtcaccgggaacacgactcggaccgatg

SEQ ID NO: 4366 - DNA, 203 bp, synthetic construct
  source 1..203: mol_type = other DNA
ggcgcgccagtcctttttttcatagcaagaaggggggcactataaggctcagtcgggactgtgcctcaaagacgaacgccgatcggtttctgtgtcggaccatgcctaaagccggtggctcagaatgggccacgttatggattattgatgcccttgaaaacaataagtttccctatttttcctggtttcgactcggaccgatg

SEQ ID NO: 4367 - DNA, 203 bp, synthetic construct
  source 1..203: mol_type = other DNA
ggcgcgccagtcctccttggtgttggtggataaaaaatatggctggatatttaaagacctgtacgcccttctgtaccaccacctgcaattgagcaaccacaatgactcccaggtctagattggccaccctggggactgtcatcctgttggtctgcttttgcgcaggcgcggcgcactcgaggggtgaccgactcggaccgatg

SEQ ID NO: 4368 - DNA, 203 bp, synthetic construct
  source 1..203: mol_type = other DNA
ggcgcgccagtcctgccagcgctggagaacacgattcatagtgagaaacacatgtgtctaatacaggcaatgctttttgacccgtgactgaaggttaaagctgcaggaagcatgttgtggtttgcgtagtagattacttctgttgaggtggggtaatgctcggaggcagaccattctgacaggtcaaccgactcggaccgatg

SEQ ID NO: 4369 - DNA, 203 bp, synthetic construct
  source 1..203: mol_type = other DNA
ggcgcgccagtccttgcaggaagcatgttgtggtttgcgtagtagattacttctgttgaggtggggtaatgctcggaggcagaccattctgacaggtcaacatggcgggacgcaggcttacctggatttctgagtttattgtaggtgctttggactctgataaatatcctttggtcaagtggctagatcgactcggaccgatg

SEQ ID NO: 4370 - DNA, 203 bp, synthetic construct
  source 1..203: mol_type = other DNA
ggcgcgccagtcctgtgccagtggggttggggtccagctagttgtggcgagaaagtcgcccacggaaaaggtgttttgtgtcgtggcttttgcctaaaaagatgcctcgctacacggagtcggaatggctcacggactttattatagatgctttagacagtggacgcttctggggggtagggtggttgcgactcggaccgatg

SEQ ID NO: 4371 - DNA, 203 bp, synthetic construct
  source 1..203: mol_type = other DNA
ggcgcgccagtcctggcctcacaagaggcgctcagactcgagccagtccagggatcgtgggaaggtgcccaaaaccacatttaaccccctgatttgacaccatgtgccgcctggacagtgagcgcgctctgtcgctcttcagttatctgagcgggacgttggcggcgaccccctttctgtggtgttttcgactcggaccgatg

SEQ ID NO: 4372 - DNA, 203 bp, synthetic construct
  source 1..203: mol_type = other DNA
ggcgcgccagtcctacgagctgtatataaatcggcttgtttttggggcggtttgtacgctgggcacagttccctttgattctcatccggtgcaccaaagtctgaacgtgaagggcacgtccttgcctgtactggtgtttgcgaactttgaggccgcgtgtggcccctggactgtgtttctgtaaggtccgactcggaccgatg

SEQ ID NO: 4373 - DNA, 203 bp, synthetic construct
  source 1..203: mol_type = other DNA
ggcgcgccagtccttctcagcaccgatttctaggcagcaccctctttaataggtgcaaggggggtgcggtgttggtgagtcacactttcgttgcagacaaaatggacaaggacaggccgggtctcccggccccggatgacaacatagaagaagtaccatctacctcgggtgttcaggaacgggcgtctcgactcggaccgatg

SEQ ID NO: 4374 - DNA, 203 bp, synthetic construct
  source 1..203: mol_type = other DNA
ggcgcgccagtcctgggacattgcagtttcttccccttcctcttctgaaacatcgaatgatgagtgatttcaaccacgtaacaagaactgggatgaaccctcgggcagtatcagactgcggggaggggcagtgataagtcatgacaattttagatgaggtagacattttgcatattttcagacccacccgactcggaccgatg

SEQ ID NO: 4375 - DNA, 203 bp, synthetic construct
  source 1..203: mol_type = other DNA
ggcgcgccagtcctcgggcagtatcagactgcggggaggggcagtgataagtcatgacaattttagatgaggtagacattttgcatattttcagacccaccatggaatcatttgaaggagagggggactctatacagtcacctgacaatgcgcggggagatgatgtacagaatactggtgagcatattcgactcggaccgatg

SEQ ID NO: 4376 - DNA, 203 bp, synthetic construct
  source 1..203: mol_type = other DNA
ggcgcgccagtcctaggaggtgtacaagcccggtaccgtggcaatcccccacccgttccaggtcggggaccaagtgcttgtcagacgccatcgacccggcagccttgagcctcggtggaaaggcccgtacctggtgttgctgaccaccccgaccgcggtaaaagtcgacggtatcgctgcctgggtcccgactcggaccgatg

SEQ ID NO: 4377 - DNA, 203 bp, synthetic construct
  source 1..203: mol_type = other DNA
ggcgcgccagtcctgggagctggaaaaagctgatcatcctcttaagctgcgtattcggcggcggcggaacgagtctgcaaaataaaaacccccaccagcctatgaccctcacctggcagggggaccccattcctgaggagctctataagatgctgagtggccactcgattcgctccttcgatgacctccgactcggaccgatg

SEQ ID NO: 4378 - DNA, 203 bp, synthetic construct
  source 1..203: mol_type = other DNA
ggcgcgccagtcctgggatcggagacccccacccagggaccaccgacccaccaacgggaggtaagctggccagcgatcgctctgtgtctcgcttctgtgtctaactccgtaactctgactgtccctctgagtgcgcgcattttggtttcagtttgttccgggctgatcgctctgtgagcgacgtgtgacgactcggaccgatg

SEQ ID NO: 4379 - DNA, 203 bp, synthetic construct
  source 1..203: mol_type = other DNA
ggcgcgccagtccttcggcagaggatcattgtgttctgatcccaccgccgcgtctagagaggcgcgctctgccatctgactctttctcttgcctctacgctactcgatctcgccgccgtttctggtttctttttgttttgtttctgataagcctctgtgtcggagtttctctcttcgaaatcttcgaacgactcggaccgatg

SEQ ID NO: 4380 - DNA, 203 bp, synthetic construct
  source 1..203: mol_type = other DNA
ggcgcgccagtcctctagagtggacacagcttggatacagacacctttagtattactgggtgttccagactagttcctgaggtaccaagttgtgaggggctatgggaaaacccctttgatccacactgcctgatagggtcgcggctggtcgagtcccatacactataataccagttgactttcatgcacgactcggaccgatg

SEQ ID NO: 4381 - DNA, 203 bp, synthetic construct
  source 1..203: mol_type = other DNA
ggcgcgccagtcctatgggaaaacccctttgatccacactgcctgatagggtcgcggctggtcgagtcccatacactataataccagttgactttcatgcaatggacactctaactaaaaacattgaagatgaaactgtcaagattattggatcctgtgccgagaaggcacaagaagcaatttctggtcgactcggaccgatg

SEQ ID NO: 4382 - DNA, 203 bp, synthetic construct
  source 1..203: mol_type = other DNA
ggcgcgccagtcctccggaattgccgggaagactgggtcctttcttggataaacccactctatgcccggccatttgggcgtgcccccgcaagactgctagccgagtagcgttgggttgcgaaaggccttgtggtactgcctgatagggtgcttgcgagtgccccgggaggtctcgtagaccgtgcacccgactcggaccgatg

SEQ ID NO: 4383 - DNA, 203 bp, synthetic construct
  source 1..203: mol_type = other DNA
ggcgcgccagtcctaatcatttatttgtttgttggttttatacctctgaactttaaagtgctaaagactctcaattttatattatatctcaacaaatcaggatgggcgcacaggtatccacgcagaagactggggcacacgagaccggtttgaacgccagtaataattcggttatacactatacaaatcgactcggaccgatg

SEQ ID NO: 4384 - DNA, 203 bp, synthetic construct
  source 1..203: mol_type = other DNA
ggcgcgccagtccttccccaaatccgtaggcaggcctcccctgccatctgaatctgaatactggccgcggctccttggttattgtctagtctgtgttgtctggtctgtgtcgacattgtagtcatctttgtgtatgtgtgtgtaagtgtgctggtgtggacgcgtggacaggacaggacgacacagcccgactcggaccgatg

SEQ ID NO: 4385 - DNA, 203 bp, synthetic construct
  source 1..203: mol_type = other DNA
ggcgcgccagtcctggtctgtgtcgacattgtagtcatctttgtgtatgtgtgtgtaagtgtgctggtgtggacgcgtggacaggacaggacgacacagccatgggacagacattgactactcctctaactttgactctgactcatttctcggacgtccaagcaagagctcacaatctttcccttgagcgactcggaccgatg

SEQ ID NO: 4386 - DNA, 203 bp, synthetic construct
  source 1..203: mol_type = other DNA
ggcgcgccagtcctgagtagcatggactcgaatcagaagagctggagctcgcttggtacggcacgtagcattgctttgcctaaagaccaagggggtatggctataggtgggggcctatagcttgtccagtgctggttgacagactcgtgctacgcgtctggttcgagtataagtagctgcaactcactcgactcggaccgatg

SEQ ID NO: 4387 - DNA, 203 bp, synthetic construct
  source 1..203: mol_type = other DNA
ggcgcgccagtcctgggacaagtcaccctcaccgttacggtaacagcggcaacactccttttttgccactatgcctacatggttcccggttggcaagctgaggcaatgcgctcagcccagcggcggacagcggccggaatcatgaagaacgctgtagtggatggcatcgtggccacggacgtcccagacgactcggaccgatg

SEQ ID NO: 4388 - DNA, 203 bp, synthetic construct
  source 1..203: mol_type = other DNA
ggcgcgccagtccttactgctgaaagaactcgatttctaaattcagtgactttgccaaagggtacaacctacgcatttggttaccttgattcattgtaactatgtataaaaccagaagtaaacgtgacactgctgagaatttgtatagacactgtaaagctactggcaactgtcctccagatgtagaacgactcggaccgatg

SEQ ID NO: 4389 - DNA, 203 bp, synthetic construct
  source 1..203: mol_type = other DNA
ggcgcgccagtccttgaaaaattagattgtatctttaggggtgagtgtttccatcttgtgagaaacacttggaggggaacgtgcagaaattgttgtagaaaatgattgggaaggagccctcaattaatgatctagaaataaagctggaagaacatgtattgcctgctaaccttttaagcaacgaggttcgactcggaccgatg

SEQ ID NO: 4390 - DNA, 203 bp, synthetic construct
  source 1..203: mol_type = other DNA
ggcgcgccagtcctctactttgggtgtccgtgtttcttgtttttcatactgggtcgcttatggttacaactaattgttgtaatcattggcagtgcgcgctgaccacgcgattattgatatttccatttgttggatactccaatagtgtcaactcatatacacaacttttaccactgatcaagataaaacgactcggaccgatg

SEQ ID NO: 4391 - DNA, 203 bp, synthetic construct
  source 1..203: mol_type = other DNA
ggcgcgccagtccttcatcatatagctattggattggccatccggatattattcttgtgtttatttgtgtaatttgatataatttagaaccctgtataagaatgggagctcaagtttcaactcagaggactggctcgcatgaaaacgccaatatggcaatggatggttctaccattaattacaccacccgactcggaccgatg

SEQ ID NO: 4392 - DNA, 203 bp, synthetic construct
  source 1..203: mol_type = other DNA
ggcgcgccagtccttgccatatagcgattggattggccatccggatattgttttagacacttgtgtttgtgagtagatctcttctgacataggatataacaatgggtgcacaggtttcaacacagaaaactggatcacatgaaaacgccaacatggcagtaggaggctccaccatcaactacaccactcgactcggaccgatg

SEQ ID NO: 4393 - DNA, 203 bp, synthetic construct
  source 1..203: mol_type = other DNA
ggcgcgccagtcctacacttatcataagaggtgttagttcctaaggataatcaatacacaatattccacgacaattggcgcccaacgtggggctcgaatataagtcgggatatttataaaaatattaattttaatccctagggaccttcgtgcactgcggaaggtataattctactgccttaatagaacgactcggaccgatg

SEQ ID NO: 4394 - DNA, 203 bp, synthetic construct
  source 1..203: mol_type = other DNA
ggcgcgccagtcctatcctcggacagtgataattttggaccatcttggcaacagacgtactgtaagtgttgacaaccttaagttaacagcttatcaggataatggcacctccaatgactctggaacaatggctcttatggaagaagatgagtcaagcacatcaagcacttgaaaatgtaaccaccttgcgactcggaccgatg

SEQ ID NO: 4395 - DNA, 203 bp, synthetic construct
  source 1..203: mol_type = other DNA
ggcgcgccagtcctagcggtaagcctcctattctatgcaaaacctattttgataggaataggagttatactgcttattgcccttctttttaagataatatcatggcttcctgggaagcccaagaagaattgagagaacttctacatcatctaccagaggacgatccaccagcagatctaactcatctacgactcggaccgatg

SEQ ID NO: 4396 - DNA, 203 bp, synthetic construct
  source 1..203: mol_type = other DNA
ggcgcgccagtccttgatagtttgattgatataagagcgagagtggcctccaccggtcaataccccgaggtgtgtgacattcatccagctactggattagacgaatgcgaagctgaggaaatagtcagggttgggaaccttttgtcatacctttaggtcctcttttatcctcctttatagggaacctccgactcggaccgatg

SEQ ID NO: 4397 - DNA, 203 bp, synthetic construct
  source 1..203: mol_type = other DNA
ggcgcgccagtcctggggcgctgccggcggcgaggagtcctacttcgacatgggggcggacctgcattggcagccgagcccgcgcgccttggaggccgcctacggtccagaggacttggatgaggaagaggaagaggaggaggatgcacccgctgcggggtactgacgcctccgtgatgtgtttttagcgactcggaccgatg

SEQ ID NO: 4398 - DNA, 203 bp, synthetic construct
  source 1..203: mol_type = other DNA
ggcgcgccagtcctacggtccagaggacttggatgaggaagaggaagaggaggaggatgcacccgctgcggggtactgacgcctccgtgatgtgtttttagatgcagcaagccccggaccccgccataagggcggcgctgcaaagccagccgtccggtctagcatcggacgactgggaggccgcgatgcgactcggaccgatg

SEQ ID NO: 4399 - DNA, 203 bp, synthetic construct
  source 1..203: mol_type = other DNA
ggcgcgccagtccttcagtgaaaacgtgcctgctctcacagatcacgggacgctaccgctgcgcagcagtatccgcggagtccagcgagtgaccgtcactgacgcccgtcgccgcacctgtccctacgtctacaaggccctgggcatagtcgcgccgcgcgtgctttccagtcgcaccttctaaaaaacgactcggaccgatg

SEQ ID NO: 4400 - DNA, 203 bp, synthetic construct
  source 1..203: mol_type = other DNA
ggcgcgccagtcctcgactccgtcacgggcgtgcgcgtgcccgtgcgcacccgtcctcctcgtccctgatctaatgcttgtgtcctcccccgcaagcgacgatgtcaaagcgcaaaatcaaggaggagatgctccaggtcgtcgccccggagatttacggaccaccccaggcggaccagaaaccccgccgactcggaccgatg

SEQ ID NO: 4401 - DNA, 203 bp, synthetic construct
  source 1..203: mol_type = other DNA
ggcgcgccagtcctcttgaaacgccccaggaactagacgcagctgcgcttagtcatgtgtaaataaagttgtacaataaaagtctatgtgacgcatgcaaggtgtggtttatgactcatgggcggggcttagtcctatataagtggcaacacctgggcacttgggcacagaccttcagggagttcctgcgactcggaccgatg

SEQ ID NO: 4402 - DNA, 203 bp, synthetic construct
  source 1..203: mol_type = other DNA
ggcgcgccagtcctgcgccggggccgctcgctcgttctgcccaccgtgcgctaccaccccagcatcctttaattcgtgtgctgtgatactgttgcagagagatggctctcacttgccgcctgcgcatccccgtcccgaattaccgaggaagatcccgccgcaggagaggcatggcaggcagcggcctgcgactcggaccgatg

SEQ ID NO: 4403 - DNA, 203 bp, synthetic construct
  source 1..203: mol_type = other DNA
ggcgcgccagtcctgccgccgatgctattgaaagagaggaaagaggacactaaagggagagcttaacttgtatgtgccttaccgccagagaacgcgcgaagatggccaccccctcgatgatgccgcagtgggcgtacatgcacatcgccgggcaggacgcctcggagtacctgagcccgggtctggtgcgactcggaccgatg

SEQ ID NO: 4404 - DNA, 203 bp, synthetic construct
  source 1..203: mol_type = other DNA
ggcgcgccagtcctctcggcccacgcgctcgacatgaccttcgaggtggaccccatggatgagcccaccctcctctatcttctcttcgaagttttcgacgtggtcagagtgcaccagccgcaccgcggcgtcatcgaggccgtctacctgcgcacgcccttctccgccggcaacgccaccacctaagccgactcggaccgatg

SEQ ID NO: 4405 - DNA, 203 bp, synthetic construct
  source 1..203: mol_type = other DNA
ggcgcgccagtcctggtcagagtgcaccagccgcaccgcggcgtcatcgaggccgtctacctgcgcacgcccttctccgccggcaacgccaccacctaagcatgagcggctccagcgaacgagagctcgcggccatcgtgcgcgacctgggctgcgggccctactttttgggcacccacgacaagcgccgactcggaccgatg

SEQ ID NO: 4406 - DNA, 203 bp, synthetic construct
  source 1..203: mol_type = other DNA
ggcgcgccagtcctgacccgtggccccggggcggagtggcctctcgctccatgaaccggcgcacgtcctgactgccgccggccattgtttcctaggggaagatggaggagcagccgcgtaagcaggagcaggaggaggacttaaccacccacgagcaacccaaaatcgagcaggacctgggcttcgaacgactcggaccgatg

SEQ ID NO: 4407 - DNA, 203 bp, synthetic construct
  source 1..203: mol_type = other DNA
ggcgcgccagtcctaccaatcgcggccgcagcacgcggatctcacggcctgcgtcatcacccagggcgcgatcctcgcccaattgcacgccatccaaaaatcccgccaagagtttcttctgaaaaagggtagaggggtctacctggacccccagacgggcgaggtgctcaacacgggtctcccccagccgactcggaccgatg

SEQ ID NO: 4408 - DNA, 203 bp, synthetic construct
  source 1..203: mol_type = other DNA
ggcgcgccagtcctgctctgttccacaagtactgcgcgctcactcttaaagactaacgcgcgcccacccggaaaaaaggcgggaattacctcatcgccaccatgagcaaggagattcccaccccttacatgtggagctatcagccccagatgggcctggccgcgggcgcctcccaagactactccacacgactcggaccgatg

SEQ ID NO: 4409 - DNA, 203 bp, synthetic construct
  source 1..203: mol_type = other DNA
ggcgcgccagtcctgtggccccctaccaaggaaaacatggttgggttttctttggcttttgtgatcatggcctgctttatgtcaggtctgctggtaggagctctagtgtggttcctgaaacgcaagcccaggtatggaaatgaggagaaggaaaaattgctataaattctttttcttttcacagcacccgactcggaccgatg

SEQ ID NO: 4410 - DNA, 203 bp, synthetic construct
  source 1..203: mol_type = other DNA
ggcgcgccagtccttctagtgtggttcctgaaacgcaagcccaggtatggaaatgaggagaaggaaaaattgctataaattctttttcttttcacagcaccatgaatactttgaccagtgtcgtgctgctctctcttcttgtagcttttagtcaggcaggaattattaacttaaatgtatcatggggacgactcggaccgatg

SEQ ID NO: 4411 - DNA, 203 bp, synthetic construct
  source 1..203: mol_type = other DNA
ggcgcgccagtcctaattccctcagctactgtggcaatcgtggtgggagtgattgcgggctttgtaactctgatcattgtcttcatatgctacatctgctgccgcaagcgtcccaggtcatacaatcatatggtagacccactactcagcttctcttactgaaactcagtcactctcatttcagaacccgactcggaccgatg

SEQ ID NO: 4412 - DNA, 203 bp, synthetic construct
  source 1..203: mol_type = other DNA
ggcgcgccagtcctccgcaagcgtcccaggtcatacaatcatatggtagacccactactcagcttctcttactgaaactcagtcactctcatttcagaaccatgaaggctttcacagcttgcgttctgattagcatagtcacacttagttcagctgcaatgattaatgttaatgtcactagaggtggtcgactcggaccgatg

SEQ ID NO: 4413 - DNA, 203 bp, synthetic construct
  source 1..203: mol_type = other DNA
ggcgcgccagtcctccccacctacctcctctttgccctgctcacctgcacctgcgtctgcagcattgtctgcgtggtcatcaccttcctgcagctcatcgactggtgctgcgcgcgctataattatctccaccacagtcccgaatacagggacgagaacgtagccagaatcttaaggctcatctgacccgactcggaccgatg

SEQ ID NO: 4414 - DNA, 203 bp, synthetic construct
  source 1..203: mol_type = other DNA
ggcgcgccagtcctctggtgctgcgcgcgctataattatctccaccacagtcccgaatacagggacgagaacgtagccagaatcttaaggctcatctgaccatgcagactctgctcatgctgctatccctcctatcccctgccctcgccacttctgctgactctaaatgcaaattcgcggagatatggcgactcggaccgatg

SEQ ID NO: 4415 - DNA, 203 bp, synthetic construct
  source 1..203: mol_type = other DNA
ggcgcgccagtcctgaaatcagttcccactgattcagtacttagaagagccccctccccggcccccttccactgttagctactttcacataaccggcggcgatgactgaccaccacctggacctcgagatggacggccaggcctccgagcagcgcatcctgcaactgcgcgtccgtcagcagcaggagcgactcggaccgatg

SEQ ID NO: 4416 - DNA, 203 bp, synthetic construct
  source 1..203: mol_type = other DNA
ggcgcgccagtcctattctgattccgcgcgtagccataggggtagacggggttgaagtcatcttccacccggagcctctttgacatctgagagggaagacaatgaaaattgtggaccaggaatttgacatccctttcaaggtgtggaggaagttcgccgcccgccggggactggaataccagagctggcgactcggaccgatg

SEQ ID NO: 4417 - DNA, 203 bp, synthetic construct
  source 1..203: mol_type = other DNA
ggcgcgccagtcctaaaaatcacttacttgaaatctgaaagtatgtctctggtgtagttgttcagcagcacctcgttaccctcctcccagctctggtattccagtccccggcgggcggcgaacttcctccacaccttgaaagggatgtcaaattcctggtccacaattttcattgtcttccctctcagcgactcggaccgatg

SEQ ID NO: 4418 - DNA, 203 bp, synthetic construct
  source 1..203: mol_type = other DNA
ggcgcgccagtcctcgagctcagggcggagggcagaaccttattgaatcttgttgttttgaacacgctgcaggtggtggagcagcaggatctgtttctattatgaaggtctgcctgattatgaaagtggagggggcactgtgggagcttttccacatgtgcggagtggacttacaccaacaatttgtacgactcggaccgatg

SEQ ID NO: 4419 - DNA, 203 bp, synthetic construct
  source 1..203: mol_type = other DNA
ggcgcgccagtcctgcggagccagctccgagtaacgaatgctgtttctgccctccgtaggagccatataccgcggaggcacaaacggaacctccagggtcgcctgcgccatcacgctctcgtacgagggaggaggagaggaagacaccaccgcacgcctcatctctaacaaggaagagaacgcacgctcgactcggaccgatg

SEQ ID NO: 4420 - DNA, 203 bp, synthetic construct
  source 1..203: mol_type = other DNA
ggcgcgccagtccttttcgattgcggtgtttttttcgcgaatttccgcgtccgtgtcaaagtccggtgtttatgtcacagatcagctgatccgcagggtatttaaaccagtcgagtccgtcaagaggccactcttgagtgccagcgagtagagatttctctgagctccgctcccagagaccgagaaaacgactcggaccgatg

SEQ ID NO: 4421 - DNA, 203 bp, synthetic construct
  source 1..203: mol_type = other DNA
ggcgcgccagtcctcgcggtgtaccccggttcgagacttgtactcgagccggccggagccgcggctaacgtggtattggcactcccgtctcgacccagcctacaaaaatccaggatacggaatcgagtcgttttgctggtttccgaatggcagggaagtgagtcctattttttttttttgccgctcagcgactcggaccgatg

SEQ ID NO: 4422 - DNA, 203 bp, synthetic construct
  source 1..203: mol_type = other DNA
ggcgcgccagtcctacgccgcacctgtccctacgtgtacaaggcactgggcatagtcgcaccgcgcgtcctttcaagccgcactttctaaaaaaaaaaaaaatgtccattcttatctcgcccagtaataacaccggttggggtctgcgcgctccaagcaagatgtacggaggcgcacgcaaacgttctcgactcggaccgatg

SEQ ID NO: 4423 - DNA, 203 bp, synthetic construct
  source 1..203: mol_type = other DNA
ggcgcgccagtcctaggcaagcagccgctgtcgcagcggcgactattgccgacatggcccaatcgcgaagaggcaatgtatactgggtgcgtgacgctgccaccggtcaacgtgtacccgtgcgcacccgtccccctcgcacttagaagatactgagcagtctccgatgttgtgtcccagcggcgaggcgactcggaccgatg

SEQ ID NO: 4424 - DNA, 203 bp, synthetic construct
  source 1..203: mol_type = other DNA
ggcgcgccagtcctaataagtgttccatatccgtgtttacttaaggtgacgtcaatatttgtgtgacagtgcaatgtaataaaaatatgttaactgttcactggtttttattgctttttgggcggggactcaggtatataagtagaagcagacctgtgtggttagctcataggagctggctttcatcccgactcggaccgatg

SEQ ID NO: 4425 - DNA, 203 bp, synthetic construct
  source 1..203: mol_type = other DNA
ggcgcgccagtccttggtttttattgctttttgggcggggactcaggtatataagtagaagcagacctgtgtggttagctcataggagctggctttcatccatggaggtttgggccattttggaagaccttaggaagactaggcaactgttagagaacgcttcggacggagtctccggtttttggagacgactcggaccgatg

SEQ ID NO: 4426 - DNA, 203 bp, synthetic construct
  source 1..203: mol_type = other DNA
ggcgcgccagtcctgcaagacacctgcaaatcgcagtcgtcgccgtagacgcacaagcaaaccgactcccggcgccctggtgcggcaagtgtaccgcaatggtagtgcggaacctttgacactgccgcgtgcgcgttaccatccgagtatcatcacttaatcaatgttgccgctgcctccttgcagatcgactcggaccgatg

SEQ ID NO: 4427 - DNA, 203 bp, synthetic construct
  source 1..203: mol_type = other DNA
ggcgcgccagtccttatctgtgtatatgtgtcattacacgccgtcacagcagcagaggaaaaaaggaagaggtcgtgcgtcgacgctgagttactttcaagatggccaccccatcgatgctgccccaatgggcatacatgcacatcgccggacaggatgcttcggagtacctgagtccgggtctggtgcgactcggaccgatg

SEQ ID NO: 4428 - DNA, 203 bp, synthetic construct
  source 1..203: mol_type = other DNA
ggcgcgccagtccttaaagaaaaagttttatcagttttagacttttcaaccccaggtagaactgctgctgctgtggcttttcttacttttatattagataaatggatcccgcagactcatttcagcaggggatacgttttggatttcatagccacagcattgtggagaacatggaaggttcgcaagatcgactcggaccgatg

SEQ ID NO: 4429 - DNA, 203 bp, synthetic construct
  source 1..203: mol_type = other DNA
ggcgcgccagtccttgcgtcgacctccttatcttctagggtagaggtggtggcaggactgggcggtggaatgcttaagctctgctccttttcctcgtcgctgaggacgagatgtgatggcactcgtggcgatgttgacagcaatggctgagtttccatgtctgttgtttctctgcctaggagaacacacgactcggaccgatg

SEQ ID NO: 4430 - DNA, 203 bp, synthetic construct
  source 1..203: mol_type = other DNA
ggcgcgccagtcctgaggacgagatgtgatggcactcgtggcgatgttgacagcaatggctgagtttccatgtctgttgtttctctgcctaggagaacacaatggccagccgcgaaggaaatcagttaagcgaccgccacagggagcacacccccgaacgcggaaggggttctgccagtcatccgcctcgactcggaccgatg

SEQ ID NO: 4431 - DNA, 203 bp, synthetic construct
  source 1..203: mol_type = other DNA
ggcgcgccagtcctaccccctatttgattttggctggaatgctcccaatgcacatgatcatccacaagacccagaggaacacattcccctacaaaacatgcaacatccaatagcgctaatagattacgaaagtgaaccacaacccccactactccctgctattagttacttcaacctaaccggcggagcgactcggaccgatg

SEQ ID NO: 4432 - DNA, 203 bp, synthetic construct
  source 1..203: mol_type = other DNA
ggcgcgccagtccttcagaacgattagatgcgatggagttttgattacaactgaagccagcattcttttgaccaacttaagagtgtggttgtacttgaactatcacacggaacacgctaagcggcaggatagaaggcgaagaagagtgtgttctgccagggccgcgttttgctatacaaaatacgagacgactcggaccgatg

SEQ ID NO: 4433 - DNA, 203 bp, synthetic construct
  source 1..203: mol_type = other DNA
ggcgcgccagtccttgtacttttccctggtgacgcagtttcggggtgtgtgttgggtttggcgggattttttacactttactcccattacgtcagtttagggcttgtgtatatatatattgtggagaggttggagagtcactttagagcttgtgctttgtgtgcccgctgtactttgtctggtaagcccgactcggaccgatg

SEQ ID NO: 4434 - DNA, 203 bp, synthetic construct
  source 1..203: mol_type = other DNA
ggcgcgccagtccttgtagatgtgactgaagatctcagaccggatcatttggttattgcccgcactggagcagagttcggatccagtggagaagaaactgactaaggtgagtattgggaaaactttggggtgggattttcagatggacagattgagtaaaaatttgttttttctgtcttgcagctgtccgactcggaccgatg

SEQ ID NO: 4435 - DNA, 203 bp, synthetic construct
  source 1..203: mol_type = other DNA
ggcgcgccagtcctctaaggtgagtattgggaaaactttggggtgggattttcagatggacagattgagtaaaaatttgttttttctgtcttgcagctgtcatgagtggaaacgcttcttttaaggggggagtcttcagcccttatctgacagggcgtctcccatcctgggcaggagttcgtcagaatcgactcggaccgatg

SEQ ID NO: 4436 - DNA, 203 bp, synthetic construct
  source 1..203: mol_type = other DNA
ggcgcgccagtccttgactcttaaagagtagcccttgcccgcgctcattttgaaaacggcgggaatcacgtcacccttggcacctgtcctttgcccttgtcatgagtaaagagattcccacgccttacatgtggagctatcagccccaaatggggttggcagcaggcgcttcccaggactactccacccgactcggaccgatg

SEQ ID NO: 4437 - DNA, 203 bp, synthetic construct
  source 1..203: mol_type = other DNA
ggcgcgccagtcctttctcctatgattagtcgtccccatatggctctgaatgaaatctaagatctttttttttttctcttacagtatggtgaacatcaatcatgatccctagaaatttcttcttcaccatactcatctgtgcttttaatgtctgtgctactttcacagcagtagccactgcaagcccacgactcggaccgatg

SEQ ID NO: 4438 - DNA, 203 bp, synthetic construct
  source 1..203: mol_type = other DNA
ggcgcgccagtccttcctgctgacgcagtttcggggtgtgtgttgggcttggcggtatttttttttcactttactcccattacgtcagtttagggcttgtgtatatattgtggagaggttggagagtgtttttagagcttctttagagcttgtgctttgtgcgcccgctgtactttgcctggtaagcccgactcggaccgatg

SEQ ID NO: 4439 - DNA, 203 bp, synthetic construct
  source 1..203: mol_type = other DNA
ggcgcgccagtcctctgccgccagcgatcccacttgagttttatggcgaggtcataggcgatgttgacgagccgctggtctccagagagtttcatgaccagcatgaaggggattagctgcttgccaaaggaccccatccaggtgtaggtttccacatcgtaggtgagaaagagcctttctgtgcgaggcgactcggaccgatg

SEQ ID NO: 4440 - DNA, 203 bp, synthetic construct
  source 1..203: mol_type = other DNA
ggcgcgccagtcctactgtagctaggccttagcgtgccttggatactgcctgatagggcgacggcctagtcgtgtcggttctataggtagcacatacaaatatgcagaactctcatttttctttcgatacagcctctggcacctttgaagatgtaaccggaacaaaagtcaagatcgttgaatacccccgactcggaccgatg

SEQ ID NO: 4441 - DNA, 203 bp, synthetic construct
  source 1..203: mol_type = other DNA
ggcgcgccagtcctggcttttaaagcgctacagtgatgtctctcagtattgacgtgacgagtcttccttctattccttcaactatatataagaatgaatcgtcttcaacaacgtcaactctttctggaaaatctattggtaggagtgaacagtacatttcaccagatgcagaagcattcaataaataccgactcggaccgatg

SEQ ID NO: 4442 - DNA, 203 bp, synthetic construct
  source 1..203: mol_type = other DNA
ggcgcgccagtcctggctattaaagctgtacaatggggaagtacaatctaatcttgtcagaatatctatcatttatatataattcacaatctgcagttcaaattccaatatattactcttccaacagtgaattagaaaatagatgtattgaatttcattccaagtgtttagagaactcaaagaatgggcgactcggaccgatg

SEQ ID NO: 4443 - DNA, 203 bp, synthetic construct
  source 1..203: mol_type = other DNA
ggcgcgccagtcctggcttttaaagcagtaccagtagtgtgttttacctctgatggtgtaaacatgaaagtactagctttaagacacagtgtggctcaagtgtatgcagacactcaagtctacgttcatgatgatacaaaagatagttatgaaaacgcttttttaatctctaatcttacgacccataacgactcggaccgatg

SEQ ID NO: 4444 - DNA, 203 bp, synthetic construct
  source 1..203: mol_type = other DNA
ggcgcgccagtcctctgttttacgtatgtccatctgcccttccgaggacgaccagtaaccttaccatcatgcttaattgatattaataatcaatgggccattctaggccgagatgtcctccagcaatgccaaagttccctttaccttgcagaccaaccctctcgcgttctaccaatccagacacctagcgactcggaccgatg

SEQ ID NO: 4445 - DNA, 203 bp, synthetic construct
  source 1..203: mol_type = other DNA
ggcgcgccagtcctttccgtggcgtctcctgaaacgaggtgcatgcccaagacccggagacagcgtaaccaccgaatcaaaacacaaagaccttcaactccatgggtaagtctagtctctttatttgcctcttttgctcatacatggctagtctctttgtccctggcgaccccagtcggtgcacacttcgactcggaccgatg

SEQ ID NO: 4446 - DNA, 203 bp, synthetic construct
  source 1..203: mol_type = other DNA
ggcgcgccagtcctccttggcgaaatgctccgagcctgtcaggcttggacaccaaaggataagaccaaagttctagtagttcagccccgtaaaacccctccaacacaaccgtgcttccggtgtggaaaggtgggacactggagccgagactgcactcagcctcgcccccctccggggccctgccccctcgactcggaccgatg

SEQ ID NO: 4447 - DNA, 203 bp, synthetic construct
  source 1..203: mol_type = other DNA
ggcgcgccagtcctcttccgtagggctcccgtgtcccttccctcatgtctaattgacaccaagaatgagtggaccatcatcggccgggacgtcctgcagcaatgccagggggccctttacttaccggaggacctcccggccccgacccagttatccccggtgaccacccctgcagtcatcggcttagacgactcggaccgatg

SEQ ID NO: 4448 - DNA, 203 bp, synthetic construct
  source 1..203: mol_type = other DNA
ggcgcgccagtcctaccagcgatggaaagggcccgtacaatctctccaggaagcagcaggagcagctctccttcaagtcagtgacggctcgccccagtggatcccttggcggctcctgaagaagactgtatgcccaaaacccgacgaccccgaacccgcagggcacgtcgaaacagaccaccaacacccgactcggaccgatg

SEQ ID NO: 4449 - DNA, 203 bp, synthetic construct
  source 1..203: mol_type = other DNA
ggcgcgccagtccttcccttggcggctcctgaagaagactgtatgcccaaaacccgacgaccccgaacccgcagggcacgtcgaaacagaccaccaacaccatgggtaacgtactcttcttaactttattggccaccctgggcatcccagtacttcaggccagccggtgtacaatcacggtaggtatccgactcggaccgatg

SEQ ID NO: 4450 - DNA, 203 bp, synthetic construct
  source 1..203: mol_type = other DNA
ggcgcgccagtcctcagtaggcgcccgtccccccgggggaaacatacaagtgggggctcgtccgggatctgttccgctctcgccgttccccccctcccactatgggtcagacccacacatccagtcccgtccctaaggcccccagggggctctccacccaccactggcttaatttcctgcaggcggctcgactcggaccgatg

SEQ ID NO: 4451 - DNA, 203 bp, synthetic construct
  source 1..203: mol_type = other DNA
ggcgcgccagtccttaaccacatgccaataatgctgcctaactgtcccctgtaaatgtgtcccttccccaaaatattgttgtatatagttggaatagtaaaatggatgcacagccttctgcaaagcggcgcaaaagggacactgtagaaaatatatatagacattgtgtggggtcaggtacatgtccacgactcggaccgatg

SEQ ID NO: 4452 - DNA, 203 bp, synthetic construct
  source 1..203: mol_type = other DNA
ggcgcgccagtcctttgaaaaggaggagcaggaagagcaggataagtgtccttaccgggtggtgacagaatgtggggtttgtcataagggattgtgtatgtatgtgttggccacggacgaaggaatcagagggtttgagcaacagctgtgtggagaccttgacattgtgtgtcctgcctgtgccaagccgactcggaccgatg

SEQ ID NO: 4453 - DNA, 203 bp, synthetic construct
  source 1..203: mol_type = other DNA
ggcgcgccagtccttggctacgtatggggtgatcataaacacgcccaggaagtgacgtatgtcagccaatcagcatcgagcatataacctatataaaccgatgcacttccgcatttcgtcagactgcatccggtctccggcgagtgaacatctctgggaagagctccacacttgtggtgagtcaaattcgactcggaccgatg

SEQ ID NO: 4454 - DNA, 203 bp, synthetic construct
  source 1..203: mol_type = other DNA
ggcgcgccagtccttgcacttccgcatttcgtcagactgcatccggtctccggcgagtgaacatctctgggaagagctccacacttgtggtgagtcaaattatggctttcaatccacctgttattagagcattctcttcacctgcttttacttatgtcttcaaatttccatatccatcatggaaagaacgactcggaccgatg

SEQ ID NO: 4455 - DNA, 203 bp, synthetic construct
  source 1..203: mol_type = other DNA
ggcgcgccagtcctttcctgcaactccaccaaattctcctggcagctctgtgagtacttctgccttctttgataattggtgcgcacaaccgcgagacgaagatgagctcagggaatacgaaagacaagcatcgcgcctacaaaagaaaagggagtccagggagagacgagaggaaacgcccatggcaacgactcggaccgatg

SEQ ID NO: 4456 - DNA, 203 bp, synthetic construct
  source 1..203: mol_type = other DNA
ggcgcgccagtcctcaggtaacctgggggatacggacggagaggactccaagtcagaagcatcggaagtggattattgtccacccaagaaaaggcgtgtgatttcagcaactccaccaaacagtccagtaagtggtccaagcctttctacctttttagatacttggcaatcacaacctagagacgacgcgactcggaccgatg

SEQ ID NO: 4457 - DNA, 203 bp, synthetic construct
  source 1..203: mol_type = other DNA
ggcgcgccagtcctagtccgtggagtgagcttctattagagtcgttaacacgtttgaataatttctactgaaaggagtagaagaaaggagattcattcccaatggcaacaaaggggatgaataagtctcgggctcgatcccgaggcgtcaatatggtagcggctagagtgaagaacctagccgttaaacgactcggaccgatg

SEQ ID NO: 4458 - DNA, 203 bp, synthetic construct
  source 1..203: mol_type = other DNA
ggcgcgccagtcctctttgctcactcagcacaggatctgatcaggagatttgtctccggtgctttacaccggagcacaaatttaaaaattgcccaaggcctggcaaataacctaggggactaggttttcttttaatttacacgtctgtcaatatgggtgcaaacaatagcaaggagtctgtgtcaagccgactcggaccgatg

SEQ ID NO: 4459 - DNA, 203 bp, synthetic construct
  source 1..203: mol_type = other DNA
ggcgcgccagtcctgtggtgacccagcccctctgcttcggcaggggggctttcgctcgctcagcacgagatctgatcaggagcccctcccagtgtgctttacacctggcgaggggttaaaaattgcccaaggcctggcaaaacaacctaggggactaggttttccttttattaataatatctgtcattcgactcggaccgatg

SEQ ID NO: 4460 - DNA, 203 bp, synthetic construct
  source 1..203: mol_type = other DNA
ggcgcgccagtcctaggaatgcctcgagatgccatgtggacgagggcgtgcccacggtgtatcttaacccaggcgggggccgcttgggtgaaatagggttgttatacaagcctttgggagtacagcctgatagggtgttgcagagacctgctacaccactagtataaaaactctgctgtacatggcaccgactcggaccgatg

SEQ ID NO: 4461 - DNA, 203 bp, synthetic construct
  source 1..203: mol_type = other DNA
ggcgcgccagtcctctggagaagcattgccagggttacgtcgcggcagaacccggttcgcagacggccgcggcgagcgagcccccttttttcttttgccagatgcatcccgtcctgcgccaaatgcgtcccacccccccggcgaccaccgcaaccgcggccgtagcaggcgccggcgctgtacaacagcgactcggaccgatg

SEQ ID NO: 4462 - DNA, 203 bp, synthetic construct
  source 1..203: mol_type = other DNA
ggcgcgccagtcctggggcgccgccagcggcgaagagtcccactttgacatgggggcggacctgcattggcagccgagcccgcgcgccttggaggccgcctacggtccagaggacttggatgaggatgaggaagaggaggaggatgcacccgctgcggggtactgacgcctccgtgatgtgtttttagcgactcggaccgatg

SEQ ID NO: 4463 - DNA, 203 bp, synthetic construct
  source 1..203: mol_type = other DNA
ggcgcgccagtccttgcagcccagactggggcaacggatgttttgaatgcataaaataaaactcaccaaggccatagcgtgcgttctcttccttgttagagatgaggcgcgcggtggtgtcctctcctcctccctcgtacgagagcgtgatggcgcaggcaaccctggaggttccgtttgtgcctccgcgactcggaccgatg

SEQ ID NO: 4464 - DNA, 203 bp, synthetic construct
  source 1..203: mol_type = other DNA
ggcgcgccagtcctgacgcccgtcgccgcacctgtccctacgtctacaaggccctgggcatagtcgcgccgcgcgtgctctccagtcgcaccttctagaaaatgtccattctcatctcgcccagcaataacaccggctggggtcttactaggcccagcaccatgtacggaggagccaagaagcgctcccgactcggaccgatg

SEQ ID NO: 4465 - DNA, 203 bp, synthetic construct
  source 1..203: mol_type = other DNA
ggcgcgccagtcctgcgccagggccgctcgtttgttctgcccaccgtgcgctaccaccccagcatcctttaatccgtgtgctgtaatactgttgcagagagatggctctcacttgccgcctgcgcattcccgtcccgaattaccgaggaagatcccgccgcaggagaggcatggcaggcagcggcctacgactcggaccgatg

SEQ ID NO: 4466 - DNA, 203 bp, synthetic construct
  source 1..203: mol_type = other DNA
ggcgcgccagtccttatcgtgggcctgggagtgaaaagtctgaagcgccgccgatgctattaagagaggaaagaggacactaaagggagagcttaacttgtatgtgccttaccgccagagaacgcgcgaagatggccaccccctcgatgatgccgcagtgggcgtacatgcacatcgccgggcaggaccgactcggaccgatg

SEQ ID NO: 4467 - DNA, 203 bp, synthetic construct
  source 1..203: mol_type = other DNA
ggcgcgccagtccttagccatgctccagcccagcgttggtttccttctgttcatcctgtgggggttctagacgagccggctcttccaagcccaggtcctgcttgattttgggttgctcgtgggtggttaagttctcctcctcctgctcctgcttacgcggctgctcctccatcttcccctaggaaacacgactcggaccgatg

SEQ ID NO: 4468 - DNA, 203 bp, synthetic construct
  source 1..203: mol_type = other DNA
ggcgcgccagtcctaatcggtctctgcgctcgctcacccgcagttgcttgtaccacaaaaacgaagatcagctgcagcgcactcttgaagacgccgaggctttgttccacaagtactgcgcgcttactcttaaagactaacgcgcgcccacccggaaaaaaggcgggaattacctcatcgccagcacccgactcggaccgatg

SEQ ID NO: 4469 - DNA, 203 bp, synthetic construct
  source 1..203: mol_type = other DNA
ggcgcgccagtcctttgttccacaagtactgcgcgcttactcttaaagactaacgcgcgcccacccggaaaaaaggcgggaattacctcatcgccagcaccatgagcaaggagattcccacaccttacatgtggagctatcagccccagatgggcctagccgcgggcgcctcccaggactactccacccgactcggaccgatg

SEQ ID NO: 4470 - DNA, 203 bp, synthetic construct
  source 1..203: mol_type = other DNA
ggcgcgccagtcctcccttttcaggctccccaggcctctaccccgacgagttcataccgaacttcgacgcagttagagaagcggtcgacggctacgactgaatgtcctatggtgactcggctgagcttgctcggttaaggcatctggaccactgccgccgcctgcgctgctttgcccgggagagctgccgactcggaccgatg

SEQ ID NO: 4471 - DNA, 203 bp, synthetic construct
  source 1..203: mol_type = other DNA
ggcgcgccagtcctttcggaggtgagctaaggcttcccccttgtaaggagggggttagcccatacaaggtggtcgggtatttaattttaggggcggtcctgggtgggtgcatagcggtgctagcccaactgccttgctgggtggaaatcaatctttatctgctgggttagatattgcggggaggaacccgactcggaccgatg

SEQ ID NO: 4472 - DNA, 203 bp, synthetic construct
  source 1..203: mol_type = other DNA
ggcgcgccagtcctaggccagtaatcgggaatcctcagcctttccaagtggaagggggtctaaggaatcttcttttttctttttcagtatggtgatcagccatgattcctaggttcttcctatttaacatcctcttctgtctttttaacgtgtgcgctgcctttgcggccgtttcgcacacctcaccccgactcggaccgatg

SEQ ID NO: 4473 - DNA, 203 bp, synthetic construct
  source 1..203: mol_type = other DNA
ggcgcgccagtcctgccattccccacctaccttctctttgccctgctcacctgcacctgcgtctgcagcattgtctgcctggtcattaccttcctgcagcttatcgactggtgctgcgcgcgctacaattatcttcaccacagtcccgaatacagggacaagaacgtagccaaactcttaaggcttatcgactcggaccgatg

SEQ ID NO: 4474 - DNA, 203 bp, synthetic construct
  source 1..203: mol_type = other DNA
ggcgcgccagtcctcctgttttgatctcggctggaactctgttggggcatttacatacacactacaaaacagttcaccagccttcacaccgcctccccgcagaaatcagttccccctgattcagtacttagaagagccccctccccggcccccttccactgttagttactttcacataaccgccggcgcgactcggaccgatg

SEQ ID NO: 4475 - DNA, 203 bp, synthetic construct
  source 1..203: mol_type = other DNA
ggcgcgccagtcctctggatgtgaccgaggagctgcgaccagaccacctggtgatggcctgtaccgggaccgagttcagctccagtggggaggacacagattagaggtaggtttaagtagtgggcgtggctaaggtaagtataaaggcgggtgtcttacaagggtctttttgcttttctgcagacatccgactcggaccgatg

SEQ ID NO: 4476 - DNA, 203 bp, synthetic construct
  source 1..203: mol_type = other DNA
ggcgcgccagtcctaccgccgctgccgccaggagcgcgtccgcgacaccgcttctaaaagcgcaccgcggcacggtcgtggccccgcgcagctacgggctcatgcaatgcgtggacacggccaccaactcacccgtggagatcaagtaccatctgcatcttaagcacgccctctcccgcctctacgagcgactcggaccgatg

SEQ ID NO: 4477 - DNA, 203 bp, synthetic construct
  source 1..203: mol_type = other DNA
ggcgcgccagtccttattgtttacttgtttgttggtttcataccattaaattacaaggtcttagaaactctcaactttattttgacactcaatacagcaaaatgggagctcaagtatcaacgcagaagactggggcacatgagactagcttgaacgccaacgggagttcggtcattcactacaccaaccgactcggaccgatg

SEQ ID NO: 4478 - DNA, 203 bp, synthetic construct
  source 1..203: mol_type = other DNA
ggcgcgccagtccttgttataaaaccatttcctcgtgccttgacctttaacacatttgtgaacttctttaaatcccttttattagtccttaaatactaagaatgggtgcacaagtatccacacaaaaatccggatctcatgaaactggcacttatgccacaggtggatcaacaattaattacacaaatcgactcggaccgatg

SEQ ID NO: 4479 - DNA, 203 bp, synthetic construct
  source 1..203: mol_type = other DNA
ggcgcgccagtcctgtttacatccagatccaagatcaagagtggcttggaaataaggggcacttgttctttgtctcaaaggacttacaaaaacaagggtgatgaagattaagaaaaagcctccttcagttgcaaggagctaattcttaaaacttcatctagactaaggataaatcgattccaatcacgcgactcggaccgatg

SEQ ID NO: 4480 - DNA, 203 bp, synthetic construct
  source 1..203: mol_type = other DNA
ggcgcgccagtccttcttatgccacagcttatattaagaaaaagaacttgatgaagattaaggcaaccagtggtgctatcttcatctctttgatttgagtcttaagtgaatacacaggttctaatactgttcttctgtccaacggtataattcagccaggcctaagacagtagctaatcacagtcatccgactcggaccgatg

SEQ ID NO: 4481 - DNA, 203 bp, synthetic construct
  source 1..203: mol_type = other DNA
ggcgcgccagtcctcatgtaagtattgtctcaccccaagatgatccctggacaccaacaaccccctaacctccccaagttgtcattaagaaaaaatatatgatgaagattaaaaccttcatcagagctatttcttctacgcttggttaggaccagtattcacaaactattttacaatccctacccaatcgactcggaccgatg

SEQ ID NO: 4482 - DNA, 203 bp, synthetic construct
  source 1..203: mol_type = other DNA
ggcgcgccagtcctcccacatcccattacctcttccaccccctcccgtccaacgcccgcaccatcgtcgagcgtgaggctgactgggatggctgtgatctagaaaagaaatggctcgacctcgtcatagaggacgatgccaagttccttctggagaacggctctctcccgtttggctccacccttgcccgactcggaccgatg

SEQ ID NO: 4483 - DNA, 203 bp, synthetic construct
  source 1..203: mol_type = other DNA
ggcgcgccagtcctagtccctggaggttggctgactttcttcctatttctcttttcactgcgaattgtgtggattggtattctttagagcttgggagttgtctcatattgaattcatatattttactctatactacactcaaacacggctctctggtcagttaagaaaatcatttatagaataataaacgactcggaccgatg

SEQ ID NO: 4484 - DNA, 203 bp, synthetic construct
  source 1..203: mol_type = other DNA
ggcgcgccagtccttaacaacaaacataaagataaggggggatgttttaagtgtggaaaacggggtcattttgcaaaagactgtcgtgaacatataaataagcccgtagaagcaaaaactccaggactctgccctaggtgtaaaagaggaaagcattgggctaatgaatgtaaatctaaaactgacagcgactcggaccgatg

SEQ ID NO: 4485 - DNA, 203 bp, synthetic construct
  source 1..203: mol_type = other DNA
ggcgcgccagtcctacctgttaatctctggggccgcgacttactttctcaaatgaaactcatgatgtgtagtccaaatgatatagtcacggcacaaatgttagcacaaggttattgtcccggaaaaggactaggaaaaaaggaaaatggtattctgcagccccttcaaaatcaaggacaatgtgataacgactcggaccgatg

SEQ ID NO: 4486 - DNA, 203 bp, synthetic construct
  source 1..203: mol_type = other DNA
ggcgcgccagtcctgttgttgatcccgcgggacgggacatctggcgcccaacgtggggcttggatacgagggaatttgtgaggaagacggcgcagggaccggccggcgattaaaaagcgaaagtacattgtcttagccgccgcgggagcctgccgcgtcggactcagaggtaagtggtgcgctcggaacgactcggaccgatg

SEQ ID NO: 4487 - DNA, 203 bp, synthetic construct
  source 1..203: mol_type = other DNA
ggcgcgccagtcctggtggtgaaccaaccacttggtggtcgtaatgagcaattctgggacggaaccgactactttggggtgtccgtgtttcttttgttcatattaaactgttttatggtcacaacacaacttggtacgatttgtgattattcactgctcacttgtcacagtaaatatacacaatcatccgactcggaccgatg

SEQ ID NO: 4488 - DNA, 203 bp, synthetic construct
  source 1..203: mol_type = other DNA
ggcgcgccagtccttacctagccaggggcaatgggactgcattgcatatccctaatgaaccattgagatttctctggtcattacccggtgatggttactagaggggggcctctagtactagatctatactgcctgatagggtcgcggctggccgaccatgacctgtatagtcagttgatttgagcaatcgactcggaccgatg

SEQ ID NO: 4489 - DNA, 203 bp, synthetic construct
  source 1..203: mol_type = other DNA
ggcgcgccagtcctaggggggcctctagtactagatctatactgcctgatagggtcgcggctggccgaccatgacctgtatagtcagttgatttgagcaatatggttttctttttcgcttctaccaagactaatgagactgctgaatccaaagacaaggtgcccaagcctcgcctcatgtcccaaggccgactcggaccgatg

SEQ ID NO: 4490 - DNA, 203 bp, synthetic construct
  source 1..203: mol_type = other DNA
ggcgcgccagtcctacctagccaggggcaatgggactgctttgcatatccctaatgaagtattgagatttctctgctcattacccggtgatggttgtgtggggggggccccatacactagatccatactgcctgatagggtcgcggctggccgaccataacctgtatagtcagttgaattcagccaagcgactcggaccgatg

SEQ ID NO: 4491 - DNA, 203 bp, synthetic construct
  source 1..203: mol_type = other DNA
ggcgcgccagtcctggggggccccatacactagatccatactgcctgatagggtcgcggctggccgaccataacctgtatagtcagttgaattcagccaagatgtgtttctttttccacacaaagaccaacgatattagcccaatgacaagaaagacttctgttgaacgcctcatgtccccagggcctcgactcggaccgatg

SEQ ID NO: 4492 - DNA, 203 bp, synthetic construct
  source 1..203: mol_type = other DNA
ggcgcgccagtccttcccacccagtgattgttgttgtgacaagaaaattacatagatcatgttttacaacagtattctcatggaatgtgtcggtctggaggatgttgtaccttcctgacggtcgggccatggtgggtcagccttttgtgtgggattttgtctgggtttgtcccgtgggtctcctgatgcgactcggaccgatg

SEQ ID NO: 4493 - DNA, 203 bp, synthetic construct
  source 1..203: mol_type = other DNA
ggcgcgccagtcctaacatcgatccgctcagatcggcacaaccgaacacggcccccgaagtcgggcatcccaaaaccagacaccaccgcaaagaggacctagacaaagggccaccacagttcaaggcctgcatcaggagacccacgggacaaacccagacaaaatcccacacaaaaggctgacccacccgactcggaccgatg

SEQ ID NO: 4494 - DNA, 203 bp, synthetic construct
  source 1..203: mol_type = other DNA
ggcgcgccagtccttcaactctcaagatccttcctcttcttactttgttccgctcctcgcctagtcccaacacagcaatcaccaaccagatcgaagaaaccgcggcaggtcgacccaactgagcaacatcgactgcaacttcacacaagcctccaactggcctccaacagataccgcaaagaacccaacgactcggaccgatg

SEQ ID NO: 4495 - DNA, 203 bp, synthetic construct
  source 1..203: mol_type = other DNA
ggcgcgccagtcctacggcatatcagccaatcaacacagcccaacacaaaggagacacccgacgggacacaaatccaagggtcaggtgatcccgccccaaacacaggactcaaagcccaccagaagggcacaccccagagactccacaggccatccctctccaaaagacccgagacgaactacacggccgactcggaccgatg

SEQ ID NO: 4496 - DNA, 203 bp, synthetic construct
  source 1..203: mol_type = other DNA
ggcgcgccagtcctcacaggactcaaagcccaccagaagggcacaccccagagactccacaggccatccctctccaaaagacccgagacgaactacacggcatggacaaagtgacggatgccatcatgactgggcgattatcactcgacacaatccctggctttcaatgctctgcgccgacctccaggcgactcggaccgatg

SEQ ID NO: 4497 - DNA, 203 bp, synthetic construct
  source 1..203: mol_type = other DNA
ggcgcgccagtcctttgctttaccaataacatcgagcttacatactcctcttgaaaatcaagagaggctgagttttgccacgggtgcagaaccgggacaagatggtgcccacctacccgtacagcagcctattagattggagaccaccaccaaacaccctaccatggatcctcaaccttgtggtctttcgactcggaccgatg

SEQ ID NO: 4498 - DNA, 203 bp, synthetic construct
  source 1..203: mol_type = other DNA
ggcgcgccagtccttaagcatcaatataacttatctgcatctaatccaatctgcttcccagtacttcttatatacttgaaataaagcaatgatgaatattaagaaaaaactaggctagtattgtatagtcttgaccttcttgaaacaaggtagcctagcttgcttaaccggctcttaaagggatcgagcgactcggaccgatg

SEQ ID NO: 4499 - DNA, 203 bp, synthetic construct
  source 1..203: mol_type = other DNA
ggcgcgccagtcctagaaaaaactaggctagtattgtatagtcttgaccttcttgaaacaaggtagcctagcttgcttaaccggctcttaaagggatcgagatggctgctggtccactaagagccaaagaatgggcaaggagacaattggacaatacaatcagtcatccagttggtccacggccttcgcgactcggaccgatg

SEQ ID NO: 4500 - DNA, 203 bp, synthetic construct
  source 1..203: mol_type = other DNA
ggcgcgccagtccttagacaatcctgaccgggcaataggactgcattgcatatccttaggtggtattgagaaacctctgccacccaccggcgtggatctctatggggggggccccatagactgggtctatactgcctgatagggtcgcggctggtcgaccactgactgtataaccagttgtactcaaccgactcggaccgatg

SEQ ID NO: 4501 - DNA, 203 bp, synthetic construct
  source 1..203: mol_type = other DNA
ggcgcgccagtcctgagggaatgggaaaccctccatggccgaatgcagggtgacagcctgccggcggatgcctgttgttagtataatccgttgtttgccacatggattccacagtctcttttccagcatacaccacctactttcctcaccgtatggcaagaatgcacagaatcgccactagtgtacagcgactcggaccgatg

SEQ ID NO: 4502 - DNA, 203 bp, synthetic construct
  source 1..203: mol_type = other DNA
ggcgcgccagtcctacatgtgtatccgtggaggatcgcccgggactggattccatatcccattgccatcccaacaaacggagggtatacccaccacgtgcgcgtttgcagtgggaatctgcaaatttagtcatactgcctgatagggtgtgggcctgcactttggggtactcaggctgttcatataatcgactcggaccgatg

SEQ ID NO: 4503 - DNA, 203 bp, synthetic construct
  source 1..203: mol_type = other DNA
ggcgcgccagtcctctactggattggtgattaccaatctgtactagtgttgtattaagacttgttgtgtggagaaaatggactctttcaagaagatttttgatgaagctgcaattgaatctggattttctggcattctcgacccccggctccgcgaaccctattccacttgcttttggcgtttctggtcgactcggaccgatg

SEQ ID NO: 4504 - DNA, 203 bp, synthetic construct
  source 1..203: mol_type = other DNA
ggcgcgccagtcctagagtagcttaaaacgtatatagacggcctacatattatagaatgcgtatccggaacgccaagcccggacaagtccctgatatatagatgcactgctacataagcctgcaggaggttccatatactatggagataataaaaacagtgtgtgcaagtgttcttaggaaaactccacgactcggaccgatg

SEQ ID NO: 4505 - DNA, 203 bp, synthetic construct
  source 1..203: mol_type = other DNA
ggcgcgccagtcctaaaccccagccttgagatgctacgtggacgagggcatgcccaagacacaccttaacctggacgggggtcgtccaggtgaaagtacccatctttgggtgctgggagtacagcctgatagggcgctgcagaggcccactgacaggctagtataaaaatctctgctgtacatggaaccgactcggaccgatg

SEQ ID NO: 4506 - DNA, 203 bp, synthetic construct
  source 1..203: mol_type = other DNA
ggcgcgccagtcctaggaccacgctccgtaatcgagcccaagtactcaaaccccagcacccctgggtcacgccctacgccgcccttttaacgcttcggctaatagggtctatccggcgggttgacaaagggcgcagggttacctggtactacgagcttgggtgtccctgggagtaatcccagggtgcccgactcggaccgatg

SEQ ID NO: 4507 - DNA, 203 bp, synthetic construct
  source 1..203: mol_type = other DNA
ggcgcgccagtcctatagggtctatccggcgggttgacaaagggcgcagggttacctggtactacgagcttgggtgtccctgggagtaatcccagggtgccatgctgcagcgcaggcgggcgagggtggtgcctcggcctaggggaagagcgcaagtgaccccgtgctgcataaatccccccccttttcgactcggaccgatg

SEQ ID NO: 4508 - DNA, 203 bp, synthetic construct
  source 1..203: mol_type = other DNA
ggcgcgccagtcctgccggggaccagctgattacttgtcctgcgagttcctcttgagactggccgaaaggcagccacggggccaccaaggcggcgcagcgctgcatgcggcaaggggaaaaatccttcgggtgacccctggtggcaatcccttcccttaggagcatgagtgtggtcgacacattcacccgactcggaccgatg

SEQ ID NO: 4509 - DNA, 203 bp, synthetic construct
  source 1..203: mol_type = other DNA
ggcgcgccagtcctttgatccagcaaaagataataaatggccatatttagaaagtagggtgacggtatttacatttccacatgcatttccatttgataaaaatggtaatccagtatatgaaataaatgataaaaattggaaatgtttttttgaaaggacatggtccagattagatttgcacgaggacgcgactcggaccgatg

SEQ ID NO: 4510 - DNA, 203 bp, synthetic construct
  source 1..203: mol_type = other DNA
ggcgcgccagtcctccttgaccatgccttctactgctgcatcctcttacagtaatgttacagtaccattaacatctgcatgggatgtacctatatatactggcccggacattatattgccatcccatactcctatgtggcctagtacatctcctaccaatgcttccaccaccacctatataggtattccgactcggaccgatg

SEQ ID NO: 4511 - DNA, 203 bp, synthetic construct
  source 1..203: mol_type = other DNA
ggcgcgccagtcctgcccggacattatattgccatcccatactcctatgtggcctagtacatctcctaccaatgcttccaccaccacctatataggtattcatggcacacaatattatttatggccatggtattattattttcctaaaaaacgtaaacgtattccctatttttttgcagatggctttgcgactcggaccgatg

SEQ ID NO: 4512 - DNA, 203 bp, synthetic construct
  source 1..203: mol_type = other DNA
ggcgcgccagtcctgtaaccacaaccgaaaccaacgatcatccggtgctggtgactcacgcgctgtcaataccgtgacacagagtgccacgtcctccacagatgaatcctcttcagctgttacagccgcttccggcggagatcaaagggactaaattgttagcccactgggattcaggggcaacaatacgactcggaccgatg

SEQ ID NO: 4513 - DNA, 203 bp, synthetic construct
  source 1..203: mol_type = other DNA
ggcgcgccagtcctttgttggccaattggtccaggagagggtggctaggcctgcttctttgagacctcgttggcataaaccgtctactgtacttaaggtgttgaatccaaggactgttgttattttggaccatcttggcaacaacagaactgtaagtatagataatttaaaacctacttctcatcagacgactcggaccgatg

SEQ ID NO: 4514 - DNA, 203 bp, synthetic construct
  source 1..203: mol_type = other DNA
ggcgcgccagtcctttgaaagggggcgctagggtctcacccctaacatgccaacgacagtccctgcattgcactccacacttacgttgtgcgtacgcggggcccgatggaccatcgttcacccacctacagctggactcacgacaccgcgtggccattttagctggattgtgcggacgaacaccgcttcgactcggaccgatg

SEQ ID NO: 4515 - DNA, 203 bp, synthetic construct
  source 1..203: mol_type = other DNA
ggcgcgccagtcctacccgaaacccgcctttcataagttttaccgtctgtcccgacgttaaagggaggtaaccacaagcatactgccgccttccccggcgttaacgggatgcaaccgtaagacacaccttcatccggaagtgaaacggctgcgtcacatagttttgcccgttttcacgagaaatgggacgactcggaccgatg

SEQ ID NO: 4516 - DNA, 203 bp, synthetic construct
  source 1..203: mol_type = other DNA
ggcgcgccagtcctcacactggtgacaggctaaggatgcccttcaggtaccccgaggtaacacgcgacactcgggatctgagaaggggactggggcttctataaaagcgctcggtttaaaaagcttctatgcctgaataggtgaccggaggtcggcacctttcctttacaattaatgaccctatgaatcgactcggaccgatg

SEQ ID NO: 4517 - DNA, 203 bp, synthetic construct
  source 1..203: mol_type = other DNA
ggcgcgccagtcctgtcctggtatttgttccatacgaccaagagccactcaatgaagggtggaaggccagcgttcagcgaaagctcaagggagctgggcaatccagcccagcgaccggttcacagaaccaatctggcaacactggcagcataattaacaactactatatgcagcagtaccaaaactcccgactcggaccgatg

SEQ ID NO: 4518 - DNA, 203 bp, synthetic construct
  source 1..203: mol_type = other DNA
ggcgcgccagtcctgcactttttgattgggttccttcacaaaattttggacacatgcacaaggttgttctgccccacgaaccaaaaggtgtttacgggggtctcgtcaagtcatacgcgtacatgcgcaatggctgggacgtcgaggtgaccgctgttggaaaccagttcaacggcggttgcctcctgcgactcggaccgatg

SEQ ID NO: 4519 - DNA, 203 bp, synthetic construct
  source 1..203: mol_type = other DNA
ggcgcgccagtcctgtcatggttgtcgcgccactcaccacaaacacagcaggtgcccaacagatcaaagtgtatgccaacatagccccaaccaacgtgcacgtggcgggtgagctcccctccaaggaggggatcttccccgttgcgtgttctgacggttacggcaacatggtgacaactgacccgaaacgactcggaccgatg

SEQ ID NO: 4520 - DNA, 203 bp, synthetic construct
  source 1..203: mol_type = other DNA
ggcgcgccagtcctgaggctgcccactgcatacacgcagaatgggacactggtctgaactccaagttcacgttttcaatcccgtacatctcggccgctgactacgcgtacaccgcgtcccacgaggctgaaacaacatgtgtacaggggtgggtctgtgtgtaccaaatcactcacggcaaggcagaccgactcggaccgatg

SEQ ID NO: 4521 - DNA, 203 bp, synthetic construct
  source 1..203: mol_type = other DNA
ggcgcgccagtcctgccgacgcgctcgtcgtctccgcatcagcggggaaagactttgagctccggctacctgtggacgctagacaacaaactacgaccactggtgaatctgctgaccccgtcaccactaccgttgagaactacggaggagagactcaggtccaacgtcgccaccacaccgacgttgcccgactcggaccgatg

SEQ ID NO: 4522 - DNA, 203 bp, synthetic construct
  source 1..203: mol_type = other DNA
ggcgcgccagtcctggtgcaccagtttctgcacttaacaacacaaccaatcccactgcctaccacaagggcccggtgactcgactggctctcccatacaccgcgccacaccgtgtgttggctacggcgtacactggcactacgacctacaccgccagtgcacgcggggatttggctcacctaacgacgcgactcggaccgatg

SEQ ID NO: 4523 - DNA, 203 bp, synthetic construct
  source 1..203: mol_type = other DNA
ggcgcgccagtcctacgcatgctcggcatttgccgacatcgttcaactttggtgcagttaaagcagaaacaatcactgagttgctcgtgcgcatgaagcgtgctgaactctattgtcctaggccgattcttccgattcagccaacgggcgatagacacaagcaaccgctcgtcgcacctgcaaaacaacgactcggaccgatg

SEQ ID NO: 4524 - DNA, 203 bp, synthetic construct
  source 1..203: mol_type = other DNA
ggcgcgccagtcctgaggaactggccagtggagtgaaagccatcaggaccggtctcgatgaggccaaaccctggtacaagcttattaagctcctgagccgcttgtcgtgcatggccgctgtagcagcgcggtcaaaggacccagtccttgtggccatcatgctggctgacaccggtctcgagattctgcgactcggaccgatg

SEQ ID NO: 4525 - DNA, 203 bp, synthetic construct
  source 1..203: mol_type = other DNA
ggcgcgccagtcctgacagcacgtttgtcgtgaagaagatctccgactcgctctccagtctctttcacgtgccggcccccgccttcagcttcggagccccgattctgttggccgggttggtcaaggtcgcctcgagtttcttccggtccacacccgaagaccttgagagagcagagaaacaactcaaacgactcggaccgatg

SEQ ID NO: 4526 - DNA, 203 bp, synthetic construct
  source 1..203: mol_type = other DNA
ggcgcgccagtcctgcacgtgacatcaacgacatcttcgccattctcaagaacggcgagtggctggtcaagctgatccttgccatccgcgactggattaaggcatggatcgcctcagaagagaagtttgtcaccatgacagacctggtgcctggtatccttgaaaaacagcgggacctcaacgacccacgactcggaccgatg

SEQ ID NO: 4527 - DNA, 203 bp, synthetic construct
  source 1..203: mol_type = other DNA
ggcgcgccagtcctcttgcgaacgtgcttgcacaagcaatctccacccacctcaccggcaggaccgattctgtttggtactgcccgcctgaccctgaccacttcgacggttacaaccagcagaccgttgttgtgatggacgatttgggccagaaccctgacggcaaggacttcaagtacttcgcccaacgactcggaccgatg

SEQ ID NO: 4528 - DNA, 203 bp, synthetic construct
  source 1..203: mol_type = other DNA
ggcgcgccagtcctgccaaggacgggtacaaaatcaacaacaaattggacatcatcaaagcacttgaagacacccacaccaatccagtggcaatgtttcagtacgactgtgcccttctcaacggcatggctgttgaaatgaagagattgcaacaggatatgttcaagcctcaaccacccctccagaaccgactcggaccgatg

SEQ ID NO: 4529 - DNA, 203 bp, synthetic construct
  source 1..203: mol_type = other DNA
ggcgcgccagtccttccattaaggaggaactccggcccctcatccaacaaacttcatttgtgaaacgtgcttttaagcgcctgaaggagaactttgaaattgttgcactgtgcctaacacttttggccaacattgtcatcatgatccgcgagactcacaagagacagaagatggtggatgatgcggtgcgactcggaccgatg

SEQ ID NO: 4530 - DNA, 203 bp, synthetic construct
  source 1..203: mol_type = other DNA
ggcgcgccagtcctcaaccgcaagctgaaggaccctacgccgggccactcgagcgtcagagacctctgaaagtgagagccaagctcccgcgacaagagggaccttacgcgggtccgatggagagacagaagccgctgaaagtgaaagcaagagccccggtcgtcaaggaaggaccttatgaaggaccgcgactcggaccgatg

SEQ ID NO: 4531 - DNA, 203 bp, synthetic construct
  source 1..203: mol_type = other DNA
ggcgcgccagtcctgtgaagaagcctgtcgctttgaaagtgaaagctaagaatttgattgtcactgagagtggtgcccccccgactgacctgcaaaagatggtcatgggcaacacgaagcctgttgagctcatcctcgacgggaagacagtagccatctgctgtgctactggagtgttcggcactgcccgactcggaccgatg

SEQ ID NO: 4532 - DNA, 203 bp, synthetic construct
  source 1..203: mol_type = other DNA
ggcgcgccagtcctgctaccaaggctggctactgtggaggagccgttcttgctaaggacggagctgacaccttcatcgttggcactcactctgctggaggcaatggagttgggtactgctcatgcgtgtccaggtccatgcttctcaaaatgaaggcacacatcgaccctgaaccgcaccacgaggggcgactcggaccgatg

SEQ ID NO: 4533 - DNA, 203 bp, synthetic construct
  source 1..203: mol_type = other DNA
ggcgcgccagtcctttgatcgttgataccagagatgtggaagagcgcgtccatgtaatgcgcaaaaccaagcttgcacccaccgtcgcgcacggtgtgttcaatcctgagttcgggcctgccgccttgtctaacaaggacccacgtctgaacgaaggtgttgtcctcgatgaagtcattttctccaagcgactcggaccgatg

SEQ ID NO: 4534 - DNA, 203 bp, synthetic construct
  source 1..203: mol_type = other DNA
ggcgcgccagtcctcataaaggagacacaaagatgtctgcggaggacaaagcgctgttccgccgctgcgctgctgactacgcgtcacgcctgcacagtgtgctgggtacggcaaatgccccactgagcatttacgaggcaatcaagggcgttgacggactcgacgccatggagccagacaccgcacctcgactcggaccgatg

SEQ ID NO: 4535 - DNA, 203 bp, synthetic construct
  source 1..203: mol_type = other DNA
ggcgcgccagtcctcccttccagggcctctttgagattccaagctacagatcactttacctgcgttgggtgaacgccgtgtgcggcgacgcataatcccccaaacatcacaattggcacaatgattttggggcgcgcgacgccgtgggagtgaaaagcccgaaagggctttcccggcttccttaatcccgactcggaccgatg

SEQ ID NO: 4536 - DNA, 203 bp, synthetic construct
  source 1..203: mol_type = other DNA
ggcgcgccagtcctaccacaaacactccagtttgttacactccgctaggaatgctcctggagcaccccccctagcagggcgtgggggatttcccctgcccgtctgcagaagggtggagccaaccaccttagtatgtaggcggcgggactcatgacgctcgcgtgatgacaagcgccaagcttgacttgcgactcggaccgatg

SEQ ID NO: 4537 - DNA, 203 bp, synthetic construct
  source 1..203: mol_type = other DNA
ggcgcgccagtccttcctgtgtccattaaaacatctgttgaaaggggacaacgagcaaagcgcaaagtccagcgcgatgctcggcctcgtaattacaaaattgctggtatccatgatggcttgcagacattggctcaggctgctttgccagctcatggttggggacgccaagaccctcgccataagtccgactcggaccgatg

SEQ ID NO: 4538 - DNA, 203 bp, synthetic construct
  source 1..203: mol_type = other DNA
ggcgcgccagtccttcgcaatcttggaatccttctggattaccctttggggtggattggtgatgttacaactcacacacctctagtaggcccgctggtggcaggagcggtcgttcgaccagtctgccagatagtacgcttgctggaggatggagtcaactgggctactggttggttcggtgtccacctcgactcggaccgatg

SEQ ID NO: 4539 - DNA, 203 bp, synthetic construct
  source 1..203: mol_type = other DNA
ggcgcgccagtcctttgttttgggcgcgcttctggttaccctttgcgtcctgtgctcccatcccagtcgtatctccaagctggctgggatgttttgtctaaagctcaagtagctccttttgctttgattttcttcatctgttgctatctccgctgcaggctacgttatgctgcccttttagggtttgtcgactcggaccgatg

SEQ ID NO: 4540 - DNA, 203 bp, synthetic construct
  source 1..203: mol_type = other DNA
ggcgcgccagtcctgcccatggctgcgggcttgcccctaactttctttgttgcagcagctgctgcccaaccagattatgactggtgggtgcgactgctagtggcagggttagttttgtgggccggccgtgaccgtggtcaccgcatagctctgcttgtaggtccttggcctctggtagcgcttttaaccgactcggaccgatg

SEQ ID NO: 4541 - DNA, 203 bp, synthetic construct
  source 1..203: mol_type = other DNA
ggcgcgccagtcctcctcttgcatttggttacgcctgcttcagcttttgacaccgagataattggagggctgacaataccacctgtagtagcattagttgtcatgtctcgttttggcttctttgctcacttgttacctcgctgtgctttagttaactcctatctttggcaacgttgggagaattggttcgactcggaccgatg

SEQ ID NO: 4542 - DNA, 203 bp, synthetic construct
  source 1..203: mol_type = other DNA
ggcgcgccagtcctggtgcgtctcggaaagtgccatgcttggtattctcattatgttcttaagtttttcctcttagtgtttggtgagaatggtgtgtttttctataagcacttgcatggtgatgtcttgcctaatgattttgcctcgaaactaccattgcaagagccatttttcccttttgaaggcaacgactcggaccgatg

SEQ ID NO: 4543 - DNA, 203 bp, synthetic construct
  source 1..203: mol_type = other DNA
ggcgcgccagtcctggcaagggtctataggaatgaaggaagacgcttggcgtgtggggacacggttgatggtttgcccgttgttgcgcgtctcggcgaccttgttttcgcagggttagctatgccgccagatgggtgggccattaccgcaccttttacgctgcagtgtctctctgaacgtggcacgctcgactcggaccgatg

SEQ ID NO: 4544 - DNA, 203 bp, synthetic construct
  source 1..203: mol_type = other DNA
ggcgcgccagtcctcccaataaccgttgacgcggctaatgaccaggacatctatcaaccaccatgtggagctgggtcccttactcggtgctcttgcggggagaccaaggggtatctggtaacacgactggggtcattggttgaggtcaataaatccgatgacccttattggtgtgtgtgcggggccctcgactcggaccgatg

SEQ ID NO: 4545 - DNA, 203 bp, synthetic construct
  source 1..203: mol_type = other DNA
ggcgcgccagtccttcccatggctgttgccaagggttcttcaggtgccccgattctgtgctcctccgggcatgttattgggatgttcaccgctgctagaaattctggcggttcagtcagccagattagggttaggccgttggtgtgtgctggataccatccccagtacacagcacatgccactcttgacgactcggaccgatg

SEQ ID NO: 4546 - DNA, 203 bp, synthetic construct
  source 1..203: mol_type = other DNA
ggcgcgccagtcctggacggcgctgacgcctgtcctggcccagagcccagcgaggtgaccagataccaaatgtgcttcactgaagtcaatacttctgggacagccgcactcgctgttggcgttggagtggctatggcttatctagccattgacacttttggcgccacttgtgtgcggcgttgctggtccgactcggaccgatg

SEQ ID NO: 4547 - DNA, 203 bp, synthetic construct
  source 1..203: mol_type = other DNA
ggcgcgccagtccttattacatcagtccctaccggtgctactgtcgccccagtggttgacgaagaagaaatcgtggaggagtgtgcatcattcattcccttggaggccatggttgctgcaattgacaagctgaagagtacaatcaccacaactagtcctttcacattggaaaccgcccttgaaaaactcgactcggaccgatg

SEQ ID NO: 4548 - DNA, 203 bp, synthetic construct
  source 1..203: mol_type = other DNA
ggcgcgccagtcctctttattgccactcgtgacatccgcaggaagatactgggcattctggaggcatctaccccctggagtgtcatatcagcttgcatccgttggctccacaccccgacggaggatgattgcggcctcattgcttggggtctagagatttggcagtacgtgtgcaatttctttgtgatcgactcggaccgatg

SEQ ID NO: 4549 - DNA, 203 bp, synthetic construct
  source 1..203: mol_type = other DNA
ggcgcgccagtcctttgctttaatgtccttaaagctggagttcagagcatggttaacattcctggttgtcctttctacagctgccagaaggggtacaagggcccctggattggatcaggtatgctccaagcacgctgtccatgcggtgctgaactcatcttttctgttgagaatggttttgcaaaactcgactcggaccgatg

SEQ ID NO: 4550 - DNA, 203 bp, synthetic construct
  source 1..203: mol_type = other DNA
ggcgcgccagtcctagtatcctctccaaatgtctgtttcacccaggtgcccccaaccttgagagctgcagtggccgtggacggcgtacaggttcagtgttatctaggtgagcccaaaactccttggacgacatctgcttgctgttacggtcctgacggtaagggtaaaactgttaagcttcccttccgcgactcggaccgatg

SEQ ID NO: 4551 - DNA, 203 bp, synthetic construct
  source 1..203: mol_type = other DNA
ggcgcgccagtcctcgttgacggtcacacacctggtgtgcgcatgcaacttaatttgcgtgatgcacttgagacaaatgactgtaattccacaaacaacactcctagtgatgaagccgcagtgtccgctcttgttttcaaacaggagttgcggcgtacaaaccaattgcttgaggcaatttcagctggcgactcggaccgatg

SEQ ID NO: 4552 - DNA, 203 bp, synthetic construct
  source 1..203: mol_type = other DNA
ggcgcgccagtccttgcttctaaagttctgtctgcaactcgggccatcactagtggtttcctcaaacaaagatcattggtgtatgtgactgagccgcgggatgcggagcttagaaaacaaaaagtcactattaatagacaacctctgttccccccatcataccacaagcaagtgagattggctaaggacgactcggaccgatg

SEQ ID NO: 4553 - DNA, 203 bp, synthetic construct
  source 1..203: mol_type = other DNA
ggcgcgccagtcctagatgcgtacgggtttgtagatccacgtacccgtgtcaagcgtctgttgtcgatgtggtcacccgatgcagtcggagccacatgcgatacagtgtgttttgacagtaccatcacacccgaggatatcatggtggagacagacatctactcagcagctaaactcagtgaccaacacgactcggaccgatg

SEQ ID NO: 4554 - DNA, 203 bp, synthetic construct
  source 1..203: mol_type = other DNA
ggcgcgccagtcctccgagctggcattcacaccattgcgaggcagttatacgctggaggaccgatgatcgcttatgatggccgagagatcggatatcgtaggtgtaggtcttccggcgtctatactacctcaagttccaacagtttgacctgctggctgaaggtaaatgctgcagccgaacaggctggcgactcggaccgatg

SEQ ID NO: 4555 - DNA, 203 bp, synthetic construct
  source 1..203: mol_type = other DNA
ggcgcgccagtcctcatgaagaaccctcgcttccttatttgcggcgatgattgcaccgtaatttggaaaagcgccggagcagatgcagacaaacaagcaatgcgtgtctttgctagctggatgaaggtgatgggtgcaccacaagattgtgtgcctcaacccaaatacagtttggaagaattaacatccgactcggaccgatg

SEQ ID NO: 4556 - DNA, 203 bp, synthetic construct
  source 1..203: mol_type = other DNA
ggcgcgccagtcctatgctcatcaaatgttacctctggaattaccaaaagtggcaagccttactactttcttacaagagatcctcgtatcccccttggcaggtgctctgccgagggtctgggatacaaccccagtgctgcgtggattgggtatctaatacatcactacccatgtttgtgggttagccgcgactcggaccgatg

SEQ ID NO: 4557 - DNA, 203 bp, synthetic construct
  source 1..203: mol_type = other DNA
ggcgcgccagtccttgtgttggctgtccatttcatggagcagatgctctttgaggacaaacttcccgagactgtgacctttgactggtatgggaaaaattatacggtgcctgtagaagatctgcccagcatcattgctggtgtgcacggtattgaggctttctcggtggtgcgctacaccaacgctgacgactcggaccgatg

SEQ ID NO: 4558 - DNA, 203 bp, synthetic construct
  source 1..203: mol_type = other DNA
ggcgcgccagtcctgcaggatttcactcaagacccgggcaagttcacagaaccagtaaaagatatcatgattaaatcactaccagctctcaactcccccacagtagaggagtgcggatacagtgacagggtgagatcaatcacattaggtaactccaccataacgactcaggaatgcgccaacgtggtcgactcggaccgatg

SEQ ID NO: 4559 - DNA, 203 bp, synthetic construct
  source 1..203: mol_type = other DNA
ggcgcgccagtcctagagaaggtcaactctatggaagcataccagatacctgtgagatccaatgaaggatctggaacgcaagtattcggctttccactgcaaccagggtactcgagtgtttttagtcggacgctcctaggagagatcttgaactattatacacattggtcaggcagcataaagcttaccgactcggaccgatg

SEQ ID NO: 4560 - DNA, 203 bp, synthetic construct
  source 1..203: mol_type = other DNA
ggcgcgccagtcctgcaaaactttttccagggcccagtggaagacgcgataacagccgctatagggagagttgcggataccgtgggtacagggccaaccaactcagaagctataccagcactcactgctgctgagacaggtcacacgtcacaagtagtgccgggtgacaccatgcagacacgccacgtcgactcggaccgatg

SEQ ID NO: 4561 - DNA, 203 bp, synthetic construct
  source 1..203: mol_type = other DNA
ggcgcgccagtcctgttcgacctggagctgacgtttgtcataacaagtactcaacagccctcaaccacacagaaccaagacgcacagatcctaacacaccaaattatgtacgtaccaccaggtggacctgtaccagataaagttgattcatacgtgtggcaaacatctacgaatcccagtgtgttttgcgactcggaccgatg

SEQ ID NO: 4562 - DNA, 203 bp, synthetic construct
  source 1..203: mol_type = other DNA
ggcgcgccagtcctgaccgagggaaacgccccgccgcgcatgtccataccgtttttgagcattggcaacgcctattcaaatttctatgacggatggtctgaattttccaggaacggagtttacggcatcaacacgctaaacaacatgggcacgctatatgcaagacatgtcaacgctggaagcacgggcgactcggaccgatg

SEQ ID NO: 4563 - DNA, 203 bp, synthetic construct
  source 1..203: mol_type = other DNA
ggcgcgccagtcctggtgtcacaatattacggaatccctatggctgaacgccaaaacaatagctggcttaagaaatttactgaaatgacgaatgcttgcaagggtatggaatggatagctgtcaaaattcagaaattcattgaatggctcaaagtaaaaattttgccagaggtcagggaaaaacacgacgactcggaccgatg

SEQ ID NO: 4564 - DNA, 203 bp, synthetic construct
  source 1..203: mol_type = other DNA
ggcgcgccagtcctattcctgaacagacttaaacaactccccttattagaaagtcagatcgccacaatcgagcagagcgcgccatcccaaagtgaccaggaacaattattttccaatgtccaatactttgcccactattgcagaaagtacgctcccctctacgcagctgaagcaaagagggtgttctccgactcggaccgatg

SEQ ID NO: 4565 - DNA, 203 bp, synthetic construct
  source 1..203: mol_type = other DNA
ggcgcgccagtcctcttagaactgacactactcaaattgaaccggaatgagaagttcagagacatcagaggcttcttagccaaggaggaagtggaggttaatgaggcagtgctagcaattaacaccagcaagtttcccaacatgtacattccagtaggacaggtcacagaatacggcttcttaaacctcgactcggaccgatg

SEQ ID NO: 4566 - DNA, 203 bp, synthetic construct
  source 1..203: mol_type = other DNA
ggcgcgccagtcctaggtggcacacccaccaagagaatgcttatgtacaacttccccacaagagcaggccagtgtggtggagtgctcatgtccaccggcaaggtactgggtatccatgttggtggaaatggccatcagggcttctcagcagcactcctcaaacactacttcaatgatgagcaaggtgacgactcggaccgatg

SEQ ID NO: 4567 - DNA, 203 bp, synthetic construct
  source 1..203: mol_type = other DNA
ggcgcgccagtccttggtaccagtattttcaactcaatgattaacaatatcataattaggacactaatgctaaaagtgtacaaagggattgacttggaccaattcaggatgatcgcatatggtgatgatgtgatcgcatcgtacccatggcctatagatgcatctttactcgctgaagctggtaagggcgactcggaccgatg

SEQ ID NO: 4568 - DNA, 203 bp, synthetic construct
  source 1..203: mol_type = other DNA
ggcgcgccagtcctaaagaacacccaagatcacgtgcgctcactgtgtctattagcttggcataacggggagcacgaatatgaggagttcatccgtaaaattagaagcgtcccagtcggacgttgtttgaccctccccgcgttttcaactctacgcaggaagtggttggactccttttagattagagacgactcggaccgatg

SEQ ID NO: 4569 - DNA, 203 bp, synthetic construct
  source 1..203: mol_type = other DNA
ggcgcgccagtcctagcgtcccagtcggacgttgtttgaccctccccgcgttttcaactctacgcaggaagtggttggactccttttagattagagacaatttgaaataatttagattggcttaaccctactgtgctaaccgaaccagataacggtacagtaggggtaaattctccgcattcggtgcgcgactcggaccgatg

SEQ ID NO: 4570 - DNA, 203 bp, synthetic construct
  source 1..203: mol_type = other DNA
ggcgcgccagtccttaagcagagccttaagcaggacccagacaagtttgcaaatcctgtcaaagacatcttcactgaaatggcagcgccattaaaatctccatctgccgaggcatgtggttacagcgatcgggtggcacaattaactattggcaattctaccatcactacgcaagaagcagcaaacatcgactcggaccgatg

SEQ ID NO: 4571 - DNA, 203 bp, synthetic construct
  source 1..203: mol_type = other DNA
ggcgcgccagtcctcatagttggctatggtgagtggccttcctactgttcggactctgatgctactgcagtggacaaaccaacgcgcccagatgtttcggtgaataggttttacacattggacacaaaattgtgggagaaatcatccaaggggtggtactggaaattcccggatgtgttaactgaaaccgactcggaccgatg

SEQ ID NO: 4572 - DNA, 203 bp, synthetic construct
  source 1..203: mol_type = other DNA
ggcgcgccagtccttatggctaccggcaagatgctcatagcatacacaccaccaggaggccccttacccaaggaccgggcgaccgccatgttgggcacggacgtcatctgggactttgggctgcaatcgtctgtcactcttgtaataccatggatcagcaacactcattacagagcgcacgctcgagacgactcggaccgatg

SEQ ID NO: 4573 - DNA, 203 bp, synthetic construct
  source 1..203: mol_type = other DNA
ggcgcgccagtccttggtgtgtttgactactacactacaggtttggttagcatatggtaccagacgaattatgtggttccaattggagcacccaatacagcctatataatagcattggcggcagcccagaagaacttcaccatgaagttgtgtaaggatgctagtgatatcctacagacaggcactatcgactcggaccgatg

SEQ ID NO: 4574 - DNA, 203 bp, synthetic construct
  source 1..203: mol_type = other DNA
ggcgcgccagtcctccagggagatagggtggcagatgtgattgagagttctataggggacagcgtgagcagagccctcacccgagctctaccggcacctaccggccaagacacacaggtaagcagccatcgattagatactggtaaaggtccagcactccaagccgctgaaattggagcatcatcaaacgactcggaccgatg

SEQ ID NO: 4575 - DNA, 203 bp, synthetic construct
  source 1..203: mol_type = other DNA
ggcgcgccagtccttgctagtgatgagagtatgattgagacacggtgtgttcttaattcacatagcacagctgagaccactcttgatagcttcttcagcagagcaggattagttggagagatagacctccctcttgaaggcacaaccaacccgaatgggtacgcaaactgggacatagacataacaggcgactcggaccgatg

SEQ ID NO: 4576 - DNA, 203 bp, synthetic construct
  source 1..203: mol_type = other DNA
ggcgcgccagtccttacgttctcagtgcggactgtaggcacctcgaagtccaagtgcccattggtgatcaggatttacatgaggatgaagcacgtcagggcgtggatacctcgcccaatgcgtaaccagaactatctattcaaagccaacccaaattatgctggtaattctattaaaccaactggtgccgactcggaccgatg

SEQ ID NO: 4577 - DNA, 203 bp, synthetic construct
  source 1..203: mol_type = other DNA
ggcgcgccagtcctcagtcgcacagcaattaccactctcgggaaatttggacagcagtccggagctatctacgtgggcaactttagagtggttaaccgccatcttgctactcataatgactgggcaaaccttgtttgggaagacagctcccgcgacttgctcgtatcatctaccactgctcaaggttgcgactcggaccgatg

SEQ ID NO: 4578 - DNA, 203 bp, synthetic construct
  source 1..203: mol_type = other DNA
ggcgcgccagtcctggattgcggtggcattcttagatgccaacatggcgtcgtagggatagtttccaccgggggaaatggcctggtggggttcgccgatgtgagggatcttctgtggttggatgatgaagccatggagcagggcgtgtctgattacattaaagggcttggagatgcttttggcatgggcgactcggaccgatg

SEQ ID NO: 4579 - DNA, 203 bp, synthetic construct
  source 1..203: mol_type = other DNA
ggcgcgccagtcctgtgccacgggagcccttgggcctgggttaagtcgaagacagcatcaattttgggcataccgatggctcagaagcagaatgcctcttggttaaagaaattcaacgatgcggcgaatgccgcgaaggggcttgagtggatctccaacaaaatcagtaaatttatcgattgggtcaacgactcggaccgatg

SEQ ID NO: 4580 - DNA, 203 bp, synthetic construct
  source 1..203: mol_type = other DNA
ggcgcgccagtccttatagatcttcacacaagtgcaggatatccatacagtgcactaggcatcaagaaaaaggacattttggatccaacaactcgcgatgtcagcaagatgaaattctacatggacaagtatgggttggatctaccgtactctacttatgttaaagatgaacttagggccatcgacaacgactcggaccgatg

SEQ ID NO: 4581 - DNA, 203 bp, synthetic construct
  source 1..203: mol_type = other DNA
ggcgcgccagtccttctggagttggcaagaacaggcaaggagtatggtctaactatgacccctgccgacaagtcaccctgctttaatgaggttacgtgggagaatgccactttcttgaagagaggattcttgcctgattatcaattcccgtttctcatccaccctacgatgccaatgagggagattcacgactcggaccgatg

SEQ ID NO: 4582 - DNA, 203 bp, synthetic construct
  source 1..203: mol_type = other DNA
ggcgcgccagtcctgtttccccggtgaggccgcatagactgttcccacggttgaaagtggccgatccgttatccgctcatgtacttcgagaagcctagtatcgctctggaatcttcgacgcgttgcgctcagcactcaaccccggagtgtagcttgggccgatgagtctggacagtccccactggcgacgactcggaccgatg

SEQ ID NO: 4583 - DNA, 203 bp, synthetic construct
  source 1..203: mol_type = other DNA
ggcgcgccagtcctgcaagattactcacaggatccatcaaaattcaccgagccactaaaggacgtgctcataaaaacagctccagcactcaattcaccaaatgtggaagcgtgtgggtatagtgatagagtgttgcaactcactttaggcaattccactattactacacaggaggcagcaaattcagtcgactcggaccgatg

SEQ ID NO: 4584 - DNA, 203 bp, synthetic construct
  source 1..203: mol_type = other DNA
ggcgcgccagtcctagtggcttacggacgttggcctgagtttattagagatgacgaagcaaacccggtggaccaaccaactgaaccagatgtggctacatgcagattctacacactagacactgtaatgtggggtaaggagtcgaaaggctggtggtggaagttacctgacgcactgagagacatgggcgactcggaccgatg

SEQ ID NO: 4585 - DNA, 203 bp, synthetic construct
  source 1..203: mol_type = other DNA
ggcgcgccagtcctcatgattcctctcaatttggagagcaccaagagaaacacaatggacatgtacagagttactctgagcgacagtgccgatctatcgcaaccaattttgtgcttgtcactatccccagcatctgatccgcgcttgtcacacaccatgcttggggaagtactgaactattatactcacgactcggaccgatg

SEQ ID NO: 4586 - DNA, 203 bp, synthetic construct
  source 1..203: mol_type = other DNA
ggcgcgccagtcctgcgagacaccactcacatttcacaatctgcgcttccacagggtattgaagatttgatttctgaagttgcacagggcgccctaactttgtcactcccgaagcaacaggatagcttacctgatactaaggccagtggcccggcgcattccaaggaggtacctgcactcactgcagtcgactcggaccgatg

SEQ ID NO: 4587 - DNA, 203 bp, synthetic construct
  source 1..203: mol_type = other DNA
ggcgcgccagtcctgaatagagacctcttggttgttgaatcaaaagctcaaggtaccgactcaatagcaaggtgcaattgcaatgcaggggtgtactattgtgagtccagaaggaaatactaccctgtgtcgtttgtgggacccaccttccaatacatggaggctaatgactactacccagctagatacgactcggaccgatg

SEQ ID NO: 4588 - DNA, 203 bp, synthetic construct
  source 1..203: mol_type = other DNA
ggcgcgccagtccttgtacgctggttgtccattcaatccaagagattcgctccattgtacgcacttgaggccaagagaatacaaaagttggaacacaccattaataattacatacagttcaagagcaaacaccgtattgagccagtatgtttgttagtgcatgggagcccaggtacaggaaaatcagtcgactcggaccgatg

SEQ ID NO: 4589 - DNA, 203 bp, synthetic construct
  source 1..203: mol_type = other DNA
ggcgcgccagtccttgcgactaacctaattgctagagccatagctgagaaagagaacacctccacctactcgctaccaccggacccgtctcactttgatggatacaaacaacaaggtgtggttatcatggacgacctaaaccaaaacccggatggggcagatatgaagctcttttgtcaaatggtgtccgactcggaccgatg

SEQ ID NO: 4590 - DNA, 203 bp, synthetic construct
  source 1..203: mol_type = other DNA
ggcgcgccagtcctcaatgtgcccaccattagagcagcaaaagtgcaagggcctgggtttgactatgcagtggctatggctaaaagaaacattgttacagcaactactagcaaaggggagttcacaatgctaggagtccacgacaacgtggccattttaccaactcatgcctcacctggtgagagtatcgactcggaccgatg

SEQ ID NO: 4591 - DNA, 203 bp, synthetic construct
  source 1..203: mol_type = other DNA
ggcgcgccagtccttgtaattgatggcaaagaggttgaaatcctagacgctaaagccctcgaagatcaggcaggcactaatctggaaatcaccataataaccctcaaaagaaatgaaaagttcagagatatcagacaacacatacccactcaaatcaccgagacgaatgatggagttctgattgtgaacgactcggaccgatg

SEQ ID NO: 4592 - DNA, 203 bp, synthetic construct
  source 1..203: mol_type = other DNA
ggcgcgccagtccttgggaatggttcacatgggtttgcagcggccctgaagcggtcatacttcactcagagccaaggtgaaatccagtggatgagaccatcaaaggaggcagggtatccaattataaacgccccaaccaagaccaagctcgagcccagcgctttccactatgtgtttgaaggagtaaacgactcggaccgatg

SEQ ID NO: 4593 - DNA, 203 bp, synthetic construct
  source 1..203: mol_type = other DNA
ggcgcgccagtcctggaaccagcagtcctcacaaagaatgatcccagacttaaaacagactttgaagaagcaatcttctctaagtatgtagggaacaagatcactgaggtggatgagtacatgaaagaggcagtggaccattatgctggacaacttatgtcgctggatatcagcacagagcaaatgtgcgactcggaccgatg

SEQ ID NO: 4594 - DNA, 203 bp, synthetic construct
  source 1..203: mol_type = other DNA
ggcgcgccagtcctagtgacatatgtcaaggacgagctgaggtccaaaacaaaagtggaacagggaaaatccagactgattgaagcttccagtctaaatgactcagtggccatgagaatggcatttggaaacctttatgcagcattccacaggaatccaggggtcgtcactggtagtgcagttggatgcgactcggaccgatg

SEQ ID NO: 4595 - DNA, 203 bp, synthetic construct
  source 1..203: mol_type = other DNA
ggcgcgccagtcctcgatccagacctattctggagcaagatcccagtgttgatggaagaaaagctatttgcctttgattacacaggatacgacgcatcacttagcccagcttggtttgaggcactcaagatggtgttagagaaaattggttttggagatagagtggattacatagactaccttaaccacgactcggaccgatg

SEQ ID NO: 4596 - DNA, 203 bp, synthetic construct
  source 1..203: mol_type = other DNA
ggcgcgccagtcctttcacaccacttgtacaaaaacaagatatattgtgttaagggcggcatgccatctggctgctccggcacttcaatttttaattcaatgattaacaatttgatcattaggacgcttttactgaaaacctacaagggcatagatttggaccacttaaaaatgattgcctatggtgacgactcggaccgatg

SEQ ID NO: 4597 - DNA, 203 bp, synthetic construct
  source 1..203: mol_type = other DNA
ggcgcgccagtcctgcggcgggccgtcaagcccgtgcgctgtatagcgccaggtaaccggacagcggcgtgctggattttcccggtgccattgctctggatggtgtcaccaagctgacaaatgcggagtgaacctcacaaagcgacacgcctgtggtagcgctgcccaaaagggagcggaactccccgcgactcggaccgatg

SEQ ID NO: 4598 - DNA, 203 bp, synthetic construct
  source 1..203: mol_type = other DNA
ggcgcgccagtcctccgaggcggtcctctctggccaaaagcccagcgttgatagcgccttttgggatgcaggaaccccacctgccaggtgtgaagtggagtgagcggatctccaatttggtctgttctgaactacaccatttactgctgtgaagaatgccctggaggcaagctggttacagccctgaccgactcggaccgatg

SEQ ID NO: 4599 - DNA, 203 bp, synthetic construct
  source 1..203: mol_type = other DNA
ggcgcgccagtcctcaggccctgcccgtgactctcgaccggcgcagggtcaaaaattgtctaagcagcagcaggaacgcgggagcgtttcttttccttttgtactgacatgatggcggcgtctaaggtgtatagagtttgcgagcagactctgctggcaggtgccgttcgcatgatggacaaattcttcgactcggaccgatg

SEQ ID NO: 4600 - DNA, 203 bp, synthetic construct
  source 1..203: mol_type = other DNA
ggcgcgccagtccttgtttcggcaaaaccgggacatgcagtattctaccttctcacaagcgagggttggatctgtgttgatgacaagaaaatatacccagaaacacccaaaacagaggatgtacttgtttttgcgccctatgactttgagtcactgggcaaggacccaccaaagctacaccagagatacgactcggaccgatg

SEQ ID NO: 4601 - DNA, 203 bp, synthetic construct
  source 1..203: mol_type = other DNA
ggcgcgccagtcctactcaagaagatgggcagttttcatgaggttgtcaaagcccaccacctggtcaagaacggctgggatgtggttgtgcaggtgaatccctcatttgctcactccgggccgctgtgtgtagcagcagtgccggagtacgaacacacacatgagaaagcactcaagtggtctgagctcgactcggaccgatg

SEQ ID NO: 4602 - DNA, 203 bp, synthetic construct
  source 1..203: mol_type = other DNA
ggcgcgccagtccttgaggaaccagcttacacataccaacaactttcagtttttccccaccagttgctaaatttgaggacaaattcatcagtgcatttggtgatgccctacattgggccaggccaaccaacaaatctgactttgcacaacccgtggaccattgttattttaattttgtctgaattgaccgactcggaccgatg

SEQ ID NO: 4603 - DNA, 203 bp, synthetic construct
  source 1..203: mol_type = other DNA
ggcgcgccagtcctcccaccgcgccaagttcctggccggtttacaaatttcattgatgtggcaaaacagacatattcattttgttccatttctggaaaaccttattttgaggttaccaacacctctggggacgagccactgtttcagatggatgtgtcgctcagtgcggcagagctacatggcacttacgactcggaccgatg

SEQ ID NO: 4604 - DNA, 203 bp, synthetic construct
  source 1..203: mol_type = other DNA
ggcgcgccagtccttgttggcttgaactcagctttttcttttaatgtaccttatccctcccctgctgacttcatggccgtttattctgcggaacggacggttgtgaatgtctctggatggcttcaagtttatgcactaacagctctaacttcaactgacattgccgtgaacagtaaaggccgtgtgctcgactcggaccgatg

SEQ ID NO: 4605 - DNA, 203 bp, synthetic construct
  source 1..203: mol_type = other DNA
ggcgcgccagtcctggttgctgtttccgccggcccagacttctcccttcgtcacccggcggacctgcccgacaagcaggttaccaatgtgggagaggatggtgaacccggtgagacagagcctcgtcatgctttgtcacccgtggacatgcacgtgcacacagatgtcagtttcttgcttgaccggttcgactcggaccgatg

SEQ ID NO: 4606 - DNA, 203 bp, synthetic construct
  source 1..203: mol_type = other DNA
ggcgcgccagtcctctttgatgttgagacacttgagctttcaaatttgacaggttctcctgccacacatgttctggatccgtttggctcgactgcccaactggcttgggcacgtctgctaaacacttgcacctacttcttttctgatttggaattgtcaatccagtttaaatttaccaccactccgtccgactcggaccgatg

SEQ ID NO: 4607 - DNA, 203 bp, synthetic construct
  source 1..203: mol_type = other DNA
ggcgcgccagtcctctctgttggagagggctttgtgtgggtgaagtggctccctgttggagcaccaaccaagaccacagatgcttggcagttagaaggaggtggaaattcagttagaattcaaaaattggccgttgcagggatgtgccccactgttgtgttcaagattgcaggctcccgttcacaagccgactcggaccgatg

SEQ ID NO: 4608 - DNA, 203 bp, synthetic construct
  source 1..203: mol_type = other DNA
ggcgcgccagtcctggtggttatgttgattgctgatttcggattggaggtctttgacactgggtttttcttttcctactttcaagagaagttgcagccttatatgaaaactattcctggtaagatttctgatttggtcactgatgcggctacggctgccgcccaaattccaaagggagtgtattctttcgactcggaccgatg

SEQ ID NO: 4609 - DNA, 203 bp, synthetic construct
  source 1..203: mol_type = other DNA
ggcgcgccagtcctgctctattcagaattggaaaaatatcccttgtacaagttaaaattgaaggaacctgatactcaagaggaagcgcgccagtggtttaaagacatgcagcagcgtgctctcgctgtgaaggacaaaggtctcttttccctcctgcaaattccattagttaacttgccccagagccgcgactcggaccgatg

SEQ ID NO: 4610 - DNA, 203 bp, synthetic construct
  source 1..203: mol_type = other DNA
ggcgcgccagtccttgttcagccaattgagctttaccttgacaatgaattggttactgactgctctgccttgggtgtttatgacaattcatatttggtgccccttcatttgtttgaatttgattttgataccattgtgcttggtggacgtcattacaagaaagctgagtgtgagaaggtagagtttgacgactcggaccgatg

SEQ ID NO: 4611 - DNA, 203 bp, synthetic construct
  source 1..203: mol_type = other DNA
ggcgcgccagtccttcaatcatttttgaaagatgagatccgcccacttgagaaagttagggctggaaagacccgcctgattgacgtgccgccgatgccccatgtggtggttggtaggcagctcttgggccggtttgtggcaaaatttcatgaagcaaatggatttgacattggctcagccattggatgcgactcggaccgatg

SEQ ID NO: 4612 - DNA, 203 bp, synthetic construct
  source 1..203: mol_type = other DNA
ggcgcgccagtcctcatttgctatggggacgactgcctcattgcttctgattttgaaattgatttccaacaactggtgcctgtcttttctagttttggacaggtaataactacagctgacaagactgatttttttaaactgacaacgctttcggaggtgaccttccttaagcgcgcttttgttctgaccgactcggaccgatg

SEQ ID NO: 4613 - DNA, 203 bp, synthetic construct
  source 1..203: mol_type = other DNA
ggcgcgccagtcctggccttttacaagccagtgatggatgtgaagacccttgaagcaatcttaagctttgttcgcccaggcacacaggctgaaaagctcctgtccgtggcgcagttggcaggccactgcgaaccggagcagtatgagcgcctgtttgagccctttgctgggatgtatttcgtccctaccgactcggaccgatg

SEQ ID NO: 4614 - DNA, 203 bp, synthetic construct
  source 1..203: mol_type = other DNA
ggcgcgccagtcctagtggatgcattgagtggattgactgtcagggctgtctttaggcttaattccagacctctctgtgcttagggcaaacatcatttggccttaaatgggattctgtgagaggggatccctccattgacagctggactgttctttggggccttatgtggtgtttgcctctgaggtaccgactcggaccgatg

SEQ ID NO: 4615 - DNA, 203 bp, synthetic construct
  source 1..203: mol_type = other DNA
ggcgcgccagtccttcaggggcatttaggtttttcctcattcttaaataataatgaacatgtctagacaaggtattttccagactgttgggagtggtcttgaccacatcctgtctttggcagacattgaggaagagcaaatgattcaatcagttgataggactgcagtgactggtgcttcttattttacgactcggaccgatg

SEQ ID NO: 4616 - DNA, 203 bp, synthetic construct
  source 1..203: mol_type = other DNA
ggcgcgccagtcctagttgtatagagggcctttagatctgacaattattattacaggagcaactgatgtagatggcatggcctggttcactccagtaggtcttgccgttgatactccttgggtagagaaggagtcagctttgtctattgactacaaaactgctcttggagctgtcagatttaacacaacgactcggaccgatg

SEQ ID NO: 4617 - DNA, 203 bp, synthetic construct
  source 1..203: mol_type = other DNA
ggcgcgccagtccttcacagaacaatcagagttttattttcccagagctccattgaactcaaatgccatgttatccactgaatcaatgatgagcagaattgcagctggagacttggagtcatcagtggatgatcctagatcagaggaagataaaagatttgagagtcatatagaatgcaggaagccatcgactcggaccgatg

SEQ ID NO: 4618 - DNA, 203 bp, synthetic construct
  source 1..203: mol_type = other DNA
ggcgcgccagtcctccaactggttaagagatatttgttctgggatcaccatttttaaaaacttcaaggatgcaatttattggctttatacaaaattaaaggacttttatgaagtgaattatggcaagaagaaggacattttaaatattcttaaagataaccaacaaaaaatagagaaagccattgaggcgactcggaccgatg

SEQ ID NO: 4619 - DNA, 203 bp, synthetic construct
  source 1..203: mol_type = other DNA
ggcgcgccagtcctttcctaagtttagagatattactcagcattttattaagaaaggggatgtgcctagagctttgaatcgcctggcaacattagtgacaactgtaaatggaacccctatgttaatttctgagggcccactaaagatggaagagaaagctacttatgttcataagaaaaatgatggtacgactcggaccgatg

SEQ ID NO: 4620 - DNA, 203 bp, synthetic construct
  source 1..203: mol_type = other DNA
ggcgcgccagtcctcaacagttgatttaactgtggatcaggcatggagaggaaaaggcgaaggtcttcctggaatgtgtggtggggccttggtttcatcgaatcaatctatacagaatgcaatcttgggcatccatgttgctggaggaaattcaattcttgttgcaaaattggttactcaagaaatgtcgactcggaccgatg

SEQ ID NO: 4621 - DNA, 203 bp, synthetic construct
  source 1..203: mol_type = other DNA
ggcgcgccagtccttccaaaatattgataagaaaattgaaagtcagagaattatgaaagtggagtttactcagtgttcaatgaatgtggtctccaaaacgctttttagaaagagtcccatttatcatcacattgataaaaccatgattaattttcctgcagctatgcccttttctaaagctgaaattgcgactcggaccgatg

SEQ ID NO: 4622 - DNA, 203 bp, synthetic construct
  source 1..203: mol_type = other DNA
ggcgcgccagtcctatccaatggctgtgatgttatctaagtattcattacctattgtagaagaaccagaggattataaagaggcttcaattttttatcaaaataaaatagtgggtaagactcagttagttgatgattttttagatcttgatatggccattacaggggccccaggaattgatgctatcacgactcggaccgatg

SEQ ID NO: 4623 - DNA, 203 bp, synthetic construct
  source 1..203: mol_type = other DNA
ggcgcgccagtcctctgatagacagtgggatgaattatttaaaacaatgataagattcggagatgttggtcttgatttagatttctctgcttttgatgctagtcttagtccatttatgattagagaagcaggtagaatcatgagtgaactatctggaactccatcccattttggcacagctcttatcacgactcggaccgatg

SEQ ID NO: 4624 - DNA, 203 bp, synthetic construct
  source 1..203: mol_type = other DNA
ggcgcgccagtcctatactatcatttattccaagcatttgctgtataactgttgttaccatgtctgtggttcaatgccctctgggtctccttgtacagctttgctaaattcaattattaataatgtcaatttgtattatgtgttttccaagatatttggaaagtctccagttttcttttgtcaggcttcgactcggaccgatg

SEQ ID NO: 4625 - DNA, 203 bp, synthetic construct
  source 1..203: mol_type = other DNA
ggcgcgccagtcctgttgagccccttgttgaagtgtttccctccatcgcgacgtggttggagatctaagtcaaccgactccgacgaaactaccatcatgcctccccgattatgtgatgctttctgccctgctgggtggagcaccctcgggttgagaaaaccttcttcctttttccttggactcgggtccgactcggaccgatg

SEQ ID NO: 4626 - DNA, 203 bp, synthetic construct
  source 1..203: mol_type = other DNA
ggcgcgccagtcctccccggtctaagccgctcggaatatgacagggttattttcacctcttcttttctactccacagtgttctatactgtggaagggtatgtgttgccccttccttcttggagaacgtgcgcggcggtctttccgtctctcgacaagcgcgcgtgcaacatacagagtaacgcgaagacgactcggaccgatg

SEQ ID NO: 4627 - DNA, 203 bp, synthetic construct
  source 1..203: mol_type = other DNA
ggcgcgccagtcctaagcagttctcggtctagctctagtgcccacaagaaaacagctgtagcgaccacacaaaggcagcggaacccccctcctggtaacaggagcctctgcggccaaaagccacgtggataagatccacctttgtgtgcggtgcaaccccagcaccctggtttcttggtgacactctacgactcggaccgatg

SEQ ID NO: 4628 - DNA, 203 bp, synthetic construct
  source 1..203: mol_type = other DNA
ggcgcgccagtcctacacgagcaatcaatctcaaacaatggactggactgacgtaccgctcatacgcgatattgtcatggaaccccagggaaactcctcgtcatctgacaagagtaactcccagtcctcaggaaatgaaggggttattattaacaacttctattccaatcaataccaaaactcaattgcgactcggaccgatg

SEQ ID NO: 4629 - DNA, 203 bp, synthetic construct
  source 1..203: mol_type = other DNA
ggcgcgccagtccttccttgaattgtgcaagctccccactttccttggtaaccccaacaccaacaacaagcgttacccctatttctctgccaccaattctgtaccagccacttccatggttgattaccaagttgctctctcatgctcttgtatggctaattcaatgcttgctgctgttgctcgtaattcgactcggaccgatg

SEQ ID NO: 4630 - DNA, 203 bp, synthetic construct
  source 1..203: mol_type = other DNA
ggcgcgccagtccttcacgctcaggatgccgatttcacccaccaagtgggttccacaaggagttgacaatgctgagaaaggtaaagtctccaacgatgatgcttcggttgactttgtcgccgaaccagtcaagctgcccgagaaccaaacccgggtggccttcttctatgacagagctgtccctatagcgactcggaccgatg

SEQ ID NO: 4631 - DNA, 203 bp, synthetic construct
  source 1..203: mol_type = other DNA
ggcgcgccagtcctgtatgttgaggcccggccaaaatatggaaaccacttttaactaccaagaaaatgattaccgcctcaattgtcttttgctaacccctctcccttccttttgtcctgacagttcttccgggccccaaaaaacaaaggctcccgttcaatggcgatgggtgcgatctggcggcgtcacgactcggaccgatg

SEQ ID NO: 4632 - DNA, 203 bp, synthetic construct
  source 1..203: mol_type = other DNA
ggcgcgccagtcctcccctaacgcagacttcgggcgtctctggatccagggcaatacctctgcctccgtccggatcaggtacaagaaaatgaaggtcttctgcccccgcccgaccctcttcttcccctggcctacgcccaccaccaccaagatcaatgctgacaacccagtccccattcttgaactcgcgactcggaccgatg

SEQ ID NO: 4633 - DNA, 203 bp, synthetic construct
  source 1..203: mol_type = other DNA
ggcgcgccagtcctagaatcccgctgctctctaccgcattgatctcttcatcaccttcactgatgagttcatcacctttgattacaaggttcacggacgtcctgtgcttaccttccggatcccaggcttcggcctgaccccggcaggtaggatgctcgtgtgcatgggcgaacaacccgcacatggtccgactcggaccgatg

SEQ ID NO: 4634 - DNA, 203 bp, synthetic construct
  source 1..203: mol_type = other DNA
ggcgcgccagtcctcgttcacctcctctagatccctctatcatgtcatttttactgctacttgctcttcctttagctttagtatctacaaggggcggtaccgctcctggaaaaagcccatccatgacgagcttgtggatcgtggttacaccactttcggcgagttcttcaaggctgtgcgcggatacccgactcggaccgatg

SEQ ID NO: 4635 - DNA, 203 bp, synthetic construct
  source 1..203: mol_type = other DNA
ggcgcgccagtcctatgctgactattacagacagagactcatacacgatgtggaaacaaatccaggccctgtgcagtcggtttttcagccacaaggtgcggtgctaactaaatccctagcaccccaggcaggaattcaaaacctccttctacgcctcctcggcatagacggtgactgttcagaagttacgactcggaccgatg

SEQ ID NO: 4636 - DNA, 203 bp, synthetic construct
  source 1..203: mol_type = other DNA
ggcgcgccagtccttgactggtgtggacctcctcaccaacgattctgtttttgattggctcaaacaaaaattgtcttccttctttcgcacccctcccccagcttgccccaatgttatgcagcctcagggacctctacgcgaggccaatgaaggcttcacctttgctaagaacattgagtgggctatgacgactcggaccgatg

SEQ ID NO: 4637 - DNA, 203 bp, synthetic construct
  source 1..203: mol_type = other DNA
ggcgcgccagtcctcgaatatggctcacctggaaagaaaaggcactccttttacctctagcttcattgttgctacaacaaatttgcccaaattccgccctgttacggttgcccactaccccgctgttgataggcgaatcacctttgattttactgttactgctggaccccactgcaaaacgcctgctgcgactcggaccgatg

SEQ ID NO: 4638 - DNA, 203 bp, synthetic construct
  source 1..203: mol_type = other DNA
ggcgcgccagtcctcccgcaagactgaaaatgtgaagaaaatgaatagcctggttgctcagtctccaccagactgggagcactttgagaacatcctcacctgtctccgtcagaacaacgccgctctccaggaccaactcgatgagttacaggaagcgtttgctcaagcgcgcgagcgctctgactttccgactcggaccgatg

SEQ ID NO: 4639 - DNA, 203 bp, synthetic construct
  source 1..203: mol_type = other DNA
ggcgcgccagtccttggttaaccgccacgttgcagagacagattggaccgctttcaaactcaaggatgtgagacacgagcgccacactgtcgcccttcgctccgtcaatagatcaggagccaagactgacctcacattcataaaagtcacaaagggacctctcttcaaagacaacgttaacaaattttcgactcggaccgatg

SEQ ID NO: 4640 - DNA, 203 bp, synthetic construct
  source 1..203: mol_type = other DNA
ggcgcgccagtcctgctccaacaaggacgacttcccagcaaggaacgacaccgtcactggaatcatgaacaccggcctggctttcgtgtactctggcaacttcttgattggcaaccaacctgttaacaccacaactggagcctgtttcaaccactgcctccactaccgggctcaaacccgacgtggttcgactcggaccgatg

SEQ ID NO: 4641 - DNA, 203 bp, synthetic construct
  source 1..203: mol_type = other DNA
ggcgcgccagtcctcaggatctgttgtacatgtccctagaaaaactaaattgaggaggacagtcgcccacgacgtcttccaacccaaattcgaacctgcagttctgtcccgttatgaccctgggaccgataaagatgtggatgttgtagccttctccaaacacactaccaacatggaaagcttgcccccgactcggaccgatg

SEQ ID NO: 4642 - DNA, 203 bp, synthetic construct
  source 1..203: mol_type = other DNA
ggcgcgccagtcctatcttctgaatttcatcactgctaaaatgacccctcaattggactacgctcattccaaattggtgatcggtgtttatgatgatgttgtttaccaatcatttttgaaagatgaaattcggcctatagaaaagatccatgaagcgaaaacccggatcgttgacgtacccccgtttgcgactcggaccgatg

SEQ ID NO: 4643 - DNA, 203 bp, synthetic construct
  source 1..203: mol_type = other DNA
ggcgcgccagtcctatgcttcccactccactgcgatgtttgaatgcttaattaacaatttctttacagagcaaaatggatttgacagacgcatcgccgagtatcttagatctctggctgtgtcacgacatgcctatgaggaccgccgtgtccttatacgtgggggcctgccctcgggctgtgctgccacgactcggaccgatg

SEQ ID NO: 4644 - DNA, 203 bp, synthetic construct
  source 1..203: mol_type = other DNA
ggcgcgccagtcctgacgtcagcctatccccaaggcacgtcggcccgagggcaggacctgggctcagcccgggtacccttggcccctctatggcaatgagggttgcgggtgggcgggatggctcctgtctccccgtggctctcggcctagctggggccccacagacccccggcgtaggtcgcgcaattcgactcggaccgatg

SEQ ID NO: 4645 - DNA, 203 bp, synthetic construct
  source 1..203: mol_type = other DNA
ggcgcgccagtccttccttctggccctgctctcttgcctgactgtgcccgcttcagcctaccaagtgcgcaattcctcggggctttaccatgtcaccaatgattgccctaactcgagtgttgtgtacgaggcggccgatgccatcctgcacactccggggtgtgtcccttgcgttcgcgagggtaacgcgactcggaccgatg

SEQ ID NO: 4646 - DNA, 203 bp, synthetic construct
  source 1..203: mol_type = other DNA
ggcgcgccagtcctcctcgaggtgttgggtggcggtgacccccacggtggccaccagggacggcaaactccccacaacgcagcttcgacgtcatatcgatctgcttgtcgggagcgccaccctctgctcggccctctacgtgggggacctgtgcgggtctgtctttcttgttggtcaactgtttacctcgactcggaccgatg

SEQ ID NO: 4647 - DNA, 203 bp, synthetic construct
  source 1..203: mol_type = other DNA
ggcgcgccagtcctcccactggggagtcctggcgggcataaagtatttctccatggtggggaactgggcgaaggtcctggtagtgctgctgctatttgccggcgtcgacgcggaaacccacgtcaccgggggaaatgccggccgcaccacggctgggcttgttggtctccttacaccaggcgccaagccgactcggaccgatg

SEQ ID NO: 4648 - DNA, 203 bp, synthetic construct
  source 1..203: mol_type = other DNA
ggcgcgccagtcctagaacatccaactgatcaacaccaacggcagttggcacatcaatagcacggccttgaactgcaatgaaagccttaacaccggctggttagcagggctcttctatcagcacaaattcaactcttcaggctgtcctgagaggttggccagctgccgacgccttaccgattttgccccgactcggaccgatg

SEQ ID NO: 4649 - DNA, 203 bp, synthetic construct
  source 1..203: mol_type = other DNA
ggcgcgccagtcctctacctacagctggggtgcaaatgatacggatgtcttcgtccttaacaacaccaggccaccgctgggcaattggttcggttgtacctggatgaactcaactggattcaccaaagtgtgcggagcgcccccttgtgtcatcggaggggtgggcaacaacaccttgctctgccccacgactcggaccgatg

SEQ ID NO: 4650 - DNA, 203 bp, synthetic construct
  source 1..203: mol_type = other DNA
ggcgcgccagtcctaagcggcctgcaactggacgcggggcgaacgctgtgatctggaagacagggacaggtccgagctcagcccgttgctgctgtccaccacacagtggcaggtccttccgtgttctttcacgaccctgccagccttgtccaccggcctcatccacctccaccagaacattgtggacgcgactcggaccgatg

SEQ ID NO: 4651 - DNA, 203 bp, synthetic construct
  source 1..203: mol_type = other DNA
ggcgcgccagtccttgcagtacttgtacggggtagggtcaagcatcgcgtcctgggccattaagtgggagtacgtcgttctcctgttccttctgcttgcagacgcgcgcgtctgttcctgcttgtggatgatgttactcatatcccaagcggaggcggctttggagaacctcgtaatactcaatgcagcgactcggaccgatg

SEQ ID NO: 4652 - DNA, 203 bp, synthetic construct
  source 1..203: mol_type = other DNA
ggcgcgccagtcctcatccctggccgggacgcatggtcttgtgtccttcctcgtgttcttctgctttgcgtggtatctgaagggtaggtgggtgcccggagcggtctacgccctctacgggatgtggcctctcctcctgctcctgctggcgttgcctcagcgggcatacgcactggacacggaggtggcgactcggaccgatg

SEQ ID NO: 4653 - DNA, 203 bp, synthetic construct
  source 1..203: mol_type = other DNA
ggcgcgccagtccttcatcttactcacgtgtgtagtacacccggccctggtatttgacatcaccaaactactcctggccatcttcggacccctttggattcttcaagccagtttgcttaaagtcccctacttcgtgcgcgttcaaggccttctccggatctgcgcgctagcgcggaagatagccggagcgactcggaccgatg

SEQ ID NO: 4654 - DNA, 203 bp, synthetic construct
  source 1..203: mol_type = other DNA
ggcgcgccagtcctgtcattacgtgcaaatggccatcatcaagttaggggcgcttactggcacctgtgtgtataaccatctcgctcctcttcgagactgggcgcacaacggcctgcgagatctggccgtggctgtggaaccagtcgtcttctcccgaatggagaccaagctcatcacgtggggggcagcgactcggaccgatg

SEQ ID NO: 4655 - DNA, 203 bp, synthetic construct
  source 1..203: mol_type = other DNA
ggcgcgccagtcctagagcttccaggtggcccacctgcatgctcccaccggcagcggtaagagcaccaaggtcccggctgcgtacgcagccaagggctacaaggtgttggtgctcaacccctctgttgctgcaacactgggctttggtgcttacatgtccaaggcccatggggttgatcctaatatcacgactcggaccgatg

SEQ ID NO: 4656 - DNA, 203 bp, synthetic construct
  source 1..203: mol_type = other DNA
ggcgcgccagtcctggaccggggtgagaacaattaccactggcagccccatcacgtactccacctacggcaagttccttgccgacgccgggtgctcaggaggtgcttatgacataataatttgtgacgagtgccactccacggatgccacatccatctcgggcatcggcactgtccttgaccaagcagcgactcggaccgatg

SEQ ID NO: 4657 - DNA, 203 bp, synthetic construct
  source 1..203: mol_type = other DNA
ggcgcgccagtcctagactgcgggggcgagactggttgtgctcgccactgctacccctccgggctccgtcactgtgtcccatcctaacatcgaggaggttgctctgtccaccaccggagagatccccttttacggcaaggctatccccctcgaggtgatcaaggggggaagacatctcatcttctgcccgactcggaccgatg

SEQ ID NO: 4658 - DNA, 203 bp, synthetic construct
  source 1..203: mol_type = other DNA
ggcgcgccagtcctactcaaagaagaagtgcgacgagctcgccgcgaagctggtcgcattgggcatcaatgccgtggcctactaccgcggtcttgacgtgtctgtcatcccgaccagcggcgatgttgtcgtcgtgtcgaccgatgctctcatgactggctttaccggcgacttcgactctgtgatagcgactcggaccgatg

SEQ ID NO: 4659 - DNA, 203 bp, synthetic construct
  source 1..203: mol_type = other DNA
ggcgcgccagtcctactgcaacacgtgtgtcactcagacagtcgattttagccttgaccctacctttaccattgagacaaccacgctcccccaggatgctgtctccaggactcaacgccggggcaggactggcagggggaagccaggcatctatagatttgtggcaccgggggagcgcccctccggcacgactcggaccgatg

SEQ ID NO: 4660 - DNA, 203 bp, synthetic construct
  source 1..203: mol_type = other DNA
ggcgcgccagtcctgactgggcgctgttcagaatgaagtcaccctgacgcacccaatcaccaaatacatcatgacatgcatgtcggccgacctggaggtcgtcacgagcacctgggtgctcgttggcggcgtcctggctgctctggccgcgtattgcctgtcaacaggctgcgtggtcatagtgggcacgactcggaccgatg

SEQ ID NO: 4661 - DNA, 203 bp, synthetic construct
  source 1..203: mol_type = other DNA
ggcgcgccagtcctaccggctaatagccttcgcctcccgggggaaccatgtttcccccacacactacgtgccggagagcgatgcagccgcccgcgtcactgccatactcagcagcctcactgtaacccagctcctgaggcgactgcatcagtggataagctcggagtgtaccactccatgctccggttcgactcggaccgatg

SEQ ID NO: 4662 - DNA, 203 bp, synthetic construct
  source 1..203: mol_type = other DNA
ggcgcgccagtcctcctggctaagggacatctgggactggatatgcgaggtgctgagcgactttaagacctggctgaaagccaagctcatgccacaactgcctgggattccctttgtgtcctgccagcgcgggtataggggggtctggcgaggagacggcattatgcacactcgctgccactgtggagcgactcggaccgatg

SEQ ID NO: 4663 - DNA, 203 bp, synthetic construct
  source 1..203: mol_type = other DNA
ggcgcgccagtcctctgagatcactggacatgtcaaaaacgggacgatgaggatcgtcggtcctaggacctgcaagaacatgtggagtgggacgttcttcattaatgcctacaccacgggcccctgtactccccttcctgcgccgaactataagttcgcgctgtggagggtgtctgcagaggaatacgcgactcggaccgatg

SEQ ID NO: 4664 - DNA, 203 bp, synthetic construct
  source 1..203: mol_type = other DNA
ggcgcgccagtccttggagataaggcgggtgggggacttccactacgtatcgggcatgactactgacaatctcaaatgcccgtgccagatcccatcgcccgaatttttcacagaattggacggggtgcgcctacataggtttgcgcccccttgcaagcccttgctgcgggaggaggtatcattcagagcgactcggaccgatg

SEQ ID NO: 4665 - DNA, 203 bp, synthetic construct
  source 1..203: mol_type = other DNA
ggcgcgccagtccttaggactccacgagtacccggtggggtcgcaattaccttgcgagcccgaaccggacgtagccgtgttgacgtccatgctcactgatccctcccatataacagcagaggcggccgggagaaggttggcgagagggtcacccccttctatggccagctcctcggctagccagctgtcgactcggaccgatg

SEQ ID NO: 4666 - DNA, 203 bp, synthetic construct
  source 1..203: mol_type = other DNA
ggcgcgccagtcctccgctccatctctcaaggcaacttgcaccgccaaccatgactcccctgacgccgagctcatagaggctaacctcctgtggaggcaggagatgggcggcaacatcaccagggttgagtcagagaacaaagtggtgattctggactccttcgatccgcttgtggcagaggaggatgcgactcggaccgatg

SEQ ID NO: 4667 - DNA, 203 bp, synthetic construct
  source 1..203: mol_type = other DNA
ggcgcgccagtcctagcgggaggtctccgtacccgcagaaattctgcggaagtctcggagattcgccccagccctgcccgtctgggcgcggccggactacaaccccctgctagtagagacgtggaaaaagcctgactacgaaccacctgtggtccatggctgcccgctaccacctccacggtcccctccgactcggaccgatg

SEQ ID NO: 4668 - DNA, 203 bp, synthetic construct
  source 1..203: mol_type = other DNA
ggcgcgccagtcctaagtgaaggctaacttgctatccgtagaggaagcttgcagcctggcgcccccacattcagccaaatccaagtttggctatggggcaaaagacgtccgttgccatgccagaaaggccgtagcccacatcaactccgtgtggaaagaccttctggaagacagtgtaacaccaatagcgactcggaccgatg

SEQ ID NO: 4669 - DNA, 203 bp, synthetic construct
  source 1..203: mol_type = other DNA
ggcgcgccagtcctacactaccatcatggccaagaacgaggttttctgcgttcagcctgagaaggggggtcgtaagccagctcgtctcatcgtgttccccgacctgggcgtgcgcgtgtgcgagaagatggccctgtacgacgtggttagcaagctccccttggccgtgatgggaagctcctacggatcgactcggaccgatg

SEQ ID NO: 4670 - DNA, 203 bp, synthetic construct
  source 1..203: mol_type = other DNA
ggcgcgccagtcctcctccaacgtgtcagtcgcccacgacggcgctggaaagagggtctactaccttacccgtgaccctacaacccccctcgcgagagccgcgtgggagacagcaagacacactccagtcaattcctggctaggcaacataatcatgtttgcccccacactgtgggcgaggatgataccgactcggaccgatg

SEQ ID NO: 4671 - DNA, 203 bp, synthetic construct
  source 1..203: mol_type = other DNA
ggcgcgccagtccttgatgacccacttctttagcgtcctcatagccagggatcagcttgaacaggctctcaactgcgagatctacggagcctgctactccatagaaccactggatctacctccaatcattcaaagactccatggcctcagcgcattttcactccacagttactctccaggtgaaattacgactcggaccgatg

SEQ ID NO: 4672 - DNA, 203 bp, synthetic construct
  source 1..203: mol_type = other DNA
ggcgcgccagtccttccggctggttcacggctggctacagcgggggagacatttatcacagcgtgtctcatgcccggccccgctggttctggttttgcctactcctgcttgctgcaggggtaggcatctacctcctccccaaccgatgaagattgggctaaccactccaggccaataggccattccctcgactcggaccgatg

SEQ ID NO: 4673 - DNA, 203 bp, synthetic construct
  source 1..203: mol_type = other DNA
ggcgcgccagtccttagtgggagtgaagagggtagtaatgaacttgctagatggcagagggccaatacggtttgtgttggctctcttagctttcttcaggtttacagcacttgccccgaccaaggccttgatgaggcgctggaagagcgtgaacaagacaacggccatgaaacatctgaccagttttacgactcggaccgatg

SEQ ID NO: 4674 - DNA, 203 bp, synthetic construct
  source 1..203: mol_type = other DNA
ggcgcgccagtcctagaaagaattaggaacactgattgatgtggtgaacaaaaggggcaaaaaacaaaagaaaagaggtggcagtgaaacatccgtgcttatgctcattttcatgctgattggatttgccgctgccttaaagctttccaccttccagggcaagataatgatgactgtgaacgctacggcgactcggaccgatg

SEQ ID NO: 4675 - DNA, 203 bp, synthetic construct
  source 1..203: mol_type = other DNA
ggcgcgccagtcctacattgctgatgtgatcgccattccaaccccgaagggacccaatcaatgctggattcgagccattgacattggatttatgtgtgatgacaccatcacttatgaatgcccgaaattggaaagtggaaatgaccctgaagacattgactgctggtgtgacaaacaagctgtgtacgcgactcggaccgatg

SEQ ID NO: 4676 - DNA, 203 bp, synthetic construct
  source 1..203: mol_type = other DNA
ggcgcgccagtccttggagggcgacagttgcatcaccatcatggccgctgacaaacccacccttgacataagaatgatgaacattgaagccaccaatcttgcactggttagaaattactgctatgcagctactgtgtcagacgtttctacggtgtcaaactgtcccactacaggggagtcacacaacacgactcggaccgatg

SEQ ID NO: 4677 - DNA, 203 bp, synthetic construct
  source 1..203: mol_type = other DNA
ggcgcgccagtcctcgaagcgggcagatcacaattacttgtgcaaacgaggtgtgaccgacagaggctggggtaatggatgtggcttgtttggtaaggggagcattgacacatgcgcaaagttcacctgctctaactcagctgcggggagacttatcttacctgaggacatcaaatatgaagttggggcgactcggaccgatg

SEQ ID NO: 4678 - DNA, 203 bp, synthetic construct
  source 1..203: mol_type = other DNA
ggcgcgccagtcctaggcctactacgtcatgaccattggaacgaaacactttctagtgcatcgtgagtggttcaatgatttgctcttgccatggacatcacctgcaagcacggaatggaggaatagagaaattctcgtggagtttgaagagccacatgccaccaaacaatcagtggttgccttgggttcgactcggaccgatg

SEQ ID NO: 4679 - DNA, 203 bp, synthetic construct
  source 1..203: mol_type = other DNA
ggcgcgccagtccttaacatccaccaggggttggcttaaactcagagaggaaaatacctcggagtgtgacagcaccattattgggaccgcagttaagggcaaccatgcagtacacagtgacctttcctactggattgagagtggactcaatgggacatggaaacttgagagagccatttttggagaggcgactcggaccgatg

SEQ ID NO: 4680 - DNA, 203 bp, synthetic construct
  source 1..203: mol_type = other DNA
ggcgcgccagtcctcaggccttatgatatgcaaccctaacaagaagagaggatggcccgccacagaggtgttaacagcagtgggactgatgttcgccattgttggaggactcgctgagctagacattgattctatgtcagtcccttttaccatagctggcctcatgttagtgtcctatgttatctcggcgactcggaccgatg

SEQ ID NO: 4681 - DNA, 203 bp, synthetic construct
  source 1..203: mol_type = other DNA
ggcgcgccagtccttaagcgtagctgccatcactccaagggccattttgccatccgcgtttgggtattggctgactctgaagtacacaaaacgagggggtgttttttgggatacgccttccccaaaagtgtatcccaagggggatacgacgccaggagtctaccgaataatggccagaggtatcctggcgactcggaccgatg

SEQ ID NO: 4682 - DNA, 203 bp, synthetic construct
  source 1..203: mol_type = other DNA
ggcgcgccagtcctgagagggaagagtcattctcagtgtgccgtcagccatcactagtgccagtgctgcccaacggagaggtagagtgggcaggaatccaagtcaaataggagatgagtaccactatggaggcggaaccagtgaggatgacaccatgctggcgcactggactgaagcaaaaattctttcgactcggaccgatg

SEQ ID NO: 4683 - DNA, 203 bp, synthetic construct
  source 1..203: mol_type = other DNA
ggcgcgccagtccttggacaacatccacctcccaaatggcctagtagctcagctgtacggtcccgaaagagataaaacttacaccatggatggagagtaccgactcagaggcgaagaacgcaagacattcctcgagctcataaaaacagccgatttgccggtgtggcttgcttacaaggtagcgtcaacgactcggaccgatg

SEQ ID NO: 4684 - DNA, 203 bp, synthetic construct
  source 1..203: mol_type = other DNA
ggcgcgccagtcctggaagtcactaattgaggaaaacgaggtccatatccctccctttgattttttcaccctggatttgaagcctgctactgcttgggctttgtacggaggaagcacagttgtgttgactccactgataaaacatctggtgacatcacagtatgttaccacctcattggcatcaataacgactcggaccgatg

SEQ ID NO: 4685 - DNA, 203 bp, synthetic construct
  source 1..203: mol_type = other DNA
ggcgcgccagtcctgagcctcggggaacatcgtgcacgcggtgaacatgaccagtcaggtgctcattggaagaatggacaagaagatttggaaaggcccaaaatatgaggaagatgtcaacctgggcagcggcacgagagcagtaggaaaaggtgtgcagcacacggattacaagaggatcaaatccacgactcggaccgatg

SEQ ID NO: 4686 - DNA, 203 bp, synthetic construct
  source 1..203: mol_type = other DNA
ggcgcgccagtcctctcggaagaggagtccctgccaacaatggagatgaagcccgtgtcagatcgcgaaagcgccacttcgccgaggagtgcaatctgtgaggccccaggaggactgggtaaacaaagccgtaaggcccccgcagcccgggccgggaggaggtgatgcaaaccccggcgaaggactagcgactcggaccgatg

SEQ ID NO: 4687 - DNA, 203 bp, synthetic construct
  source 1..203: mol_type = other DNA
ggcgcgccagtcctaggttagaggagaccctgcggaagaaatgagtggcccaagctcgccgaagctgtaaggcgggtggacggactagaggttagaggagaccccactctcaaaagcatcaaacaacagcatattgacacctgggaaaagactaggagatcttctgctctattccaacatcagtcacacgactcggaccgatg

SEQ ID NO: 4688 - DNA, 203 bp, synthetic construct
  source 1..203: mol_type = other DNA
ggcgcgccagtcctgtaaggcgggtggacggactagaggttagaggagaccccactctcaaaagcatcaaacaacagcatattgacacctgggaaaagactaggagatcttctgctctattccaacatcagtcacaaggcaccgagcgccgaacactgtgactgatgggggagaagaccacaggatctcgactcggaccgatg

SEQ ID NO: 4689 - DNA, 203 bp, synthetic construct
  source 1..203: mol_type = other DNA
ggcgcgccagtcctgcgccagtcctccgatagactgagtcgcccgggtacccgtgtatccaataaatcctcttgctgttgcatccgactcgtggtctcgctgttccttgggagggtctcctcagagtgattgactacccgtctcgggggtctttcatttgggggctcgtccgggatctggagacccctcgactcggaccgatg

SEQ ID NO: 4690 - DNA, 203 bp, synthetic construct
  source 1..203: mol_type = other DNA
ggcgcgccagtcctacctgggaagctatagcagtagacccccctccctgggtcagacccttcgtgcaccctaaacctcccctctctcttcccccttcagccccctctctcccacctgaacccccactctcgaccccgccccagtcctccctctatccggctctcacttctcctttaaacaccaaacctcgactcggaccgatg

SEQ ID NO: 4691 - DNA, 203 bp, synthetic construct
  source 1..203: mol_type = other DNA
ggcgcgccagtcctaggcctcaagtccttcctgatagcggaggaccactcattgatctactcacggaggaccctccgccttaccgggacccagggccaccctctcctgacgggaacggcgatagcggagaagtggcccctacagaaggagcccctgacccttccccaatggtatcccgcctgcggggacgactcggaccgatg

SEQ ID NO: 4692 - DNA, 203 bp, synthetic construct
  source 1..203: mol_type = other DNA
ggcgcgccagtcctagaaaagaaccccccgtggcggattctactacctctcaggcgttcccccttcgcctgggagggaatggacagtatcaatactggccattttcctcctctgacctctataactggaaaaataacaacccctctttctccgaggacccagctaaattgacagctttgatcgagtcccgactcggaccgatg

SEQ ID NO: 4693 - DNA, 203 bp, synthetic construct
  source 1..203: mol_type = other DNA
ggcgcgccagtcctcccgactgggactacaacacccaacgaggtaggaaccacctagtccactatcgccagttgctcctagcgggtctccaaaacgcgggcagaagccccaccaatttggccaaggtaaaagggataacccagggacctaatgagtctccctcagcctttttagagagactcaaggagcgactcggaccgatg

SEQ ID NO: 4694 - DNA, 203 bp, synthetic construct
  source 1..203: mol_type = other DNA
ggcgcgccagtcctaaacgagaaaccccggaagaaagagaggaacgtattaggagagaaacagaggaaaaggaagaacgccgtagggcagaggatgtgcagagagagaaggagagggaccgcagaagacatagagaaatgagtaagttgctggctactgtcgttagcgggcagagacaggatagacagcgactcggaccgatg

SEQ ID NO: 4695 - DNA, 203 bp, synthetic construct
  source 1..203: mol_type = other DNA
ggcgcgccagtccttcaggacaattaacctggaccagactcccgcagggtttcaaaaacagtcccaccctgtttgatgaagccctgcacagggacctcgcagacttccggatccagcacccagacctgattctgctccagtatgtagatgacttactgctggccgccacttctgagcttgactgtcaacgactcggaccgatg

SEQ ID NO: 4696 - DNA, 203 bp, synthetic construct
  source 1..203: mol_type = other DNA
ggcgcgccagtcctacccctcgacaactaagggagttcctagggacggcaggcttctgtcgcctctggatccctgggtttgcagaaatggcagcccccttgtaccctctcaccaaaacggggactctgtttgagtggggcccagaccagcaaaaggcctaccaagagatcaagcaggctctcttaactcgactcggaccgatg

SEQ ID NO: 4697 - DNA, 203 bp, synthetic construct
  source 1..203: mol_type = other DNA
ggcgcgccagtcctgcggaggcaaggggcaacaggatggccgaccaagcggcccgagaagtagccactagagaaactccagagacttccacacttctgatagaaaattcagccccctatactcatgaacattttcactatacggtgactgacataaaagatctgactaaactaggggccacttatgaccgactcggaccgatg

SEQ ID NO: 4698 - DNA, 203 bp, synthetic construct
  source 1..203: mol_type = other DNA
ggcgcgccagtcctgacatcactgagacttgccaagcctgtgcacaggtcaatgccagcaagtctgccgtcaaacaagggactagagttcgagggcaccgacccggcacccactgggaaattgatttcactgaggtaaaacctggcctgtatgggtataaatatcttttagttttcatagacactttccgactcggaccgatg

SEQ ID NO: 4699 - DNA, 203 bp, synthetic construct
  source 1..203: mol_type = other DNA
ggcgcgccagtccttctggatgggtagaagctttcccaaccaagaaagaaactgccaaagttgtaaccaagaagctactagaagaaatcttccccagattcggcatgccacaggtattgggaaccgacaatgggcctgccttcgtctccaaggtaagtcagacagtagccgatttactgggggttgatcgactcggaccgatg

SEQ ID NO: 4700 - DNA, 203 bp, synthetic construct
  source 1..203: mol_type = other DNA
ggcgcgccagtcctccggtagtgcctcaccctttccgagtcggtgacacagtgtgggtccgcagacaccaaactaaaaatctagaaccccgctggaaaggaccttataccgtcctactgactacccccaccgctctcaaagtggacggcattgcagcgtggatccacgctgcccacgtaaaggctgcccgactcggaccgatg

SEQ ID NO: 4701 - DNA, 203 bp, synthetic construct
  source 1..203: mol_type = other DNA
ggcgcgccagtcctgacaccaggattgagccaccatcggaatcgacatggcgtgttcaacgctctcaaaatcccctaaagataagattgacccgcgggacctcctaatccccttaattctcttcctgtctctcaaaggggccagatccgcagcacccggctccagccctcaccaggtctacaacattacgactcggaccgatg

SEQ ID NO: 4702 - DNA, 203 bp, synthetic construct
  source 1..203: mol_type = other DNA
ggcgcgccagtcctcctgggaagtgaccaatggggatcgggagacagtatgggcaatatcaggcaaccaccctctgtggacttggtggccagtcctcaccccagatttgtgtatgttagctctcagtgggccgccccactgggggctagagtatcaggccccctattcctcgcccccggggcccccttcgactcggaccgatg

SEQ ID NO: 4703 - DNA, 203 bp, synthetic construct
  source 1..203: mol_type = other DNA
ggcgcgccagtccttaggaacagtcccaaaaactcaccaggccctgtgcaacactacccttaaggcaggcaaagggtcttactatctagttgcccccacaggaactatgtgggcatgtaacactggactcactccatgcctatctgccaccgtgcttaatcgcaccactgactattgcgttctcgtggcgactcggaccgatg

SEQ ID NO: 4704 - DNA, 203 bp, synthetic construct
  source 1..203: mol_type = other DNA
ggcgcgccagtcctcccagcagtttcagcagctccatgctgccgtacaagatgatctcaaagaagtcgaaaagtcaattactaacctagaaaagtctcttacttcgttgtctgaggttgtactgcagaatcgacgaggcctagacctgttgttcctaaaagagggaggactgtgtgctgccctaaaagcgactcggaccgatg

SEQ ID NO: 4705 - DNA, 203 bp, synthetic construct
  source 1..203: mol_type = other DNA
ggcgcgccagtcctcattcaggaagtgcttccttctgctcggggtgatacatgagtatacagtagtttgaatcctgtgtgctggtgttgtcttctcggctttttgtgacatcataaataacacctagaagtaatatttttaagaggcttacacctcaggaaggagtgtggctaatgctggtaaggcaccgactcggaccgatg

SEQ ID NO: 4706 - DNA, 203 bp, synthetic construct
  source 1..203: mol_type = other DNA
ggcgcgccagtcctgactatctctaactcccggagattgtattacatgggactcagcagtcgctactctgttcattagaacatatggacaatatccattacatcagcttggaaatgtgttaaaaggaatagctgatcaagaaggagtagcaacagcatatactctagggatgatgctttctggacaaacgactcggaccgatg

SEQ ID NO: 4707 - DNA, 203 bp, synthetic construct
  source 1..203: mol_type = other DNA
ggcgcgccagtcctccccaaaatagcacaatgaatacacctgtttatcctgttcctaaaccagatggaaggtggagaatggttttagattatagagaagtaaataaaactatacctttaacagcggcccaaaaccaacattctgctggtatattggccactattgtaagacaaaaatataaaactactcgactcggaccgatg

SEQ ID NO: 4708 - DNA, 203 bp, synthetic construct
  source 1..203: mol_type = other DNA
ggcgcgccagtcctggtcgtggcctaacggatacttttaaaacaaaattattaaatgttacaccacccaaagatttaaaacaattacagagcatactgggattgttaaattttgctagaaattttatacctaattttgcagaattggtacaaacgttgtataatttaatagcttcatctaagggaaaacgactcggaccgatg

SEQ ID NO: 4709 - DNA, 203 bp, synthetic construct
  source 1..203: mol_type = other DNA
ggcgcgccagtcctaaaggatatcctaaacaatatacatattatttagaagatggcaaagtaaaagtttccagacctgaaggggttaaaataatacccccacagtcggatcgacaaaaaattgtacttcaagcccacaatttggctcataccggacgtgaagccactcttttaaaaattgccaatcttcgactcggaccgatg

SEQ ID NO: 4710 - DNA, 203 bp, synthetic construct
  source 1..203: mol_type = other DNA
ggcgcgccagtcctggatatctatatgttttagtaattgttgatggaatgacaggttttacatggttatacccaactaaggctccttctacaagcgcaactgttaaatctctcaatgtactcactagtattgcaattccaaaggtgattcactctgatcaaggtgcagcattcacttcttcaacctttcgactcggaccgatg

SEQ ID NO: 4711 - DNA, 203 bp, synthetic construct
  source 1..203: mol_type = other DNA
ggcgcgccagtcctaataatacttatagccctgtattaaaatatactccacatcaactcttatttggtatagattcaaatactccatttgcaaaccaagatacacttgatttgacgagagaagaagaactttctcttttacaggaaattcgtgcctctttataccaaccatccacccctcctgcctcccgactcggaccgatg

SEQ ID NO: 4712 - DNA, 203 bp, synthetic construct
  source 1..203: mol_type = other DNA
ggcgcgccagtccttcacgttcctggtctcctgttgtaggccaattggtccaggagagggtggctaggcctgcatccttgcgaccacgttggcataaaccttccactgttcttgaagtattgaatcctaggactgttgttattttggaccatcttggcaacaacagaactgtaagtattgacaatttacgactcggaccgatg

SEQ ID NO: 4713 - DNA, 203 bp, synthetic construct
  source 1..203: mol_type = other DNA
ggcgcgccagtcctcactcagagggctgtttatcaacccttgcaaaccagaaggattgcacgttctcttagaatgcaacacccagttccaaaatatatagaggtaaacatgaccagtatcccacaaggtgtatattatgaacctcatccagaacctatagtggtcacggagagggtcttaggtctttccgactcggaccgatg

SEQ ID NO: 4714 - DNA, 203 bp, synthetic construct
  source 1..203: mol_type = other DNA
ggcgcgccagtcctaaaatgctaccaagaattcgcgcattgctatctggtaaaatataaaactccaaagtcctggccaactgaaggtctcattgcagatcaatgtcccttgccaggatatcatgcaggacttagttataagccacaatcaatatgggattattatataaaagtagaaattacaaggcccgactcggaccgatg

SEQ ID NO: 4715 - DNA, 203 bp, synthetic construct
  source 1..203: mol_type = other DNA
ggcgcgccagtccttaaattagataaccttacaactgggtcatctctattaaaaaagagagccctgcctaaggaatggagctcacaaggtaaaaatgccttgtttaaggaaattaatgtattggatgtttgcagtaaacctgaattagtaatattgttaaatacttcatattattcattctctttatgcgactcggaccgatg

SEQ ID NO: 4716 - DNA, 203 bp, synthetic construct
  source 1..203: mol_type = other DNA
ggcgcgccagtccttactgttttattctccctaaaaaattttcttaatcacacaggtaggcctgtaaatgaaatgcctaatgctagagcctttgtgggcctagtagatcctaagtttcccccttcctatcccaatgtaacccgagaacattatacttcttgtaacaataggaaaagaagaagtactgacgactcggaccgatg

SEQ ID NO: 4717 - DNA, 203 bp, synthetic construct
  source 1..203: mol_type = other DNA
ggcgcgccagtcctaaaacaaacctacaattcacccactgctacggcttgggaaattgggttatattatgaattgactatacctaaacatgtttacttaaacaattggaatgttgtcaatataggtcatttggttcaatcagctggacaattgactcatgtaactatagctcatccatatgaaataatcgactcggaccgatg

SEQ ID NO: 4718 - DNA, 203 bp, synthetic construct
  source 1..203: mol_type = other DNA
ggcgcgccagtcctaagattaccacatttggttggaattattgcaaaaatcaaggggctaaaaatagaagtcacatcctctggagagagtataaaagaccaaattgaaagagcaaaggctgagcttcttcgactggatatccacgaaggagacactccagcctggatacagcaactagctgcagcaaccgactcggaccgatg

SEQ ID NO: 4719 - DNA, 203 bp, synthetic construct
  source 1..203: mol_type = other DNA
ggcgcgccagtcctgattcctaccaagaagaagagccagtagcctctacctctggacttcaggacctgcagactcttagtgagcttgttggccctgaaaatgccggagagggagatctggtcattgcagaagaacctgaagaaaacccccgacgccccagaagatacaccaagagagatgttaaatgtcgactcggaccgatg

SEQ ID NO: 4720 - DNA, 203 bp, synthetic construct
  source 1..203: mol_type = other DNA
ggcgcgccagtcctgtttcttaccatgcttataaagagcttgaggacaaacatcctcaccacattaagctccaagactggattcctaaacctgaagaaatgagtaagtcaatttgtaaaagacttattttatgtggattatatagtggagaaaaggctagagaaatcttaaaaaagccttttacagtacgactcggaccgatg

SEQ ID NO: 4721 - DNA, 203 bp, synthetic construct
  source 1..203: mol_type = other DNA
ggcgcgccagtcctaaacatcaaaagaactgttctcttgttaaaccttctactagttgcccagaaggtccaaaaccaagacgtaggcacgatcctgtccttcgatgtgacatgtttgaaaagcatcacaagcctcggccgaaacgatccaggaaacgatccatcgatcatgagtcatgtgcttccagtcgactcggaccgatg

SEQ ID NO: 4722 - DNA, 203 bp, synthetic construct
  source 1..203: mol_type = other DNA
ggcgcgccagtcctggtgacaccgtggccaatgagtcaggaccactatgcaccaacactttttggactcctggaccggtattacaagggctacttggagaatccagcaaccttccagacctggaagttcacatgtcaggaggacccttctggaaagaggtatatggggactcaattctgggtcccccccgactcggaccgatg

SEQ ID NO: 4723 - DNA, 203 bp, synthetic construct
  source 1..203: mol_type = other DNA
ggcgcgccagtccttctgggtcaggtgaacattcagttttataaaaattaccagattgtaacttgctgccaggccctagatccttttgctaatattttccatggcaccgaggaagaaatgtatgatattgattctgggcctgatgtttggtgcaccccctctttgtgtttcaaagtaatctatgagggcgactcggaccgatg

SEQ ID NO: 4724 - DNA, 203 bp, synthetic construct
  source 1..203: mol_type = other DNA
ggcgcgccagtcctgggctgtaaggcaggctgtttggcttcgccagtgcttaatttcaaagctctgcagttccatagaactttaatggcagaccttaccaaccctaaaattggacaaggctaccttgcccatggttatcacgctgctatggaagcttatggacctcagagaggaagtagcgaggagagcgactcggaccgatg

SEQ ID NO: 4725 - DNA, 203 bp, synthetic construct
  source 1..203: mol_type = other DNA
ggcgcgccagtcctttcaaaaccacagacagtaaaagtgtggtaacactttaagcaatattatctttgtcagaatattagaagctttcacatgctcagcagctgtttcgcaactaccaaaataagaatgatgtaataataggaagtagcttacaataggttaagtatgtttactgaagtagataatcccgactcggaccgatg

SEQ ID NO: 4726 - DNA, 203 bp, synthetic construct
  source 1..203: mol_type = other DNA
ggcgcgccagtcctacctttctatcagtacaatcaagcccattcctccccatgttctcagggtgtgtgcggcgtaagatcgaatccccacacacctgggaacttgattattgcataatattttgttagtcatatagaaaagtaatataggataagttatagggattaaactatgaggtgtgtggctcacgactcggaccgatg

SEQ ID NO: 4727 - DNA, 203 bp, synthetic construct
  source 1..203: mol_type = other DNA
ggcgcgccagtcctctagtgaacccctgaatggcgatcttaagcgcctctgtagggaagccaggaatgtccaggaggtaccccttccgctcggaagggatctgacctggagacacatcacatgtgctttacacctgtgcttgtgtttaaaaattgtcgcagcttccccaaaccaagtggtcttggtttcgactcggaccgatg

SEQ ID NO: 4728 - DNA, 203 bp, synthetic construct
  source 1..203: mol_type = other DNA
ggcgcgccagtcctactttaatcagtaccgtggttcactgaattttcttttcgttttcactggtgctgcaatggttaagggcaagtttctcatagcctacaccccgcctggtgcgggaaagcccaccacccgggaccaagctatgcaggctacctacgccatttgggacttgggcttgaattccagctcgactcggaccgatg

SEQ ID NO: 4729 - DNA, 203 bp, synthetic construct
  source 1..203: mol_type = other DNA
ggcgcgccagtcctccaatggtgccaacttcccactcatgaccaaacaggactacgccttcctctgcttttcccctttcacctactacaagtgtgaccttgaagttaccgttagtgctatgggagcaggcaccgtttcttctgttctgcgctgggcacccaccggggcgcccgcggatgtcactgacccgactcggaccgatg

SEQ ID NO: 4730 - DNA, 203 bp, synthetic construct
  source 1..203: mol_type = other DNA
ggcgcgccagtcctagctgatcggctatactcctagtcttggtgaaacacgtaacccccacatgtggatcgttggctctggaaattctcaaatttcttttgtcgtaccttacaattcccctctgtccgtcttacccgctgcttggttcaatggatggtccgactttggaaacaccaaggattttggagcgactcggaccgatg

SEQ ID NO: 4731 - DNA, 203 bp, synthetic construct
  source 1..203: mol_type = other DNA
ggcgcgccagtcctttgagaatcccgcttctctctaccgcattgatcttttcatcacctttactgatgagctcataacttttgactacaaggtccacggacgtcctgtgctcaccttccggattccaggcttcggtctgacaccggcaggcagaatgctcgtgtgcatgggcgagaagcccgcacacacgactcggaccgatg

SEQ ID NO: 4732 - DNA, 203 bp, synthetic construct
  source 1..203: mol_type = other DNA
ggcgcgccagtcctgtccgttcacctcgtctaaatctctataccatgttatcttcacttccacttgcaattccttcagctttaccatctataaaggacgctaccgctcctggaagaagcccatccacgatgagcttgtggatcgtggttacaccactttccgcgagttcttcaaggctgtgcgcggatcgactcggaccgatg

SEQ ID NO: 4733 - DNA, 203 bp, synthetic construct
  source 1..203: mol_type = other DNA
ggcgcgccagtcctttagtaaagcaatcacagttgtcactgacttggttgctgcatgggaaaaagcaaaaaccactctggtctctcctgaattttggtcagaacttatattaaaaactaccaagttcattgctgcttccgtgctctaccttcacaaccctgacttcactaccactgtttgtctctcatcgactcggaccgatg

SEQ ID NO: 4734 - DNA, 203 bp, synthetic construct
  source 1..203: mol_type = other DNA
ggcgcgccagtccttgatgactggtgtagacctcctcaccaatgattctgtttttgattggcttaagagcaaattgtcctccttctttcgtactcctcccccagcttgccccaatgtcatgcaacctcaggggcctctacgcgaggccaatgagggttttacctttgccaagaatattgaatgggccacgactcggaccgatg

SEQ ID NO: 4735 - DNA, 203 bp, synthetic construct
  source 1..203: mol_type = other DNA
ggcgcgccagtcctaatctgtttctaagatggcctttggccgtcagtctgtttattctatgccccccgattcggaatattttgatggctatgaaaatcaattttctgtgattatggatgatctaggacaaaatcccgatggtgaagatttcaccgtcttttgtcaaatggtttctagcacaaattttccgactcggaccgatg

SEQ ID NO: 4736 - DNA, 203 bp, synthetic construct
  source 1..203: mol_type = other DNA
ggcgcgccagtcctccacaggatctgtcgtacatgtccccagaaagaccaaactgaggagaacagtcgctcatgacgttttccaacccaaattcgaacctgcagttctgtcccgttatgaccctgggaccgacaaggatgtagatgttgtagccttctccaaacacactactaacatggaaagcttgccgactcggaccgatg

SEQ ID NO: 4737 - DNA, 203 bp, synthetic construct
  source 1..203: mol_type = other DNA
ggcgcgccagtcctctccaatctttgacattgtctgcggtgaatacgctaaccgtgttttcaccatccttggtaaagacaacggtctcttaaccgttgaacaggctgtgcttggcttgtcgggcatggaccccatggagaaggacacctcccctggattgccctacactcaacaaggactcagacgaacgactcggaccgatg

SEQ ID NO: 4738 - DNA, 203 bp, synthetic construct
  source 1..203: mol_type = other DNA
ggcgcgccagtcctaatgtagtcttatgcaatactcttgtagtcttgcaacatgcttatgtaacgatgagttagcaacatgccttataaggaaagaaaaagcaccgtgcatgccgattggtggaagtaaggtggtatgatcgtggtatgatcgtggtatgatcgtgccttattaggaaggcaacagaccgactcggaccgatg

SEQ ID NO: 4739 - DNA, 203 bp, synthetic construct
  source 1..203: mol_type = other DNA
ggcgcgccagtcctgggtctaacacggattggacgaaccactgaattccgcattgcagagatattgtatttaagtgcctagctcgatacaataaacgccatttgaccattcaccacattggtgtgcacctgggttgatggcgggaccgttgattccctgacgactacgagcacatgcatgaagcagaacgactcggaccgatg

SEQ ID NO: 4740 - DNA, 203 bp, synthetic construct
  source 1..203: mol_type = other DNA
ggcgcgccagtcctggcttcatttggtgaccccgacgtgatcgttagggaatagtggtcggccacaggcggcgtggcgatcctgtcctcatccgtctcgcttattcggggagcggacgatgaccctagtagagggggctgcggcttaggagggcagaagctgagtgacgtcggagggagctccacggccgactcggaccgatg

SEQ ID NO: 4741 - DNA, 203 bp, synthetic construct
  source 1..203: mol_type = other DNA
ggcgcgccagtcctccgcccctctcgcccagctgccgctccaacctggccgccgcctcctgcttcccttccaccgccgaccagctggagatggtgacggagctgctcgggggggacatggtcaaccagagctccatctgcgacccggacgacgaatccttcgtcaaatccatcatcatccgggactgccgactcggaccgatg

SEQ ID NO: 4742 - DNA, 203 bp, synthetic construct
  source 1..203: mol_type = other DNA
ggcgcgccagtcctaggcaacagacgggtctaacacggattggacgaaccactgaattccgcattgcagagatattgtatttaagtgcctagctcgatacaataaacgccatttgaccattcaccacattggtgtgcacctgggttgatggcgggaccgttgattccctgacgactacgagcacatgccgactcggaccgatg

SEQ ID NO: 4743 - DNA, 203 bp, synthetic construct
  source 1..203: mol_type = other DNA
ggcgcgccagtccttcgcttaatcggggagcggacgatgaccctagcagagggggctgcggcttaggagggcagaagctgagtgacgtcggagggagctccacggccgggggccaagataacctaccgagaactcagagagtcgttggaagacgggaaggaagcccaacgactgagcagtccaccccacgactcggaccgatg

SEQ ID NO: 4744 - DNA, 203 bp, synthetic construct
  source 1..203: mol_type = other DNA
ggcgcgccagtccttcccccaggtccggagtgcatcgagaaaccagcaacggagcggcgaatcgacaagggagaaacaactgtgcagcgagatacgaagatggcgccggaggaaacggccacacctaaaaccgttggcacatcctgctatcattgcggaacagctattggctgtaattgcgccacagccgactcggaccgatg

SEQ ID NO: 4745 - DNA, 203 bp, synthetic construct
  source 1..203: mol_type = other DNA
ggcgcgccagtcctctccccgctgctgccgcatgacgtcacgaatccaatgagagttattttaggacccgccccacatgccttatggatggacgcttgggctgcgtcaggtcagttgcaccggccccaaccccaggaacacaccagcaccagcgctgcagcggggacctggcggctcactcaggcttccgactcggaccgatg

SEQ ID NO: 4746 - DNA, 203 bp, synthetic construct
  source 1..203: mol_type = other DNA
ggcgcgccagtcctggagtcgcggcacaggctgccccactgctctgcagccccatcccaccaggatcacagtgccatgggctttgggccggagctgtggtgcccgaaggggcacactgagctgctgcggctgcaggacagcgagttgcgcctcctggagctgatgaagaagtggatgtcacagcgtgccgactcggaccgatg

SEQ ID NO: 4747 - DNA, 203 bp, synthetic construct
  source 1..203: mol_type = other DNA
ggcgcgccagtccttaagagcgaccgggagtacgcggggatgctgcaccacatgttctctcagctggagaaacaggagggcctgggacatctccgtgccaccgaccacagcagccagatcggggagtcgtggtgggttctggcaagccagactgagacactgagccagacgctgcggcggcacgcggacgactcggaccgatg

SEQ ID NO: 4748 - DNA, 203 bp, synthetic construct
  source 1..203: mol_type = other DNA
ggcgcgccagtcctgagcagcaaggagcagcgggtgtgggagctgcaggttgagctgcggggcgaggagctggcactcagccctggggagcgggtgcacttgctgggcaagcggcaggggctgcgggaggcccagcagcagctgcagggcttggtctgtgctcaggccaagctgcaggcacagcgggacgactcggaccgatg

SEQ ID NO: 4749 - DNA, 203 bp, synthetic construct
  source 1..203: mol_type = other DNA
ggcgcgccagtcctacctcccgtgcccctcatcccggaggtgcagaagccgctgtgccagcaggcctggtaccacggggccatcccgcgctcggaggtgcaggagctgctgaaatacagcggagacttcctggtgcgggagagccaggggaagcaggagtatgtgctcagcgtgctgtgggatgggcacgactcggaccgatg

SEQ ID NO: 4750 - DNA, 203 bp, synthetic construct
  source 1..203: mol_type = other DNA
ggcgcgccagtccttcccaacatcgtccggctcatcggcgtctgcacccagaagcagcccatttacatcgtcatggagctggtgcagggaggggacttcctgagcttcctgcgcagcaaggggccccgcctgaagatgaagaagctgatcaagatgatggagaatgccgcggcgggcatggagtacctcgactcggaccgatg

SEQ ID NO: 4751 - DNA, 203 bp, synthetic construct
  source 1..203: mol_type = other DNA
ggcgcgccagtcctggaaagcaagcactgcatccacagggacctggctgcccgcaactgcctggtgacagaaaagaacaccctgaaaatcagcgactttgggatgtcgcggcaggaggaggatggtgtctatgcctccacggggggcatgaagcagatccccgtgaaatggactgcccccgaggctctcgactcggaccgatg

SEQ ID NO: 4752 - DNA, 203 bp, synthetic construct
  source 1..203: mol_type = other DNA
ggcgcgccagtcctgaattacggctggtacagctcggagagcgacgtgtggagctttgggatcctgctgtgggaagccttcagcctgggcgccgtgccctacgccaacctcagcaaccagcagacgcgcgaggccatcgagcagggcgtgcggctggagcccccggagcagtgccccgaggacgtgtacgactcggaccgatg

SEQ ID NO: 4753 - DNA, 203 bp, synthetic construct
  source 1..203: mol_type = other DNA
ggcgcgccagtcctgaagcggaaggcttcattgatgttgccagttagtcatcattgccacttagtcatcattacataagacagtctaaagtcctaaaaaggaaaaacaagacatctcggatgtcattggctgcaaccagtaaggaagtagtggcgtgaggatcacccgatgggtgtaacccagaaggccgactcggaccgatg

SEQ ID NO: 4754 - DNA, 203 bp, synthetic construct
  source 1..203: mol_type = other DNA
ggcgcgccagtcctggcaagggtcagggaggagcttgcgagtactggtccgcccgtggtggccatgcctgtagtgattaagacagagggacccgcttggacccctctggagccaaaattgatcacaagactggctgatacggtcaggaccaagggcttacgatccccgattactatggcagaagtggacgactcggaccgatg

SEQ ID NO: 4755 - DNA, 203 bp, synthetic construct
  source 1..203: mol_type = other DNA
ggcgcgccagtcctaggagagataattaaatatgtgctagacaggcagaagactgcccctcttacggatcaaggcatagccgcggccatgtcgtctgctatccagcccttaattatggcagtagtcaatagagagagggatggacaaactgggtcgggtggtcgtgcccgagggctctgctacacttgcgactcggaccgatg

SEQ ID NO: 4756 - DNA, 203 bp, synthetic construct
  source 1..203: mol_type = other DNA
ggcgcgccagtccttggatccccgggacattatcaggcgcagtgcccgaaaaaacggaagtcaggaaacagccgtgagcgatgtcagttgtgtaacgggatgggacacaacgctaaacagtgtaggaagcgggatggcaaccagggccaacgcccaggaaaaggtctctcttcggggccgtggcccggcgactcggaccgatg

SEQ ID NO: 4757 - DNA, 203 bp, synthetic construct
  source 1..203: mol_type = other DNA
ggcgcgccagtcctccctgagccacctgccgtctcgttagcgatgacaatggaacataaagatcgccccttggttagggtcattctgactaacactgggagtcatccggtcaaacagcgttcggtgtatatcaccgcgctgttggactctggagcggacatcactattatttcagaggaggattggcccgactcggaccgatg

SEQ ID NO: 4758 - DNA, 203 bp, synthetic construct
  source 1..203: mol_type = other DNA
ggcgcgccagtcctttagtggaaaaagaattacagttaggacatatagaaccttcacttagttgttggaacacacctgtcttcgtgatccggaaggcttccgggtcttaccgcttactgcatgatttgcgcgctgttaacgccaagcttgttccttttggggccgtccaacagggggcgccagttctccgactcggaccgatg

SEQ ID NO: 4759 - DNA, 203 bp, synthetic construct
  source 1..203: mol_type = other DNA
ggcgcgccagtcctactatttcgcctgataaggtccagagggagcccggagtacaatatcttgggtacaagttaggcagtacgtatgtagcacccgtaggcctggtagcagaacccaggatagccaccttgtgggatgttcaaaagctggtggggtcacttcagtggcttcgcccagcgttaggaatccgactcggaccgatg

SEQ ID NO: 4760 - DNA, 203 bp, synthetic construct
  source 1..203: mol_type = other DNA
ggcgcgccagtcctccgccacgactgatgggccccttctatgagcagttacgagggtcagatcctaacgaggcgagggaatggaatctagacatgaaaatggcctggagagagatcgtacggcttagcaccactgctgccttggaacgatgggaccctgccctgcctctggaaggagcggtcgctagacgactcggaccgatg

SEQ ID NO: 4761 - DNA, 203 bp, synthetic construct
  source 1..203: mol_type = other DNA
ggcgcgccagtccttgtgaacagggggcaataggggttttgggacagggactgtccacacacccaaggccatgcttgtggttattctccacccaacccaccaaggcgtttactgcttggttagaagtgctcacccttttgattactaagctacgtgcttcggcagtgcgaacctttggcaaggaggtccgactcggaccgatg

SEQ ID NO: 4762 - DNA, 203 bp, synthetic construct
  source 1..203: mol_type = other DNA
ggcgcgccagtcctgatatcctcctgttgcctgcatgctttcgggaggaccttccgctcccagaggggatcctgttagcccttaaggggtttgcaggaaaaatcaggagtagtgacacgccatctatttttgacattgcgcgtccactgcatgtttctctgaaagtgagggttaccgaccaccctgtgcgactcggaccgatg

SEQ ID NO: 4763 - DNA, 203 bp, synthetic construct
  source 1..203: mol_type = other DNA
ggcgcgccagtcctacagaaggacccccggttaaaatacgaatagagacaggggagtgggaaaaaggatggaacgtgctggtctggggacgaggttatgccgctgtgaaaaacagggacactgataaggttatttgggtaccctctcgaaaagttaaaccggacatcacccaaaaggatgaggtgactcgactcggaccgatg

SEQ ID NO: 4764 - DNA, 203 bp, synthetic construct
  source 1..203: mol_type = other DNA
ggcgcgccagtcctgtgtgaggttacgggggtaagagctgatgttcacttactcgagcagccagggaacctttggattacatgggccaaccgtacaggccaaacggatttctgcctctctacacagtcagccacctccccttttcaaacatgtttgataggtatcccgtctcctatttccgaaggtgacgactcggaccgatg

SEQ ID NO: 4765 - DNA, 203 bp, synthetic construct
  source 1..203: mol_type = other DNA
ggcgcgccagtcctttttaagggatatgtttctgatacaaattgctccactgtgggaactgaccggttagtcttgtcagccagcattaccggcggccctgacaacagcaccaccctcacttatcgaaaggtttcatgcctgctgttaaagctgaacgtctccatgtgggatgagccacctgaactgcacgactcggaccgatg

SEQ ID NO: 4766 - DNA, 203 bp, synthetic construct
  source 1..203: mol_type = other DNA
ggcgcgccagtcctgctgctaggttcccagtctctccctaacgttactaacattactcaggtctctggcgtggccgggggatgtgtatatttcgccccaagggccactggcctgtttttaggttggtctaaacaaggtctctcgcggttcctcctccgtcacccctttacctccacctctaactccaccgactcggaccgatg

SEQ ID NO: 4767 - DNA, 203 bp, synthetic construct
  source 1..203: mol_type = other DNA
ggcgcgccagtcctggaaccgttcacggtggtgacagcggatagacacaatctttttatggggagtgagtactgtggtgcatatggctacagattttgggaaatatataactgctcacagactaggaatacttaccgctgtggagacgtgggaggtactggcctccctgaaacctggtgcagaggaaacgactcggaccgatg

SEQ ID NO: 4768 - DNA, 203 bp, synthetic construct
  source 1..203: mol_type = other DNA
ggcgcgccagtcctcctcggggacttattggatgatgtcacgagtattcgacacgcggtcctgcagaaccgagcggctattgacttcttgcttctagctcacggccatggctgtgaggacgttgccggaatgtgttgtttcaatctgagtgatcacagtgaatctatacagaagaagttccagctaatcgactcggaccgatg

SEQ ID NO: 4769 - DNA, 203 bp, synthetic construct
  source 1..203: mol_type = other DNA
ggcgcgccagtcctgaagaaacatgtcaataagatcggcgtggacagcgacccaatcggaagttggctgcgagggatattcgggggaataggggaatgggccgttcatctgctaaaaggactgcttttggggcttgtagttattttattgctactggtgtgcctgccttgccttttacaatttgtgtccgactcggaccgatg

SEQ ID NO: 4770 - DNA, 203 bp, synthetic construct
  source 1..203: mol_type = other DNA
ggcgcgccagtccttgtaacgcgcttaggaagtcccctcgaggtatggcagatatgctcttgcatagggggaaaaaatgtagtcttaatattgtctgtgtgctgcaggagctaagctgactctgctggtggcctcgcgtaccactgtggccaggcggtagctgggacgtgcagccgaccaccatggggcgactcggaccgatg

SEQ ID NO: 4771 - DNA, 203 bp, synthetic construct
  source 1..203: mol_type = other DNA
ggcgcgccagtcctttctggggcttcaacacttctgacaccgtcacgtcgccgcagcgtgccggggcactggctggcggcgtcaccactttcgtggctctctacgactacgagtcctggactgaaacggacttgtccttcaagaaaggagaacgcctgcagattgtcaacaacacggaaggtgactggcgactcggaccgatg

SEQ ID NO: 4772 - DNA, 203 bp, synthetic construct
  source 1..203: mol_type = other DNA
ggcgcgccagtccttggctggctcattccctcactacaggacagacgggctacatccccagtaactatgtcgcgccctcagactccatccaggctgaagagtggtactttgggaagatcactcgtcgggagtccgagcggctgctgcttaaccccgaaaacccccggggaaccttcttggtccggaagcgactcggaccgatg

SEQ ID NO: 4773 - DNA, 203 bp, synthetic construct
  source 1..203: mol_type = other DNA
ggcgcgccagtcctaagggagagatgggcaagtacctgcggctgccacagctcgtcgatatggctgctcagattgcatccggcatggcctatgtggagagaatgaactacgtgcaccgagacctgcgggcggccaacatcctggtgggggagaacctggtgtgcaaggtggctgacttcgggctggcacgactcggaccgatg

SEQ ID NO: 4774 - DNA, 203 bp, synthetic construct
  source 1..203: mol_type = other DNA
ggcgcgccagtcctcgcctcatcgaggacaacgagtacacagcacggcaaggtgccaagttccccatcaagtggacagcccccgaggcagccctctatggccggttcaccatcaagtcggatgtctggtccttcggcatcctgctgactgagctgaccaccaagggccgggtgccatacccagggatgcgactcggaccgatg

SEQ ID NO: 4775 - DNA, 203 bp, synthetic construct
  source 1..203: mol_type = other DNA
ggcgcgccagtcctgtcaacagggaggtgctggaccaggtggagaggggctaccgcatgccctgcccgcccgagtgccccgagtcgctgcatgacctcatgtgccagtgctggcggaaggaccctgaggagcggcccacctttaagtacctgcaggcccagctgctccctgcttgtgtgttggaggtccgactcggaccgatg

SEQ ID NO: 4776 - DNA, 203 bp, synthetic construct
  source 1..203: mol_type = other DNA
ggcgcgccagtccttaggaatcccctcaggacaattctgcttggaatatgatggcgtcttccctgttttgcccttagactattcgagttgcctctgtggattagggctggaggcagcacggatagtctgatggccaaataaggcaggcaagacagctatttgtaactgcgaaatacgcttttgcatagcgactcggaccgatg

SEQ ID NO: 4777 - DNA, 203 bp, synthetic construct
  source 1..203: mol_type = other DNA
ggcgcgccagtcctgggatcccatcactgcggcgctctcccagcgggcaatggtacttgggaaatcgggagagttaaaaacctggggattggttttgggggcattgaaggcggctcgagaggaacaggttacatctgagcaagcaaagttttggttgggattagggggagggagggtctctcccccagcgactcggaccgatg

SEQ ID NO: 4778 - DNA, 203 bp, synthetic construct
  source 1..203: mol_type = other DNA
ggcgcgccagtcctgtccggagtgcatcgagaaaccagcaacggagcggcgaatcgacaaaggggaggaagtgggagaaacaactgcgcagcgagatgcgaagatggcgccggagaaaatggccacacctaaaaccgttggcacatcctgctatcagtgcggaacagctactggctgtaattgcgccacgactcggaccgatg

SEQ ID NO: 4779 - DNA, 203 bp, synthetic construct
  source 1..203: mol_type = other DNA
ggcgcgccagtcctcatctgagtcctttgttgattttgccaatcggcttataaaggcggttgaggggtcagatctcccgccttccgcgcgggctccggtgatcattgactgctttaggcagaagtcacagccagatattcagcagcttatacgggcagcaccctccacgctgaccaccccaggagagacgactcggaccgatg

SEQ ID NO: 4780 - DNA, 203 bp, synthetic construct
  source 1..203: mol_type = other DNA
ggcgcgccagtccttaatcaaatatgtgctagacaggcagaagattgcccctcttacggatcaaggcatagccgcggccatgtcgtctgctatccagcccttagttatggcagtagtcaatagagagagggatggacaaactgggtcgggtggtcgtgcccgagggctctgctacacttgtggatccccgactcggaccgatg

SEQ ID NO: 4781 - DNA, 203 bp, synthetic construct
  source 1..203: mol_type = other DNA
ggcgcgccagtcctaaaagaattacagttaggacatatagaaccttcacttagttgttggaacacacctgtctttgtgatccggaaggcttccgggtcttatcgcttattgcatgacttgcgcgctgttaacgccaagcttgttccttttggggccgtccaacagggggcgccagttctctccgcgctcgactcggaccgatg

SEQ ID NO: 4782 - DNA, 203 bp, synthetic construct
  source 1..203: mol_type = other DNA
ggcgcgccagtcctgcctgataagatccagagggaacccggagtacaatatcttgggtacaagttaggcagtacgtatgtagcacccgtaggcctggtagcagaacccaggatagccaccttgtgggatgttcaaaagctggtggggtcacttcagtggcttcgcccagcgttaggaatcccgccacgcgactcggaccgatg

SEQ ID NO: 4783 - DNA, 203 bp, synthetic construct
  source 1..203: mol_type = other DNA
ggcgcgccagtcctgggggcaataggggtcctgggacagggactgtccacacacccaaggccatgtttgtggttattctccacccaacccaccaaggcgtttactgcttggttagaagtgctcacccttttgattactaagctacgcgcttcggcagtgcgaacctttggcaaggaggttgatatcctcgactcggaccgatg

SEQ ID NO: 4784 - DNA, 203 bp, synthetic construct
  source 1..203: mol_type = other DNA
ggcgcgccagtcctcgtggcagatagccaagccacctttcaagcgtatcccttgagagaggctaaagatcttcatactgctctccatattggaccccgcgcgctatccaaagcgtgtaatatatctatgcagcaggctagggaggttgttcagacctgcccgcattgtaattcagcccctgcgttggacgactcggaccgatg

SEQ ID NO: 4785 - DNA, 203 bp, synthetic construct
  source 1..203: mol_type = other DNA
ggcgcgccagtcctttacgggggtaagagctgatgtccacttactcgagcagccagggaacctttggattacatgggccaaccgtacaggccaaacggatttttgcctctctacacagtcagccacctccccttttcaaacatgtttgataggtatcccgtcccctatttccgaaggtgattttaaggcgactcggaccgatg

SEQ ID NO: 4786 - DNA, 203 bp, synthetic construct
  source 1..203: mol_type = other DNA
ggcgcgccagtcctcccagtctctccctaacattactaatattgctcagatttccggtataaccgggggatgcgtaggtttcagaccacaaggggttccttggtatctaggttggtctagacaggaggccacgcggtttctccttagacacccctctttctctaaatccacggaaccgtttacggtggcgactcggaccgatg

SEQ ID NO: 4787 - DNA, 203 bp, synthetic construct
  source 1..203: mol_type = other DNA
ggcgcgccagtccttggatgatgtcacgagtattcgacacgcggtcctgcagaaccgagcggctattgacttcttgcttctggctcacggccatggctgtgaggacgttgccggaatgtgttgtttcaatctgagtgatcacagtgagtctatacagaagaagttccagctaatgaaggaacatgtcacgactcggaccgatg

SEQ ID NO: 4788 - DNA, 203 bp, synthetic construct
  source 1..203: mol_type = other DNA
ggcgcgccagtcctttcagctcgtgtagctcattagctccgagctccccaacctacagcctgagaggcactggctcggttgggtagccagcctttcgggtaataaaggcttgttggcattcggcatctacccgtgcctcctgtcttgtcttactcgagcgaacccacaactccgtcctgctgagctcacgactcggaccgatg

SEQ ID NO: 4789 - DNA, 203 bp, synthetic construct
  source 1..203: mol_type = other DNA
ggcgcgccagtcctaatatattaggggtcattacagcaaacctagtacaggaagaaattaaactcctcttgaatagtacacccaagtggagattagatgtacaacttatagaatcaaaagtaagagagaaagaaaatgcccacagaacgtggaaacagcatcatccagaagccccaaaaacagatgaacgactcggaccgatg

SEQ ID NO: 4790 - DNA, 203 bp, synthetic construct
  source 1..203: mol_type = other DNA
ggcgcgccagtcctataaatagattagtggcagcccttgaaggtatggcggctccagaaaccacaaaagaatacttactccaacatctatctattgatcatgccaatgaagactgccagtctattctaagacctttgggacccaacaccccaatggagaaaaaattagaagcatgtagggtagtgggacgactcggaccgatg

SEQ ID NO: 4791 - DNA, 203 bp, synthetic construct
  source 1..203: mol_type = other DNA
ggcgcgccagtcctggaagacccacgtagagtggagatttaaggataagactgggataattgatgtcttgttctcagatactcctgtaaacctttttgggagatctcttctacgtagcatagtgacttgcttcaccctacttgttcacacagaaaaaatcgaacccctacccgtcaaggtaaggggaccgactcggaccgatg

SEQ ID NO: 4792 - DNA, 203 bp, synthetic construct
  source 1..203: mol_type = other DNA
ggcgcgccagtcctaagaaacagcactacaagtagctctctgcattttacagctaatccagagatatacagttcttcacttacatagtgacaacgggccgtgctttactgcacacaggatagaaaatctatgtaagtatctggggatcacaaaaactacgggaataccctacaacccacaatcccaggcgactcggaccgatg

SEQ ID NO: 4793 - DNA, 203 bp, synthetic construct
  source 1..203: mol_type = other DNA
ggcgcgccagtcctgagttgtagaaagagcccacagagatctaaaagacagattggcagcttatcagggagattgtgaaaccgtagaagcagcccttagcctcgcattagtttctttaaataaaaaaagagggggaatagggggccatacaccatatgaaatatacctagaatcagaacataccaaatcgactcggaccgatg

SEQ ID NO: 4794 - DNA, 203 bp, synthetic construct
  source 1..203: mol_type = other DNA
ggcgcgccagtcctagctggaacacacaccactgaagaaataggtcacttagatctcttttggcttaggtactgttcatgtccgcatgagatgcccccgtggctagacttccttagaggcaccctcaatctacgcatttcctgtcgacgcgctcttcaagcgtcagtgttgactagcacccctagacacgactcggaccgatg

SEQ ID NO: 4795 - DNA, 203 bp, synthetic construct
  source 1..203: mol_type = other DNA
ggcgcgccagtcctctccctccaacgcttagctgcacttcagctgtgcactaacgcatgtctctgttggtacccgttaggacgcatcaacgacaccaccccgttgtggttgaacttttcgtctgggaaggaaccaacgatccaacaactgagtggccacccctaactcgtcgtaacattcatagattgcgactcggaccgatg

SEQ ID NO: 4796 - DNA, 203 bp, synthetic construct
  source 1..203: mol_type = other DNA
ggcgcgccagtccttggcaatatgcccggaccttgggtggcgatgataatgttgccacagcccaaagaaagctttggaggaaagccaattggctggcttttctggaacacgtgcaaaggacctaggcgggactgtccacattgttgttgtcccatatgtagttggcattgtcagctttgctttttgcacgactcggaccgatg

SEQ ID NO: 4797 - DNA, 203 bp, synthetic construct
  source 1..203: mol_type = other DNA
ggcgcgccagtcctgaaaaatctaggaatcaactatggatcaggacctagacggcgcggaacgcggggaaaggggaggaggatccgaagaactgcttcaggaggagatcaacgaagggaggctgacagccagagaagctttacaaacatggatcaataacggtgagatccacccttgggtcctggcagcgactcggaccgatg

SEQ ID NO: 4798 - DNA, 203 bp, synthetic construct
  source 1..203: mol_type = other DNA
ggcgcgccagtcctgtcattccttctcaaaacaggcctctgcccggtggattcttgtaaaggtccccagctatgggtttgtggtagtaaatgacacagatacaccaccatccctccgcatccgaaagcctcgagcagtcggactagcaatattcctgcttgtgctggctatcatggccatcacatcctcgactcggaccgatg

SEQ ID NO: 4799 - DNA, 203 bp, synthetic construct
  source 1..203: mol_type = other DNA
ggcgcgccagtcctttatcttctcagctgattgtggttaggccgattactggaaactagacaacctgattcattagtggttaagattatgcataagtgctcgcaatgatgtagctgcttacgcttgcttactccgccctgaaacgcctaccttaacacgcaacacgcccacctgtaagaatatataaacgactcggaccgatg

SEQ ID NO: 4800 - DNA, 203 bp, synthetic construct
  source 1..203: mol_type = other DNA
ggcgcgccagtcctgaagcgttctcctcctgagaccctagtgctcagctctcggtcctgagctctcttgctcccgagaccttctggtcggctatccggcagcggtcaggtaaggcaaaccacggtttggagggtggttctcggctgagaccgccgcgagctctatctccggtcctctgaccgtctccacgactcggaccgatg

SEQ ID NO: 4801 - DNA, 203 bp, synthetic construct
  source 1..203: mol_type = other DNA
ggcgcgccagtcctcgtggactctctctcttgcctcctgaccccgcgctccaagggcgtctggcttgcacccgcgtttgtttcctgtcttactttctgtttctcgcggcccgcgctctctccctcggcgccctctagcggccaggagagaccggcaaacaattgggggctcgtccgggattgatcacccgactcggaccgatg

SEQ ID NO: 4802 - DNA, 203 bp, synthetic construct
  source 1..203: mol_type = other DNA
ggcgcgccagtcctccggaaccctaacgatcctctggacccaccccctcggcggcgttttgggtctttcctttaaattatatcatgggaaattccccctcctataacccccccgctggtatctccccctcagactggctcaaccttcgtcaaagcgcgcaaaggctcaatccgcgaccctctcctagccgactcggaccgatg

SEQ ID NO: 4803 - DNA, 203 bp, synthetic construct
  source 1..203: mol_type = other DNA
ggcgcgccagtcctgcaatcttacaggccgaccctactcctgctgacctagaacaactttgccaatatattgcttccccggtcgatcaaacggcccacatgaccagcctaacggcagcaatagccgccgctgaagcggccaataccctccagggttttaatccccaaaatgggaccctgacccaacaacgactcggaccgatg

SEQ ID NO: 4804 - DNA, 203 bp, synthetic construct
  source 1..203: mol_type = other DNA
ggcgcgccagtcctcacaccccagggcccaagatgcccgggcctcggcaaccggcccccaaaaggccccccccgggaccatgctatcgatgcctcaaagaaggccattgggcccgggactgtcccaccaagaccaccggcccccctccgggaccttgtcccatatgtaaagatccttcccattggaaacgactcggaccgatg

SEQ ID NO: 4805 - DNA, 203 bp, synthetic construct
  source 1..203: mol_type = other DNA
ggcgcgccagtcctcgagactgtccaaccctcaaatcaaaaaactaatagaggggggacttagcgccccccaaaccgtaacccctataacagatcctcttagtgaggccgaattagaatgcctactttctattcctctggctcgcagccgtccctccgtggctgtatacctgtctggcccctggctgccgactcggaccgatg

SEQ ID NO: 4806 - DNA, 203 bp, synthetic construct
  source 1..203: mol_type = other DNA
ggcgcgccagtcctagccctctcagaatcaagcccttatgctcgtggacaccggggctgaaaatacggtcctcccacaaaattggctggttcgagattacccacggatccccgccgcggtgctcggagcagggggagtctcccggaacagatacaattggctacaaggccctctgaccctggctctaacgactcggaccgatg

SEQ ID NO: 4807 - DNA, 203 bp, synthetic construct
  source 1..203: mol_type = other DNA
ggcgcgccagtcctcctccctacccccgggggactccaacctcacagacgctttgcctggcgggtcctacctcaaggcttcattaacagcccagctcttttcgaacgggcactacaggaaccccttcgccaagtttccgccgccttctcccagtctcttctggtgtcctatatggacgatatccttatcgactcggaccgatg

SEQ ID NO: 4808 - DNA, 203 bp, synthetic construct
  source 1..203: mol_type = other DNA
ggcgcgccagtcctcgcttcgcctacagaagaacaacggtcacaatgttatcaagccctggctgcccgcctccgggacctagggtttcaggtggcgtctgaaaagactcgccagacgccttcgcccgtccccttcttgggacaaatggtccataaccagattgtcacctatcagtccctacctaccttcgactcggaccgatg

SEQ ID NO: 4809 - DNA, 203 bp, synthetic construct
  source 1..203: mol_type = other DNA
ggcgcgccagtcctgcagatctcatccccaatttctcttcaccaattacaggcggtcttgggagacctccagtgggtctctaggggcacacccactacccgccggcccctgcaacttctctactcttcccttaaaggcatcgatgaccctagggccatcatccagctttccccggaacagctacaaggcgactcggaccgatg

SEQ ID NO: 4810 - DNA, 203 bp, synthetic construct
  source 1..203: mol_type = other DNA
ggcgcgccagtcctcattgcagagcttcgacaagccctgtcccataacgcaagatctagatataacgagcaagaacccctgctggcctacgtacacctaacccgggcagggtccaccctggtactcttccaaaagggcgctcaatttcccctggcctactttcagacccccttgactgacaaccaagccgactcggaccgatg

SEQ ID NO: 4811 - DNA, 203 bp, synthetic construct
  source 1..203: mol_type = other DNA
ggcgcgccagtcctctcaccttggggcctccttctcctgctgggatgccaatacctgcagactcaggccttaagctcttatgccaagcccatactcaaatactatcacaatcttcctaaaacctctctcgacaattggattcaatcatctgaggaccctcgagttcaggagttgttgcaattgtggcccgactcggaccgatg

SEQ ID NO: 4812 - DNA, 203 bp, synthetic construct
  source 1..203: mol_type = other DNA
ggcgcgccagtcctctccaaaacctttgtcaggttttgccagcagttcggaatttccctttctcatcacgttccctacaaccccacaagttcagggttggtagagcggacaaatggactgctcaaacttcttttgtctaaatatcacctagacgaaccccaccttcccatgactcaggccctttctcgcgactcggaccgatg

SEQ ID NO: 4813 - DNA, 203 bp, synthetic construct
  source 1..203: mol_type = other DNA
ggcgcgccagtcctcagcccatccagacttggagatgctccctgtccctaggaaatcaacaatggatgacaacatataaccaagaggcaaaattttccatctccattgaccaaatattagaggctcacaatcaatcacctttctgtcccaggtctcccagatacaccttggacttcgtaaatggttatcgactcggaccgatg

SEQ ID NO: 4814 - DNA, 203 bp, synthetic construct
  source 1..203: mol_type = other DNA
ggcgcgccagtcctttattcctgcatctcaaacaatgtcatggaattttcactctaacctgggaaatatggggatatgatcccctgatcaccttttctttacataaaattcctgatccccctcaacccgacttccctcagctgaacagtgactgggttccctctgtcagatcatgggccctgcttttacgactcggaccgatg

SEQ ID NO: 4815 - DNA, 203 bp, synthetic construct
  source 1..203: mol_type = other DNA
ggcgcgccagtcctaatcaaacggcacgggccttcccagactgtgctatatgttgggaaccttcccctccctgggctcccgaaatattagtatataacaaaaccatctccggctctggacccggtctcgccctcccggacgcccaaatcttctgggtcaacacgtccttgtttaacaccacccaaggacgactcggaccgatg

SEQ ID NO: 4816 - DNA, 203 bp, synthetic construct
  source 1..203: mol_type = other DNA
ggcgcgccagtccttggcaccacccttcccagaggttgttgttcaatgtttctcaaggcaacgccttattattaccccctatctccctggttaatctctctacggtttcctccgcccctcctacccgggtcagacgcagtcccgtcgcagccctgaccttaggcctagccctgtcagtggggctcactcgactcggaccgatg

SEQ ID NO: 4817 - DNA, 203 bp, synthetic construct
  source 1..203: mol_type = other DNA
ggcgcgccagtcctcggctgggttttcaaagcctatgtcccacaatcaatgaaccttgctgtttcctacgcattcaaaatgactccattatccgcctcggtgatctccagcctctctcgcaaagagtctctacagactggcagtggccctggaattgggatctggggctcaccgcctgggtgcgagaacgactcggaccgatg

SEQ ID NO: 4818 - DNA, 203 bp, synthetic construct
  source 1..203: mol_type = other DNA
ggcgcgccagtccttcagcaccagagatctactctcacctctcccccaccaaacccgattacatcaaccttcgaccctgcccttgacacccccgtgtttcacgcaccctcaggctgtggtggggcactggcttagtggaatagtcagtgtaccatcacaagcctcttcttgctgccagcaccgagttccgactcggaccgatg

SEQ ID NO: 4819 - DNA, 203 bp, synthetic construct
  source 1..203: mol_type = other DNA
ggcgcgccagtcctgaacacagccctaccctgagcctctctgagtacatgactgagtgtagcgcagagaggttgtcgcttctgcgtgtcactcagtcattttttatagccgattggggttcgcgccctcccattgcctgtgacacggttaagacctctctcacttctgcttcaccatccccctgccagcgactcggaccgatg

SEQ ID NO: 4820 - DNA, 203 bp, synthetic construct
  source 1..203: mol_type = other DNA
ggcgcgccagtcctcgttggtctagtggaaagaactaacgctgacgggggcgatttcttgcagctgtgctaagcgagaggctctggtgctggggataagatgcggcccctagcaccacagtctctgcgccttttgggttcgaatcttccccatgcagcttccgctttttacgccctgttgcacaccctcgactcggaccgatg

SEQ ID NO: 4821 - DNA, 203 bp, synthetic construct
  source 1..203: mol_type = other DNA
ggcgcgccagtcctagtgtgcacaatatctcttccaaaaggtcctgatgaacatcttcccatgtaacaagccccagcagagacattccagccacatccagcagcatttgggccgccttctctaacagtgcccataaagtcccttccgtttccacaacggctgcctctgcatcttctatttccacctcgcgactcggaccgatg

SEQ ID NO: 4822 - DNA, 203 bp, synthetic construct
  source 1..203: mol_type = other DNA
ggcgcgccagtcctgcccccttccggccgttcgcgctcagcccggcccggtttcactttcccccttcgagcagtcccccttccagccctaccaatgccaattgccctcggcctctagcgacggttgccccatcatcgggcacggccttcttccctggaacaacttagtaacgcatcctgtcctcggaacgactcggaccgatg

SEQ ID NO: 4823 - DNA, 203 bp, synthetic construct
  source 1..203: mol_type = other DNA
ggcgcgccagtcctaagtccttatattaaatcaaatggccaatttttccttactcccccccttcgataccctccttgtagaccccctccggctgtccgtctttgccccggacactaggggagccatacgttatctctccacccttttgacgctatgcccagttacttgtattctacccctaggcgagccgactcggaccgatg

SEQ ID NO: 4824 - DNA, 203 bp, synthetic construct
  source 1..203: mol_type = other DNA
ggcgcgccagtcctgtcctcaggccttacaacgcttcctccatgaccctacgctcacctggtcagaattggttgctagcgggaaactaagacttgattcacccttaaaattacagctgttagaaaatgaatggctctcccgccttttttgagggggagtcatttgtatgaaagatcatgcaggcctagcgactcggaccgatg

SEQ ID NO: 4825 - DNA, 203 bp, synthetic construct
  source 1..203: mol_type = other DNA
ggcgcgccagtcctttagcggcaccagaagcgttctcctcctgagaccctagtgctcagctctcggtcctgagctctcttgctcccgagaccttctggtcggctatccggcagcggtcaggtaaggcaaaccacggtttggagggtggttctcggctgagaccgccgcgagctctatctccggtcctccgactcggaccgatg

SEQ ID NO: 4826 - DNA, 203 bp, synthetic construct
  source 1..203: mol_type = other DNA
ggcgcgccagtcctctcccgagaccttctggtcggctatccggcagcggtcaggtaaggcaaaccacggtttggagggtggttctcggctgagaccgccgcgagctctatctccggtcctctgaccgtctccacgtggactctctctcttgcctcctgaccccgcgctccaagggcgtctggcttgcacgactcggaccgatg

SEQ ID NO: 4827 - DNA, 203 bp, synthetic construct
  source 1..203: mol_type = other DNA
ggcgcgccagtccttctgtttccccggtgaagttgcatagactgtacccacggttgaaagcgatgaatccgttacccgcttaggtacttcgagaagcctagtatcatcttggaatcttcgatgcgttgcgatcagcactctaccccgagtgtagcttgggtcgatgagtctggacaccccacaccggccgactcggaccgatg

SEQ ID NO: 4828 - DNA, 203 bp, synthetic construct
  source 1..203: mol_type = other DNA
ggcgcgccagtcctgtccaataccactacctgtataggagtgggttcctgtgccacgtacaatgcaatgctacaaaatttcaccaaggtactcttctaatagtggctatcccagaacaccaaattggaaagaaaggaacaggtacgtcagcaagctttgctgaagtcatgaaaggggctgaaggtggacgactcggaccgatg

SEQ ID NO: 4829 - DNA, 203 bp, synthetic construct
  source 1..203: mol_type = other DNA
ggcgcgccagtcctattccggtatgtccattggcaggaggtactggcaacacaaacacctatgtgccaattaccatctccattgctcccatgtgtgctgaatacaatgggcttagaaatgccattacacaaggagtgcccacttgcctgttgccaggctccaaccaatttttgactactgatgaccaccgactcggaccgatg

SEQ ID NO: 4830 - DNA, 203 bp, synthetic construct
  source 1..203: mol_type = other DNA
ggcgcgccagtcctttaggcagatctgcacttgtgtgtatgcgatcatttgagtacaagaatcactcaacaagtacctcatccattcaaaagaatttcttcatctggactttgaacaccagagaacttgtccaaattaggaggaagatggaattgtttacttacctaaggtttgacactgaaataactcgactcggaccgatg

SEQ ID NO: 4831 - DNA, 203 bp, synthetic construct
  source 1..203: mol_type = other DNA
ggcgcgccagtcctctaacagttagggtatatatgaagcctaagcatattaaggcctgggcacctagggcgcctcgcaccatgccctataccaacatcctcaacaacaattatgcaggtcggtcagctgcacccaatgctcccacagccatagtgtcccataggagtaccataaagacaatgcccaaccgactcggaccgatg

SEQ ID NO: 4832 - DNA, 203 bp, synthetic construct
  source 1..203: mol_type = other DNA
ggcgcgccagtcctctcttagtctgctcacatggagtgataggactcgtcaccgcaggcggtgagggaatagttgctttcacagacattagaaatctcctgtggttagaggatgatgccatggaacaaggtataacagattacatccagaaccttggtagcgcctttgggactggatttactgagacccgactcggaccgatg

SEQ ID NO: 4833 - DNA, 203 bp, synthetic construct
  source 1..203: mol_type = other DNA
ggcgcgccagtcctatcagtgaaaaggctaaagagattcagaacatgctagttggagaggacagtttattggaaaagcttcttaaagcattaatcaaaatagtatctgcaatggtgattgtgattaggaattcagaagatctagttacagtcactgcaacacttgccctcctagggtgcaatgactcacgactcggaccgatg

SEQ ID NO: 4834 - DNA, 203 bp, synthetic construct
  source 1..203: mol_type = other DNA
ggcgcgccagtcctccatgggcgtttcttaaacagaaagtttgctcatatcttggcatcccatacacaataagacagagtgattcttggctcaagaagttcacagaggcatgcaatgcattgagaggcctggattggctagcacaaaagattgacaagtttatcaactggcttaaaacaaagattctccgactcggaccgatg

SEQ ID NO: 4835 - DNA, 203 bp, synthetic construct
  source 1..203: mol_type = other DNA
ggcgcgccagtccttcttactcactcccacctgatccaaaatattttgatgggtataaacaacagacagtggtcctgatggatgacttaatgcaaaatccagatggtaatgatattgctatgttttgtcagatggtatctactgtagactttataccaccaatggccagtcttgaggaaaagggaacccgactcggaccgatg

SEQ ID NO: 4836 - DNA, 203 bp, synthetic construct
  source 1..203: mol_type = other DNA
ggcgcgccagtcctaacccagaaaagtgcagaccaaccaactataaaaagtgttgtccactgatttgtggaaaggccattcagtttagagacaagagaacgaacgtcaggtactcagtagatatgttagtaactgaaatgatcaaggaatataggatcagaaacagcacacaagataaattggaggctcgactcggaccgatg

SEQ ID NO: 4837 - DNA, 203 bp, synthetic construct
  source 1..203: mol_type = other DNA
ggcgcgccagtcctcagcgttggtatactgcccctacccgcgggccggctgctaattgccggcgttccgcactgcgcgggctccccgctgctgaccgcacttactgcttcgacgggttttctggctgtaactttcccgccgagactggcgtcgccctctattctctccatgatatgtcaccatctgatcgactcggaccgatg

SEQ ID NO: 4838 - DNA, 203 bp, synthetic construct
  source 1..203: mol_type = other DNA
ggcgcgccagtcctcgatcgatcttcggcccgggtggtaccccctccctatttccaacctcatgctccactaagtcgaccttccatgctgtccctgcccatatctgggaccgtctcatgttgttcggggccaccctagatgaccaagccttttgctgctcccgcctaatgacttacctccgtggcattcgactcggaccgatg

SEQ ID NO: 4839 - DNA, 203 bp, synthetic construct
  source 1..203: mol_type = other DNA
ggcgcgccagtcctagctacaaggttactgtgggcacccttgttgccaatgaaggctggaacgcctctgaggtcgctcttacagctgtcatcactgccgcctaccttaccatctgccaccagcggtacctccgcactcaggctatatctaaggggatgcgccgtctggagcgggagcatgctcagaagcgactcggaccgatg

SEQ ID NO: 4840 - DNA, 203 bp, synthetic construct
  source 1..203: mol_type = other DNA
ggcgcgccagtccttttataacacgcctctacagttggctctttgagaagtccggccgtgattatatccccggccgtcagttggagttctacgctcagtgtaggcgctggctctcggccggctttcatcttgacccacgggtgttggtttttgatgagtcggccccctgccactgtaggactgcgattcgactcggaccgatg

SEQ ID NO: 4841 - DNA, 203 bp, synthetic construct
  source 1..203: mol_type = other DNA
ggcgcgccagtcctccccggtcagcccctggcgaggtcaccgccttttgttctgccctatacaggtttaatcgcgaggcccagcgcctttcgctcaccggtaatttttggttccatcctgaggggctccttggcccctttgccccgttttcccccgggcatgtttgggagtcggctaatccattctgtcgactcggaccgatg

SEQ ID NO: 4842 - DNA, 203 bp, synthetic construct
  source 1..203: mol_type = other DNA
ggcgcgccagtcctccggcgcgtggtgagccggctcctggcgctaccgcccgggccccggccataacccaccaggcggcccggcatcgccgcctgctctttacctacccggatggctctaaggtattcgccggctcgctgtttgagtcgacatgtacctggctcgttaacgcgtctaatgttgaccaccgactcggaccgatg

SEQ ID NO: 4843 - DNA, 203 bp, synthetic construct
  source 1..203: mol_type = other DNA
ggcgcgccagtcctcgccctggcggtgggctctgtcatgcattttaccaaaggtaccccgcatcctttgatgctgcctcttttgtgatgcgcgacggcgcggccgcctatacattaaccccccggccaataattcacgccgtcgctcctgattataggttggaacataacccaaagatgcttgaggctcgactcggaccgatg

SEQ ID NO: 4844 - DNA, 203 bp, synthetic construct
  source 1..203: mol_type = other DNA
ggcgcgccagtcctgcctaccgggagacttgctcccgcctcggtaccgctgcatacccactcctcgggaccggcatataccaggtgccgatcggtcccagttttgacgcctgggagcggaatcaccgccccggggatgagttgtaccttcctgagcttgctgccagatggttcgaggccaataggccgcgactcggaccgatg

SEQ ID NO: 4845 - DNA, 203 bp, synthetic construct
  source 1..203: mol_type = other DNA
ggcgcgccagtcctacctgcccaactctcactataactgaggatgttgcacggacagcaaatctggctatcgaacttgactcagccacagacgtcggccgggcctgtgccggctgtcgagtcacccccggcgttgtgcagtaccagtttaccgcaggtgtgcctggatccggcaagtcccgctctattcgactcggaccgatg

SEQ ID NO: 4846 - DNA, 203 bp, synthetic construct
  source 1..203: mol_type = other DNA
ggcgcgccagtcctcagcgggccgccaccgtccaccttcttggtgacccgaatcagatcccagccatcgactttgagcacgccgggctcgttcccgccatcaggcccgatttggcccccacctcctggtggcatgtgacccatcgctgccctgcggatgtatgtgagctgatccgtggcgcataccctcgactcggaccgatg

SEQ ID NO: 4847 - DNA, 203 bp, synthetic construct
  source 1..203: mol_type = other DNA
ggcgcgccagtcctcgaggcctcattcagtcgtcccgagctcatgccattgttgccttgacgcgccacactgagaagtgcgtcatcattgacgcaccaggcctgcttcgcgaggtgggcatctccgatgcaatcgttaataactttttccttgctggtggcgaaattggccaccagcgcccatctgttcgactcggaccgatg

SEQ ID NO: 4848 - DNA, 203 bp, synthetic construct
  source 1..203: mol_type = other DNA
ggcgcgccagtcctgaactcaccacctgtgatagtgtcgtaacatttgaattaacagatattgtgcactgtcgtatggccgccccgagccagcgcaaggccgtgctgtccacgcttgtgggccattacggccgccgcacaaagctctacaatgcctcccactctgatgttcgcgactctctcgcccgtcgactcggaccgatg

SEQ ID NO: 4849 - DNA, 203 bp, synthetic construct
  source 1..203: mol_type = other DNA
ggcgcgccagtccttttatcccggccattggccacgtacaggttacaacctgtgaattgtacgagctagtggaggccatggtcgagaagggccaggacggctccgccgtccttgagctcgacctttgtaaccgcgacgtgtccaggatcaccttcttccagaaagattgtaataaattcaccacggggcgactcggaccgatg

SEQ ID NO: 4850 - DNA, 203 bp, synthetic construct
  source 1..203: mol_type = other DNA
ggcgcgccagtcctgcagcaagggcatccatggtgtttgagaatgacttttctgagtttgattccacccagaataatttttccttgggcctagagtgtgctattatggtggagtgtgggatgccgcagtggctcatccgcttgtaccaccttataaggtctgcgtggattctgcaggccccgaaggagcgactcggaccgatg

SEQ ID NO: 4851 - DNA, 203 bp, synthetic construct
  source 1..203: mol_type = other DNA
ggcgcgccagtccttccctgcgagggttttggaagaaacactccggtgagcccggcacccttctatggaatacagtctggaacatggccgttatcacccactgttatgatttccgcgatctgcaggtggccgcctttaaaggtgatgattcgatagtgctttgcagtgagtaccgtcagagcccagggcgactcggaccgatg

SEQ ID NO: 4852 - DNA, 203 bp, synthetic construct
  source 1..203: mol_type = other DNA
ggcgcgccagtcctctccgcctcgctgtgagtgattttctccgcaagctcacgaatgtagctcagatgtgtgtggatgttgtctctcgtgtttatggggtttcccctggactcgttcataacctgattggcatgctacaggctgttgctgacggcaaggctcatttcactgagtcagtgaagccagtgcgactcggaccgatg

SEQ ID NO: 4853 - DNA, 203 bp, synthetic construct
  source 1..203: mol_type = other DNA
ggcgcgccagtcctcagcggcggttccggcggtggtttctggggtgaccgggctgattctcagcccttcgcaatcccctatattcatccaaccaaccccttcgcccccgatgtcaccgctgcggccggggctggacctcgtgttcgccaacccgcccgaccactcggctccgcttggcgtgaccaggccgactcggaccgatg

SEQ ID NO: 4854 - DNA, 203 bp, synthetic construct
  source 1..203: mol_type = other DNA
ggcgcgccagtcctccagcgccccgccgctgcctcacgtcgtagacctaccacagctggggccgcgccgctaaccgcggtcgctccggcccatgacaccccgccagtgcctgatgttgactcccgcggcgccatcctgcgccggcagtataacctatcaacatctccccttacctcttccgtggccaccgactcggaccgatg

SEQ ID NO: 4855 - DNA, 203 bp, synthetic construct
  source 1..203: mol_type = other DNA
ggcgcgccagtcctctccatctcgttctggccacagaccaccaccaccccgacgtccgttgacatgaattcaataacctcgactgatgttcgtattttagtccagcccggcatagcctccgagcatgttatcccaagtgagcgcctacactatcgtaaccaaggttggcgctctgttgagacctccggcgactcggaccgatg

SEQ ID NO: 4856 - DNA, 203 bp, synthetic construct
  source 1..203: mol_type = other DNA
ggcgcgccagtcctctccagcactgcccgtcaccgccttcgtcgcggtgcagatgggactgccgagctcaccaccacggctgctacccgcttcatgaaggacctctattttactagtactaatggtgtcggtgagatcggccgcgggatagcgcttaccctgtttaaccttgctgacaccctgcttggcgactcggaccgatg

SEQ ID NO: 4857 - DNA, 203 bp, synthetic construct
  source 1..203: mol_type = other DNA
ggcgcgccagtccttattcaggattatgataaccaacatgagcaggaccgaccgacaccttccccagccccatcgcgccccttttctgtcctccgagctaatgatgtgctttggctttctctcaccgctgccgagtatgaccagtccacttacggctcttcgaccggcccagtctatgtctctgactccgactcggaccgatg

SEQ ID NO: 4858 - DNA, 203 bp, synthetic construct
  source 1..203: mol_type = other DNA
ggcgcgccagtcctcgggtacccttataattataacaccactgctagtgaccaactgctcgttgagaatgccgctgggcatcgggttgctatttccacttacaccactagcctgggtgctggccccgtctctatttccgcggttgctgttttagccccccactctgcgctagcattgcttgaggataccgactcggaccgatg

SEQ ID NO: 4859 - DNA, 203 bp, synthetic construct
  source 1..203: mol_type = other DNA
ggcgcgccagtcctcccggagtgccgcccccttggcctccagggctgtgcttttcagtctactgtcgctgagcttcagcgccttaagatgaaggtgggtaaaactcgggagttatagtttatttgcttgtgccccccttctttctgttgcttatttctcatttctgcgttccgcgctccctgaaaaaacgactcggaccgatg

SEQ ID NO: 4860 - DNA, 203 bp, synthetic construct
  source 1..203: mol_type = other DNA
ggcgcgccagtcctaacgagaacttggaacactcattgacgccgtgaacaagcggggcagaaaacaaaacaaaagaggaggaaatgaaggctcaatcatgtggctcgcaagcttggcagttgtcatagcttacgcaggagcaatgaagttgtcgaatttccaggggaagcttttgatgaccatcaacacgactcggaccgatg

SEQ ID NO: 4861 - DNA, 203 bp, synthetic construct
  source 1..203: mol_type = other DNA
ggcgcgccagtcctctggctatgctttcctggcggcgacacttggctggatgcttggcagtaacaacggtcaacgcgtggtatttaccatcctcctgctgttggtcgctccggcttacagttttaattgtctgggaatgggcaatcgtgacttcatagaaggagccagtggagccacttgggtggactcgactcggaccgatg

SEQ ID NO: 4862 - DNA, 203 bp, synthetic construct
  source 1..203: mol_type = other DNA
ggcgcgccagtcctacaacgagaagcgagctgatagtagctatgtgtgcaaacaaggcttcactgatcgtgggtggggcaacggatgtggacttttcgggaagggaagcattgacacatgtgcaaaattctcctgcaccagcaaagcgattggaagaacaatccagccagaaaacatcaaatacgaagcgactcggaccgatg

SEQ ID NO: 4863 - DNA, 203 bp, synthetic construct
  source 1..203: mol_type = other DNA
ggcgcgccagtcctttgggtcacaggaaggaggcctccatcaggcgttggcaggagccatcgtggtggagtactcaagctcagtgaagttaacatcaggccacctgaaatgtaggctgaaaatggacaaactggctctgaaaggcacaacctatggcatgtgtacagaaaaattctcgttcgcgaaaacgactcggaccgatg

SEQ ID NO: 4864 - DNA, 203 bp, synthetic construct
  source 1..203: mol_type = other DNA
ggcgcgccagtcctatccggcggacactggccacggaacagttgtcattgaactatcctactctgggagtgatggcccctgcaaaattccgattgtctccgttgcgagcctcaatgacatgacccccgttgggcggctggtgacagtgaaccctttcgtcgcgacttccagtgccaactcaaaggtgccgactcggaccgatg

SEQ ID NO: 4865 - DNA, 203 bp, synthetic construct
  source 1..203: mol_type = other DNA
ggcgcgccagtccttggtcgagatggaaccccccttcggagactcctacatcgtggttgggaggggagacaagcagatcaaccaccattggcacaaagctggaagcacgctaggcaaggccttttcaacaactttgaagggagctcaaagactggcagcgttgggcgacacagcctgggactttggctcgactcggaccgatg

SEQ ID NO: 4866 - DNA, 203 bp, synthetic construct
  source 1..203: mol_type = other DNA
ggcgcgccagtcctcaggaggtgtgctcgtgttcttagcgaccaatgtgcatgctgacactggatgtgccattgacatcacaagaaaagagatgagatgtggaagtggcatctttgtgcacaacgacgtggaagcctgggtggacaggtataaatacttgccagaaacgcccagatccctagcgaagacgactcggaccgatg

SEQ ID NO: 4867 - DNA, 203 bp, synthetic construct
  source 1..203: mol_type = other DNA
ggcgcgccagtccttcagacctgtcaggcatgatgaaacaacactcgttagatcacaggttgatgctttcaatggtgaaatggttgacccttttcagctgggccttctggtgatgtttctggccacccaggaggtccttcgcaagaggtggacggccagattgaccattcctgcggttttgggggccccgactcggaccgatg

SEQ ID NO: 4868 - DNA, 203 bp, synthetic construct
  source 1..203: mol_type = other DNA
ggcgcgccagtccttacttgtgctgatgcttgggggcatcacttacactgatttggcgaggtatgtggtgctagtcgctgccgctttcgcagaggccaacagtggaggagacgtcctgcatcttgctttgattgccgtttttaagatccaaccagcgtttctagtgatgaacatgcttagcacgagatcgactcggaccgatg

SEQ ID NO: 4869 - DNA, 203 bp, synthetic construct
  source 1..203: mol_type = other DNA
ggcgcgccagtcctctgccggactaatggtctgcaacccaaacaagaagagagggtggccagccactgagtttttgtcggcagttggattgatgtttgccatcgtaggtggcttggccgagttggatattgaatccatgtcaatacccttcatgctggcaggtctcatggcagtgtcctacgtggtgtcgactcggaccgatg

SEQ ID NO: 4870 - DNA, 203 bp, synthetic construct
  source 1..203: mol_type = other DNA
ggcgcgccagtcctttggcacttaccaggccggcgtcggagtcatgtacgagaatgttttccacacactatggcacacaactagaggagcagccattatgagtggagaaggaaaattgacgccatactggggtagtgtgaaagaagaccgcatagcttacggaggcccatggaggtttgaccgaaaatcgactcggaccgatg

SEQ ID NO: 4871 - DNA, 203 bp, synthetic construct
  source 1..203: mol_type = other DNA
ggcgcgccagtcctgaaccacggatccttttcctgactcaaatgccccaatccatgatttgcaagatgagataccagacagggcatggagcagtggatacgaatggatcacagaatatgcgggcaaaaccgtgtggtttgtggcgagcgtaaaaatggggaatgagattgcaatgtgcctccaaagagcgactcggaccgatg

SEQ ID NO: 4872 - DNA, 203 bp, synthetic construct
  source 1..203: mol_type = other DNA
ggcgcgccagtcctccaatggcattcagtacaccgacagaaggtggtgttttgatgggccgcgcacgaatgccatactggaggacaacaccgaggtagagatagtcacccggatgggtgagaggaaaatcctcaagccgagatggcttgatgcaagagtttatgcagatcaccaagccctcaagtggtcgactcggaccgatg

SEQ ID NO: 4873 - DNA, 203 bp, synthetic construct
  source 1..203: mol_type = other DNA
ggcgcgccagtccttgctgatcgccctgctgctgatggtggtgctcatcccagaaccggaaaaacagaggtcacagacagataaccaactggcggtgtttctcatctgcgtcttgaccgtggttggagtggtggcagcaaacgagtacgggatgctagagaaaaccaaagcagatctcaagagcatgtcgactcggaccgatg

SEQ ID NO: 4874 - DNA, 203 bp, synthetic construct
  source 1..203: mol_type = other DNA
ggcgcgccagtcctttgtcggaaagacgcaggcatcagggctgactggattgccaagcatggcactggacctgcgtccagccacagcctgggcactgtatggggggagcacagtcgtgctaacccctcttctgaaacacctgatcacgtcggaatacgtcaccacatcgctagcctcaattaactcaccgactcggaccgatg

SEQ ID NO: 4875 - DNA, 203 bp, synthetic construct
  source 1..203: mol_type = other DNA
ggcgcgccagtcctatgtcaccactgtgagagaagcaggggtattggtgacggcggctacgctcactttgtgggacaatggagccagtgccgtctggaattccaccacagccacgggactctgccatgttatgcgaggtagctacctggctggaggttccattgcttggactctcatcaagaacgcggcgactcggaccgatg

SEQ ID NO: 4876 - DNA, 203 bp, synthetic construct
  source 1..203: mol_type = other DNA
ggcgcgccagtcctcatctgactggttgcaccgaggacctagagagttctgcataaaagttctctgcccttacatgcccaaggttatagaaaaaatggaagttctgcagcgccgcttcggaggtgggctagtgcgtctccccctgtcccggaactccaatcacgagatgtattgggttagtggagccgcgactcggaccgatg

SEQ ID NO: 4877 - DNA, 203 bp, synthetic construct
  source 1..203: mol_type = other DNA
ggcgcgccagtcctctggcaatgtggtgcacgctgtgaacatgaccagccaggtactactggggcgaatggatcgcacagtgtggagagggccaaagtatgaggaagatgtcaacctagggagcggaacaagagccgtgggaaagggagaagtccatagcaatcaggagaaaatcaagaagagaatcccgactcggaccgatg

SEQ ID NO: 4878 - DNA, 203 bp, synthetic construct
  source 1..203: mol_type = other DNA
ggcgcgccagtcctaatttataaagaaagtcaacagcaacgcggctcttggagcagtgttcgctgaacagaatcaatggagcacggctcgtgaggctgtggatgacccgcggttctgggagatggttgatgaagagagggaaaaccatctgcgaggagagtgtcatacatgtatctacaacatgatggcgactcggaccgatg

SEQ ID NO: 4879 - DNA, 203 bp, synthetic construct
  source 1..203: mol_type = other DNA
ggcgcgccagtcctagctgggatacatcctccgtgacatagcaggaaagcaaggagggaaaatgtacgctgatgacaccgccggatgggacactagaattaccagaactgatttagaaaatgaagccaaggtgctggagctcctagacggtgaacaccgcatgctcgctcgagccataattgaactgacgactcggaccgatg

SEQ ID NO: 4880 - DNA, 203 bp, synthetic construct
  source 1..203: mol_type = other DNA
ggcgcgccagtcctcttacaggcacaaagtggtcaaggtcatgagacctgcagcagaaggaaagaccgtaatggacgtgatatcaagagaagatcaaagggggagtggacaggtggtcacttatgcccttaacactttcacgaacattgctgtccagctcgtcaggctgatggaggctgagggggtcacgactcggaccgatg

SEQ ID NO: 4881 - DNA, 203 bp, synthetic construct
  source 1..203: mol_type = other DNA
ggcgcgccagtcctttggaccacaacacttggaacagctacctagaaaaaccaagatagctgtcaggacctggctctttgagaatggagaggagagagtgaccaggatggcgatcagcggagatgactgtgtcgtcaagccgctggatgacagattcgccacagccctccacttcctcaacgcaatgtcgactcggaccgatg

SEQ ID NO: 4882 - DNA, 203 bp, synthetic construct
  source 1..203: mol_type = other DNA
ggcgcgccagtcctgagctggatggaatgtgaaggacacagcttgtctggccaaagcatatgcacagatgtggctactcctatacttccatcgtagggacttgcgtctcatggcaaatgcgatttgctcagcagtgccagtggattgggtgcccacaggcaggacgtcctggtcaatacactcgaaagcgactcggaccgatg

SEQ ID NO: 4883 - DNA, 203 bp, synthetic construct
  source 1..203: mol_type = other DNA
ggcgcgccagtcctaaaatgcatgcatatggagtcaggccagcaaaagctgccaccggatactgggtagacggtgctgtctgcgtctcagtcccaggaggactgggttaacaaatctgacaacagaaagtgagaaagccctcagaaccgtctcggaagtaggtccctgctcactggaagttgaaagaccgactcggaccgatg

SEQ ID NO: 4884 - DNA, 203 bp, synthetic construct
  source 1..203: mol_type = other DNA
ggcgcgccagtcctggcccaagccccctcgaagctgtagaggaggtggaaggactagaggttagaggagaccccgcatttgcatcaaacagcatattgacacctgggaatagactgggagatcttctgctctatctcaacatcagctactaggcacagagcgccgaagtatgtagctggtggtgaggacgactcggaccgatg

SEQ ID NO: 4885 - DNA, 203 bp, synthetic construct
  source 1..203: mol_type = other DNA
ggcgcgccagtcctcgaagctgtagaggaggtggaaggactagaggttagaggagaccccgcatttgcatcaaacagcatattgacacctgggaatagactgggagatcttctgctctatctcaacatcagctactaggcacagagcgccgaagtatgtagctggtggtgaggaagaacacaggatctcgactcggaccgatg

SEQ ID NO: 4886 - DNA, 203 bp, synthetic construct
  source 1..203: mol_type = other DNA
ggcgcgccagtcctcctgtctctagtttgtctgttcgagatcctacagttggcgcccgaacagggacctgagaggggcgcagaccctacctgttgaacctggctgatcgtaggatccccgggacagcagaggagaacttacagaagtcttctggaggtgttcctggccagaacacaggaggacaggtacgactcggaccgatg

SEQ ID NO: 4887 - DNA, 203 bp, synthetic construct
  source 1..203: mol_type = other DNA
ggcgcgccagtcctagatgggagaccctttgacatggagcaaggcgctcaagaagttagagaaggtgacggtacaagggtctcagaaattaactactggtaactgtaattgggcgctaagtctagtagacttatttcatgataccaactttgtaaaagaaaaggactggcagctgagggatgtcattccgactcggaccgatg

SEQ ID NO: 4888 - DNA, 203 bp, synthetic construct
  source 1..203: mol_type = other DNA
ggcgcgccagtcctgggaatcccagggggaatctcaacccctattacccaacagtcagaaaaatctaagtgtgaggagaacacaatgtttcaaccttattgttataataatgacagtaagaacagcatggcagaatcgaaggaagcaagagaccaagaaatgaacctgaaagaagaatctaaagaagacgactcggaccgatg

SEQ ID NO: 4889 - DNA, 203 bp, synthetic construct
  source 1..203: mol_type = other DNA
ggcgcgccagtcctagttaatcttaattcctctgactcctctaactctgtacgtgttgaggatgtaatgaacacagcggaatattggggatttaaatggctagaatgtaatcaaacagaaaattttaagactatattagtacctgaaaatgaaatggtaaatatcaatgatactgatacctggatacccgactcggaccgatg

SEQ ID NO: 4890 - DNA, 203 bp, synthetic construct
  source 1..203: mol_type = other DNA
ggcgcgccagtccttaaggggtgtaatgagacgtgggcaagagtgaaacgttgtcctatagatattttatatgggatacatccaatcaggctgtgtgtacagccaccattttttctggtacaggagaaagggattgctgatacttctagaattggcaattgtgggccaacaatatttcttggggttttcgactcggaccgatg

SEQ ID NO: 4891 - DNA, 203 bp, synthetic construct
  source 1..203: mol_type = other DNA
ggcgcgccagtcctaactgaggttaacaaaataatggaagtacaaaatcatacttttgaggtagaaaatagtactctaaatggtatggatttaatagaacgacaaataaagatattatatgctatgattcttcaaacacatgcagatgttcaactgttaaaggaaagacaacaggtagaggagacattcgactcggaccgatg

SEQ ID NO: 4892 - DNA, 203 bp, synthetic construct
  source 1..203: mol_type = other DNA
ggcgcgccagtccttaatttaattggatgtatagaaagaacacatgtattttgtcatactggtcatccctggaatatgtcatggggacatttaaatgagtcaacacaatgggatgactgggtaagcaaaatggaagatttaaatcaagagatactaactacacttcatggagccaggaacaatttggccgactcggaccgatg

SEQ ID NO: 4893 - DNA, 203 bp, synthetic construct
  source 1..203: mol_type = other DNA
ggcgcgccagtcctcgactggaatggagaatcagaggagtacaacaggcggccaaagagctgggtgaagtcaatcgaggcatttggagagagctatatttccgagaagaccaaaggggagatttctcagcctggggcggctatcaacgagcacaagaacggctctggggggaacaatcctcaccaaggcgactcggaccgatg

SEQ ID NO: 4894 - DNA, 203 bp, synthetic construct
  source 1..203: mol_type = other DNA
ggcgcgccagtcctgtccttagacctggagattcgaagcgaaggaggaaacatttatgactgttgcattaaagcccaagaaggaactctcgctatcccttgctgtggatttcccttatggctattttggggactagtaattatagtaggacgcatagcaggctatggattacgtggactcgctgttatcgactcggaccgatg

SEQ ID NO: 4895 - DNA, 203 bp, synthetic construct
  source 1..203: mol_type = other DNA
ggcgcgccagtcctttctgcggtctgagtcccttctctgctgggctgaaaaggcctttgtaataaatataattctctactcagtccctgtctctagtttgtctgttcgagatcctacagttggcgcccgaacagggacctgagaggggcgcagaccctacctgttgaacctggctgatcgtaggatcccgactcggaccgatg

SEQ ID NO: 4896 - DNA, 203 bp, synthetic construct
  source 1..203: mol_type = other DNA
ggcgcgccagtcctgggaaaagcagagtgctttggagagctcgaaggaaagagtctccgggcctctcctgcctgcctgaaaagctcaataaaggagttggctgatatctgagcttgcctggttattatcgggattcgttactaattccgtgcaacaccggagcggatctcgcagctggcgcccaacgtcgactcggaccgatg

SEQ ID NO: 4897 - DNA, 203 bp, synthetic construct
  source 1..203: mol_type = other DNA
ggcgcgccagtcctgaaagagaaagtgttgcttgggcacaggaggagggttcgcgaccccttaaaagacggaggggcacgggcgtcctcctgggccgaggggacacaagagcaacactggtaaggaagccgccgtggtgaggctagctagagacatggcgaagcaaggctcaaaggagaaaaagggatcgactcggaccgatg

SEQ ID NO: 4898 - DNA, 203 bp, synthetic construct
  source 1..203: mol_type = other DNA
ggcgcgccagtcctgacaaaccaatcagcaggcatctcaagccaatatggatcaggcaagacagatatgcctgcagtgggtaataacagcgttaagatcagtgaggcatatgtcacatagaccaggaaaccctatgttagtgaagcagaagaatactgagagttatgaagacttcatagctcgcctaccgactcggaccgatg

SEQ ID NO: 4899 - DNA, 203 bp, synthetic construct
  source 1..203: mol_type = other DNA
ggcgcgccagtcctactgccggcagaagaaacagcagggaaacaacaggagggggccacgtgtggtgccgtccgcgccccctatgttgtaacagaagcaccacccaaaatagaaataaaagtaggaacaaggtggaaaaaattattagtagatacaggggcagataaaactatagtaacatcccatgacgactcggaccgatg

SEQ ID NO: 4900 - DNA, 203 bp, synthetic construct
  source 1..203: mol_type = other DNA
ggcgcgccagtcctagcgcccccacactggacttgtaatacccctatattttgtattaagaagaaatcaggaaaatggaggatgttaatagattttagagaattaaataagcaaacagaagatttagcagaagcacagttagggttaccgcatccaggaggattacagagaaagaaacatgtaacaatcgactcggaccgatg

SEQ ID NO: 4901 - DNA, 203 bp, synthetic construct
  source 1..203: mol_type = other DNA
ggcgcgccagtccttcccctagcagaagaagagcataacaaatggcatcaagatgctgtgtccttgcatttagaatttgggattcccaggacagctgcagaagatatagttcaacaatgtgatgtgtgtcaagaaaataaaatgcctagtacattaagaggcagtaataaaaggggcatagaccattgcgactcggaccgatg

SEQ ID NO: 4902 - DNA, 203 bp, synthetic construct
  source 1..203: mol_type = other DNA
ggcgcgccagtcctagcatttgtagcagaatctactcagctcttaatgaaatatttgggcatagaacatactacagggatcccctggaacccacaatctcaagcattagtagagagaacacatcagacgttaaagaatacattagaaaaacttatacctatgtttaacgcgtttgaatcagccctcgccgactcggaccgatg

SEQ ID NO: 4903 - DNA, 203 bp, synthetic construct
  source 1..203: mol_type = other DNA
ggcgcgccagtcctcgggtatattgggaaaaagaggatgaagaaagcatgaagtttttgaatataaaagcctgtaatatatcattgaggtgtcaagatgaaggaaagagtccgggaggatgtgtacaaggataccccattccaaagggagcagaaataataccagaagctatgaaatacctcaggggacgactcggaccgatg

SEQ ID NO: 4904 - DNA, 203 bp, synthetic construct
  source 1..203: mol_type = other DNA
ggcgcgccagtcctaagaaaagtcgatatggagggatcaaggataaaaatggggaattaaaattacctctctctgtaagggtgtgggtgaggatggcgaatttgtcaggatgggtgaatggaacgcctccttactggagtgcaaggattaatgggagtacagggataaatggaacaaggtggtatggacgactcggaccgatg

SEQ ID NO: 4905 - DNA, 203 bp, synthetic construct
  source 1..203: mol_type = other DNA
ggcgcgccagtcctataggaacattacatcacttagggtgtaacattagcagtaacccagagagagggatatgtaactttacaggagaactttggatagggggcgacaaattcccatattattatacgccctcatggaattgttcacaaaattggacaggtcacccagtatggcacgtatttagataccgactcggaccgatg

SEQ ID NO: 4906 - DNA, 203 bp, synthetic construct
  source 1..203: mol_type = other DNA
ggcgcgccagtccttacacatatggtgttgtagaaatgccacaatcatatatggaggcgcaaggggaaaacaagaggtcaagaaggaacctccaaaggaagaaaagagggataggcttggttattgtgctagccatcatggcaataatcgctgctgcaggagctggtctcggtgtcgcaaacgccgtgcgactcggaccgatg

SEQ ID NO: 4907 - DNA, 203 bp, synthetic construct
  source 1..203: mol_type = other DNA
ggcgcgccagtcctcagcaatcctataccaggacggctgtccagtctcttgctaacgcaactgctgcccagcaggaagtgttagaagcatcgtatgccatggtacagcatatagccaaaggaataagaatcctagaggcaagagtggctagggtggaagccctggtagatcgaatgatggtataccaacgactcggaccgatg

SEQ ID NO: 4908 - DNA, 203 bp, synthetic construct
  source 1..203: mol_type = other DNA
ggcgcgccagtccttgagtcatgtagcagctgatggttaagtcataaccgcagatgtaaacaagttgcctatataagccgcttgctagctggggaaaagcagagtgctttggagagctcgaaggaaagagtctccgggcctctcctgcctgcctgaaaagctcaataaaggagttggctgatatctgacgactcggaccgatg

SEQ ID NO: 4909 - DNA, 203 bp, synthetic construct
  source 1..203: mol_type = other DNA
ggcgcgccagtcctctgtattgctactaaaaatctctgctgtacatggcacatggagttgatcacaaatgaacttttatacaaaacatacaaacaaaaacccgtcggggtggaggaacctgtttatgatcaggcaggtgatcccttatttggtgaaaggggagcagtccaccctcaatcgacgctaaacgactcggaccgatg

SEQ ID NO: 4910 - DNA, 203 bp, synthetic construct
  source 1..203: mol_type = other DNA
ggcgcgccagtcctgctctttgaggagggatccatgtgtgaaacgactaaacggatagggagagtaactggaagtgacggaaagctgtaccacatttatgtgtgtatagatggatgtataataataaaaagtgccacgagaagttaccaaagggtgttcaggtgggtccataataggcttgactgccccgactcggaccgatg

SEQ ID NO: 4911 - DNA, 203 bp, synthetic construct
  source 1..203: mol_type = other DNA
ggcgcgccagtcctggtaacacaagctagagatagccccacacccttaacaggttgcaagaaaggaaagaacttctcctttgcaggcatattgatgcggggcccctgcaactttgaaatagctgcaagtgatgtattattcaaagaacatgaacgcattagtatgttccaggataccactctttacctcgactcggaccgatg

SEQ ID NO: 4912 - DNA, 203 bp, synthetic construct
  source 1..203: mol_type = other DNA
ggcgcgccagtcctcatatggtatacaaaaaattgcacccctgcctgcttacccaagaacacaaaaattgtcggccctgggaaatttggcaccaatgcagaggacggcaagatattacatgagatggggggtcacttgtcggaggtactactactttctttagtggtgctgtccgacttcgcaccggacgactcggaccgatg

SEQ ID NO: 4913 - DNA, 203 bp, synthetic construct
  source 1..203: mol_type = other DNA
ggcgcgccagtcctaacagctagtgtaatgtacctaatcctacatttttccatcccacaaagtcacgttgatgtaatggattgtgataagacccagttgaacctcacagtggagctgacaacagctgaagtaataccagggtcggtctggaatctaggcaaatatgtatgtataagaccaaattggtgcgactcggaccgatg

SEQ ID NO: 4914 - DNA, 203 bp, synthetic construct
  source 1..203: mol_type = other DNA
ggcgcgccagtcctgccttatgagacaactgtagtgttggcatttgaagaggtgagccaggtggtgaagttagtgttgagggcactcagagatttaacacgcatttggaacgctgcaacaactactgcttttttagtatgccttgttaagatagtcaggggccagatggtacagggcattctgtggctcgactcggaccgatg

SEQ ID NO: 4915 - DNA, 203 bp, synthetic construct
  source 1..203: mol_type = other DNA
ggcgcgccagtcctcaagtgtaaattggagaacgagactggttacaggctagtagacagtacctcttgcaatagagaaggtgtggccatagtaccacaagggacattaaagtgcaagataggaaaaacaactgtacaggtcatagctatggataccaaactcggacctatgccttgcagaccatatgacgactcggaccgatg

SEQ ID NO: 4916 - DNA, 203 bp, synthetic construct
  source 1..203: mol_type = other DNA
ggcgcgccagtcctaattgtaacgaggtggaaggttgacgtggctggcctattgttgcaatgtgtgcctatcttattgctggtcacaaccttgtgggccgacttcttaaccctaatactgatcctgcctacctatgaattggttaaattatactatctgaaaactgttaggactgatacagaaagaagcgactcggaccgatg

SEQ ID NO: 4917 - DNA, 203 bp, synthetic construct
  source 1..203: mol_type = other DNA
ggcgcgccagtcctatacatgagttacttaactttggactttatgtactacatgcacaggaaagttatagaagagatctcaggaggtaccaacataatatccaggttagtggcagcactcatagagctgaactggtccatggaagaagaggagagcaaaggcttaaagaagttttatctattgtctggcgactcggaccgatg

SEQ ID NO: 4918 - DNA, 203 bp, synthetic construct
  source 1..203: mol_type = other DNA
ggcgcgccagtcctaggtggcacctgcccaaaatgtggacgccatgggaagccgataacgtgtgggatgtcgctagcagattttgaagaaagacactataaaagaatctttataagggaaggcaactttgagggtatgtgcagccgatgccagggaaagcataggaggtttgaaatggaccgggaacccgactcggaccgatg

SEQ ID NO: 4919 - DNA, 203 bp, synthetic construct
  source 1..203: mol_type = other DNA
ggcgcgccagtccttaagagtgccagatactgtgctgagtgtaataggctgcatcctgctgaggaaggtgacttttgggcagagtcgagcatgttgggcctcaaaatcacctactttgcgctgatggatggaaaggtgtatgatatcacagagtgggctggatgccagcgtgtgggaatctccccagacgactcggaccgatg

SEQ ID NO: 4920 - DNA, 203 bp, synthetic construct
  source 1..203: mol_type = other DNA
ggcgcgccagtcctgattactttggcaacaggggcaggcaaaaccacagaactcccaaaagcagttatagaggagataggaagacacaagagagtattagttcttataccattaagggcagcggcagagtcagtctaccagtatatgagattgaaacacccaagcatctcttttaacctaaggataggcgactcggaccgatg

SEQ ID NO: 4921 - DNA, 203 bp, synthetic construct
  source 1..203: mol_type = other DNA
ggcgcgccagtcctaatactaaataatctactcatctcagaagacttgccagccgctgttaagaacataatggccaggactgatcacccagagccaatccaacttgcatacaacagctatgaagtccaggtcccggtcctattcccaaaaataaggaatggagaagtcacagacacctacgaaaattacgactcggaccgatg

SEQ ID NO: 4922 - DNA, 203 bp, synthetic construct
  source 1..203: mol_type = other DNA
ggcgcgccagtcctaaatgccctactagtggctttatttgggtatgtgggttaccaggctctctcaaagaggcatgtcccaatgataacagacatatataccatcgaggaccagagactagaagacaccacccacctccagtatgcacccaacgccataaaaaccgatgggacagagactgaactgaacgactcggaccgatg

SEQ ID NO: 4923 - DNA, 203 bp, synthetic construct
  source 1..203: mol_type = other DNA
ggcgcgccagtcctaaataaagaagaaataatcagatatggtttgtggggaacacacacagcactatacaaaagcatagctgcaagactggggcatgaaacagcgtttgccacactagtgttaaagtggctagcttttggaggggaatcagtgtcagaccacgtcaagcaggcggcagttgatttagtcgactcggaccgatg

SEQ ID NO: 4924 - DNA, 203 bp, synthetic construct
  source 1..203: mol_type = other DNA
ggcgcgccagtcctggtctattatgtgatgaataagccttccttcccaggtgactccgagacacagcaagaagggaggcgattcgtcgcaagcctgttcatctccgcactggcaacctacacatacaaaacttggaattaccacaatctctctaaagtggtggaaccagccctggcttacctcccctacgactcggaccgatg

SEQ ID NO: 4925 - DNA, 203 bp, synthetic construct
  source 1..203: mol_type = other DNA
ggcgcgccagtcctcccatgtggctatgagatgaaagctttcaaaaatgtaggtggcaaacttaccaaagtggaggagagcgggcctttcctatgtagaaacagacctggtaggggaccagtcaactacagagtcaccaagtattacgatgacaacctcagagagataaaaccagtagcaaagttggacgactcggaccgatg

SEQ ID NO: 4926 - DNA, 203 bp, synthetic construct
  source 1..203: mol_type = other DNA
ggcgcgccagtcctcaccacatggctagcttacaccttcgtgaatgaagacgtagggactataaaaccagtactaggagagagagtaatccccgaccctgtagttgatatcaatttacaaccagaggtgcaagtggacacgtcagaggttgggatcacaataattggaagggaaaccctgatgacaaccgactcggaccgatg

SEQ ID NO: 4927 - DNA, 203 bp, synthetic construct
  source 1..203: mol_type = other DNA
ggcgcgccagtcctcccacctgcaactaagagcaataaggggcacatggcatcagcttaccaattggcacagggtaactgggagcccctcggttgcggggtgcacctaggtacaataccagccagaagggtgaagatacacccatatgaagcttacctgaagttgaaagatttcatagaagaagaagacgactcggaccgatg

SEQ ID NO: 4928 - DNA, 203 bp, synthetic construct
  source 1..203: mol_type = other DNA
ggcgcgccagtccttataaatatagttgggaccgtccacctcaagaagacgacacgcccaacacgcacagctaaacagtagtcaagattatctacctcaagataacactacatttaatgcacacagcactttagctgtatgaggatacgcccgacgtctatagttggactagggaagacctctaacagcgactcggaccgatg

SEQ ID NO: 4929 - DNA, 203 bp, synthetic construct
  source 1..203: mol_type = other DNA
ggcgcgccagtcctgagttctaggagagtccctcctagtctctcctctccgaggaggtaccgagacctcaaaataaaggagtgattgccttactgccgagtggagagtgattactgagcggccggtgtatcgggagtcgtcccttaatctgtgcaataccagagcggctctcgcagctggcgcccaaccgactcggaccgatg

SEQ ID NO: 4930 - DNA, 203 bp, synthetic construct
  source 1..203: mol_type = other DNA
ggcgcgccagtcctattaacagtggatcaaattatgggggtaggacaaacaaatcaagcagcagcacaagctaacatggatcaggcaaggcaaatatgcctgcaatgggtaataaatgcattaagagcagtaagacatatggcgcacaggccagggaatccaatgctagtaaagcaaaaaacgaatgacgactcggaccgatg

SEQ ID NO: 4931 - DNA, 203 bp, synthetic construct
  source 1..203: mol_type = other DNA
ggcgcgccagtcctaaaaatgcaagcatgtagagatgtgggatcagaagggttcaaaatgcaattgttagcacaagcattaaggccaggaaaaggaaaagggaatggacagccacaaaggtgttacaactgtggaaaaccgggacatcaagcaaggcaatgtagacaaggaatcatatgtcacaactgcgactcggaccgatg

SEQ ID NO: 4932 - DNA, 203 bp, synthetic construct
  source 1..203: mol_type = other DNA
ggcgcgccagtccttggaaagagaggacatatgcaaaaagaatgcagaggaaagagagacataaggggaaaacagcagggaaacgggaggagggggatacgtgtggtgccgtccgctcctcctatggaataacttcagcaccacctatggttcaggtccgcataggttcccagcagaggaacttgttacgactcggaccgatg

SEQ ID NO: 4933 - DNA, 203 bp, synthetic construct
  source 1..203: mol_type = other DNA
ggcgcgccagtcctgaaatcatagataaattagtggaagaaggaaaactaggaaaggcacccccacattggacatgtaatactccaatcttttgcataaaaaagaaatcagggaagtggagaatgttaatagatttcagagaattgaacaaacagacagaagatttaacagaagcgcagttaggactccgactcggaccgatg

SEQ ID NO: 4934 - DNA, 203 bp, synthetic construct
  source 1..203: mol_type = other DNA
ggcgcgccagtcctggacaattggcttggggagacaaagctatagaatatatagtgtatcaggagaaagggaaaccattatgggtaaatgtggttcacaatataaagaacctaagcatcccgcaacaggttattaaagcagcgcaaaaattaacccaagaagtcatcattaggacaggaaaaataccacgactcggaccgatg

SEQ ID NO: 4935 - DNA, 203 bp, synthetic construct
  source 1..203: mol_type = other DNA
ggcgcgccagtcctaattgggatgaagaagtaataaagaatccaattcaagcaagaattatggaaattgcccacaagaaagataggataggagtgcattgggtgccaggacataaagggattccccaaaatgaagaaatagacaaatatatttcggaaatatttcttgcaaaagaaggagaaggaattcgactcggaccgatg

SEQ ID NO: 4936 - DNA, 203 bp, synthetic construct
  source 1..203: mol_type = other DNA
ggcgcgccagtcctaaaacctggaccagaattacccttagcactatggatacatatagcagaaagcattaatggggatagctcatggtacataacaatgagactgcaacagatgatgtggggaaaaagaggaaataagttacaatataagaatgaagacagggaatatgaaaattgggaaattacatccgactcggaccgatg

SEQ ID NO: 4937 - DNA, 203 bp, synthetic construct
  source 1..203: mol_type = other DNA
ggcgcgccagtcctatggggatggaaaatgcacctaaggagagtgaaacaatggatacaagacaacaggagaggaagcccatggcagtacaaagtaggaggaacatggaaaagtataggagtgtggttcctgcaagcaggagattacagaaaggtagacaggcacttctggtgggcatggaggatactcgactcggaccgatg

SEQ ID NO: 4938 - DNA, 203 bp, synthetic construct
  source 1..203: mol_type = other DNA
ggcgcgccagtccttatatcaagagaattggccatggaatacatatcattggcctctctggcaaatggagaatgttaggtactggttaaaagaaaatatgcaagaaaatcaacagagaaaaaataatacaaaagagggtatagaggaattattagcaggaactataaggggaagattctgtgtaccatcgactcggaccgatg

SEQ ID NO: 4939 - DNA, 203 bp, synthetic construct
  source 1..203: mol_type = other DNA
ggcgcgccagtcctgagagagcatggcctttatgaatatcaaagcatgtgatagcaacctaaggtgtcagaaaagacctggagggtgtatggaaggataccctatcccagtaggagcagaaataatccctgaaagtatgaaatacctaaggggagcaaagagtcagtatgggggaataaaagataagacgactcggaccgatg

SEQ ID NO: 4940 - DNA, 203 bp, synthetic construct
  source 1..203: mol_type = other DNA
ggcgcgccagtcctgccagaacggcaaatggtgtaactacaccggggaaataaaattagggcaagaaacattccaatatcattacaagccaaactggaactgtaccgggaattggacgcaatatccggtgtggcaagtgattagaaacctggatatggtggaacatatgacaggagaatgtgtgcagacgactcggaccgatg

SEQ ID NO: 4941 - DNA, 203 bp, synthetic construct
  source 1..203: mol_type = other DNA
ggcgcgccagtcctaaatgccagaaaactatgcaaaaacaagaatcataaacaggaaaaaaagagaactcagccacaagaggaagaagagaggcgttggcttggtcattatgctagttatcatggcaatagtagctgccgcaggggcttctctgggagtcgcaaacgcgattcagcagtcttacactacgactcggaccgatg

SEQ ID NO: 4942 - DNA, 203 bp, synthetic construct
  source 1..203: mol_type = other DNA
ggcgcgccagtcctaggcagctgtccagacccttgctaatgcaactgctgcacagcaggatgtgttagaggcaacctatgccatggtacagcatgtggctaaaggcgtacgaatcttggaagctcgagtggctcgagtggaagctatcacagatagaataatgctataccaagaattggattgttggccgactcggaccgatg

SEQ ID NO: 4943 - DNA, 203 bp, synthetic construct
  source 1..203: mol_type = other DNA
ggcgcgccagtcctactatcatcaatactgtataacctctacaaaaacagaagtagcaaaatatatcaattggacgaggtttaaggataattgcacatggcagcagtgggagagaggattacaggggtatgatacaaacttaacaatactgttaaaggaatcagcagcaatgacacaactagcagaagcgactcggaccgatg

SEQ ID NO: 4944 - DNA, 203 bp, synthetic construct
  source 1..203: mol_type = other DNA
ggcgcgccagtcctagcaagcaaggaggataccagaagtatgggaaagtttaaaagacgtctttgattggtcaggatggttctcatggctaaagtatattcctattatagtagtaggattattaggatgcattctgataagagctgtgatatgtgtatgtcaacctcttgtgcagatatacagaactccgactcggaccgatg

SEQ ID NO: 4945 - DNA, 203 bp, synthetic construct
  source 1..203: mol_type = other DNA
ggcgcgccagtcctgtaacagctgacatatcagctgatgcttgctcatgctgacactgtagctctgagctgtatataaggagaagcttgctgcttgcacttcagagttctaggagagtccctcctagtctctcctctccgaggaggtaccgagacctcaaaataaaggagtgattgccttactgccgacgactcggaccgatg

SEQ ID NO: 4946 - DNA, 203 bp, synthetic construct
  source 1..203: mol_type = other DNA
ggcgcgccagtcctccgtggcggtggctgcgttggcggcctgcctacggggaaacccgtaggacgctctaatacagacatggtgcgaagagtctattgagctagttggtaatcctccggcccctgaatgcggctaatcctaactgcggagcacataccctcaaaccagggggcagtgtgtcgtaacggcgactcggaccgatg

SEQ ID NO: 4947 - DNA, 203 bp, synthetic construct
  source 1..203: mol_type = other DNA
ggcgcgccagtcctagaggttaaaacactacatctcatcattaaactaaatacaacaaaatgggggctcaagtatcaacacaaaagactggagcacatgagaccgggctgaatgcaagcgggaattccatcatccattacacaaacataaactactataaagatgctgcatccaactcagccaacagacgactcggaccgatg

SEQ ID NO: 4948 - DNA, 203 bp, synthetic construct
  source 1..203: mol_type = other DNA
ggcgcgccagtcctttgcccgtcatgacgacaccgggtagcacgcaatttctgacttctgatgatttccaatcgccatcagcaatgccacaattcgacgtcacaccagagatgcagatcccgggtcgtgtcaacaatctgatggaaatagctgaggtggactctgtggtcccagtgaacaacactgaccgactcggaccgatg

SEQ ID NO: 4949 - DNA, 203 bp, synthetic construct
  source 1..203: mol_type = other DNA
ggcgcgccagtcctaagaattaccactcaaggtcggaatcttccattgaaaatttcttgtgccgatctgcttgtgtgtattacgccacctacaataataattctgagaagggctacgcagagtgggttatcaacaccaggcaggttgcgcagttgctgaggaggaaactagagttcacttacttaaggcgactcggaccgatg

SEQ ID NO: 4950 - DNA, 203 bp, synthetic construct
  source 1..203: mol_type = other DNA
ggcgcgccagtcctacagaggggaatgccccaccgaggatgtctattcccttcatcagtattggaaatgcttatagctgcttttatgatggatggacacagttctctaggaatggggtttacggcattaataccctgaacaacatgggtacgctgtacatgcggcacgtaaatgaggcaggccaaggccgactcggaccgatg

SEQ ID NO: 4951 - DNA, 203 bp, synthetic construct
  source 1..203: mol_type = other DNA
ggcgcgccagtcctgtaactatgggaggggagggtgttgttggctttgccgacgtacgcgacctgctgtggttagaagatgatgcaatggagcagggggtcaaagattacgtagagcaacttggaaacgcctttgggtcaggattcactaaccaagtctgtgaacaggttaaccttttgaaagagtcccgactcggaccgatg

SEQ ID NO: 4952 - DNA, 203 bp, synthetic construct
  source 1..203: mol_type = other DNA
ggcgcgccagtcctctagtgggccaagactccatcttagaaaaatctctgaaagccctagtaaaaattgtgtcagccttggtgatagtcgtgaggaaccacgacgatttaataacagtgactgcaacacttgccctcattggctgcacctcctcaccatggagatggcttaagcaaaaggtgtcccagcgactcggaccgatg

SEQ ID NO: 4953 - DNA, 203 bp, synthetic construct
  source 1..203: mol_type = other DNA
ggcgcgccagtcctagacttaaacaacttccgttactggagagtcagattgccaccattgagcaaagtgcaccttctcagagtgatcaagagcaattgttttctaatgttcagtactttgcacattactgcaggaaatacgcacccctgtatgcggccgaagcaaaaagggtgttctcccttgagaagcgactcggaccgatg

SEQ ID NO: 4954 - DNA, 203 bp, synthetic construct
  source 1..203: mol_type = other DNA
ggcgcgccagtcctaaaatgagtaactacatacagttcaagtccaaatgccgtattgaacctgtatgcttgctcttgcacgggagtcctggtgcagggaagtcagttgccactaacctgattgggcgctcactcgcggagaagcttaatagctctgtgtactctctaccaccagacccagaccattttcgactcggaccgatg

SEQ ID NO: 4955 - DNA, 203 bp, synthetic construct
  source 1..203: mol_type = other DNA
ggcgcgccagtcctgacggttacaaacaacaggccgttgtgatcatggatgatttatgccagaacccagatggtaaggatgtttctttgttttgtcaaatggtctccagtgtggactttgtaccgccaatggcagcgctagaagagaaaggcattttgttcacctctccctttgtcctggcttcaacccgactcggaccgatg

SEQ ID NO: 4956 - DNA, 203 bp, synthetic construct
  source 1..203: mol_type = other DNA
ggcgcgccagtcctaacgccggctctattaatgctccaacagtttcagacagtagggcactggctaggaggtttcactttgatatgaacatcgaggtcatttccatgtacagccagaatgggaagataaacatgcctatgtcggtgaagacgtgtgatgaagagtgttgcccagtcaactttaagaaacgactcggaccgatg

SEQ ID NO: 4957 - DNA, 203 bp, synthetic construct
  source 1..203: mol_type = other DNA
ggcgcgccagtccttgctgccccttagtgtgtggaaaggctatccagtttatagatagaaggacacaagtcagatactcccttgacatgctggtaactgagatgttcagagaatataaccatagacatagtgttggggccacccttgaggcgctatttcagggcccgccaatatatagagagattaagcgactcggaccgatg

SEQ ID NO: 4958 - DNA, 203 bp, synthetic construct
  source 1..203: mol_type = other DNA
ggcgcgccagtcctatcagtattgcgccagagacgccaccaccacctgccattgcagatctactcaaatcagtagacagtgaggctgtgagggagtactgcaaagaaaaaggatggctggttccagagatcaactccaccctgcagattgaaaagcacgtcagtagggcctttatctgtttgcaagcacgactcggaccgatg

SEQ ID NO: 4959 - DNA, 203 bp, synthetic construct
  source 1..203: mol_type = other DNA
ggcgcgccagtcctcccaccaagagaatgcttatgtacaacttccccacgagggcaggtcagtgtggcggagtgctcatgtccactggcaaagttttggggatccatgttggcgggaatggtcatcaaggcttctcagcggcacttcttaaacactacttcaatgatgaacaaggagaaatcgagttccgactcggaccgatg

SEQ ID NO: 4960 - DNA, 203 bp, synthetic construct
  source 1..203: mol_type = other DNA
ggcgcgccagtcctattgaaagctcaaaggaagcagggttcccagtcatcaacacgcctagcaaaactaaattggagccaagtgtcttccaccaggtttttgaaggcaataaagagccagcagtcctcaggaatggcgatccacgcctcagagccaactttgaggaggccatattttccaaatacatccgactcggaccgatg

SEQ ID NO: 4961 - DNA, 203 bp, synthetic construct
  source 1..203: mol_type = other DNA
ggcgcgccagtcctatcatgacaccagcagacaaaggggattgcttcaatgaagtcacctgggctaatgtcacatttctaaagaggtattttagagcagatgaacagtacccctttttagtgcaccccgtcatgcctatgaaagacatacatgaatcaatcagatggaccaaggacccaaagaacacccgactcggaccgatg

SEQ ID NO: 4962 - DNA, 203 bp, synthetic construct
  source 1..203: mol_type = other DNA
ggcgcgccagtcctagcgtcccagttggagcttgcttgactctacctgcgttttcaactctacgcaggaagtggttggactctttttaaattagagacaatttgaactaattttaattggcttaaccctaccgcactaaccgaactagataacggtgcagtgggggtaaattctccgcattcggtgcgcgactcggaccgatg

SEQ ID NO: 4963 - DNA, 203 bp, synthetic construct
  source 1..203: mol_type = other DNA
ggcgcgccagtcctgatggcgtgaacatgtgtaccctcatggccatggaccttggtgaattgtgtgaagacacaatcacgtacaagtgtccccttctcaggcagaatgagccagaagacatagactgttggtgcaactctacgtccacgtgggtaacttatgggacgtgtaccaccatgggagaacatcgactcggaccgatg

SEQ ID NO: 4964 - DNA, 203 bp, synthetic construct
  source 1..203: mol_type = other DNA
ggcgcgccagtcctcaatggttcctagacctgccgttaccatggttgcccggagcggacacacaagggtcaaattggatacagaaagagacattggtcactttcaaaaatccccatgcgaagaaacaggatgttgttgttttaggatcccaagaaggggccatgcacacagcacttacaggggccacacgactcggaccgatg

SEQ ID NO: 4965 - DNA, 203 bp, synthetic construct
  source 1..203: mol_type = other DNA
ggcgcgccagtcctgaaatccaaatgtcatcaggaaacttactcttcacaggacatctcaagtgcaggctgagaatggacaagctacagctcaaaggaatgtcatactctatgtgcacaggaaagtttaaagttgtgaaggaaatagcagaaacacaacatggaacaatagttatcagagtgcaatatcgactcggaccgatg

SEQ ID NO: 4966 - DNA, 203 bp, synthetic construct
  source 1..203: mol_type = other DNA
ggcgcgccagtcctaaaatgctctctacagagtctcataaccagacctttctcattgatggccccgaaacagcagaatgccccaacacaaatagagcttggaattcgttggaagttgaagactatggctttggagtattcaccaccaatatatggctaaaattgaaagaaaaacaggatgtattctgccgactcggaccgatg

SEQ ID NO: 4967 - DNA, 203 bp, synthetic construct
  source 1..203: mol_type = other DNA
ggcgcgccagtcctgactcaaaactcatgtcagcggccataaaagacaacagagccgtccatgccgatatgggttattggatagaaagtgcactcaatgacacatggaagatagagaaagcctctttcattgaagttaaaaactgccactggccaaaatcacacaccctctggagcaatggagtgctacgactcggaccgatg

SEQ ID NO: 4968 - DNA, 203 bp, synthetic construct
  source 1..203: mol_type = other DNA
ggcgcgccagtcctgtaggcgccactatgacggatgacataggtatgggcgtgacttatcttgccctactagcagccttcaaagtcagaccaacttttgcagctggactactcttgagaaagctgacctccaaggaattgatgatgactactataggaattgtactcctctcccagagcaccataccacgactcggaccgatg

SEQ ID NO: 4969 - DNA, 203 bp, synthetic construct
  source 1..203: mol_type = other DNA
ggcgcgccagtccttccgtttccccactgctcttaacatcctcacagcaaaaaacagattggataccattagcattgacgatcaaaggtctcaatccaacagctatttttctaacaaccctctcaagaaccagcaagaaaaggagctggccattaaatgaggctatcatggcagtcgggatggtgagccgactcggaccgatg

SEQ ID NO: 4970 - DNA, 203 bp, synthetic construct
  source 1..203: mol_type = other DNA
ggcgcgccagtcctattttagccagttctctcctaaaaaatgatattcccatgacaggaccattagtggctggagggctcctcactgtgtgctacgtgctcactggacgatcggccgatttggaactggagagagcagccgatgtcaaatgggaagaccaggcagagatatcaggaagcagtccaatccgactcggaccgatg

SEQ ID NO: 4971 - DNA, 203 bp, synthetic construct
  source 1..203: mol_type = other DNA
ggcgcgccagtcctctgtcaataacaatatcagaagatggtagcatgtcgataaaaaatgaagaggaagaacaaacactgaccatactcattagaacaggattgctggtgatctcaggactttttcctgtatcaataccaatcacggcagcagcatggtacctgtgggaagtgaagaaacaacgggcccgactcggaccgatg

SEQ ID NO: 4972 - DNA, 203 bp, synthetic construct
  source 1..203: mol_type = other DNA
ggcgcgccagtcctcataaaggaaagaggattgaaccatcatgggcggacgtcaagaaagacctaatatcatatggaggaggctggaagttagaaggagaatggaaggaaggagaagaagtccaggtattggcactggagcctggaaaaaatccaagagccgtccaaacgaaacctggtcttttcaaacgactcggaccgatg

SEQ ID NO: 4973 - DNA, 203 bp, synthetic construct
  source 1..203: mol_type = other DNA
ggcgcgccagtcctaccaacgccggaacaataggtgctgtatctctggacttttctcctggaacgtcaggatctccaattatcgacaaaaaaggaaaagttgtgggtctttatggtaatggtgttgttacaaggagtggagcatatgtgagtgctatagcccagactgaaaaaagcattgaagacaaccgactcggaccgatg

SEQ ID NO: 4974 - DNA, 203 bp, synthetic construct
  source 1..203: mol_type = other DNA
ggcgcgccagtcctactgacatttcagaaatgggtgccaatttcaaggctgagagggttatagaccccagacgctgcatgaaaccagtcatactaacagatggtgaagagcgggtgattctggcaggacctatgccagtgacccactctagtgcagcacaaagaagagggagaataggaagaaatccacgactcggaccgatg

SEQ ID NO: 4975 - DNA, 203 bp, synthetic construct
  source 1..203: mol_type = other DNA
ggcgcgccagtcctcgcttgagaggagaagcaaggaaaacctttgtagacttaatgagaagaggagacctaccagtctggttggcctacagagtggcagctgaaggcatcaactacgcagacagaaggtggtgttttgatggagtcaagaacaaccaaatcctagaagaaaacgtggaagttgaaatccgactcggaccgatg

SEQ ID NO: 4976 - DNA, 203 bp, synthetic construct
  source 1..203: mol_type = other DNA
ggcgcgccagtcctacatttgttacaccaatgttgagacatagcattgaaaattcctcagtgaatgtgtccctaacagctatagccaaccaagccacagtgttaatgggtctcgggaaaggatggccattgtcaaagatggacatcggagttccccttctcgccattggatgctactcacaagtcaaccgactcggaccgatg

SEQ ID NO: 4977 - DNA, 203 bp, synthetic construct
  source 1..203: mol_type = other DNA
ggcgcgccagtccttcatactattgtggaggactaaagaatgtaagagaagtcaaaggcctaacaaaaggaggaccaggacacgaagaacccatccccatgtcaacatatgggtggaatctagtgcgtcttcaaagtggagttgacgttttcttcatcccgccagaaaagtgtgacacattattgtgtcgactcggaccgatg

SEQ ID NO: 4978 - DNA, 203 bp, synthetic construct
  source 1..203: mol_type = other DNA
ggcgcgccagtcctgcagagtggctttggaaagaattagggaagaaaaagacacccaggatgtgcaccagagaagaattcacaagaaaggtgagaagcaatgcagccttgggggccatattcactgatgagaacaagtggaagtcggcacgtgaggctgttgaagatagtaggttttgggagctggttcgactcggaccgatg

SEQ ID NO: 4979 - DNA, 203 bp, synthetic construct
  source 1..203: mol_type = other DNA
ggcgcgccagtcctgaagatcactggttctccagagagaactccctgagtggagtggaaggagaagggctgcacaagctaggttacattctaagagacgtgagcaagaaagagggaggagcaatgtatgccgatgacaccgcaggatgggatacaagaatcacactagaagacctaaaaaatgaagaacgactcggaccgatg

SEQ ID NO: 4980 - DNA, 203 bp, synthetic construct
  source 1..203: mol_type = other DNA
ggcgcgccagtcctatggtaacaaaccacatggaaggagaacacaagaaactagccgaggccattttcaaactaacgtaccaaaacaaggtggtgcgtgtgcaaagaccaacaccaagaggcacagtaatggacatcatatcgagaagagaccaaagaggtagtggacaagttggcacctatggactccgactcggaccgatg

SEQ ID NO: 4981 - DNA, 203 bp, synthetic construct
  source 1..203: mol_type = other DNA
ggcgcgccagtcctaaacctttagatgacaggttcgcaagcgctttaacagctctaaatgacatgggaaagattaggaaagacatacaacaatgggaaccttcaagaggatggaatgattggacacaagtgcccttctgttcacaccatttccatgagttaatcatgaaagacggtcgcgtactcgttcgactcggaccgatg

SEQ ID NO: 4982 - DNA, 203 bp, synthetic construct
  source 1..203: mol_type = other DNA
ggcgcgccagtccttggtagaaagcaaaactaacatgaaacaaggctagaagtcaggtcggattaagccatagtacggaaaaaactatgctacctgtgagccccgtccaaggacgttaaaagaagtcaggccatcataaatgccatagcttgagtaaactatgcagcctgtagctccacctgagaaggcgactcggaccgatg

SEQ ID NO: 4983 - DNA, 203 bp, synthetic construct
  source 1..203: mol_type = other DNA
ggcgcgccagtccttgtaaaaaatccgggaggccacaaaccatggaagctgtacgcatggcgtagtggactagcggttagaggagacccctcccttacaaatcgcagcaacaatgggggcccaaggcgagatgaagctgtagtctcgctggaaggactagaggttagaggagacccccccgaaacaaacgactcggaccgatg

SEQ ID NO: 4984 - DNA, 203 bp, synthetic construct
  source 1..203: mol_type = other DNA
ggcgcgccagtcctacagttggcgaagagattctcaaaaggactgctgaacggccagggaccaatgaaattggttatggcgttcatagctttcctcagatttctagccattccaccaacagcaggagtcttggctagatggggaaccttcaagaagtcgggggccattaaggtcctgaaaggcttcaacgactcggaccgatg

SEQ ID NO: 4985 - DNA, 203 bp, synthetic construct
  source 1..203: mol_type = other DNA
ggcgcgccagtcctgaaggagatctcaaacatgctgagcataatcaaccaacggaaaaagacatcgctctgtctcatgatgatattgccagcagcacttgctttccacttgacttcacgagatggagagccgcgcatgattgtggggaagaatgaaagaggtaaatccctactttttaagacagcctccgactcggaccgatg

SEQ ID NO: 4986 - DNA, 203 bp, synthetic construct
  source 1..203: mol_type = other DNA
ggcgcgccagtcctacgcgacaagagatcagtggcgttagctccccatgtcggcatgggactggacacacgcacccaaacctggatgtcggctgaaggagcttggagacaagtcgagaaggtagagacatgggcccttaggcacccagggttcaccatactagccctatttctcgcccattacataggcgactcggaccgatg

SEQ ID NO: 4987 - DNA, 203 bp, synthetic construct
  source 1..203: mol_type = other DNA
ggcgcgccagtcctcacttccctgacccagaaggtggttattttcatattattaatgctggtcaccccatccatgacaatgagatgtgtgggagtaggaaacagagattttgtggaagggctatcaggagctacgtgggttgacgtggtgctcgagcacggggggtgtgtgactaccatggctaagaacgactcggaccgatg

SEQ ID NO: 4988 - DNA, 203 bp, synthetic construct
  source 1..203: mol_type = other DNA
ggcgcgccagtcctatacgtagacagaggttgggggaacggttgtggtttgtttggcaaaggaagcttggtaacatgtgcgaaatttcaatgcctggaaccaatagagggaaaagtggtgcaatatgagaacctcaaatacaccgtcatcattacagtgcacacaggagaccaacaccaggtgggaaacgactcggaccgatg

SEQ ID NO: 4989 - DNA, 203 bp, synthetic construct
  source 1..203: mol_type = other DNA
ggcgcgccagtcctgaaaatcaactggtacaagaaggggagctcgattgggaagatgttcgaggccactgaaaggggtgcaaggcgcatggccatcttgggagacacagcttgggactttggatcagtgggtggtgttctgaactcattaggcaaaatggtgcaccaaatatttggaagtgcttataccgactcggaccgatg

SEQ ID NO: 4990 - DNA, 203 bp, synthetic construct
  source 1..203: mol_type = other DNA
ggcgcgccagtcctgacagctgaaacacaaaattcctctttcataatagacgggccaaacacaccggagtgtccaagtgcctcaagagcatggaatgtgtgggaggtggaagattacgggttcggagtcttcacaaccaacatatggctgaaactccgagaggtctacacccaactatgtgaccatagcgactcggaccgatg

SEQ ID NO: 4991 - DNA, 203 bp, synthetic construct
  source 1..203: mol_type = other DNA
ggcgcgccagtcctgctaatgtcggcagctgtcaaggatgagagggccgtgcatgccgacatgggctactggatagaaagccaaaagaatggaagttggaagctagaaaaagcatccctcatagaggtaaaaacctgcacatggccaaaatcacacactctctggactaatggtgtgctagagagtgacgactcggaccgatg

SEQ ID NO: 4992 - DNA, 203 bp, synthetic construct
  source 1..203: mol_type = other DNA
ggcgcgccagtcctgagaacaacaacagtgtcagggaagttgatacacgaatggtgttgccgctcgtgcacacttccccccctgcgatacatgggagaagacggctgctggtatggcatggaaatcagacccatcagtgagaaagaagagaacatggtaaagtctttagtctcagcgggaagtggaaacgactcggaccgatg

SEQ ID NO: 4993 - DNA, 203 bp, synthetic construct
  source 1..203: mol_type = other DNA
ggcgcgccagtcctcagttctctccttagaaatgatgtgcccatggctggaccattagtggccgggggcttgctgatagcgtgctacgtcataactggcacgtcagcggacctcactgtagaaaaagccccagatgtaacatgggaggaagaggctgagcagacaggagtgtcccacaacttaatgatcgactcggaccgatg

SEQ ID NO: 4994 - DNA, 203 bp, synthetic construct
  source 1..203: mol_type = other DNA
ggcgcgccagtcctgaaaagactggaaccaaactgggctagtgtgaaaaaagatctgatttcatatggaggaggatggagactgagcgcacaatggcaaaagggggaggaggtgcaggttattgccgtagagccagggaagaacccaaagaactttcaaaccacgccaggcactttccagactactaccgactcggaccgatg

SEQ ID NO: 4995 - DNA, 203 bp, synthetic construct
  source 1..203: mol_type = other DNA
ggcgcgccagtcctgttggaagaagagatgttcaaaaagcgaaacctgaccataatggatcttcatcctgggtcaggaaagacacggaaataccttccagctattgtcagagaggcaatcaagagacgtttaagaaccttaattttggcaccgacaagggtggttgcagctgagatggaagaagcattcgactcggaccgatg

SEQ ID NO: 4996 - DNA, 203 bp, synthetic construct
  source 1..203: mol_type = other DNA
ggcgcgccagtcctgaaagggctcccaataaggtaccaaacaacagcaacaaaatctgaacacacaggaagagagattgttgatctaatgtgccacgcaacgttcacaatgcgtttgctgtcaccagttagggttccaaattacaacttgataataatggatgaggcccatttcacagacccagccagcgactcggaccgatg

SEQ ID NO: 4997 - DNA, 203 bp, synthetic construct
  source 1..203: mol_type = other DNA
ggcgcgccagtccttatagcggctagagggtacatatcaactcgtgttggaatgggagaggcagccgcaatcttcatgacagcaacaccccctggaacagctgatgcctttcctcagagcaacgctccaattcaagatgaagaaagggacataccagaacgctcatggaattcaggcaatgaatggatcgactcggaccgatg

SEQ ID NO: 4998 - DNA, 203 bp, synthetic construct
  source 1..203: mol_type = other DNA
ggcgcgccagtccttaccgacttcgctgggaaaacggtgtggtttgtccctagcattaaagccggaaatgacatagcaaactgcttgcgaaaaaacgggaaaaaagtcattcaacttagtaggaagacttttgacacagaatatcagaagactaaactgaatgattgggactttgtggtgacaactgacgactcggaccgatg

SEQ ID NO: 4999 - DNA, 203 bp, synthetic construct
  source 1..203: mol_type = other DNA
ggcgcgccagtcctgaagggtgagtccaggaagactttcgtggaactcatgaggaggggtgaccttccagtttggttagcccataaagtagcatcagaaggaatcaaatacacagatagaaaatggtgctttgatgggcaacgcaataatcaaattttagaggagaacatggatgtggaaatttggaccgactcggaccgatg

SEQ ID NO: 5000 - DNA, 203 bp, synthetic construct
  source 1..203: mol_type = other DNA
ggcgcgccagtcctaaaggaaggagaaaagaaaaaattgagacctaggtggcttgatgcccgcacttattcagatccattggcactcaaggaattcaaggactttgcggctggcagaaagtcaatcgcccttgatcttgtgacagaaataggaagagtgccttcacatctagcccacagaacaagaaacgactcggaccgatg

SEQ ID NO: 5001 - DNA, 203 bp, synthetic construct
  source 1..203: mol_type = other DNA
ggcgcgccagtcctcgctctggacaatctggtgatgctgcatacgtcagaagatggcggtagggcttacaggcatgcggtggaggaactaccagaaacaatggaaacactcctactcttgggactaatgatcttgttgacaggtggagcaatgcttttcttgatatcaggtaaagggattggaaagaccgactcggaccgatg

SEQ ID NO: 5002 - DNA, 203 bp, synthetic construct
  source 1..203: mol_type = other DNA
ggcgcgccagtcctatttgaaaaacaactgggacaggttatgctcctggttttgtgcgcagtccaactcttgctaatgagaacatcatgggccttgtgtgaagctttaactctagctacaggaccaataacaacactctgggaaggatcacctggtaagttctggaacaccacgatagctgtttccatcgactcggaccgatg

SEQ ID NO: 5003 - DNA, 203 bp, synthetic construct
  source 1..203: mol_type = other DNA
ggcgcgccagtcctggcgaacatttttagagggagctatttagcaggagctgggcttgctttttctattatgaaatcagttggaacaggaaaaagaggaacaggctcacaaggtgaaactttaggagaaaaatggaaaaagaaattaaatcaattatcccggaaagagtttgacctttacaagaaatccgactcggaccgatg

SEQ ID NO: 5004 - DNA, 203 bp, synthetic construct
  source 1..203: mol_type = other DNA
ggcgcgccagtccttggaatcactgaagtggatagaacagaagccaaagaagggttgaaaagaggagagacaacacatcatgccgtgtcccgaggtagcgcaaaacttcaatggtttgtggaaagaaacatggtcgttcccgaaggaagagtcatagacttgggctgtggaagaggaggctggtcatacgactcggaccgatg

SEQ ID NO: 5005 - DNA, 203 bp, synthetic construct
  source 1..203: mol_type = other DNA
ggcgcgccagtcctttactgtgcaggactgaaaaaagtcacagaagtgcgaggatacacaaaaggcggtccaggacacgaagaaccagtacctatgtctacatatggatggaacatagttaagttaatgagcggaaaggatgtgttctatctcccacctgaaaagtgtgataccctgttgtgtgacatcgactcggaccgatg

SEQ ID NO: 5006 - DNA, 203 bp, synthetic construct
  source 1..203: mol_type = other DNA
ggcgcgccagtcctgagaaatccactttcacgaaactccacgcacgaaatgtactggatatctaatggcacaggtaacattgtctcttcagtcaacatggtgtctagattgctactgaacaggttcacgatgacacacaggagacccaccatagagaaagatgtggatttaggagcaggaactcgacacgactcggaccgatg

SEQ ID NO: 5007 - DNA, 203 bp, synthetic construct
  source 1..203: mol_type = other DNA
ggcgcgccagtcctacagcaaatggaccctgaacacaggcagttagcgaacgctatattcaagctcacataccaaaacaaagtggtcaaagttcaacgaccgactccaacgggcacggtaatggatattatatctaggaaagaccaaaggggcagtggacaactgggaacttatggcctgaatacattcgactcggaccgatg

SEQ ID NO: 5008 - DNA, 203 bp, synthetic construct
  source 1..203: mol_type = other DNA
ggcgcgccagtcctccactgggttcccacaagtagaacgacatggtctattcatgctcaccatcagtggatgactacagaagacatgcttactgtttggaacagggtgtggatagaggaaaatccatggatggaagacaaaactccagttacaacttgggaaaatgttccatatctaggaaagagagacgactcggaccgatg

SEQ ID NO: 5009 - DNA, 203 bp, synthetic construct
  source 1..203: mol_type = other DNA
ggcgcgccagtcctagaccaatggtgtggatcacttattggtctcacttccagagcaacctgggcccagaacatacccacagcaattcaacaggtgagaagccttataggcaatgaagagttcctggactacatgccttcaatgaagagattcaggaaggaagaggagtcggagggagccatttggtacgactcggaccgatg

SEQ ID NO: 5010 - DNA, 203 bp, synthetic construct
  source 1..203: mol_type = other DNA
ggcgcgccagtcctaacgtaggaagtggaaaagaggctaactgtcaggccaccttaagccacagtacggaagaagctgtgctgcctgtgagccccgtccaaggacgttaaaagaagaagtcaggccccaaagccacggtttgagcaaaccgtgctgcctgtagctccgtcgtggggacgtaaaacctgcgactcggaccgatg

SEQ ID NO: 5011 - DNA, 203 bp, synthetic construct
  source 1..203: mol_type = other DNA
ggcgcgccagtcctagcactgagggaagctgtacctccttgcaaaggactagaggttagaggagaccccccgcaaataaaaacagcatattgacgctgggagagaccagagatcctgctgtctcctcagcatcattccaggcacagaacgccagaaaatggaatggtgctgttgaatcaacaggttctcgactcggaccgatg

SEQ ID NO: 5012 - DNA, 203 bp, synthetic construct
  source 1..203: mol_type = other DNA
ggcgcgccagtcctaacatccatcacccagaaagggatcatttttattttgctgatgctggtaactccatccatggccatgcggtgcgtgggaataggcaacagagacttcgtggaaggactgtcaggagctacgtgggtggatgtggtactggagcatggaagttgcgtcactaccatggcaaaagacgactcggaccgatg

SEQ ID NO: 5013 - DNA, 203 bp, synthetic construct
  source 1..203: mol_type = other DNA
ggcgcgccagtccttgagaccacagaacatggaacaactgcaaccataacacctcaagctcccacgtcggaaatacagctgacagactacggagctctaacattggattgttcacctagaacagggctagactttaatgagatggtgttgttgacaatgaaaaaaaaatcatggctcgtccacaaacacgactcggaccgatg

SEQ ID NO: 5014 - DNA, 203 bp, synthetic construct
  source 1..203: mol_type = other DNA
ggcgcgccagtcctatctcttagaaccacaacagtcacaggaaagacaatccatgaatggtgctgtagatcttgcacgttaccccccctacgtttcaaaggagaagacgggtgctggtacggcatggaaatcagaccagtcaaggagaaggaagagaacctagttaagtcaatggtctctgcagggtccgactcggaccgatg

SEQ ID NO: 5015 - DNA, 203 bp, synthetic construct
  source 1..203: mol_type = other DNA
ggcgcgccagtccttcttctaagttcacttctcaagaatgatgtgccactagctggcccactaatagctggaggcatgctaatagcatgttatgtcatatctggaagctcggccgatttatcactggagaaagcggctgaggtctcctgggaagaagaagcagaacactctggtgcctcacacaacatcgactcggaccgatg

SEQ ID NO: 5016 - DNA, 203 bp, synthetic construct
  source 1..203: mol_type = other DNA
ggcgcgccagtcctccctgaaggcgaagttggagccatagctctagactttaaacccggcacatctggatctcctatcgtgaacagagagggaaaaatagtaggtctttatggaaatggagtggtgacaacaagtggtacctacgtcagtgccatagctcaagctaaagcatcacaagaagggcctctcgactcggaccgatg

SEQ ID NO: 5017 - DNA, 203 bp, synthetic construct
  source 1..203: mol_type = other DNA
ggcgcgccagtcctaccagagattgaggacgaggtgtttaggaaaagaaacttaacaataatggacctacatccaggatcgggaaaaacaagaagataccttccagccatagtccgtgaggccataaaaagaaagctgcgcacgctagtcttagctcccacaagagttgtcgcttctgaaatggcagacgactcggaccgatg

SEQ ID NO: 5018 - DNA, 203 bp, synthetic construct
  source 1..203: mol_type = other DNA
ggcgcgccagtcctaacagacatatccgaaatgggagcaaacttccgagccgacagggtaatagacccgaggcggtgcctgaaaccggtaatactaaaagatggcccagagcgtgtcattctagcgggaccgatgccagtgactgtggctagcgccgcccagaggagaggaagaattggaaggaaccacgactcggaccgatg

SEQ ID NO: 5019 - DNA, 203 bp, synthetic construct
  source 1..203: mol_type = other DNA
ggcgcgccagtcctggtgataggtctgttattcatgatattgacagtggcagccaatgagatgggattactggaaaccacaaagaaggacctggggattggtcatgcagctgctgaaaaccaccatcatgctgcaatgctggacgtagacctacatccagcttcagcctggactctctatgcagtggccgactcggaccgatg

SEQ ID NO: 5020 - DNA, 203 bp, synthetic construct
  source 1..203: mol_type = other DNA
ggcgcgccagtcctcatggtcaatggtgtggtgagactgctaaccaaaccatgggatgtcattcccatggtcacacaaatagccatgactgacaccacaccctttggacaacagagggtgtttaaagagaaagttgacacgcgtacaccaaaagcgaaacgaggcacagcacaaattatggaggtgaccgactcggaccgatg

SEQ ID NO: 5021 - DNA, 203 bp, synthetic construct
  source 1..203: mol_type = other DNA
ggcgcgccagtccttccagttgattgggtcccaaccagccgcaccacctggtcgatccatgcccaccatcaatggatgacaacagaagacatgttgtcagtgtggaatagggtttggatagaggaaaacccatggatggaggacaagactcatgtgtccagttgggaagacgttccatacctaggaaacgactcggaccgatg

SEQ ID NO: 5022 - DNA, 203 bp, synthetic construct
  source 1..203: mol_type = other DNA
ggcgcgccagtcctgcaggcagcggaaccccccacctggcgacaggtgcctctgcggccaaaagccacgtgtataagatacacctgcaaaggcggcacaaccccagtgccacgttgtgagttggatagttgtggaaagagtcaaatggctctcctcaagcgtattcaacaaggggctgaaggatgccccgactcggaccgatg

SEQ ID NO: 5023 - DNA, 203 bp, synthetic construct
  source 1..203: mol_type = other DNA
ggcgcgccagtcctacactgcttcagaaaagatcctggcggtggaaaggtactacaccttcaaggttaatgattggacatcaacacaaaagccctttgagtacatccgcattccccttcctcacgtcctgtccggtgaagatggtggtgtctttggtgcggccctccgccggcactacctggtgaaaacgactcggaccgatg

SEQ ID NO: 5024 - DNA, 203 bp, synthetic construct
  source 1..203: mol_type = other DNA
ggcgcgccagtcctctggatggcgggtgcaagttcagtgcaacgcctctcaattccacgctggaggtttgctggtgttcatggcaccagagtatccaaccttagatgcttttgccatggacaaccgttggtccaaggataacctgcctaatggaaccagaactcagacaaacaaaaagggaccatttgcgactcggaccgatg

SEQ ID NO: 5025 - DNA, 203 bp, synthetic construct
  source 1..203: mol_type = other DNA
ggcgcgccagtcctatggcaagactcctgttgctccatccaattacatggtaggcgaatacaaggacttcctggagatagctcagattccaacctttattgggaataagatccctaatgctgtcccctacattgaggcatccaacacagccgtcaagacccaaccgctggccacctatcaagtgacctcgactcggaccgatg

SEQ ID NO: 5026 - DNA, 203 bp, synthetic construct
  source 1..203: mol_type = other DNA
ggcgcgccagtccttgtcctgctcctgtctggccaatacattcttggccgctttgtctagaaactttgctcagtaccggggatcattggtttatacctttgtgttcactgggaccgcgatgatgaagggcaagttcctcattgcctacaccccacctggagcgggcaagcccactagtcgagaccaagcgactcggaccgatg

SEQ ID NO: 5027 - DNA, 203 bp, synthetic construct
  source 1..203: mol_type = other DNA
ggcgcgccagtcctgatgcccgacctctgctaagatactaacaatggtgagcgcagggaaggatttctcactcaagatgcctatctcacctgccccctggagccctcagggagtagaaaacgctgaaaaaggggtcactgaaaacacaaacgcaactgctgactttgtggctcaaccagtttacttgccgactcggaccgatg

SEQ ID NO: 5028 - DNA, 203 bp, synthetic construct
  source 1..203: mol_type = other DNA
ggcgcgccagtcctcttttagactgcccctggttcagaaggaatggcccgtgcgagaggagaacgttttcggtttgtaccggatcttcaatgcccactacgctggttactttgcggacctactgattcatgacattgagacaaatccagggcccttcatgtttagaccaaggaaacaggttttccagacgactcggaccgatg

SEQ ID NO: 5029 - DNA, 203 bp, synthetic construct
  source 1..203: mol_type = other DNA
ggcgcgccagtcctaaacactaaacaacccagagttctggaagcagctcttgagcagatgtgtgcagctgattgcagggatgacaatagcagtgatgcatccggaccctttgactctgctctgcttaggaacattgacggccgccgagattacaagccagacaagtctgtgcgaagaaatagcagctacgactcggaccgatg

SEQ ID NO: 5030 - DNA, 203 bp, synthetic construct
  source 1..203: mol_type = other DNA
ggcgcgccagtcctaggaaaaggaacagaccctagatcagctcttgcagcgtttccccgaacatgcgaagcgcatttctgatctccggaatggaatggccgcctatgtagagtgcaaggagagttttgatttctttgaaaagctgtacaatcaggcagtgaaagagaagagaacgggtatcgccgccgcgactcggaccgatg

SEQ ID NO: 5031 - DNA, 203 bp, synthetic construct
  source 1..203: mol_type = other DNA
ggcgcgccagtcctctcttccatgcttccagaataactgccttttccttgagaaagctgggctccagttcagagataaccgaactaaagagatcatttccctggtagatgtgattgagagagccgtggctaggattgaaaggaagaagaaagttctcacaaccgtgcagacccttgtggcacaaggtccgactcggaccgatg

SEQ ID NO: 5032 - DNA, 203 bp, synthetic construct
  source 1..203: mol_type = other DNA
ggcgcgccagtcctcagtagacgaggtcagtttccattccgtagtccagcagcttaaagcaagacagcaagcgacagatgaacagcttgaggaattgcaagaggctttcgcgaaagtacaggagcgtaactctgtgttttctgattggttgaagatttctgcaatgttgtgtgctgcgactctggcaccgactcggaccgatg

SEQ ID NO: 5033 - DNA, 203 bp, synthetic construct
  source 1..203: mol_type = other DNA
ggcgcgccagtcctaatatgtagccaaacatgtaaccgcccccattggttttgtctaccccactggggtgagcacccagacttgcctccttgtgagaggccgcaccttggtagtaaatagacacatggccgagtctgactggacttccatagtagtgcgtggagtcacacacgcccgctctactgttacgactcggaccgatg

SEQ ID NO: 5034 - DNA, 203 bp, synthetic construct
  source 1..203: mol_type = other DNA
ggcgcgccagtcctaaattttggccatagctaaagcaggcaaagagactgacgtatctttcatccgcctctcttctggtcctctattcagagacaatacatccaaatttgtcaaggctggtgatgtacttcctactggtgccgctccagtcacggggataatgaacacggacatacccatgatgtacacgactcggaccgatg

SEQ ID NO: 5035 - DNA, 203 bp, synthetic construct
  source 1..203: mol_type = other DNA
ggcgcgccagtcctctttggaaggactggaggggatggaccccatggacaggaacacctccccggggcttccatatactgcgctaggaatgcgcagaacagatgtcgtagattgggaatcagccaccctgatcccgtttgcggcagaaagattaagaaaaatgaatgaaggagacttttccgaagttgcgactcggaccgatg

SEQ ID NO: 5036 - DNA, 203 bp, synthetic construct
  source 1..203: mol_type = other DNA
ggcgcgccagtcctccattgtaagagtatataaccagtgctttgtgaaacttcgaggagtctctttgttgaggacttttgagttctcccttgaggctcccacagatacaataaatatttgagattgaaccctgtcgagtatctgtgtaatcttttttacctgtgaggtctcggaatccgggccgagaacgactcggaccgatg

SEQ ID NO: 5037 - DNA, 203 bp, synthetic construct
  source 1..203: mol_type = other DNA
ggcgcgccagtcctggatcaggaccagtgtgttttaattgtaaaaaaccaggacatctagcaagacaatgtagagaagtgaaaaaatgtaataaatgtggaaaacctggtcatgtagctgccaaatgttggcaaggaaatagaaagaattcgggaaactggaaggcggggcgagctgcagccccagtgcgactcggaccgatg

SEQ ID NO: 5038 - DNA, 203 bp, synthetic construct
  source 1..203: mol_type = other DNA
ggcgcgccagtccttaacagaaatagtagaaagactagaaagagaagggaaagtaaaaagagcagatccaaataatccatggaatacaccagtatttgctataaaaaagaaaagtggaaaatggagaatgctcatagattttagagaattaaacaaactaactgagaaaggagcagaggtccagttggcgactcggaccgatg

SEQ ID NO: 5039 - DNA, 203 bp, synthetic construct
  source 1..203: mol_type = other DNA
ggcgcgccagtccttatatgctaaattaagtttggtgggaccacatcaaataagttatcaagtatatcagaaggatccagaaaagatactatggtatggaaaaatgagtagacaaaagaaaaaggcagaaaatacatgtgatatagccttaagagcatgctataagataagagaagagtctattataacgactcggaccgatg

SEQ ID NO: 5040 - DNA, 203 bp, synthetic construct
  source 1..203: mol_type = other DNA
ggcgcgccagtcctgaataggaaaagaaccaagatatgaaatacctacttctagagaagcctgggaatcaaatttaattaattcaccatatcttaaggccccacctcctgaggtagaatatatccatgctgctttgaatataaagagagcgttaagtatgataaaagatgctccaataccaggagcagcgactcggaccgatg

SEQ ID NO: 5041 - DNA, 203 bp, synthetic construct
  source 1..203: mol_type = other DNA
ggcgcgccagtcctaaacatggtatatagatggaggtagaaagctaggaaaagcagcaaaagcagcctattggacagatacaggaaagtggcaagtgatggaattagaaggcagtaatcagaaggcagaaatacaagcattattattggcattaaaagcaggatcagaggagatgaatattataacagcgactcggaccgatg

SEQ ID NO: 5042 - DNA, 203 bp, synthetic construct
  source 1..203: mol_type = other DNA
ggcgcgccagtcctaagctgtcttacaattgttgagtgctcataatgttactgaattacaaacagataatggaccaaattttaaaaatcaaaagatggaaggagtactcaattacatgggtgtgaaacataagtttggtatcccagggaacccacagtcacaagcattagttgaaaatgtaaatcatacgactcggaccgatg

SEQ ID NO: 5043 - DNA, 203 bp, synthetic construct
  source 1..203: mol_type = other DNA
ggcgcgccagtccttcaggtagtatggagacttccaccattagtagtcccagtagaagaatcagaaataattttttgggattgttgggcaccagaagaacccgcctgtcaggactttcttggggcaatgatacatctaaaagctaagacaaatataagtatacgagagggacctaccttggggaattgcgactcggaccgatg

SEQ ID NO: 5044 - DNA, 203 bp, synthetic construct
  source 1..203: mol_type = other DNA
ggcgcgccagtccttgaaagtaaaaaggtgaaaatatctctacagtgcaatagcacaaaaaacctaacctttgcaatgagaagttcaggagattatggagaagtaacgggagcttggatagagtttggatgtcatagaaataaatcaaaacttcatgctgaagcaaggtttagaattagatgtagatgcgactcggaccgatg

SEQ ID NO: 5045 - DNA, 203 bp, synthetic construct
  source 1..203: mol_type = other DNA
ggcgcgccagtccttaaagcgctagcagctgcctaaccgcaaaaccacatcctatggaaagcttgctaatgacgtataagttgttccattgtaagagtatataaccagtgctttgtgaaacttcgaggagtctctttgttgaggacttttgagttctcccttgaggctcccacagatacaataaatatcgactcggaccgatg

SEQ ID NO: 5046 - DNA, 203 bp, synthetic construct
  source 1..203: mol_type = other DNA
ggcgcgccagtcctagaaaaaaatagacctcacccttacccacttcccctagcgctgaaaaacaaggctctgacgattaccccctgcccataaaatttgcctagtcaaaataaaagatgccgagtctataaaagcgcaaggacagttcaggaggtggctcgctccctcaccgaccctctggtcacggacgactcggaccgatg

SEQ ID NO: 5047 - DNA, 203 bp, synthetic construct
  source 1..203: mol_type = other DNA
ggcgcgccagtcctgtttccgcctgcgctcggctagactctgccttaaacttcacttccgcgttcttgtctcgttctttcctcttcgccgtcactgaaaacgaaacctcaacgccgccctcttggcaggcgtcccggggccaacatacgccgtggagcgcagcaagggctagggcttcctgaacctctcgactcggaccgatg

SEQ ID NO: 5048 - DNA, 203 bp, synthetic construct
  source 1..203: mol_type = other DNA
ggcgcgccagtcctccgggagaggtctattgctataggcaggcccgccctaggagcattgtcttcccggggaagacaaacaattgggggctcgtccgggatttgaattcctccattctcacattatgggacaaatccacgggctttccccaactccaatacccaaagcccccagggggctatcaaccccgactcggaccgatg

SEQ ID NO: 5049 - DNA, 203 bp, synthetic construct
  source 1..203: mol_type = other DNA
ggcgcgccagtccttggctgctttctccaccctgccaggcaatacccgtgacccctcttgggcagctatcctacaggggctggaggaaccctattgcgcgttcgtagagcgccttaacgtggcccttgacaacggcctccccgagggtacccccaaagagcccatcttacgttccctagcgtactcaacgactcggaccgatg

SEQ ID NO: 5050 - DNA, 203 bp, synthetic construct
  source 1..203: mol_type = other DNA
ggcgcgccagtcctacgccaacaaagaatgccaaaaaatcttacaagcccgcggacacactaacagcccccttggggagatgctccggacatgtcaggcgtggacacccaaggacaaaaccaaggtccttgtggtccaaccacggaggcccccccccacacagccctgctttcgttgtggcaaggtagcgactcggaccgatg

SEQ ID NO: 5051 - DNA, 203 bp, synthetic construct
  source 1..203: mol_type = other DNA
ggcgcgccagtcctccttaaggggggagatctaatctccccccatcccgatcaagacatctcgatactcccactcatccccctgcggcagcaacagcaaccaattctaggggtccggatctccgttatgggacaaacacctcagcctacccaagcgctacttgacacaggagccgaccttacggttatcgactcggaccgatg

SEQ ID NO: 5052 - DNA, 203 bp, synthetic construct
  source 1..203: mol_type = other DNA
ggcgcgccagtcctaccccagacactcgtgcccgggccggtaaagctccacgacaccctgatcctaggcgccagtgggcaaaccaacacccagttcaaactcctccaaacccccctacacatattcttgcccttccgaaggtcccccgttatcctttcctcctgcctcttagacacccacaacaaatgcgactcggaccgatg

SEQ ID NO: 5053 - DNA, 203 bp, synthetic construct
  source 1..203: mol_type = other DNA
ggcgcgccagtcctgaccatcattggaagggacgccctacaacaatgccaggggcttctatacctcccagacgaccccagcccccaccaattgctgccaatagccactccaaacaccataggcctcgaacaccttcccccacctccccaagtggaccaatttcctttaaacctgagcgcctccaggcccgactcggaccgatg

SEQ ID NO: 5054 - DNA, 203 bp, synthetic construct
  source 1..203: mol_type = other DNA
ggcgcgccagtcctttaaatgacctggtctccaaggccctggaggctggtcacattgaaccatactcaggaccaggcaataaccccgtcttccccgttaaaaaaccaaatggtaaatggaggttcattcatgacctaagagccaccaatgccattactaccaccctcacctctccttccccagggccccgactcggaccgatg

SEQ ID NO: 5055 - DNA, 203 bp, synthetic construct
  source 1..203: mol_type = other DNA
ggcgcgccagtcctcccgatctcactagcctaccgacagccttaccccacctacagaccatagatcttactgacgcctttttccaaatccccctccccaagcagtaccagccatacttcgccttcaccattccccagccatgtaactatggccccgggaccagatatgcatggactgtccttccacagcgactcggaccgatg

SEQ ID NO: 5056 - DNA, 203 bp, synthetic construct
  source 1..203: mol_type = other DNA
ggcgcgccagtcctgtctctaaaggaacacccatccttcgcaaacacctacaatccctatattctgcccttcacgggtaccgggacccaagagcttgtatcaccctcaccccacaacaactccatgcgttacatgccattcaacaagctctacaacataactgccgtggccgcctcaaccccgccctacgactcggaccgatg

SEQ ID NO: 5057 - DNA, 203 bp, synthetic construct
  source 1..203: mol_type = other DNA
ggcgcgccagtcctcctctccttggcctcatctcgttaagtacatctggtacaacatctgtcatctttcaacccaagcaaaattggcccctggcttggctccacaccccccaccctccgaccagtttatgtccttggggtcacctactggcctgcaccatcttaactctagacaaatataccctacaacgactcggaccgatg

SEQ ID NO: 5058 - DNA, 203 bp, synthetic construct
  source 1..203: mol_type = other DNA
ggcgcgccagtcctcattatggccagctctgccaatctttccaccacaacatgtcaaagcaagccctttgcgacttcctgaggaactcccctcatccaagtgtcggcatcctcattcaccacatgggtcgattccataaccttggcagccaaccgtctggtccgtggaagactctcttacacctcccacgactcggaccgatg

SEQ ID NO: 5059 - DNA, 203 bp, synthetic construct
  source 1..203: mol_type = other DNA
ggcgcgccagtcctcccctactgcagggcaagaccatctacctccaccatgtccgcagccacaccaacctccccgacccaatttccaccttcaatgaatacacagactcccttatcttagctccccttgttcccctgacgccccaaggcctccacggcctcacccattgcaatcaaagggctctagtccgactcggaccgatg

SEQ ID NO: 5060 - DNA, 203 bp, synthetic construct
  source 1..203: mol_type = other DNA
ggcgcgccagtcctctaaatgtcatgaaccccagtggtaaaacccgatggcaaatccaccacagtcctccactaccacccattcctgaagcctctacccctcccaaaccacctcccaaatggttctattataaactccccggccttaccaatcagcggtggaaaggtccattgcaatccctccaggaacgactcggaccgatg

SEQ ID NO: 5061 - DNA, 203 bp, synthetic construct
  source 1..203: mol_type = other DNA
ggcgcgccagtcctgcggccggggcagccttgctctccatagacggctccccccggtggatcccgtggcgattcctgaaaaaagctgcatgcccaagaccagacgccagcgaactcgccgagcacgccgcaacagaccaccaacaccatgggtaatgttttcttcctacttttattcagtctcacacacgactcggaccgatg

SEQ ID NO: 5062 - DNA, 203 bp, synthetic construct
  source 1..203: mol_type = other DNA
ggcgcgccagtcctgtttcattcagatgtaaatttcacccaggaagtcagccaagtgtcccttcgactacacttctctaagtgcggctcctccatgaccctcctagtagatgcccctggatatgatcctttatggttcatcacctcagaacccactcagcctccaccaacttctcccccattggtccacgactcggaccgatg

SEQ ID NO: 5063 - DNA, 203 bp, synthetic construct
  source 1..203: mol_type = other DNA
ggcgcgccagtcctaacctcctcccgaaccatcctctttccttcccttgccctgcccgctcctccatcccaacccttcccttggacccattgctaccaacctcgcctacaggcgataacaacagataactgcaacaactccattatcctcccccctttttccctcgctcccgtacctcctccggcgaccgactcggaccgatg

SEQ ID NO: 5064 - DNA, 203 bp, synthetic construct
  source 1..203: mol_type = other DNA
ggcgcgccagtcctaagacgccgccgtgccgttccaatagcagtgtggcttgtctccgccctagcggccggaacaggtatcgctggtggagtaacaggctccctatctctggcttccagtaaaagccttctcctcgaggttgacaaagacatctcccaccttacccaggccatagtcaaaaatcatcacgactcggaccgatg

SEQ ID NO: 5065 - DNA, 203 bp, synthetic construct
  source 1..203: mol_type = other DNA
ggcgcgccagtcctaaacatcctccgggttgcacagtatgcagcccaaaatagacgaggattagacctcctattctgggaacaagggggtttgtgcaaggccatacaggagcaatgttgcttcctcaacatcagtaacactcatgtatccgtcctccaggaacggccccctcttgaaaaacgtgtcatcgactcggaccgatg

SEQ ID NO: 5066 - DNA, 203 bp, synthetic construct
  source 1..203: mol_type = other DNA
ggcgcgccagtcctcgctcacattcctcccataggaccttcttttccccttcaggaaatccacataaccctgaagcaagtcacaaaacccatcaaaacccaggagtcctatacactccaactgctgatgcctttcttccctctcccggcgcttttgatccttttcccgcaggcgctcctttctgcgcccgactcggaccgatg

SEQ ID NO: 5067 - DNA, 203 bp, synthetic construct
  source 1..203: mol_type = other DNA
ggcgcgccagtcctggtctatgttccacccgcctacatcgacatgccctcctggccacctgtccagagcaccaactcacctgggaccccatcgatggacgcgttgtcagctctcctctccaataccttatccctcgcctcccctccttccccacccagagaacctcaaggaccctcaaggtccttacccgactcggaccgatg

SEQ ID NO: 5068 - DNA, 203 bp, synthetic construct
  source 1..203: mol_type = other DNA
ggcgcgccagtcctcctcccaccactcctgtctcccccaaggttccacctgccttctttcaatcaatgcgaaagcacaccccctaccgaaatggatgcctggaaccaaccctcggggatcagctcccctccctcgccttccccgaacctggcctccgtccccaaaacatctacaccacctggggaaaacgactcggaccgatg

SEQ ID NO: 5069 - DNA, 203 bp, synthetic construct
  source 1..203: mol_type = other DNA
ggcgcgccagtcctcagccatctttagtagttcagtcctccctattaatcttcgaaaaattcgaaaccaaagccttccatccctcctatctactctctcatcagcttatacaatactcctccttccataaccttcaccttctattcgatgaatacaccaacatccctgtctctattttatttaataaacgactcggaccgatg

SEQ ID NO: 5070 - DNA, 203 bp, synthetic construct
  source 1..203: mol_type = other DNA
ggcgcgccagtcctaacagctctccagaaaaaaatagacctcacccttacccacttcccctagcgctgaaaaacaaggctctgacgattaccccctgcccataaaatttgcctagtcaaaataaaagatgccgagtctataaaagcgcaaggacagttcaggaggtggctcgctccctcaccgaccctcgactcggaccgatg

SEQ ID NO: 5071 - DNA, 203 bp, synthetic construct
  source 1..203: mol_type = other DNA
ggcgcgccagtcctctggtcacggagactcaccttggggatccatcctctccaagcggcctcggttgagacgccttccgtgggaccgtctcccggcctcggcacctcctgaactgctcctcccaaggtaagtctcctctcaggtcgagctcggctgccccttaggtagtcgctccccgagggtctttacgactcggaccgatg

SEQ ID NO: 5072 - DNA, 203 bp, synthetic construct
  source 1..203: mol_type = other DNA
ggcgcgccagtccttgtacaagcacttctgtttcccaggagcgaggtataggctgtacccactgccaaaagcctttaaccgttatccgccaaccaactacgtaacagttagtaccatcttgttcttgactggacgttcgatcaggtggattttccctccactagtttggtcgatgaggctaggaattccgactcggaccgatg

SEQ ID NO: 5073 - DNA, 203 bp, synthetic construct
  source 1..203: mol_type = other DNA
ggcgcgccagtcctcccacgggtgaccgtgtcctagcctgcgtggcggccaacccagcttatgctgggacgcccttttaaggacatggtgtgaagactcgcatgtgcttggttgtgagtcctccggcccctgaatgcggctaaccttaaccctagagccttatgccacgatccagtggttgtaaggtccgactcggaccgatg

SEQ ID NO: 5074 - DNA, 203 bp, synthetic construct
  source 1..203: mol_type = other DNA
ggcgcgccagtcctagaacaccaactggcttcacatgagggtggcaatgtttcagttaaatacacattcacgcatccaggtgaacgtggtatagatttatcatctgcaaatgaagtgggagggcctgtcaaggatgtcatatacaatatgaatggtactttattaggaaatctgctcattttccctcacgactcggaccgatg

SEQ ID NO: 5075 - DNA, 203 bp, synthetic construct
  source 1..203: mol_type = other DNA
ggcgcgccagtccttgaaattgttcagtactatacacattggtctggatcacttagattctcttcgatgtatactggtcctgccttgtccagtgctaaactcactctagcatacaccccgcctggtgctcgtggtccacaggacaggagagaagcaatgctaggtactcatgttgtctgggatattggcgactcggaccgatg

SEQ ID NO: 5076 - DNA, 203 bp, synthetic construct
  source 1..203: mol_type = other DNA
ggcgcgccagtccttgttccacatggtgccccgaaatccaaaagagtgggcgattacacatggcaaagtgcttcaaaccccagtgtattcttcaaggtgggggatacatcaaggtttagtgtgccttatgtaggattggcatcagcatataattgtttttatgatggttactcacatgatgatgcagacgactcggaccgatg

SEQ ID NO: 5077 - DNA, 203 bp, synthetic construct
  source 1..203: mol_type = other DNA
ggcgcgccagtcctaactcagtatggcataactgttctaaaccatatgggtagtatggcattcagaatagtaaatgaacatgatgaacacaaaactcttgtcaagatcagagtttatcacagggcaaagctcgttgaagcatggattccaagagcacccagagcactaccctacacatcaatagggcgcgactcggaccgatg

SEQ ID NO: 5078 - DNA, 203 bp, synthetic construct
  source 1..203: mol_type = other DNA
ggcgcgccagtcctcttgcctccaatggctagtttagataacaagggcatgttattcaccagtaattttgttctagcctccacaaattctaacacactaagccccccaacaatcttgaatcctgaagctttagtcaggagatttggttttgacctagatatatgtttgcatactacctacacaaagaacgactcggaccgatg

SEQ ID NO: 5079 - DNA, 203 bp, synthetic construct
  source 1..203: mol_type = other DNA
ggcgcgccagtccttggaaaactcaatgcaggcatgtcaaccaagacatgcaaagattgccatcaaccatctaatttcaagaaatgttgccccctagtctgtggaaaagctattagcttggtagacagaactaccaacgttaggtatagtgtggatcaactggtcacggctattataagtgatttcaacgactcggaccgatg

SEQ ID NO: 5080 - DNA, 203 bp, synthetic construct
  source 1..203: mol_type = other DNA
ggcgcgccagtcctacgcccagttgttgtgcaaggaccaaacacagaatttgcactatccctgttaaggaaaaacataatgactataacaacctcaaagggagagttcacagggttaggcatacatgatcgtgtctgtgtgatacccacacacgcacagcctggtgatgatgtactagtgaatggtcacgactcggaccgatg

SEQ ID NO: 5081 - DNA, 203 bp, synthetic construct
  source 1..203: mol_type = other DNA
ggcgcgccagtcctcactatcttagaagttggccctgtaacaatggcaggacttattaatttgagtagcacccccactaacagaatgattcgttatgattatgcaacaaaaactgggcagtgtggaggtgtgctgtgtgctactggtaagatctttggtattcatgttggcggtaatggaagacaaggcgactcggaccgatg

SEQ ID NO: 5082 - DNA, 203 bp, synthetic construct
  source 1..203: mol_type = other DNA
ggcgcgccagtccttgacaatgatcccagactggaagttaaattgactgaatcattattctctaagtacaaggggaatgtaaatacggaacccactgaaaatatgcttgtggctgtagaccattatgcagggcaactattatcactagatatccccacttctgaacttacactaaaagaagcattatacgactcggaccgatg

SEQ ID NO: 5083 - DNA, 203 bp, synthetic construct
  source 1..203: mol_type = other DNA
ggcgcgccagtcctgtctgtcatcccttgcttaatggatgggcacctgatggcatttgattactctaattttgatgcctctttgtcaccagtttggtttgtctgtctagagaaggttttgaccaagttaggctttgcaggctcttcattaattcaatcaatttgtaatacccatcatatctttagggacgactcggaccgatg

SEQ ID NO: 5084 - DNA, 203 bp, synthetic construct
  source 1..203: mol_type = other DNA
ggcgcgccagtcctgcaaggtatcagccgttctggtctgatcctctcaaccccatcttttgtctttctcagtttcttagcggggaccgtccgttctctccctgtgcaggtgcgactcttgtttgtgctggtcgcggcaggtggcgcccaacgtggggctcgagctcgacagttttcttccgccactaccgactcggaccgatg

SEQ ID NO: 5085 - DNA, 203 bp, synthetic construct
  source 1..203: mol_type = other DNA
ggcgcgccagtcctattaattaattttctttcatttattgaggaagtttgcccttggtttcctagggaaggcacagtgaatttggagacatggaagaaggtgggagagcaaattcggacgcattataccttacacggccctgaaaaggtccctgtcgagacattatctttttggacattgattcgtgacgactcggaccgatg

SEQ ID NO: 5086 - DNA, 203 bp, synthetic construct
  source 1..203: mol_type = other DNA
ggcgcgccagtcctctgcctggattttgataatgatgaattgaaacgtttaggaaatttgttaaaacaggaagaagatcctctccatacccctgattcggtacctagttatgatcctcctcctcctcctccgccatctctgaaaatgcacccttctgataatgatgattcactttcatctacagatgacgactcggaccgatg

SEQ ID NO: 5087 - DNA, 203 bp, synthetic construct
  source 1..203: mol_type = other DNA
ggcgcgccagtccttaacaaccagcgttactatgaatcactgccgtttaaacaactaaaagagttaaagattgcttgttcgcaatatggtcctaccgctccatttactattgctatgatagaaagtttgggtactcaagctttgcccccgaatgactggaaacagaccgctagggcatgtctctcaggcgactcggaccgatg

SEQ ID NO: 5088 - DNA, 203 bp, synthetic construct
  source 1..203: mol_type = other DNA
ggcgcgccagtccttgcggctcgacaggcatggaaaaaacttcctagctccagtactaagacagaggacctttcaaaggtccggcagggacctgatgagccttaccaggacttcgtggcacgacttttagatactataggtaagataatgtcagatgaaaaggctgggatggtgctggcaaaacaattcgactcggaccgatg

SEQ ID NO: 5089 - DNA, 203 bp, synthetic construct
  source 1..203: mol_type = other DNA
ggcgcgccagtcctagcttttgaaaacgctaactctgcttgtcaagctgctttgagaccttatcgaaaaaagggagatctatctgattttattcgcatttgtgctgatattggaccctcctacatgcaaggcattgctatggcagcagcattacaaggaaaaagcataaaagaagtacttttccagcacgactcggaccgatg

SEQ ID NO: 5090 - DNA, 203 bp, synthetic construct
  source 1..203: mol_type = other DNA
ggcgcgccagtcctgcaagcccggaacaagaaaggacttcaaaagtcaggtaattcgggttgctttgtttgtggtcagcctggccatcgggctgcagtatgccctcaaaaacatcaaacctctgttaatacccctaatttgtgcccacgctgtaaaaaaggaaagcattgggcacgagactgccgttccgactcggaccgatg

SEQ ID NO: 5091 - DNA, 203 bp, synthetic construct
  source 1..203: mol_type = other DNA
ggcgcgccagtccttacgtccttatttaaaattacccacttataccttgcagccattatttgacatccttaaaggtgactctgatcctgcgtcaccccgaacgctttctttagaaggacgaactgctttacaatcaatagaagaagctattagacaacaacagattacttattgtgattaccaacgatcgactcggaccgatg

SEQ ID NO: 5092 - DNA, 203 bp, synthetic construct
  source 1..203: mol_type = other DNA
ggcgcgccagtcctttaaatcttgctctacttgtcctcaattctttgttctccctcaatatggtgtcaaccctcgaggtttacgccctaatcacctctggcaaacagatgttactcacattcctcaatttgggcgtcttaaatatgttcatgtttctattgacactttttccaattttctcatggcttcgactcggaccgatg

SEQ ID NO: 5093 - DNA, 203 bp, synthetic construct
  source 1..203: mol_type = other DNA
ggcgcgccagtcctcagaggaactccctgacgcatcagatgcaacgcatgaccctgagtgagcccacgagtgagctgcccacccagaggcaaattgaagcgctaatgccgtacgcctggaatgaggcacatgtacaaccccccgtgacacctactaatatactgattatgttgttgttactattacagcgactcggaccgatg

SEQ ID NO: 5094 - DNA, 203 bp, synthetic construct
  source 1..203: mol_type = other DNA
ggcgcgccagtcctggccttactactcaataccccatgtgcttttcttatcaatcgcagcatccccattgtatacaggtgtcagccgacatatcatatcctcgagtgactatttcaggcattgatgaaaaaacagggaaaaaatcgtatgggaacggaactggacccctcgatattccgttttgtgaccgactcggaccgatg

SEQ ID NO: 5095 - DNA, 203 bp, synthetic construct
  source 1..203: mol_type = other DNA
ggcgcgccagtcctaagcatttaagcatcggcataggcatagacactccgtggactttatgtcgagcccgggttgcatcggtgtataatatcaataatgccaatgccacctttttatgggactgggcacctggaggaacacctgattttcctgagtatcgaggacagcatccacctattttttcggtgcgactcggaccgatg

SEQ ID NO: 5096 - DNA, 203 bp, synthetic construct
  source 1..203: mol_type = other DNA
ggcgcgccagtcctcaccgacatctaatggagcttttaaagaataaagagaggggagctgcgggggacgacccgtgaagggttaagtcctgggagctctttggcaaaagccaaagcctaggacaaatacctaagctccctgtcccgccaccctctaggattcttgaaagctcttaaggttcggatgttcgactcggaccgatg

SEQ ID NO: 5097 - DNA, 203 bp, synthetic construct
  source 1..203: mol_type = other DNA
ggcgcgccagtcctgatccggtggagccatcagaggaatcaaacacattattatagtaccaattcctggagattcctcaattaccactcgatccagactactggaccggttggtcaggttaattggaaacccggatgtgagcgggcccaaactaacaggggcactaataggtatattatccttatttgcgactcggaccgatg

SEQ ID NO: 5098 - DNA, 203 bp, synthetic construct
  source 1..203: mol_type = other DNA
ggcgcgccagtcctgtgatcaatccaggtccggatggttcgagaacaaggaaatctcagatattgaagtgcaagaccctgagggattcaacatgattctgggtaccattctagcccagatctgggtcttgctcgcaaaggcggttacggccccagacacggcagctgattcggagctaagaaggtggacgactcggaccgatg

SEQ ID NO: 5099 - DNA, 203 bp, synthetic construct
  source 1..203: mol_type = other DNA
ggcgcgccagtccttggtaatcctagagaactcaattcagaacaagttcagtgcaggatcataccctctgctctggagctatgccatgggagtaggagtggaacttgaaaactccatgggaggtttgaactttggtcgatcttactttgatccagcatattttagattagggcaagagatggtgaggacgactcggaccgatg

SEQ ID NO: 5100 - DNA, 203 bp, synthetic construct
  source 1..203: mol_type = other DNA
ggcgcgccagtcctaaaacttaggaaccaggtccacacagccgccagccaaccaaccatccactcccacgactggagccgatggcagaagagcaggcacgccatgtcaaaaacggactggaatgcatccgggctctcaaggccgagcccatcggctcactggccgtcgaggaagccatggcagcatggcgactcggaccgatg

SEQ ID NO: 5101 - DNA, 203 bp, synthetic construct
  source 1..203: mol_type = other DNA
ggcgcgccagtccttcagaaatatcagacaacccaggacaggaccgagccacctgcaaggaagaggaggcaggcagttcgggtctcagcaaaccatgcctctcagcaattggatcaactgaaggcggtgcacctcgcatccgcggtcagggatctggagaaagcgatgacgacgctgaaactttgggacgactcggaccgatg

SEQ ID NO: 5102 - DNA, 203 bp, synthetic construct
  source 1..203: mol_type = other DNA
ggcgcgccagtcctaatgttcctccgcccccgaaccccagtagggccagcacttccgagacacccattaaaaagggcacagacgcgagattggcctcatttggaacggagatcgcgtctttattgacaggtggtgcaacccaatgtgctcgaaagtcaccctcggaaccatcagggccaggtgcacctcgactcggaccgatg

SEQ ID NO: 5103 - DNA, 203 bp, synthetic construct
  source 1..203: mol_type = other DNA
ggcgcgccagtcctgggaaaaaggtgagctcagccgtcgggtttgttcctgacaccggccctgcatcacgcagtgtaatccgctccattataaaatccagccggctagaggaggatcggaagcgttacctgatgactctccttgatgatatcaaaggagccaacgatcttgccaagttccaccagatgcgactcggaccgatg

SEQ ID NO: 5104 - DNA, 203 bp, synthetic construct
  source 1..203: mol_type = other DNA
ggcgcgccagtccttcgggtccctgcccttaggtgttggtagatccacagcaaaacccgaggaactcctcaaagaggccactgagcttgacatagttgttagacgtacagcagggctcaatgaaaaactggtgttctacaacaacaccccactaaccctcctcacaccttggagaaaggtcctaacaacgactcggaccgatg

SEQ ID NO: 5105 - DNA, 203 bp, synthetic construct
  source 1..203: mol_type = other DNA
ggcgcgccagtcctcagggagtgtcttcaatgcaaaccaagtgtgcaatgcggttaatctaataccgctggacaccccgcagaggttccgtgttgtttatatgagcatcacccgtctttcggataacgggtattacaccgttcccagaagaatgctggaattcagatcggtcaatgcagtggccttcacgactcggaccgatg

SEQ ID NO: 5106 - DNA, 203 bp, synthetic construct
  source 1..203: mol_type = other DNA
ggcgcgccagtcctagacggggggccccccccaaaaaaaggcccccaggggccgacagccagcatcgcgaggaagcacacccaccccacacacgaccacggcaaccgaaccagagtccagaccaccctgggccaccagctcccagactcggccatcaccccgcaaaaaggaaaggccacaacccgcgccgactcggaccgatg

SEQ ID NO: 5107 - DNA, 203 bp, synthetic construct
  source 1..203: mol_type = other DNA
ggcgcgccagtcctaccccagccccgatccggcgggcagccactcaacccgaaccagcacccaagagcgatccctgggggacccccaaaccgcaaaagacatcagtatcccacagcctctccaagtcccccggtctcctcctcttctcgaagggaccaaaagatcaatccaccacatccgacgacactcgactcggaccgatg

SEQ ID NO: 5108 - DNA, 203 bp, synthetic construct
  source 1..203: mol_type = other DNA
ggcgcgccagtcctcaattccccacccccaaaggagacaccgggaatcccagaatcaagactcatccagtgtccatcatgggtctcaaggtgaacgtctctgccatattcatggcagtactgttaactctccaaacacccaccggtcaaatccattggggcaatctctctaagataggggtggtagggcgactcggaccgatg

SEQ ID NO: 5109 - DNA, 203 bp, synthetic construct
  source 1..203: mol_type = other DNA
ggcgcgccagtcctcagaatataagaccggttcagagtgtagcttcaagtaggagacacaagagatttgcgggagttgtcctggcaggtgcggccctaggcgttgccacagctgctcagataacagccggcattgcacttcaccagtccatgctgaactctcaagccatcgacaatctgagagcaagccgactcggaccgatg

SEQ ID NO: 5110 - DNA, 203 bp, synthetic construct
  source 1..203: mol_type = other DNA
ggcgcgccagtcctctggaaactactaatcaggcaattgaggcaatcagacaagcagggcaggagatgatattggctgttcagggtgtccaagactacatcaataatgagctgataccgtctatgaaccaactatcttgtgatttaatcggccagaagctagggctcaaattgctcagatactatacacgactcggaccgatg

SEQ ID NO: 5111 - DNA, 203 bp, synthetic construct
  source 1..203: mol_type = other DNA
ggcgcgccagtcctactcacgtcgacacagagtcctacttcattgtactcagtatagcctatccgacgctgtccgagattaagggggtgattgtccaccggctagagggggtctcgtacaatataggctctcaagagtggtataccactgtgcccaagtatgttgcaacccaagggtaccttatctcgcgactcggaccgatg

SEQ ID NO: 5112 - DNA, 203 bp, synthetic construct
  source 1..203: mol_type = other DNA
ggcgcgccagtcctggagtacgacttcagagatctcacttggtgtatcaacccgccagagagaatcaaattggattatgatcaatactgtgcagatgtggctgctgaagaactcatgaatgcattggtgaactcaactctactggaggccagggcaaccaatcagttcctagctgtctcaaagggaaacgactcggaccgatg

SEQ ID NO: 5113 - DNA, 203 bp, synthetic construct
  source 1..203: mol_type = other DNA
ggcgcgccagtcctgacagttgagcttaaaatcaaaattgcttcaggattcgggccattgatcacacacggttcagggatggacctatacaaaaccaaccacaacaatgtgtattggctgactatcccgccaatgaagaacctagccttaggtgtaatcaacacattggagtggataccgagattcaacgactcggaccgatg

SEQ ID NO: 5114 - DNA, 203 bp, synthetic construct
  source 1..203: mol_type = other DNA
ggcgcgccagtcctacatgctgtggtttattatgtttacagcccaagccgctcattttcttacttttatccttttaggttgcctataaagggggtcccaatcgaattacaagtggaatgcttcacatgggacaaaaaactctggtgccgtcacttctgtgtgcttgcggactcagaatctggtggacacgactcggaccgatg

SEQ ID NO: 5115 - DNA, 203 bp, synthetic construct
  source 1..203: mol_type = other DNA
ggcgcgccagtccttatcactcactctgggatggtgggcatgggagtcagctgcacagtcactcgggaagatggaaccaatcgcagatagggctgccagtgaaccgatcacatgatgtcacccagacatcaggcatacccactagtgtgaaatagacatcagaattaagaaaaacgtagggtccaagtcgactcggaccgatg

SEQ ID NO: 5116 - DNA, 203 bp, synthetic construct
  source 1..203: mol_type = other DNA
ggcgcgccagtcctggtttcccgttatggactcgctatctgtcaaccagatcttataccctgaagttcacctagatagcccgatagttaccaataagatagtagctatcctggagtatgctcgagtccctcacgcttacagcctggaggaccctacactgtgtcagaacatcaagcaccgcctaaaaacgactcggaccgatg

SEQ ID NO: 5117 - DNA, 203 bp, synthetic construct
  source 1..203: mol_type = other DNA
ggcgcgccagtccttcaagactgagatgaggtcagtgattaaatcacaaacccatacttgccataggaggagacacacacctgtattcttcactggtagttcagttgagctgttaatctctcgtgaccttgttgctataatcagtaaggagtctcaacatgtatattacctgacgtttgaactggtttcgactcggaccgatg

SEQ ID NO: 5118 - DNA, 203 bp, synthetic construct
  source 1..203: mol_type = other DNA
ggcgcgccagtccttgatgtattgtgatgtcatagaggggaggttaatgacagagaccgctatgaccattgatgctaggtatgcagaacttctaggaagagtcagatacatgtggaaactgatagatggtttcttccctgcactcgggaatccaacttatcaaattgtagccatgctggagccactttcgactcggaccgatg

SEQ ID NO: 5119 - DNA, 203 bp, synthetic construct
  source 1..203: mol_type = other DNA
ggcgcgccagtcctggcacggaggcagttggccacccctgaccctccccctgcatgctgcagacacaatccggaatgctcaagcttcaggtgaagggttaacacatgagcagtgcgttgataactggaaatcatttgctggagtgagatttggctgttttatgcctcttagcctggacagtgatctgacgactcggaccgatg

SEQ ID NO: 5120 - DNA, 203 bp, synthetic construct
  source 1..203: mol_type = other DNA
ggcgcgccagtcctttcagtggctgcataagaggcttgaaacctctgtcctctatgtaagtgaccctcattgcccccccgaccttgacgcccatgtcccgttatgcaaagtccccaatgaccaaatcttcatcaagtaccctatgggaggtatagaagggtattgtcagaagctgtggaccatcagcacgactcggaccgatg

SEQ ID NO: 5121 - DNA, 203 bp, synthetic construct
  source 1..203: mol_type = other DNA
ggcgcgccagtcctccattccctacttatacctggctgcttatgagagcggggtaaggattgcttcgttagtgcaaggggacaatcagaccatagccgtaacaaaaagggtacccagcacatggccttacaaccttaagaaacgggaagctgctagagtaactagagattactttgtaattcttaggccgactcggaccgatg

SEQ ID NO: 5122 - DNA, 203 bp, synthetic construct
  source 1..203: mol_type = other DNA
ggcgcgccagtcctcatgcagtaatattgctacaacaatggctaaaagcatcgagagaggttatgaccgttatcttgcatattccctgaacgtcctaaaagtgatacagcaaattttgatctctcttggcttcacaatcaattcaaccatgacccgagatgtagtcatacccctcctcacaaacaacgcgactcggaccgatg

SEQ ID NO: 5123 - DNA, 203 bp, synthetic construct
  source 1..203: mol_type = other DNA
ggcgcgccagtcctatctcttaataaggatggcactgttgcccgctcctattggggggatgaattatctgaatatgagcaggctgtttgtcagaaacatcggtgatccagtaacatcatcaattgctgatctcaagagaatgattctcgcatcactaatgcctgaagagaccctccatcaagtaatgacgactcggaccgatg

SEQ ID NO: 5124 - DNA, 203 bp, synthetic construct
  source 1..203: mol_type = other DNA
ggcgcgccagtcctcacaacaaccgggggactcttcattcctagactgggctagcgacccttactcagcaaatcttgtatgcgtccagagcatcactagactcctcaagaacataactgcaaggtttgtcctaatccatagtccaaacccaatgttaaaagggttattccatgatgacagtaaagaagcgactcggaccgatg

SEQ ID NO: 5125 - DNA, 203 bp, synthetic construct
  source 1..203: mol_type = other DNA
ggcgcgccagtcctaggacgagagactggcggcattcctcatggacaggcatattatagtacctagggcagctcatgaaatcctggatcatagtgtcacaggggcaagagagtctattgcaggcatgctagataccacaaaaggcctgattcgagccagcatgaggaagggggggttaacctctcgagcgactcggaccgatg

SEQ ID NO: 5126 - DNA, 203 bp, synthetic construct
  source 1..203: mol_type = other DNA
ggcgcgccagtccttgataaccagattgtccaattatgactatgaacaatttagagcagggatggtgctattgacaggaagaaagagaaatgtcctcattgacaaagagtcatgttcagtgcagctggctagagccctaagaagccatatgtgggcaagactagctcgaggacggcctatttacggcccgactcggaccgatg

SEQ ID NO: 5127 - DNA, 203 bp, synthetic construct
  source 1..203: mol_type = other DNA
ggcgcgccagtcctctaccactgatgagagaacagacatgaagctcgccttcgtaagagccccaagtagatccttgcgatctgccgttagaatagcaacagtgtactcatgggcttacggtgatgatgatagctcttggaacgaagcctggttgttggcaaggcaaagggccaatgtgagcctggaggcgactcggaccgatg

SEQ ID NO: 5128 - DNA, 203 bp, synthetic construct
  source 1..203: mol_type = other DNA
ggcgcgccagtcctagctaagggtgatcactcccatctcgacttcgactaatttagcgcataggttgagggatcgtagcactcaagtgaaatactcaggtacatcccttgtccgagtggcaaggtataccacaatctccaacgacaatctctcatttgtcatatcagataagaaggttgatactaactcgactcggaccgatg

SEQ ID NO: 5129 - DNA, 203 bp, synthetic construct
  source 1..203: mol_type = other DNA
ggcgcgccagtcctttatataccaacaaggaatgcttctagggttgggtgttttagaaacattgtttcgactcgagaaagatactggatcatctaacacggtattacatcttcacgtcgaaacagattgttgcgtgatcccgatgatagatcatcccaggatacccagctcccgcaagctagagctgacgactcggaccgatg

SEQ ID NO: 5130 - DNA, 203 bp, synthetic construct
  source 1..203: mol_type = other DNA
ggcgcgccagtccttcaaacagataagattgagagttgatccaggattcatttttgacgccctcgctgaggtaaatgtcagtcagccaaaggtcggcagcaacaacatctcaaatatgagcatcaaggatttcagacctccacacgatgatgttgcaaaattgctcaaagatatcaacacaagcaagccgactcggaccgatg

SEQ ID NO: 5131 - DNA, 203 bp, synthetic construct
  source 1..203: mol_type = other DNA
ggcgcgccagtcctatcctgaaaagatcaagcagcagataattgaatcatctgtgcggacttcacctggacttataggtcacatcctatccattaagcaactaagctgcatacaagcaattgtgggaggcgcagttagtagaggtgatatcaaccctattctgaaaaaacttacacctatagagcaggcgactcggaccgatg

SEQ ID NO: 5132 - DNA, 203 bp, synthetic construct
  source 1..203: mol_type = other DNA
ggcgcgccagtcctccgtattggtaagtagtaggcaacgagaacttgtatctaggatcactcgcaaattttgggggcatattcttctttactccgggaacagaaagttgataaatcggtttatccagaatctcaagtccggttatctagtactagacttacaccagaatatcttcgttaagaatctatcgactcggaccgatg

SEQ ID NO: 5133 - DNA, 203 bp, synthetic construct
  source 1..203: mol_type = other DNA
ggcgcgccagtcctagtcggttgatgtcaagaagagacgttgggttaccttctgctctgcagaatggccaacctttaacgtcggatggccgcgagacggcacctttaaccgagacctcatcacccaggttaagatcaaggtcttttcacctggcccgcatggacacccagaccaggtcccctacatcgcgactcggaccgatg

SEQ ID NO: 5134 - DNA, 203 bp, synthetic construct
  source 1..203: mol_type = other DNA
ggcgcgccagtccttgacctgggaagccttggcttttgacccccctccctgggtcaagccctttgtacaccctaagcctccgcctcctcttcctccatccgccccgtctctcccccttgaacctcctctttcgaccccgcctcgatcctccctttatccagccctcactccttctctaggcgccaaaccgactcggaccgatg

SEQ ID NO: 5135 - DNA, 203 bp, synthetic construct
  source 1..203: mol_type = other DNA
ggcgcgccagtcctggagacgggagcccccagtggccgactccactacctcgcaggcattccccctccgcacaggaggaaacggacagcttcaatactggccgttctcctcttctgacctttacatcacccccgtcaacagcctggagaaacattcctggtatcatggccctgtatctcggaatgctgcgactcggaccgatg

SEQ ID NO: 5136 - DNA, 203 bp, synthetic construct
  source 1..203: mol_type = other DNA
ggcgcgccagtccttggctgagttagttcaccatcactccacggtggctgatggcctcatcaccacactccactacccagctcccaagcgcaacaagcccactatctacggtgtgtcccccaactacgacaagtgggaaatggagcgcaccgacatcaccatgaagcacaagttgggtggaggccagtcgactcggaccgatg

SEQ ID NO: 5137 - DNA, 203 bp, synthetic construct
  source 1..203: mol_type = other DNA
ggcgcgccagtcctacggggaggtgtacgagggcgtttggaagaagtacagcctcactgtggccgtgaagaccttgaaggaggacaccatggaggtggaggagttcctgaaggaagcggcggtgatgaaggagatcaaacaccctaacctggtgcagctgctaggggtgtgtacccgggaaccaccatcgactcggaccgatg

SEQ ID NO: 5138 - DNA, 203 bp, synthetic construct
  source 1..203: mol_type = other DNA
ggcgcgccagtccttctacataatcactgagttcatgacctatgggaacctgctggactacctgagggagtgtaaccggcaggaggtgagcgccgtggtactgctctacatggccacacagatctcatcagccatggagtacttggagaagaagaacttcatccacagagaccttgctgcccggaactcgactcggaccgatg

SEQ ID NO: 5139 - DNA, 203 bp, synthetic construct
  source 1..203: mol_type = other DNA
ggcgcgccagtcctcctttgctgaaatccaccaagcctttgaaaccatgttccaggaatccagtatctcagatgaggtggagaaggagctggggaaacgaggcacgagaggaggtgctgggagtatgctgcaggccccagagctgcccaccaagaccagaacctgcaggagagcagctgagcagaaagcgactcggaccgatg

SEQ ID NO: 5140 - DNA, 203 bp, synthetic construct
  source 1..203: mol_type = other DNA
ggcgcgccagtcctccagccctcccagcttgactcccaaactcctccgcaggcaggtcactgcctctccttcctctggcctctctcacaagaaagaggccaccaagggcagtgcctcaggcatggggactccggccactgcagagccagcaccccccagcaacaaagtgggcctcagcaaggcctcctcgactcggaccgatg

SEQ ID NO: 5141 - DNA, 203 bp, synthetic construct
  source 1..203: mol_type = other DNA
ggcgcgccagtcctctgaggagatgcgcgtaaggaggcacaagcacagctcggagtccccagggagagacaaggggcgactggctaagctcaagcctgccccgccgcctcctcctgcctgcacaggaaaagcaggcaagcccgcacagagccccagccaagaggccggggaggcaggggggcccacaacgactcggaccgatg

SEQ ID NO: 5142 - DNA, 203 bp, synthetic construct
  source 1..203: mol_type = other DNA
ggcgcgccagtcctagacaaaatgcacgagtctggctatggatgctgtgaacactgaccccaccaaggccggcccacctggagaaggactgagaaagcctgtgcccccatctgtgccaaagccccagtcgacggctaagcctccagggactcccaccagcccggtctccaccccctccacagcaccagcgactcggaccgatg

SEQ ID NO: 5143 - DNA, 203 bp, synthetic construct
  source 1..203: mol_type = other DNA
ggcgcgccagtcctctccttcacccctggctggggaccagcagccatcttctgccgccttcatccccctcatatcaacccgtgtgtctcttaggaagacccgccagccgccagagcgcattgccagtggcaccatcaccaagggtgtggttctggacagtactgaggccctgtgccttgccatctccccgactcggaccgatg

SEQ ID NO: 5144 - DNA, 203 bp, synthetic construct
  source 1..203: mol_type = other DNA
ggcgcgccagtcctggaactcagagcagatggccagccacagtgctgtactggaggctggcaagaacctgtacactttctgtgtgagctatgtggactctatccagcagatgaggaacaagtttgccttccgtgaggctatcaacaagctggagagcaacctccgagagctgcagatctgccctgccacgactcggaccgatg

SEQ ID NO: 5145 - DNA, 203 bp, synthetic construct
  source 1..203: mol_type = other DNA
ggcgcgccagtcctgtctttccccaggagctttaaagagagacaagcagagcctgagggagacctggatggagcctggtggagttggctcttcctcctgtgttgtgcaccagctgccctgcacctttcctgcccagcccaggcgtcagccacctctcctcactgcctgtggatgggtctcctgctctgcgactcggaccgatg

SEQ ID NO: 5146 - DNA, 203 bp, synthetic construct
  source 1..203: mol_type = other DNA
ggcgcgccagtcctaagactacatctggcctgcctggccaccaggcttctcactccccggtgcctcagacccagctcccaggtcagcctggagtgctcttccctgtccttgcagaacgacctcctctgatggaccttcttgtcaccaaggcatgggagcccctgtgcttactgtacctgcacctttgacgactcggaccgatg

SEQ ID NO: 5147 - DNA, 203 bp, synthetic construct
  source 1..203: mol_type = other DNA
ggcgcgccagtccttgcttacaaactgtccccgagagcctgtgctcactgtgttttcattggaaggaagctgtcgctttaagggtcatgaggtgctaaagccaggggcccagatgggtgggcactggaaacaggagctgggcagtgtggtctgtcacctgctctcagtatcttcagcagtgtgcccggcgactcggaccgatg

SEQ ID NO: 5148 - DNA, 203 bp, synthetic construct
  source 1..203: mol_type = other DNA
ggcgcgccagtcctcagatcttggacagcaagcttgagttttatgggtggcagtcactggctggctaggcacatagccaggccaaacctaggcctccaagggctccccaaaatctgaatttctgagtagtcttcatcccctctcctgctctaaggtcaggtccatcctctctggtccttaccttgatgcgactcggaccgatg

SEQ ID NO: 5149 - DNA, 203 bp, synthetic construct
  source 1..203: mol_type = other DNA
ggcgcgccagtcctctctagttttgactcaacaatatcaccagctgaagcctatagagtacgagccatagataaaataaaagattttatttagtctccagaaaaagggggaatgaaagaccccacctgtaggtttggcaagctagcttaagtaacgccattttgcaaggcatggaaaaatacataactcgactcggaccgatg

SEQ ID NO: 5150 - DNA, 203 bp, synthetic construct
  source 1..203: mol_type = other DNA
ggcgcgccagtcctgagaatagagaagttcagatcaaggtcaggaacagagaaacagctgaatatgggccaaacaggatatgctgtggtaagcagttcctgccccggctcagggccaagaacagttggaacagctgaatatgggccaaacaggatatctgtggtaagcagttcctgccccggctcaggcgactcggaccgatg

SEQ ID NO: 5151 - DNA, 203 bp, synthetic construct
  source 1..203: mol_type = other DNA
ggcgcgccagtcctgccaagaacagatggtccccagatgcggtccagccctcagcagtttctagagaaccatcagatgtttccagggtgccccaaggacctgaaatgaccctgtgccttatttgaactaaccaatcagttcgcttctcgcttctgttcgcgcgcttctgctccccgagctcaataaaacgactcggaccgatg

SEQ ID NO: 5152 - DNA, 203 bp, synthetic construct
  source 1..203: mol_type = other DNA
ggcgcgccagtcctagtaaggagcaccctgcagtcttgaaaactgtatatctttgcacgattctgggtgaaagaccccacctgtaggtttggcaagctagcttaagtaacgccattttgcaaggcatggaaaaatacataactgagaatagagaagttcagatcaaggtcaggaacagagaaacagctcgactcggaccgatg

SEQ ID NO: 5153 - DNA, 203 bp, synthetic construct
  source 1..203: mol_type = other DNA
ggcgcgccagtcctgaatatgggccaaacaggatatgctgtggtaagcagttcctgccccggctcagggccaagaacagttggaacagctgaatatgggccaaacaggatatctgtggtaagcagttcctgccccggctcagggccaagaacagatggtccccagatgcggtccagccctcagcagttcgactcggaccgatg

SEQ ID NO: 5154 - DNA, 203 bp, synthetic construct
  source 1..203: mol_type = other DNA
ggcgcgccagtccttgaaagaccccaccaagttgcttagcctgatagccgcagtaacgccattttgcaaggcatggaaaaataccaaaccaagaatagggaagttcagatcaagggcgggtacacgaaaacagctaacgttgggccaaacaagatatctgcggtaagcagtttcggccccggcccgggcgactcggaccgatg

SEQ ID NO: 5155 - DNA, 203 bp, synthetic construct
  source 1..203: mol_type = other DNA
ggcgcgccagtcctctcgtccgggatttggagacccccgcccagggaccaccgacccaccgtcgggaggtaagctggccagcgatcgttttgtctccgtctctgtctttgtgtgtgtgtgtgtgtaccggtatttactttttgcgcctgcgtctggttctgtactagttagctaactagatctgtatccgactcggaccgatg

SEQ ID NO: 5156 - DNA, 203 bp, synthetic construct
  source 1..203: mol_type = other DNA
ggcgcgccagtcctgggaggtccaagccctcgccgcctccatctgaatttttgctttcggtttttcgccgaaaccgcgccgcgcgtcttgtctgtctcagtattgttttgttatttgtctgttcgttattgttttggaccgcttctaaaaacatgggacagaccgtaaccacccctctgagtctgacccgactcggaccgatg

SEQ ID NO: 5157 - DNA, 203 bp, synthetic construct
  source 1..203: mol_type = other DNA
ggcgcgccagtcctctagaacactgggaggatgtccagcgcaccgcgtccaatcagtccgtagatgtcaagaagagacgctgggtcaccttctgctctgccgagtggccaactttcggtgtagggtggccacaagatggtacttttaacttggacattattctacaggttaaatctaaggtgttctctcgactcggaccgatg

SEQ ID NO: 5158 - DNA, 203 bp, synthetic construct
  source 1..203: mol_type = other DNA
ggcgcgccagtcctcctggtccccacggacacccggatcaggtcccatatattgtcacctgggaggctattgcctatgaaccccctccgtgggtaaaaccttttgtctctcccaaactctccccctctccaaccgctcccatcctcccatccggtccttcgactcaacctccgccccgatctgcccttcgactcggaccgatg

SEQ ID NO: 5159 - DNA, 203 bp, synthetic construct
  source 1..203: mol_type = other DNA
ggcgcgccagtccttaccctgctcttaccccctctataaaacccggaccttctccgataatggcggacctctcactgaccttctctcagaagaccctccgccgtacggaggacagggaccgtcctcctctgacggagatggcgacagagaagaggccacctccacttctgagattcctgccccctctccgactcggaccgatg

SEQ ID NO: 5160 - DNA, 203 bp, synthetic construct
  source 1..203: mol_type = other DNA
ggcgcgccagtcctaaactgactacattgattgaatctgtcctcaccacccaccagcccacctgggatgattgccagcaattattagggactctgcttaccggggaggagaagcagcgggtgctcctggaagcccgaaaagctgtccggggcaacgatgggcgccccacccaactgcccaacgaggttcgactcggaccgatg

SEQ ID NO: 5161 - DNA, 203 bp, synthetic construct
  source 1..203: mol_type = other DNA
ggcgcgccagtcctagggaagctgaagagatctttaataaatgagaaaccccggaagaaagagagagaaggagagggaccgcagaagacatagagaaatgagtaagttgctggctgctgtcgttagcgggcagagacaggatagacagggaggagagcgaaggaggccccaactcgaccacgaccagtcgactcggaccgatg

SEQ ID NO: 5162 - DNA, 203 bp, synthetic construct
  source 1..203: mol_type = other DNA
ggcgcgccagtcctaccttcctagtggatactggggcccaacactccgtgctgacccaaaatcctggacccctaagtgacaagtctgcctgggtccaaggggctactggaagaaagcggtatcgctggaccacggatcgccaggtgcacctagccaccgggtttcaaaaacagtcccaccctgtttgacgactcggaccgatg

SEQ ID NO: 5163 - DNA, 203 bp, synthetic construct
  source 1..203: mol_type = other DNA
ggcgcgccagtcctagcccaaaattgccagaaacaggtcaagtatctggggtatcttctaaaagagggtcagggatggctgactgaggccagaaaagagactgtgatggggcagcctactccaaagacccctcgacaactaagggagttcctagggacggcaggcttctgtcgcctctggatccccggcgactcggaccgatg

SEQ ID NO: 5164 - DNA, 203 bp, synthetic construct
  source 1..203: mol_type = other DNA
ggcgcgccagtcctgtttgcagaaatggcagcccccttgtaccctctcaccaaaacggggactctgtttaaatggggcccagaccagcaaaaggcctaccaagagatcaagcaggctctcttaactgcccctgccctgggattaccagacttgactaagcccttcgaactttttgttgaccaaagacacgactcggaccgatg

SEQ ID NO: 5165 - DNA, 203 bp, synthetic construct
  source 1..203: mol_type = other DNA
ggcgcgccagtcctggaatactccgggcccccatggacttactccgtatgaaattctgtatggggcacccccgccccttgtcaattttcatgatcctgaaatgtcaaagttaactaatagtccctctctccaagctcacttacaggccctccaagcagtacaacgagaggtctggaagccactggccgcgactcggaccgatg

SEQ ID NO: 5166 - DNA, 203 bp, synthetic construct
  source 1..203: mol_type = other DNA
ggcgcgccagtcctctgcttatcaggaccagctggatcagccagtgataccacaccccctccgtgtcggtgacgccgtgtgggtacgccggcaccagactaagaacttagaaccccgctggaaaggaccctacaccgtcctgctgaccacccccaccgctctcaaagtagacggcatctctgcggggacgactcggaccgatg

SEQ ID NO: 5167 - DNA, 203 bp, synthetic construct
  source 1..203: mol_type = other DNA
ggcgcgccagtcctcgacccggtgacccggttctctttgacccgccaggtcctcaatatagggccccgcatccccattgggcctaatcccgtgatcattggccaactacccccctcccgacccgtgcaggtcaggctccccaggcctcctcagcctcctcctacaggcgcagcctctatggtccctggcgactcggaccgatg

SEQ ID NO: 5168 - DNA, 203 bp, synthetic construct
  source 1..203: mol_type = other DNA
ggcgcgccagtcctgactgccccaccttctcaacaaccggggacgggagacaggttactaaatctagtacagggagcttaccaggcactcaaccttaccaaccctgataaaacccaagagtgctggttatgcctagtgtctggacccccctattacgagggggttgcggtcctaggcactaattctaacgactcggaccgatg

SEQ ID NO: 5169 - DNA, 203 bp, synthetic construct
  source 1..203: mol_type = other DNA
ggcgcgccagtccttcatacctctgccctaaaagaaaaatgttgtttctatgctgaccatacaggcctagtaagagatagtatggccaaattaagaaagagactcactcagagacaaaaactatttgagtcgagccaaggatggttcgaaggatcgtttaacagatccccctggtttaccacgttgatcgactcggaccgatg

SEQ ID NO: 5170 - DNA, 203 bp, synthetic construct
  source 1..203: mol_type = other DNA
ggcgcgccagtcctacaagatatctgcggtaagcagtttcggccccggcccggggccaagaacagatggtccccagatatggcccaaccctcagcagtttcttaagacccatcagatgtttccaggctcccccaaggacctgaaatgaccctgtgccttatttgaattaaccaatcagcccgcttctccgactcggaccgatg

SEQ ID NO: 5171 - DNA, 203 bp, synthetic construct
  source 1..203: mol_type = other DNA
ggcgcgccagtccttatgcgcctgcgtcggtactagttagctaactagctctgtatctggcggacccgtggtggaactgacgagttcggaacacccggccgcaaccctgggagacgtcccagggacttcgggggccgtttttgtggcccgacctgagtccaaaaatcccgatcgttttggactctttgcgactcggaccgatg

SEQ ID NO: 5172 - DNA, 203 bp, synthetic construct
  source 1..203: mol_type = other DNA
ggcgcgccagtcctgtgcaccccccttagaggagggatatgtggttctggtaggagacgagaacctaaaacagttcccgcctccgtctgaatttttgctttcggtttgggaccgaagccgcgccgcgcgtcttgtctgctgcagcatcgttctgtgttgtctctgtctgactgtgtttctgtatttgtcgactcggaccgatg

SEQ ID NO: 5173 - DNA, 203 bp, synthetic construct
  source 1..203: mol_type = other DNA
ggcgcgccagtcctctgagaatatgggccagactgttaccactcccttaagtttgaccttaggtcactggaaagatgtcgagcggatcgctcacaaccagtcggtagatgtcaagaagagacgttgggttaccttctgctctgcagaatggccaacctttaacgtcggatggccgcgagacggcacctcgactcggaccgatg

SEQ ID NO: 5174 - DNA, 203 bp, synthetic construct
  source 1..203: mol_type = other DNA
ggcgcgccagtcctgaagccccaccaatttggccaaggtaaaaggaataacacaagggcccaatgagtctccctcggccttcctagagagacttaaggaagcctatcgcaggtacactccttatgaccctgaggacccagggcaagaaactaatgtgtctatgtctttcatttggcagtctgccccagcgactcggaccgatg

SEQ ID NO: 5175 - DNA, 203 bp, synthetic construct
  source 1..203: mol_type = other DNA
ggcgcgccagtcctaaccacgaggacctcggggaccaagaccccagacctccctcctgaccctagatgactagggaggtcagggtcaggagcccccccctgaacccaggataaccctcaaagtcggggggcaacccgtcaccttcctggtagatactggggcccaacactccgtgctgacccaaaatccgactcggaccgatg

SEQ ID NO: 5176 - DNA, 203 bp, synthetic construct
  source 1..203: mol_type = other DNA
ggcgcgccagtcctaaaccgggggcatgggactggcagttcgccaagctcctctgatcatacctctgaaagcaacctctacccccgtgtccataaaacaataccccatgtcacaagaagccagactggggatcaagccccacatacagagactgttggaccagggaatactggtaccctgccagtccccgactcggaccgatg

SEQ ID NO: 5177 - DNA, 203 bp, synthetic construct
  source 1..203: mol_type = other DNA
ggcgcgccagtcctacttccggatccagcacccagacttgatcctgctacagtacgtggatgacttactgctggccgccacttctgagctagactgccaacaaggtactcgggccctgttacaaaccctagggaacctcgggtatcgggcctcggccaagaaagcccaaatttgccagaaacaggtcacgactcggaccgatg

SEQ ID NO: 5178 - DNA, 203 bp, synthetic construct
  source 1..203: mol_type = other DNA
ggcgcgccagtcctagtatctggggtatcttctaaaagagggtcagagatggctgactgaggccagaaaagagactgtgatggggcagcctactccgaagacccctcgacaactaagggagttcctagggacggcaggcttctgtcgcctctggatccctgggtttgcagaaatggcagcccccttgtcgactcggaccgatg

SEQ ID NO: 5179 - DNA, 203 bp, synthetic construct
  source 1..203: mol_type = other DNA
ggcgcgccagtccttggccgaagcccacggaacccgacccgacctaacggaccagccgctcccagacgccgaccacacctggtacacggatggaagcagtctcttacaagagggacagcgtaaggcgggagctgcggtgaccaccgagaccgaggtaatctgggctaaagccctgccagccgggacatcgactcggaccgatg

SEQ ID NO: 5180 - DNA, 203 bp, synthetic construct
  source 1..203: mol_type = other DNA
ggcgcgccagtcctaaaattcatcaccctacacctcagaacattttcattacacagtgactgatataaaggacctaaccaagttgggggccatttatgataaaacaaagaagtattgggtctaccaaggaaaacctgtgatgcctgaccagtttacttttgaattattagactttcttcatcagctgacgactcggaccgatg

SEQ ID NO: 5181 - DNA, 203 bp, synthetic construct
  source 1..203: mol_type = other DNA
ggcgcgccagtcctcgcttgcaactggctctagagactgggtgctcctactccccttagccctgtaccgagcccgcaacacgccgggcccccatggcctcaccccatatgagatcttatatggggcacccccgccccttgtaaacttccctgaccctgacatgacaagagttactaacagcccctctccgactcggaccgatg

SEQ ID NO: 5182 - DNA, 203 bp, synthetic construct
  source 1..203: mol_type = other DNA
ggcgcgccagtccttccaagctcacttacaggctctctacttagtccagcacgaagtctggagacctctggcggcagcctaccaagaacaactggaccgaccggtggtacctcacccttaccgagtcggcgacacagtgtgggtccgccgacaccagactaagaacctagaacctcgctggaaaggaccgactcggaccgatg

SEQ ID NO: 5183 - DNA, 203 bp, synthetic construct
  source 1..203: mol_type = other DNA
ggcgcgccagtccttacatttgggatccgactcagataccaaaatctaggaccccgcgtcccaatagggccaaaccccgttctggcagaccaacagccactctccaagcccaaacctgttaagtcgccttcagtcaccaaaccacccagtgggactcctctctcccctacccaacttccaccggcgggcgactcggaccgatg

SEQ ID NO: 5184 - DNA, 203 bp, synthetic construct
  source 1..203: mol_type = other DNA
ggcgcgccagtcctaacggaaaataggctgctaaacttagtagacggagcctaccaagccctcaacctcaccagtcctgacaaaacccaagagtgctggttgtgtctagtagcgggacccccctactacgaaggggttgccgtcctgggtacctactccaaccatacctctgctccagccaactgctccgactcggaccgatg

SEQ ID NO: 5185 - DNA, 203 bp, synthetic construct
  source 1..203: mol_type = other DNA
ggcgcgccagtcctactgtttaacagatccccttggtttaccaccttgatatctaccattatgggacccctcattgtactcctaatgattttgctcttcggaccctgcattcttaatcgattagtccaatttgttaaagacaggatatcagtggtccaggctctagttttgactcaacaatatcaccacgactcggaccgatg

SEQ ID NO: 5186 - DNA, 203 bp, synthetic construct
  source 1..203: mol_type = other DNA
ggcgcgccagtcctgtccagccctcagcagtttctagagaaccatcagatgtttccagggtgccccaaggacctgaaatgaccctgtgccttatttgaactaaccaatcagttcgcttctcgcttctgttcgcgcgcttctgctccccgagctcaataaaagagcccacaacccctcactcggggcgccgactcggaccgatg

SEQ ID NO: 5187 - DNA, 203 bp, synthetic construct
  source 1..203: mol_type = other DNA
ggcgcgccagtcctcagtcctccgattgactgagtcgcccgggtacccgtgtatccaataaaccctcttgcagttgcagcgccagtcctccgattgactgagtcgcccgggtacccgtgtatccaataaaccctcttgcagttgcatccgacttgtggtctcgctgttccttgggagggtctcctctgcgactcggaccgatg

SEQ ID NO: 5188 - DNA, 203 bp, synthetic construct
  source 1..203: mol_type = other DNA
ggcgcgccagtcctccttgggagggtctcctctgagtgattgactacccgtcagcgggggtctttcatttgggggctcgtccgggatcgggagacccctgcccagggaccaccgacccaccaccgggaggtaagctggccagcaacttatctgtgtctgtccgattgtctagtgtctatgactgatttcgactcggaccgatg

SEQ ID NO: 5189 - DNA, 203 bp, synthetic construct
  source 1..203: mol_type = other DNA
ggcgcgccagtcctattcccaataaagcctcttgctgtttgcatccgaatcgtggtctcgctgttccttgggagggtctcctctgagtgattgactacccacgacgggggtctttcatttgggggctcgtccgggatttggagacccctgcccagggaccaccgacccaccaccgggaggtaagctggcgactcggaccgatg

SEQ ID NO: 5190 - DNA, 203 bp, synthetic construct
  source 1..203: mol_type = other DNA
ggcgcgccagtcctccagcaacttatctgtgtctgtccgattgtctagtgtctatgtttgatgttatgcgcctgcgtctgtactagttagctaactagctctgtatctggcggacccgtggtggaactgacgagttctgaacacccggccgcaaccctgggagacgtcccagggactttgggggccgtcgactcggaccgatg

SEQ ID NO: 5191 - DNA, 203 bp, synthetic construct
  source 1..203: mol_type = other DNA
ggcgcgccagtcctttttgtggcccgacctgaggaagggagtcgatgtggaatccgaccccgtcaggatatgtggttctggtaggagacgagaacctaaaacagttcccgcctccgtctgaatttttgctttcggtttggaaccgaagccgcgcgtcttgtctgctgcagcatcgttctgtgttgtctcgactcggaccgatg

SEQ ID NO: 5192 - DNA, 203 bp, synthetic construct
  source 1..203: mol_type = other DNA
ggcgcgccagtcctcgtcggatggccgcgagacggcacctttaaccgagacctcatcacccaggttaagatcaaggtcttttcacctggcccgcatggacacccagaccaggtcccctacatcgtgacctgggaagccttggcttttgacccccctccctgggtcaagccctttgtacaccctaagcccgactcggaccgatg

SEQ ID NO: 5193 - DNA, 203 bp, synthetic construct
  source 1..203: mol_type = other DNA
ggcgcgccagtccttccgcctcctcttcttccatccgcgccgtctctcccccttgaacctcctctttcgaccccgcctcaatcctccctttatccagccctcactccttctttgggcgccaaacctaaacctcaagttctttctgacagtggggggccgctcatcgacctacttacagaagacccccccgactcggaccgatg

SEQ ID NO: 5194 - DNA, 203 bp, synthetic construct
  source 1..203: mol_type = other DNA
ggcgcgccagtcctgccttatagggacccaagaccacccccttccgacagggacggagatagtggagaagcgacccctgcgggagaggcaccggacccctccccaatggcatctcgcctgcgtgggagacgggagccccctgtggccgactccactacctcgcaggcattccccctccgcacaggaggcgactcggaccgatg

SEQ ID NO: 5195 - DNA, 203 bp, synthetic construct
  source 1..203: mol_type = other DNA
ggcgcgccagtcctcggggaagaaaaacaacgggtgctcttagaggctagaaaggcggtgcggggcgatgatgggcgccccactcaactgcccaatgaagtcgatgccgcttttcccctcgagcgcccagactgggagtacaccacccaggcaggtaggaaccacctagtccactatcgccagttgctcgactcggaccgatg

SEQ ID NO: 5196 - DNA, 203 bp, synthetic construct
  source 1..203: mol_type = other DNA
ggcgcgccagtcctacgccgtaggacagaggatgagcagaaagagaaagaaagagatcgtaggagacatagagagatgagcaggctattggccactgtcgttagtggacagagacaggatagacaggaaggagaacgaaggaggtcccaactcgactgcgaccagtgtacctactgcgaagaacaaggcgactcggaccgatg

SEQ ID NO: 5197 - DNA, 203 bp, synthetic construct
  source 1..203: mol_type = other DNA
ggcgcgccagtcctgcactgggctaaagattgtcccaagagaccacgaggacctcggggaccaagaccccagacctccctcctgaccctagatgactagggaggtcagggtcaggagcccccccctgaacccaggataaccctcaaagtcggggggcaacccgtcaccttcctggtagatactggggccgactcggaccgatg

SEQ ID NO: 5198 - DNA, 203 bp, synthetic construct
  source 1..203: mol_type = other DNA
ggcgcgccagtccttccaaacagctagacccagtagcagctgggtgacccccttgcctacggatggtagcagccattgccgtactgacaaaggatgcaggcaagctaaccatgggacagccactagtcattctggccccccatgcagtagaggcactagtcaaacaaccccccgaccgctggctttcccgactcggaccgatg

SEQ ID NO: 5199 - DNA, 203 bp, synthetic construct
  source 1..203: mol_type = other DNA
ggcgcgccagtcctaacgcccggatgactcactatcaggccttgcttttggacagggaccgggtccagttcagaccggtggtagccctgaacccggctacgctgctcccactgcctgagaaagggctgcaacacaactgccttgatatcctggccgaagctcatggaacccgacccgacctaagggaccgactcggaccgatg

SEQ ID NO: 5200 - DNA, 203 bp, synthetic construct
  source 1..203: mol_type = other DNA
ggcgcgccagtcctcagccgctcccagacgccgaccacacctggtacacggatggaagcagtcttttacaagagggacagcgtaaggcgggagctgcggtgaccaccgagaccgagaagccttcccaaccaagaaaaaaaaccgccaaggtcgtaaatcttccccaggttcggcatgcttcaggtattcgactcggaccgatg

SEQ ID NO: 5201 - DNA, 203 bp, synthetic construct
  source 1..203: mol_type = other DNA
ggcgcgccagtccttagggactgggtgctcctactccccttagccctgtatcgagcccgcaacacgccgggcccccatggcctcaccccatatgagatcttatgtggggcacccccgccccttgtaaacttccctgaccctgacatgacaagagttactaacagcccctctctccaagctcacatacacgactcggaccgatg

SEQ ID NO: 5202 - DNA, 203 bp, synthetic construct
  source 1..203: mol_type = other DNA
ggcgcgccagtccttaatgccttcgcctctaagcctgtgtcgctacctccctcgtgagctgtcgccatcggtagactcgcggtcctgcagcattcctttggtggccccgaggaaggcagggaagctcttcctggggaccactcctcctcgggctcccggactgccacgccggctggcctggttctccacgactcggaccgatg

SEQ ID NO: 5203 - DNA, 203 bp, synthetic construct
  source 1..203: mol_type = other DNA
ggcgcgccagtcctgccacgacaacatagttcgggttgtggctgccagcacgcgcacgcccgaagactccaacagcctaggtaccataatcatggagtttgggggcaacgtgactctacaccaagtcatctacgatgccacccgctcaccggagcctctcagctgcagaaaacaactaagtttggggacgactcggaccgatg

SEQ ID NO: 5204 - DNA, 203 bp, synthetic construct
  source 1..203: mol_type = other DNA
ggcgcgccagtcctcccctccccacatagggggcacgtacacgcaccaagctccggagatcctaaaaggagagattgccacgcccaaagctgacatctactcttttggaatcaccctgtggcagatgactaccagagaggtgccttactccggcgaacctcagtacgtgcagtatgcagtggtagcctcgactcggaccgatg

SEQ ID NO: 5205 - DNA, 203 bp, synthetic construct
  source 1..203: mol_type = other DNA
ggcgcgccagtcctacaatctgcgtccctcactggcaggagcggtgttcaccgcctccctgactggaaaggcactgcagaacatcatccagagctgctgggaggcccgcggcctgcagaggccgagtgcagaactgctccaaagggacctcaaggctttccgagggacactaggctgactccatcgagcgactcggaccgatg

SEQ ID NO: 5206 - DNA, 203 bp, synthetic construct
  source 1..203: mol_type = other DNA
ggcgcgccagtcctagtttctagtgaatcatcagatgtttccagggtgccccaaggacctgaaaatgaccctgtaccttatttgaactaaccaatcagttcgcttctcgcttctgttcgcgcgcttccgctctccgagctcaataaaagagcccacaacccctcactccgcgcgccagtcttccgatacgactcggaccgatg

SEQ ID NO: 5207 - DNA, 203 bp, synthetic construct
  source 1..203: mol_type = other DNA
ggcgcgccagtcctcactttgcaaggcatggaaaaatacataactgagaatagaaaagttcagatcaaggtcaggaacaaagaaacagctgaataccaaacaggatatctgtggtaagcggttcctgccccggctcagggccaagaacagatgagacagctgagtgatgggccaaacaggatatctgtcgactcggaccgatg

SEQ ID NO: 5208 - DNA, 203 bp, synthetic construct
  source 1..203: mol_type = other DNA
ggcgcgccagtccttttccagggtgccccaaggacctgaaaatgaccctgtaccttatttgaactaaccaatcagttcgcttctcgcttctgttcgcgcgcttccgctctccgagctcaataaaagagcccacaacccctcactccgcgcgccagtcttccgatagactgcgtcgcccgggtacccgtcgactcggaccgatg

SEQ ID NO: 5209 - DNA, 203 bp, synthetic construct
  source 1..203: mol_type = other DNA
ggcgcgccagtcctggagagatcagagcactcttgggagtggaagctcccgggtctctcctgcctgactgtggagacaataaaggagttactttacaactgcgctagcctggttattatcgggattcgtcactaattctgtgcaacaccagagcggatctcgcagctggcgcccaacgtggggctcgacgactcggaccgatg

SEQ ID NO: 5210 - DNA, 203 bp, synthetic construct
  source 1..203: mol_type = other DNA
ggcgcgccagtcctgaaaagaagacagcagtccgcagaaatcaggagaagaagagtcatggaaggagttatgggacctcggactttgctgttgtaaagagaaaccagcgcgcagcggaagagcggagacacggacaaaagggaaacaaaaacttcggggacgcctgaagtaaggtaagagagacacctcgactcggaccgatg

SEQ ID NO: 5211 - DNA, 203 bp, synthetic construct
  source 1..203: mol_type = other DNA
ggcgcgccagtcctgaaaaaatgcaagcatgtcgggacgtaggatcagaaggatttaaaatgcagctgttagcacaggcattgagaccgccacggaaggaaggaaaacagggagtacaaaaatgctattactgcgggaaaccaggacatctcgcaaggcaatgcagacaaggaataatatgtcatcatcgactcggaccgatg

SEQ ID NO: 5212 - DNA, 203 bp, synthetic construct
  source 1..203: mol_type = other DNA
ggcgcgccagtcctgatggaagttgagtccctcagtgtatcaatttacaatgcaagaaatattaagggattggatagcgaaacatcctatgatacaatttggaatatacatggatgatatttatatagggagtgatttggatataatgaaacacagagagatagtagaagaactagctagctatattgcgactcggaccgatg

SEQ ID NO: 5213 - DNA, 203 bp, synthetic construct
  source 1..203: mol_type = other DNA
ggcgcgccagtcctcccagtatggatttatgttaccagaagaaaagagacaagaagggtatccagcaaagtggcttggatttgaattgcacccagagaaatggagatttcagaaacatacacttccagaaataaaggaagggaccataacattaaataaattacaaaaattagtaggagatttagtctcgactcggaccgatg

SEQ ID NO: 5214 - DNA, 203 bp, synthetic construct
  source 1..203: mol_type = other DNA
ggcgcgccagtcctggagacaatcattaataggaaaaagcatacctaatatactaaagttaatggaaggggatagggcgctccaaagtgaaagaaggatagagctcagacatgtaaaggaatgggaggaatgtagaagaaaattagcagaaatggaaggaaattactatgatgaagagaaggatgtatcgactcggaccgatg

SEQ ID NO: 5215 - DNA, 203 bp, synthetic construct
  source 1..203: mol_type = other DNA
ggcgcgccagtcctagaatggaaaaggaagtctaggattcattgcctctacaggcgttaaatttagaaaacacgaagagggaacaaatcaacaattagaattaagagcaatagaagaggcgtgcaaacagggaccagagaaaatgaatatagtaacagatagcagatatgcatatgaatttatgagaacgactcggaccgatg

SEQ ID NO: 5216 - DNA, 203 bp, synthetic construct
  source 1..203: mol_type = other DNA
ggcgcgccagtcctaagggggaataatagattcaggatatcaaggcattatacaggtagtagtatataacagcaatgacaaggaagtcattatcccacaagggagaaaatttgcacaattaattctcatgcctttaatacatgaagacctagaagcttggggggaaactagaaggacagaaagaggaacgactcggaccgatg

SEQ ID NO: 5217 - DNA, 203 bp, synthetic construct
  source 1..203: mol_type = other DNA
ggcgcgccagtcctaccaaggatttggatcaacgggagcatattggattgaaaatattcccctagcagaggaagatcacagtaaatggcatcaagatgctgggtcattacacttagactttgggataccccgaactgcagctgaggatattgtacaacaatgtgaagtatgtcaagaaaataaaatgccgactcggaccgatg

SEQ ID NO: 5218 - DNA, 203 bp, synthetic construct
  source 1..203: mol_type = other DNA
ggcgcgccagtccttttgttattacagagtcaggaaaagaggacacccaggcgagtggctgggaccaacacaggtactctgggaaggggaaggagcaatcgtaataaaagataaaaatctagaaaagtatttagtcatagcaaaaaaggatgttaagttcataccgcaaccaaaagaaatacaaacagcgactcggaccgatg

SEQ ID NO: 5219 - DNA, 203 bp, synthetic construct
  source 1..203: mol_type = other DNA
ggcgcgccagtcctaatgaggaaacagagagacgaagaagaaaaacaaaatttggtaacaggtaaggaaaaatcttgggtaagtattgacctcctggggaccaaacaagaagggaaaaggcagaaggtaaacatatggggaccatgggaaaaatggggaattaaaatagtatgggtaatgctatgggtcgactcggaccgatg

SEQ ID NO: 5220 - DNA, 203 bp, synthetic construct
  source 1..203: mol_type = other DNA
ggcgcgccagtccttgctatcatggctataatagctgctgcaggagctggactcggcgttgctaatgccgtgcagcaatcctacaccaggacggctgttcagtctcttgctaacgcaactgctgctcagcagaatgtgttagaagcaacttatgccatggttcagcatgtggcaaaaggggtaagaatcgactcggaccgatg

SEQ ID NO: 5221 - DNA, 203 bp, synthetic construct
  source 1..203: mol_type = other DNA
ggcgcgccagtcctggccaccaataaaggacctgatcacgcacagaacatgcatggctgcaccaatggggtagctgatcatgagctaaacactcgtctcccagcctatcagaactacttcccctttcccctctctacccgctcccctccctatataaggaacccattttgaaataaactttgcagcttcgactcggaccgatg

SEQ ID NO: 5222 - DNA, 203 bp, synthetic construct
  source 1..203: mol_type = other DNA
ggcgcgccagtcctttcactgggcttcagaatgccgttctcgattagacattaatggacaacccattattaagcagggaaacttgaacaggggccagccccagggccccactaccgggatgaactccggggcttcacagttcaccccccaataccgccagccaacccctgccctcccagtaatcaacccgactcggaccgatg

SEQ ID NO: 5223 - DNA, 203 bp, synthetic construct
  source 1..203: mol_type = other DNA
ggcgcgccagtcctacgccgctacgtcacagacctctggcgagcaacagcgggcagtgcaggactggacctctgtaccaccaccgacacaatactaaccacccaaaatagccctctgacacttccagttggaatatatggacccttaccaccccagacattcggcctcatattagcagagccagctctcgactcggaccgatg

SEQ ID NO: 5224 - DNA, 203 bp, synthetic construct
  source 1..203: mol_type = other DNA
ggcgcgccagtcctaaccgttgctactcacctgcgcggtattggccaggccaccaacccccaacaaagtgctcaaatgcttaagtgggaggactctgaaggcaataatggtcacattaccccttatgtcctccccaatctgccagtcaatctctggggaagggacatcctctctcaaatgaaacttgtcgactcggaccgatg

SEQ ID NO: 5225 - DNA, 203 bp, synthetic construct
  source 1..203: mol_type = other DNA
ggcgcgccagtcctttaagaaaaaatcaggtagctggcgtcttttacaggatctaagagccgttaataaggtaatggtccccatgggagcccttcagcctggtcttccctctcctgtagccatccccctaaactatcacaaaattgttattgaccttaaggattgtttctttaccatccccttacacccgactcggaccgatg

SEQ ID NO: 5226 - DNA, 203 bp, synthetic construct
  source 1..203: mol_type = other DNA
ggcgcgccagtcctctgaagacagaccttactttgcctttagcgtccctcaaatcaacttccaaagtcctatgcctcgttatcagtggaaggttctgccacagggcatggccaacagtcccacactgtgccaaaaatttgttgctgccgccattgccccagtaagatcccagtggccagaggcctatacgactcggaccgatg

SEQ ID NO: 5227 - DNA, 203 bp, synthetic construct
  source 1..203: mol_type = other DNA
ggcgcgccagtcctccctcctttggctccatctacctgcctccccatcaaaagtcttactcacctacccctcgctcctcgccatgttaattattaagggtcggtacactggccgccaactgtttggcagggacccccactctataatcattccatacacccaggaccaattaacctggctcctgcaaacgactcggaccgatg

SEQ ID NO: 5228 - DNA, 203 bp, synthetic construct
  source 1..203: mol_type = other DNA
ggcgcgccagtcctgaattgctgcatatgttattgataatcaacccatctcaataaaatccccctacctgtcagctcaacttgttgagctctatgctattctccaggtgttcacagttctagctcaccaaccgtttaacttgtacactgacagtgcgtatattgctcaatcagtccctcttttggagacgactcggaccgatg

SEQ ID NO: 5229 - DNA, 203 bp, synthetic construct
  source 1..203: mol_type = other DNA
ggcgcgccagtccttcaccagtgtttggaagggccctgaccctgtcctcatatgggggcgaggctcagcctgcatatacgatcaaaaggaggatggcccccgctggctccctgagcgactaattagacacatcaataatcagacagcccccttgtgtgacaggccaagtaacccaaatacagccccagcgactcggaccgatg

SEQ ID NO: 5230 - DNA, 203 bp, synthetic construct
  source 1..203: mol_type = other DNA
ggcgcgccagtcctcggatgcgatggcacggttggaaaatcggtttgttggaatcagcaagcccctattcacgtctccgacggtggcggaccccaagatgctgtgagagagctttatgtacaaaaacaaatagagcttgttattcaaagccaattccctaagttatcctaccaccccctagctcgctccgactcggaccgatg

SEQ ID NO: 5231 - DNA, 203 bp, synthetic construct
  source 1..203: mol_type = other DNA
ggcgcgccagtcctaaaaccaagaggacctgacattgatgcacaaatgcttgatattctgtcagccacccaccaggccctcaatatctccaaccccagcctagcccaaaattgctggttatgcttaaatcaaggtacctccatgcccctagccttccctgtcaatatatctagttttaatgcctcacacgactcggaccgatg

SEQ ID NO: 5232 - DNA, 203 bp, synthetic construct
  source 1..203: mol_type = other DNA
ggcgcgccagtcctccaagcttttgtttgcggcaacaacctcgcctttactgctctgcctgcaaactggacagggtcatgtgtgttagccgccctcctgccagatatagacattatttctggtgatgaccctgtccctatccctacctttgactatattgcagggcggcagaaacgagccgttacactcgactcggaccgatg

SEQ ID NO: 5233 - DNA, 203 bp, synthetic construct
  source 1..203: mol_type = other DNA
ggcgcgccagtcctgattcccctgctagtaggattgggtgtctctacagcagtcgctaccggtacagcaggactcggggtggctgttcaatcttacacaaaactttcccatcaacttattaacgacgtccaagccttgtctagcaccattaatgacttacaggaccaactagattccctagccgaagtcgactcggaccgatg

SEQ ID NO: 5234 - DNA, 203 bp, synthetic construct
  source 1..203: mol_type = other DNA
ggcgcgccagtcctcttcctcaccggcctcaatggacttctcccttacctcctccccttccttggacccttattcgctatcatcctgttcttctcttttgccccttggatcctaagacgagtaacagcgttaatcagggatcagctcaattccctactgggaaagcccatacaaatccactatcaccacgactcggaccgatg

SEQ ID NO: 5235 - DNA, 203 bp, synthetic construct
  source 1..203: mol_type = other DNA
ggcgcgccagtccttggcttgcatagaggttggtactcgaaaaatcctctcctcccaaaaaggtacctgtaagcctgaaaattaaggctcaggaggagcacagcctctacctcccctagctggttaaggtccgcctcctctttttttaaagaaaaagggaggagatgttgggaacccaggctaagctgcgactcggaccgatg

SEQ ID NO: 5236 - DNA, 203 bp, synthetic construct
  source 1..203: mol_type = other DNA
ggcgcgccagtccttttgaaaaagccctgtataactctaggaaaggctcccgatttaaataaagcatacaagtcagttttatcatgcatgagcgccgccaaacttgatcctgacgatgtatgttcctatttggcggcggcaatgcagttttttgaggggacatgtccggaagactggaccagctatggcgactcggaccgatg

SEQ ID NO: 5237 - DNA, 203 bp, synthetic construct
  source 1..203: mol_type = other DNA
ggcgcgccagtcctaaatgcaacggttattgctgcatgtgctcctcatgaaatgtctgttctagggggctatctgggagaggaattcttcgggaaagggacatttgaaagaagattcttcagagatgagaaagaacttcaagaatacgaggcggctgaactgacaaagactgacgtagcactggcagacgactcggaccgatg

SEQ ID NO: 5238 - DNA, 203 bp, synthetic construct
  source 1..203: mol_type = other DNA
ggcgcgccagtcctcaaccctccaggaaagtcttcagaggataaatcaacccagactaccggccgagagctcaagaaggagacaacacccactccttctcagagagaaagccaatcctcgaaagccaggatggcggctcaaactgcttctggccctccagcccttgaatggtcggccaccaatgaagacgactcggaccgatg

SEQ ID NO: 5239 - DNA, 203 bp, synthetic construct
  source 1..203: mol_type = other DNA
ggcgcgccagtcctgggtcttccctggcgggaattgctcaggagtagcggtgtcttctacctactgctccactaaccacgattacaccatttggatgcccgagaatccgagactagggatgtcttgtgacatttttaccaatagtagagggaagagagcatccaaagggagtgagacttgcggctttgcgactcggaccgatg

SEQ ID NO: 5240 - DNA, 203 bp, synthetic construct
  source 1..203: mol_type = other DNA
ggcgcgccagtcctatgctcactacaagtcagtcagaacttggaatgagatcatcccttcaaaagggtgtttaagagttggggggaggtgtcatcctcatgtaaacggggtatttttcaatggtataatattaggacctgacggcaatgtcttaatcccagagatgcaatcatccctcctccagcaaccgactcggaccgatg

SEQ ID NO: 5241 - DNA, 203 bp, synthetic construct
  source 1..203: mol_type = other DNA
ggcgcgccagtccttactgagtgcaggggccctgactgccttgatgttgataattttcctgatgacatgctggagaagagtcaatcgatcggaacctacacaacacaatctcagagggacagggagggaggtgtcagtcactccccaaagcgggaagatcatatcttcatgggaatcatacaagagcgcgactcggaccgatg

SEQ ID NO: 5242 - DNA, 203 bp, synthetic construct
  source 1..203: mol_type = other DNA
ggcgcgccagtcctttgccaacacgtattcctcttacttgttcttccatgtaatcaccttatacatgaacgccctagactgggatgaagaaaagaccatcctagcattatggaaagatttaacctcagtggacatcgggaaggacttggtaaagttcaaagaccaaatatggggactgctgatcgtgacgactcggaccgatg

SEQ ID NO: 5243 - DNA, 203 bp, synthetic construct
  source 1..203: mol_type = other DNA
ggcgcgccagtcctcaaaggactttgtttactcccaaagttccaattgtctttttgacagaaactacacacttatgctaaaagatcttttcttgtctcgcttcaactccttaatggtcttactttctcccccagagccccgatactcagatgacttgatatctcagctatgccagctgtacattgctgcgactcggaccgatg

SEQ ID NO: 5244 - DNA, 203 bp, synthetic construct
  source 1..203: mol_type = other DNA
ggcgcgccagtcctggcacaagctcccgatcacgcaaatctttgagattcctgaatcaatggatccatcagaaatattggatgacaaatcacattctttcaccagaacgagactagcttcttggctgtcagaaaaccgaggggggcctgttcctagcgaaaaagttattatcacggccctgtctaagccgactcggaccgatg

SEQ ID NO: 5245 - DNA, 203 bp, synthetic construct
  source 1..203: mol_type = other DNA
ggcgcgccagtcctatggccaggatggcgggctagaaggcttacggcagaagggctggagtctagtcagcttattgatgatagatagagaatctcaaatcaggaacacaagaaccaaagtactagctcaaggagacaaccaggttttatgtccgacatatatgttgtcgccagggctatctcaagaggcgactcggaccgatg

SEQ ID NO: 5246 - DNA, 203 bp, synthetic construct
  source 1..203: mol_type = other DNA
ggcgcgccagtcctagtccaaaagatgggccagagtctcttgcgtctctaatgaccaaatagtcaacctcgccaatataatgtcgacagtgtccaccaacgcgctaacagtggcacaacactctcaatctttgatcaaaccgatgagggattttctgctcatgtcagtacaggcagtctttcactacccgactcggaccgatg

SEQ ID NO: 5247 - DNA, 203 bp, synthetic construct
  source 1..203: mol_type = other DNA
ggcgcgccagtcctggttatccttctggagagagatctggttaagctcccacgagtcctggattcacgcgttgtgtcaagaggctggaaacccagatcttggagagagaacactcgagagcttcactcgccttctagaagatcctaccaccttaaatatcagaggaggggccagtcctaccattctaccgactcggaccgatg

SEQ ID NO: 5248 - DNA, 203 bp, synthetic construct
  source 1..203: mol_type = other DNA
ggcgcgccagtccttgggaatccccgagtcaatcattggactgatacaaaactcccgaacgataagaaggcagtttagaaagagtctctcaaaaactttagaagaatccttctacaactcagagatccacgggattagtcggatgacccagacacctcagagggttgggggggtgtggccttgctcttcgactcggaccgatg

SEQ ID NO: 5249 - DNA, 203 bp, synthetic construct
  source 1..203: mol_type = other DNA
ggcgcgccagtcctatcagtcatttttttgcacggggcccctaaaggggtacttgggctcgtccacctctatgtcgacccagctattccatgcatgggaaaaagtcactaatgttcatgtggtgaagagagctctatcgttaaaagaatctataaactggttcattactagagattccaacttggctccgactcggaccgatg

SEQ ID NO: 5250 - DNA, 203 bp, synthetic construct
  source 1..203: mol_type = other DNA
ggcgcgccagtcctttaatagacctcttgaattgatctcaggggtaatctcatatattctcctgaggctagataaccatccctccttgtacataatgctcagagaaccgtcttttagagaagagatattttctatccctcagaaaatccccgccgcttatccaaccactatgaaagaaggcaacagatcgactcggaccgatg

SEQ ID NO: 5251 - DNA, 203 bp, synthetic construct
  source 1..203: mol_type = other DNA
ggcgcgccagtcctctggagattacagccccaacaagaaggtgtcccgtaaggtaggatgttcagaatgggtctgctctgctcaacaggttgcagtctctacctcagcaaacccggcccctgtctcggagcttgacataagggccctctctaagaggttccagaaccctttgatctcgggcttgagagcgactcggaccgatg

SEQ ID NO: 5252 - DNA, 203 bp, synthetic construct
  source 1..203: mol_type = other DNA
ggcgcgccagtccttggttcagtgggcaaccggtgctcattataagcttaagcctattctagatgatctcaatgttttcccatctctctgccttgtagttggggacgggtcaggggggatatcaagggcagtcctcaacatgtttccagatgccaagcttgtgttcaacagtcttttagaggtgaatgcgactcggaccgatg

SEQ ID NO: 5253 - DNA, 203 bp, synthetic construct
  source 1..203: mol_type = other DNA
ggcgcgccagtcctaaagcgggccatcgtagccgtgatacccagacctgtgttcacgcagatgcaggtcagtgatcacccagcactccacgcaatttcgcggtatacccgccgccattggatcgagtggggccctaaagaagccctacacgtcctcatcgacccaagcccgggcctgctccgcgaggtcgactcggaccgatg

SEQ ID NO: 5254 - DNA, 203 bp, synthetic construct
  source 1..203: mol_type = other DNA
ggcgcgccagtcctcggcggttgccccgccgattgccgcggagccggcgctgggcccacgcccggctacacccgcccctgcaccacacgcatctaccaagtcctgccggacaccgcccaccccgggcgcctctaccggtgcgggccccgcctgtggacgcgcgattgcgccgtggccgaactctcatgcgactcggaccgatg

SEQ ID NO: 5255 - DNA, 203 bp, synthetic construct
  source 1..203: mol_type = other DNA
ggcgcgccagtcctcgccgccttcgaccgcggccccctcgaggacggcgggcgccacttggacaccgtgcaacccccaaaatcgccgccccgccctgagatcgccgcgacctggatcgtccacgcagccagcgaagaccgccattgcgcgtgcgctccccgctgcgacgtcccgcgcgaacgtccttccgactcggaccgatg

SEQ ID NO: 5256 - DNA, 203 bp, synthetic construct
  source 1..203: mol_type = other DNA
ggcgcgccagtcctaaccagggcagacccagacagcgacatcgttgaaagttacgcccgcgccgccggacccgtgcacctccgagtccgcgacatcatggacccaccgcccggctgcaaggtcgtggtcaacgccgccaacgaggggctactggccggctctggcgtgtgcggtgccatctttgccaacgactcggaccgatg

SEQ ID NO: 5257 - DNA, 203 bp, synthetic construct
  source 1..203: mol_type = other DNA
ggcgcgccagtcctcgccacgctgacgcacgcctccgtgctcgtcggcgcggggctcgctgccaggcgcgtcagtcctcctccgaccgagcccctcgcatcttgccccgccggtgacccgggccgaccggctcagcgcagcgcgtcgcccccagcgaccccccttggggatgccaccgcgcccgagcccgactcggaccgatg

SEQ ID NO: 5258 - DNA, 203 bp, synthetic construct
  source 1..203: mol_type = other DNA
ggcgcgccagtcctccgcggatgccaggggtgcgaactctgccggtacacgcgcgtcaccaatgaccgcgcctatgtcaacctgtggctcgagcgcgaccgcggcgccaccagctgggccatgcgcattcccgaggtggttgtctacgggccggagcacctcgccacgcattttccattaaaccactacgactcggaccgatg

SEQ ID NO: 5259 - DNA, 203 bp, synthetic construct
  source 1..203: mol_type = other DNA
ggcgcgccagtcctagacccaaacacctgctggctccgcgccgccgccaacgttgcgcaggctgcgcgcgcctgcggcgcctacacgagtgccgggtgccccaagtgcgcctacggccgcgccctgagcgaagcccgcactcatgaggacttcgccgcgctgagccagcggtggagcgcgagccacgccgactcggaccgatg

SEQ ID NO: 5260 - DNA, 203 bp, synthetic construct
  source 1..203: mol_type = other DNA
ggcgcgccagtcctgcgccccgaggggggcaaccccaccggccacttcgtctgcgcggtcggcggcggcccacgccgcgtctgggaccgcccccacctctggcttgcggtccccctgtctcggggcggtggcacctgtgccgcgaccgacgaggggctggcccaggcgtactacgacgacctcgaggtcgactcggaccgatg

SEQ ID NO: 5261 - DNA, 203 bp, synthetic construct
  source 1..203: mol_type = other DNA
ggcgcgccagtcctgcgccgcctcggggatgacgccatggcccgggcggccctcgcatcagtccaacgccctcgcaaaggcccttacaatatcagggtatggaacatggccgcaggcgctggcaagactacccgcatcctcgctgccttcacgcgcgaagacctttacgtctgccccaccaatgcgctcgactcggaccgatg

SEQ ID NO: 5262 - DNA, 203 bp, synthetic construct
  source 1..203: mol_type = other DNA
ggcgcgccagtcctcggcaccttcgcctgcaacctttgggacggccgccaggtcgaccttcacctcgccttctcgcgcgaaaccgtgcgccgccttcacgaggctggcatacgcgcatacaccgtgcgcgaggcccagggtatgagcgtcggcaccgcctgcatccatgtaggcagagacggcacggacgactcggaccgatg

SEQ ID NO: 5263 - DNA, 203 bp, synthetic construct
  source 1..203: mol_type = other DNA
ggcgcgccagtcctcatgcgcatctcgcgtcacctgctcaacaagaatcacaccgagatgcccggaacggaacgcgttctcagtgccgtttgcgccgtgcggcgctaccgcgcgggcgaggatgggtcgaccctccgcactgctgtggcccgccagcacccgcgcccttttcgccagatcccaccccccgactcggaccgatg

SEQ ID NO: 5264 - DNA, 203 bp, synthetic construct
  source 1..203: mol_type = other DNA
ggcgcgccagtcctcgccttgcgcccgcaattccttgtggccgctggccatacggagcccgaggtcgatgcgtggtggcaggcccattacaccaccaacgccatcgaggtcgacttcactgagttcgacatgaaccagaccctcgctactcgggacgtcgagctcgagattagcgccgctctcttgggcgactcggaccgatg

SEQ ID NO: 5265 - DNA, 203 bp, synthetic construct
  source 1..203: mol_type = other DNA
ggcgcgccagtcctcctcttccatgatgtcatgcaccaggcgatcaaggtgctttgccgccgtttcgacccagacgtgcttgaagaacagcaggtggccctcctcgaccgcctccggggggtctacgcggctctgcctgacaccgttgccgccaatgctgcgtactacgactacagcgcggagcgcgtcgactcggaccgatg

SEQ ID NO: 5266 - DNA, 203 bp, synthetic construct
  source 1..203: mol_type = other DNA
ggcgcgccagtcctcgaggcctgcgtgacctcgtggctttggagcgagggcgaaggcgcggtcttttaccgcgtcgacctgcatttcaccaacctgggcacccccccactcgacgaggacggccgctgggaccctgcgctcatgtacaacccttgcgggcccgagccgcccgctcacgtcgtccgcgccgactcggaccgatg

SEQ ID NO: 5267 - DNA, 203 bp, synthetic construct
  source 1..203: mol_type = other DNA
ggcgcgccagtcctgacccgctccgcgcgccatccttggcgcatccgcttcggtgccccccaggccttccttgccgggctcttgctcgccacggtcgccgttggcaccgcgcgcgccgggctccagccccgcgctgatatggcggcacctcctacgctgccgcagcccccctgtgcgcacgggcagcacgactcggaccgatg

SEQ ID NO: 5268 - DNA, 203 bp, synthetic construct
  source 1..203: mol_type = other DNA
ggcgcgccagtccttcataccaagcacatggacttctggtgtgtggagcacgaccgaccgccgcccgcgaccccgacgcctctcaccaccgcggcgaactccacgaccgccgccacccccgccactgcgccggccccctgccacgccggcctcaatgacagctgcggcggcttcttgtctgggtgcggcgactcggaccgatg

SEQ ID NO: 5269 - DNA, 203 bp, synthetic construct
  source 1..203: mol_type = other DNA
ggcgcgccagtcctcgtgcccgcccatccaggcgcccgctgccccgaactggtgagccccatgggacgcgcgacttgctccccagcctcggccctctggctcgccacagcgaacgcgctgtctcttgatcacgccctcgcggccttcgtcctgctggtcccgtgggtcctgatatttatggtgtgccgcgactcggaccgatg

SEQ ID NO: 5270 - DNA, 203 bp, synthetic construct
  source 1..203: mol_type = other DNA
ggcgcgccagtcctctcctctggcgggtacgcgcagctggcctcttacttcaaccctggcggcagctactacaagcagtaccaccctaccgcgtgcgaggttgaacctgccttcggacacagcgacgcggcctgctggggcttccccaccgacaccgtgatgagcgtgttcgcccttgctagctacgtcgactcggaccgatg

SEQ ID NO: 5271 - DNA, 203 bp, synthetic construct
  source 1..203: mol_type = other DNA
ggcgcgccagtcctgctgcgcactgcccctggacccggcgaggtgtgggtcacgcctgtcataggctctcaggcgcgcaagtgcggactccacatacgcgctggaccgtacggccatgctaccgtcgaaatgcccgagtggatccacgcccacaccaccagcgacccctggcatccaccgggccccttcgactcggaccgatg

SEQ ID NO: 5272 - DNA, 203 bp, synthetic construct
  source 1..203: mol_type = other DNA
ggcgcgccagtcctggggctgaagttcaagacagttcgcccggtggccctgccacgcacgttagcgccaccccgcaatgtgcgtgtgaccgggtgctaccagtgcggtacccccgcgctggtggaaggccttgcccccgggggaggcaattgccatctcaccgtcaatggcgaggacctcggcgccgtcgactcggaccgatg

SEQ ID NO: 5273 - DNA, 203 bp, synthetic construct
  source 1..203: mol_type = other DNA
ggcgcgccagtcctcccccctgggaagttcgtcaccgccgccctcctcaacacccccccgccctaccaagtcagctgcgggggcgagagcgatcgcgcgaccgcgcgggtcatcgaccccgccgcgcaatcgtttaccggcgtggtgtatggcacacacaccactgctgtgtcggagacccggcagaccgactcggaccgatg

SEQ ID NO: 5274 - DNA, 203 bp, synthetic construct
  source 1..203: mol_type = other DNA
ggcgcgccagtcctctgggcggagtgggctgctgcccattggtggcagctcactctgggcgccatttgcgccctcccactcgctggcttactcgcttgctgtgccaaatgcttgtactacttgcgcggcgctatagcgcctcgctagtgggcccccgcgcgaaacccgcactaggccactagatcccccgactcggaccgatg

SEQ ID NO: 5275 - DNA, 203 bp, synthetic construct
  source 1..203: mol_type = other DNA
ggcgcgccagtcctgaacagggacttgagaagaggcatcggcaccgaccgctgagttgctgagcgtcggagagggacgactcaggtagggtgagagcctacgagttttttgctacctagtcagcgagaaaggctaggccgcgacaggggcgcgggtcccattagtggcaaccaacccagttggacgaacgactcggaccgatg

SEQ ID NO: 5276 - DNA, 203 bp, synthetic construct
  source 1..203: mol_type = other DNA
ggcgcgccagtcctgggttggtaggggacgggtcggagcaatgggcgggggtcactcagcactgtcagggagaagcctcgacacgttcgagaagattaggctacgtccgaacgggaaaaagaagtaccaaattaaacatttaatatgggcaggaaaagaaatggaacgatttgggttacatgagaaaccgactcggaccgatg

SEQ ID NO: 5277 - DNA, 203 bp, synthetic construct
  source 1..203: mol_type = other DNA
ggcgcgccagtcctttggacatatgcaaagggaatgcaaggcaccaagacagatcaaatgctttaagtgcggcaaaattggccatatggcaaaagactgcaagaatggacaggcaaattttttagggtatggccattggggaggagcgaaaccaagaaattttgtgcaatacagaggagacacagttgcgactcggaccgatg

SEQ ID NO: 5278 - DNA, 203 bp, synthetic construct
  source 1..203: mol_type = other DNA
ggcgcgccagtcctgtctggaaccaacagcccccccaatggaaacagcttacgatccagcaaagaagctcctccagcagtatgcagagaagggacagcgcctgagagaggagagagaacagacaaggaaacagaaggagaaagaagtggaggatgtttccttgagctccctctttggaggagaccaatcgactcggaccgatg

SEQ ID NO: 5279 - DNA, 203 bp, synthetic construct
  source 1..203: mol_type = other DNA
ggcgcgccagtcctattggaggacagtggagaaaatgtaaatatagtcacagattctcaatatgtaatgaacatcttgacagcatgtccacaggaaagtaactcacccttagtggaacagataatacaagccctaatgaaaaagaggcaggtctacttacaatgggtaccagctcataaggggataggcgactcggaccgatg

SEQ ID NO: 5280 - DNA, 203 bp, synthetic construct
  source 1..203: mol_type = other DNA
ggcgcgccagtcctcaaaagatgattacatagaagtgaatatttatcacaacctcaccccagaaagaggatggctctcaagtcatggagtagggttatcctattaccatcaaaagggatataagacagaagtagatccaggaacagcagacagaatgatacacctatattattttaactgttttacagcgactcggaccgatg

SEQ ID NO: 5281 - DNA, 203 bp, synthetic construct
  source 1..203: mol_type = other DNA
ggcgcgccagtcctatagagccatccaacaggctatcagaggggagaagtatacgtggtgcacattcaaggaaggacataaaggtcaggtacaatcactgcaacttttggcactagttgcatatacaaatggcatcaggaagagatccaagagaacctttaccaggatggctggaaatctgggatctacgactcggaccgatg

SEQ ID NO: 5282 - DNA, 203 bp, synthetic construct
  source 1..203: mol_type = other DNA
ggcgcgccagtcctcaaaagtctatgtttgtacatttcagatgtggttgtagaaggagaggacctttttccccttacgaagagaggagaaatggacaaggaggaggagccccaccccctcctccaggacttgcataggccattacaaccatgtactaataaatgctattgcaaaaaatgctgttatcacgactcggaccgatg

SEQ ID NO: 5283 - DNA, 203 bp, synthetic construct
  source 1..203: mol_type = other DNA
ggcgcgccagtcctctggtaaaacaagcagagagtaatatacatctactctttgaacaaacgatgaggccttgtgttaagctctcccccatatgtattaaaatgtcctgtgtagagctgaatggtacagccacgacaaaggccaccactactgcaactacaacaatgactaccccctgtcagaattgccgactcggaccgatg

SEQ ID NO: 5284 - DNA, 203 bp, synthetic construct
  source 1..203: mol_type = other DNA
ggcgcgccagtcctatacattgtaatgattcagtgataaaagaagcttgtgataaaacatattgggatactttaagagtaagatactgtgcaccagcagggtatgctttgctaaaatgtaatgataaggattatagaggctttgctccaaagtgcaagaatgtttcagtagtgcattgtactagattacgactcggaccgatg

SEQ ID NO: 5285 - DNA, 203 bp, synthetic construct
  source 1..203: mol_type = other DNA
ggcgcgccagtcctatcaatactactataactacagggataggattaaatggtagtagatcagaaaatagaacagagatatggcagaaaggaggaaatgataatgatacagttataataaagttgaataagttttacaacttgacagtgagatgccgaagacctggtaataaaacagtgttgccagtacgactcggaccgatg

SEQ ID NO: 5286 - DNA, 203 bp, synthetic construct
  source 1..203: mol_type = other DNA
ggcgcgccagtcctgttgcctgccatatacgacaagtagtaaatgattggtacactgtctctaaaaaggtatatgctccaccaagggaaggtcatttggagtgtaactcatcagtcacggcactatacgtggcaatagattataacaacaagtctggcccaataaatgtgaccctaagtcctcaggtacgactcggaccgatg

SEQ ID NO: 5287 - DNA, 203 bp, synthetic construct
  source 1..203: mol_type = other DNA
ggcgcgccagtcctaagaatctggatctgtaccagaaattggatgattggtcagggttctggtcatggttctcactgtcaacttggttaggctatgttaaaataggatttttagtgatagtgattattctaggattaagatttgcatgggtattatggggatgtatcagaaatattaggcagggatatcgactcggaccgatg

SEQ ID NO: 5288 - DNA, 203 bp, synthetic construct
  source 1..203: mol_type = other DNA
ggcgcgccagtcctaatcctctcccccagatccatatccacagttcagcggaacggccagacaacggaggagggcaagacagaggtggagaaagcagcagcagcaaattgataagattgcaggaagagtcctcaacaccttcgaggatcaacaactggtggctcaacttcaagagctgcagcttgagacgactcggaccgatg

SEQ ID NO: 5289 - DNA, 203 bp, synthetic construct
  source 1..203: mol_type = other DNA
ggcgcgccagtcctgtaccgcccggacatgtttaaggacatgcacgaacatgcaaagcgctagtgtcagcactttgcggttgggactttccgccagggactttccacagtgggtggatcggaggcggtacaggggcggtactgggagtggctttcccctcagagctgcataaaagcagatgctcgctgcgactcggaccgatg

SEQ ID NO: 5290 - DNA, 203 bp, synthetic construct
  source 1..203: mol_type = other DNA
ggcgcgccagtcctgcttgtaactcagtctcttactaggagaccagctagagcctgggtgttcgctggttagcctaacccggttggccaccgggggtaaggactccttggcttcatatagctcaataaacctgctcgcttagtcgctatattggagtcaagtgctcattgctgcgccgagcctctagacgactcggaccgatg

SEQ ID NO: 5291 - DNA, 203 bp, synthetic construct
  source 1..203: mol_type = other DNA
ggcgcgccagtcctgttagcctaacccggttggccaccgggggtaaggactccttggcttcatatagctcaataaacctgctcgcttagtcgctatattggagtcaagtgctcattgctgcgccgagcctctagaggtgaacctctcttactgggttctcctgtacccaggtgggagaaactccagcacgactcggaccgatg

SEQ ID NO: 5292 - DNA, 203 bp, synthetic construct
  source 1..203: mol_type = other DNA
ggcgcgccagtcctaactcacccagacacagcaggaggcctttctcgcacgcctcactggccagggcaacatatccctaaaggaaaatgttgcgccagtcgagaaaaggaagaacaaatcccaaaagatattttcccagtgactgaaaccgttgatgggcaaggtcaagcctggagacaccataatggcgactcggaccgatg

SEQ ID NO: 5293 - DNA, 203 bp, synthetic construct
  source 1..203: mol_type = other DNA
ggcgcgccagtcctgcgttaagcactggaatatatggaccactgcctcccaacacttttggattaatcctaggccgaagtagcattactatgaagggtctacaagtttatccaggagtaattgataatgactataccggagaaattaaaattatggcaaaagctgttaacaatattgttactgtctctcgactcggaccgatg

SEQ ID NO: 5294 - DNA, 203 bp, synthetic construct
  source 1..203: mol_type = other DNA
ggcgcgccagtcctcaaggcaacagaatagctcaattaatcctcctgcctctgatcgagacagacaataaggtacaacaaccttatagaggacaaggaagttttggatcctcagacatatattgggtccaacctattacttgtcaaaaaccttccttaacattatggttagatgacaaaatgttcacacgactcggaccgatg

SEQ ID NO: 5295 - DNA, 203 bp, synthetic construct
  source 1..203: mol_type = other DNA
ggcgcgccagtcctccccagaaaaagttcaattacaagatccctacacatatttaggatttgaacttaatggtcctaaaatcactaatcaaaaagcagtcattcgtaaagataaattacagactcttaatgatttccaaaaacttttaggagacatcaattggctcagaccatatctaaaactcactacgactcggaccgatg

SEQ ID NO: 5296 - DNA, 203 bp, synthetic construct
  source 1..203: mol_type = other DNA
ggcgcgccagtcctctggagacttaaaacccttattcgacacccttaaaggagactctgaccccaattcccatagatccttatcaaaagaagctcttgcctcacttgaaaaggtagagacagccattgcagaacaattcgttactcacataaattattcactaccattaattttcctcatattcaacacgactcggaccgatg

SEQ ID NO: 5297 - DNA, 203 bp, synthetic construct
  source 1..203: mol_type = other DNA
ggcgcgccagtcctacaatgccttattagtttttactgatggctcttccactgggatggccgcatatactcttactgataccaccatcaaattccaaactaatcttaattcggctcaactagtagaactacaagctttaattgcagtcttatcagccttccctaatcaacctcttaatatttacactgcgactcggaccgatg

SEQ ID NO: 5298 - DNA, 203 bp, synthetic construct
  source 1..203: mol_type = other DNA
ggcgcgccagtcctacagtgcttacttagcccactcaatacccctacttgaaactgtcgcacaaattaaacacatatcagaaacagctaaactgttcctacagtgccagcaactcatatacaatagatccatacctttttatattggacatgtcagggcccattctggactacctggacccatagctccgactcggaccgatg

SEQ ID NO: 5299 - DNA, 203 bp, synthetic construct
  source 1..203: mol_type = other DNA
ggcgcgccagtccttagttgaaagagcccacttatctcttaaaaccaccattgaaaagataaaaaagggggaatggtaccctaggaagggtacccccaggaacatcctcaatcatgcactctttattctaaattttttaaatttagatgatcaaaataaatcagcagctgatcgtttttggcataatacgactcggaccgatg

SEQ ID NO: 5300 - DNA, 203 bp, synthetic construct
  source 1..203: mol_type = other DNA
ggcgcgccagtcctaccccaaaaaacaatttgccatggtaaaatggaaagatccattagataatacatggcatggccccgatccagtgttaatttggggcagaggttcagtctgtgtttactctcaaacctatgatgccgctagatggctaccagaacggttagtaagacaggtgtctaacaataacccgactcggaccgatg

SEQ ID NO: 5301 - DNA, 203 bp, synthetic construct
  source 1..203: mol_type = other DNA
ggcgcgccagtcctgatctcatatgattctgtacatgcctcttgctataaccactatcaacaatgtaacattggtaataaaacatatctcactgccactataactggagatagaactcctgccattggtgacgggaatgtccctacagtactagggactagtcacaacctcattacagcaggctgtcccgactcggaccgatg

SEQ ID NO: 5302 - DNA, 203 bp, synthetic construct
  source 1..203: mol_type = other DNA
ggcgcgccagtcctacgccgaagacaactgatcgacaacccattttggaccagttttcatggattcctcccttatgttatgcccctattaggccctttgctttgcttattgcttgtgttatctttcggtccaattattttcaacaagcttatgacctttattaaacatcaaattgagagcatccaggccgactcggaccgatg

SEQ ID NO: 5303 - DNA, 203 bp, synthetic construct
  source 1..203: mol_type = other DNA
ggcgcgccagtcctccaatgacgggtaatagtgacaagaaatgtatcactccaacctaagacaggcgcagcctccgagggatgtgtcttttgttttttataattaaaaagggtgacatgtccggagccgtgctgcccggatgatgtcttggcctctgtttgctctagctccatgttatgaatttaagacgactcggaccgatg

SEQ ID NO: 5304 - DNA, 203 bp, synthetic construct
  source 1..203: mol_type = other DNA
ggcgcgccagtcctatgagacttgatcagaacactgtcttgtctccatttcttgtgtctcttgttcccttcaattcccactccctcctccaggttcctactgttgatcccgcgggtcgggacagttggcgcccaacgtggggcacgaacccacgaccctgggattaagagtcccatgctctaccgactcgactcggaccgatg

SEQ ID NO: 5305 - DNA, 203 bp, synthetic construct
  source 1..203: mol_type = other DNA
ggcgcgccagtccttccatgttatgaatttaagatggcgtatttcctggttcttctccgtcttactttcccgccggcgcgaatgtttcccgctcttgggcttacgtggctttccttgctctgctactgagcatgcgcccagtatctttcccctcccacttgctgcctgtgtatataaggcaacacattcgactcggaccgatg

SEQ ID NO: 5306 - DNA, 203 bp, synthetic construct
  source 1..203: mol_type = other DNA
ggcgcgccagtcctactgacgtgattaccattccaacagctgctgggaaaaacctgtgcatcgtaagggctatggacgtaggatacctttgtgaggatactatcacttatgaatgtccggtcctagctgctggaaatgaccctgaagacattgactgctggtgcacgaaatcatctgtttacgtgcgccgactcggaccgatg

SEQ ID NO: 5307 - DNA, 203 bp, synthetic construct
  source 1..203: mol_type = other DNA
ggcgcgccagtcctggcgatagttgtgtgaccataatgtcaaaagacaagccaaccattgatgtcaaaatgatgaacatggaagcagccaacctcgcagatgtgcgcagttactgttacctagcttcggtcagtgacttgtcaacaagagctgcgtgtccaaccatgggtgaagcccacaacgagaaacgactcggaccgatg

SEQ ID NO: 5308 - DNA, 203 bp, synthetic construct
  source 1..203: mol_type = other DNA
ggcgcgccagtcctggaacggtggtgttggaactgcaatataccggaacagacggtccctgcaaagtgcccatttcttccgtagcttccctgaatgacctcacacctgttggaagactggtgaccgtgaatccatttgtgtctgtggccacagccaactcgaaggttttgattgaactcgaacccccgcgactcggaccgatg

SEQ ID NO: 5309 - DNA, 203 bp, synthetic construct
  source 1..203: mol_type = other DNA
ggcgcgccagtccttttggtgactcttacatcgtggtgggaagaggagaacagcagataaaccatcactggcacaaatctgggagcagcattggaaaggcctttaccaccacactcagaggagctcaacgactcgcagctcttggagatactgcttgggattttggatcagttggaggggttttcacccgactcggaccgatg

SEQ ID NO: 5310 - DNA, 203 bp, synthetic construct
  source 1..203: mol_type = other DNA
ggcgcgccagtccttcagtggggaaagccatacaccaagtctttggaggagcttttagatcactctttggagggatgtcctggatcacacagggacttctgggagctcttctgttgtggatgggaatcaatgcccgtgacaggtcaattgctatgacgtttcttgcggttggaggagttttgctcttccgactcggaccgatg

SEQ ID NO: 5311 - DNA, 203 bp, synthetic construct
  source 1..203: mol_type = other DNA
ggcgcgccagtcctttcctgaggattcgggaaacgaacacaacggaatgcgactcgaagatcataggaaccgccgtcaagaacaacatggctgtgcatagtgatctatcatactggatagagagcggactcaacgacacctggaagcttgagagggcggttctaggagaagtcaaatcatgcacctggcgactcggaccgatg

SEQ ID NO: 5312 - DNA, 203 bp, synthetic construct
  source 1..203: mol_type = other DNA
ggcgcgccagtcctccagaaacccacactctgtggggtgatggagttctggaaagtgatctcatcatacccatcaccttggcaggacccagaagcaaccacaacaggagaccagggtacaaaactcagaaccaaggcccatgggatgaggggcgcgtcgagattgactttgactattgcccaggaacacgactcggaccgatg

SEQ ID NO: 5313 - DNA, 203 bp, synthetic construct
  source 1..203: mol_type = other DNA
ggcgcgccagtcctgaaaagaccctcgtgcaatcgagagtgaatgcatacaacgccgacatgattgatccttttcagttgggccttatggtcgtgttcttggccacccaggaggtccttcgcaagaggtggacggccaagatcagcattccagctatcatgcttgcactcctagtcctagtgtttgggcgactcggaccgatg

SEQ ID NO: 5314 - DNA, 203 bp, synthetic construct
  source 1..203: mol_type = other DNA
ggcgcgccagtcctggtattacgtacactgatgtcctgcgatatgtcattctcgtcggcgccgcgtttgctgaagcaaactcaggaggagacgtcgtgcacttggcacttatggctacattcaagattcaaccagtctttctggtggcttcctttttgaaggcaaggtggaccaaccaagagagtattcgactcggaccgatg

SEQ ID NO: 5315 - DNA, 203 bp, synthetic construct
  source 1..203: mol_type = other DNA
ggcgcgccagtcctcctggattgaaatgcttaaaccttgatgtgtacagaattttgctactcatggttggagttggaagcctcatcaaagaaaaaaggagctctgcagcaaaaaagaaaggagcttgcctcatctgcctagcgctggcgtctacaggagtgttcaatccaatgatacttgcagctgggcgactcggaccgatg

SEQ ID NO: 5316 - DNA, 203 bp, synthetic construct
  source 1..203: mol_type = other DNA
ggcgcgccagtccttcaacagacatgtggattgagaggacggctgacattacttgggagagtgatgctgaaatcacaggctctagcgaaagagtagatgtgaggctggatgatgatggaaattttcaactgatgaatgaccccggggcaccatggaaaatttggatgcttaggatggcctgcctggcgcgactcggaccgatg

SEQ ID NO: 5317 - DNA, 203 bp, synthetic construct
  source 1..203: mol_type = other DNA
ggcgcgccagtccttatgggaacggcgtcatcatgcctaatggttcatacataagcgccattgtgcaaggagagagaatggaagaaccggcaccagctggcttcgaacctgaaatgttgaggaagaaacagatcactgtccttgatctgcaccccggagcaggaaagacacgcaagatacttccccaacgactcggaccgatg

SEQ ID NO: 5318 - DNA, 203 bp, synthetic construct
  source 1..203: mol_type = other DNA
ggcgcgccagtcctatcatcaaggaggccatcaacaaaagattgaggacggctgtgctggcacccaccagggtcgttgctgctgagatgtctgaggccctgagaggacttcccattcggtaccaaacctcagcagtgcacagagagcacagtggaaatgagatcgttgatgtcatgtgccatgccacccgactcggaccgatg

SEQ ID NO: 5319 - DNA, 203 bp, synthetic construct
  source 1..203: mol_type = other DNA
ggcgcgccagtcctgacccctttccagagtctaatgctcctatctcggacatgcaaacagagatcccagacagagcctggaacactggatatgaatggataactgagtatgttggaaagaccgtttggtttgttccaagtgtgaaaatgggaaatgagattgccctctgtctgcaacgggcggggaagcgactcggaccgatg

SEQ ID NO: 5320 - DNA, 203 bp, synthetic construct
  source 1..203: mol_type = other DNA
ggcgcgccagtcctggaagagtcatcctgggggaaccctcagccatcacggctgccagcgctgctcagcggagaggacgcataggaagaaacccatcacaagttggtgatgagtattgctatggagggcacacaaatgaggatgattccaactttgctcactggacagaggctcgcatcatgctagaccgactcggaccgatg

SEQ ID NO: 5321 - DNA, 203 bp, synthetic construct
  source 1..203: mol_type = other DNA
ggcgcgccagtcctaggccagaagctagagagacgaccctgggagttgagagcttcttacttgatctgcggccggccacggcatggtcgctctatgccgtaacgacagccgttctcacccctttgctgaagcatctaatcacgtcagactacatcaacacttcgttgacctcaataaacgtccaagcccgactcggaccgatg

SEQ ID NO: 5322 - DNA, 203 bp, synthetic construct
  source 1..203: mol_type = other DNA
ggcgcgccagtcctagaaccgtcagagaggccggaattctgactacagcagcagcagtcaccctatgggagaatggtgctagttcagtgtggaatgcaacgacagctattggcctttgtcacatcatgcgaggaggatggctctcgtgtctctccatcatgtggactctcatcaaaaacatggagaaacgactcggaccgatg

SEQ ID NO: 5323 - DNA, 203 bp, synthetic construct
  source 1..203: mol_type = other DNA
ggcgcgccagtcctccagtctcacggggaaccgcgaaattacggtggttagtggaaaggcgtttcctcgagccagtgggaaaggttgtggatctcgggtgtggtagaggcggctggtgctattacatggctacccagaagagggtacaggaagtgaaagggtacacgaaaggaggacctggccatgaacgactcggaccgatg

SEQ ID NO: 5324 - DNA, 203 bp, synthetic construct
  source 1..203: mol_type = other DNA
ggcgcgccagtcctgaaccacaactggtgcagagctatggttggaatattgttaccatgaagagtggagtcgacgtcttctacagaccatcagaagcgagcgacacactgctctgtgacattggagagtcatcgtcaagtgccgaggtagaagaacaccgcaccgtccgtgtcctggagatggtggaacgactcggaccgatg

SEQ ID NO: 5325 - DNA, 203 bp, synthetic construct
  source 1..203: mol_type = other DNA
ggcgcgccagtcctgattggttgcacagaggaccgaaggaattctgcatcaaagtgctatgcccttacatgcccaaagtgattgagaagatggaaacactccaaaggcgatatggaggtggccttataagaaaccccctttcacgcaactctacccatgagatgtactgggtgagccacgcttcaggccgactcggaccgatg

SEQ ID NO: 5326 - DNA, 203 bp, synthetic construct
  source 1..203: mol_type = other DNA
ggcgcgccagtcctgccatgacagacaccactcctttcggtcaacaacgagtgttcaaggaaaaggtggacacaaaggctccagagcctccagaaggagtcaaatacgtcctcaatgagaccacgaactggctgtgggcttttttagcccgcgataagaaacccaggatgtgttcccgggaggaatttcgactcggaccgatg

SEQ ID NO: 5327 - DNA, 203 bp, synthetic construct
  source 1..203: mol_type = other DNA
ggcgcgccagtcctattggaaaagtcaacagtaatgccgccctaggagcgatgtttgaagaacagaaccaatggaagaacgcccgggaagctgtagaggatccaaagttttgggagatggtggatgaggagcgtgaagcgcatctccgtggagaatgcaacacctgcatctacaacatgatgggaaagcgactcggaccgatg

SEQ ID NO: 5328 - DNA, 203 bp, synthetic construct
  source 1..203: mol_type = other DNA
ggcgcgccagtcctcgacacaaagtcgtgaaagtgatgaggccagcggccgacgggaaaactgtgatggacgtcatctctagagaggatcagagaggaagcggtcaggtagtgacttacgccctgaacaccttcaccaatctagcagttcagctggtcagaatgatggagggggagggggtcattggacgactcggaccgatg

SEQ ID NO: 5329 - DNA, 203 bp, synthetic construct
  source 1..203: mol_type = other DNA
ggcgcgccagtcctcccgatgatgttgaaaaactgggaaaaggaaaaggccctaaggtcagaacctggctgtttgagaatggcgaggagcgtctcagtcgcatggccgtcagcggtgatgactgcgtggtgaaacctttggacgaccgcttcgccacatcactacacttcctaaatgctatgtcaaagcgactcggaccgatg

SEQ ID NO: 5330 - DNA, 203 bp, synthetic construct
  source 1..203: mol_type = other DNA
ggcgcgccagtcctgtccgcaaagacatccaggaatggaaaccctcgacggggtggtatgactggcagcaggttccattctgttcaaaccatttcacggaactgatcatgaaggacggcaggacgctggtggtcccgtgtcgtggacaagacgagttgattggacgtgccaggatctctccaggggctcgactcggaccgatg

SEQ ID NO: 5331 - DNA, 203 bp, synthetic construct
  source 1..203: mol_type = other DNA
ggcgcgccagtcctggatggaatgtgcgcgacaccgcctgcctggcgaagtcatacgcgcagatgtggctgctgctttatttccaccgtagagacctgagattgatggccaatgccatctgttccgctgtgcctgccaactgggttcccacagggcgtaccacttggtcgatccacgcaaaaggagaacgactcggaccgatg

SEQ ID NO: 5332 - DNA, 203 bp, synthetic construct
  source 1..203: mol_type = other DNA
ggcgcgccagtccttcgtccaagccctcattcacatggcattggtgcttcatgccttgtttgcctccatcgaccggcgaattcgctcattatcccgacgtgttaccgctcttgaatctcgccgaaccacaggaaatcccatgacgctagctttcatcttgggctttctcacagtgttatgtggatgcgcgactcggaccgatg

SEQ ID NO: 5333 - DNA, 203 bp, synthetic construct
  source 1..203: mol_type = other DNA
ggcgcgccagtcctcagattgcggatcaacgtggactgagttcacattgcggtatcggagatgcgtcgtgaagaaacgtgaaaagcgatcacgtgaacccccgaaagcggatttgctagctgaaatggagatcattgcgttcaagaccattcgcgaaaataagacaatcttcatcgtggccctattgtcgactcggaccgatg

SEQ ID NO: 5334 - DNA, 203 bp, synthetic construct
  source 1..203: mol_type = other DNA
ggcgcgccagtcctacggtctcctcgagtttaaaacaggaccggcggagatctacggggggcaatggctgcgcgagttactcgcagattgccacgtcaacgcatcctattcgactgacgtgtgtcccggtggatcgcagctcaacatggcagatatcatggccaaggaacgagtatgctcgacccaaccgactcggaccgatg

SEQ ID NO: 5335 - DNA, 203 bp, synthetic construct
  source 1..203: mol_type = other DNA
ggcgcgccagtcctgtcggcacggcatggagaaagttgttgtgtggggagatgctaggtccaatgagattctagtaaaaaacgtaattgaaccttcgttgtcctgggaagacgcgatcgccactcatggtggattccgtgacatctcctttgtttgtcagattatgctcgacaaactagtcagtggagcgactcggaccgatg

SEQ ID NO: 5336 - DNA, 203 bp, synthetic construct
  source 1..203: mol_type = other DNA
ggcgcgccagtcctaggatctggtcggaaagttttcggttggtgccttcttctccaacacagcccttctggtcattctcgtcctcgctgccttgattgacaaacgcatagcctttctattggttttaggggggtacttttactatgtgcgggctgatctggggtgtggaattgacaccacgagaaaaacgactcggaccgatg

SEQ ID NO: 5337 - DNA, 203 bp, synthetic construct
  source 1..203: mol_type = other DNA
ggcgcgccagtccttgcgcagagctgctttctctgctgttgggtcgatgggttctgaacgggtgtatgtaaatgacacattggcgcgtacattcaagttctccgaaacagcaaagagaaccatttccgtcaccattaacttaattcagtacaagttctcatcttatgttgcacatggacgcgctgaggcgactcggaccgatg

SEQ ID NO: 5338 - DNA, 203 bp, synthetic construct
  source 1..203: mol_type = other DNA
ggcgcgccagtcctcaaaggtcaaagtggactctcgatgccatgggcgaatgcacgcccaggtaattggaccgaatgacacggaatcttggtgttgccagtcatgcacaagaatagtccactttcgagtcggtgacctcctatattaccccatggagatccaacttggaaccatgtctgaagcgtcagcgactcggaccgatg

SEQ ID NO: 5339 - DNA, 203 bp, synthetic construct
  source 1..203: mol_type = other DNA
ggcgcgccagtcctcattgcagcttatcggggcaaaaactagaacatcgacactaactcgcctatttctgacgattctcgcaatggcgctctttggactccccaacttgttttcatctgtggggctatctgcgtgggtgttgctggtggcgtcctcatcggcgcaaccgcaagacctatcaatgaatccgactcggaccgatg

SEQ ID NO: 5340 - DNA, 203 bp, synthetic construct
  source 1..203: mol_type = other DNA
ggcgcgccagtcctagcttgagttcatctcagctggagagactcccgaaggagtgtcaaccgaaaatgatgacgggataaatattcctgacttaaaagggcgctatggagaggatgggatcgtcgtgggggcggcctcatcgtctggttacctacctgagctcgtgtttgtgttcctcctaggctttgcgactcggaccgatg

SEQ ID NO: 5341 - DNA, 203 bp, synthetic construct
  source 1..203: mol_type = other DNA
ggcgcgccagtcctccgtgacgtccacttcatactttttgggggcactctacctgctcatcgcaaccagcactaacctccccgtggtcataatacggatgctgcgtatgaagctcactgctagcaaccgatctgatgatctcttgggactcggcggacctgttgaaactgacctccagaccagctttccgactcggaccgatg

SEQ ID NO: 5342 - DNA, 203 bp, synthetic construct
  source 1..203: mol_type = other DNA
ggcgcgccagtcctgcgacgtggtgtcgtatggtggaccttggcagttggacacccccaccaccacggaagacctcgtgctgatggcttgcaaaccggataagaccattgagtaccataggtacaggccgggagtcatgagtattgacggtgagcctgtcatgttcattagtgatgatttcggaaaagcgactcggaccgatg

SEQ ID NO: 5343 - DNA, 203 bp, synthetic construct
  source 1..203: mol_type = other DNA
ggcgcgccagtcctgatcttctggctcaccgttcttcatcaatggcgagcccgtcgggttctatggttttgggttctatgtgaacggtatttaccgctcaacagtagcaggtggcaaaccaaccgatgtcacggagagcttgaactgtgattcgaccaggcggtttgtgacatggcatccaggaaaagcgactcggaccgatg

SEQ ID NO: 5344 - DNA, 203 bp, synthetic construct
  source 1..203: mol_type = other DNA
ggcgcgccagtccttcggcatgacttttatgctagaggaagctgcatacagccagcctccggggagattcaccctagtgggagaggatagaatgcgatttttaaagcttatggaccgggatgacattcccatttggctggcgtggcactgggcagaagctggagaccgacggcactcagccctgtttccgactcggaccgatg

SEQ ID NO: 5345 - DNA, 203 bp, synthetic construct
  source 1..203: mol_type = other DNA
ggcgcgccagtcctagggcgcaggaaccggaaagatcatcgaaaaccgatttggcaaacaagagtatcgaccacaatacgttgatgaccgctttgagagcattgagtgggagacgcgaaaggtgtccattgatttctacatgaactgccgcggggggcctaccctctatgagttttttacagtggttgcgactcggaccgatg

SEQ ID NO: 5346 - DNA, 203 bp, synthetic construct
  source 1..203: mol_type = other DNA
ggcgcgccagtcctccgggccatctttcccaagttgggaaatagcgcaaggaaagggagctacaatgttggactctctgcaggtattcttcttcataacagtgttgtcaacaaaattcctgtattggttccaggagaactggactgcacgaatgtacgctatgaaacatccggagatggttagctcgacgactcggaccgatg

SEQ ID NO: 5347 - DNA, 203 bp, synthetic construct
  source 1..203: mol_type = other DNA
ggcgcgccagtcctttggtggatttagatttgatgaaattcccttcagggctgtccttccctctggttttgccattgtcgcgattgctagcctcccaagcgtggtggtggggcttctggcagctggtgtgttcatggccatcatgtactgtcagaacaagtggaatgccaccccaaagatcttgacagcgactcggaccgatg

SEQ ID NO: 5348 - DNA, 203 bp, synthetic construct
  source 1..203: mol_type = other DNA
ggcgcgccagtcctcattggacgctcgcgaccagaggcatgatcgtcccactgaaatcactagtagagtgccactcgaaaacactcgatccatcatgtatgccttttgcctgatcttcagcctgttttgggctttctgcacacggtctcctggagattttctccgagggtcattggtggtcggggctacgactcggaccgatg

SEQ ID NO: 5349 - DNA, 203 bp, synthetic construct
  source 1..203: mol_type = other DNA
ggcgcgccagtccttggacgtcgttggccgtcgagaccaacgtgggtcagggcaagtagtcacatatgcgttgaacaccataacaaatggtaaggtccaggtggcgagagttttagaaagtgaaggactactgcaagcggatgaatcggtgttggatgcgtggttggaaaaacaccttgaagaagctccgactcggaccgatg

SEQ ID NO: 5350 - DNA, 203 bp, synthetic construct
  source 1..203: mol_type = other DNA
ggcgcgccagtcctatttgcgcctaggtttcattgctatctcatcggctgtgccaaccaattggttcccactaggacgcacctcgtggtcagtccaccagtatcacgaatggatgaccactgatgatatgcttcgggtttggaatgacgtgtgggtgcacaacaacccgtggatgctaaacaaggagtcgactcggaccgatg

SEQ ID NO: 5351 - DNA, 203 bp, synthetic construct
  source 1..203: mol_type = other DNA
ggcgcgccagtcctagctctcagtcatgagtcgatatcgaagaggaaatgatgtcatttagacgtgatcgaatagagccgtgaggaaccagcatcctcccggccacaggagcagggcatgaaaatgtcgggcatgacgaacccgctcccccgagtcccctggcaacagggtgtgttcccttatggagccgactcggaccgatg

SEQ ID NO: 5352 - DNA, 203 bp, synthetic construct
  source 1..203: mol_type = other DNA
ggcgcgccagtccttagccagctgatggtcttaagcatcccccccatggaatgggtaagagaagcctgtaaacaaaactggatggcaccagtgctcttataaaatggcagccaaagcgatccagagctttcaaaactggacggggcaacagggagaaatcccggggtagcgaacctcctccgtaaatgcgactcggaccgatg

SEQ ID NO: 5353 - DNA, 203 bp, synthetic construct
  source 1..203: mol_type = other DNA
ggcgcgccagtcctattatttgacacaaatcatcaggttagtatctgtaatcagataatagatgcaataaactcagggattgatcttggagatctcctagaagggggtttgctgacgttgtgtgttgagcattactataattctgataaggataaattcaacacaagtcctatcgcgaagtacttacgcgactcggaccgatg

SEQ ID NO: 5354 - DNA, 203 bp, synthetic construct
  source 1..203: mol_type = other DNA
ggcgcgccagtccttcaaggagtaaatttggtgacaggtcatgatgcctatgacagtatcattagtaattcagtaggtcaaactagattctcaggacttcttatcgtgaaaacagttctcgagttcatcttgcaaaaaactgattcaggggtgacactacatcctttggtgcggacctccaaagtaaacgactcggaccgatg

SEQ ID NO: 5355 - DNA, 203 bp, synthetic construct
  source 1..203: mol_type = other DNA
ggcgcgccagtcctaaatgaagttgctagtttcaagcaggcgttgagcaacctagcccgacatggggaatacgcaccatttgcacgggttctgaatttatcagggattaacaacctcgaacatggactctatcctcagctttcagcaattgcgctgggtgtggcaacagcacacggcagtacattggccgactcggaccgatg

SEQ ID NO: 5356 - DNA, 203 bp, synthetic construct
  source 1..203: mol_type = other DNA
ggcgcgccagtccttggtgtcaatgttggcgaacaatatcaacaactacgagaggcggcacatgatgcggaagtaaaactacaaaggcgacatgaacatcaggaaattcaagctattgccgaggatgacgaggaaaggaagatattagaacaattccaccttcagaaaactgaaatcacacacagtcacgactcggaccgatg

SEQ ID NO: 5357 - DNA, 203 bp, synthetic construct
  source 1..203: mol_type = other DNA
ggcgcgccagtcctgacactagccgtcctcagccagaaacgagaaaaattagctcgtctcgctgcagaaattgaaaacaatattgtggaagatcagggatttaagcaatcacagaatcgggtgtcacagtcgtttttgaatgaccctacacctgtggaagtaacggttcaagccaggcccatgaatcgcgactcggaccgatg

SEQ ID NO: 5358 - DNA, 203 bp, synthetic construct
  source 1..203: mol_type = other DNA
ggcgcgccagtccttgctcctcaggaagacacaaggatgagggaagcctatgaattgtcgcctgatttcacaaatgatgaggataatcagcagaattggccacaaagagtggtgacaaagaagggtagaactttcctttatcctaatgatcttctgcaaacaaatcctccagagtcacttataacagccgactcggaccgatg

SEQ ID NO: 5359 - DNA, 203 bp, synthetic construct
  source 1..203: mol_type = other DNA
ggcgcgccagtccttttatttgaatatttgaaccaccttttagtatcctattacttgttactattgtgtgagacaacataagccatcaaataacaatcacgggcaaggactgggcatactatggtggtcttagagcattgtccagtgctacaaattcttttttcaattgctataattatacaactacacgactcggaccgatg

SEQ ID NO: 5360 - DNA, 203 bp, synthetic construct
  source 1..203: mol_type = other DNA
ggcgcgccagtcctcaaggggatgtcagaaatgttagccaaatacgaccaccttgtaatttcaactggaagaaccactgcaccagctgctgcctttgatgcctacttaaatgagcatggtgtccctccccctcaacccgcgattttcaaagatcttggggttgcccaacaagcttgtagtaaggggaccgactcggaccgatg

SEQ ID NO: 5361 - DNA, 203 bp, synthetic construct
  source 1..203: mol_type = other DNA
ggcgcgccagtcctgggtgatttaaacctagatgatcagttcaaagggaatgtctgccatgctttcactttagaggcaataattgacatatctgcatataacgagcgaacagtcaaaggcgttccggcatggctgcctcttgggattatgagcaattttgaatatcctttagctcatactgtggccgccgactcggaccgatg

SEQ ID NO: 5362 - DNA, 203 bp, synthetic construct
  source 1..203: mol_type = other DNA
ggcgcgccagtcctcacctacaatctcactaatttagtattgagtgtgcaaaaacttcctgatgatgcctggcgcccatccaaggacaaattaattgggaacactatgcatcccgcagtctccatccacccgaatctgccgcctattgttctaccaacagtcaagaagcaggcttatcgtcagcacaacgactcggaccgatg

SEQ ID NO: 5363 - DNA, 203 bp, synthetic construct
  source 1..203: mol_type = other DNA
ggcgcgccagtcctagcacctgagaacttccctttgaatggcttcaataacagacaagttgtgctagcgtatgcgaatccaacgctcagtgccgtttgaaatgatgctcaaatgagacaggagtccatctgtataagaagtatggcttaaatggatatttgtcaaattcttacaagattagtttgtatcgactcggaccgatg

SEQ ID NO: 5364 - DNA, 203 bp, synthetic construct
  source 1..203: mol_type = other DNA
ggcgcgccagtccttaacatatgtcattgtgccctccattgctaagtcaactcaactgacgataatactccttctgaaatagtaagaaaaactaatgaagaacattaattgctgggtaaaagtgattaatttctttaaatttgaccagaataatattttgtcagtgaatatattctcatatcacttgacgactcggaccgatg

SEQ ID NO: 5365 - DNA, 203 bp, synthetic construct
  source 1..203: mol_type = other DNA
ggcgcgccagtcctttaaaaacagaaaattaccctaacatgaagaccacatgtttccttatcagtcttatcttaattcaagggacaaaaaatctccccattttagagatagctagtaataatcaaccccaaaatgtggattcggtatgctccggaactctccagaagacagaagacgtccatctgatgcgactcggaccgatg

SEQ ID NO: 5366 - DNA, 203 bp, synthetic construct
  source 1..203: mol_type = other DNA
ggcgcgccagtcctcctcctaccaacatccgtgactatcctaaatgcaaaactatccatcatattcaaggtcaaaaccctcatgcacaggggatcgcccttcatttatggggagcattttttctgtatgatcgcattgcctccacaacaatgtaccgaggcaaagtcttcactgaagggaacatagcacgactcggaccgatg

SEQ ID NO: 5367 - DNA, 203 bp, synthetic construct
  source 1..203: mol_type = other DNA
ggcgcgccagtcctaaaaaaggccccgccacaacggcaccaaacacgacaaatgagcatttcaccagtcctccccccacccccagctcgactgcacaacatcttgtatatttcagaagaaagcgaagtatcctctggagggaaggcgacatgttcccttttctggatgggttaataaatgctccaattcgactcggaccgatg

SEQ ID NO: 5368 - DNA, 203 bp, synthetic construct
  source 1..203: mol_type = other DNA
ggcgcgccagtcctttattgagagtcacaactgaggaaagaacattctccttaatcaatagacatgctattgactttctactcacaagatggggaggaacatgcaaagtgcttggacctgattgttgcatcgggatagaagacttgtccaaaaatatttcagagcaaattgaccaaattaaaaaggaccgactcggaccgatg

SEQ ID NO: 5369 - DNA, 203 bp, synthetic construct
  source 1..203: mol_type = other DNA
ggcgcgccagtccttaggactttaggacaattgctactgagccctttttctaatctactgaaatcaacttgggagatttttaagaagctgataacttaatgtgaatcaatagtttatgtattatcgattattatggtttgatattcaattgttattattgtcaggagtgaccttttctatttgatgcacgactcggaccgatg

SEQ ID NO: 5370 - DNA, 203 bp, synthetic construct
  source 1..203: mol_type = other DNA
ggcgcgccagtcctacgtgctgttcaaagagtcttaatttataaccaactattgcaagaattaatttactttttccgttatacttagttacattaatcttttgactgttcagcattattaacgacttgtcttaattcaatcgttcggatgaaattcataaggaaaaatgagcctccttccccctattccgactcggaccgatg

SEQ ID NO: 5371 - DNA, 203 bp, synthetic construct
  source 1..203: mol_type = other DNA
ggcgcgccagtcctcaacctcgcggaagaagtcgaacccgcaaccaccaagtcacaccgactatatatcatgaaactcaattgccctccaaacctcattataccaattatcatccacgtgcaagatcgatgagctcaacccgtagtagtgcagaaagtagtcccaccaatcatattccccgtgctcgacgactcggaccgatg

SEQ ID NO: 5372 - DNA, 203 bp, synthetic construct
  source 1..203: mol_type = other DNA
ggcgcgccagtccttaggaacagatttggagctgtttggaatagcagattttgttatttttaaggttccagtaaaaacaataatccgaaatgctgtaagcttacaagcttcaaaaccgggattaagaatatggtaccgtgaccaaaacttgaccccttatctatgcgacgatgagtttattgtaagcgcgactcggaccgatg

SEQ ID NO: 5373 - DNA, 203 bp, synthetic construct
  source 1..203: mol_type = other DNA
ggcgcgccagtcctaggacggtttcaaattgattaaacacttagaacccttgtgtgtcagctgtatacaaacacatggcatctttacaccaagaaaatactggttccaatcacagatgattaagtcatattatgatgaactccatgatctcaatttgaaacttcaaatttcagacaataaggctgagtcgactcggaccgatg

SEQ ID NO: 5374 - DNA, 203 bp, synthetic construct
  source 1..203: mol_type = other DNA
ggcgcgccagtcctccctgctagcagatggactggcaaaagcattccctagtaacatgatggttgtcactgagagggaacagaaagaagcattattacatcaggcttcttggcaccacaattcagcaagcataggggagaacgctatagtgaggggtgcaagttttgttactgatcttgagaaatacacgactcggaccgatg

SEQ ID NO: 5375 - DNA, 203 bp, synthetic construct
  source 1..203: mol_type = other DNA
ggcgcgccagtcctcaattgatgctcccaacgattatcaagagaacgaggctgaattgaatgcggcacgagttgctgtcgaattagctattactacaggttatagtggtatatttttaaagcctgaggaaacatttgtccattcagggttcatttattttggtaaaaagcaatatctcaacggtgttccgactcggaccgatg

SEQ ID NO: 5376 - DNA, 203 bp, synthetic construct
  source 1..203: mol_type = other DNA
ggcgcgccagtcctactcaaaatcaactataaacttgttgccgtatgactgtaaggaactgcgacttgaaggaagcaatgacacagagttaaattatgtcagttgtgctcttgaccggaaagttgtccagaaacatccctctgttaatcgtctagcttggacgataggaaatcgagcaccgtatattgcgactcggaccgatg

SEQ ID NO: 5377 - DNA, 203 bp, synthetic construct
  source 1..203: mol_type = other DNA
ggcgcgccagtcctagacggtgcttaactttttacctacacactactcaggcaacatagttcatagatataatgatcaatatggacaacattcctttatggcaaacaggatgagtaatacatctacacgtgcaattatatcaactaacacactgggtaaatatgctgggggaggtcaagctgctattgcgactcggaccgatg

SEQ ID NO: 5378 - DNA, 203 bp, synthetic construct
  source 1..203: mol_type = other DNA
ggcgcgccagtcctttaagaacctctcagatttgacattccttatatcatccacaatcaggaatttatcacatagatcacttcggattcttcaatctactttccgacatgaattggtgctcacccgactagcccaccacataccgttaatttctttaatgttagggggctctgcaggagagaagagttcgactcggaccgatg

SEQ ID NO: 5379 - DNA, 203 bp, synthetic construct
  source 1..203: mol_type = other DNA
ggcgcgccagtccttccttataaaatcactagatgcacatgaggactttgatgcctcgaagataatcttaaattctgaaataaataatcttaaccttacggagtatactcttaatacaaagttattgacaactcctaccaggacagaaattttagatacaagtccgttacaatcctctagatattcatcgactcggaccgatg

SEQ ID NO: 5380 - DNA, 203 bp, synthetic construct
  source 1..203: mol_type = other DNA
ggcgcgccagtccttgaagaatgctattcagtattatgggcaagttcaactcaagaaaccatatagctcaaatgcaaaaaactcagaatggtacttgtgttgcggtaaacgaagaattcaacggctccaaattgatttctcagaccaggtgggaatttttctgatttgtaaagcaatgtcacgccaaacgactcggaccgatg

SEQ ID NO: 5381 - DNA, 203 bp, synthetic construct
  source 1..203: mol_type = other DNA
ggcgcgccagtcctgcgggtcgccaagatatgtctcaggaccctaagaaatttacagaccctgtgatggatgtcatacacgagatggctcctcccttgaaatcacccagtgctgaagcttgtggttatagtgatcgagttgcccaactcacaattggaaactccacaatcactacacaagaagctgcacgactcggaccgatg

SEQ ID NO: 5382 - DNA, 203 bp, synthetic construct
  source 1..203: mol_type = other DNA
ggcgcgccagtcctgattcggccctaaaccattgcaactttggcttaattgtagtgcccgtagtaccactcgactttaacgctggagctacatcagaaataccaataactgtcaccatcgcacccatgtgcgctgaatttgcaggtttgcgacaggcaatcaaacaggggatacctaccgagttgaagcgactcggaccgatg

SEQ ID NO: 5383 - DNA, 203 bp, synthetic construct
  source 1..203: mol_type = other DNA
ggcgcgccagtcctatgcaacgactatgcttccctgtctcggtgcagagtaagacgggggaattgtgtgctgtttttagggccgaccctggtaggaatggaccgtggcagtcgactattttaggacagttgtgtaggtactatactcaatggtctggatctctggaagtcactttcatgtttgctggacgactcggaccgatg

SEQ ID NO: 5384 - DNA, 203 bp, synthetic construct
  source 1..203: mol_type = other DNA
ggcgcgccagtcctaacatccagggtgatggaattgcagacatgattgaccaggctgtcacttcccgagttggtcgtgcgctgacatccttacaggtagaacctaccgccgccaacaccaatgctagtgagcacagattgggcaccgggctcgtccccgccttgcaggctgcagagaccggcgcctctcgactcggaccgatg

SEQ ID NO: 5385 - DNA, 203 bp, synthetic construct
  source 1..203: mol_type = other DNA
ggcgcgccagtcctatgggttatgctcaaatgaggcgtaagtgtgagctattcacatacatgcgctttgatgcagagtttacatttgtagctgccaaaccaaacggtgagctagtaccacaattgttgcagtacatgtatgtgcctcccggagctccaaaacctacgtcccgggattcctttgcctggcgactcggaccgatg

SEQ ID NO: 5386 - DNA, 203 bp, synthetic construct
  source 1..203: mol_type = other DNA
ggcgcgccagtcctgtcgagcggcaccttaatagggcggtgttgatcatgcagtccattgccactgtggtagcagttgtttcactggtgtatgttatctacaaattgtttgcagggttccaaggtgcatactctggtgcccctaagcaaacactcaagaaacctatactccgcacagcgacagtgcaacgactcggaccgatg

SEQ ID NO: 5387 - DNA, 203 bp, synthetic construct
  source 1..203: mol_type = other DNA
ggcgcgccagtcctgctgttgagttggtggatgaacaaggggtcaacttagaactgaccctggttactcttgataccaatgagaagttcagagacatcaccaagttcatcccagaaaacattagcgctgccagtgatgccaccctagtgatcaacacagagcacatgccctccatgttcgtgccagtgcgactcggaccgatg

SEQ ID NO: 5388 - DNA, 203 bp, synthetic construct
  source 1..203: mol_type = other DNA
ggcgcgccagtcctaagaggagttattttgccagtgagcaaggagagatccagtgggtcaagcccaataaagagacaggcagactcaacatcaatgggccgactcgcactaagctcgaacccagtgtgttccatgatgtctttgaggggaacaaagaaccagcagtcttgcatagcagagacccacgccgactcggaccgatg

SEQ ID NO: 5389 - DNA, 203 bp, synthetic construct
  source 1..203: mol_type = other DNA
ggcgcgccagtcctcttgaagtggactttgagcaggctttattctccaagtatgtagggaacacactgcatgagcctgacgagtacatcaaagaggcggccctccactatgcaaatcagttgaagcaactggacatcaacacttctcaaatgagtatggaggaagcttgctatggtactgagaaccttcgactcggaccgatg

SEQ ID NO: 5390 - DNA, 203 bp, synthetic construct
  source 1..203: mol_type = other DNA
ggcgcgccagtcctctgcttccaggttcactctttgcatttgattactcaggctatgatgctagtctcagtccagtctggtttagagcactggagctggtcctcagggaggtgggctatagtgaggaggcagtctcccttatagaggggattaaccatacacaccatgtataccgcaataaaacttaccgactcggaccgatg

SEQ ID NO: 5391 - DNA, 203 bp, synthetic construct
  source 1..203: mol_type = other DNA
ggcgcgccagtcctgattgcctggaattggcaagaacaggcaaagagtatggtttgactatgactcctgcagacaaatctccttgcttcaatgaggtaaattggggcaatgcaacctttctcaaaagaggcttcttgcccgatgagcaattccctttcttgatccatcctaccatgccaatgaaggagcgactcggaccgatg

SEQ ID NO: 5392 - DNA, 203 bp, synthetic construct
  source 1..203: mol_type = other DNA
ggcgcgccagtccttgtttccccggtcaatgaggatatgctttacccaaggcaaaaaccttagagatcgttatccccacactgcctacacagagcccagtaccatttttgatataattgggttggtcgctccctgcaaacccagcagtagacctggcagatgaggctggacattccccactggcgacacgactcggaccgatg

SEQ ID NO: 5393 - DNA, 203 bp, synthetic construct
  source 1..203: mol_type = other DNA
ggcgcgccagtcctgtggtccagcctgcgtggctgcctgctcacccttcttgggtgagaagcctaattattgacaaggtgtgaagagccgcgtgtgctcagtgtgcttcctccggcccctgaatgtggctaaccttaaccctgcagccgttgcccataatccaatgggtttgcggtcgtaatgcgtaacgactcggaccgatg

SEQ ID NO: 5394 - DNA, 203 bp, synthetic construct
  source 1..203: mol_type = other DNA
ggcgcgccagtcctgtgcgggatgggaccaactactttgggtgtccgtgtttcctgtttttcttttgattgcattttatggtgacaatttatagtgtatagattgtcatcatgggtgcacaagtatctagacaaaatgttgggacacactccacacaaaattcagtgagcaatggatctagcttaaatcgactcggaccgatg

SEQ ID NO: 5395 - DNA, 203 bp, synthetic construct
  source 1..203: mol_type = other DNA
ggcgcgccagtcctttggcatctgcaacaagtggaaatgtatcagtcgggtacaatcacacccacccaggtgagcaaggtagagaagtagtaccatcacggacatctagtgataataaaagacctagtgatgacagttggttaaattttgatggaacattacttggtaacttacctatttatccccaccgactcggaccgatg

SEQ ID NO: 5396 - DNA, 203 bp, synthetic construct
  source 1..203: mol_type = other DNA
ggcgcgccagtcctcaatacattaatctaaggactaacaattcagctacccttattttaccttatgtcaatgctgtaccaatggactctatgcttagacataataattggagcttggttataatcccaatatgccctcttcaggtccaacctggggggacacaatccatacctataacagtatcaattcgactcggaccgatg

SEQ ID NO: 5397 - DNA, 203 bp, synthetic construct
  source 1..203: mol_type = other DNA
ggcgcgccagtcctcaagttaggaatttaattgaaatgtgccaagttgacacactcattcctgttaacaatacacaggaaaatgtaagatctgtgaatatgtacactgttgatttacgcacacaagttgatttagctaaagaagtcttttctataccagtagatattgcctcacaacctttagccactcgactcggaccgatg

SEQ ID NO: 5398 - DNA, 203 bp, synthetic construct
  source 1..203: mol_type = other DNA
ggcgcgccagtcctgtttctgcatgcaaagatttttgcttaagattagccagagatactaacctacacacacaagaaggagtactcacacaaaacccagttgaaaattatatagatagtgtattaaatgaagttcttgtggtgccaaatatccaacctagcacatctgtgtcaagtcatgcagcgcctcgactcggaccgatg

SEQ ID NO: 5399 - DNA, 203 bp, synthetic construct
  source 1..203: mol_type = other DNA
ggcgcgccagtcctattgccactctcacccttctaggttgttcaggctcaccatggaggtttcttaaagagaaactctgtgcgtggctccagcttagctatgtacataagcagtctgattcatggctcaagaaatttactgaagcgtgtaacgcagcacgtgggctagagtggattggacaaaagatacgactcggaccgatg

SEQ ID NO: 5400 - DNA, 203 bp, synthetic construct
  source 1..203: mol_type = other DNA
ggcgcgccagtccttccttaaaattcttaccactgtatgcatctgaagcacgtagaattaagaatttatatatcaaatgcagtaatgttattaaagggggaaagaggaatgaaccagttgcagttctaatacatggttctcctggtactggaaaatctcttgccacttctgttcttgctcgaatgctacgactcggaccgatg

SEQ ID NO: 5401 - DNA, 203 bp, synthetic construct
  source 1..203: mol_type = other DNA
ggcgcgccagtcctagctttcgaccatgtgatgttaatattaaaataggcaatgctaagtgctgtccatttatctgtggaaaagctgtagagtttaaagatagaaattcatgtacaaccttgtctttatctcaattgtatagtcatataaaggaagaagataggagaagaagcagtgcagcacaagcacgactcggaccgatg

SEQ ID NO: 5402 - DNA, 203 bp, synthetic construct
  source 1..203: mol_type = other DNA
ggcgcgccagtcctatggaggctatatttcaaggtatagacctccaatctcctccacctccagccatagctgacctccttaggtctgtgaaaacaccagagatcattaagtattgccaagataataattggattgttccagcagagtgttctattgaaagagatttagggatagcaaatatgactatacgactcggaccgatg

SEQ ID NO: 5403 - DNA, 203 bp, synthetic construct
  source 1..203: mol_type = other DNA
ggcgcgccagtcctaattgctgtgttgtgacaaccgacaaaggcaaattcacaggtcttggcatatatgaccaagtcatggtacttccaacacattctgacccaggctctgagatcttggtagatggagtaaaagttaaggtctctgattcctatgatttgcataaccatgagggtgttaagctagagcgactcggaccgatg

SEQ ID NO: 5404 - DNA, 203 bp, synthetic construct
  source 1..203: mol_type = other DNA
ggcgcgccagtcctaaagaacttcctgtatctgtaaagaacttaccatccgtacatgtttcatctaaaacccgactacaacctagtgtttttcatgatgttttccctggaacaaaagagcctgcagttcttagtagtaatgatccaagactagaaactgactttgactcagcacttttctccaaatatcgactcggaccgatg

SEQ ID NO: 5405 - DNA, 203 bp, synthetic construct
  source 1..203: mol_type = other DNA
ggcgcgccagtccttttaatacaataatcaacaatattatcattagaactttggtactagatgcttataagaacatagatctagataaactgaaaatcttagcatatggggatgatgtcatcttttcttataattttaaacttgacatggcagttcttgccaaagaaggagaaaaatatggactaacacgactcggaccgatg

SEQ ID NO: 5406 - DNA, 203 bp, synthetic construct
  source 1..203: mol_type = other DNA
ggcgcgccagtcctgaacacgtgctatctttgtgtcatttaatgtggcataatggtagacatgcataccaggaattcattaaaggtatacgcagtgtatctgccggtcgggcactgtatataccagcttatgaagttcttgaacatgaatggtatgaaaaattttagatataaaactgttaaatatagcgactcggaccgatg

SEQ ID NO: 5407 - DNA, 203 bp, synthetic construct
  source 1..203: mol_type = other DNA
ggcgcgccagtcctagacgtgattctggtcgcccggagatcaagcatggaagccgtcataaaggtgatttcgtccgcgtgtaaaacctattgcggaaaaacctctccttctaagaaggaaatcggggccatgttgtccctcttacaaaaagaagggttgcttatgtctccctcagacttatattcccccgactcggaccgatg

SEQ ID NO: 5408 - DNA, 203 bp, synthetic construct
  source 1..203: mol_type = other DNA
ggcgcgccagtcctgagctgctcccgagtggtaaagattggtgattttggacttgccagagatatctataaaaatgattactacaggaaaagaggagaaggcctactccctgtcagatggatggctcctgaaagcctcattgatggcgtctttacaaatcactctgatgtttgggcttttggagtcttcgactcggaccgatg

SEQ ID NO: 5409 - DNA, 203 bp, synthetic construct
  source 1..203: mol_type = other DNA
ggcgcgccagtcctagtgtgggaaacattaactttgggtcaacagccatatccgggtctctccaatatagaagttttacaccatgtacgatcaggaggaaggctggaatctccgaataactgtcctgatgacatacgtgatttaatgacaagatgctgggcccaagatcctcacaacagacctactttcgactcggaccgatg

SEQ ID NO: 5410 - DNA, 203 bp, synthetic construct
  source 1..203: mol_type = other DNA
ggcgcgccagtcctttctagctcacggtcatggctgtgaggacattgccggaatgtgttgtttcaatctgagtgatcacagtgagtctatacagaaaaagttccaactaatgaaggaacatgtcaataagatcggcgtggacagcgacccaatcggaagttggctgcgaggactattcggaggaatagcgactcggaccgatg

SEQ ID NO: 5411 - DNA, 203 bp, synthetic construct
  source 1..203: mol_type = other DNA
ggcgcgccagtcctcttgcgaatcgggctgtaacggggaaggcttgactaggggaccatggtatgtataggcggaaggcggggcttcggttgtacgcggttaggagtcccctcaggatatagtagttgcgcttctgcatagggagggggaaatgtagtcttatgcaatactcttatgtaacgatgaaacgactcggaccgatg

SEQ ID NO: 5412 - DNA, 203 bp, synthetic construct
  source 1..203: mol_type = other DNA
ggcgcgccagtcctcctcgacgagtgtcgaaagagaccgcaacgaagacgcgtcaacccagagtccaaatgccaaatgggcttgtgttgatgcgcatgatggggatcttgtggcatgccgtagccggcaccgcgagaaaccccgtattgaaggcgttctggaactcagtccctctgaaacaggcaacacgactcggaccgatg

SEQ ID NO: 5413 - DNA, 203 bp, synthetic construct
  source 1..203: mol_type = other DNA
ggcgcgccagtcctgcagcactgcggaagatcaaaaggacggtgagtgccctaatggttggcttgcaaaaacgtgggaaaaggaggtcagcgacggactggatgagctggttgctggtcatcactctgttggggatgacgcttgctgcaacggtgaggaaagaaagggatggctcaactgtgatcagacgactcggaccgatg

SEQ ID NO: 5414 - DNA, 203 bp, synthetic construct
  source 1..203: mol_type = other DNA
ggcgcgccagtcctcttgccttggcaatggttaccgttgtgtggttgaccctggagagtgtggtgaccagggttgccgttcttgttgtgctcctgtgtttggcaccggtttacgcttcgcgttgcacacacttggaaaacagggactttgtgactggtactcaggggactacgagggtcaccttggtgcgactcggaccgatg

SEQ ID NO: 5415 - DNA, 203 bp, synthetic construct
  source 1..203: mol_type = other DNA
ggcgcgccagtcctatccttgagcttgacaagacagtggaacaccttccaacggcttggcaggtccatagggactggttcaatgatctggctctgccatggaaacatgagggagcgcaaaactggaacaacgcagaaagactggttgaatttggggctcctcacgctgtcaagatggacgtgtacaaccgactcggaccgatg

SEQ ID NO: 5416 - DNA, 203 bp, synthetic construct
  source 1..203: mol_type = other DNA
ggcgcgccagtcctctcggagaccagactggagtgttactgaaggctctcgctggggttcctgtggcacacattgagggaaccaagtaccacctgaagagtggccacgtgacctgcgaagtgggactggaaaaactgaagatgaaaggtcttacgtacacaatgtgtgacaaaacaaagttcacatggcgactcggaccgatg

SEQ ID NO: 5417 - DNA, 203 bp, synthetic construct
  source 1..203: mol_type = other DNA
ggcgcgccagtcctagttcaattgggaaggcggtacatacggtccttggtggcgctttcaacagcatcttcgggggagtggggtttctaccaaaacttttattaggagtggcattggcttggttgggcctgaacatgagaaaccctacaatgtccatgagctttctcttggctggaggtctggtcttgcgactcggaccgatg

SEQ ID NO: 5418 - DNA, 203 bp, synthetic construct
  source 1..203: mol_type = other DNA
ggcgcgccagtccttcatggcctgctagccacactatcgataatgctgacgtggtggactcagagttattccttccggcgagcctggcaggacccagatcctggtacaacaggatacctggctattcagaacaggtgaaagggccatggaagtacacgcctatccgagttatcagagaggagtgtccccgactcggaccgatg

SEQ ID NO: 5419 - DNA, 203 bp, synthetic construct
  source 1..203: mol_type = other DNA
ggcgcgccagtcctggcacgaccgttaccatcaacgccaagtgtgacaaaagaggagcatctgtgaggagtaccacagagagtggcaaggttatcccagaatggtgctgccgagcgtgcacaatgccaccagtgacgttccggactggaactgattgctggtatgccatggaaatacggccagtccatcgactcggaccgatg

SEQ ID NO: 5420 - DNA, 203 bp, synthetic construct
  source 1..203: mol_type = other DNA
ggcgcgccagtcctgtcaccgggatggtcaggatagagagcctggtgcgctatgtggtggcagtggggatcacattccaccttgagctggggccagagatcgtggccttgatgctactccaggctgtgtttgagctgagggtgggtttgctcagcgcatttgcattgcgcagaagcctcaccgtccgacgactcggaccgatg

SEQ ID NO: 5421 - DNA, 203 bp, synthetic construct
  source 1..203: mol_type = other DNA
ggcgcgccagtcctcagcaggatgtggtgactgtgcaccatggactggtgtgcttcctaagtgtagcttcggcatgctcggtctggaggctgctcaagggacacagagagcagaagggattgacctgggttgtccccctggctgggttgcttgggggagagggctctggaatcagactgctggcgtttcgactcggaccgatg

SEQ ID NO: 5422 - DNA, 203 bp, synthetic construct
  source 1..203: mol_type = other DNA
ggcgcgccagtccttggggtcagaaccaggtgggagttggctacggttccaagggtgtcttgcacacgatgtggcacgtgacgagaggagcggcgctgtctattgatgacgctgtggccggtccctactgggctgatgtgagggaagatgtcgtgtgttacggaggagcctggagcctggaggaaaaacgactcggaccgatg

SEQ ID NO: 5423 - DNA, 203 bp, synthetic construct
  source 1..203: mol_type = other DNA
ggcgcgccagtcctagagtcctcccggagctcattcgccaatgcattgacaggcgcctgagaacgttggtgttggctccaactcgtgtggtactcaaagaaatggagcgtgctttgaatgggaaacgggtcaggttccactcaccagcagtcagtgaccaacaggctggaggggcaattgtcgatgtgcgactcggaccgatg

SEQ ID NO: 5424 - DNA, 203 bp, synthetic construct
  source 1..203: mol_type = other DNA
ggcgcgccagtcctatgtgtcacgcaacctatgtcaacagaaggctactcccacagggaagacaaaattgggaggtggcaatcatggatgaggcccactggacggacccccacagcatagctgccagaggtcatttgtatactctggcaaaagaaaacaagtgtgcactggtcttgatgacagcgacacgactcggaccgatg

SEQ ID NO: 5425 - DNA, 203 bp, synthetic construct
  source 1..203: mol_type = other DNA
ggcgcgccagtcctcctcctggtaagagtgaaccctttccggagtccaatggagccattactagtgaggaaagacagattcctgatggggagtggcgtgacgggtttgactggatcactgagtatgaagggcgcaccgcctggtttgtcccttcgattgcaaaaggtggtgctatagctcgcaccttgcgactcggaccgatg

SEQ ID NO: 5426 - DNA, 203 bp, synthetic construct
  source 1..203: mol_type = other DNA
ggcgcgccagtcctagacagaaggggaaaagtgtgatttgtttgaacagcaaaacctttgaaaaggactactccagagtgagggatgagaagcctgactttgtggtgacgactgatatctcggagatgggagctaaccttgacgtgagccgcgtcatagatgggaggacaaacatcaagcccgaggagcgactcggaccgatg

SEQ ID NO: 5427 - DNA, 203 bp, synthetic construct
  source 1..203: mol_type = other DNA
ggcgcgccagtccttttctgactatggttgagatgatggtgctgggtttggcaaccctgggtgtcatctggtgcttcgtcgtccggacttcaatcagccgcatgatgctgggcacgctggtcctgctggcctccttgctactcttgtgggcaggtggcgtcggctatgggaacatggctggagtggctcgactcggaccgatg

SEQ ID NO: 5428 - DNA, 203 bp, synthetic construct
  source 1..203: mol_type = other DNA
ggcgcgccagtcctctcatcttttacacgttgctgacggtgctgcagcctgaggcgggaaaacagagaagcagtgacgacaacaaactggcatatttcttgctgacgctctgcagccttgctggactggttgcagccaatgagatgggctttctggagaagaccaaggcagacttgtccacggcgctgcgactcggaccgatg

SEQ ID NO: 5429 - DNA, 203 bp, synthetic construct
  source 1..203: mol_type = other DNA
ggcgcgccagtccttggagtgaacgggaggaaccccggccatggagtgaatggacgaatgtggacatccagccagcgaggtcctgggggacctatgtgctggtggtgtctctgttcacaccttacatcatccaccaactgcagaccaaaatccaacaacttgtcaacagtgccgtggcatctggtgcacgactcggaccgatg

SEQ ID NO: 5430 - DNA, 203 bp, synthetic construct
  source 1..203: mol_type = other DNA
ggcgcgccagtcctcaggccatgagagaccttgggggaggtgcccccttctttggtgtggcgggacatgtcatgaccctcggggtggtgtcactgattggggctactcccacctcactgatggtgggcgttggcttggcggcactccatctggccattgtggtgtctggtctggaggctgaattaacacgactcggaccgatg

SEQ ID NO: 5431 - DNA, 203 bp, synthetic construct
  source 1..203: mol_type = other DNA
ggcgcgccagtcctaagatggtaacaagcctgggttggaacttgattaaattcagatcaggaatggacgtgttcagcatgcagccacaccgggctgacactgtcatgtgtgacatcggagagagcagcccagatgccgctgtggagggtgagaggacaaggaaagtgatactgctcatggagcaatggcgactcggaccgatg

SEQ ID NO: 5432 - DNA, 203 bp, synthetic construct
  source 1..203: mol_type = other DNA
ggcgcgccagtcctgtgaaatcaaatgcagccttgggagcttggtcagatgagcaaaacagatgggcaagtgcaagagaggctgtagaggatcctgcattctggcgcctcgtggatgaagagagagaaaggcacctcatggggagatgtgcgcactgcgtgtacaacatgatgggcaagagagaaaagcgactcggaccgatg

SEQ ID NO: 5433 - DNA, 203 bp, synthetic construct
  source 1..203: mol_type = other DNA
ggcgcgccagtcctgtcgtgaaggtcgcgaggccttcccgtgatggaggctgcatcatggatgtcatcacaagaagagaccaaagaggttcgggtcaggttgtgacctatgcccttaacaccctcaccaacataaaggtgcaattaatccgaatgatggaaggggaaggggtcatagaggcagcggatcgactcggaccgatg

SEQ ID NO: 5434 - DNA, 203 bp, synthetic construct
  source 1..203: mol_type = other DNA
ggcgcgccagtcctgaatgggagcactcagccggcttttcaagctgggaggaggtacccttttgttcacaccatttccacgagctagtgatgaaggatggacgcaccctggtggtgccgtgccgagaccaagatgaactcgttgggagggcgcgcatctcaccggggtgcggctggagtgtccgcgagcgactcggaccgatg

SEQ ID NO: 5435 - DNA, 203 bp, synthetic construct
  source 1..203: mol_type = other DNA
ggcgcgccagtcctacgtgggggagttgatcccccccccccggcactgggtgcaagccccagaaaccgacgcctatctaagtagacgcaatgactcggcgccgactcggcgaccggccaaaaggtggtggatgggtgatgacagggttggtaggtcgtaaatcccggtcaccttggtagccactatagcgactcggaccgatg

SEQ ID NO: 5436 - DNA, 203 bp, synthetic construct
  source 1..203: mol_type = other DNA
ggcgcgccagtcctagtggcccctttcatgcccccagtatgtctatgggtctgctacagtcacttgcgtgtggggttccgcttcttggtttgcctccaccagtggtcgcgactcgaagatagatgtgtggagtttagtgccagttggctctgccacctgcaccatagccgcacttggatcatcggatccgactcggaccgatg

SEQ ID NO: 5437 - DNA, 203 bp, synthetic construct
  source 1..203: mol_type = other DNA
ggcgcgccagtcctgcgacacggtgcctgggctctccgagtggggaatcccgtgcgtgacgtgtgttctggaccgtcggcctgcctcctgcggcacctgtgtgagggactgctggcccgagaccgggtcggttaggttcccattccatcggtgcggcgtggggcctcggctgacaaaggacttggaagcgactcggaccgatg

SEQ ID NO: 5438 - DNA, 203 bp, synthetic construct
  source 1..203: mol_type = other DNA
ggcgcgccagtcctctgtgcccttcgtcaacaggacaactcccttcaccattagggggcccctgggcaaccagggccgaggcaacccggtgcggtcgcccttgggttttgggtcctacgccatgaccaggatccgagataccctacatctggtggagtgtcccacaccagccattgagcctcccaccgcgactcggaccgatg

SEQ ID NO: 5439 - DNA, 203 bp, synthetic construct
  source 1..203: mol_type = other DNA
ggcgcgccagtcctgcctgatgttcctcgtgttgtggaagcttgctcggggagctttcccgctggccctcttgatggggatttcggcgacccgcgggcgcacctcagtgctcggggccgagttctgcttcgatgctacattcgaggtggacacttcggtgttgggctgggtggtggccagtgtggtagcgactcggaccgatg

SEQ ID NO: 5440 - DNA, 203 bp, synthetic construct
  source 1..203: mol_type = other DNA
ggcgcgccagtcctcttgggccattgcgctcctgagctcgatgagcgcaggggggtggaggcacaaagccgtgatctataggacgtggtgtaaggggtaccaggcaatccgtcaaagggtggtgaggagccccctcggggaggggcggcctgccaaacccctgacctttgcctggtgcttggcctcgtcgactcggaccgatg

SEQ ID NO: 5441 - DNA, 203 bp, synthetic construct
  source 1..203: mol_type = other DNA
ggcgcgccagtcctagtgcgtcatgggtttacccgtggttgcgcgccgtggtgatgaggttctcatcggcgtcttccaggatgtgaatcatttgcctcccgggtttgttccgaccgcgcctgttgtcatccgacggtgcggaaagggcttcttgggggtcacaaaggctgccttgacaggtcgggatccgactcggaccgatg

SEQ ID NO: 5442 - DNA, 203 bp, synthetic construct
  source 1..203: mol_type = other DNA
ggcgcgccagtcctctgacttacatccagggaacgtcatggtgttggggacggctacgtcgcgaagcatgggaacatgcttgaacggcctgctgttcacgaccttccatggggcttcatcccgaaccatcgccacacccgtgggggcccttaatcccagatggtggtcagccagtgatgatgtcacggcgactcggaccgatg

SEQ ID NO: 5443 - DNA, 203 bp, synthetic construct
  source 1..203: mol_type = other DNA
ggcgcgccagtccttcacaaggatcactgactcccccctgacgtattcaacctatgggaggtttttggccaaccctaggcagatgctacggggcgtttcggtggtcatttgtgatgagtgccacagtcatgactcaaccgtgctgttaggcattgggagagtccgggagctggcgcgtgggtgcggggcgactcggaccgatg

SEQ ID NO: 5444 - DNA, 203 bp, synthetic construct
  source 1..203: mol_type = other DNA
ggcgcgccagtccttgcaactagtgctctacgccaccgctacacctcccggatcccctatgacgcagcacccttccataattgagacaaaattggacgtgggcgagattcccttttatgggcatggaatacccctcgagcggatgcgaaccggaaggcacctcgtgttctgccattctaaggctgagtcgactcggaccgatg

SEQ ID NO: 5445 - DNA, 203 bp, synthetic construct
  source 1..203: mol_type = other DNA
ggcgcgccagtcctgcgagcgccttgctggccagttctccgctaggggggtcaatgccattgcctattataggggtaaagacagttctatcatcaaggatggggacctggtggtctgtgctacagacgcgctttccactgggtacactggaaatttcgactccgtcaccgactgtggattagtggtggcgactcggaccgatg

SEQ ID NO: 5446 - DNA, 203 bp, synthetic construct
  source 1..203: mol_type = other DNA
ggcgcgccagtcctgctgggcaaaagttcgcggcgtcaactggcccctcttggtgggtgttcagcggaccatgtgtcgggaaacactgtctcccggcccatcggatgacccccaatgggcaggtctgaagggcccaaatcctgtcccactcctgctgaggtggggcaatgatttaccatctaaagtggcgactcggaccgatg

SEQ ID NO: 5447 - DNA, 203 bp, synthetic construct
  source 1..203: mol_type = other DNA
ggcgcgccagtcctgagaagtgttgtccttggctcaggctaagacggccgaggcctacacagcaaccgccaagtggctcgctggctgctatacggggacgcgggccgttcccactgtatccattgttgacaagctcttcgccggagggtgggcggctgtggtgggccattgccacagcgtgattgctgcgactcggaccgatg

SEQ ID NO: 5448 - DNA, 203 bp, synthetic construct
  source 1..203: mol_type = other DNA
ggcgcgccagtcctgccttgcggggatcgctctcgggttggttttgtattcagctaacaactctggcactaccacttggttgaaccgtctgctgactacgttaccaaggtcttcatgtatcccggacagttactttcagcaagttgactattgcgacaaggtctcagccgtgctccggcgcctgagcccgactcggaccgatg

SEQ ID NO: 5449 - DNA, 203 bp, synthetic construct
  source 1..203: mol_type = other DNA
ggcgcgccagtccttcacccgcacagtggttgccctggtcaacagggagcctaaggtggatgaggtacaggtggggtatgtctgggacctgtgggagtggatcatgcgccaagtgcgcgtggtcatggccagactcagggccctctgccccgtggtgtcactacccttgtggcattgcggggaggggtcgactcggaccgatg

SEQ ID NO: 5450 - DNA, 203 bp, synthetic construct
  source 1..203: mol_type = other DNA
ggcgcgccagtcctcatcgccagcacttatctcggttactgagagcagctcagatgagaagaccccgtcggtgtcctcctcgcaggaggataccccgtcctctgactcattcgaggtcatccaagagtccgagacagccgaaggggaggaaagtgtcttcaacgtggctctttccgtattaaaagcctcgactcggaccgatg

SEQ ID NO: 5451 - DNA, 203 bp, synthetic construct
  source 1..203: mol_type = other DNA
ggcgcgccagtccttatttccacagagcgacgcgaccaggaagcttaccgtcaagatgtcgtgctgcgttgaaaagagcgtcacgcgctttttctcattggggttgacggtggctgatgttgctagcctgtgtgagatggaaatccagaaccatacagcctattgtgaccaggtgcgcactccgcttgcgactcggaccgatg

SEQ ID NO: 5452 - DNA, 203 bp, synthetic construct
  source 1..203: mol_type = other DNA
ggcgcgccagtcctaattgcaggttgggtgcttggtgggcaatgaacttacctttgaatgtgacaagtgtgaggctaggcaagaaaccttggcctccttctcttacatttggtctggagtgccgctgactagggccacgccggccaagcctcccgtggtgaggccggttggctctttgttagtggccgcgactcggaccgatg

SEQ ID NO: 5453 - DNA, 203 bp, synthetic construct
  source 1..203: mol_type = other DNA
ggcgcgccagtcctacactactaaggtgtatgttaccaatccagacaatgtgggacggagggtggacaaggtgaccttctggcgtgctcctagggttcatgataagtacctcgtggactctattgagcgcgctaagagggccgctcaagcctgcctaagcatgggttacacttatgaggaagcaataacgactcggaccgatg

SEQ ID NO: 5454 - DNA, 203 bp, synthetic construct
  source 1..203: mol_type = other DNA
ggcgcgccagtcctggactgtaaggccacatgctgccatgggctggggatctaaggtgtcggttaaggacttagccacccccgcggggaagatggccgtccatgaccggcttcaggagatacttgaagggactccggtcccctttactcttactgtgaaaaaggaggtgttcttcaaagaccggaaggcgactcggaccgatg

SEQ ID NO: 5455 - DNA, 203 bp, synthetic construct
  source 1..203: mol_type = other DNA
ggcgcgccagtcctgcgacgctttgggcagagccctagcgagctatgggtacgcgtgcgagccctcatatcatgcatcattggacacggcccccttctgctccacttggcttgctgagtgcaatgcagatgggaagcgccatttcttcctgaccacggacttccggaggccgctcgctcgcatgtcgacgactcggaccgatg

SEQ ID NO: 5456 - DNA, 203 bp, synthetic construct
  source 1..203: mol_type = other DNA
ggcgcgccagtcctgtgagtatagtgacccgatggcttcggcgatcggttacatcctcctttatccttggcaccccatcacacggtgggtcatcatccctcatgtgctaacgtgcgcattcaggggtggaggcacaccgtctgatccggtttggtgccaggtgcatggtaactactacaagtttccaccgactcggaccgatg

SEQ ID NO: 5457 - DNA, 203 bp, synthetic construct
  source 1..203: mol_type = other DNA
ggcgcgccagtccttggacaaactgcctaacatcatcgtggccctccacggaccagcagcgttgagggttaccgcagacacaactaaaacaaagatggaggctggtaaggttctgagcgacctcaagctccctggcttagcagtccaccgaaagaaggccggggcgttgcgaacacgcatgctccgctcgactcggaccgatg

SEQ ID NO: 5458 - DNA, 203 bp, synthetic construct
  source 1..203: mol_type = other DNA
ggcgcgccagtcctcgcgcggttgggctgagttggctaggggcttgttgtggcatccaggcctacggcttcctccccctgagattgctggtatcccggggggtttccctctctcccccccctatatgggggtggtacatcaattggatttcacaagccagaggagtcgctggcggtggttggggttctcgactcggaccgatg

SEQ ID NO: 5459 - DNA, 203 bp, synthetic construct
  source 1..203: mol_type = other DNA
ggcgcgccagtccttagccctgctcatcgtagccctcttcgggtgaactaaattcatctgttgcggcaaggtctggtgactgatcatcaccggaggaggttcccgccctccccgccccaggggtctccccgctgggtaaaaagggcccggccttgggaggcatggtggttactaaccccctggcagggcgactcggaccgatg

SEQ ID NO: 5460 - DNA, 203 bp, synthetic construct
  source 1..203: mol_type = other DNA
ggcgcgccagtccttgtataaatgtacccgcttcttgcattgtattcagtcgctctgcggagaggctggcagatcgagccctgagaggttctctccagcactagcaggtagagcctgggtgttccctgctggactctcaccagtacttggccggtactgggcagacggctccacgcttgcttgcttaacgactcggaccgatg

SEQ ID NO: 5461 - DNA, 203 bp, synthetic construct
  source 1..203: mol_type = other DNA
ggcgcgccagtcctagacctcttcaataaagctgccagttagaagcaagttaagtgtgtgttcccatctctcctagtcgccgcctggtcattcggtgttcatctgagtaacaagaccctggtctgttaggacccttctcgctttgggaatccaaggcaggaaaatccctagcaggttggcgcccgaaccgactcggaccgatg

SEQ ID NO: 5462 - DNA, 203 bp, synthetic construct
  source 1..203: mol_type = other DNA
ggcgcgccagtcctagggacttgaagaggactgagaagccctggaactcggctgagtgaaggcagtaagggcggcaggaacaaaccacgacggagtgctcctagaaaggcgcgggccgaggtaccaaaggcggcgtgtggagcgggagtgaaagaggcctccgggtgaaggtaagtacctacaccaaacgactcggaccgatg

SEQ ID NO: 5463 - DNA, 203 bp, synthetic construct
  source 1..203: mol_type = other DNA
ggcgcgccagtccttgaggaagcaaagaaactagcacagagacatctagtggcagaaactggaactgcagagaaaatgccaaatacaagtagaccaacagcaccacctagtgggaaaagaggaaactaccccgtgcaacaagcgggtggcaactatgtccatgtgccactgagcccccgaactctaaacgactcggaccgatg

SEQ ID NO: 5464 - DNA, 203 bp, synthetic construct
  source 1..203: mol_type = other DNA
ggcgcgccagtccttgcatgggtaaaattagtggaggaaaagaagttcggggcagaagtagtgccaggatttcaggcactctcagaaggctgcacgccctatgatattaatcaaatgcttaattgtgtgggcgatcaccaagcagctatgcaaataatcagagagattattaatgaagaagcagcagacgactcggaccgatg

SEQ ID NO: 5465 - DNA, 203 bp, synthetic construct
  source 1..203: mol_type = other DNA
ggcgcgccagtcctcccagactgcaagttagtactaaaaggactggggatgaatcccaccctagaagagatgctaaccgcctgccagggggtaggcggaccaggccagaaagccaggctaatggctgaagccctaaaagaggctatgggaccaagccctatcccatttgcagcagcccaacaaagaaacgactcggaccgatg

SEQ ID NO: 5466 - DNA, 203 bp, synthetic construct
  source 1..203: mol_type = other DNA
ggcgcgccagtcctccccgtgacccaagcccctcaggggctgataccaacagcacctccggcagatccagcagcggaactgttggagagatatatgcagcaagggagaaagcagagggagcagagggagagaccatacaaagaggtgacggaggacttgctgcacctcgagcagagagagacacctcacgactcggaccgatg

SEQ ID NO: 5467 - DNA, 203 bp, synthetic construct
  source 1..203: mol_type = other DNA
ggcgcgccagtccttttgtatctaccccaccactggtcaggttaacatttaacctagtaggagatcctataccaggcgcagagaccttctacacagatggatcatgcaatagacagtcaaaagagggaaaagcaggatatgtaacagatagaggaaaagacaaagtaaaagtattagaacaaactacccgactcggaccgatg

SEQ ID NO: 5468 - DNA, 203 bp, synthetic construct
  source 1..203: mol_type = other DNA
ggcgcgccagtcctcttctagtagcaagacagatagtaaactcatgtgcccaatgccaacagaaaggagaagccatacatgggcaagtaaatgcagaaataggcgtttggcaaatggactacacacacttagaaggaaaaatcattatagtagcagtacatgttgcaagtggattcatagaagcagaacgactcggaccgatg

SEQ ID NO: 5469 - DNA, 203 bp, synthetic construct
  source 1..203: mol_type = other DNA
ggcgcgccagtcctgtcatcccacaggaatcaggaaggcagacagcactcttcctattaaaactggccagtaggtggccaataacgcacttgcacacagacaatggccccaacttcacttcacaggaagtgaagatggtggcatggtgggtaggtatagaacaatcctttggagtaccttacaacccacgactcggaccgatg

SEQ ID NO: 5470 - DNA, 203 bp, synthetic construct
  source 1..203: mol_type = other DNA
ggcgcgccagtcctattaccacagaacaagaaatacaattcctccaaagaaaaaattcaaattttaaaaatttccaggtctattacagagaaggcagagatcagctgtggaaaggacctggtgaactactgtggaagggagaaggagcagtcatagtcaaggtagggacagacataaaagtagtaccacgactcggaccgatg

SEQ ID NO: 5471 - DNA, 203 bp, synthetic construct
  source 1..203: mol_type = other DNA
ggcgcgccagtcctagaaggaaggccaagattatcagggactatggaggaagacaggaactggatagtagtccccacctggagggtgccagggaggatggagaaatggcatgcccttgtcaagtacctgaaatacagaacaaaagacctagaggaggtgcgctatgttccccaccacaaggtgggatgcgactcggaccgatg

SEQ ID NO: 5472 - DNA, 203 bp, synthetic construct
  source 1..203: mol_type = other DNA
ggcgcgccagtcctcctaatacatagcacttatttctcttgctttacggcaggtgaagtaagaagagccatcagaggggaaaagttattgtcctgctgcaactatccccaagctcataaagcacaggtaccatcacttcaatacctagccctagtagtagtacaacaaaatgacagaccccagagaaacgactcggaccgatg

SEQ ID NO: 5473 - DNA, 203 bp, synthetic construct
  source 1..203: mol_type = other DNA
ggcgcgccagtcctgggtaccgccaggaaacagtggagaagagaccattggagaggccttcgagtggctagagaggaccatagaagccttaaacagggaggcagtgaaccatctgccccgagagctcattttccaggtgtggcaaaggtcctggagatattggcatgatgaacaagggatgtcagcaacgactcggaccgatg

SEQ ID NO: 5474 - DNA, 203 bp, synthetic construct
  source 1..203: mol_type = other DNA
ggcgcgccagtcctgctacacaaagtatagatatttgtgcctaatgcaaaaagctatatttacacatttcaagagagggtgcacttgctggggggaggacatgggccgggaaggattggaagaccaaggacctccccctcctccccctccaggtctagtctaatgactgaagcaccaacagagtttcccgactcggaccgatg

SEQ ID NO: 5475 - DNA, 203 bp, synthetic construct
  source 1..203: mol_type = other DNA
ggcgcgccagtcctcccagaagatgggaccccacggagggacttagggagtgactgggtaatagaaactctgagggaaataaaggaagaagccttaagacattttgatccccgcttgctaattgctcttggctactatatccataatagacatggagacacccttgaaggcgccagagagctcattaacgactcggaccgatg

SEQ ID NO: 5476 - DNA, 203 bp, synthetic construct
  source 1..203: mol_type = other DNA
ggcgcgccagtcctggctcggaatatcatatgagcgaaagggcagacgaagaaggactccaaggaaaactaagactccttcgccttctgcaccagacaagtgagtatggagcctggtaggaatcagctgtttgttgtcattttactaacaagtgcttgcttagtatattgtagccagtatgtgactgtcgactcggaccgatg

SEQ ID NO: 5477 - DNA, 203 bp, synthetic construct
  source 1..203: mol_type = other DNA
ggcgcgccagtcctagtagaagatgtctggcatctatttgagacatcaataaaaccatgtgtcaagctaacacctctatgtgtggcaatgaattgtagcagggttcaagggaataccacgaccccgaatcccaggacctcgagttccacaacctcgagaccacccacatccgcagcctccataataaacgactcggaccgatg

SEQ ID NO: 5478 - DNA, 203 bp, synthetic construct
  source 1..203: mol_type = other DNA
ggcgcgccagtccttgaaacttctaactgcatagaaaacaacacatgcgcaggattagggtatgaggagatgatgcaatgtgagttcaatatgaaggggttagaacaagataagaaaaggaggtataaggacacatggtatttagaagatgtggtttgtgacaacacaacagctggcacatgttacatcgactcggaccgatg

SEQ ID NO: 5479 - DNA, 203 bp, synthetic construct
  source 1..203: mol_type = other DNA
ggcgcgccagtcctgagacattgcaacacatcaatcatcaaagagtcatgtgataagcactattgggatgctatgaggtttagatactgtgcaccaccgggctttgccctattaagatgtaatgataccaactattcaggctttgaacctaagtgcactaaagtagtagctgcttcatgcacaaggatcgactcggaccgatg

SEQ ID NO: 5480 - DNA, 203 bp, synthetic construct
  source 1..203: mol_type = other DNA
ggcgcgccagtcctgtttgacttaacctcctgggtcaagtatattcaatatggagtgcatatagtagtgggaataatagctttaagaatagcaatctatgtagtgcaattgttaagtagatttagaaagggctataggcctgttttctcttccccccccggttatctccaacagatccatatccacaacgactcggaccgatg

SEQ ID NO: 5481 - DNA, 203 bp, synthetic construct
  source 1..203: mol_type = other DNA
ggcgcgccagtcctcaggaagtagctactaagaaacagctgaggctgcagggactttccagaaggggctgtaaccaagggagggacatgggaggagctggtggggaacgccctcatacttactgtataaatgtacccgcttcttgcattgtattcagtcgctctgcggagaggctggcagatcgagcccgactcggaccgatg

SEQ ID NO: 5482 - DNA, 203 bp, synthetic construct
  source 1..203: mol_type = other DNA
ggcgcgccagtcctgaaaaatttgtacctttgtttgtggtcaccatgtcccaagcagtaccatattggcggcagaccatgcaggcacgcaatcaaaatggtaaaaagcaaaagaaccgcattgctgaactagaaaaagaggtagcagacttaactagcgccggtaggggagctgatcaggttatagcacgactcggaccgatg

SEQ ID NO: 5483 - DNA, 203 bp, synthetic construct
  source 1..203: mol_type = other DNA
ggcgcgccagtcctttgactatgcccaccagatcaaaaggaccgaagaaacggggccctgatttgaaacagattagatcgttgcacgtgatggctgattcattgggcatggacagtgatggcatagactgggattggttggctagacaagcctgggactatgaaggagatgaggatccacatgttaagcgactcggaccgatg

SEQ ID NO: 5484 - DNA, 203 bp, synthetic construct
  source 1..203: mol_type = other DNA
ggcgcgccagtcctgaagcagaggaggaggcatggcgtgagagacaaacatctcaaccatcccaaccctctcagttgagaccttttgtagccgcagggaacggtcatagggaagatcaatggagacccctgacagtcacagaattacccgcagccgttaccgcagtaggaggagcatgggatcccacgcgactcggaccgatg

SEQ ID NO: 5485 - DNA, 203 bp, synthetic construct
  source 1..203: mol_type = other DNA
ggcgcgccagtcctaagcagggacccggaggaggacagggtttgttggaatttactaagttaagacaaggacccactgagaatcctagtaactacttggaaaaggctctagaattgtacctagactctcaacccggtgatagagacggtaacaaagatgaccccgcatttctgcagcaggctactcaacgactcggaccgatg

SEQ ID NO: 5486 - DNA, 203 bp, synthetic construct
  source 1..203: mol_type = other DNA
ggcgcgccagtcctggccacaagatcgagtgtctagtggacacaggagcagaggtgtcattaacatcccttcaattacaggcacaacgatttgaacaggtggttggtttgggaggcaaaccggtgagagtagggatagcggatcatgtcgataccacagtaggacaagtaaaaggaaaaggctgctggcgactcggaccgatg

SEQ ID NO: 5487 - DNA, 203 bp, synthetic construct
  source 1..203: mol_type = other DNA
ggcgcgccagtcctcatgcttcaccaggcatattccaccaagccctgtacaatggactggcctcctgtaaaacagcgattgaaagtcagggttgtaaactattgcaatatgtagatgatatcctgttgatgagtgaagatagggaccatcatttaaggtcgctggcaatattactgcaaggcctcaagcgactcggaccgatg

SEQ ID NO: 5488 - DNA, 203 bp, synthetic construct
  source 1..203: mol_type = other DNA
ggcgcgccagtcctatccaaggatggtttgtcccggagccttatgagggggaacagcaccagtgccgacctcatgatgacacaataacatggagagtcagcactagagctatgcccacgggtgagaagtggtggatagacggaagtagatattgggatcatgataagggaggctacgttacaggatggcgactcggaccgatg

SEQ ID NO: 5489 - DNA, 203 bp, synthetic construct
  source 1..203: mol_type = other DNA
ggcgcgccagtccttggaaaaggaggggtatggtcaatgcagatggatcacagatcagcaaccagaatatcctacaagaaatttggcaattgattgaacatgattctacacaaacgcttggtatagtcaaggtaaaagcacatacccagcgtaaatgtagcacgcatgaacaacaactgaataatgatcgactcggaccgatg

SEQ ID NO: 5490 - DNA, 203 bp, synthetic construct
  source 1..203: mol_type = other DNA
ggcgcgccagtcctgtagatcagccggcaaaacaatatgctaaggaagaacctaacatgtcagtcatagcacctctgcaagtctatccattatggataggtttggtaccatgtaaagaaccaaaattgtgggaaaatatacaacatcacatcacaaaggttgacctgcccgacttccagaaacaacttcgactcggaccgatg

SEQ ID NO: 5491 - DNA, 203 bp, synthetic construct
  source 1..203: mol_type = other DNA
ggcgcgccagtcctggaaaagtacaaggctacgtcattaagacaaccttaggcatgaaaacatggataatgaatgatcacctggtgactcagagtgaacagactgagggtagggctaagctaagcagcacggaaggctacgccttagcccaacaataccatcatctgtacggtcacccctcagaggaacgactcggaccgatg

SEQ ID NO: 5492 - DNA, 203 bp, synthetic construct
  source 1..203: mol_type = other DNA
ggcgcgccagtcctgtgggacctttgggacctggtacccatggatacaggtacctcacaaccatggttgatgtgtacacaggttggttctgggccaaaccctgtagaggtccaactacgggtgccactatagcggccttagaggaacacatcagtatttggggggtaccctattctatacaatctgatcgactcggaccgatg

SEQ ID NO: 5493 - DNA, 203 bp, synthetic construct
  source 1..203: mol_type = other DNA
ggcgcgccagtcctcaaaataagaagtgggaagaacagttagaaaaggtcactaaagcagaagcccactcacactggactcagaggagccctaatttagaacctggctgcattgtgttagtaagaaagttcaccggggatgccttctcacctaaatgggaaggaccatatgtgataacagaaactacccgactcggaccgatg

SEQ ID NO: 5494 - DNA, 203 bp, synthetic construct
  source 1..203: mol_type = other DNA
ggcgcgccagtcctaccaaggcaaaaacgtagcctaaggaaccaacccacagaatggcatctccatatgtgtggaccaccaggtgattacatatgcatgtggaccaataagaaaccagtgtgtactacctatcatgaaggacaggatacatactccttagggacgcataggaaggtgctccccaaagtcgactcggaccgatg

SEQ ID NO: 5495 - DNA, 203 bp, synthetic construct
  source 1..203: mol_type = other DNA
ggcgcgccagtcctaactgaagcctgtgcggttggacaacctcctcagatacccggaacctatgtagccagtagtaaaggatggactatgtttaataaatttgaagtccattcctaccccgctaatgtcacccagattaaaacaaacagaacactgcatgacgtaacattatggtggtgtcatgacaacgactcggaccgatg

SEQ ID NO: 5496 - DNA, 203 bp, synthetic construct
  source 1..203: mol_type = other DNA
ggcgcgccagtcctcaccgccacccgtgtccaaatgcagaaaataggaccaggggaatggaaaatagcaactagcatggtagggctatgcctggacgaatgggaaatagagtgcaccggcttctgtagtggtcctcctccttgcagtttaagcataactcaacagcaggatacagtgggaggatcttacgactcggaccgatg

SEQ ID NO: 5497 - DNA, 203 bp, synthetic construct
  source 1..203: mol_type = other DNA
ggcgcgccagtcctactgatattaccttttactgtagcaccaaaatatagacgacaacgaaggggacttaacccctcaaccacacctgattattacactaatgaagattatagtggatcaggggggtgggaaataaatgacgagtgggaatatataccaccaacagtgaaaccaaccacgcctagtgtcgactcggaccgatg

SEQ ID NO: 5498 - DNA, 203 bp, synthetic construct
  source 1..203: mol_type = other DNA
ggcgcgccagtccttacacttatagggaaacactggattaaggtaattcagcggcttttacgggaatatcagaagacaggggttacctttaatctcccacaggttcaatcattacccaattgggaaaccaaaaacaaagataatcctggacatcacattcccaaaagccggcggaagagaattaggcgcgactcggaccgatg

SEQ ID NO: 5499 - DNA, 203 bp, synthetic construct
  source 1..203: mol_type = other DNA
ggcgcgccagtcctaggattaggtgaagctttaggattaggtaactttgctgataacagatggaaggatttacagatagcaggattaggggtagaacagcagaaattaatgggattaactagagaagccacgtttgaggcatggaatgccctgaagggtatttctaacgaattaattaaatgggaagacgactcggaccgatg

SEQ ID NO: 5500 - DNA, 203 bp, synthetic construct
  source 1..203: mol_type = other DNA
ggcgcgccagtcctagatatggtagccactctcagacagcttctattacaaattaaaggcactaatactaccctctgtagtgcgatgggaccgttaatggctaccaatatacaacaaataatgttcgcattacaacatggtaatctacctgaaatgtcttactctaaccctgtgttgaaggaaatagccgactcggaccgatg

SEQ ID NO: 5501 - DNA, 203 bp, synthetic construct
  source 1..203: mol_type = other DNA
ggcgcgccagtcctaaattcaggaacatggtcatcactgaaaaatgagacactgtatgtaagtggacgaaattgctccttctctctcaccagtaggcggcgacctgtgtgttttcacctaaatagcaccgcccaatggcgaggacacgttttgccttttgtaggtaactcccaggaagcacccaacaccgactcggaccgatg

SEQ ID NO: 5502 - DNA, 203 bp, synthetic construct
  source 1..203: mol_type = other DNA
ggcgcgccagtcctccaaaccagaagaagtgataagtttatataatcctgaattatttgcttgggggggaacactgggagattatgtatggtgtaaaactactactattcgatggggacctattgtaatgaagtatcgtgtgtgtgggcacctcgaatcagattataccacgagtcagtattacagagcgactcggaccgatg

SEQ ID NO: 5503 - DNA, 203 bp, synthetic construct
  source 1..203: mol_type = other DNA
ggcgcgccagtcctacatatgctcttaatgtacttgtttactgtttatacgcacccaagtaacaactgtatttaattataacctatgtgaatcataaggccaatcacgctaggaggcggcctctagtacttttccattgtatgaactattgttattagcccctccctgaaggaggagccacttgcctacgactcggaccgatg

SEQ ID NO: 5504 - DNA, 203 bp, synthetic construct
  source 1..203: mol_type = other DNA
ggcgcgccagtcctgaatcataaggccaatcacgctaggaggcggcctctagtacttttccattgtatgaactattgttattagcccctccctgaaggaggagccacttgcctatatattgtagagcacggctgtgctcattgtcttttgctgcacccaacttgaagaataaagattattgcatctgacgactcggaccgatg

SEQ ID NO: 5505 - DNA, 203 bp, synthetic construct
  source 1..203: mol_type = other DNA
ggcgcgccagtccttgtttagtctaactcaatagacatgtgtttattaccattttagttaatataaaaactcatcaaagggaaatggggcaaataaactcacctaatcaatcaaactatgagcactacaaatgacaacactactatgcaaagattaatgatcacggacatgagacccctgtcgatggacgactcggaccgatg

SEQ ID NO: 5506 - DNA, 203 bp, synthetic construct
  source 1..203: mol_type = other DNA
ggcgcgccagtccttgaatataatacaaaatatggcactttccccatgcctatatttatcaatcatggcgggtttctagaatgtattggcattaagcctacaaaacacactcctataatatacaaatatgacctcaacccgtaaattccaacaaaaaaaaccaacccaaccaaaccaagctattcctccgactcggaccgatg

SEQ ID NO: 5507 - DNA, 203 bp, synthetic construct
  source 1..203: mol_type = other DNA
ggcgcgccagtcctaggaatgctccatacattagtagttgcaagtgcaggacccacttcagctcgcgatggaataagagatgctatggttggtctgagagaagaaatgatagaaaaaataagagcggaagcattaatgaccaatgataggttagaggctatggcaagacttaggaatgaggaaagcgacgactcggaccgatg

SEQ ID NO: 5508 - DNA, 203 bp, synthetic construct
  source 1..203: mol_type = other DNA
ggcgcgccagtcctaaaaatggcaaaagacacctcagatgaagtgcctcttaatccaacttccaaaaaattgagtgacttgttggaagacaacgatagtgacaatgatctgtcacttgatgatttttgatcagtgatcaactcactcagcaatcaacaacatcaataaaacagacatcaatccattgacgactcggaccgatg

SEQ ID NO: 5509 - DNA, 203 bp, synthetic construct
  source 1..203: mol_type = other DNA
ggcgcgccagtcctgctagacctagagtgcgaataggtaaataaaaccaaaatatggggtaaatagacattagttagagttcaatcaatctcaacaaccatttataccgccaattcaatacatatactataaatcttaaaatgggaaatacatccatcacaatagaattcacaagcaaattttggccccgactcggaccgatg

SEQ ID NO: 5510 - DNA, 203 bp, synthetic construct
  source 1..203: mol_type = other DNA
ggcgcgccagtcctcacaagaatcaacgcactgccaggactctagaaaagacctgggatactctcaatcatctaattgtaatatcctcttgtttatacagattaaatttaaaatctatagcacaaatagcactatcagttctggcaatgataatctcaacctctctcataattgcagccataatattccgactcggaccgatg

SEQ ID NO: 5511 - DNA, 203 bp, synthetic construct
  source 1..203: mol_type = other DNA
ggcgcgccagtcctatcatctctgccaatcacaaagttacactaacaacggtcacagttcaaacaataaaaaaccacactgaaaaaaacatcaccacctaccttactcaagtcccaccagaaagggttagctcatccaaacaacctacaaccacatcaccaatccacacaaattcagccacaacatcacgactcggaccgatg

SEQ ID NO: 5512 - DNA, 203 bp, synthetic construct
  source 1..203: mol_type = other DNA
ggcgcgccagtcctaccctcacgaccacagaaagagacaccagcacctcacaatccactgtgctcgacacaaccacattagaacacacaatccaacagcaatccctccactcaaccacccccgaaaacacacccaactccacacaaacacccacagcatccgagccctctacatcaaattccacccaacgactcggaccgatg

SEQ ID NO: 5513 - DNA, 203 bp, synthetic construct
  source 1..203: mol_type = other DNA
ggcgcgccagtcctaatacccaatcacatgcttagttattcaaaaactacatcttagcagaaaaccgtgacctatcaagcaagaacgaaattaaacctggggcaaataaccatggagctgctgatccacaggttaagtgcaatcttcctaactcttgctattaatgcattgtacctcacctcaagtcacgactcggaccgatg

SEQ ID NO: 5514 - DNA, 203 bp, synthetic construct
  source 1..203: mol_type = other DNA
ggcgcgccagtcctaccaaaaataatgatattaccggataaatatccttgtagtatatcatccatattgatttcaagtgaaagcatgattgctacattcaatcataaaaacatattacaatttaaccataaccatttggataaccaccagcgtttattaaataatatatttgatgaaattcattggaccgactcggaccgatg

SEQ ID NO: 5515 - DNA, 203 bp, synthetic construct
  source 1..203: mol_type = other DNA
ggcgcgccagtcctgataataatctcaataatttgagtgagctatattttctcttcagaatctttggacatccaatggttgatgaaagacaagcaatggatgctgtaagaattaactgtaatgaaactaagttctacttattaagtagtctaagtacgttaagaggtgctttcatttatagaatcatacgactcggaccgatg

SEQ ID NO: 5516 - DNA, 203 bp, synthetic construct
  source 1..203: mol_type = other DNA
ggcgcgccagtcctaaattcaatcaagcatttagatatgaaacatcatgtatctgcagtgatgtattagatgaactgcatggagtacaatctctgttctcttggttgcatttaacaatacctcttgtcacaataatatgtacatatagacatgcacctcctttcataaaggatcatgttgttaatcttcgactcggaccgatg

SEQ ID NO: 5517 - DNA, 203 bp, synthetic construct
  source 1..203: mol_type = other DNA
ggcgcgccagtcctaatgaagttgatgaacaaagtggattatacagatatcatatgggtggtattgagggctggtgtcaaaaactgtggaccattgaagctatatcattattagatctaatatctctcaaagggaaattctctatcacagctctgataaatggtgataatcagtcaattgatataagtcgactcggaccgatg

SEQ ID NO: 5518 - DNA, 203 bp, synthetic construct
  source 1..203: mol_type = other DNA
ggcgcgccagtcctaaaccagttagacttatagagggtcagacccatgctcaagcagattatttgttagcattaaatagccttaaattgctatataaagagtatgcaggtataggccataagcttaagggaacagagacctatatatcccgagatatgcagttcatgagcaaaacaatccagcacaatcgactcggaccgatg

SEQ ID NO: 5519 - DNA, 203 bp, synthetic construct
  source 1..203: mol_type = other DNA
ggcgcgccagtcctaaaaagcaaagagaccaaatagatttattagcaaaattagactgggtatatgcatccatagacaacaaagatgaattcatggaagaactgagtactggaacacttggactgtcatatgaaaaagccaaaaagttgtttccacaatatctaagtgtcaattatttacaccgtttacgactcggaccgatg

SEQ ID NO: 5520 - DNA, 203 bp, synthetic construct
  source 1..203: mol_type = other DNA
ggcgcgccagtcctagaaacaaggcagtcaaccacctaccaatcccacaaacagaacgaatcaggacgaaatagatgatctgtttaatgcatttggaagcaactaatcgaatcaacattttgatccaaattaataataaataagaaaaacttaggattaaagaatcctattataccagaatatagggtcgactcggaccgatg

SEQ ID NO: 5521 - DNA, 203 bp, synthetic construct
  source 1..203: mol_type = other DNA
ggcgcgccagtcctggtaaatttagagtttgcttgcaactcaatcaatagagagttgatggaaagcgatgctaaaaactatcaaatcatggattcttgggaagaggaatcaagagataaatcaactaatatctcctcggccctcaatatcattgaattcatacttagcaccgacccccaagaagacctcgactcggaccgatg

SEQ ID NO: 5522 - DNA, 203 bp, synthetic construct
  source 1..203: mol_type = other DNA
ggcgcgccagtcctaatgaaaaatagtaggacaaagaaaagttcttcaatacaccaagaagatgacaaaagaattaaaaaagggggaaaagggaaagactggtttaagaaatcaaaagatactgacaaccagataccaacatcagactacagatccacatcaaaagggcagaagaaaatctcaaaaaccgactcggaccgatg

SEQ ID NO: 5523 - DNA, 203 bp, synthetic construct
  source 1..203: mol_type = other DNA
ggcgcgccagtccttctctcacaaagcacaaaacaatcatatataaacgaactcaaacattgcaaaaatgatgaagaagtatctgaattaatggacatgttcaatgaagatgtcaataattgccaatgatccaacaaagaaacgacaccgaacaaacagacaagaaacaacagtagatcaaaatctatcgactcggaccgatg

SEQ ID NO: 5524 - DNA, 203 bp, synthetic construct
  source 1..203: mol_type = other DNA
ggcgcgccagtcctacaaagtttgtggctctggatcattaccaatcggattggctaaatacactgggaatgaccaggaattattacaagctgcaaccaaactggacatagaagtgagaagaacagtcaaagcgaaagagatggttgtgtatacagtacaaaatataaaaccagaactatacccatggtcgactcggaccgatg

SEQ ID NO: 5525 - DNA, 203 bp, synthetic construct
  source 1..203: mol_type = other DNA
ggcgcgccagtcctacacaatatcaatcaatctgcaggtacatatcaaaacaggggttcagactgattccaaagggatagttcaaattttgaatgagaagggcgaaaaatcactgaatttcatgatccatctcggattgatcaagagaaaaataggcagaatgtactctgttgaatactgtaaacagacgactcggaccgatg

SEQ ID NO: 5526 - DNA, 203 bp, synthetic construct
  source 1..203: mol_type = other DNA
ggcgcgccagtcctccctttattaactaggctgctgaacactcagatctacaaagtagattccatatcatataatatccacaatagagaatggtatattcctcttcccagccatatcatgacgaaaggggcatttctaggtggagcagatgtcaaagaatgtatagaagcattcagcagttatatatgcgactcggaccgatg

SEQ ID NO: 5527 - DNA, 203 bp, synthetic construct
  source 1..203: mol_type = other DNA
ggcgcgccagtccttatgagacaaaattactgggggtcagaaggaaggttgattctactaggtaacaagatctatatatatacaagatctacaagttggcatagcaaattacaattaggaataattgatattactgattacagtgatataaggataaaatggacatggcataatgtgctatcaagacccgactcggaccgatg

SEQ ID NO: 5528 - DNA, 203 bp, synthetic construct
  source 1..203: mol_type = other DNA
ggcgcgccagtcctataattaaccataatatgcattaacctatctataatacaagtatatgataagtaatcagcaatcagacaatggacaaaaggaaaatataaaaaacttaggagcaaagcgtgctcggaaaatggacactgaatctaacaatggcactgtatctgacatactctatcctgagtgtccgactcggaccgatg

SEQ ID NO: 5529 - DNA, 203 bp, synthetic construct
  source 1..203: mol_type = other DNA
ggcgcgccagtccttcacttttaatgttgggaaagattataacttgttagaagaccagaagaatttcttattgatacatccagaattggttttgatattagataaacaaaactataatggttatctaattactcctgaattagtactgatgtattgtgacgtagtcgaaggccgatggaatataagtgcgactcggaccgatg

SEQ ID NO: 5530 - DNA, 203 bp, synthetic construct
  source 1..203: mol_type = other DNA
ggcgcgccagtcctgaggagcttttttaaatcatgtgttatccgaaatggaattgatatttgaatctggagaatcgattagggaatttctgagtgtagattacattgataaaatcttagatatttttaatgaatctacaatagatgaaatagcagagattttctctttttttagaacatttgggcatccgactcggaccgatg

SEQ ID NO: 5531 - DNA, 203 bp, synthetic construct
  source 1..203: mol_type = other DNA
ggcgcgccagtcctttctagataattctctcacaggaattagaaatgctatagctggaatgttagatacgacaaaatcattaattcgggttggcataaatagaggaggactgacatatagtttgttgagaaaaatcagtaattatgatctagtgcaatatgaaacactaagtaggactttgcgattaacgactcggaccgatg

SEQ ID NO: 5532 - DNA, 203 bp, synthetic construct
  source 1..203: mol_type = other DNA
ggcgcgccagtcctctgcaactcagatgaaattctccagtacatcattaatcagagtcagcagattcataacaatgtccaatgataacatgtctattaaagaagctaatgaaaccaaagataccaatcttatttaccaacaaataatgttaacaggattaagtgttttcgaatatttatttagattaacgactcggaccgatg

SEQ ID NO: 5533 - DNA, 203 bp, synthetic construct
  source 1..203: mol_type = other DNA
ggcgcgccagtccttattaaaagtattatctaatgcattatctcatcctaaagtatttaagaggttctgggattgtggagttttaaaccctatttatggtcctaatactgctagtcaagaccagataaaacttgctctctctatatgtgaatatgcactagatctatttatgagagaatggttgaatgcgactcggaccgatg

SEQ ID NO: 5534 - DNA, 203 bp, synthetic construct
  source 1..203: mol_type = other DNA
ggcgcgccagtcctatgatgatgttgttttagtttccaaaattatacctacaatcactccgaattggtctagaatactttatctatataaattatattggaaagatgtaagtataatatcacttaaaacttctaatcctgcatcaacagaattatatctaatttcgaaagatgcatattgtactataacgactcggaccgatg

SEQ ID NO: 5535 - DNA, 203 bp, synthetic construct
  source 1..203: mol_type = other DNA
ggcgcgccagtcctaaatctttggatttcaaatcaacttaaatcatctggcgaaagaatttttatcaactccagatctgaccaatatcaacaatataatccaaagttttcagcgaacaatcaaagatgtcttgtttgaatggattaatataactcatgatgacaagagacataaattaggcgggagatcgactcggaccgatg

SEQ ID NO: 5536 - DNA, 203 bp, synthetic construct
  source 1..203: mol_type = other DNA
ggcgcgccagtcctaatcattaaaattattgtcgaaaaacatcattaagaattatagagagtgtataggatcaatatcatattggtttctaaccaaagaagttaaaatacttatgaaattgattggtggtgctaaattattaggaattcccagacaatataaagaacccgaagaacagttattagaaacgactcggaccgatg

SEQ ID NO: 5537 - DNA, 203 bp, synthetic construct
  source 1..203: mol_type = other DNA
ggcgcgccagtcctccaccccacaagatttaaacaccatgctaaacacagtggggggacatcaagcagccatgcaaatgttaaaagagaccatcaatgaggaagctgcagaatgggatagagtgcatccagtgcatgcagggcctattgcaccaggccagatgagagaaccaaggggaagtgacatagcgactcggaccgatg

SEQ ID NO: 5538 - DNA, 203 bp, synthetic construct
  source 1..203: mol_type = other DNA
ggcgcgccagtccttaggaggacccggccataaggcaagagttttggctgaagcaatgagccaagtaacaaattcagctaccataatgatgcagagaggcaattttaggaaccaaagaaagattgttaagtgtttcaattgtggcaaagaagggcacacagccagaaattgcagggcccctaggaaaacgactcggaccgatg

SEQ ID NO: 5539 - DNA, 203 bp, synthetic construct
  source 1..203: mol_type = other DNA
ggcgcgccagtcctagggctgttggaaatgtggaaaggaaggacaccaaatgaaagattgtactgagagacaggctaattttttagggaagatctggccttcctacaagggaaggccagggaattttcttcagagcagaccagagccaacagccccaccagaagagagcttcaggtctggggtagagacgactcggaccgatg

SEQ ID NO: 5540 - DNA, 203 bp, synthetic construct
  source 1..203: mol_type = other DNA
ggcgcgccagtcctaaattttcccattagccctattgagactgtaccagtaaaattaaagccaggaatggatggcccaaaagttaaacaatggccattgacagaagaaaaaataaaagcattagtagaaatttgtacagagatggaaaaggaagggaaaatttcaaaaattgggcctgaaaatccatacgactcggaccgatg

SEQ ID NO: 5541 - DNA, 203 bp, synthetic construct
  source 1..203: mol_type = other DNA
ggcgcgccagtcctaataatagagcagttaataaaaaaggaaaaggtctatctggcatgggtaccagcacacaaaggaattggaggaaatgaacaagtagataaattagtcagtgctggaatcaggaaagtactatttttagatggaatagataaggcccaagatgaacatgagaaatatcacagtaacgactcggaccgatg

SEQ ID NO: 5542 - DNA, 203 bp, synthetic construct
  source 1..203: mol_type = other DNA
ggcgcgccagtcctggttttatagacatcactatgaaagccctcatccaagaataagttcagaagtacacatcccactaggggatgctagattggtaataacaacatattggggtctgcatacaggagaaagagactggcatttgggtcagggagtctccatagaatggaggaaaaagagatatagcacgactcggaccgatg

SEQ ID NO: 5543 - DNA, 203 bp, synthetic construct
  source 1..203: mol_type = other DNA
ggcgcgccagtccttaacaccaaaaaagataaagccacctttgcctagtgttacgaaactgacagaggatagatggaacaagccccagaagaccaagggccacagagggagccacacaatgaatggacactagagcttttagaggagcttaagaatgaagctgttagacattttcctaggatttggctcgactcggaccgatg

SEQ ID NO: 5544 - DNA, 203 bp, synthetic construct
  source 1..203: mol_type = other DNA
ggcgcgccagtcctagactagagccctggaagcatccaggaagtcagcctaaaactgcttgtaccaattgctattgtaaaaagtgttgctttcattgccaagtttgtttcataacaaaagccttaggcatctcctatggcaggaagaagcggagacagcgacgaagagctcatcagaacagtcagactcgactcggaccgatg

SEQ ID NO: 5545 - DNA, 203 bp, synthetic construct
  source 1..203: mol_type = other DNA
ggcgcgccagtcctaagaggtaaggtgcagaaagaatatgcatttttttataaacttgatataataccaatagataatgatactaccagctataagttgacaagttgtaacacctcagtcattacacaggcctgtccaaaggtatcctttgagccaattcccatacattattgtgccccggctggtttcgactcggaccgatg

SEQ ID NO: 5546 - DNA, 203 bp, synthetic construct
  source 1..203: mol_type = other DNA
ggcgcgccagtccttaacactttaaaacagatagctagcaaattaagagaacaatttggaaataataaaacaataatctttaagcaatcctcaggaggggacccagaaattgtaacgcacagttttaattgtggaggggaatttttctactgtaattcaacacaactgtttaatagtacttggtttaacgactcggaccgatg

SEQ ID NO: 5547 - DNA, 203 bp, synthetic construct
  source 1..203: mol_type = other DNA
ggcgcgccagtccttagtacttggagtactgaagggtcaaataacactgaaggaagtgacacaatcaccctcccatgcagaataaaacaaattataaacatgtggcagaaagtaggaaaagcaatgtatgcccctcccatcagtggacaaattagatgttcatcaaatattacagggctgctattaaccgactcggaccgatg

SEQ ID NO: 5548 - DNA, 203 bp, synthetic construct
  source 1..203: mol_type = other DNA
ggcgcgccagtcctgggaataggagctttgttccttgggttcttgggagcagcaggaagcactatgggcgcagcctcaatgacgctgacggtacaggccagacaattattgtctggtatagtgcagcagcagaacaatttgctgagggctattgaggcgcaacagcatctgttgcaactcacagtctgcgactcggaccgatg

SEQ ID NO: 5549 - DNA, 203 bp, synthetic construct
  source 1..203: mol_type = other DNA
ggcgcgccagtcctgatagtaggaggcttggtaggtttaagaatagtttttgctgtactttctatagtgaatagagttaggcagggatattcaccattatcgtttcagacccacctcccaaccccgaggggacccgacaggcccgaaggaatagaagaagaaggtggagagagagacagagacagatccgactcggaccgatg

SEQ ID NO: 5550 - DNA, 203 bp, synthetic construct
  source 1..203: mol_type = other DNA
ggcgcgccagtcctcattcgattagtgaacggatccttggcacttatctgggacgatctgcggagcctgtgcctcttcagctaccaccgcttgagagacttactcttgattgtaacgaggattgtggaacttctgggacgcagggggtgggaagccctcaaatattggtggaatctcctacagtattgcgactcggaccgatg

SEQ ID NO: 5551 - DNA, 203 bp, synthetic construct
  source 1..203: mol_type = other DNA
ggcgcgccagtcctgagaagtgttagagtggaggtttgacagccgcctagcatttcatcacgtggcccgagagctgcatccggagtacttcaagaactgctgacatcgagcttgctacaagggactttccgctggggactttccagggaggcgtggcctgggcgggactggggagtggcgagccctcacgactcggaccgatg

SEQ ID NO: 5552 - DNA, 203 bp, synthetic construct
  source 1..203: mol_type = other DNA
ggcgcgccagtcctgagactataataatatcactaaccagagacatcataacacacagatttatatacttgataaatcatgaatgtatagtgagaaaacttgatgaaagacaggccacatttacattcctggtcaactatgaaatgaaactattgcacaaagtgggaagcactaaatacaaaaaatatcgactcggaccgatg

SEQ ID NO: 5553 - DNA, 203 bp, synthetic construct
  source 1..203: mol_type = other DNA
ggcgcgccagtcctttcctcacttctccagtgtagtattaggcaatgctgctggcctaggcataatgggagaatacagaggtacaccaaggaatcaagatctatatgatgctgcaaaagcatatgctgaacaactcaaagaaaatggtgtgattaactacagtgtattagacttgacagcagaagaaccgactcggaccgatg

SEQ ID NO: 5554 - DNA, 203 bp, synthetic construct
  source 1..203: mol_type = other DNA
ggcgcgccagtcctagacgatgaccctgcatcacttacaatatgggtgcccatgttccaatcatccatgccagcagatttacttataaaagaactagctaatgtcaacatactagtgaaacaaatatccacacccaatggaccttcattaagagtcatgataaactcaagaagtgcagtgctagcacacgactcggaccgatg

SEQ ID NO: 5555 - DNA, 203 bp, synthetic construct
  source 1..203: mol_type = other DNA
ggcgcgccagtcctaataatctctttgctaatcataatctccatcatgattgcaatactgaacaaactctgtgaatataacgtattccataacaaaacctttgagctaccaagagctcgagtcaatacatagcattcaccaatctgatggcacaaaacagtaaccttgcatttgtaagtgaacaaccccgactcggaccgatg

SEQ ID NO: 5556 - DNA, 203 bp, synthetic construct
  source 1..203: mol_type = other DNA
ggcgcgccagtcctcagtcaagaccaaaaacacaacaacaaccaaaatacaacccagcaagcccaccacaaaacaacgccaaaacaaaccaccaaacaaacccaataatgattttcactttgaagtgttcaactttgtaccttgcagcatatgcagcaacaatccaacctgctgggctatctgtaaaacgactcggaccgatg

SEQ ID NO: 5557 - DNA, 203 bp, synthetic construct
  source 1..203: mol_type = other DNA
ggcgcgccagtcctctcatgcaaagcacaccggcaaccaacaatcgagccagaagagaactaccaaggtttatgaattatacactcaacaataccaaaaataccaatgtaacattaagcaagaaaaggaaaagaagatttcttggctttttgttaggtgttggatctgcaatcgccagtggcattgctcgactcggaccgatg

SEQ ID NO: 5558 - DNA, 203 bp, synthetic construct
  source 1..203: mol_type = other DNA
ggcgcgccagtcctaataagggggttgacactgtgtctgtaggtaatacattatattatgtaaataagcaagaaggcaaaagtctctatgtaaaaggtgaaccaataataaatttctatgacccattagtgttcccctctgatgaatttgatgcatcaatatctcaagtcaatgagaagattaaccagcgactcggaccgatg

SEQ ID NO: 5559 - DNA, 203 bp, synthetic construct
  source 1..203: mol_type = other DNA
ggcgcgccagtcctgtgttcaatgcaacatcctccatcatggttaatacattggtttaatttatacacaaaattaaacaacatattaacacagtatcgatcaagtgaggtaaaaaaccatggttttatattgatagacaatcatactctcaatggattccaatttattttgaatcaatatggttgtatcgactcggaccgatg

SEQ ID NO: 5560 - DNA, 203 bp, synthetic construct
  source 1..203: mol_type = other DNA
ggcgcgccagtcctagtttatcataaggaactcaaaagaattactgtgacaacctataatcaattcttgacatggaaaaatattagccttagtagattaaatgtttgtttaattacatggattagtaactgtttgaacacattaaataaaagcttaggcttaagatgcggattcaataatgttatcttcgactcggaccgatg

SEQ ID NO: 5561 - DNA, 203 bp, synthetic construct
  source 1..203: mol_type = other DNA
ggcgcgccagtcctgaatgctattgttttacccttaagatggttaacttactataaactaaacacttatccttccttgttggaacttacagaaagagatttgattgttttatcaggactacgtttctatcgtgagtttcggttgcctaaaaaagtggatcttgaaatgatcataaatgataaggctatcgactcggaccgatg

SEQ ID NO: 5562 - DNA, 203 bp, synthetic construct
  source 1..203: mol_type = other DNA
ggcgcgccagtcctgggtggtatcgaagggtggtgtcaaaaactatggaccatagaagctatatcactattggatctaatatctctcaaagggaaattctcaattactgctttaattaatggtgacaatcaatcaatagatataagtaaaccagtcagactcatggaaggtcaaactcatgctcaagccgactcggaccgatg

SEQ ID NO: 5563 - DNA, 203 bp, synthetic construct
  source 1..203: mol_type = other DNA
ggcgcgccagtcctcattaatttgaaagttttcttcaatgcttataagacctatctcttgtgttttcataaaggttacggcagagcaaagctggagtgtgatatgaatacttcagatctcctatgtgtattggaattaatagacagtagttattggaagtctatgtctaaggtatttttagaacaaaacgactcggaccgatg

SEQ ID NO: 5564 - DNA, 203 bp, synthetic construct
  source 1..203: mol_type = other DNA
ggcgcgccagtcctcaattacagcaaacaagatttgtataatttatttcctacggttgtgattgataaaattatagatcattcaggtaatacagccaaatctaaccaactttacactactacttctcatcaaatacctttagtgcacaatagcacatcactttattgcatgcttccttggcatcatatcgactcggaccgatg

SEQ ID NO: 5565 - DNA, 203 bp, synthetic construct
  source 1..203: mol_type = other DNA
ggcgcgccagtcctaagtctgaaggattgcaatgatcatagtttacctattgagtttttaaggctgtacaatggacatatcaacattgattatggtgaaaatttgaccattcctgctacagatgcaaccaacaacattcattggtcttatttacatataaagtttgctgaacctatcagtctttttgtcgactcggaccgatg

SEQ ID NO: 5566 - DNA, 203 bp, synthetic construct
  source 1..203: mol_type = other DNA
ggcgcgccagtcctttatgtatgcttaggcagtaagttaaaggggtctgaagtttacttagtccttacaataggtcctgcaaatgtgttcccagtatttaatgtagtacaaaatgctaaattgatactatcaagaaccaaaaatttcatcatgcctaagaaggctgataaagagtctattgatgcaaacgactcggaccgatg

SEQ ID NO: 5567 - DNA, 203 bp, synthetic construct
  source 1..203: mol_type = other DNA
ggcgcgccagtccttattaaaagtttgataccctttctttgttaccctataacaaaaaaaggaattaatactgcattgtcaaaactaaagagtgttgttagtggagatatactatcatattctatagcaggacgtaatgaagttttcagcaataaacttataaatcataagcatatgaacatcttaaacgactcggaccgatg

SEQ ID NO: 5568 - DNA, 203 bp, synthetic construct
  source 1..203: mol_type = other DNA
ggcgcgccagtcctgcacttcggaagataaagaggacagtgagtgctttgatggttggcttgcaaaggcgcggaaaaaggaggtcagtgacgaactggatgaactggttgctggtcattgctctgctggggatgacacttgcagcgacagtaaggaaagaaggggacggcaccactgtgatcagggctcgactcggaccgatg

SEQ ID NO: 5569 - DNA, 203 bp, synthetic construct
  source 1..203: mol_type = other DNA
ggcgcgccagtccttcaattggaaaggcggtgcacacggttcttggtggtgccttcaacagcatctttggaggagtggggttcctgccaaagctcctaatgggagtggcactggcctggttgggactgaacacaaggaaccccacaatgtccatgagctttctcttggctggaggtctggtcttggcccgactcggaccgatg

SEQ ID NO: 5570 - DNA, 203 bp, synthetic construct
  source 1..203: mol_type = other DNA
ggcgcgccagtcctaaggacatgaaggtctcttggaggagctggggccactcaatgatctggagtatccctgaggctcctcggcgtttcatggtgggtacagagggacaaagtgagtgcccactagagagacgaaaaacaggtgtgttcacggttgcagagtttggggtcggtctgagaacaaaagtccgactcggaccgatg

SEQ ID NO: 5571 - DNA, 203 bp, synthetic construct
  source 1..203: mol_type = other DNA
ggcgcgccagtccttttctggactttagacaggaaccaacacacgagtgtgacacaggagtgatgggggccgccgtcaaaaacgacatggcggtccacacagatcaaagcctctggatgaaatcgatgagaaatgacacaggtacctacatagttgaactcctggtcactgacctgaggaactgctctcgactcggaccgatg

SEQ ID NO: 5572 - DNA, 203 bp, synthetic construct
  source 1..203: mol_type = other DNA
ggcgcgccagtcctactggaatggtcaggattgagagcctcgtgcgctacgtggtggcggtggggattgcgttccaccttgagctgggaccagagactgtggccttgatgctgctccaggccgtgtttgagctaagagttgggcttctcagcgcctttgcattgcgcagaggcctcaccgtccgagagcgactcggaccgatg

SEQ ID NO: 5573 - DNA, 203 bp, synthetic construct
  source 1..203: mol_type = other DNA
ggcgcgccagtcctctccattggtcaggcatccttggtgtgatgggactgtggacactcacagaaataatgaggtcatccagagggtccgacctggtctactcaggacagggaggccaagaacgtggcgacaggccttttgaggtcaaggatggagtttacagaattttcagtcccggcttgttctggcgactcggaccgatg

SEQ ID NO: 5574 - DNA, 203 bp, synthetic construct
  source 1..203: mol_type = other DNA
ggcgcgccagtcctaaaggtgaaacagtacaggtccatgccttcccaccggggagggcgcacgaggtgcaccagtgccagcccggagaattgatccttgacacaggaaagaggcttggggcaataccaattgacttggcaaagggaacatctggtagccctattcttaacgctcagggagtggttgttcgactcggaccgatg

SEQ ID NO: 5575 - DNA, 203 bp, synthetic construct
  source 1..203: mol_type = other DNA
ggcgcgccagtcctgggctatacggaaatggtccaaaaaccaatgagagctacgtcagcagcatcgctcagggagaggcggagaagagtcgacccaaccttccacaggcagttgtgggcacgggctggacgtcaaagggtcagatcacagtgttggatatgcacccaggctctggaaagacccacagacgactcggaccgatg

SEQ ID NO: 5576 - DNA, 203 bp, synthetic construct
  source 1..203: mol_type = other DNA
ggcgcgccagtcctgtcctcccggagctcatccgccaatgcattgacaggcgcctgagtacgttggtgctggctccaactcgcgtggtactgaaggagatggagcgcgctctcagtgggaagcgggtccggttccattcgccagcagtcagtgaccaacaggctggaggggcaattgtcgatgtgatgcgactcggaccgatg

SEQ ID NO: 5577 - DNA, 203 bp, synthetic construct
  source 1..203: mol_type = other DNA
ggcgcgccagtcctaacataacaaccttgcgggggcccgtggccaccttttatggccctgagcaggacaagatgccggaggtggccggtcactttcgactcactgaggagaagaggaagcacttccgccaccttctcacccattgtgatttcacgccctggctggcatggcacgttgcagcgaacgtgcgactcggaccgatg

SEQ ID NO: 5578 - DNA, 203 bp, synthetic construct
  source 1..203: mol_type = other DNA
ggcgcgccagtcctctgacggtggttgagatgatggttctgggtctggcgaccctgggtgtcgtctggtgtttcgtcgtccgaacatcaatcagtcgcatgatgctcggcacgctggtcttgctggcctccctgctactcttgtgggcaggtggcgtcggctatgggaacatggctggagtggctctccgactcggaccgatg

SEQ ID NO: 5579 - DNA, 203 bp, synthetic construct
  source 1..203: mol_type = other DNA
ggcgcgccagtcctgccatgagagacttgggggggggagctcccttctttggtgtggcaggacatgttatgactctcggggtggtgtccctggttggggccacccccacctcactgatagtgggcattggcttagcagctttccatttggccatcgtggtatctggactggaggctgagctgacacagcgactcggaccgatg

SEQ ID NO: 5580 - DNA, 203 bp, synthetic construct
  source 1..203: mol_type = other DNA
ggcgcgccagtcctaggcgtggtggctctgatggagacacgcttggtgacctctggaagcgcaggctgaacaactgcaccaaggaggaattcttcgtttacaggcgcactggcattctggaaaccgaacgtgacaaggccagagagctgctcaggagaggagagacaaacatgggactggcggtctcgcgactcggaccgatg

SEQ ID NO: 5581 - DNA, 203 bp, synthetic construct
  source 1..203: mol_type = other DNA
ggcgcgccagtcctcgtggcacggcaaagctcgcttggcttgaagaacgcggatatcgcaccctcaagggagaggtggtagatctcgggtgtggaaggggcggctggtcctactatgcggcttctcgaccggcagtcatgagtgttagggcatataccattggtggaagagggcatgaggttccaaagcgactcggaccgatg

SEQ ID NO: 5582 - DNA, 203 bp, synthetic construct
  source 1..203: mol_type = other DNA
ggcgcgccagtcctatccgaaacccagcggcggcctgcgtgttcaaggtgctggctccataccgcccagaggtaatagaggcattgcacagattccagctgcagtggggtgggggtctagtgaggactcccttctcaaggaactcaactcacgagatgtactactcgacagctgtcacaggcaatatacgactcggaccgatg

SEQ ID NO: 5583 - DNA, 203 bp, synthetic construct
  source 1..203: mol_type = other DNA
ggcgcgccagtcctacgacagcctttgggcagcagagagtgtttaaagagaaagttgacacaaaagcacaggagccccaaccggggacaagagtgatcacgagagcagtgaatgattggattctagagcgtctggcccagaaaagcaaaccacgcatgtgcagcagagaggaattcatagcaaaagtgcgactcggaccgatg

SEQ ID NO: 5584 - DNA, 203 bp, synthetic construct
  source 1..203: mol_type = other DNA
ggcgcgccagtcctcaacccaacttccgcgttcttgtcttattctccgccgaaatcgaaagcacagtgcccctccctgcaccactggcccggggccagcatcctgccagggacgcgcgcctgctaaacccgagggtgttttgggcctctccgggaggggtacccagccacttcgggtccttgttctctcgactcggaccgatg

SEQ ID NO: 5585 - DNA, 203 bp, synthetic construct
  source 1..203: mol_type = other DNA
ggcgcgccagtcctccgggagagacaaacaagtgggggctcgtccgggatacctacccctgccctctcgcattatgggacaaacctacggcctctcgtccagcccaatccccaaggcccccagggggttatcaacccaccattggttaaacttcctccaagccgcctaccggctacaacctgggccctcgactcggaccgatg

SEQ ID NO: 5586 - DNA, 203 bp, synthetic construct
  source 1..203: mol_type = other DNA
ggcgcgccagtcctctcctgccccgtctctacccgaaccagctaacccaccgcccctccaacagccctcggctcctccggaaccccatacaccccccccctatataaagcctcccgctacccattgccttcccatactacacccacatggggccccctcggctcacagcccttggcaaatgaaagacccgactcggaccgatg

SEQ ID NO: 5587 - DNA, 203 bp, synthetic construct
  source 1..203: mol_type = other DNA
ggcgcgccagtccttgcaggccatcaagcaggaggtcagcacctcagcccccgggagtccccagttcatgcaaacagtccggctcgcaattcagcaattcgaccccacggccaaagacttacaagatctcttgcagtacctctgctcctccctagtcgtctcccttcaccatcaacaattccataccccgactcggaccgatg

SEQ ID NO: 5588 - DNA, 203 bp, synthetic construct
  source 1..203: mol_type = other DNA
ggcgcgccagtcctccctaggggacatgctccgagcctgccaagcatggacacccaaggacaaagcccgggtcctcgtcgtccaaccacgaaagcccccgcccacgcagccctgcttccgctgcgggaaaacagggcattggagccgagactgcaccctcccacgccccccccctggtccgtgtccctcgactcggaccgatg

SEQ ID NO: 5589 - DNA, 203 bp, synthetic construct
  source 1..203: mol_type = other DNA
ggcgcgccagtccttccgttagagcaacagcaccagccccttctagacgttcaagtctccattgcaggcgccccccctcgacctacccaggcactcttagacacgggggctgatctcaccgtcctgccccaggcccttgcccccgagtcagtaagtgtttctgatacaacggttctgggcgctggcggcgactcggaccgatg

SEQ ID NO: 5590 - DNA, 203 bp, synthetic construct
  source 1..203: mol_type = other DNA
ggcgcgccagtcctacagaccagctcccagttcaaactccttcaatcccccctgtgcgtctacctacccttccggagggcccctgttaccctcccatcatgccttgtagacaccaatagcaaatgggccattattggccgtgatatcctccagaaatgccagagtgtcctgtaccttccggaggacaacgactcggaccgatg

SEQ ID NO: 5591 - DNA, 203 bp, synthetic construct
  source 1..203: mol_type = other DNA
ggcgcgccagtccttctgtgcaagggtaccccccggctccccgatggaataactcctccccgattattacccgtgaccacccccaatgtcattggccttgagcacttcccaccacccccacagatagatcagttccctttaaacctgagcgcctccaggccttgactgacctggtctccaaggccctgcgactcggaccgatg

SEQ ID NO: 5592 - DNA, 203 bp, synthetic construct
  source 1..203: mol_type = other DNA
ggcgcgccagtcctgaggctagctacattgaaccttactctggaccaggtaataaccccgtctttccagtcaaaaaaccaaacggcaaatggagatttattcatgacctaagggccaccaatgccatcacgaccaccttggcctccccgtcccccggacctcccgatctcaccagcttatcaacagcccgactcggaccgatg

SEQ ID NO: 5593 - DNA, 203 bp, synthetic construct
  source 1..203: mol_type = other DNA
ggcgcgccagtcctctcccatacctgcaaactatagaccttactgacgccttcttccaaatcccccttccaaaacagttccagccatacttcgccttcaccatcccccagccatgtaattatggccctggggctcggtatgcctggactgtccttccacagggatttaaaaacagccccaccctgttccgactcggaccgatg

SEQ ID NO: 5594 - DNA, 203 bp, synthetic construct
  source 1..203: mol_type = other DNA
ggcgcgccagtcctgaacaacagctggccgccgtcctttcccccatcaggaaaaccttccctatgtctactatcatccaatatatggatgatatactcttggccagtcctacacaagaggaactgcaacaactctccaagatgaccctccaagcgctagtcacccacggccttccagtctctcaggagcgactcggaccgatg

SEQ ID NO: 5595 - DNA, 203 bp, synthetic construct
  source 1..203: mol_type = other DNA
ggcgcgccagtcctaaaacccaacaaacccctgggcaaatacgtttcctgggtcaagttatatctcccaaccatattacctatgaaaccacccccaccattcccatcaaatcccaatggactctcactgaactacagactgtactaggagagattcaatgggtctcaaaaggaacccccattctccgccgactcggaccgatg

SEQ ID NO: 5596 - DNA, 203 bp, synthetic construct
  source 1..203: mol_type = other DNA
ggcgcgccagtccttcgtctggcacaacctccgtcctcttccaagcccgacagcgatggcccctggtttggctgcacaccccccatcccccaaccagcctgtgcccctggggtcacttgctggcctgcactatcctgaccttggacaaatactccctccagcactatggccagctgtgccagtccttccgactcggaccgatg

SEQ ID NO: 5597 - DNA, 203 bp, synthetic construct
  source 1..203: mol_type = other DNA
ggcgcgccagtcctctccaccatattcgtagccacaccaatctccccgaccccatctccactcttaacgaatacacagactcactcattatagcccctctcattcccctaacacctcaggatctgcataaacttacccattgcaactccagggcccttgtttcctcaggggccaccccacagcaagcccgactcggaccgatg

SEQ ID NO: 5598 - DNA, 203 bp, synthetic construct
  source 1..203: mol_type = other DNA
ggcgcgccagtcctaacgcagtctccattacctgcaagacaaaagagactagttctgaaactgtcagcgccctcctgcacgctatcactatcttaggcaagcccctttctataaacactgacaatggttctgccttcctatctcaagaattccaggccttttgcgcctcatggcacatcaaacattcccgactcggaccgatg

SEQ ID NO: 5599 - DNA, 203 bp, synthetic construct
  source 1..203: mol_type = other DNA
ggcgcgccagtcctacccatgtgccttacaactctaccagctccgggctagtagaaaggaccaatggcattgttaaggccctcctcaacaaatatcttttagacagcccaaacctccccctagacaatgccatcagtaaagccctatggaccctaaaccaactcaatgtcatgtcgtcccagtggaaacgactcggaccgatg

SEQ ID NO: 5600 - DNA, 203 bp, synthetic construct
  source 1..203: mol_type = other DNA
ggcgcgccagtcctcacgcttacggtaggtgtctcctcgtatcactctagtccctgcagtcttgcccaacctatctgcacctgggatctcgaccttcattccttaactacagaccaacgtctgtaccctccatgccccaatctagtttcttactctaacttccacaagtcctactccttatatttgttcgactcggaccgatg

SEQ ID NO: 5601 - DNA, 203 bp, synthetic construct
  source 1..203: mol_type = other DNA
ggcgcgccagtcctagaggtcaaccatgtaaccctccggctacacttctcccgatgtggctcttctatgaccctcctcatagacgccccaggctacgaccccctgtggttcatctcttcggaacccactcagcccccccccacttccccaccattagtccgcgactctgaccttgaacatatcttaaccgactcggaccgatg

SEQ ID NO: 5602 - DNA, 203 bp, synthetic construct
  source 1..203: mol_type = other DNA
ggcgcgccagtcctcccctcctcctcctgggctactaggatgctaaccctcatccaactaactctacaaagtaccaattattcttgcatggtttgtatagacagaaccagcttgtcgtcctggcacgtactctatacccctaatatctctgcctcacctgggggcgactccttgcctatactttatcccgactcggaccgatg

SEQ ID NO: 5603 - DNA, 203 bp, synthetic construct
  source 1..203: mol_type = other DNA
ggcgcgccagtcctctccttggccctaccggccccccaaccccagccgttttcctggtctcactgttaccagccccacctacaggcagtaactacagccaattgcaacaattccattgtcctgcccccattctctctcaccccggtgccttcccctgggacaagaagccgccgggctattccagtggccgactcggaccgatg

SEQ ID NO: 5604 - DNA, 203 bp, synthetic construct
  source 1..203: mol_type = other DNA
ggcgcgccagtccttgtatggctcgtctcagccctagcggccgggactggtattgcagggggaataaccggatccctgtccctagcatcaagccgcagcctgctttttgaagttgacaaagatatttcccacctcacacaagccatcgttaaaaaccatcaaaacatcctccgcgtagcacaatatgccgactcggaccgatg

SEQ ID NO: 5605 - DNA, 203 bp, synthetic construct
  source 1..203: mol_type = other DNA
ggcgcgccagtcctgctccccctccaagacactgatatatccctctaacatctcacaatacccttcaaaccccagcaaccctatacactctaactgttgatgtctcttttcgcgctctcgacgcttttcttccttctcccgcagccgctcccttctgcgctgctccttctcctcgcgttgtttcagaacgactcggaccgatg

SEQ ID NO: 5606 - DNA, 203 bp, synthetic construct
  source 1..203: mol_type = other DNA
ggcgcgccagtccttttccatgatttccttctgctcttccgccagcgccctccggcgaccatcccgtacatcctctccgaccgaccctgatcctaagggtcgcccccgtgttgtctttctcaggcctcctccagaacacgatacaccagtcaccaccacctcaggatcccccaatggcagccttctgacgactcggaccgatg

SEQ ID NO: 5607 - DNA, 203 bp, synthetic construct
  source 1..203: mol_type = other DNA
ggcgcgccagtcctaatactctaaacaaaatacatgcctttcttcagcccactttccaggtttcggacagagcctcctctatggatacccagtctacgtgtttggcgattgtgttcaagccgattggtgtcccgtttcaggtgggctttgttccacccgcctgcaccggcatgcccttctcgccacctcgactcggaccgatg

SEQ ID NO: 5608 - DNA, 203 bp, synthetic construct
  source 1..203: mol_type = other DNA
ggcgcgccagtcctgcccggagcaccagctcacctgggaccccatcgatggacgcgttgtcggctctcctctccaataccttatccctcggctcccctccttccccacccagagaacctccaagaccctcaaggtcctcactccccctaccactcctgtctcccccaagattccacccgcctttttcccgactcggaccgatg

SEQ ID NO: 5609 - DNA, 203 bp, synthetic construct
  source 1..203: mol_type = other DNA
ggcgcgccagtcctaatccatgcgtaaactctccccctaccggaacgggtgcctatacccaactctcggagaccagctcccctcccttgccttccccgaccccggtctccggccccaaaacatctacaccacctggggaagaaccgtagtttgcttgtacctctaccaactatctcccccgatgacctcgactcggaccgatg

SEQ ID NO: 5610 - DNA, 203 bp, synthetic construct
  source 1..203: mol_type = other DNA
ggcgcgccagtcctccccctgcgtccagacggcttgggacacggggcttttaccctaccactctctcataactactccaggcctaatatggacgttcaatgacggttcgcccatgatttccggcccctgccccaaaccggggcagccatctttggtggtacaatcctccctgttaatctttgaaaaatcgactcggaccgatg

SEQ ID NO: 5611 - DNA, 203 bp, synthetic construct
  source 1..203: mol_type = other DNA
ggcgcgccagtccttttatatcgtgtgtacatataaatatgtacacacggcttttaggtagaatattgttttcaatgttgattttaaaggtaactttggttattatgctttacggttttcattgttgatggtatttgtggcctgcggtccctaattgttgaattatttattctgatacgttgttttcacgactcggaccgatg

SEQ ID NO: 5612 - DNA, 203 bp, synthetic construct
  source 1..203: mol_type = other DNA
ggcgcgccagtccttgtgtatgatctatacgcacatttagttcccagagggcgttgtcgtctccccctaagcaagggagaaacacgtggcacatgatcttgcgcttaacgataaaaatggaatctgataaaagtatggcctgtttaaatagaattttgatgaataagatgatgtttgtggaagataagcgactcggaccgatg

SEQ ID NO: 5613 - DNA, 203 bp, synthetic construct
  source 1..203: mol_type = other DNA
ggcgcgccagtcctatctctacccttaagatggttgctgattattatcaaaaagaagtaaagtatgattttgatgcagttgaatctccccgtgaggcacctgtatttagatgtacttgtcgattccttggttataccattatgactcaaggcatcggtaagaagaatccgaaacaggaagctgcacgtcgactcggaccgatg

SEQ ID NO: 5614 - DNA, 203 bp, synthetic construct
  source 1..203: mol_type = other DNA
ggcgcgccagtcctcagatgttgctcttgttatcaggagatgttgagactaaccctggacccgttcaatcgcgccccgtgtattatcgttacaacgaccctagatatacacggttggaaaaagctattgaacgtcgagacgataaaattaaaacattaattaaagagttgcgtcgacaaatcaaaaatcgactcggaccgatg

SEQ ID NO: 5615 - DNA, 203 bp, synthetic construct
  source 1..203: mol_type = other DNA
ggcgcgccagtcctgaattggatcaacggaataaaattgatctagatactgaaaccgcaaatcgtgttgaacaactttggataaagggcttgaaattcaagagtgaaccccttttgagtaaggaaatgtcagctttagttcatacaactcttttaccagctaagcaattgtacgagtatgtatcgtgtcgactcggaccgatg

SEQ ID NO: 5616 - DNA, 203 bp, synthetic construct
  source 1..203: mol_type = other DNA
ggcgcgccagtccttctcctgttaaagggggaggaccacgtatgcgtccaatttgtttatggttggtaggtgaatcaggagttggtaagactgaaatggtatatccattgtgcattgatgttcttcgggaaatggggatgattaagaaagatgattttcatcatcaagtttatggtcgtcaagttgaacgactcggaccgatg

SEQ ID NO: 5617 - DNA, 203 bp, synthetic construct
  source 1..203: mol_type = other DNA
ggcgcgccagtccttggttaggtcgattctttttgagtcgagatcgcaagaataaggttggaatttgggccgaagtgggacaatcaggtgatgttaaaacaaataaagctcagattaaacgtgttgaagctggagccgaagaattagttactgttgctttaactcaaggttgttctgatgatgctgcacgactcggaccgatg

SEQ ID NO: 5618 - DNA, 203 bp, synthetic construct
  source 1..203: mol_type = other DNA
ggcgcgccagtcctcaggcagttaattcgtccataattccttctcgaatttatgggaagttgtctgttcctacaatgaaaccagcactactcaagccaacgattctgaataacaaagtacataatcctttattgtcgggacttaagaaatgtggtgtagacactgcggtcttgagtgatgatgaagttcgactcggaccgatg

SEQ ID NO: 5619 - DNA, 203 bp, synthetic construct
  source 1..203: mol_type = other DNA
ggcgcgccagtcctatgaaaagaaatgctccaggtaaacagcaatggatgggttttggtgaagaatttgattttacaagtaattatgcactagctttgcggaaagatgttgaacaactcattgaagattgtgctagcggaaaaatatctaatgtcatttttgtagatacattgaaagatgagcgacgccgactcggaccgatg

SEQ ID NO: 5620 - DNA, 203 bp, synthetic construct
  source 1..203: mol_type = other DNA
ggcgcgccagtcctgcaaaacgtcttaaaacaaaaggtagtcacgtcattgcgggggactttggaaatttcgatggatctttagtagcacaaattttgtgggccatattttgggaaatttttgttgtatggcttaagcaatttattgatatagagaattcagaaggaaaacgtattttatgtatctgtcgactcggaccgatg

SEQ ID NO: 5621 - DNA, 203 bp, synthetic construct
  source 1..203: mol_type = other DNA
ggcgcgccagtcctaaatctcgtaaattagaagatattttctttttgaagagaaaatttcgttttagcccagaattacaacgccatgttgctccattgaagatcgaagttatttatgaaatgttgaattggtctcgccgctctatagatccagatgaaatcttgatgtcgaacattgaaacggcttttcgactcggaccgatg

SEQ ID NO: 5622 - DNA, 203 bp, synthetic construct
  source 1..203: mol_type = other DNA
ggcgcgccagtcctgtgaatcgaaactgcgtggtcaagttcgaatggcgaattttgatggcgctgatacatcacataaattggctttgtctgcccaaaacgaaattgaaacaaaatctggactttctggaacttctcctgatgaaatggatttatcacacgtcctttccataccaaatttttgggatccgactcggaccgatg

SEQ ID NO: 5623 - DNA, 203 bp, synthetic construct
  source 1..203: mol_type = other DNA
ggcgcgccagtcctaatttgttaagactcaatttcattctggacgtttacgcattagttttattccattttattataatacgactatatctgcaggagttcccgatgtttctcgtacccaaaaagtaatcgttgatctgcgcacctctacagaagtctctttcactattccgtatgtgtcttcacgaccgactcggaccgatg

SEQ ID NO: 5624 - DNA, 203 bp, synthetic construct
  source 1..203: mol_type = other DNA
ggcgcgccagtccttgggtgaagatttagctattcaaagaaacgatgctcaacatggtgttcatccaatgactatagacactcataagatcgactcaaattggtctccggaagcgcattgtattggtgaaaagattatgtctattcgccaattgattaagcgttttggcatggctttgaactccttgacgactcggaccgatg

SEQ ID NO: 5625 - DNA, 203 bp, synthetic construct
  source 1..203: mol_type = other DNA
ggcgcgccagtcctaagtttctttttggttttgggttttattcagtaactatctgccctgcttacacgggtattatttttaattcttgtcccttctggactcttttattttgtattttcaaaatttttactaatttttagtcagagtccttaggggctaccaggtttttcgcaattttcctgcttactcgactcggaccgatg

SEQ ID NO: 5626 - DNA, 203 bp, synthetic construct
  source 1..203: mol_type = other DNA
ggcgcgccagtcctgccgggtggaaggcccggaaccgccccaccacctcaactaggtggtaagggtacgtctatgggtccggctggcccgaaaggcggtggatcctgtgtgttagggttcgtaggtggtaaatcccagcacaggtggtaatcgctatagggcaggcttatcccggtgaccgcttccctcgactcggaccgatg

SEQ ID NO: 5627 - DNA, 203 bp, synthetic construct
  source 1..203: mol_type = other DNA
ggcgcgccagtcctactgtgtgtacacagtcttgctggactctctacagacctggagttgctacgcggcctggctcccagcccggagagcttcttgggaagtttggcggagccttaggcccggtggcctcagctgcttacacagcaggggtcttgggcctgggtgaaccattctccctcgctttctgtcgactcggaccgatg

SEQ ID NO: 5628 - DNA, 203 bp, synthetic construct
  source 1..203: mol_type = other DNA
ggcgcgccagtccttttggcgactgggtgccattgtatgatgagctgcccaggagtgctctttgcaccttctatgcggggaccggcaggtatccggctgatgttgatgtcttgaatccctccggtcctccatgtgctagttgtgtcgtggaccagagaccacggaaatgtggtgactgtgtccgcgaccgactcggaccgatg

SEQ ID NO: 5629 - DNA, 203 bp, synthetic construct
  source 1..203: mol_type = other DNA
ggcgcgccagtcctaagaagcttggggtcaacatgactgtgagccagataggaggttattggcacgcccttcagtgtccatgtgattttacacctggtccgctaccagagcggattcccggaatcccagtgaatgcttgcatcaccggaaaggccgcgcacccattctctgcgtgggcgccggggggtcgactcggaccgatg

SEQ ID NO: 5630 - DNA, 203 bp, synthetic construct
  source 1..203: mol_type = other DNA
ggcgcgccagtcctgtcaagcctttgccctgcccgaactcgaccacgggcttgggtgattcagtcagtaacgccgcctgcttcgctggttccgacttgtggctcggggtcggtggtgcttggtcggccctttctggcgccacgtccgctgtcgccagttgggtcggctcggcctaccggaccttgcaccgactcggaccgatg

SEQ ID NO: 5631 - DNA, 203 bp, synthetic construct
  source 1..203: mol_type = other DNA
ggcgcgccagtcctaatgtgggtctcggcgtgagatggttggcatcggtgggctcttacctaccgaccgtggaggccgcgctggctcctgagctggtgtgtgctcccgtggttggttggggggcacaggagtcttggttcgtggggttcctagcagtgtgttgtgtggtcgcttaccttggggttctccgactcggaccgatg

SEQ ID NO: 5632 - DNA, 203 bp, synthetic construct
  source 1..203: mol_type = other DNA
ggcgcgccagtcctggcactgccagatgctgcgtgctggtggcgatgcacttcgcaagaggtgcgctgcccctagtcatgctagtgttggcaggggtgtcgcgagagcggcattccgtcttgggtctcgaggtttgcttcaacttggagggcactggttgggactggagtgactactggtggtgtgtgcgactcggaccgatg

SEQ ID NO: 5633 - DNA, 203 bp, synthetic construct
  source 1..203: mol_type = other DNA
ggcgcgccagtcctgctggggtggtgtcttgggcccttgtcaccatgggtctcttgacccacggtggcaaggaggtgaagcttaggtggtatcgcacctggtgcgtgttctaccaaaaggttcgcctgcgcctgttggacactcccataggcaaccgcccccgccggcctttgtgcaaactgtggctgcgactcggaccgatg

SEQ ID NO: 5634 - DNA, 203 bp, synthetic construct
  source 1..203: mol_type = other DNA
ggcgcgccagtcctggtgccacacacctggccgagcgcctacgtcgcaggggggtattcctgtttgagcacgctggacatgtcacacggccagcggcagagcggttgcgggaatggggttttgccctagagcccgtcgctgtgaagccagaggactgtgccatagttcgggatgccgcacgagtgttgcgactcggaccgatg

SEQ ID NO: 5635 - DNA, 203 bp, synthetic construct
  source 1..203: mol_type = other DNA
ggcgcgccagtcctggttgtggtcagagagtgaatggtgtgcctgtggtcgcccgtaggggagacgaagtgctcatagggtgcttgtccagcaggttcgacctcccacccgggttcgtgccgacggctcctgtcgtcgtgcaccaccaggggaaggggttttttggggtcgtcaagacctcaatgacccgactcggaccgatg

SEQ ID NO: 5636 - DNA, 203 bp, synthetic construct
  source 1..203: mol_type = other DNA
ggcgcgccagtcctgatgtgtgtgtatacccattgccaatgggggctacctgcttggaaccttgcaaatgctcaccgcagggcgtttgggtcgtgagaaacgacggagcgctctgccatggcactctcgggaagactgttgagctggacctaccagctgagctgtgtgacttccgggggtcgtctggccgactcggaccgatg

SEQ ID NO: 5637 - DNA, 203 bp, synthetic construct
  source 1..203: mol_type = other DNA
ggcgcgccagtcctactgcttattctaggactactcaatctaacctgacttactgtacttatggaagattcatggcaaatcccagaaagtacctccgcggccatgacgtggtgatctgcgacgagtgtcactcgactgacggcgttagtgttctgggcatgggacgtgcccggttgctggcgaaagaacgactcggaccgatg

SEQ ID NO: 5638 - DNA, 203 bp, synthetic construct
  source 1..203: mol_type = other DNA
ggcgcgccagtccttgtcgggttcgcttgttgctgtttgccactgcgacccctccgggggccccaatggccgcacatgacaatattactgaggagccccttgacaccgaaggggagatcaccttttatggacacaggttgccagttgcaagatacgccactgggagacacctgcttttctgccactcacgactcggaccgatg

SEQ ID NO: 5639 - DNA, 203 bp, synthetic construct
  source 1..203: mol_type = other DNA
ggcgcgccagtcctatggtggaggaggtggtcgaggtcaccttggaccccaccataacaatttcactgcggacagtgccagcaccagcagagttgaggatgcaacgcagggggcggtgtggacgtggtaggaccggacactactactccgcgctggctgctgcagcgccggcaggtaccgtgcgctctcgactcggaccgatg

SEQ ID NO: 5640 - DNA, 203 bp, synthetic construct
  source 1..203: mol_type = other DNA
ggcgcgccagtcctcaggcctcaacgggtctggccatggcgggtgcttacttcgccggggggtcgataaccagctcttggttgagcatcatcataaccctgcttggtggttgggagggcgccgttaacgcggcctctctcacttttgacctcctttctggcaaggcagaggccaaggacgcctggtgccgactcggaccgatg

SEQ ID NO: 5641 - DNA, 203 bp, synthetic construct
  source 1..203: mol_type = other DNA
ggcgcgccagtcctgctgttaaagccagtccctgcttcgccggtgatttgcctgtctcttgggaggccccaatctgtaggccagcaatggtctataggggaggccagactatccagctggatggagtgcgccgtacgttgccttgtggcttgccacttggagcgcgcccccctcctcggcaggagcaacgactcggaccgatg

SEQ ID NO: 5642 - DNA, 203 bp, synthetic construct
  source 1..203: mol_type = other DNA
ggcgcgccagtcctcccacccatgtgagcaactggagcaaggaggaggaagctgagcttcagtgtgcgaaggctgctgctattgaggctatagggtctgcactgcatctccctagccaagaggctgcggaagcagccttgcaggctctggaggatgctgctgtgtccctactgccccatgtgcctgtccgactcggaccgatg

SEQ ID NO: 5643 - DNA, 203 bp, synthetic construct
  source 1..203: mol_type = other DNA
ggcgcgccagtcctcgtgcggaatcaatcaacgatctgcgcgcgcccctcgcgagcttcgacagcatgccaagccttgaaacgtcagactccatgccatcattggagtccagctctggatccagctttgaggttgtctcgttgaccgagtctgaaccagaaactgtgatcgagggaggtttgaccctccgactcggaccgatg

SEQ ID NO: 5644 - DNA, 203 bp, synthetic construct
  source 1..203: mol_type = other DNA
ggcgcgccagtcctaagaaacatccggctgcgataactgtggatgccacttgctttgattcgtcaatcgacgaacatgacatgcaggtggaagctgcaatcttcgcggccgctagtgacgaccccgtccgggtgcatgctttgtgcaggtactatgtcgagggccccatggtgtcaccggatggcgtgcgactcggaccgatg

SEQ ID NO: 5645 - DNA, 203 bp, synthetic construct
  source 1..203: mol_type = other DNA
ggcgcgccagtcctaggacccttctacggattggtatgagttccccaccccgtaacttagaagtactagcaaaaccgaccaataggagcgtggcacccagctgcgttaaggtcaagcacttctgtctccccggccagaaatggtcgtcacccgccctctctactacgagaagcctattaaccattgaacgactcggaccgatg

SEQ ID NO: 5646 - DNA, 203 bp, synthetic construct
  source 1..203: mol_type = other DNA
ggcgcgccagtcctattcagcaaccctgatattaccatacgtgaatgccattccgatggactcggccattaggcattcaaattggacactagctatcattccagttgcacccttgaaatatgcagccgagaccacgccgcttgtccccattactgtgactatcgcaccgatggagacggagtacaacgcgactcggaccgatg

SEQ ID NO: 5647 - DNA, 203 bp, synthetic construct
  source 1..203: mol_type = other DNA
ggcgcgccagtcctttgagtctatccttgaggccaacaacagggaaggggtagagggtgttgagcggtatgtcatcccagtaagtgttcaggacgcattggatgcccagatttatgccctaagacttgagcttggcggaagtggccctctctcctccagccttctaggtaccttagcaaagcattatacgactcggaccgatg

SEQ ID NO: 5648 - DNA, 203 bp, synthetic construct
  source 1..203: mol_type = other DNA
ggcgcgccagtcctcccaatggagtgggtcagtggagatcacctgcatgttcactggcaccttcatgacaacaggaaaggtcctcttggcatacacacctccaggtggagatatgcctaggaatagagaagaagccatgcttggaacgcatgttgtctgggactttggtctacaatcatcaataacctcgactcggaccgatg

SEQ ID NO: 5649 - DNA, 203 bp, synthetic construct
  source 1..203: mol_type = other DNA
ggcgcgccagtccttggtcataccttggatctctgcatcacattttagaggagtcagtaatgacgatgtgctgaattaccaatattatgcagcaggtcatgtcaccatctggtaccaaacaaacatggtaatccctccgggattccctaacacggcaggcataatcatgatgattgccgcacagccaacgactcggaccgatg

SEQ ID NO: 5650 - DNA, 203 bp, synthetic construct
  source 1..203: mol_type = other DNA
ggcgcgccagtcctaggccgctgagactggtgccacgtcaactgccagggatgagagcatgattgagacccgcactattgtgccgactcacggtatccacgagacaagtgtggagagtttctttggacgctcctcactcgtgggtatgccgctgctggccactggcaccagtatcaccaactggcgcacgactcggaccgatg

SEQ ID NO: 5651 - DNA, 203 bp, synthetic construct
  source 1..203: mol_type = other DNA
ggcgcgccagtcctatcaagactcatttcagtggcaatctgggtgcaacccctcggtattcgcggacacggacggaccacctgcccaattctcagtacccttcatgagctcagccaatgcgtattccacggtttatgatgggtacgcacgattcatggacactgacccagatagatatggcatcctcccgactcggaccgatg

SEQ ID NO: 5652 - DNA, 203 bp, synthetic construct
  source 1..203: mol_type = other DNA
ggcgcgccagtcctacgggtgtgacaccatcgctcgatgcaattgcagatctggtatctattactgcaaatccacagccaagcactatcctattgtagtcacgcccccatctatctacaagattgaggccaacgattattacccagaaagaatgcaaactcacatccttcttgggattggcttcgctgcgactcggaccgatg

SEQ ID NO: 5653 - DNA, 203 bp, synthetic construct
  source 1..203: mol_type = other DNA
ggcgcgccagtcctttctaggttgtgaaggctctccatggaaatggctgaagagaaaggtttgccaaattcttggaatcaacatggcagaaaggcagtcagacaactggatgaaaaagttcactgagatgtgcaacgccttcagaggcctagactggatcgcagcaaaaatctccaagtttattgattcgactcggaccgatg

SEQ ID NO: 5654 - DNA, 203 bp, synthetic construct
  source 1..203: mol_type = other DNA
ggcgcgccagtcctagaacgccccgctttatgccgcagaagctaagcgcgtctaccatctagagaagcgcgtcctccgtgccatgcagttcaagaccaagaaccgcattgaacctgtatgtgcactgattcatggctcacctggtaccggtcagtcgttggctactatgatagtaggaagaaaactggcgactcggaccgatg

SEQ ID NO: 5655 - DNA, 203 bp, synthetic construct
  source 1..203: mol_type = other DNA
ggcgcgccagtccttcactgaacttaagcttgagcgcaacgtgaaccgtgcgctggcagtcattcagagtgtgtctctcattgctgcagtggctgggaccatttacatagtttatcgcctcttttctggtatgcagggcccttactcaggtatcggcacaaactacgccacaaagaaaccagtggtaacgactcggaccgatg

SEQ ID NO: 5656 - DNA, 203 bp, synthetic construct
  source 1..203: mol_type = other DNA
ggcgcgccagtcctagctttttacctgcgtggggcgtgtcaaggactacggattcctgaaccttgctggcaggccaacacatagagttttgatgtatgaattccccaccaaggcaggccaatgcggtggtgtggttattagcatgggtaagatagtgggtgtccacgtaggaggtaacggtgcccaagcgactcggaccgatg

SEQ ID NO: 5657 - DNA, 203 bp, synthetic construct
  source 1..203: mol_type = other DNA
ggcgcgccagtcctgttttgccgcctcccttctacgcaggtactttacagcagaacaaggacaaattgaatatatcgagaagagtaaagatgccgggtaccccgtgatcaatgcacccacccaaaccaaattagagcccagtgttttctttgatgttttccccggggtgaaagaaccagcggtactcccgactcggaccgatg

SEQ ID NO: 5658 - DNA, 203 bp, synthetic construct
  source 1..203: mol_type = other DNA
ggcgcgccagtcctatgaactcagggcgccagataagatcaggaaaggaaaaagccgtttgatagaggcatctagcttgaatgattcagtagccatgcggtgctactttgggaacctctacaaggttttccacaccaaccctggaaccatctccggctgtgccgttggatgcgaccctgaaaccttctcgactcggaccgatg

SEQ ID NO: 5659 - DNA, 203 bp, synthetic construct
  source 1..203: mol_type = other DNA
ggcgcgccagtcctctaacgattacgcgaacctgaatgaagcagaaggcttcatttggtgaccccgacgtgatcgttagggaatagtggtcggccacaggcgtggcgatcctgccctcatccgtctcgcttaacggagcaggacgatgaccctagtagagggggctgcggcttaggagggcagaagctcgactcggaccgatg

SEQ ID NO: 5660 - DNA, 203 bp, synthetic construct
  source 1..203: mol_type = other DNA
ggcgcgccagtcctgagtgacgtcggagggagctccacggccggggggcaagataacctaccgagaactcagagagtcgttggaagacgggaaggaagcccgacgactgagcagtccaccccaggcgttgattctggtcgcccggtggatcaaagcatggaagccgtcataaaggtgatttcgtccgccgactcggaccgatg

SEQ ID NO: 5661 - DNA, 203 bp, synthetic construct
  source 1..203: mol_type = other DNA
ggcgcgccagtcctacctgccccatatgccttatggatggacgcttggggagtccaactccagacggttatagcggcggccactcgcgacccccgacacccagcgaacggtcaaggacggggggaacggactaacttggatcgcttaaagggcttagctgatgggatggtgggcaacccacagggtcacgactcggaccgatg

SEQ ID NO: 5662 - DNA, 203 bp, synthetic construct
  source 1..203: mol_type = other DNA
ggcgcgccagtcctagacctcccgccttccgcgcgggctccggtgatcattgactgctttaggcagaagtcacagccagatatccagcagcttatacgggcagcaccctccacagtgcacggccaggcagcagccgccgcgatgccgctcagcgccagcctccccagcaagaactacgattacgactacgactcggaccgatg

SEQ ID NO: 5663 - DNA, 203 bp, synthetic construct
  source 1..203: mol_type = other DNA
ggcgcgccagtcctcgactcggtgcagccctacttctacttcgaggaggaggaggagaacttctacctggcggcgcagcagcggggcagcgagctgcagcctcccgccccgtccgaggacatctggaagaagtttgagctcctgcccatgccgcccctctcgcccagccgccgctccagcctggccgccgactcggaccgatg

SEQ ID NO: 5664 - DNA, 203 bp, synthetic construct
  source 1..203: mol_type = other DNA
ggcgcgccagtcctcgagtctgaatccagcacagagtccagcacagaagcatcagaggagcactgtaagccccaccacagtccgctggtcctcaagcggtgtcacgtcaacatccaccaacacaactacgctgctcctccctccaccaaggtggaatacccagccgccaagaggctaaagttggacagcgactcggaccgatg

SEQ ID NO: 5665 - DNA, 203 bp, synthetic construct
  source 1..203: mol_type = other DNA
ggcgcgccagtcctcgagaaggcgcccaaggttgtcatcctgaaaaaagccacggagtacgttctgtctctccaatcggacgagcacaaactgatcgcagagaaagagcagttgaggcggaggagagaacagttgaaacacaaccttgagcagctaaggaactctcgtgcataggaactcttggacatcgactcggaccgatg

SEQ ID NO: 5666 - DNA, 203 bp, synthetic construct
  source 1..203: mol_type = other DNA
ggcgcgccagtcctaaaactgcctcataattgatactttgggcataagggatgatgggacattcttcatgcttggggatgaactcttcaacttttttcttttaaaattttgtatttaaggcattcctggtggccctgataacagcacaaccctcacctatcggaaggtttcgtgcttgttgttaaagccgactcggaccgatg

SEQ ID NO: 5667 - DNA, 203 bp, synthetic construct
  source 1..203: mol_type = other DNA
ggcgcgccagtcctttaaaattttgtatttaaggcattcctggtggccctgataacagcacaaccctcacctatcggaaggtttcgtgcttgttgttaaagctgaacgtttctctttagacgagccatcagaactacaactattaggttcccagtctctccccattataactaatattactcggatcccgactcggaccgatg

SEQ ID NO: 5668 - DNA, 203 bp, synthetic construct
  source 1..203: mol_type = other DNA
ggcgcgccagtcctggtctcactccctcacagttgctgtggtgttgtgattcctcttctgcagaagatattaataaagtgtataacagacaaatgtgactggcctgggctgctttcctttcttcgaacatggatataatttagataagtgaatttgaattaacattttggtgccgtgacccggattctcgactcggaccgatg

SEQ ID NO: 5669 - DNA, 203 bp, synthetic construct
  source 1..203: mol_type = other DNA
ggcgcgccagtcctcatacccctcatgcagcattacctaaacttgcaaagcagacaggatgcaaaaattaaacaaactcccctagtcttacagcttgcgatgccagcgcagaccatgaacgggaataaaggatatgtaggctcttaccctacaaacgaaccatattattcgttccagcaacaacagcgcgactcggaccgatg

SEQ ID NO: 5670 - DNA, 203 bp, synthetic construct
  source 1..203: mol_type = other DNA
ggcgcgccagtcctacctgcaccaagggccccacctggaaatgtacccagcaatacctgcttcttttgcaaacaaccgggtcattggaaagctgactgccccaataaaacacgtaatcttagaaacatgggaaatatgggacgaggcggaaggatgggaggccctccgtataggtcacaaccataccccgactcggaccgatg

SEQ ID NO: 5671 - DNA, 203 bp, synthetic construct
  source 1..203: mol_type = other DNA
ggcgcgccagtcctcgcatttatacaacctcctcaaaaccaccaaaaccaatataatggccgcatggaccggtcacagctacaagcctctgctcaagagtggcttcccggtacatatcctgcataggatccaattgactgtccttatgaaaaatctggtacaaaaacaacccaagatgtaattaccaccgactcggaccgatg

SEQ ID NO: 5672 - DNA, 203 bp, synthetic construct
  source 1..203: mol_type = other DNA
ggcgcgccagtccttaaaaatgctgaaattatggttacagtaaaccacacgaaaattcctatgttggtagatacaggcgcctgcctgactgcaataggaggggcggccacagtggttcccgacctcaaattaacaaacacagaaattatagctgttggtatttccgctgaaccagttccacatgtcttcgactcggaccgatg

SEQ ID NO: 5673 - DNA, 203 bp, synthetic construct
  source 1..203: mol_type = other DNA
ggcgcgccagtccttaaagataaaaccgaaggactaaggccattaattagttcactagaaaatcaaggaatattgataaaatgccatagcccatgtaatacaccaatctttcctattaagaaagcaggtcgggatgagtatcgaatgatacatgacttacgcgcaataaataatatagttgcccccctcgactcggaccgatg

SEQ ID NO: 5674 - DNA, 203 bp, synthetic construct
  source 1..203: mol_type = other DNA
ggcgcgccagtccttccggcgcacttatatatgcagtcttgtgaaaataatattccgcctcatgactgcgttttacttacccacacgatctccaggccccgacctgatttatctgatctcccaatacctgaccctgatatgactctgttttctgatggctcttatacaaccggcagaggaggagcggccgactcggaccgatg

SEQ ID NO: 5675 - DNA, 203 bp, synthetic construct
  source 1..203: mol_type = other DNA
ggcgcgccagtcctaccttttctgatcctcctctctacaccaacggcggtaaaagttgaaggacgaccaacatggatacacctggatcattgcaagttattgcgatcatctctctcctcctcgttgggggggccagtcaaccagctactttcttagagaaagcacttccgactgatggtcccagcctgcgactcggaccgatg

SEQ ID NO: 5676 - DNA, 203 bp, synthetic construct
  source 1..203: mol_type = other DNA
ggcgcgccagtcctttcgtaataaaacaatgcagaaagaaacgaggaaaaagacagatcacggtacctaacagcaccctttcccccacaggtactacagacttcacaaaatttacccctaatcctatatctcccaacagtacggccctgaatgagcttgagcaaaagactacaccaataggaacagagcgactcggaccgatg

SEQ ID NO: 5677 - DNA, 203 bp, synthetic construct
  source 1..203: mol_type = other DNA
ggcgcgccagtcctctaaaacagggccagatagcattgattcgacatcacgaggctattactaccattcttggacaagaggcaacatatagcattaaagaaacacaggcattaatttcatctatcgaacaagaggcatggtataataatttattctcttggtatgacggctctgtatggtcacagctacgactcggaccgatg

SEQ ID NO: 5678 - DNA, 203 bp, synthetic construct
  source 1..203: mol_type = other DNA
ggcgcgccagtcctttcactctggcttatggatgtgacgagtcagcaggatgggttaaccaacatgctgaatacatgggaaagccggtaatcgtgacattggcgggcctagtaattacgcctgtgggtttggcttggataccactcccacaacaagaaccattggaaaagttatttatggtccccaatcgactcggaccgatg

SEQ ID NO: 5679 - DNA, 203 bp, synthetic construct
  source 1..203: mol_type = other DNA
ggcgcgccagtcctagcatgccacatgtcaccgtggccatggccgattatcatgagacaaaagaaatgggcaaaattgtgaaagacataaacaacgaagaacttcttttggtaaaaccacaactctttaagtgggaccgaagggttttttgtagcctgtccccttgttataagaggagttgtcactggcgactcggaccgatg

SEQ ID NO: 5680 - DNA, 203 bp, synthetic construct
  source 1..203: mol_type = other DNA
ggcgcgccagtcctccaagccgaaaatgacttactacacccttacatgtaccattacattaaactatcttatcgacacagaacacccgactatcactccagtccggcccttcgagcggcagtagttattgctgcggccgtaaaaggtgcagatctgttagaaatgaatatgctcttcataatgatgtacgactcggaccgatg

SEQ ID NO: 5681 - DNA, 203 bp, synthetic construct
  source 1..203: mol_type = other DNA
ggcgcgccagtcctattagatgatgtgatggcagtactggaggcagaggttgcaatcacgataaccacagccactgaaggcacggacgctgaagacacgagtgaggtcgacgtcatcaacgtcgtcgatccaataggataactatgttttcagactcagattcctcggacgaggaactaagcagaatacgactcggaccgatg

SEQ ID NO: 5682 - DNA, 203 bp, synthetic construct
  source 1..203: mol_type = other DNA
ggcgcgccagtccttacacaatcatgaatagatacacgggggaatcaatagcagaaatgcacactgggtttaggtgtttcagggatcaaatgatagcctatgatatggagtttaccaattttctcagggatctgacagaggaagaaactccagtattagagataaccgaaccagagcccagccctacgcgactcggaccgatg

SEQ ID NO: 5683 - DNA, 203 bp, synthetic construct
  source 1..203: mol_type = other DNA
ggcgcgccagtcctgtttgtcattatattgttgacacttaggaaagtgctgtataggcctaaagtagaaataacaactgatcgtggaacagttggtgctgaatgcatgttgccttcaaacagtgttttcttcaaacagtatttacttctgagaatccatgaaagtatataacggttgcttgttggtaacgactcggaccgatg

SEQ ID NO: 5684 - DNA, 203 bp, synthetic construct
  source 1..203: mol_type = other DNA
ggcgcgccagtcctcattatattgttgacacttaggaaagtgctgtataggcctaaagtagaaataacaactgatcgtggaacagttggtgctgaatgcatgttgccttcaaacagtgttttcttcaaacagtatttacttctgagaatccatgaaagtatataacggttgcttgttggtaagaacggcgactcggaccgatg

SEQ ID NO: 5685 - DNA, 203 bp, synthetic construct
  source 1..203: mol_type = other DNA
ggcgcgccagtcctggaccttaccttactgaggaaggatggctcgagaattaaatcctctccaattacagcaactgtatataaataatggcttacaacctaatccaggacatggagatattattgctgtcagatttacaggaggaccttggggtccaggtgatagatgggctagagtgacaatacgatcgactcggaccgatg

SEQ ID NO: 5686 - DNA, 203 bp, synthetic construct
  source 1..203: mol_type = other DNA
ggcgcgccagtccttagtagcatctcatcccggcctaacgttgactgagaatgaggccgggagctggaatgctgccatatcagctttatggaggaaagctcacggtgctgcagctcagcatgaattggcaggagtattaagtgatattaataaaaaggaaggcatacaaactgcattcaacctaggaacgactcggaccgatg

SEQ ID NO: 5687 - DNA, 203 bp, synthetic construct
  source 1..203: mol_type = other DNA
ggcgcgccagtcctagagagatcagagaggaccgtcgcaacctcctcgtggaagtggaggaggatataattttagaagaaatccgcagcagcctcagcgctacggccaaggaccaccaggaccaaacccgtaccgacgattcggagacggcggtaatcctcaacagcagggaccaccaccaaaccgagcgactcggaccgatg

SEQ ID NO: 5688 - DNA, 203 bp, synthetic construct
  source 1..203: mol_type = other DNA
ggcgcgccagtcctgatttatccaatggtttctgggcacaccccatagtcccagaggattattggattactgcattcacttggcaaggaaaacaatattgttggactgttttaccacaaggttttttaaacagccctgggttgtttactggagatgttgtagatcttctacagggaattcccaacgtgcgactcggaccgatg

SEQ ID NO: 5689 - DNA, 203 bp, synthetic construct
  source 1..203: mol_type = other DNA
ggcgcgccagtcctcccacctgctctggttggtcaccatacgttggccagctggtccaggagagggtgtacaggccgtcacaattaaggcctaagtggaggaagcctacaaaggtcttggaaatattgaatcctagaactgtgattatagtggaccatctaggccaacggaaatctgtgagtattgaccgactcggaccgatg

SEQ ID NO: 5690 - DNA, 203 bp, synthetic construct
  source 1..203: mol_type = other DNA
ggcgcgccagtccttttggttttatcaagtactacagactgtggcataccagcttacgtgcctgtggttataacggtgaatgacacaatcagctgttttgataaagagtttaaaaggccacttaaacaggaactaaaagtaacaaaatatgcaccatccgttcctcaattagaactaagagttcctcgcgactcggaccgatg

SEQ ID NO: 5691 - DNA, 203 bp, synthetic construct
  source 1..203: mol_type = other DNA
ggcgcgccagtcctttatcctttggagggaagcaaaagttgtattatatatgcaaccaatgtcataaaggaattcctgaaagtggatacataactctcaatactaaatattatctatatgagaaaggacctactgagactggcaccaaaggtctaactcttatgagaaggcatgtgcaaaattcccctcgactcggaccgatg

SEQ ID NO: 5692 - DNA, 203 bp, synthetic construct
  source 1..203: mol_type = other DNA
ggcgcgccagtccttgtttcctgaacagtcggaaagaatccggaacacccaagacggatcctactcgtcctgcaacatcttatagcctatgccgaagcgactatcaagaagcaggatgttcccggcccactccttccaattctgagtccgtatgtaatggcttgggacaaccctcagaacgtggtcaccgactcggaccgatg

SEQ ID NO: 5693 - DNA, 203 bp, synthetic construct
  source 1..203: mol_type = other DNA
ggcgcgccagtccttccatactcagaaaacgaatgcaagagcgtttgttttttttttatagaggttcccgaactattgtacctttgaatatggtttatcccttatttaaagatacgttaaatagtatcaggcatccagcgaattatacgcggtggggtttcgaatatttggacggaacagatattcgtcgactcggaccgatg

SEQ ID NO: 5694 - DNA, 203 bp, synthetic construct
  source 1..203: mol_type = other DNA
ggcgcgccagtcctcaacgtttacagattgaatcattgaattgtccggaagcggtgtcacgtcgtatagattttgcttttaacgttcgtatagtaccagaataccaaatggaatatatgagcgctaatggtgataaattgtatagactagacgctgccaaggcaaggcaagattttggagacgttttacgactcggaccgatg

SEQ ID NO: 5695 - DNA, 203 bp, synthetic construct
  source 1..203: mol_type = other DNA
ggcgcgccagtccttcttgtcctggaatacttgccaaatattattttgccaatgcggaaactgaaaagtcccgtgtttgcatcagtgctattggtgtttcagaacgagatgaagttgatgtaatgtctgtacctggatgcatggagatagtgcgtaatcgtgacttctacacttacacggcgccaactcgactcggaccgatg

SEQ ID NO: 5696 - DNA, 203 bp, synthetic construct
  source 1..203: mol_type = other DNA
ggcgcgccagtccttttgatcaagccatattgggtatcgatggtgacccgtttatcaattctttggatcgtaatacggcacctgggttcccttactcaactatgaggaagggaacgaaaggtaaaacgttatggttcggcaatggtatggattatgaccttacgggaccgtatgcggttgcgttacgacgactcggaccgatg

SEQ ID NO: 5697 - DNA, 203 bp, synthetic construct
  source 1..203: mol_type = other DNA
ggcgcgccagtcctccttttgttgctcatttatcacgtatgcgtattagaaatacgatatgtgtgggtgtcaaccctttttctagtgaatggagtgctgtagcacaaaaactcttagttaaaggaccgcacgttatagctggcgactattctaattttgacggttcgttacccgcccaactagtctatcgactcggaccgatg

SEQ ID NO: 5698 - DNA, 203 bp, synthetic construct
  source 1..203: mol_type = other DNA
ggcgcgccagtccttgctgacgtgaaaacgttgcgtattgctacaacacttggttagctatttagctttactaatcaagacgccgtcgtgcagcccacaaaagtctagatacgtcacaggagagcatacgctaggtcgcgttgactatccttatatatgacctgcaaatataaacgaaaacactacaacgactcggaccgatg

SEQ ID NO: 5699 - DNA, 203 bp, synthetic construct
  source 1..203: mol_type = other DNA
ggcgcgccagtcctcaaaaatacaacagcaaatcctttcttttagttcggaaggtgaatccccgtcgtcatccacagttttagcaccactcaaattgcaagatcctatattggattgcgcgagagatggaaaaactcatacagttaattcttttcttgagaggcctataaactttagaaccgcgacttcgactcggaccgatg

SEQ ID NO: 5700 - DNA, 203 bp, synthetic construct
  source 1..203: mol_type = other DNA
ggcgcgccagtcctggagtaatcaaccagctggcgaaaggttattttcttttaattacccttctaatgttgttacgaatcctatgtacagcagaaaattgcaaaattttctaggtttgcgtgctgatttagttgttcgcgttcaagtcaacgctcaaccatttcatgcaggtagattaatgctgtcctcgactcggaccgatg

SEQ ID NO: 5701 - DNA, 203 bp, synthetic construct
  source 1..203: mol_type = other DNA
ggcgcgccagtccttgacggggtcaggcgatattggaactttccaattaatcgtttattctccgttagtcgatttagtctcgggaggtaatatagactatacgatatgggttaatatgacaaacgtaagaacagagtttccaaccggtatgccaacttctatcgctcaggtgggagaagaaggcagtacgactcggaccgatg

SEQ ID NO: 5702 - DNA, 203 bp, synthetic construct
  source 1..203: mol_type = other DNA
ggcgcgccagtcctggttacatgtcaactctacaccttgggtcactgcattttcgcagatccatgcgtgtaggtcgattgtcgtcgaggttcttaatgagctagttaacacatctaccgtatctgatactattgaagttttagtggaagtatgtgctgctgaagatattgaatttgccattcctatagcgactcggaccgatg

SEQ ID NO: 5703 - DNA, 203 bp, synthetic construct
  source 1..203: mol_type = other DNA
ggcgcgccagtccttgccatctttaacaccgcgtgctgccccgcaaggttcatctcgtcgtactgcttacgatttgatcacaagcattgcgcaagtaggaactgatacgggagatacaccactcgaggtatctcgtgaagagccaacaacttttaacgatgtacctctccaaccaactacgactacatcgactcggaccgatg

SEQ ID NO: 5704 - DNA, 203 bp, synthetic construct
  source 1..203: mol_type = other DNA
ggcgcgccagtccttcgaggcgggccctcatgtgttccacatgcagacttaaagaagtctacccccggcccgtctgggggatctaagtttttatcagttttcttagacctgaccttaattggttgggaggcgtaactgttactttatgtctggcgaacatgagaggtgctgtaatgtcatttttcgtccgactcggaccgatg

SEQ ID NO: 5705 - DNA, 203 bp, synthetic construct
  source 1..203: mol_type = other DNA
ggcgcgccagtcctccgggtgaatcactctgcgagtgacgtgtgagtagcgaacagacgtgttcggggctcaccgcctggtaatccagggagacgtcccaggatcaggggaggaccagggacgcctggtggacccctcggtaacgggtcgttgtgacccgatttcatcgcccgtctggtaagacgcgccgactcggaccgatg

SEQ ID NO: 5706 - DNA, 203 bp, synthetic construct
  source 1..203: mol_type = other DNA
ggcgcgccagtcctcccccgccctatccggcggcactgccaccccctctggcccctcaggcgatgggaccgccgtcaggccagatgcccgatagtagcgatcctgaggggccagccgctgggaccaggagtcgccgtgcccgcagtccagcagacaactcgggtcctgactccactgtgattttgccccgactcggaccgatg

SEQ ID NO: 5707 - DNA, 203 bp, synthetic construct
  source 1..203: mol_type = other DNA
ggcgcgccagtcctctccgagccataggacccccggccgagcccaatggcctggtccctctacaatattggcctttttcctcagcagatctttataattggaaatctaatcatccctctttttctgaaaacccagcaggtctcacggggctccttgagtctcttatgttctcccatcagcccacttggcgactcggaccgatg

SEQ ID NO: 5708 - DNA, 203 bp, synthetic construct
  source 1..203: mol_type = other DNA
ggcgcgccagtcctgacgattgccaacagctcctacagattcttttcaccactgaggaacgggaaagaattctcctggaggcccgcaaaaatgtccttggggacaatggggcccctacacagctcgagaacctcattaatgaggccttccccctcaatcgacctcactgggattacaacacagccgcacgactcggaccgatg

SEQ ID NO: 5709 - DNA, 203 bp, synthetic construct
  source 1..203: mol_type = other DNA
ggcgcgccagtcctggtagggagcgtcttctggtctaccgccggactctagtggcaggtctcaaaggggcagctcggcgtcctaccaatttggctaaggtaagagaggtcttgcagggaccggcagaacccccttcggttttcttagaacgcctgatggaggcctataggagatacactccgtttgatcgactcggaccgatg

SEQ ID NO: 5710 - DNA, 203 bp, synthetic construct
  source 1..203: mol_type = other DNA
ggcgcgccagtcctgacaaagaccagtgcgcatactgtaaagagaagggccattgggcaagagaatgtccccgaaaaaaacacgtcagagaagccaaggttctagccctagataactaggggagtcagggttcggaccccctccccgaacctagggtaacactgactgtggaggggacccccattgagcgactcggaccgatg

SEQ ID NO: 5711 - DNA, 203 bp, synthetic construct
  source 1..203: mol_type = other DNA
ggcgcgccagtcctttcctggtcgacaccggagctgaacattcagtattgacccaacccatgggaaaagtagggtccagacggacggtcgtggaaggagcgacaggcagcaaggtctacccctggaccacaaaaagacttttaaaaattggacataaacaagtgacccactccttcctggtcataccccgactcggaccgatg

SEQ ID NO: 5712 - DNA, 203 bp, synthetic construct
  source 1..203: mol_type = other DNA
ggcgcgccagtcctgagtgccctgctcctctgttgggcagggacctcctaaccaaactaaaggcccagatccagttttccgctgagggcccacaggtaacatggggagaacgccctactatgtgcctggtcctaaacctggaagaagaataccgactacatgaaaagccagtaccctcctctatcgaccgactcggaccgatg

SEQ ID NO: 5713 - DNA, 203 bp, synthetic construct
  source 1..203: mol_type = other DNA
ggcgcgccagtcctccatcctggctccagcttttccccactgtatgggcagaaagagccggcatgggactagccaatcaagtcccaccagtggtagtagagctaagatcaggtgcctcaccagtggctgttcgacaatatccaatgagcaaagaagctcgggaaggtatcagaccccacatccagaagcgactcggaccgatg

SEQ ID NO: 5714 - DNA, 203 bp, synthetic construct
  source 1..203: mol_type = other DNA
ggcgcgccagtcctcttccgcctagctatacttggtactcagtcttagatctcaaggatgcctttttctgcctcaggctacatcccaacagccagccgctgttcgcgttcgagtggaaagacccagaaaaaggtaacacaggtcagctgacctggacgcggctaccacaagggttcaagaactctccccgactcggaccgatg

SEQ ID NO: 5715 - DNA, 203 bp, synthetic construct
  source 1..203: mol_type = other DNA
ggcgcgccagtccttcggctaagaaggcccagctctgccagagagaagtcacctatctggggtacctactcaaggaaggaaaaagatggctaaccccagcccgaaaggctactgttatgaaaatccctgttcctacgacccccagacaggtccgtgaatttctaggcactgccggattctgcaggctccgactcggaccgatg

SEQ ID NO: 5716 - DNA, 203 bp, synthetic construct
  source 1..203: mol_type = other DNA
ggcgcgccagtccttggatccctgggtttgcttccctggctgcacccttgtaccccctaacaaaagagagcatcccttttatttggactgaggaacatcagcaggcttttgaccacataaaaaaagccttgctgtcagcccctgcattggccctcccagacctcaccaagccattcactctatatatacgactcggaccgatg

SEQ ID NO: 5717 - DNA, 203 bp, synthetic construct
  source 1..203: mol_type = other DNA
ggcgcgccagtcctagggccaggaatacccctggccggtttggtttaactccttatgaaattctctatggaggaccaccccccatacttgagtctggagaaactttgggtcccgatgatagatttctccctgtcttatttactcacttaaaggctttagaaattgtaaggacccaaatctgggaccagcgactcggaccgatg

SEQ ID NO: 5718 - DNA, 203 bp, synthetic construct
  source 1..203: mol_type = other DNA
ggcgcgccagtcctatcaaagaggtgtataagcctggtaccgtaacaatccctcacccgttccaggtcggggatcaagtgcttgtcagacgccatcgacccagcagccttgagcctcggtggaaaggcccatacctggtgttgctgactaccccgaccgcggtaaaagtcgatggtattgctgcctggcgactcggaccgatg

SEQ ID NO: 5719 - DNA, 203 bp, synthetic construct
  source 1..203: mol_type = other DNA
ggcgcgccagtcctgtccatgcttctcacctcaaacctgcaccaccttcggcaccagatgagtcctgggagctggaaaagactgatcatcctcttaagctgcgtattcggcggcggcgggacgagtctgcaaaataagaacccccaccagcccatgaccctcacttggcaggtactgtcccaaactggcgactcggaccgatg

SEQ ID NO: 5720 - DNA, 203 bp, synthetic construct
  source 1..203: mol_type = other DNA
ggcgcgccagtccttctccccgactctaactccacagccctggcgactagtgcacaaactcccacggtgagaaaaacaattgttaccctaaacactccgcctcccaccacaggcgacagactttttgatcttgtgcagggggccttcctaaccttaaatgctaccaacccaggggccactgagtcttgcgactcggaccgatg

SEQ ID NO: 5721 - DNA, 203 bp, synthetic construct
  source 1..203: mol_type = other DNA
ggcgcgccagtcctctggctttgtttggccatgggccccccttattatgaagcaatagcctcatcaggagaggtcgcctactccaccgaccttgaccggtgccgctgggggacccaaggaaagctcaccctcactgaggtctcaggacacgggttgtgcataggaaaggtgccctttacccatcagcacgactcggaccgatg

SEQ ID NO: 5722 - DNA, 203 bp, synthetic construct
  source 1..203: mol_type = other DNA
ggcgcgccagtcctgttgctcatcctcgggccatgcatcatcaataagttagttcaattcatcaatgataggataagtgcagttaaaattctggtccttagacagaaatatcaggccctagagaacgaaggtaacctttaattttgctctaagattagagctattcacaagagaaatgggggaatgaacgactcggaccgatg

SEQ ID NO: 5723 - DNA, 203 bp, synthetic construct
  source 1..203: mol_type = other DNA
ggcgcgccagtccttttgaaaggggtctcctagagagcttggccgtcgggccttacaccccgacttgctgagtttctctaggagagtccctttcccagccagaggtggctggtcaaacaataccaaacgtaactaaacatctaagataacatagccctatgcctggtctccaccagttgaaggcatctcgactcggaccgatg

SEQ ID NO: 5724 - DNA, 203 bp, synthetic construct
  source 1..203: mol_type = other DNA
ggcgcgccagtcctaacttagttcatttaaatctatttccaaatttgaaggtctttgaaaacagttattcatacttcagaggttctcttataatcaggttaagtgtttatgctagtacattcaacagaggccgtttgaatgggttctttccaaattccagtacagatgaaacttctgaaattgataatcgactcggaccgatg

SEQ ID NO: 5725 - DNA, 203 bp, synthetic construct
  source 1..203: mol_type = other DNA
ggcgcgccagtcctcaagatgatggccctttaggaaatgacaaaccaaattattttcttaactttaagtctatgaatgttgatatctttactgtcagtcacaccaaagtagacaatatttttggacgtgcttggtttgcccatgttcatgacttcactaatgatggcctatggagacagggattggaacgactcggaccgatg

SEQ ID NO: 5726 - DNA, 203 bp, synthetic construct
  source 1..203: mol_type = other DNA
ggcgcgccagtccttttccaaaggaagggcacggtgccctatcacttctgtttgcctactttactggtgaattaaacatccatgttctatttcttagtgataggggttttctcagagttggacatacatatgacactgagacaaacagaaccaattttttatcatccagtggcataattacagtaccacgactcggaccgatg

SEQ ID NO: 5727 - DNA, 203 bp, synthetic construct
  source 1..203: mol_type = other DNA
ggcgcgccagtcctgcaggagaacagatgacactatctgtcccctcttattccaacaagccattacggacagttagatcatccaatgctttaggttatttactgtgtaaaccattgctaactggtaccagctctggtagaatagagatattccttagcttgagatgtccaaatttcttctttcccttacgactcggaccgatg

SEQ ID NO: 5728 - DNA, 203 bp, synthetic construct
  source 1..203: mol_type = other DNA
ggcgcgccagtcctcttgattatgcttctgacattatagttaagtcaaaggaccagacaaaaatgaaaacacaagaattttatcagcgttacaatgattgtttgtctaaatttaaacccattatggcaatgtgctttagaagctgtcacaatagtattagtaacacagtctacagattattccaggaacgactcggaccgatg

SEQ ID NO: 5729 - DNA, 203 bp, synthetic construct
  source 1..203: mol_type = other DNA
ggcgcgccagtcctagtgaattcatggatggatatgataatcaggatatacatttgattgatgatttgggccaaacaaggaaggagagggacattgagatgttgtgtaattgtatatcatcagatcccgatatagtccctatggcccaccttgaggaaaaaggcaaattctacacaagcaaattagttcgactcggaccgatg

SEQ ID NO: 5730 - DNA, 203 bp, synthetic construct
  source 1..203: mol_type = other DNA
ggcgcgccagtcctatagccaccacaaataaacctgatttttccagtacagtcttattagattcaggtgctctgaggagaaggtttccatacattatgcatattagagctgctaaacattatagcaaatcaggcaaactaaatgtctcccaagctatgccacatatgtcaaccggcgagtgttgggaacgactcggaccgatg

SEQ ID NO: 5731 - DNA, 203 bp, synthetic construct
  source 1..203: mol_type = other DNA
ggcgcgccagtcctgtggaagttaaaatgggcccagctgtactgagtaaatcggacactagactagaagaaccagtggattgtttggtcaagaagtcagcatcaaaatatagggtcaataaatttcaggtcaacaatgagctatggcagggggttaaagcttgtgttaagtcaaagtttagagaaatacgactcggaccgatg

SEQ ID NO: 5732 - DNA, 203 bp, synthetic construct
  source 1..203: mol_type = other DNA
ggcgcgccagtcctcaagagaaattccacaacctcctaaaaggaaatcagattacaaccatttttaatacatgtctcaaggatgagttgaggaagctggataaaatcgcaaccggtaaaactcgatgtattgaggcttgtgaaatagactattgcattgtttacagaatgattatgatggagatatatcgactcggaccgatg

SEQ ID NO: 5733 - DNA, 203 bp, synthetic construct
  source 1..203: mol_type = other DNA
ggcgcgccagtccttgggcgggcaagtgcggcaacagctactttgactactaagataagaatttttgtaccagcaactaatagcccagaactgagatgggagttgactttgttcgctctcgatgtaatcagatcaccaagtgcagcagaatcaatgaagattggtgctgctttcactctgatatcaatcgactcggaccgatg

SEQ ID NO: 5734 - DNA, 203 bp, synthetic construct
  source 1..203: mol_type = other DNA
ggcgcgccagtcctgtactcagaaagacctggcgctttaatcaggagcctccttaacgacccagacatagaagctgtcatcatagatgtgggttccatgctcaacgggatccctgtgatggaaaggagaggggacaaagcacaagaggagatggaaggtttgatgaggattctgaagactgcacgtgacgactcggaccgatg

SEQ ID NO: 5735 - DNA, 203 bp, synthetic construct
  source 1..203: mol_type = other DNA
ggcgcgccagtcctaagcagcaagggaaagaccccgtttgtagatagcagagcctatggactgaggatcaccgatatgagcactcttgtgtcagccgtcattaccatcgaagcccaaatttggatcctgattgcaaaggcagtgactgctccagatacagccgaggaaagtgagaccagaagatgggccgactcggaccgatg

SEQ ID NO: 5736 - DNA, 203 bp, synthetic construct
  source 1..203: mol_type = other DNA
ggcgcgccagtccttgacataggaaattatgtcgaggaaacaggaatggccggcttctttgcgactatcagattcggtcttgaaacaagataccctgcacttgccctcaatgagttccagagtgatctcaataccatcaaagggctgatgctgctctacagagaaatagggcctcgagcgccatacatcgactcggaccgatg

SEQ ID NO: 5737 - DNA, 203 bp, synthetic construct
  source 1..203: mol_type = other DNA
ggcgcgccagtcctggtgctccttgaggaatctattcagacaaagtttgcaccaggtggttatccactcctgtggagctttgctatgggtgttgcaaccactatcgaccgatccatgggtgctctcaacatcaatcgtggttatcttgaacctatgtatttcagacttggacagaaatcagcaagacacgactcggaccgatg

SEQ ID NO: 5738 - DNA, 203 bp, synthetic construct
  source 1..203: mol_type = other DNA
ggcgcgccagtcctagatattgatgaggaagaagagcctatcgaacatagtggtaggcagtcagtgactttcaagagagaaatgagcatgtcatctctcgcagacagtgtcccaagcagttcagtgagtacatccggaggaacgagattgacaaattctctattgaatctcagatccagattagctgccgactcggaccgatg

SEQ ID NO: 5739 - DNA, 203 bp, synthetic construct
  source 1..203: mol_type = other DNA
ggcgcgccagtcctcattatattaagaaaaacttaggatccaagaccataaatctaggatcctttacaatctcagaccctggtgcaaggttatatatagagcccaattctcctaattaaacagtgtctcaggttgacaaatggacaagttggatctagtcaatgatggcctcgatattattgactttacgactcggaccgatg

SEQ ID NO: 5740 - DNA, 203 bp, synthetic construct
  source 1..203: mol_type = other DNA
ggcgcgccagtcctttcagaagaaccaaaaagaaatacaaaagacatacggacgatcaagcatccaacaaccaagtaccaaagacaggacaagagcatgggaggacttcttgcagagcaccagtggagaacatgaacaggctgaggggggaatgcctaagaatgatggaggtactgaaggaagaaatgcgactcggaccgatg

SEQ ID NO: 5741 - DNA, 203 bp, synthetic construct
  source 1..203: mol_type = other DNA
ggcgcgccagtccttggaggatctatccagtgttacttcctcagatggaactattggacaaagagtgtcaaacacccgagcttgggcagaagacccagatgacatacaactggacccaatggttacagacgttgtataccatgatcatggaggagaatgtaccggacatggaccttcttcaagccctgcgactcggaccgatg

SEQ ID NO: 5742 - DNA, 203 bp, synthetic construct
  source 1..203: mol_type = other DNA
ggcgcgccagtcctttccctttgtccccaagaatcaatcaaccccaactgaggagcctccagtcatcccggagtattactatggatctgggaggagaggagatctctcaaaatctcctcctagaggtaatgtcaatctggacagcatcaagatttacacttcggacgacgaggatgaaaatcagctggcgactcggaccgatg

SEQ ID NO: 5743 - DNA, 203 bp, synthetic construct
  source 1..203: mol_type = other DNA
ggcgcgccagtcctagtatgaggatgagtttgccaaaagctcaagtgaggttgtcattgacactactcctgaggacaatgattctatcaaccaggaggaagtagttggggacccgtctgatcagggtttagagcatcctttccctttggggaaattcccggagaaagaagaaactcctgatgtacgcacgactcggaccgatg

SEQ ID NO: 5744 - DNA, 203 bp, synthetic construct
  source 1..203: mol_type = other DNA
ggcgcgccagtcctattttgctaacactttcttaccccatgacactgataggttaaattatcatgcagaccatctcaatgattacgatttagagaccttgtgtgaggagtcagtattgatgggcatcgttaacgcaatcaaactcatcaacattgatatgaggttgaatcacattgaggaacagatgacgactcggaccgatg

SEQ ID NO: 5745 - DNA, 203 bp, synthetic construct
  source 1..203: mol_type = other DNA
ggcgcgccagtcctttgatagagtagcagtcagaccaagatcatatattagaggtacacatcataatggccagtgtcttaatctcaaccattcataaaccgtcagtgtttcccttataaactccattatgtagtttattaatatctagagctattctttattaagtaataaatctgtattagattattcgactcggaccgatg

SEQ ID NO: 5746 - DNA, 203 bp, synthetic construct
  source 1..203: mol_type = other DNA
ggcgcgccagtcctggatcttttagaagagctatgttctttgaaagtcactgtcagaagaacagctggggctacagagaaaattgtgttcgggtcctctggcccgcttcatcatctcttaccatggaagaagattctgactggcggatcaatattcaatgctgtcaaggtttgccgcaatgtggatcacgactcggaccgatg

SEQ ID NO: 5747 - DNA, 203 bp, synthetic construct
  source 1..203: mol_type = other DNA
ggcgcgccagtcctgatctatgacgatgtgttcattgacaacacagggaagatcctaaaggggtgaaataaaacattcacttggttattgtagattgataaattaaccagataaccactttaatcttcattctaaagaatgccacagtgtcagtaagttacacaggtacaatacataatctaaattcacgactcggaccgatg

SEQ ID NO: 5748 - DNA, 203 bp, synthetic construct
  source 1..203: mol_type = other DNA
ggcgcgccagtcctaagcaatggctacacaagaggtcaggctaaagtgtttgctctgtgggatcatagttctggttttgtcattagaagggctagggatactacattatgagaaacttagtaagatagggctggttaaaggtattacaagaaagtacaagattaagagtaaccctttgaccaaggatacgactcggaccgatg

SEQ ID NO: 5749 - DNA, 203 bp, synthetic construct
  source 1..203: mol_type = other DNA
ggcgcgccagtcctttgtgatcaaaatgatccctaatgtctcgaatgtctcaaagtgcaccgggactgttatggagaattacaaaagcagactcacagggattctctcaccaatcaaaggcgccatcgaactgtacaataataacacgcatgacctagttggtgatgtcaagcttgcaggtgtggtgacgactcggaccgatg

SEQ ID NO: 5750 - DNA, 203 bp, synthetic construct
  source 1..203: mol_type = other DNA
ggcgcgccagtccttggcagggattgcaatcgggatagctactgctgcacaaatcacagcaggtgttgccttatatgaggcaatgaagaacgcagacaatatcaataaactcaagagcagcatagagtctacaaatgaggctgttgtcaaattacaggaaacagctgagaaaacagtctacgtccttacgactcggaccgatg

SEQ ID NO: 5751 - DNA, 203 bp, synthetic construct
  source 1..203: mol_type = other DNA
ggcgcgccagtcctctgctcttcaagattacatcaacactaaccttgttcctacaatagatcaaattagctgcaagcaaacagagctcgcattagacttggcgttgtctaagtatctgtctgatctgctctttgttttcggacctaacttacaggatccagtctctaattccatgactatccaagcaacgactcggaccgatg

SEQ ID NO: 5752 - DNA, 203 bp, synthetic construct
  source 1..203: mol_type = other DNA
ggcgcgccagtcctaacaggcttatgtgcaggagttgcttccagtgagttttaataacgataattcagaatggatcagcattgtcccgaatttcgtgctgattaggaacacgctgatttcaaatatagaagtcaagtactgcttaatcaccaagaaaagtgtgatttgtaatcaggactatgctacaccgactcggaccgatg

SEQ ID NO: 5753 - DNA, 203 bp, synthetic construct
  source 1..203: mol_type = other DNA
ggcgcgccagtcctagataggccccaaagtctcactaattgacacatccagcaccatcacaattcctgctaacatagggttactgggatccaagataagtcagtctaccagcagtattaatgagaatgttaacgataaatgcaaatttactcttcctcctttaaagattcatgagtgtaatatctcttcgactcggaccgatg

SEQ ID NO: 5754 - DNA, 203 bp, synthetic construct
  source 1..203: mol_type = other DNA
ggcgcgccagtcctctataactaaagttgaaagagggaagtacgataaggtgatgccttacggtccatcaggtatcaagcaaggggatacattgtactttccggccgtcggttttttgccaaggaccgaatttcaatataatgactctaattgtcccataattcattgcaagtacagcaaagcagaaacgactcggaccgatg

SEQ ID NO: 5755 - DNA, 203 bp, synthetic construct
  source 1..203: mol_type = other DNA
ggcgcgccagtcctttttctaccaggcatcatattcttgggatacgatgattaaattaggcgatgttgataccgttgaccctctaagagtacagtggagaaataacagtgtgatttctagacctggacagtcacagtgtcctcgatttaatgtctgtcccgaggtatgctgggaagggacatataatgcgactcggaccgatg

SEQ ID NO: 5756 - DNA, 203 bp, synthetic construct
  source 1..203: mol_type = other DNA
ggcgcgccagtcctcttataatatactcaaaaaattaaaaattcccccaagaaaatactaaatgtaatcaaactcaataaaccctgaaatattgatagtttacagagatcatatgactctttgtataattctttatagaactcctaaatatcaaagagcgataaacttgctaccctgtacacttaaagcgactcggaccgatg

SEQ ID NO: 5757 - DNA, 203 bp, synthetic construct
  source 1..203: mol_type = other DNA
ggcgcgccagtcctttttaggtatttatgagcaggacagactcagtaacatagggaaatacatgagtcaatcgcaatggtatgagtgttttctcttctggttcacaatcaagacagagatgagagctgttatcaagaactcacagaaacctaagtttagatctgactcttgtattattcatatgaaagcgactcggaccgatg

SEQ ID NO: 5758 - DNA, 203 bp, synthetic construct
  source 1..203: mol_type = other DNA
ggcgcgccagtcctttagagagcatatgctagcagataaggtccttgaatacgggccaatcatgaaagcacacgcagtcttttgtggtacaattataaatgggtaccgtgacaggcatcggggagcttggcctccactttatctgccatcgcatgcatcgaaacacataataagactcaagaattctgcgactcggaccgatg

SEQ ID NO: 5759 - DNA, 203 bp, synthetic construct
  source 1..203: mol_type = other DNA
ggcgcgccagtcctatcgccacaagtgtgataacactagccaaacattccttgactatcatatggaattcagtccctacaagtcagacagaatggataggacagagacatctgatttctcgaaatatgatgatggaacaggaacaaaatttgacacggtgagtgctttcctaactactgacttgaagacgactcggaccgatg

SEQ ID NO: 5760 - DNA, 203 bp, synthetic construct
  source 1..203: mol_type = other DNA
ggcgcgccagtcctaattctgtctcaattggcgatatgaatccatggctatttttgcagaaagacttgacgaaatttatggcttacccggtttctttaactggatgcacaaacgattagagaagtcagtcatttatgtcgcagatcctaattgcccaccagacatcgggaaacatataaaccttgatgcgactcggaccgatg

SEQ ID NO: 5761 - DNA, 203 bp, synthetic construct
  source 1..203: mol_type = other DNA
ggcgcgccagtcctaggtccaccctaatttaccttacaaagtcaagaaagaaatttgtgcaaggcaagctcaattatattttgacaggctcagaatgaatcttagggccttaggactcaacttaaaagcaacagagaccattataagtacacacttatttgtctactctaagaaaatacattatgatgcgactcggaccgatg

SEQ ID NO: 5762 - DNA, 203 bp, synthetic construct
  source 1..203: mol_type = other DNA
ggcgcgccagtcctgagaggaaattgctggattacttgacacaacaaaggggctaataagatcaggattgaaaaagagcgggatacaacctaagttagtgtctagactgtctaaccatgattataatcagttcctgatactcaatagacttttgtccaataaaaagagaaacgatcttatatcccctacgactcggaccgatg

SEQ ID NO: 5763 - DNA, 203 bp, synthetic construct
  source 1..203: mol_type = other DNA
ggcgcgccagtcctgttggtttttcgtgccacgagattcacaattagaccaagtgaataaagagcactcatccattagagtaccttacgtcggctcaagcactgatgagaggtcagatatcaaactaggaaacgtcaagagaccgacaagagcactgagatctgccatcgaattgcaactgtttataccgactcggaccgatg

SEQ ID NO: 5764 - DNA, 203 bp, synthetic construct
  source 1..203: mol_type = other DNA
ggcgcgccagtccttggatcctgagctttttgccctttatttaggtcaatcaatttcagtcaagtgggcatttgaaatccatcatagacgcccacatggacgacatacaatggtagatttgttgtctgatctcatatccaatacatcgaaacatacatacaaagtcttgtctaatgcactgtcacatccgactcggaccgatg

SEQ ID NO: 5765 - DNA, 203 bp, synthetic construct
  source 1..203: mol_type = other DNA
ggcgcgccagtccttactagatattagaggttgcataatatataatctagaagaaatcttatcaatgaatactaagtccacgtcaagaaaggtgttcaatttgggttcaaagttgtcagttgaaaaccacaaatatagaaggataggattaaattcgtcttcttgctacaaggcattaaatctgtcaccgactcggaccgatg

SEQ ID NO: 5766 - DNA, 203 bp, synthetic construct
  source 1..203: mol_type = other DNA
ggcgcgccagtcctctaaaagcccggaactttataacatcaaaaattacataaggagaaaagttttgattctagacttcagatcccatactatgattaaactgctacctaaaggaatgaaagagagaagagagaaaagcggattcaaagaaatttggatatttgacttatctaatagggaagtcaaaacgactcggaccgatg

SEQ ID NO: 5767 - DNA, 203 bp, synthetic construct
  source 1..203: mol_type = other DNA
ggcgcgccagtccttcaccctctttcccggtggtctggtcccggaccaccgttactccattcagcttcttcggaacctgttcggaggaattaaacgggcacccatactccccccacccccctttggtaactaagtatgtgtgctcgtgatcttggctcccacggaggggaccgatccgttggtgaacacgactcggaccgatg

SEQ ID NO: 5768 - DNA, 203 bp, synthetic construct
  source 1..203: mol_type = other DNA
ggcgcgccagtcctaacagctaggtccacatcctcccttcccctgggagggcccccgccctcccacatcctccccccagcctgacgtatcacaggctgtgtgaagcccccgcgaaagctgctcacgtggcaattgtgggtccccccttcatcaagacaccaggtctttcctccttaaggctagccccgcgactcggaccgatg

SEQ ID NO: 5769 - DNA, 203 bp, synthetic construct
  source 1..203: mol_type = other DNA
ggcgcgccagtcctgcgtgtgaattcacgttgggcaactagtggtgtcactgtgcgctcccaatctcggccgcggagtgctgttccccaagccaaacccctggcccttcactatgtgcctggcaagcatatctgagaaggtgttccgctgtggctgccaacctggtaacaggtgccccagtgtgcgtacgactcggaccgatg

SEQ ID NO: 5770 - DNA, 203 bp, synthetic construct
  source 1..203: mol_type = other DNA
ggcgcgccagtcctaccttcttccgtctccggacggtagtgattggttaagatttggtgtaaggttcatgtgccaacgccctgtgcgggatgaaacctctactgccctaggaatgccaggcaggtaccccacctccgggtgggatctgagcctgggctaattgtctacgggtagtttcatttccaatccgactcggaccgatg

SEQ ID NO: 5771 - DNA, 203 bp, synthetic construct
  source 1..203: mol_type = other DNA
ggcgcgccagtcctcttttatgtcggagtcatggctgcaacacgggtttcacgatctgtgctcgctgctgtggctcactctgccgctcaccgcacctaccacactgtccttgactgctatgataggctttacctcaacaccaacccccatctctcttatccccttcccaaaaactcttccttcccttgcgactcggaccgatg

SEQ ID NO: 5772 - DNA, 203 bp, synthetic construct
  source 1..203: mol_type = other DNA
ggcgcgccagtcctaacatactactctgaccttcagcaaaagttctttgacaaattggctctcctctctcttccaggtgcctaccaagcaaagaccccggaggagcgtgccctcgcgggcgcgctcacccaactcctcaacttcccctccaccccccctctcacactccctaccactaacctccaacgcgactcggaccgatg

SEQ ID NO: 5773 - DNA, 203 bp, synthetic construct
  source 1..203: mol_type = other DNA
ggcgcgccagtcctccgcacctggttgttggatacagtcacctggtcccaggagttcacccgcggctggaacatcgcaggctccaatggcatgcaatggaccggcctggaatcccttatcttccctgtctccactgacaccaattggacctccacctccagtcctaccgcatatcccctccctttctccgactcggaccgatg

SEQ ID NO: 5774 - DNA, 203 bp, synthetic construct
  source 1..203: mol_type = other DNA
ggcgcgccagtcctcttcgtgcgtgcttacccagactcctcctgggctgccatgtacaacacccactccatgtggaattgcggttggcgcgttcaagtgaccgtcaacggctcacagttccatgccggagcccttatcctctacatggtccctgaagccaccacccatgccatccaaacggctcgggacgactcggaccgatg

SEQ ID NO: 5775 - DNA, 203 bp, synthetic construct
  source 1..203: mol_type = other DNA
ggcgcgccagtcctcaacgctggctttgtcttcccctatgtcatcctcaatctctatgaaagcaacaccgctaccatagaggtcccctacatctcccccacccccaatacctcgagtggactccacgccccgtggacgttctacctccaggtgctctcacccctcaatcctcccccttctctccccaccgactcggaccgatg

SEQ ID NO: 5776 - DNA, 203 bp, synthetic construct
  source 1..203: mol_type = other DNA
ggcgcgccagtcctttccttatcctgctctatctatgtcacccccgttgactcctctttccacggtctccgctacctcgccccacagcactggaagactcgcgccgtcccaggtgcgggcactttcggatctgccgtggctggccaggaactccctctctgtggagtccgtgcctactacccccccaacgactcggaccgatg

SEQ ID NO: 5777 - DNA, 203 bp, synthetic construct
  source 1..203: mol_type = other DNA
ggcgcgccagtccttgcctacatccctgcccaggtacgcgactggcttgagttcgcccaccggcctggtctcatggccacagtgccgtggaccatggcggacgagccggccgagcgcctcggtatcttccccgtctctcccagtgctatcgctgggactggcgcccccatctcctatgttatttctctcgactcggaccgatg

SEQ ID NO: 5778 - DNA, 203 bp, synthetic construct
  source 1..203: mol_type = other DNA
ggcgcgccagtcctcttctcccagtggcgcggtgaactcgccgcccacctcctcttcactggctccgctcagcactacggccgcctggtcgtgtgctacactcctgctgccccccaacccccctccaccatgcaggaagcgatgcgcggaacatacaccgtatgggacgtcaacgctgcctcaaccctcgactcggaccgatg

SEQ ID NO: 5779 - DNA, 203 bp, synthetic construct
  source 1..203: mol_type = other DNA
ggcgcgccagtcctatccttcaacgtacgactgatgcaaaaccccgccctcacttcccaaaccctcaccgaagacctcgatgcaccccaagacaccgggaacattgagaacggtgcggctgacaactccccgcagccccgcaccaccttcgactacaccggaaaccccctccctccagacaccaaactcgactcggaccgatg

SEQ ID NO: 5780 - DNA, 203 bp, synthetic construct
  source 1..203: mol_type = other DNA
ggcgcgccagtcctggacctgcgaatcacgctccgcttctccaacccaaatgacaaccctgccaccatgcttgttgccttcgctccccctggcgccaccatccccctcaaacccacgcgccaaatgctctccaacttctacatggcggaggtcccagtctccgctgccacctccaccatggtctctttcgactcggaccgatg

SEQ ID NO: 5781 - DNA, 203 bp, synthetic construct
  source 1..203: mol_type = other DNA
ggcgcgccagtcctctccatcccctacacctcccccctctctgccatccccacctcatacttcggatgggaggactggtcaggtaccaactttggccagctctcctccgggtcatggggaaacctcatgctcatcccctctctctctgtcgactctgctatccccttcgacttccagctctcttgctgcgactcggaccgatg

SEQ ID NO: 5782 - DNA, 203 bp, synthetic construct
  source 1..203: mol_type = other DNA
ggcgcgccagtcctccccacctacgtccactgggccatccgcaaggtggcccccgacggcagtgccaaacagatctcgctgtcccgcagcgggatccaggcactggtcgccctcgaaccccccgagggtgaaccttacctcgaaattctcccctcccattggacccttgctgaactccaacttggcaacgactcggaccgatg

SEQ ID NO: 5783 - DNA, 203 bp, synthetic construct
  source 1..203: mol_type = other DNA
ggcgcgccagtcctcaagtgggagtacagcgccaccaacaactgtacccacttcgtcagctccatcactggcgaatccctccccaacaccggcttctccctggccctcggaatcggtgccctcaccgccatcgcagcctcggctgctgttgccgtgaaagcgctcccaggcatcaggcgacagggtctcgactcggaccgatg

SEQ ID NO: 5784 - DNA, 203 bp, synthetic construct
  source 1..203: mol_type = other DNA
ggcgcgccagtcctcattgatcacatcactaaatccatctcccgctgccgtgaattggtctccatcgcccaggaggccaaatccggccctcactcttccttcctcaaccaagcagtcaaaaactacacccttgccatctcccaacaccgcaaatgccagacaggtcccaggcctgaacccgtggtggtcgactcggaccgatg

SEQ ID NO: 5785 - DNA, 203 bp, synthetic construct
  source 1..203: mol_type = other DNA
ggcgcgccagtcctctacctctacggaccccccggcactggcaaatccctccttgcttcactcctcgctcaaaccctttcccagcgtcttgctgggacccccgatgacgtctactccccctcctccgcctcctgtgagtacttcgatgggtacacgggtcaaaccgtgcactttatcgatgacatcggcgactcggaccgatg

SEQ ID NO: 5786 - DNA, 203 bp, synthetic construct
  source 1..203: mol_type = other DNA
ggcgcgccagtcctgcaggatccggaggggcgggactgggctaatttcccaaacctcgtctcctctgcccccttcattgtcccaatggcctccctcgaggagaagggcacccactacacctccaaggtcatcgtggttacctccaacttccacgagcctaacgagcgcgccgcgcgctcgatgggcgccgactcggaccgatg

SEQ ID NO: 5787 - DNA, 203 bp, synthetic construct
  source 1..203: mol_type = other DNA
ggcgcgccagtcctggcgcaccaccgccctgtaccatgctcccttggcctctcccaagccatcgcaaacaacacccccatccaacaaatctctgaaaccttctggaagtaccgcaaacccatcttcacttgcaccactttcctcgctgtcctcggtttcctctgctctgtcatccctcttgctcgctccgactcggaccgatg

SEQ ID NO: 5788 - DNA, 203 bp, synthetic construct
  source 1..203: mol_type = other DNA
ggcgcgccagtccttcccacctcccgccagtacaaggacatgcggcgcttcatcggcgcccatccccaccccactggactccttgtttcccaattcaaagctgcccccctctatgtccgcatctccgacaaccggatcctggaccttgacttccccggagtcgtcgtctgtaagcaggcgtacggatacgactcggaccgatg

SEQ ID NO: 5789 - DNA, 203 bp, synthetic construct
  source 1..203: mol_type = other DNA
ggcgcgccagtcctcattgttcccactgctgaagtccggcctggcgtcaacgtcaaccggatgtcccgcttgcacccctctcccgcctacggtgccttccctgtcaagaaacaacccgctcccctcaagcgcaacgacaagcgcctgcaggagggcgtcgatcttgacacccagctcttcctcaaacacgactcggaccgatg

SEQ ID NO: 5790 - DNA, 203 bp, synthetic construct
  source 1..203: mol_type = other DNA
ggcgcgccagtcctcgtcgaagctgctcccatccatgctatcgtcgctggccggatgctcctcggtggtctcatcgactacatgcaggggcgtcccggcgagcacggtagtgcggttggttgcaacccagacgttcactggacttccttcttttacgccttcagcgagttctctcaggtatacgatctcgactcggaccgatg

SEQ ID NO: 5791 - DNA, 203 bp, synthetic construct
  source 1..203: mol_type = other DNA
ggcgcgccagtcctggactacaagtgttttgatgctacccttccttctgctgtcttcacccttgttgctgaccatcttacccgcatcaccggagatccccgcgtcggtcgctacatccactccatccgccattcacaccacatttatggcaaccggatgtacgacatgatcggggggaatccctccggcgactcggaccgatg

SEQ ID NO: 5792 - DNA, 203 bp, synthetic construct
  source 1..203: mol_type = other DNA
ggcgcgccagtcctttgtgtggccacctccatcctcaacaccatcatcaacaacatctgtgtcctctctgccctcatccaacaccctgatttctctccctcccgcttccacatcctggcgtacggtgacgacgtcatctacgctacggaaccccccatccatccttccttccttcgggagttctaccacgactcggaccgatg

SEQ ID NO: 5793 - DNA, 203 bp, synthetic construct
  source 1..203: mol_type = other DNA
ggcgcgccagtcctgaaacacacccctctggtggtcacccccgcaaacaaaggccaggatttcccacccacgtctacgatctatgaagtcaccttcctcaaacgctggttcgttccggacgatgttagacccatctacattcaccctgtgatggaccccgacacgtacgagcaatcggtaatgtggttcgactcggaccgatg

SEQ ID NO: 5794 - DNA, 203 bp, synthetic construct
  source 1..203: mol_type = other DNA
ggcgcgccagtcctggctgcctgatagttagggaacacagtgcctcggcacgcttagttagttagaaccctttgcccactcctccatggtgatataaagaccacccacttccttcgggtgagcccctaagccatggttgtactgcactatcatcctaagacggtccttcttcggatcgcaatctcacccgactcggaccgatg

SEQ ID NO: 5795 - DNA, 203 bp, synthetic construct
  source 1..203: mol_type = other DNA
ggcgcgccagtcctggtgatataaagaccacccacttccttcgggtgagcccctaagccatggttgtactgcactatcatcctaagacggtccttcttcggatcgcaatctcaccctggtgccgcgcttccttcgggaactgcacccgcggaccagggccgtctttgaacttttctaactgttcttaccgactcggaccgatg

SEQ ID NO: 5796 - DNA, 203 bp, synthetic construct
  source 1..203: mol_type = other DNA
ggcgcgccagtccttctttgctgagacttgaccgccccgggtacccgtgtacgaataaacctcttgctgattgcatctgactcgtggtctcggtgttctgtgggcgcggggtctcatcgccgaggaagacctagttcaggggtctttcatttgggggctcgtccgggatcgagacccccgacccccggcgactcggaccgatg

SEQ ID NO: 5797 - DNA, 203 bp, synthetic construct
  source 1..203: mol_type = other DNA
ggcgcgccagtcctgaccaccgacccaccatcaggaggtaagctggccggcgaccatacctgttgtccttgtataagtgtctctgtcaattgatctgattttggcggtgggatcgaaggagctgacgagctcgtacttcgcccccgcaaccctggaagacgttccacgggtgtctgatgtctggagcccgactcggaccgatg

SEQ ID NO: 5798 - DNA, 203 bp, synthetic construct
  source 1..203: mol_type = other DNA
ggcgcgccagtcctggccaggaccccccccctgagcccaggataaccttaaaaataggggggcaaccggtgactttcctggtggacacgggagcccagcactcagtactaactcgaccagatggacctctcagtgaccgcacagccctggtgcaaggagccacgggaagcaaaaactaccggtggacccgactcggaccgatg

SEQ ID NO: 5799 - DNA, 203 bp, synthetic construct
  source 1..203: mol_type = other DNA
ggcgcgccagtcctccagaaataggactgtcagggcagctaacctggacacgccttcctcaagggttcaagaatagccccaccctatttgatgaggccctgcactcagacctggccgatttcagggtaaggtacccggctctagtcctcctacaatatgtagatgacctcttgctggctgcggcaacccgactcggaccgatg

SEQ ID NO: 5800 - DNA, 203 bp, synthetic construct
  source 1..203: mol_type = other DNA
ggcgcgccagtcctaggactgaatgcctggaagggactaaggcactccttgagactttgggcaataaggggtaccgagcctctgcaaagaaggcccaaatttgcctgcaagaagtcacatacctggggtactctttaaaagatggccaaaggtggcttaccaaagctcgcaaggaagccatcctatcccgactcggaccgatg

SEQ ID NO: 5801 - DNA, 203 bp, synthetic construct
  source 1..203: mol_type = other DNA
ggcgcgccagtcctcccccttgtttacgcatggttgcagccatcgccatcctagtcaaggatgcagggaagctaaccctaggacagccgctaactatcctgacctcccacccagttgaggcacttgtccgacagcctccaaataaatggctctctaatgctagaatgactcattaccaagctatgctccgactcggaccgatg

SEQ ID NO: 5802 - DNA, 203 bp, synthetic construct
  source 1..203: mol_type = other DNA
ggcgcgccagtcctctcgatgcagagcgagtccatttcgggccgacagtctcccttaaccctgctaccttgctccccctccccagcgggggaaaccaccacgactgtctccagattttagccgagacccatggcaccagacccgacttaactgaccagccgttgccggatgcagacctgacctggtaccgactcggaccgatg

SEQ ID NO: 5803 - DNA, 203 bp, synthetic construct
  source 1..203: mol_type = other DNA
ggcgcgccagtcctgaagctcattatgagccaaagagaggtacctgggagtaccgaggaaaaactatcatgcctgaaaaatacgcaaaagagttgattagccatctgcataagttaacacacctcagtgctaggaaaatgaaaactttactagaaagagaagaaactgggttttacctccctaacagacgactcggaccgatg

SEQ ID NO: 5804 - DNA, 203 bp, synthetic construct
  source 1..203: mol_type = other DNA
ggcgcgccagtcctgacttacacctccggcaagtaacagagagctgccgggcatgtgctcaaatcaacgccggaaagataaagtttggacctgatgtaagggcccgaggccgccggcccggaacacattgggaagtagacttcactgaaatcaagccaggaatgtatggatataaatacctcttggtgcgactcggaccgatg

SEQ ID NO: 5805 - DNA, 203 bp, synthetic construct
  source 1..203: mol_type = other DNA
ggcgcgccagtcctccaatgtaaaacacggggcacgttactcctcctcaaagtatggatgtaaaactacagatagaaaaaaacagcaacaaacataccccttttacgtctgccccggacatgccccctcgctggggccaaagggaacacattgtggaggggcacaagatgggttttgtgccgcatgggcgactcggaccgatg

SEQ ID NO: 5806 - DNA, 203 bp, synthetic construct
  source 1..203: mol_type = other DNA
ggcgcgccagtcctctgaaagcgccccaaggtctgttgcccccaccaccgtgggtcccaaacggattgggaccggagataggttaataaatttagtacaagggacatacctagccttaaatgccaccgaccccaacaaaactaaagactgttggctctgcctggtttctcgaccaccctattacgaagcgactcggaccgatg

SEQ ID NO: 5807 - DNA, 203 bp, synthetic construct
  source 1..203: mol_type = other DNA
ggcgcgccagtcctggattgcaatcttaggtaactacagcaaccaaacaaacccccccccatcctgcctatctactccgcaacacaaactgaccatatctgaagtatcagggcaaggactgtgcatagggactgttcctaagacccaccaggctttgtgcaatgagacacaacagggacatacaggggcgactcggaccgatg

SEQ ID NO: 5808 - DNA, 203 bp, synthetic construct
  source 1..203: mol_type = other DNA
ggcgcgccagtcctcgcactatctagccgcccccaatggcgcctattgggcctgtaacactggactcaccccatgcatttccatggcggtgctcaattggacctctgatttttgtgtcttaatcgaattatggcccagagtgacttaccatcaacccgaatatgtgtacacacattttgccaaagctgcgactcggaccgatg

SEQ ID NO: 5809 - DNA, 203 bp, synthetic construct
  source 1..203: mol_type = other DNA
ggcgcgccagtcctttagtgccttagaaaagtccctgacctccctttctgaagtagtcttacaaaacagacggggcctagatattctattcttacaagagggagggctctgtgccgcattaaaagaagaatgttgcttctatgcggatcacaccggactcgtccgagacaatatggctaaattgagagcgactcggaccgatg

SEQ ID NO: 5810 - DNA, 203 bp, synthetic construct
  source 1..203: mol_type = other DNA
ggcgcgccagtcctaaagactaaaacagcggcaacaactgtttgactcccaacagggatggtttgaaggatggttcaacaagtccccctggttcacaaccttaatttcctccattatgggccccttactaatcctactcctaattctcctcttcggcccatgcatccttaacagattagtacaattcgcgactcggaccgatg

SEQ ID NO: 5811 - DNA, 203 bp, synthetic construct
  source 1..203: mol_type = other DNA
ggcgcgccagtcctgtggtgccatttcacaaggcatggaaaattactcaagtatgttcccatgagatacaaggaagttagaggctaaaacaggatatctgtggttaagcacctgggccccggcttgaggccaagaacagttaaaccccggatatagctgaaacagcagaagtttcaaggccgctaccacgactcggaccgatg

SEQ ID NO: 5812 - DNA, 203 bp, synthetic construct
  source 1..203: mol_type = other DNA
ggcgcgccagtcctgctataaaacgagccatcagcccccaacgggcgcgcaagtctttgctgagacttgaccgccccgggtacccgtgtacgaataaacctcttgctgattgcatctgactcgtggtctcggtgttctgtgggcgcggggtctcatcgccgaggaagacctagttcaggggtctttcacgactcggaccgatg

SEQ ID NO: 5813 - DNA, 203 bp, synthetic construct
  source 1..203: mol_type = other DNA
ggcgcgccagtccttgatgaacacgctgagtggtttgatgccggtggcttaggtccaagtacactacccactagtcatgaacggtacacacatgagaatgatgaaggccaccaggtaaagtggtcggctagggaaggtgtagaccttggcatatccgggctcacgacggtgtctgggcctgagtggaacgactcggaccgatg

SEQ ID NO: 5814 - DNA, 203 bp, synthetic construct
  source 1..203: mol_type = other DNA
ggcgcgccagtcctgcaaaggaagctcatctcctctggccggttttaccacccgacccaagattggtcccgagacactccagaattccaacaagacagcaagttagagatggttagggatgcagtgctagccgctataaatgggttggtgtcgcggccatttaaagatcttctgggtaagctcaaacccgactcggaccgatg

SEQ ID NO: 5815 - DNA, 203 bp, synthetic construct
  source 1..203: mol_type = other DNA
ggcgcgccagtcctcgtagtatcctctaccaatgctctcatatcccggatctcaatggctagggctgcattggccaaggctcaagctgaaatgaccagcaggatgcgtcctgtggtcattatgatgtgtgggccccctggtataggtaaaaccaaggcagcagaacatctggctaaacgcctagccaacgactcggaccgatg

SEQ ID NO: 5816 - DNA, 203 bp, synthetic construct
  source 1..203: mol_type = other DNA
ggcgcgccagtccttgagatacggcctggtggtaaggttgggctggtcccacgggaggcagtggatcattgggatggatatcacggagaggaagtgatgctgtgggacgactatggaatgacaaagatacaggaagactgtaataaactgcaagccatagccgactcagcccccctaacactcaattgcgactcggaccgatg

SEQ ID NO: 5817 - DNA, 203 bp, synthetic construct
  source 1..203: mol_type = other DNA
ggcgcgccagtccttgaccgaatagaaaacaagggaatgcaatttgtgtctgatgctatagtcatcaccaccaatgctcctggcccagccccagtggactttgtcaacctcgggcctgtttgccgaagggtggacttccttgtgtattgcacggcacctgaagttgaacacacgaggaaagtcagtcccgactcggaccgatg

SEQ ID NO: 5818 - DNA, 203 bp, synthetic construct
  source 1..203: mol_type = other DNA
ggcgcgccagtccttggggacacaactgcactgaaagactgcttcaagcccgatttctcacatctaaaaatggagttggctccccaagggggctttgataaccaagggaataccccgtttggtaagggtgtgatgaagcccaccaccataaacaggctgttaatccaggctgtagccttgacgatggacgactcggaccgatg

SEQ ID NO: 5819 - DNA, 203 bp, synthetic construct
  source 1..203: mol_type = other DNA
ggcgcgccagtcctcgcttcatgtttccagtccgccataactaccatactacaaatggcgggatctgcgctcgttattaatcgagcggtcaagcgtatgtttggtacccgtacagcagccatggcattagaaggacctgggaaagaacataattgcagggtccataaggctaaggaagctggaaagggcgactcggaccgatg

SEQ ID NO: 5820 - DNA, 203 bp, synthetic construct
  source 1..203: mol_type = other DNA
ggcgcgccagtcctggtcttctataaatccaagagtaagaaacaccaacaagagcaacggcgacaacttggtctagtgactggatcagacatcagaaaacgtaagcccattgactggaccccgccaaagaatgaatgggcagatgatgacagagaggtggattataatgaaaagatcaattttgaagccgactcggaccgatg

SEQ ID NO: 5821 - DNA, 203 bp, synthetic construct
  source 1..203: mol_type = other DNA
ggcgcgccagtccttcccccgacactatggagccgagtcacaaagtttggatcaggatggggcttttgggtcagcccgacagtgttcatcacaaccacacatgtagtgccaactggtgtgaaagaattctttggtgagcccctatctagtatagcaatccaccaagcaggtgagttcacacaattcagcgactcggaccgatg

SEQ ID NO: 5822 - DNA, 203 bp, synthetic construct
  source 1..203: mol_type = other DNA
ggcgcgccagtcctgttctcaaagaaaatgcgccctgacttgacaggtatggtccttgaagaaggttgccctgaagggacagtctgctcagtcctaattaaacgggattcgggtgaactacttccgctagccgtccgtatgggggctattgcctccatgaggatacagggtcggcttgtccatggccacgactcggaccgatg

SEQ ID NO: 5823 - DNA, 203 bp, synthetic construct
  source 1..203: mol_type = other DNA
ggcgcgccagtcctgggcgaaaccgcactagaaggtggagacaaggggcattatgccggccacgagattgtgaggtatggaagtggcccagcactgtcaactaaaacaaaattctggaggtcctccccagaaccactgccccccggagtatatgagccagcatacctggggggcaaggacccccgtgtcgactcggaccgatg

SEQ ID NO: 5824 - DNA, 203 bp, synthetic construct
  source 1..203: mol_type = other DNA
ggcgcgccagtcctatctcttgacaaaactactagttcggggtaccctcaccataaaaggaagaatgatgattggaatggcaccaccttcgttggagagctcggtgagcaagctgcacacgccaacaatatgtatgagaatgctaaacatatgaaacccatttacactgcagccttaaaagatgaactcgactcggaccgatg

SEQ ID NO: 5825 - DNA, 203 bp, synthetic construct
  source 1..203: mol_type = other DNA
ggcgcgccagtcctagtcaagccagaaaagatttatcaaaaagtcaagaagcgtctactatggggcgccgatctcggaacagtggtcagggccgcccgggcttttggcccattttgtgacgctataaaatcacatgtcatcaaattgccaataaaagttggcatgaacacaatagaagatggccccctcgactcggaccgatg

SEQ ID NO: 5826 - DNA, 203 bp, synthetic construct
  source 1..203: mol_type = other DNA
ggcgcgccagtcctcatctatgctgagcatgctaaatataagaatcattttgatgcagattatacagcatgggactcaacacaaaatagacaaattatgacagaatccttctccattatgtcgcgccttacggcctcaccagaattggccgaggttgtggcccaagatttgctagcaccatctgagatcgactcggaccgatg

SEQ ID NO: 5827 - DNA, 203 bp, synthetic construct
  source 1..203: mol_type = other DNA
ggcgcgccagtcctggatgtaggtgattatgtcatcagggtcaaagaggggctgccatctggattcccatgtacttcccaggtgaacagcataaatcactggataattactctctgtgcactgtctgaggccactggtttatcacctgatgtggtgcaatccatgtcatatttctcattttatggtgacgactcggaccgatg

SEQ ID NO: 5828 - DNA, 203 bp, synthetic construct
  source 1..203: mol_type = other DNA
ggcgcgccagtcctgttccaaggcaggttagatagggcttcgattgaacgccaaatcttctggacccgcgggcccaatcattcagatccatcagagactctagtgccacacactcaaagaaaaatacagttgatttcacttctaggggaagcttcactccatggtgagaaattttacagaaagatttccgactcggaccgatg

SEQ ID NO: 5829 - DNA, 203 bp, synthetic construct
  source 1..203: mol_type = other DNA
ggcgcgccagtcctgtgcccctctcccaatcagtagtatgggcatttccccagacaatgtccagagtgtgcagttccaaaatggtcggtgtactctggatggccgcctggttggcaccaccccagtttcattgtcacatgttgccaagataagagggacctccaatggcactgtaatcaaccttactgcgactcggaccgatg

SEQ ID NO: 5830 - DNA, 203 bp, synthetic construct
  source 1..203: mol_type = other DNA
ggcgcgccagtcctaattggatggcacaccctttcacccttttgagggccctgcccccattgggtttccagacctcggtggttgtgattggcatatcaatatgacacagtttggccattctagccagacccagtatgatgtagacaccacccctgacacttttgtcccccatcttggttcaattcaggcgactcggaccgatg

SEQ ID NO: 5831 - DNA, 203 bp, synthetic construct
  source 1..203: mol_type = other DNA
ggcgcgccagtcctcaaatggcattggcagtggtaattatgttggtgttcttagctggatttcccccccatcacacccgtctggctcccaagttgacctttggaagatccccaattatgggtcaagtattacggaggcaacacatctagccccttctgtatacccccctggtttcggagaggtattggcgactcggaccgatg

SEQ ID NO: 5832 - DNA, 203 bp, synthetic construct
  source 1..203: mol_type = other DNA
ggcgcgccagtcctcataattggtgcaattgctgcttccacagcaggtagtgctctgggagcgggcatacaggttggtggcgaagcggccctccaaagccaaaggtatcaacaaaatttgcaactgcaagaaaattcttttaaacatgacagggaaatgattgggtatcaggttgaagcttcaaatcacgactcggaccgatg

SEQ ID NO: 5833 - DNA, 203 bp, synthetic construct
  source 1..203: mol_type = other DNA
ggcgcgccagtcctattattggctaaaaatttggcaactagatattcactcctccgtgctgggggtttgaccagtgctgatgcagcaagatctgtggcaggagctccagtcacccgcattgtagattggaatggcgtgagagtgtctgctcccgagtcctctgctaccacattgagatccggtggcttcgactcggaccgatg

SEQ ID NO: 5834 - DNA, 203 bp, synthetic construct
  source 1..203: mol_type = other DNA
ggcgcgccagtcctgacaacaaccaacccactaatcagacatgagaacagaatggttttagccagcactacagctaaggctatggagcaaatggctggatcgagtgagcaagcagcagaggccatggaggttgctagtcaggctaggcaaatggtgcaagcgatgagaaccattgggactcatcctagcgactcggaccgatg

SEQ ID NO: 5835 - DNA, 203 bp, synthetic construct
  source 1..203: mol_type = other DNA
ggcgcgccagtcctctccagtgctggtctgaaaaatgatcttcttgaaaatttgcaggcctatcagaaacgaatgggggtgcagatgcaacggttcaagtgatcctctcgctattgccgcaaatatcattgggatcttgcacttgatattgtggattcttgatcgtctttttttcaaatgcatttacccgactcggaccgatg

SEQ ID NO: 5836 - DNA, 203 bp, synthetic construct
  source 1..203: mol_type = other DNA
ggcgcgccagtccttatgttatccaggagatttcatcgactatgaggagctgagggagcaattgagctcagtgtcatcattcgaaagattcgaaatatttcccaaagaaagctcatggcccaaccacaacacaaccaaaggagtaacggcagcatgctcccatgcggggaaaagcagtttttacagaacgactcggaccgatg

SEQ ID NO: 5837 - DNA, 203 bp, synthetic construct
  source 1..203: mol_type = other DNA
ggcgcgccagtcctattataacaggagatttaccccggaaatagcagaaagacccaaagtaagagatcaagctgggaggatgaactattactggaccttgctaaaacccggagacacaataatatttgaggcaaatggaaatctaatagcaccaaggtatgctttcgcactgagtagaggctttgggtcgactcggaccgatg

SEQ ID NO: 5838 - DNA, 203 bp, synthetic construct
  source 1..203: mol_type = other DNA
ggcgcgccagtcctatggggatctatcagattctggcgatctactcaactgtcgccagttcactggtgcttttggtctccctgggggcaatcagtttctggatgtgttctaatggatctttgcagtgcagaatatgcatctgagattagaatttcagaaatatgaggaaaaacacccttgtttctactcgactcggaccgatg

SEQ ID NO: 5839 - DNA, 203 bp, synthetic construct
  source 1..203: mol_type = other DNA
ggcgcgccagtcctctcacttggaatgcaggaccttttttctgacccaaggtgccttactgaatgacaggcattcaaatgggactgttaaggacagaagcccttatagggccttaatgagctgccctgtcggtgaagctccgtccccgtacaattcaagatttgaatcggttgcttggtcagcaagtgcgactcggaccgatg

SEQ ID NO: 5840 - DNA, 203 bp, synthetic construct
  source 1..203: mol_type = other DNA
ggcgcgccagtcctcatgtcatgatggcatgggctggctaacaatcggaatttcaggtccagataatggagcagtggctgtattaaaatacaacggcataataactgaaaccataaaaagttggaggaagaaaatattgaggacacaagagtctgaatgtgcctgtgtaaatggttcatgttttactacgactcggaccgatg

SEQ ID NO: 5841 - DNA, 203 bp, synthetic construct
  source 1..203: mol_type = other DNA
ggcgcgccagtccttagactgtataaggccgtgcttctgggttgaattaatcaggggacgacctaaagaaaaaacaatctggactagtgcgagcagcatttctttttgtggcgtgaatagtgatactgtagattggtcttggccagacggtgctgagttgccattcaccattgacaagtagtctgttccgactcggaccgatg

SEQ ID NO: 5842 - DNA, 203 bp, synthetic construct
  source 1..203: mol_type = other DNA
ggcgcgccagtcctgatcccaggatgtgctctctgatgcaaggttcaactctccctaggaggtctggagccgcaggtgctgcagtcaaaggagttggaacaatggtgatggaattggtcaggatgatcaaacgtgggatcaatgatcggaacttctggaggggtgagaatggacgaaaaacaagaattcgactcggaccgatg

SEQ ID NO: 5843 - DNA, 203 bp, synthetic construct
  source 1..203: mol_type = other DNA
ggcgcgccagtcctcattctgccgcatttgaagatctaagagtattgagcttcatcaaagggacgaaggtggtcccaagagggaagctttccactagaggagttcaaattgcttccaatgaaaatatggagactatggaatcaagtacacttgaactgagaagcaggtactgggccataaggaccagacgactcggaccgatg

SEQ ID NO: 5844 - DNA, 203 bp, synthetic construct
  source 1..203: mol_type = other DNA
ggcgcgccagtcctgcaaatgttgtaaggaagatgatgaccaattctcaggacaccgaactttctttgaccatcactggagataacaccaaatggaacgaaaatcagaatcctcggatgtttttggccatgatcacatatatgaccagaaatcagcccgaatggttcagaaatgttctaagtattgctcgactcggaccgatg

SEQ ID NO: 5845 - DNA, 203 bp, synthetic construct
  source 1..203: mol_type = other DNA
ggcgcgccagtccttcatttgaaataaagaaactgtgggagcaaacccgttccaaagctggactgctggtctccgacggaggcccaaatttatacaacattagaaatctccacattcctgaagtctgcctaaaatgggaattgatggatgaggattaccaggggcgtttatgcaacccactgaacccacgactcggaccgatg

SEQ ID NO: 5846 - DNA, 203 bp, synthetic construct
  source 1..203: mol_type = other DNA
ggcgcgccagtcctctgctgatggatgccttaaaattaagcattgaggacccaagtcatgaaggagagggaataccgctatatgatgcaatcaaatgcatgagaacattctttggatggaaggaacccaatgttgttaaaccacacgaaaagggaataaatccaaattatcttctgtcatggaagcaacgactcggaccgatg

SEQ ID NO: 5847 - DNA, 203 bp, synthetic construct
  source 1..203: mol_type = other DNA
ggcgcgccagtcctattaaaatgaaatggggaatggagatgaggcgttgtctcctccagtcacttcaacaaattgagagtatgattgaagctgagtcctctgtcaaagagaaagacatgaccaaagagttctttgagaacaaatcagaaacatggcccattggagagtctcccaaaggagtggaggaacgactcggaccgatg

SEQ ID NO: 5848 - DNA, 203 bp, synthetic construct
  source 1..203: mol_type = other DNA
ggcgcgccagtcctagttccattgggaaggtctgcaggactttattagcaaagtcggtatttaacagcttgtatgcatctccacaactagaaggattttcagctgaatcaagaaaactgcttcttatcgttcaggctcttagggacaatctggaacctgggacctttgatcttggggggctatatgaacgactcggaccgatg

SEQ ID NO: 5849 - DNA, 203 bp, synthetic construct
  source 1..203: mol_type = other DNA
ggcgcgccagtcctacaagcagtgtgtacattgaagtgttgcatttgactcaaggaacatgctgggaacagatgtatactccaggaggggaagtgaagaatgatgatgttgatcaaagcttgattattgctgctaggaacatagtgagaagagctgcagtatcagcagacccactagcatctttattgcgactcggaccgatg

SEQ ID NO: 5850 - DNA, 203 bp, synthetic construct
  source 1..203: mol_type = other DNA
ggcgcgccagtcctgagatgtgccacagcacacagattggtggaattaggatggtagacatccttaagcagaacccaacagaagagcaagccgtgggtatatgcaaggctgcaatgggactgagaattagctcatccttcagttttggtggattcacatttaagagaacaagcggatcatcagtcaagcgactcggaccgatg

SEQ ID NO: 5851 - DNA, 203 bp, synthetic construct
  source 1..203: mol_type = other DNA
ggcgcgccagtcctagagaggaagaggtgcttacgggcaatcttcaaacattgaagataagagtgcatgagggatatgaagagttcacaatggttgggagaagagcaacagccatactcagaaaagcaaccaggagattgattcagctgatagtgagtgggagagacgaacagtcgattgccgaagcacgactcggaccgatg

SEQ ID NO: 5852 - DNA, 203 bp, synthetic construct
  source 1..203: mol_type = other DNA
ggcgcgccagtccttctcccgaggaggtcagtgaaacacagggaacagagaaactgacaataacttactcatcgtcaatgatgtgggagattaatggtcctgaatcagtgttggtcaatacctatcaatggatcatcagaaactgggaaactgttaaaattcagtggtcccagaaccctacaatgctacgactcggaccgatg

SEQ ID NO: 5853 - DNA, 203 bp, synthetic construct
  source 1..203: mol_type = other DNA
ggcgcgccagtccttccgctgttctgaggggattcctcattctgggcaaagaagacaggagatatgggccagcattaagcatcaatgaactgagcaaccttgcgaaaggagagaaggctaatgtgctaattgggcaaggagacgtggtgttggtaatgaaacgaaaacgggactctagcatacttactcgactcggaccgatg

SEQ ID NO: 5854 - DNA, 203 bp, synthetic construct
  source 1..203: mol_type = other DNA
ggcgcgccagtcctcttggctgttctaaggaaagtcaagagagtggtggccagtttgatgagaggattgtcctcaaggaaacgccgttcccatgatgttctgactgtgcaattcctaattttgggaatgctgttgatgacgggtggagtgaccttggtgcggaaaaacagatggttgctcctaaatgtcgactcggaccgatg

SEQ ID NO: 5855 - DNA, 203 bp, synthetic construct
  source 1..203: mol_type = other DNA
ggcgcgccagtcctttttgcagtgacggctctgaccattgcctaccttgtgggaagcaacatgacgcaacgagtcgtgattgccctactggtcttggctgttggtccggcctactcagctcactgcattggaattactgacagggatttcattgagggggtgcatggaggaacttgggtttcagctaccgactcggaccgatg

SEQ ID NO: 5856 - DNA, 203 bp, synthetic construct
  source 1..203: mol_type = other DNA
ggcgcgccagtcctcctggagcaagacaagtgtgtcactgttatggcccctgacaagccttcattggacatctcactagagacagtagccattgatagacctgctgaggtgaggaaagtgtgttacaatgcagttctcactcatgtgaagattaatgacaagtgccccagcactggagaggcccacctcgactcggaccgatg

SEQ ID NO: 5857 - DNA, 203 bp, synthetic construct
  source 1..203: mol_type = other DNA
ggcgcgccagtcctagctgaagagaacgaaggggacaatgcgtgcaagcgcacttattctgatagaggctggggcaatggctgtggcctatttgggaaagggagcattgtggcatgcgccaaattcacttgtgccaaatccatgagtttgtttgaggttgatcagaccaaaattcagtatgtcatcagcgactcggaccgatg

SEQ ID NO: 5858 - DNA, 203 bp, synthetic construct
  source 1..203: mol_type = other DNA
ggcgcgccagtcctccatggcactgttgtgatgcaggtgaaagtgtcaaaaggagccccctgcaggattccagtgatagtagctgatgatcttacagcggcaatcaataaaggcattttggttacagttaaccccatcgcctcaaccaatgatgatgaagtgctgattgaggtgaacccaccttttggcgactcggaccgatg

SEQ ID NO: 5859 - DNA, 203 bp, synthetic construct
  source 1..203: mol_type = other DNA
ggcgcgccagtccttctaggagttggggcggatcaaggatgcgccatcaactttggcaagagagagctcaagtgcggagatggtatcttcatatttagagactctgatgactggctgaacaagtactcatactatccagaagatcctgtgaagcttgcatcaatagtgaaagcctcttttgaagaaggcgactcggaccgatg

SEQ ID NO: 5860 - DNA, 203 bp, synthetic construct
  source 1..203: mol_type = other DNA
ggcgcgccagtcctgcagtatggttggaagacttggggtaagaaccttgtgttctccccagggaggaagaatggaagcttcatcatagatggaaagtccaggaaagaatgcccgttttcaaaccgggtctggaattctttccagatagaggagtttgggacgggagtgttcaccacacgcgtgtacatcgactcggaccgatg

SEQ ID NO: 5861 - DNA, 203 bp, synthetic construct
  source 1..203: mol_type = other DNA
ggcgcgccagtcctgatcattgatggcaactgtgatggacggggaaaatcaaccagatccaccacggatagcgggaaagttattcctgaatggtgttgccgctcctgcacaatgccgcctgtgagcttccatggtagtgatgggtgttggtatcccatggaaattaggccaaggaaaacgcatgaaagcgactcggaccgatg

SEQ ID NO: 5862 - DNA, 203 bp, synthetic construct
  source 1..203: mol_type = other DNA
ggcgcgccagtccttgatttgctgaaactcacagtggctgtgggattgcatttccatgagatgaacaatggaggagacgccatgtatatggcgttgattgctgccttttcaatcagaccagggctgctcatcggctttgggctcaggaccctatggagccctcgggaacgccttgtgctgaccctaggcgactcggaccgatg

SEQ ID NO: 5863 - DNA, 203 bp, synthetic construct
  source 1..203: mol_type = other DNA
ggcgcgccagtcctggaaccaactagggttgttaactgggaagtgatcattatggatgaagcccattttttggatccagctagcatagccgctagaggttgggcagcgcacagagctagggcaaatgaaagtgcaacaatcttgatgacagccacaccgcctgggactagtgatgaatttccacattccgactcggaccgatg

SEQ ID NO: 5864 - DNA, 203 bp, synthetic construct
  source 1..203: mol_type = other DNA
ggcgcgccagtcctgccacttcgtatctccgcatcctctgctgctcaaaggagggggcgcattgggagaaatcccaacagagatggagactcatactactattctgagcctacaagtgaaaataatgcccaccacgtctgctggttggaggcctcaatgctcttggacaacatggaggtgaggggtggcgactcggaccgatg

SEQ ID NO: 5865 - DNA, 203 bp, synthetic construct
  source 1..203: mol_type = other DNA
ggcgcgccagtcctaatggtcgccccactctatggcgttgaaggaactaaaacaccagtttcccctggtgaaatgagactgagggatgaccagaggaaagtcttcagagaactagtgaggaattgtgacctgcccgtttggctttcgtggcaagtggccaaggctggtttgaagacgaatgatcgtaacgactcggaccgatg

SEQ ID NO: 5866 - DNA, 203 bp, synthetic construct
  source 1..203: mol_type = other DNA
ggcgcgccagtcctgtggtgttttgaaggccctgaggaacatgagatcttgaatgacagcggtgaaacagtgaagtgcagggctcctggaggagcaaagaagcctctgcgcccaaggtggtgtgatgaaagggtgtcatctgaccagagtgcgctgtctgaatttattaagtttgctgaaggtaggagcgactcggaccgatg

SEQ ID NO: 5867 - DNA, 203 bp, synthetic construct
  source 1..203: mol_type = other DNA
ggcgcgccagtcctgggagctgctgaagtgctagttgtgctgagtgaactccctgatttcctggctaaaaaaggtggagaggcaatggataccatcagtgtgttcctccactctgaggaaggctctagggcttaccgcaatgcactatcaatgatgcctgaggcaatgacaatagtcatgctgtttatcgactcggaccgatg

SEQ ID NO: 5868 - DNA, 203 bp, synthetic construct
  source 1..203: mol_type = other DNA
ggcgcgccagtcctggttgtgatccccgagccagggcaacaaaggtccatccaagacaaccaagtggcatacctcattattggcatcctgacgctggtttcagcggtggcagccaacgagctaggcatgctggagaaaaccaaagaggacctctttgggaagaagaacttaattccatctagtgcttccgactcggaccgatg

SEQ ID NO: 5869 - DNA, 203 bp, synthetic construct
  source 1..203: mol_type = other DNA
ggcgcgccagtcctaccctggagttggccggatcttgacctgaagccaggagctgcctggacagtgtacgttggcattgttacaatgctctctccaatgttgcaccactggatcaaagtcgaatatggcaacctgtctctgtctggaatagcccagtcagcctcagtcctttctttcatggacaagggcgactcggaccgatg

SEQ ID NO: 5870 - DNA, 203 bp, synthetic construct
  source 1..203: mol_type = other DNA
ggcgcgccagtcctgataccattcatgaagatgaatatctcggtcataatgctgctggtcagtggctggaattcaataacagtgatgcctctgctctgtggcatagggtgcgccatgctccactggtctctcattttacctggaatcaaagcgcagcagtcaaagcttgcacagagaagggtgttccacgactcggaccgatg

SEQ ID NO: 5871 - DNA, 203 bp, synthetic construct
  source 1..203: mol_type = other DNA
ggcgcgccagtccttggcgttgccgagaaccctgtggttgatgggaatccaacagttgacattgaggaagctcctgaaatgcctgccctttatgagaagaaactggctctatatctccttcttgctctcagcctagcttctgttgccatgtgcagaacgcccttttcattggctgaaggcattgtcctcgactcggaccgatg

SEQ ID NO: 5872 - DNA, 203 bp, synthetic construct
  source 1..203: mol_type = other DNA
ggcgcgccagtccttttgggtgaagtctggaagagggaactgaatctgttggacaagcgacagtttgagttgtataaaaggaccgacattgtggaggtggatcgtgatacggcacgcaggcatttggccgaagggaaggtggacaccggggtggcggtctccagggggaccgcaaagttaaggtggttcgactcggaccgatg

SEQ ID NO: 5873 - DNA, 203 bp, synthetic construct
  source 1..203: mol_type = other DNA
ggcgcgccagtcctcatcaccttcaaggacaaaactgatatccaccgcctagaaccagtgaaatgtgacacccttttgtgtgacattggagagtcatcatcgtcatcggtcacagagggggaaaggaccgtgagagttcttgatactgtagaaaaatggctggcttgtggggttgacaacttctgtgtcgactcggaccgatg

SEQ ID NO: 5874 - DNA, 203 bp, synthetic construct
  source 1..203: mol_type = other DNA
ggcgcgccagtcctaagccgtgccatatggtatatgtggctgggagcgcggtatcttgagtttgaggccctgggattcctgaatgaggaccattgggcttccagggaaaactcaggaggaggagtggaaggcattggcttacaatacctaggatatgtgatcagagacctggctgcaatggatggtggcgactcggaccgatg

SEQ ID NO: 5875 - DNA, 203 bp, synthetic construct
  source 1..203: mol_type = other DNA
ggcgcgccagtccttggattctacgcggatgacaccgctggatgggacacgcgcatcacagaggcagaccttgatgatgaacaggagatcttgaactacatgagcccacatcacaaaaaactggcacaagcagtgatggaaatgacatacaagaacaaagtggtgaaagtgttgagaccagccccaggcgactcggaccgatg

SEQ ID NO: 5876 - DNA, 203 bp, synthetic construct
  source 1..203: mol_type = other DNA
ggcgcgccagtcctcaggctggaggcatggctcactgagcacggatgtgacagactgaagaggatggcggtgagtggagacgactgtgtggtccggcccatcgatgacaggttcggcctggccctgtcccatctcaacgccatgtccaaggttagaaaggacatatctgaatggcagccatcaaaaggcgactcggaccgatg

SEQ ID NO: 5877 - DNA, 203 bp, synthetic construct
  source 1..203: mol_type = other DNA
ggcgcgccagtcctgtggaatgattgggagaatgtgcccttctgttcccaccacttccatgaactacagctgaaggatggcaggaggattgtggtgccttgccgagaacaggacgagctcattgggagaggaagggtgtctccaggaaacggctggatgatcaaggaaacagcttgcctcagcaaagccgactcggaccgatg

SEQ ID NO: 5878 - DNA, 203 bp, synthetic construct
  source 1..203: mol_type = other DNA
ggcgcgccagtcctagtatggataaccaacaacccacacatgcaggacaagacaatggtgaaaaaatggagagatgtcccttatctaaccaagagacaagacaagctgtgcggatcactgattggaatgaccaatagggccacctgggcctcccacatccatttagtcatccatcgtatccgaacgctcgactcggaccgatg

SEQ ID NO: 5879 - DNA, 203 bp, synthetic construct
  source 1..203: mol_type = other DNA
ggcgcgccagtcctgattggacaggagaaatacactgactacctaacagtcatggacaggtattctgtggatgctgacctgcaactgggtgagcttatctgaaacaccatctaacaggaataaccgggatacaaaccacgggtggagaaccggactccccacaacctgaaaccgggatataaaccacgcgactcggaccgatg

SEQ ID NO: 5880 - DNA, 203 bp, synthetic construct
  source 1..203: mol_type = other DNA
ggcgcgccagtcctgctggagaaccgggctccgcacttaaaatgaaacagaaaccgggataaaaactacggatggagaaccggactccacacattgagacagaagaagttgtcagcccagaaccccacacgagttttgccactgctaagctgtgaggcagtgcaggctgggacagccgacctccaggtcgactcggaccgatg

SEQ ID NO: 5881 - DNA, 203 bp, synthetic construct
  source 1..203: mol_type = other DNA
ggcgcgccagtcctatggcacatggagttgttttcaaatgaacttttatacaaaacatataaacaaaaaccagcaggcgtcgtggaacctgtttacgacgtcaacgggcgtccactgtttggagagagcagtgacttgcacccgcagtccacactaaaactaccacaccaacgaggcagcgccaacatcgactcggaccgatg

SEQ ID NO: 5882 - DNA, 203 bp, synthetic construct
  source 1..203: mol_type = other DNA
ggcgcgccagtcctcctgaccaatgctaggtccctaccgcggaaaggtgactgccggagaggtaatgtgaatggagcggtgagtggcatctatatcaaaccaggaccgatctactaccaggactatgtggggcccgtctatcatagagccccactggaactatgtagggaggcaagtatgtgtgaaaccgactcggaccgatg

SEQ ID NO: 5883 - DNA, 203 bp, synthetic construct
  source 1..203: mol_type = other DNA
ggcgcgccagtcctgaacaaacatggttggtgtaactggtttcatatagaaccgtggatatggctgatgaacaaaacccaaaacaacctgacagaagggcagccgcttagggagtgtgctgtgacttgtaggtatgacaaggaagcagaattgaacattgtgacacaggctagggacaggcctacaaccgactcggaccgatg

SEQ ID NO: 5884 - DNA, 203 bp, synthetic construct
  source 1..203: mol_type = other DNA
ggcgcgccagtccttctgacaggctgcaacaaaggcaagaatttctccttcgcaggtgttgtactggacaggccctgtaactttaaagtatcggttgaagatgtgctgttcaaggagcacgattgcggcaacatgctgcaagagaccgcgatacagatactcgatggggcaaccaacaccattgagggcgactcggaccgatg

SEQ ID NO: 5885 - DNA, 203 bp, synthetic construct
  source 1..203: mol_type = other DNA
ggcgcgccagtcctagcaagggtagggacggccaagttgacaacctggttagggaagcaattagggatccttggtaagaagttggagaataaaagcaaagcatggtttggtgcacatgcagcaagtccatactgcggagtggagaagaagatcggttacgtctggtatacaaaaaactgcactccagccgactcggaccgatg

SEQ ID NO: 5886 - DNA, 203 bp, synthetic construct
  source 1..203: mol_type = other DNA
ggcgcgccagtcctgaagaggtacctagtggctgtgcacgagagagccctatcaaccagtgctgagtttatgcagatcagtgatgggacaatagccccagatgtgatagatatgactgatgactttgagtttggactctgcccttgtgactcaaaaccagtgataaagggcaaatttaatgccagcttcgactcggaccgatg

SEQ ID NO: 5887 - DNA, 203 bp, synthetic construct
  source 1..203: mol_type = other DNA
ggcgcgccagtcctagtttatgacatctgtgacaatgaagaagcagtgtacctgtttccatcaaggcataagagtggaagcagaccggatttcatattaccttttttgaaagccgtgttaataagctgcatcagtagccaatggcaattggtttacattacttacctaatactggaaattacatactacgactcggaccgatg

SEQ ID NO: 5888 - DNA, 203 bp, synthetic construct
  source 1..203: mol_type = other DNA
ggcgcgccagtccttgtaaaaaaattgactagtatgaacagaggagagttcaaacagataacattggccactggggcaggaaaaactacggaactgccaagatccgtcatagaggagatagggaggcacaaaagggtcttagtcctgataccattgagagctgcagcagagtcagtgtatcagtatatcgactcggaccgatg

SEQ ID NO: 5889 - DNA, 203 bp, synthetic construct
  source 1..203: mol_type = other DNA
ggcgcgccagtcctgagagtgaagtacccaagtatatctttcaatttgagaataggagatatgaaggaaggtgacatggctactggtatcacttactcctcatatcggtactttttccagcttccccagcccaaactgaaaactgccatggtagagtattcatatatattcttagatgagtaccactgcgactcggaccgatg

SEQ ID NO: 5890 - DNA, 203 bp, synthetic construct
  source 1..203: mol_type = other DNA
ggcgcgccagtccttgctacacccgagcaattagcaataattggaaagatacacaggtttgctgaaaatcttagagtggtagcaatgacagcaaccccagctggaacggtcacaacgactggtcagaaacaccctatagaggagttcatagccccagaggtgatgaagggtgaagatctaggtagtgacgactcggaccgatg

SEQ ID NO: 5891 - DNA, 203 bp, synthetic construct
  source 1..203: mol_type = other DNA
ggcgcgccagtcctctcgcaatccccgtatgtggtagtaagcaccaatgccatagagtcaggtgtgacattgccagacttagacacagttgtagacactggactaaggtgtgaaaagagggtgaggatatcttcaaaaatgcccttcattgtaacaggacttaagagaatggcagtcacaataggagacgactcggaccgatg

SEQ ID NO: 5892 - DNA, 203 bp, synthetic construct
  source 1..203: mol_type = other DNA
ggcgcgccagtcctgagcctttatgaagaggacagcctgatgataactcaactcgaggtcctcaacaacctccttatatcagaagacctgcctgccgcagtgaagaacatcatggccgggaccgatcacccagaacccatacaactggcctataacagttatgaaaaccaaattccagtgctgttccccgactcggaccgatg

SEQ ID NO: 5893 - DNA, 203 bp, synthetic construct
  source 1..203: mol_type = other DNA
ggcgcgccagtcctaaagatcaaaaatggtgaggtgacagacagttacgagaattacacatacctcaatgcaagaaaactaggagaggacgtgccggcatatgtgtacgccacagaggatgaggatctagcagtggatcttctgggtatggattggccggacccaggcagccaacaggtggtggagaccgactcggaccgatg

SEQ ID NO: 5894 - DNA, 203 bp, synthetic construct
  source 1..203: mol_type = other DNA
ggcgcgccagtcctcccaaacgccataaggactgacggcaaggacacagagttgaaggaattagctgtgggagaccttgataaatatgtggatgcactggtagactactccaaacaagggatgaaatttatcaaagtccaagctgaaaaggtcaaagactcccagtctacaaaggaaggcttgcaaaccgactcggaccgatg

SEQ ID NO: 5895 - DNA, 203 bp, synthetic construct
  source 1..203: mol_type = other DNA
ggcgcgccagtccttctgcaacgcgtcgtcgaacctgccttagcatacctcccatatgctacaagttccttgaagtcgttcgcacccacaagattagagagtgtggtcatactcagttctacaatttacaagacatacctatccataaggaagggtaagagtgacggcttgctaggtacaggcataagcgactcggaccgatg

SEQ ID NO: 5896 - DNA, 203 bp, synthetic construct
  source 1..203: mol_type = other DNA
ggcgcgccagtcctgataggttttaaaggtgcatatttgggtgaccgaccagactatcaagatcttgtcgatagagattgtgcaactataacgaagaactcagtacagttcctaaaaatgaagaagggttgcgctttcacatatgacctaacaatctctaaccttgtcaggcttattgaactagtccacgactcggaccgatg

SEQ ID NO: 5897 - DNA, 203 bp, synthetic construct
  source 1..203: mol_type = other DNA
ggcgcgccagtcctagatgagaaagtagacaggccttttgttctaattattggaaacaaaggttctacctcaaatagagcaagaacggccaagaatatacggctttataaaggaaataacccaagagagatcagggatctgatgagccaaggaagaatattgacggttgctctaaaagagttggaccccgactcggaccgatg

SEQ ID NO: 5898 - DNA, 203 bp, synthetic construct
  source 1..203: mol_type = other DNA
ggcgcgccagtcctacagatgagtctagcccccctctttgaagagctgttattaaagtgccctccatgtagtaaaatttcaaagggacatatggtgtcagactaccaactggctcaaggaaactgggaacccttcgggtgtggggtctatatgggaaccataccagctaggcgtctcaagatccaccccgactcggaccgatg

SEQ ID NO: 5899 - DNA, 203 bp, synthetic construct
  source 1..203: mol_type = other DNA
ggcgcgccagtcctcagagatggacacaaaagaaacatatataataagatcataggctcaacaatggcctctgctggtattaggctggagaaactgccagtagtccgagcccaaaccgacacaaccagtttccaccaggctataagagaaaaaattgataaaccagaaaacaagcagacccctggattcgactcggaccgatg

SEQ ID NO: 5900 - DNA, 203 bp, synthetic construct
  source 1..203: mol_type = other DNA
ggcgcgccagtcctagtgatgtacaagtgggtaaagcaaaaaccagtggtgatacccggctatgaaggtaaaacaccgcattttgacatattcaacaaagtgaagaaggaatgggattcattccaggaccccgtggcagtgagctttgacaccaaagcatgggatacacaagtcaccagtagagacctcgactcggaccgatg

SEQ ID NO: 5901 - DNA, 203 bp, synthetic construct
  source 1..203: mol_type = other DNA
ggcgcgccagtcctgaagccccagaaaataactgaaggggacaaaatgaaagtggcatatagatttgaggacatcgagttttgttcccatactcccgtgccagtaagatgggcagataacaccagtagttacatggcagggaggagcacagccactatactagctaagatggcaaccaggttggattccgactcggaccgatg

SEQ ID NO: 5902 - DNA, 203 bp, synthetic construct
  source 1..203: mol_type = other DNA
ggcgcgccagtcctttccccggtgatgtcgtatagactgcttgcgtggttgaaagcgacggatccgttatccgcttatgtacttcgagaagcccagtaccacctcggaatcttcgatgcgttgcgctcagcactcaaccccagagtgtagcttaggctgatgagtctggacatccctcaccggtgacgcgactcggaccgatg

SEQ ID NO: 5903 - DNA, 203 bp, synthetic construct
  source 1..203: mol_type = other DNA
ggcgcgccagtcctgtggtccaggctgcgttggcggcctacctatggctaacgccatgggacgctagttgtgaacaaggtgtgaagagcctattgagctacataagaatcctccggcccctgaatgcggctaatcccaacctcggagcaggtggtcacaaaccagtgattggcctgtcgtaacgcgcacgactcggaccgatg

SEQ ID NO: 5904 - DNA, 203 bp, synthetic construct
  source 1..203: mol_type = other DNA
ggcgcgccagtcctactctttgggcaaaatatgtactaccactacctaggtaggtccgggtacaccgtgcatgtacagtgtaacgcctccaaattccaccagggggcactaggggtattcgccgtaccagagatgtgtctggccggggatagcaacaccactaccatgcacaccagctatcaaaatgccgactcggaccgatg

SEQ ID NO: 5905 - DNA, 203 bp, synthetic construct
  source 1..203: mol_type = other DNA
ggcgcgccagtcctggtagtgccatggattagcaacaccacgtatcggcaaaccatagatgatagtttcaccgaaggcggatacatcagcgtcttctaccaaactagaatagtcgtccctctttcgacacccagagagatggacatccttggttttgtgtcagcgtgtaatgacttcagcgtgcgcttcgactcggaccgatg

SEQ ID NO: 5906 - DNA, 203 bp, synthetic construct
  source 1..203: mol_type = other DNA
ggcgcgccagtcctgttgcgagataccacacatatagagcaaaaagcgctagcacaggggttaggtcagatgcttgaaagcatgattgacaacacagtccgtgaaacggtgggggcggcaacatctagagacgctctcccaaacactgaagccagtggaccaacacactccaaggaaattccggcactcgactcggaccgatg

SEQ ID NO: 5907 - DNA, 203 bp, synthetic construct
  source 1..203: mol_type = other DNA
ggcgcgccagtcctcaccgcagtggaaactggggccacaaatccactagtcccttctgatacagtgcaaaccagacatgttgtacaacataggtcaaggtcagagtctagcatagagtctttcttcgcgcggggtgcatgcgtgaccattatgaccgtggataacccagcttccaccacgaataaggacgactcggaccgatg

SEQ ID NO: 5908 - DNA, 203 bp, synthetic construct
  source 1..203: mol_type = other DNA
ggcgcgccagtccttaagctatttgcagtgtggaagatcacttataaagatactgtccagttacggaggaaattggagttcttcacctattctagatttgatatggaacttacctttgtggttactgcaaatttcactgagactaacaatgggcatgccttaaatcaagtgtaccaaattatgtacgtcgactcggaccgatg

SEQ ID NO: 5909 - DNA, 203 bp, synthetic construct
  source 1..203: mol_type = other DNA
ggcgcgccagtcctggaccagtcggcagcactaggtgactccctttatggtgcagcatctctaaatgacttcggtattttggctgttagagtagtcaatgatcacaacccgaccaaggtcacctccaaaatcagagtgtatctaaaacccaaacacatcagagtctggtgcccgcgtccaccgagggccgactcggaccgatg

SEQ ID NO: 5910 - DNA, 203 bp, synthetic construct
  source 1..203: mol_type = other DNA
ggcgcgccagtcctagtggcgtactacggccctggagtggattacaaggatggtacgcttacacccctctccaccaaggatctgaccacatatggattcggacaccaaaacaaagcggtgtacactgcaggttacaaaatttgcaactaccacttggccactcaggatgatttgcaaaacgcagtgaacgactcggaccgatg

SEQ ID NO: 5911 - DNA, 203 bp, synthetic construct
  source 1..203: mol_type = other DNA
ggcgcgccagtcctcgtcatgtggagtagagacctcttagtcacagaatcaagagcccagggcaccgattcaatcgcaaggtgcaattgcaacgcaggggtgtactactgcgagtctagaaggaaatactacccagtatccttcgttggcccaacgttccagtacatggaggctaataactattaccccgactcggaccgatg

SEQ ID NO: 5912 - DNA, 203 bp, synthetic construct
  source 1..203: mol_type = other DNA
ggcgcgccagtcctctatgaagacaccacaacagtgctcgctaccctggcccttcttgggtgtgatgcttcaccatggcagtggcttagaaagaaagcatgcgatgttctggagataccttatgtcatcaagcaaggtgacagttggttgaagaagtttactgaagcatgcaacgcagctaagggactcgactcggaccgatg

SEQ ID NO: 5913 - DNA, 203 bp, synthetic construct
  source 1..203: mol_type = other DNA
ggcgcgccagtcctgatggtatcaacagtggagtttataccacccatggcatccctggaggagaaaggaatcctgtttacttcaaattacgttctagcatccacaaactcaagcagaatttccccccccactgtggcacacagtgatgcattagccaggcgctttgcgttcgacatggacattcaggtcgactcggaccgatg

SEQ ID NO: 5914 - DNA, 203 bp, synthetic construct
  source 1..203: mol_type = other DNA
ggcgcgccagtcctcaaaaaacccaacgtgcccaccattcggacagcaaaggtacaaggaccagggttcgattacgcagtggctatggctaaaagaaacattgttacagcaactactagcaagggagagttcactatgttaggagtccacgacaacgtggctattttaccaacccacgcttcacctggcgactcggaccgatg

SEQ ID NO: 5915 - DNA, 203 bp, synthetic construct
  source 1..203: mol_type = other DNA
ggcgcgccagtcctcctcccactggtgacttatgtaaaggatgaacttagatccaaaacaaaggttgagcaggggaaatccagattaattgaagcttctagtttgaatgactcagtggcaatgagaatggcttttgggaacctatatgctgcttttcacaaaaacccaggagtgataacaggttcagccgactcggaccgatg

SEQ ID NO: 5916 - DNA, 203 bp, synthetic construct
  source 1..203: mol_type = other DNA
ggcgcgccagtcctcagggtaggtgcattgataacattattctctcttccctcagcaggcatgcaaaatcatattagattggcagatagatcacctgaagctcagatagaacgctgtgagattgacggttttgagccaggcacatataggctaattccgaatgcacgcgccaatcttactgccaatgacgactcggaccgatg

SEQ ID NO: 5917 - DNA, 203 bp, synthetic construct
  source 1..203: mol_type = other DNA
ggcgcgccagtcctaattgctgcctatgctttgcttgcagatgacctccctccaaccataaataatggaactccctatgtacatgcagatgttgaaggacagccatgtgatgagattgagcaattcctagatcgatgctacagtgtactaatccaggcttgggtgatggtctgtaaatgtatgacagccgactcggaccgatg

SEQ ID NO: 5918 - DNA, 203 bp, synthetic construct
  source 1..203: mol_type = other DNA
ggcgcgccagtccttggttattatttccagattggggttgagactgcacgacggcaacaaggcactgttgacaacagagtagcagatgatctaggcctgactcctgagcaaaggactgaggttactcagcttattgacaggcttgcaaggggcagaggtgcggggataccaggtgggcccgtgaatcccgactcggaccgatg

SEQ ID NO: 5919 - DNA, 203 bp, synthetic construct
  source 1..203: mol_type = other DNA
ggcgcgccagtcctcccgtcctgcaaagcagccaaaaccccaaccagtaaaggatttagcaggacggaaagtgatgataactaaaatgatcactgactgtgtggccaatcctcaaatgaagcaggtgtttgagcaacgattggcaaaggccagcaccgaggatgctctgaatgatatcaagcgagacacgactcggaccgatg

SEQ ID NO: 5920 - DNA, 203 bp, synthetic construct
  source 1..203: mol_type = other DNA
ggcgcgccagtccttcatctctgaatcatcacaacagaaggtgactcctgtagtgacggcgtgcatgctgtccttcggtgctggaccagtcctagaagacccacaacatatgctgaaagctcttgatcagacagacatcagggttcggaagacagcgagtgataaagagcagatcttattcgagatcacgactcggaccgatg

SEQ ID NO: 5921 - DNA, 203 bp, synthetic construct
  source 1..203: mol_type = other DNA
ggcgcgccagtcctaagcttttaccgaatatccaacccactgataacagctgtgaatttaagagtgtaactcaatacaataagaccttgagtaatttgcttcttccaattgcagaaaacataaacaatattgcatcgccctcatctgggtcaagacggcataaaaggtttgctggcattgctattggccgactcggaccgatg

SEQ ID NO: 5922 - DNA, 203 bp, synthetic construct
  source 1..203: mol_type = other DNA
ggcgcgccagtcctattgctgcgctcggtgttgcgaccgcagcacaagtaactgccgctgtctcattagttcaagcacagacgaatgcacgtgcaatagcggcgatgaaaaattcaatacaagcaactaatcgagcagtcttcgaagtgaaggaaggcactcaacggttagctatagcggtacaagcacgactcggaccgatg

SEQ ID NO: 5923 - DNA, 203 bp, synthetic construct
  source 1..203: mol_type = other DNA
ggcgcgccagtcctcatgcagtcacgaccattgatctaaccgcatgtcaaacattgtccctagacggattggatttcagcattgtctctctaagcaacatcacttatgctgagaaccttaccatttcattgtctcagacaatcaatactcaacccattgacatatcaactgaactgagtaaggttaatcgactcggaccgatg

SEQ ID NO: 5924 - DNA, 203 bp, synthetic construct
  source 1..203: mol_type = other DNA
ggcgcgccagtcctgatggagccctccaaactcttcacaatgtcagacaatgccacctttgcacctgggcctgttatcaatgcggctgacaagaagacattccgaacctgcttccgaatattggtactgtctgtacaagctgttacccttatattagttattgtcactttaggtgagcttgtgaggatcgactcggaccgatg

SEQ ID NO: 5925 - DNA, 203 bp, synthetic construct
  source 1..203: mol_type = other DNA
ggcgcgccagtcctgatcaatgatcaaggcttgagcaatcagttgtcttcaattgcagacaagataagagagtcagctactatgattgcatctgctgtgggagtaatgaatcaagttattcacggagtaacggtatccttacccctacaaattgagggaaaccaaaatcaattgttatccacgcttgccgactcggaccgatg

SEQ ID NO: 5926 - DNA, 203 bp, synthetic construct
  source 1..203: mol_type = other DNA
ggcgcgccagtcctagtaaccattgtggatactaggtccactctatgcattattgccccagaattagttgctttatactccaatgagcacaaagcattaacgtacctcacctttgaaatggtattaatggtcactgatatgttagagggacgactcaatgtttcttctttgtgcacagctagtcattacgactcggaccgatg

SEQ ID NO: 5927 - DNA, 203 bp, synthetic construct
  source 1..203: mol_type = other DNA
ggcgcgccagtccttctgtcccctctaaagaagagaatcgaaattctcctaacattagttgatgaccttgctctacttatgggggacaaagtatacggtgttgtctcttcacttgagagttttgtttacgcccaattacagtatggtgatcctgttgtagacattaagggtacattctatggatttatcgactcggaccgatg

SEQ ID NO: 5928 - DNA, 203 bp, synthetic construct
  source 1..203: mol_type = other DNA
ggcgcgccagtcctagcatccaaggtccgagagtccatgtgtgctcctaaggtgttagatttccaaacaataatgaagaccctggctttctttcatgcaatcctgattaacggttataggaggagccataatggaatctggcctcctactactcttcatggcaatgcccccaaaagcctcattgagatcgactcggaccgatg

SEQ ID NO: 5929 - DNA, 203 bp, synthetic construct
  source 1..203: mol_type = other DNA
ggcgcgccagtcctgagcctgataaaacagcgatatcgtgatgcgaatcggcctctaccacaaccattcaaccgacggctactgttgaattttctagaggatgacagattcgatcccattaaggagcttgagtatgtcaccagtggagaatatcttagggaccctgaattttgtgcatcttactctctcgactcggaccgatg

SEQ ID NO: 5930 - DNA, 203 bp, synthetic construct
  source 1..203: mol_type = other DNA
ggcgcgccagtccttgacctcacaaaatactgcttaaattggaggtaccaagtcatcatcccctttgcgcgtacattgaattcaatgtatggtataccccacctgttcgaatggatacatttaaggctaatgcgaagcactctctatgttggtgatcccttcaatcctccatcagatcctacccaactcgactcggaccgatg

SEQ ID NO: 5931 - DNA, 203 bp, synthetic construct
  source 1..203: mol_type = other DNA
ggcgcgccagtccttgaccttgatacagctctcaatgatgatatatttatagtttctcctcgtggaggaatcgagggtttatgtcaaaaattatggactatgatttccatctcaacaatcatattatccgcgactgaggcaaacactagagttatgagtatggttcagggtgacaaccaagcaattgccgactcggaccgatg

SEQ ID NO: 5932 - DNA, 203 bp, synthetic construct
  source 1..203: mol_type = other DNA
ggcgcgccagtcctgttttacaaaggtcgaattttgactcaagcgttaaagaacgtgagcaagatgtgcttaacagctgacatactaggggactgttcacaagcatcatgctccaatttagctactactgtaatgcgcctgactgagaatggggtcgagaaagatttgtgttattttctaaatgcattcgactcggaccgatg

SEQ ID NO: 5933 - DNA, 203 bp, synthetic construct
  source 1..203: mol_type = other DNA
ggcgcgccagtcctattaaaatttacccctgcaagctcctatgcattctctagctttgttcatatatctaatgactgtcaagttcttgagatcgatgatcaggtaacagattctaacctgatttaccagcaagttatgattactggccttgctttaattgagacatggaacaatcctccaatcaacttcgactcggaccgatg

SEQ ID NO: 5934 - DNA, 203 bp, synthetic construct
  source 1..203: mol_type = other DNA
ggcgcgccagtcctcatctcatccacaattagtcaccctcgtatactcagaagatgcatcaatctggatgtcatagcccctatcaattctccacacatagcttcactggattacacaaaattgagcatagatgcagtaatgtggggaactaagcaggttttgaccaacatttcgcaaggtatcgattacgactcggaccgatg

SEQ ID NO: 5935 - DNA, 203 bp, synthetic construct
  source 1..203: mol_type = other DNA
ggcgcgccagtccttgagatagttgttccttctgaaagccaactcacactcagtgatagagttctaaatctagttgcacgaaaactatcactactggcaatcatctgggccaattataactaccctccaaaggttaaaggtatgtcacctgaggacaaatgtcaggctttaactacccatctactccacgactcggaccgatg

SEQ ID NO: 5936 - DNA, 203 bp, synthetic construct
  source 1..203: mol_type = other DNA
ggcgcgccagtcctctttggatatctggaaccaatactaatggaatctaaaatattcaatctaagttcatccgaatcagcatcccttacagaatttgatttcatcctcaacttggaattgtctgaagccagccttgagaaatactctctcccaagtttgcttatgacggctgagaatatggataaccccgactcggaccgatg

SEQ ID NO: 5937 - DNA, 203 bp, synthetic construct
  source 1..203: mol_type = other DNA
ggcgcgccagtccttaacagcgatatcactgacttaagcacgaaaactagtgtcgagtacattattcacaaggtaggggctgatacatgtgcgttggttcatgtggatctggagggtgtacccggctcaatgaacagtatgttggagagagcccaagttcatgcgctactgatcacggtaactgtactcgactcggaccgatg

SEQ ID NO: 5938 - DNA, 203 bp, synthetic construct
  source 1..203: mol_type = other DNA
ggcgcgccagtcctgcttacccctgatgttgaagattctgagcgcattgatattgacaatgatatacctgattatgatatccacggggacataatttaaatcgactaaagactcctctggcatgataagtcaccaaaaggttccacaccagcatccaaattcttctagaccgtacacgacctcgaatacgactcggaccgatg

SEQ ID NO: 5939 - DNA, 203 bp, synthetic construct
  source 1..203: mol_type = other DNA
ggcgcgccagtcctggacataatttaaatcgactaaagactcctctggcatgataagtcaccaaaaggttccacaccagcatccaaattcttctagaccgtacacgacctcgaataatcataaccacatcagtattaaatccataatatcattttaagaaaaaattgattttactttctccccttggtcgactcggaccgatg

SEQ ID NO: 5940 - DNA, 203 bp, synthetic construct
  source 1..203: mol_type = other DNA
ggcgcgccagtccttcaactgacagcaaccccatagtctggtgctcatgacagtgtgagagttcaatactcacctctccactgtcgtgaggacccttatgttaaccacaaaccttatatttttaggagccgggaggatagctcaacctgttaagaactcagaaggttatgtatattcttccttgctcccgactcggaccgatg

SEQ ID NO: 5941 - DNA, 203 bp, synthetic construct
  source 1..203: mol_type = other DNA
ggcgcgccagtcctggattatacaagctggttttataatccgagaagtctatgaagtactggggcttgatcctcttggtcgacccctgaacttcccagggggtttaacacaaagagacaccgctgttcctgttacaagaggaagaggacgaggacgaacaggcccccgacgaggaccagttctgcccgcgactcggaccgatg

SEQ ID NO: 5942 - DNA, 203 bp, synthetic construct
  source 1..203: mol_type = other DNA
ggcgcgccagtcctatgggccaacctatatgggtatattctcccatacactctatgaccagaatacagaaaacacccttaacagaaaggaaggcattatcaattcggtggttaaaatggcaaacttattttgaagatcctagattaatatttcattatgatgatacattaccagatttacaaaatcttcgactcggaccgatg

SEQ ID NO: 5943 - DNA, 203 bp, synthetic construct
  source 1..203: mol_type = other DNA
ggcgcgccagtcctaataagaaaaagccactgaaacatgtgagtaaatggaaatcaatagctgactgtaaaaaacataaggccgatatccacgtgatacatgagccaggccatcaaaatgatttgcaatcaccttatgccatgggcaacaatgctgctgataaattggcagtcaaggccagttacactcgactcggaccgatg

SEQ ID NO: 5944 - DNA, 203 bp, synthetic construct
  source 1..203: mol_type = other DNA
ggcgcgccagtcctaaggctctcaatcatctcactggtactgctattcctaaggtgctgcattctgatcaaggatcagcattcacctctgcaactttggtcgcctgggccaaagacaagggtatacaaatggaatacagttctccttatcatccccaaagtagtggtaaagttgaaaggaaaaacagtcgactcggaccgatg

SEQ ID NO: 5945 - DNA, 203 bp, synthetic construct
  source 1..203: mol_type = other DNA
ggcgcgccagtcctgagataaaacgactcttgacaaaactattggttggacggcctacaaagtggtacccacttatacctactgttcaattggcattgaataatactccaaatgcaaaaataggcaaaacgccacatcaattgatgtatggagtggattgtaatcttcccttccaggatctaagtacacgactcggaccgatg

SEQ ID NO: 5946 - DNA, 203 bp, synthetic construct
  source 1..203: mol_type = other DNA
ggcgcgccagtcctacctgatgtgcagatagatttgcctgtttataatcctgacatgactaagccattgcctctttgtttgcggattaagtattggatgtatttgttatgtgctacctcaccgcgtgtaatggcttggttactgtttgtttgtgttttgatatctgttatgatcatagctgttatagtcgactcggaccgatg

SEQ ID NO: 5947 - DNA, 203 bp, synthetic construct
  source 1..203: mol_type = other DNA
ggcgcgccagtcctccaaggggtctttttggaaccctttcctaaacctattattgacaaggagagggttttgggtatttcacaaattgttatgattgattctggttcaatagcccaatctatgaatttggatttgtatatgaaacatttgttggtggatatgattaatgaagagatggttgcattaagcgactcggaccgatg

SEQ ID NO: 5948 - DNA, 203 bp, synthetic construct
  source 1..203: mol_type = other DNA
ggcgcgccagtccttaatgtggtgcttccttttgaattaccagtaggggatccctcaactcaagaccaatatatacataagagatgttatcagcagtttgcacactgctatatagtatggcaacctggtaggcgtgtctggcctacttcagagattatacaagaccaatgtccattaccagatcatcccgactcggaccgatg

SEQ ID NO: 5949 - DNA, 203 bp, synthetic construct
  source 1..203: mol_type = other DNA
ggcgcgccagtcctatatggaaactggtggtatcttaatagaacctctgaacaaaaggaagaaacatataggaagaagatgctaaatttgacagaaaataactcttccattctaaaagatagagctttgccaccaacatggacccctaaaggacaagccaggctgtttagagaattaaacccattagacgactcggaccgatg

SEQ ID NO: 5950 - DNA, 203 bp, synthetic construct
  source 1..203: mol_type = other DNA
ggcgcgccagtcctatataaggtacaatctttatatcaagaatgtattcaaaaggggacctcatatgatttggaagatgtaattaatcaactcttaagggtcttacagaacaatggaatagatttgggtaaagtaccagcctcacgagcatttactcctttctataaccaaatgcctgtctcttataacgactcggaccgatg

SEQ ID NO: 5951 - DNA, 203 bp, synthetic construct
  source 1..203: mol_type = other DNA
ggcgcgccagtccttgctggtcatcttgctagggtagaattacaacatccttatgaaatagttaaccaagactgtgagcaactgacttatctagaactcaagggatgtcaagaattggattatctggtatgcgaagaaatccttcaacatgaaccatgtggaaatcagacaggatctgactgtccagtcgactcggaccgatg

SEQ ID NO: 5952 - DNA, 203 bp, synthetic construct
  source 1..203: mol_type = other DNA
ggcgcgccagtcctgggttgcctaacatggactggacagttgaatgggatggggagatttcagattcagctcttcaggaatttgactttgatctcagtctgtttgggcagtgatcaccacaaaggtattacagattattgttgtggacctgcttcatgctatactattgtgtgggaaattagtgcagacgactcggaccgatg

SEQ ID NO: 5953 - DNA, 203 bp, synthetic construct
  source 1..203: mol_type = other DNA
ggcgcgccagtcctagtattggcaacaggaactccttatcttttcagagctcagcctcatcataggccactacaaacccctgctccttggtccaaaaggcttattaggaccagatatatcagaaattctgtagaagatcaatttgtacattttgccactgaagcaaattacactcccctttcagcccacgactcggaccgatg

SEQ ID NO: 5954 - DNA, 203 bp, synthetic construct
  source 1..203: mol_type = other DNA
ggcgcgccagtcctctcatgacagtgtgagagttcaatactcacctctccactgtcgtgaggacccttatgttaaccacaaaccttatatttttaggagccgggaggatagctcaacctgttaagaactcagaaggttatgtatattcttccttgctcccggtggttcgatccctgtttagcctgatacgactcggaccgatg

SEQ ID NO: 5955 - DNA, 203 bp, synthetic construct
  source 1..203: mol_type = other DNA
ggcgcgccagtcctcgatagccgctaacctgggacgaactccccttttagtttcggttttaagatgcttccgcatacgcatatagatagaagtaggaagtagttaatcccagtctgagggatggctcgtccaacaaaccacacatcgaggaatgtaatacctgtcctctctcagatcagtggagggaccgactcggaccgatg

SEQ ID NO: 5956 - DNA, 203 bp, synthetic construct
  source 1..203: mol_type = other DNA
ggcgcgccagtcctccatggaggcactaatggtcacaacagtggacaaattgactcaggggagacagacctttgattggacggtgtgtagaaaccaacctgctgcaacggcactgaacacaacaataacctcttttaggttgaatgatttaaatggagccgacaagggtggattagtgcccttttgcccgactcggaccgatg

SEQ ID NO: 5957 - DNA, 203 bp, synthetic construct
  source 1..203: mol_type = other DNA
ggcgcgccagtcctgaacggcatctctttcgccaggaatgatgatgggaatgtttaatatgctatctacagtattaggagtagccgcactagggataaaaaacattggaaacaaagaatacttatgggatggactgcagtcttcggatgattttgctctgtttgttaatgcaaaagatgaagagacatcgactcggaccgatg

SEQ ID NO: 5958 - DNA, 203 bp, synthetic construct
  source 1..203: mol_type = other DNA
ggcgcgccagtccttacgaaagcttttttctcagaaagatgagacttgacaatgccacttggggccgaataacctttggccctgttgagagagtaagaaaaagagtactactaaacccgctcaccaaggaaatgcccccagatgaagcgagcaatgtaataatggaaatattattccctaaagaagcacgactcggaccgatg

SEQ ID NO: 5959 - DNA, 203 bp, synthetic construct
  source 1..203: mol_type = other DNA
ggcgcgccagtccttttgaaagcataatccctcagaagatggctggtcagtacagtggatttgcaagagcagtgctcaaacaaatgagagaccaagaggttatgaaaactgaccaattcataaaattgttgcctttctgtttttcgccaccaaaattaaggagcaatggagagccttatcaatttttgcgactcggaccgatg

SEQ ID NO: 5960 - DNA, 203 bp, synthetic construct
  source 1..203: mol_type = other DNA
ggcgcgccagtcctggctttcttgttagtggcaaatatgaccctgatcttggagatttcaaaaccattgaggaacttgaaagactaaaaccgggagaaaaagccaacatcttactttaccaaggaaagcccgttaaagtagttaaaaggaaaagatatagtgctttatccaatgatatttcacaagggcgactcggaccgatg

SEQ ID NO: 5961 - DNA, 203 bp, synthetic construct
  source 1..203: mol_type = other DNA
ggcgcgccagtcctctggccaatatgactgaaggaaagtccaagaaaccgaagaccttagctaaggaatgtctagaaaggtattcaacactacgtgatcaaactgacccaatattgataatgaaaagcgaaaaagctaacgaaaacttcttatggaggttatggagggactgtgtaaatacaataagccgactcggaccgatg

SEQ ID NO: 5962 - DNA, 203 bp, synthetic construct
  source 1..203: mol_type = other DNA
ggcgcgccagtcctttattaaatgaaagcaatgctagtatgggaaaatataaagtaataccaatcaccaacagagtggtaaatgaaaaaggggaaagctttgacatgctttatggtctggcggttaaggggcaatctcatttgcggggggacacggatgttgtaacagttgtgactttcgagtttagtcgactcggaccgatg

SEQ ID NO: 5963 - DNA, 203 bp, synthetic construct
  source 1..203: mol_type = other DNA
ggcgcgccagtccttcaaatcctcaaaagttcacctcatctgccaatggagtaaccacacattatgtttctcagattggtggcttcccaaatcaaacagaagacgaagggctaaaacaaagcggcagaattgttgttgattacatggtacaaaaacctggaaaaacaggaacaattgtttatcaaagacgactcggaccgatg

SEQ ID NO: 5964 - DNA, 203 bp, synthetic construct
  source 1..203: mol_type = other DNA
ggcgcgccagtcctggactgaaaagggttggacttgacccttcattaatcagtacttttgccggaagcacactacccagaagatcaggtacaactggtgttgcaatcaaaggaggtggaactttagtggatgaagccatccgatttataggaagagcaatggcagacagagggctactgagagacatccgactcggaccgatg

SEQ ID NO: 5965 - DNA, 203 bp, synthetic construct
  source 1..203: mol_type = other DNA
ggcgcgccagtcctcatcaacaaaaacaactgcaccaacaatgtcattagagtgcacaaacgcatcaaatgcccagactgtgaaccattctgcaacaaaagagatgacatttccacccccagagccggagtggacataccctcgtttatcttgccagggctcaacctttcagaaggcactcctaattacgactcggaccgatg

SEQ ID NO: 5966 - DNA, 203 bp, synthetic construct
  source 1..203: mol_type = other DNA
ggcgcgccagtcctgccctcataggttcggagagatcaaaggaaactcagctcccttgataataagagaaccttttgttgcttgtggaccaaaagaatgcagacactttgctctgacccattatgcagctcagccggggggatactacaatggaacaagaaaggacagaaacaagctgaggcatctagcgactcggaccgatg

SEQ ID NO: 5967 - DNA, 203 bp, synthetic construct
  source 1..203: mol_type = other DNA
ggcgcgccagtcctacactgaagagtgcacatgcgggttcgccagcaataaaaccatagaatgtgcctgtagagacaacagttacacagcaaaaagaccctttgtcaaattaaatgtggaaactgatacagctgaaataagattgatgtgcacaaagacttatctagacactcccagaccggatgatgcgactcggaccgatg

SEQ ID NO: 5968 - DNA, 203 bp, synthetic construct
  source 1..203: mol_type = other DNA
ggcgcgccagtcctgaagcatagcagggccttgcgaatctaatggagacaagtggcttggaggcatcaaaggaggattcgtccatcaaagaatggcatctaagattggaagatggtactcccgaacgatgtctaaaactaacagaatggggatggaactgtatgtaaagtatgatggtgacccatggacgactcggaccgatg

SEQ ID NO: 5969 - DNA, 203 bp, synthetic construct
  source 1..203: mol_type = other DNA
ggcgcgccagtccttgcctaactgatatacaaaaagcactaattggtgcctctatatgctttttaaaacccaaagaccaagaaagaaaaaggagattcatcacagagcccctgtcaggaatgggaacaacagcaacaaagaagaaaggcctaattctagctgagagaaaaatgagaagatgtgtaagccgactcggaccgatg

SEQ ID NO: 5970 - DNA, 203 bp, synthetic construct
  source 1..203: mol_type = other DNA
ggcgcgccagtcctgggtaaacttgaaaatacaaataaggaatccaaataaggaggcaataaacagagaggtgtcaattctgagacacaattaccaaaaggaaatccaagccaaagaaacaatgaagaaaatactctctgacaacatggaagtattgggtgaccacatagtagttgaagggctttcaacgactcggaccgatg

SEQ ID NO: 5971 - DNA, 203 bp, synthetic construct
  source 1..203: mol_type = other DNA
ggcgcgccagtcctcaagaccgcctacacagactaaaacgaaaattagaatcaagaataaagactcacaacaagagtgagcctgagaataaaaggatgtctcttgaagagagaaaagcaattggggtaaaaatgatgaaagtgcttctgtttatggatccctctgctggaattgaagggtttgagccacgactcggaccgatg

SEQ ID NO: 5972 - DNA, 203 bp, synthetic construct
  source 1..203: mol_type = other DNA
ggcgcgccagtcctcccgtcaaaataacaacttataacacgatgttacccgaagaaaccattttagtgtaacatttaagattagaagtagttcatctaatagagataggcactattagaaggaggccttttctaaaggagccgttagtcagcccagacaagcgcagtactttagaagagagaagttcccgactcggaccgatg

SEQ ID NO: 5973 - DNA, 203 bp, synthetic construct
  source 1..203: mol_type = other DNA
ggcgcgccagtccttacctacaaaaaactgggaattgaagcaatgattaaaagacttggagatttgggaagagcagccaaaggctgttcagatttgaatgtggtgctcaaccaggctataaccaaccacatgttagaacattttgggaagaatgttcttggtttaaaacaagaagatgaactcaaagtcgactcggaccgatg

SEQ ID NO: 5974 - DNA, 203 bp, synthetic construct
  source 1..203: mol_type = other DNA
ggcgcgccagtccttaaccctaaccctgaatttatggagttaatacgtacagctaacatagctccataccccttacacatggctcacctcgaagataaaaggaaaacaaaattcacatcaaaagtaatcattatgacatctaatgtttttgaacaggatgttaattcactaacatttccagatgcattcgactcggaccgatg

SEQ ID NO: 5975 - DNA, 203 bp, synthetic construct
  source 1..203: mol_type = other DNA
ggcgcgccagtcctgatgaccgttagtttaatactgggcactctcattggaatacttactgttgtagggttttggaaatggttatgtagtggcgataaaaagaagaatccgataaaaagacattttattaatacaggcaatgttctaatcttacccgatagagaattaaacaccttttggaaaaatcacgactcggaccgatg

SEQ ID NO: 5976 - DNA, 203 bp, synthetic construct
  source 1..203: mol_type = other DNA
ggcgcgccagtcctaattaagacaaaacccgccatcctaagaaatgtgatagtggatggaaaaattgttaatataaaacataaaaacttgaagaaatgcgccatggacacaccctatgtgtcaaaagaaatgactgaagaagcttttcagttagttaaatcagtctggttaaagggaatgcgtaatgacgactcggaccgatg

SEQ ID NO: 5977 - DNA, 203 bp, synthetic construct
  source 1..203: mol_type = other DNA
ggcgcgccagtcctgtactatttgggcttcatagcacaccttatggaaaatcgaataaccaatgaagtatccataggaactaatgtttattcccaagattggaataagacagttagaaaacttaaaactatgggacccaaggttattgcaggagatttctcaacctttgatggatctttgaatgtttgcgactcggaccgatg

SEQ ID NO: 5978 - DNA, 203 bp, synthetic construct
  source 1..203: mol_type = other DNA
ggcgcgccagtccttttggatatcagtacatataatggttatgctcaggagagattcctaaattactacttgtaatttgggaatcgcaacacaacatggttacccatagattgaggaaatttccaataaactcagtattaaggcttgttgtgttggacaaggtgccctatttagggtgaggagccttacgactcggaccgatg

SEQ ID NO: 5979 - DNA, 203 bp, synthetic construct
  source 1..203: mol_type = other DNA
ggcgcgccagtcctctggcagccccagtgaatcctccattggataggaacagctatattgggtagttgtagcagttgtattcaaatgaatgcagcgttccgaaatatcatacctgccgatcaagaaacaaatacttccaacgtacataatacgcaactcgcgtcgacctctgaagaaaactcagttgacgactcggaccgatg

SEQ ID NO: 5980 - DNA, 203 bp, synthetic construct
  source 1..203: mol_type = other DNA
ggcgcgccagtccttgataacaaacccctcaatagatatgtgttaaatcgacagaatccacaaccatttgttaaatcttggacattgccttcagtagttttaagtgctggaggtaagggacaaaaattagctaattttaaatatttacgatgtgatgttaaagtcaaaattgttctaaacgcaaatcccgactcggaccgatg

SEQ ID NO: 5981 - DNA, 203 bp, synthetic construct
  source 1..203: mol_type = other DNA
ggcgcgccagtcctagcatatgatttagtcacaggtactgaagattttgtcaagctatatctatttacaataacgcccatattatccccgactagcacatctgctagttcaaaggtggacctttcagtttatatgtggttggataatatttccttagtcatacccacgtatcgcgttaacacgagcatcgactcggaccgatg

SEQ ID NO: 5982 - DNA, 203 bp, synthetic construct
  source 1..203: mol_type = other DNA
ggcgcgccagtcctcgtaccaaatgtggggactgttgttcagacagtacaaaatatgactacacgagacagtgaaacaattaggaaagcaatggttgcattaaggaaaaataataaatcaacttacgactatatagtgcaagctttatcttctgcagttccagaagttaagaatgtaactatgcagatcgactcggaccgatg

SEQ ID NO: 5983 - DNA, 203 bp, synthetic construct
  source 1..203: mol_type = other DNA
ggcgcgccagtccttgctgccatgccggaagaggagacaactgaagctaatgccggtcagtttctctcctttgcaagtctattccttccgaaattggtagtaggagaaaaggcttgccttgagaaggttcaaaggcaaattcaagtacatgcagagcaaggactgatacaatatccaacagcttggcacgactcggaccgatg

SEQ ID NO: 5984 - DNA, 203 bp, synthetic construct
  source 1..203: mol_type = other DNA
ggcgcgccagtcctacttgatcatatcctacaaaagacagaacgaggagttcgtctccatcctcttgcaaggaccgccaaggtaaaaaatgaggtgaactcctttaaggctgcactcagctccctggccaagcatggagagtatgctcctttcgcccgacttttgaacctttctggagtaaataatctcgactcggaccgatg

SEQ ID NO: 5985 - DNA, 203 bp, synthetic construct
  source 1..203: mol_type = other DNA
ggcgcgccagtccttggacttgatgatcaggaaaagaaaattcttatgaacttccatcagaaaaagaacgaaatcagcttccagcaaacaaacgctatggtaactctaagaaaagagcgcctggccaagctgacagaagctatcactgctgcgtcactgcccaaaacaagtggacattacgatgatgacgactcggaccgatg

SEQ ID NO: 5986 - DNA, 203 bp, synthetic construct
  source 1..203: mol_type = other DNA
ggcgcgccagtccttgacgacattccctttccaggacccatcaatgatgacgacaatcctggccatcaagatgatgatccgactgactcacaggatacgaccattcccgatgtggtggttgatcccgatgatggaagctacggcgaataccagagttactcggaaaacggcatgaatgcaccagatgacgactcggaccgatg

SEQ ID NO: 5987 - DNA, 203 bp, synthetic construct
  source 1..203: mol_type = other DNA
ggcgcgccagtcctcaaccgcacacccactgtcgccccaccggctcccgtatacagagatcactctgaaaagaaagaactcccgcaagacgagcaacaagatcaggaccacactcaagaggccaggaaccaggacagtgacaacacccagtcagaacactcttttgaggagatgtatcgccacattctcgactcggaccgatg

SEQ ID NO: 5988 - DNA, 203 bp, synthetic construct
  source 1..203: mol_type = other DNA
ggcgcgccagtcctcaactagaacaaagggcaggggccatactgcggccacgactcaaaacgacagaatgccaggccctgagctttcgggctggatctctgagcagctaatgaccggaagaattcctgtaagcgacatcttctgtgatattgagaacaatccaggattatgctacgcatcccaaatgccgactcggaccgatg

SEQ ID NO: 5989 - DNA, 203 bp, synthetic construct
  source 1..203: mol_type = other DNA
ggcgcgccagtcctcacctgtcatccacatccgctctcgaggtgacattccccgagcttgccagaaaagcttgcgtccagtcccaccatcgcccaagattgatcgaggttgggtatgtgtttttcagcttcaagatggtaaaacacttggactcaaaatttgagccaatctcccttccctccgaaagacgactcggaccgatg

SEQ ID NO: 5990 - DNA, 203 bp, synthetic construct
  source 1..203: mol_type = other DNA
ggcgcgccagtcctggcgaataatagcagaggcttcaactgctgaactatagggtacgttacattaatgatacacttgtgagtatcagccctggataatataagtcaattaaacgaccaagataaaattgttcatatctcgctagcagcttaaaatataaatgtaataggagctatatctctgacagtcgactcggaccgatg

SEQ ID NO: 5991 - DNA, 203 bp, synthetic construct
  source 1..203: mol_type = other DNA
ggcgcgccagtccttccttgaagctatggtgaatgtcatatcgggccccaaagtgctaatgaagcaaattccaatttggcttcctctaggtgtcgctgatcaaaagacctacagctttgactcaactacggccgccatcatgcttgcttcatacactatcacccatttcggcaaggcaaccaatccaccgactcggaccgatg

SEQ ID NO: 5992 - DNA, 203 bp, synthetic construct
  source 1..203: mol_type = other DNA
ggcgcgccagtcctttgtcagagtcaatcggctgggtcctggaatcccggatcatcccctcaggctcctgcgaattggaaaccaggctttcctccaggagttcgttcttccgccagtccaactaccccagtatttcacctttgatttgacagcactcaaactgatcacccaaccactgcctgctgcaacgactcggaccgatg

SEQ ID NO: 5993 - DNA, 203 bp, synthetic construct
  source 1..203: mol_type = other DNA
ggcgcgccagtcctagatcgttccaattgatccaaccaaaaatatcatgggaatcgaagtgccagaaactctggtccacaagctgaccggtaagaaggtgacttctaaaaatggacaaccaatcatccctgttcttttgccaaagtacattgggttggacccggtggctccaggagacctcaccatggcgactcggaccgatg

SEQ ID NO: 5994 - DNA, 203 bp, synthetic construct
  source 1..203: mol_type = other DNA
ggcgcgccagtcctaacccttgccacaatctccacgagtccccaatccctcacaaccaaaccaggtccggacaacagcacccataatacacccgtgtataaacttgacatctctgaggcaactcaagttgaacaacatcaccgcagaacagacaacgacagcacagcctccgacactccctctgccaccgactcggaccgatg

SEQ ID NO: 5995 - DNA, 203 bp, synthetic construct
  source 1..203: mol_type = other DNA
ggcgcgccagtcctgggaatttacatagaggggctaatgcacaatcaagatggtttaatctgtgggttgagacagctggccaacgagacgactcaagctcttcaactgttcctgagagccacaactgagctacgcaccttttcaatcctcaaccgtaaggcaattgatttcttgctgcagcgatggggcgactcggaccgatg

SEQ ID NO: 5996 - DNA, 203 bp, synthetic construct
  source 1..203: mol_type = other DNA
ggcgcgccagtcctatcactgcattcttgaatattgctctccagttaccgtgtgaaagttctgctgtcgttgtttcagggttaagaacattggttcctcaatcagataatgaggaagcttcaaccaacccggggacatgctcatggtctgatgagggtaccccttaataaggctgactaaaacactatcgactcggaccgatg

SEQ ID NO: 5997 - DNA, 203 bp, synthetic construct
  source 1..203: mol_type = other DNA
ggcgcgccagtcctaccttattattcagattaggccccaagaggcattcttcatctccttttagcaaagtactatttcagggtagtccaattagtggcacgtcttttagctgtatatcagtcgcccctgagatacgccacaaaagtgtctctaagctaaattggtctgtacacatcccatacattgtacgactcggaccgatg

SEQ ID NO: 5998 - DNA, 203 bp, synthetic construct
  source 1..203: mol_type = other DNA
ggcgcgccagtcctagagcttgcgggttatattcatcatactcccttaatccgcaactacgcaactgtaaactcccgaaacatatctaccgtttgaaatacgatgtaactgttaccaagttcttgagtgatgtaccagtggcgacattgcccatagatttcatagtcccagttcttctcaaggcactgcgactcggaccgatg

SEQ ID NO: 5999 - DNA, 203 bp, synthetic construct
  source 1..203: mol_type = other DNA
ggcgcgccagtcctcatcaagcatcatggcaccacacaagtgatgattttggtgaacatgccacagttagagggagtagctttgtaactgatttagagaaatacaatcttgcatttagatatgagtttacagcaccttttatagaatattgcaaccgttgctatggtgttaagaatgtttttaattggcgactcggaccgatg

SEQ ID NO: 6000 - DNA, 203 bp, synthetic construct
  source 1..203: mol_type = other DNA
ggcgcgccagtcctcaaatttctttagttgaaattaagactggttttaagttacgctcagctgtgatgggtgacaatcagtgcattactgttttatcagtcttccccttagagactgacgcagacgagcaggaacagagcgccgaagacaatgcagcgagggtggccgccagcctagcaaaagttacacgactcggaccgatg

SEQ ID NO: 6001 - DNA, 203 bp, synthetic construct
  source 1..203: mol_type = other DNA
ggcgcgccagtcctagtataggcactgcttttgagcgatccatctctgagacacgacatatctttccttgcaggataaccgcagctttccatacgtttttttcggtgagaatcttgcaatatcatcatctcgggttcaataaaggttttgaccttggacagttaacactcggcaaacctctggatttccgactcggaccgatg

SEQ ID NO: 6002 - DNA, 203 bp, synthetic construct
  source 1..203: mol_type = other DNA
ggcgcgccagtcctggagccacactcccatgtatgattgagcaattcaaagtgttttggctgaaaccctacgaacaatgtccgcagtgttcaaatgcaaagcaaccaggtgggaaaccattcgtgtcagtggcagtcaagaaacatattgttagtgcatggccgaacgcatcccgaataagctggactcgactcggaccgatg

SEQ ID NO: 6003 - DNA, 203 bp, synthetic construct
  source 1..203: mol_type = other DNA
ggcgcgccagtcctgaagcacgagtaaatttaagtgttcaagaaatacttcaaatgaccccttcacattactcaggaaatattgttcacaggtacaacgatcaatacagtcctcattctttcatggccaatcgtatgagtaattcagcaacgcgattgattgtttctacaaacactttaggtgagtttcgactcggaccgatg

SEQ ID NO: 6004 - DNA, 203 bp, synthetic construct
  source 1..203: mol_type = other DNA
ggcgcgccagtcctttatctggatgggagctagccaagaccatcatgcaatcaattatttcagatagcaacaattcatctacagacccaattagcagtggagaaacaagatcattcactacccatttcttaacttatcccaagataggacttctgtacagttttggggcctttgtaagttattatcttcgactcggaccgatg

SEQ ID NO: 6005 - DNA, 203 bp, synthetic construct
  source 1..203: mol_type = other DNA
ggcgcgccagtcctaaccgaaaatacttggcaagagactcttcaactggatcaagcacaaacaacagtgatggtcatattgagagaagtcaagaacaaaccaccagagatccacatgatggcactgaacggaatctagtcctacaaatgagccatgaaataaaaagaacgacaattccacaagaaaaccgactcggaccgatg

SEQ ID NO: 6006 - DNA, 203 bp, synthetic construct
  source 1..203: mol_type = other DNA
ggcgcgccagtcctgagagtttcaagtcggctgtgacgctagcagagggagaaggtgctggtgccttactattgattcagaaataccaagttaagaccttatttttcaacacgctagctactgagtccagtatagagtcagaaatagtatcaggaatgactactcctaggatgcttctacctgttatgcgactcggaccgatg

SEQ ID NO: 6007 - DNA, 203 bp, synthetic construct
  source 1..203: mol_type = other DNA
ggcgcgccagtccttcaaaattccataatgaccaaattgagattattcttaacaactcagcaagccaaataacagacataacaaatcctacttggtttaaagaccaaagagcaaggctacctaagcaagtcgaggttataaccatggatgcagagacaacagagaatataaacagatcgaaattgtaccgactcggaccgatg

SEQ ID NO: 6008 - DNA, 203 bp, synthetic construct
  source 1..203: mol_type = other DNA
ggcgcgccagtccttcaggaaggagataggccgcatgctgaacatcttgaacgggagaaaaaggtcaacgataacattgctgtgcttgattcccaccgtaatggcgttttccctcagcacaagagatggcgaacccctcatgatagtggcaaaacatgaaagggggagacctctcttgtttaagacaacgactcggaccgatg

SEQ ID NO: 6009 - DNA, 203 bp, synthetic construct
  source 1..203: mol_type = other DNA
ggcgcgccagtcctagggaaaaccaaccttggattttgaactgactaagacaacagccaaggaagtggctctgttaagaacctattgcattgaagcctcaatatcaaacataactacggcaacaagatgtccaacgcaaggagagccttatctgaaagaggaacaggaccaacagtacatttgccggacgactcggaccgatg

SEQ ID NO: 6010 - DNA, 203 bp, synthetic construct
  source 1..203: mol_type = other DNA
ggcgcgccagtcctgagatgtggtagacagagggtggggcaatggctgtggcttgtttggaaaaggaggagttgtgacatgtgcgaagttttcatgttcggggaagataacaggcaatttggtccaaattgagaaccttgaatacacagtggttgtaacagtccacaatggagacacccatgcagtagcgactcggaccgatg

SEQ ID NO: 6011 - DNA, 203 bp, synthetic construct
  source 1..203: mol_type = other DNA
ggcgcgccagtcctcagaagtggactccggtgatggaaatcacatgtttgcaggacatcttaagtgcaaagtccgtatggagaaattgagaatcaagggaatgtcatacacgatgtgttcaggaaagttttcaattgacaaagagatggcagaaacacagcatgggacaacagtggtgaaagtcaagtcgactcggaccgatg

SEQ ID NO: 6012 - DNA, 203 bp, synthetic construct
  source 1..203: mol_type = other DNA
ggcgcgccagtcctatgaaggtgctggagctccgtgtaaagtccccatagagataagagatgtaaacaaggaaaaagtggttgggcgtatcatctcatccacccctttggctgagaataccaacagtgtaaccaacatagaattagaacccccctttggggacagctacatagtgataggtgttggaacgactcggaccgatg

SEQ ID NO: 6013 - DNA, 203 bp, synthetic construct
  source 1..203: mol_type = other DNA
ggcgcgccagtcctacagcgcattaacactccattggttcaggaaagggagttccattggcaagatgtttgagtccacatacagaggtgcaaaacgaatggccattctaggtgaaacagcttgggattttggttccgttggtggactgttcacatcattgggaaaggctgtgcaccaggtttttggaacgactcggaccgatg

SEQ ID NO: 6014 - DNA, 203 bp, synthetic construct
  source 1..203: mol_type = other DNA
ggcgcgccagtcctgtgtgtatacaaccatgtttggaggagtctcatggatgattagaatcctaattgggttcttagtgttgtggattggcacgaactcgaggaacacttcaatggctatgacgtgcatagctgttggaggaatcactctgtttctgggcttcacagttcaagcagacatgggttgtgcgactcggaccgatg

SEQ ID NO: 6015 - DNA, 203 bp, synthetic construct
  source 1..203: mol_type = other DNA
ggcgcgccagtcctcaaaaatcttcaccccagaagcaagaaatagcacatttttaatagacggaccagacacctctgaatgccccaatgaacgaagagcatggaactctcttgaggtggaagactatggatttggcatgttcacgaccaacatatggatgaaattccgagaaggaagttcagaagtgtcgactcggaccgatg

SEQ ID NO: 6016 - DNA, 203 bp, synthetic construct
  source 1..203: mol_type = other DNA
ggcgcgccagtcctgtgaccacaggttaatgtcagctgcaattaaagatcagaaagctgtgcatgctgacatgggttattggatagagagctcaaaaaaccagacctggcagatagagaaagcatctcttattgaagtgaaaacatgtctgtggcccaagacccacacactgtggagcaatggagtgccgactcggaccgatg

SEQ ID NO: 6017 - DNA, 203 bp, synthetic construct
  source 1..203: mol_type = other DNA
ggcgcgccagtcctgacagggcacatcagaaactttttctatgggtctgttgtgcctgaccttgtttgtggaagaatgcttgaggagaagagtcactaggaaacacatgatattagttgtggtgatcactctttgtgctatcatcctgggaggcctcacatggatggacttactacgagccctcatcacgactcggaccgatg

SEQ ID NO: 6018 - DNA, 203 bp, synthetic construct
  source 1..203: mol_type = other DNA
ggcgcgccagtccttgttgggggacactatgtctggtagaataggaggacagatccacctagccatcatggcagtgttcaagatgtcaccaggatacgtgctgggtgtgtttttaaggaaactcacttcaagagagacagcactaatggtaataggaatggccatgacaacggtgctttcaattccaccgactcggaccgatg

SEQ ID NO: 6019 - DNA, 203 bp, synthetic construct
  source 1..203: mol_type = other DNA
ggcgcgccagtcctcaggagccctgtgggacgtcccctcacccgctgccactaaaaaagccgcactgtctgaaggagtgtacaggatcatgcaaagagggttattcgggaaaactcaggttggagtagggatacacatggaaggtgtatttcacacaatgtggcatgtaacaagaggatcagtgatctcgactcggaccgatg

SEQ ID NO: 6020 - DNA, 203 bp, synthetic construct
  source 1..203: mol_type = other DNA
ggcgcgccagtcctaggccctacgtggactgccaatccgttatcagaccccagctgtgaaatcagaacacacaggaagagagattgtagacctcatgtgtcatgcaaccttcacaacaagacttttgtcatcaaccagggttccaaattacaaccttatagtgatggatgaagcacatttcaccgatccgactcggaccgatg

SEQ ID NO: 6021 - DNA, 203 bp, synthetic construct
  source 1..203: mol_type = other DNA
ggcgcgccagtcctcttctagtgtcgcggctagaggatacatctcgaccagggtggaaatgggagaggcagcagccatcttcatgaccgcaacccctcccggagcgacagatccctttccccagagcaacagcccaatagaagacatcgagagggaaattccggaaaggtcatggaacacagggttcgcgactcggaccgatg

SEQ ID NO: 6022 - DNA, 203 bp, synthetic construct
  source 1..203: mol_type = other DNA
ggcgcgccagtccttgactcccatgctgagacacaccatagaaaacacgtcggccaacctatctctagcagccattgccaaccaggcagccgtcctaatggggcttggaaaaggatggccgctccacagaatggacctcggtgtgccgctgttagcaatgggatgctattctcaagtgaacccaacaacgactcggaccgatg

SEQ ID NO: 6023 - DNA, 203 bp, synthetic construct
  source 1..203: mol_type = other DNA
ggcgcgccagtcctccttgacagcatccttagtcatgcttttagtccattatgcaataataggcccaggattgcaggcaaaagccacaagagaggcccagaaaaggacagctgctgggatcatgaaaaatcccacagtggacgggataacagtaatagatctagaaccaatatcctatgacccaaaatcgactcggaccgatg

SEQ ID NO: 6024 - DNA, 203 bp, synthetic construct
  source 1..203: mol_type = other DNA
ggcgcgccagtcctacggggtggtaaaactgctaacaaaaccctgggatgtgattccaatggtgactcagttagccatgacagatacaaccccttttgggcaacaaagagtgttcaaagagaaggtggataccagaacaccacaaccaaaacccggtacacgaatggttatgaccacgacagccaattcgactcggaccgatg

SEQ ID NO: 6025 - DNA, 203 bp, synthetic construct
  source 1..203: mol_type = other DNA
ggcgcgccagtcctggctgtgggccctccttggaaagaagaaaaatcccagactgtgcacaagggaagagttcatctcaaaagttagatcaaacgcagccataggcgcagtctttcaggaagaacagggatggacatcagccagtgaagctgtgaatgacagccggttttgggaactggttgacaaagcgactcggaccgatg

SEQ ID NO: 6026 - DNA, 203 bp, synthetic construct
  source 1..203: mol_type = other DNA
ggcgcgccagtcctcggaatggtttccaacaagcagaacaacatggtcaatccacgctcatcaccagtggatgaccactgaagatatgctcaaagtgtggaacagagtgtggatagaagacaaccctaatatgactgacaagactccagtccattcgtgggaagatataccttacctagggaaaagagcgactcggaccgatg

SEQ ID NO: 6027 - DNA, 203 bp, synthetic construct
  source 1..203: mol_type = other DNA
ggcgcgccagtccttaccaacaacaaacaccaaaggctattgaagtcaggccacttgtgccacggtttgagcaaaccgtgctgcctgtagctccgccaataatgggaggcgtaataatccccagggaggccatgcgccacggaagctgtacgcgtggcatattggactagcggttagaggagacccctcgactcggaccgatg

SEQ ID NO: 6028 - DNA, 203 bp, synthetic construct
  source 1..203: mol_type = other DNA
ggcgcgccagtcctattttctgaccgtccttttatgcttcatgggtggttggttttttccaattcaaattaccttttggaggaatttgatgttgtcttcggtaagagaggtggtggtaatgtgacatacactgaccagtatctctgtggcgccgatggcaaacctgttatgagtgaagatttatggcacgactcggaccgatg

SEQ ID NO: 6029 - DNA, 203 bp, synthetic construct
  source 1..203: mol_type = other DNA
ggcgcgccagtcctgtttgttgaccatttcggtgagaacgaagaaattatcatcaatggtcatacttacgtttgtgcttggcttactaagcgtaagcccttagattacaaacgtcagaacaaccttgccattgaagagattgaatatgtgcatggtgatgctttgcatacactacgcaatggttctgtcgactcggaccgatg

SEQ ID NO: 6030 - DNA, 203 bp, synthetic construct
  source 1..203: mol_type = other DNA
ggcgcgccagtccttattgaaggtgtctctgtttggagagtgattgctcttcagagtgtggattgctttgttgcttcttccacttttgtagaagaggaacatgttaatagaatggatacattctgcttcaatgtacgcaatagtgttactgatgagtgtcgtctggccatgttgggtgctgaaatgaccgactcggaccgatg

SEQ ID NO: 6031 - DNA, 203 bp, synthetic construct
  source 1..203: mol_type = other DNA
ggcgcgccagtccttagtaatgtcagaagacaagttgcttcaggtgtcatagacattagtaccggttggtttgatgtttatgatgacatctttgctgaaagcaaaccatggtttgttcgcaaggctgaagacatttttggcccttgttggtccgctcttgcttctgcacttaaacaacttaaagtcaccgactcggaccgatg

SEQ ID NO: 6032 - DNA, 203 bp, synthetic construct
  source 1..203: mol_type = other DNA
ggcgcgccagtccttacaggtgaacttgtgagatttgttaagtctatttgcaattcagctgttgctgtcgtgggtggtactatacaaattctcgctagtgtgcctgagaagtttttgaatgcgtttgacgtgtttgtcacagctattcaaactgtctttgactgtgctgttgaaacttgtactattgccgactcggaccgatg

SEQ ID NO: 6033 - DNA, 203 bp, synthetic construct
  source 1..203: mol_type = other DNA
ggcgcgccagtcctgagagactatgttgacaaatgggatgatttttgcagacaatatagtaacgagtcttggtttgaggatgattacagggcttttatcagtgttttggacatcactgatgctgctgtgaaagctgcagagtctaaagctttcgttgatactattgttccaccttgcccatctattttcgactcggaccgatg

SEQ ID NO: 6034 - DNA, 203 bp, synthetic construct
  source 1..203: mol_type = other DNA
ggcgcgccagtcctagacactgtggtttctactgttaaaattggtggcttgacctttaaaacatatgcttttgataaaccttacattgtgatacgtgatatcgtgtgtaaggttgaaaataaaacagaagcagaatggattgagctttttccacataatgacaggattaagtcttttagtactttcgacgactcggaccgatg

SEQ ID NO: 6035 - DNA, 203 bp, synthetic construct
  source 1..203: mol_type = other DNA
ggcgcgccagtcctgagtgcttacatgccaattgcagaccctacacattttgacattgaagaagttgaacttttagatgcagagtttgtagaaccaggctgtggtggtattttggcagtaatagatgagcacgtcttttataagaaggatggtgtttattatccatcaaatggtactaacattctacccgactcggaccgatg

SEQ ID NO: 6036 - DNA, 203 bp, synthetic construct
  source 1..203: mol_type = other DNA
ggcgcgccagtccttgctgaggatgttgttgaccaagttgaagaagtcaatagcatttttgacattgagacagtggatgttaaacatgatgtgagtccttttgaaatgccatttgaagagttaaatggtttaaagatactcaaacaattggataacaactgctgggttaactcagttatgttacaaatcgactcggaccgatg

SEQ ID NO: 6037 - DNA, 203 bp, synthetic construct
  source 1..203: mol_type = other DNA
ggcgcgccagtcctctttacagaagacttgttgtgtgtcgctgatgacaaacccattgttttgtttactgactctatgcttactttggatgaccgtggtttagctctagacaatgcacttagtggtgtgcttagtgctgctattaaggattgtgttgacataaataaagctataccttctggtaatctcgactcggaccgatg

SEQ ID NO: 6038 - DNA, 203 bp, synthetic construct
  source 1..203: mol_type = other DNA
ggcgcgccagtccttattaagtttgatataggttctgttgttgtctacatgtgtgttgtgccatccgaaaaggacaaacatttagataataatgttcaacgatgcacacgtaagttgaatagacttatgtgtgatatagtttgtactataccagctgactacatcttgccattggtgttgtctagtttcgactcggaccgatg

SEQ ID NO: 6039 - DNA, 203 bp, synthetic construct
  source 1..203: mol_type = other DNA
ggcgcgccagtcctttgggtgaatgctgtttgtattgcactacagtattcgaaaccccattttatttcacaaggtcttgatgctgcgtggaataaatttgttttaggcgatgttgaaatttttgttgcatttgtttactatgttgcaagactaatgaaaggtgacaagggtgatgctgaagacactttcgactcggaccgatg

SEQ ID NO: 6040 - DNA, 203 bp, synthetic construct
  source 1..203: mol_type = other DNA
ggcgcgccagtccttaagtactattcacgtgttagaagtgttagaggtagagctattatagtcagtgtcgaacagcttgaaccgtgtgctcagtctagacttttgagtggtgttgcttatactgctttttctggacctgttgacaaaggtcattatactgtttatgatactgcaaagaaatcaatgtacgactcggaccgatg

SEQ ID NO: 6041 - DNA, 203 bp, synthetic construct
  source 1..203: mol_type = other DNA
ggcgcgccagtcctgcttgctaagtttacgaaactactgttactcatatatacattgtactcagtagttttgctttgtgtacgttttggaccgtttaatttttgtagtgagactgttaatggttatgctaagtcaaactttgtcaaggatgattactgtgatggttcattgggctgcaagatgtgtctcgactcggaccgatg

SEQ ID NO: 6042 - DNA, 203 bp, synthetic construct
  source 1..203: mol_type = other DNA
ggcgcgccagtcctttttggttaccaagagttaagtcaatttagccatttggatgttgtgtggaagcatataacagaccctttgtttagtaatatgcaacctttcattgtcatggttttgctgcttatatttggtgacaattatttgagatgcttcttgctgtattttgttgctcagatgataagcaccgactcggaccgatg

SEQ ID NO: 6043 - DNA, 203 bp, synthetic construct
  source 1..203: mol_type = other DNA
ggcgcgccagtccttagacttaagagattccctgttaacacaattgtcaatggtgtgcaacgttcattttatgttaatgcaaatggtggtagtaagttttgtaagaaacatagatttttctgtgttgattgtgactcttatggttatggcagcacgtttataacacccgaagtttctagagaacttggcgactcggaccgatg

SEQ ID NO: 6044 - DNA, 203 bp, synthetic construct
  source 1..203: mol_type = other DNA
ggcgcgccagtcctttgtactagattagaaggtttgggtggtaacaatgtttattgttataacacagcgcttatggaaggttctttgccttacagttcaatacaagctaatgcatattataaatatgacaatggcaattttattaagttgccagaagttattgcacaaggctttggttttagaacagtcgactcggaccgatg

SEQ ID NO: 6045 - DNA, 203 bp, synthetic construct
  source 1..203: mol_type = other DNA
ggcgcgccagtcctctatagtggtaatgcaaatgaagctgattaccgttgcgcttgttatgcctatttagcaaaagcaatgttggacttttcgcgtgatcataatgacatcttgtacacacctccgactgtcagttatggttctacattacaggctggtttgcgcaaaatggcacaaccatctggcttcgactcggaccgatg

SEQ ID NO: 6046 - DNA, 203 bp, synthetic construct
  source 1..203: mol_type = other DNA
ggcgcgccagtcctcatgagaactaattggactatccgtggttcatttattaatggtgcgtgtggttcccctggctacaatcttaaaaatggcgaggtggaatttgtttatatgcatcaaattgaactcggaagtggtagccatgtaggttctagctttgatggtgttatgtatggtggttttgaagacgactcggaccgatg

SEQ ID NO: 6047 - DNA, 203 bp, synthetic construct
  source 1..203: mol_type = other DNA
ggcgcgccagtcctacataaggttttgtttttgcaagtgtttttgttgccttcaattattgtggctgctattcaaaactgtgcttgggactaccatgttacaaaggtgttggcagagaagtttgattataatgtttctgttatgcaaatggacatccagggttttgttaacatttttatttgtcttttcgactcggaccgatg

SEQ ID NO: 6048 - DNA, 203 bp, synthetic construct
  source 1..203: mol_type = other DNA
ggcgcgccagtccttgttgcactgttgcatacttggcgctttgctaaagagcgttgtacacattggtgcacttatttgttctcactcattgctgttttatacactgcattgtatagttatgactacgttagtttgctggttatgctactttgtgcaatttctaatgaatggtatattggtgctattatcgactcggaccgatg

SEQ ID NO: 6049 - DNA, 203 bp, synthetic construct
  source 1..203: mol_type = other DNA
ggcgcgccagtcctcgttctaatgggcattttgtctaacatgaacatagcttctaattcaaaggagtgggcatattgtgttgaaatgcacaataaaataaacttgtgtgacgaccctgaaactgctcaagagttattgctggcgttgttggcctttttcttgtctaagcatagtgattttggtcttggcgactcggaccgatg

SEQ ID NO: 6050 - DNA, 203 bp, synthetic construct
  source 1..203: mol_type = other DNA
ggcgcgccagtccttagtgaaggtaatgctctatacaacaatgaaggtggacgtgcattcatgtatgcatatgtgactacgaagcctggcatgaagtatgttaaatgggaacatgactctggtgtggttacagttgaattggaaccaccttgcagatttgttatagacacacctactggaccccaaatcgactcggaccgatg

SEQ ID NO: 6051 - DNA, 203 bp, synthetic construct
  source 1..203: mol_type = other DNA
ggcgcgccagtccttaagtatctttattttgttaagaatcttaacaatttaaggagaggtgctgttttgggttacattggtgccactgtgagattgcaagctggcaaacagactgagtttgtttcaaactcccatttattaacacattgttcttttgctgttgacccagctgcagcctatcttgatgccgactcggaccgatg

SEQ ID NO: 6052 - DNA, 203 bp, synthetic construct
  source 1..203: mol_type = other DNA
ggcgcgccagtccttgttaaacaaggcgcaaaacctgttggcaattgtgtaaagatgttgactaatggttctggtagcggtcaggctattacttgtaccattgattccaacactacgcaggacacatatggtggcgcgtctgtttgtatttattgcagagcacatgttgcacatccaaccatggacggcgactcggaccgatg

SEQ ID NO: 6053 - DNA, 203 bp, synthetic construct
  source 1..203: mol_type = other DNA
ggcgcgccagtccttgtttagctagtgagtgctttatgaaaagtgacatctttggtcaagacttcaaaacttttgatttgttgaaatatgatttcacagaacataaggaggttttgtttaacaagtactttaagtattggggacaggattatcatcctgattgtgttgattgccatgacgagatgtgtcgactcggaccgatg

SEQ ID NO: 6054 - DNA, 203 bp, synthetic construct
  source 1..203: mol_type = other DNA
ggcgcgccagtcctgggtgggataatatgttaaagaacctgatggccgatgttgatgatcctaaattgatgggatgggactatcctaagtgtgatagagctatgccctcaatgattcgtatgttgtcggctatgatcttaggttctaagcatgtcacatgttgtacggctagtgataaattttatagacgactcggaccgatg

SEQ ID NO: 6055 - DNA, 203 bp, synthetic construct
  source 1..203: mol_type = other DNA
ggcgcgccagtcctctaccatatccagatcctagccgtattatttctgctggtgtttttgtggatgacatcactaagactgatgctgtcattcttttggaacgctatgtttctctggctatagatgcctacccattgtctaagcatcctaaacctgagtacaggaaggtgttttacgcattgttagaccgactcggaccgatg

SEQ ID NO: 6056 - DNA, 203 bp, synthetic construct
  source 1..203: mol_type = other DNA
ggcgcgccagtccttgggtcaaacatctcaacaagactcttaacgaaggtgttttggagtctttttctgttacacttttagatgaacatgagtctaagttttgggatgaaagcttttatgctagtatgtatgagaagtctacagtattacaagctgctggtctttgtgtagtatgtggttctcaaacacgactcggaccgatg

SEQ ID NO: 6057 - DNA, 203 bp, synthetic construct
  source 1..203: mol_type = other DNA
ggcgcgccagtcctgttctaagatgcggtgattgtttacgcagaccgatgttgtgcactaagtgcgcctatgatcatgtgtttggcactgatcataagttcattttagctattacaccatatgtgtgtaacacatctggctgcaatgtaaatgacgttacaaaactgtatcttggaggtttgaattatcgactcggaccgatg

SEQ ID NO: 6058 - DNA, 203 bp, synthetic construct
  source 1..203: mol_type = other DNA
ggcgcgccagtcctgagaaatattctaccatttacaagttgcacccatcatttaatgttagtgatgcttatgcaaatcttgtaccttattaccaacttattggcaaacagcgtataaccacaatacagggtcctcctggtagtggaaaatcgcattgttctattggtattggtgtgtattaccctggacgactcggaccgatg

SEQ ID NO: 6059 - DNA, 203 bp, synthetic construct
  source 1..203: mol_type = other DNA
ggcgcgccagtcctgaaccaattgactataatgttgtgacacaacgtatgtgtgctataggacccgatgtctttttacacaagtgttacagatgtcctgctgaaatagttaacactgtttcagagcttgtttatgaaaacaagtttgtacctgtcaaagaagctagtaagcagtgcttcaaaatctttcgactcggaccgatg

SEQ ID NO: 6060 - DNA, 203 bp, synthetic construct
  source 1..203: mol_type = other DNA
ggcgcgccagtcctgaacgcggtagtgttcaggtagacaatggctccagtataaataggcgtcaacttgatgttgttaagcgatttatacataaaaactccacatggagcaaggctgtgtttatctcaccttacaatagtcaaaattatgtagctgccaggcttttaggcttacaaactcagacagtgcgactcggaccgatg

SEQ ID NO: 6061 - DNA, 203 bp, synthetic construct
  source 1..203: mol_type = other DNA
ggcgcgccagtcctgtgatttcatatatgggtttcaggtttgatgttagcatgcctggtagtcatagtttgttctgtactagagactttgccatgcgtcatgtcagaggttggttaggaatggatgtggaaggtgcacatgtcacaggtgacaatgttggcactaatgtacctctacaagttggttttcgactcggaccgatg

SEQ ID NO: 6062 - DNA, 203 bp, synthetic construct
  source 1..203: mol_type = other DNA
ggcgcgccagtcctgttaagaatgtggattggtcaattacctaccctatgatagctaatgaaaatgccataaacaagggcggtcgcactgtgcagagtcatattatgcgtgctgctattaaattgtacaaccctaaagcaatccatgacattggtaatcctaagggtattcgttgtgctgtaactgatcgactcggaccgatg

SEQ ID NO: 6063 - DNA, 203 bp, synthetic construct
  source 1..203: mol_type = other DNA
ggcgcgccagtcctcaaggtttagagaacattgcttttaacgttgttaataaaggttcatttgttggtgctgatggtgaattaccagtagccattagtggtgataaagtgttcgtacgtgatggtaacactgataatttagtctttgttaacaaaacatcactgcctacaaacatagcatttgaacttcgactcggaccgatg

SEQ ID NO: 6064 - DNA, 203 bp, synthetic construct
  source 1..203: mol_type = other DNA
ggcgcgccagtccttctaagactgtttgtacttacatggatttgttgttggatgattttgtttctgtattgaagtctttggatttgactgttgtatccaaggttcatgaggtcataattgacaacaaaccatggagatggatgctatggtgtaaagataatgccgttgctacattctatcctcagttgcgactcggaccgatg

SEQ ID NO: 6065 - DNA, 203 bp, synthetic construct
  source 1..203: mol_type = other DNA
ggcgcgccagtcctagctggaataagaaattgtatgaacttgtacaaagattttctttttggactatgttttgcacttctgttaatacgtcatcatcagaagcctttgttgtcggaattaactatcttggtgatttcgcacaaggaccttttatagatggtaacataatacacgcaaattatgtatttcgactcggaccgatg

SEQ ID NO: 6066 - DNA, 203 bp, synthetic construct
  source 1..203: mol_type = other DNA
ggcgcgccagtcctttgagttttagtaatcatttagtctcaactaaataaaatgtttgttttgcttgttgcatatgccttgttgcatattgctggttgtcaaactacaaatgggctgaacactagttactctgtttgcaacggctgtgttggttattcagaaaatgtatttgctgttgagagtggtggcgactcggaccgatg

SEQ ID NO: 6067 - DNA, 203 bp, synthetic construct
  source 1..203: mol_type = other DNA
ggcgcgccagtcctaagccctattcaatccgttgagctacctgtgtctattgtgtcgctacctgtttatcataaacatacgtttattgtgttgtacgttgacttcaaacctcagagtggcggtggcaagtgctttaactgttatcctgctggtgttaatattacactggccaattttaatgaaactaacgactcggaccgatg

SEQ ID NO: 6068 - DNA, 203 bp, synthetic construct
  source 1..203: mol_type = other DNA
ggcgcgccagtcctagggcctttgtgtgttgacacatcacacttcactaccaaatacgttgctgtttatgccaatgttggtaggtggagtgctagtattaacacgggaaattgccctttttcttttggcaaagttaataactttgttaaatttggcagtgtatgtttttcgctaaaggatatacccggcgactcggaccgatg

SEQ ID NO: 6069 - DNA, 203 bp, synthetic construct
  source 1..203: mol_type = other DNA
ggcgcgccagtccttacttctgcttgtaaaactattgaagacgccttaagaaatagcgccaggctggagtctgcagatgttagtgagatgctcacttttgacaagaaagcgtttacacttgctaatgttagtagttttggtgactacaaccttagcagcgtcatacctagcttgcccacaagtggtagcgactcggaccgatg

SEQ ID NO: 6070 - DNA, 203 bp, synthetic construct
  source 1..203: mol_type = other DNA
ggcgcgccagtccttagagtggctggtcgcagtgccatagaagacatactttttagcaaacttgttacttctggacttggcactgtggacgcagactacaaaaagtgcactaagggtctttccattgctgacttggcttgtgctcaatattataatggcattatggttttgcctggcgtcgctgatgccgactcggaccgatg

SEQ ID NO: 6071 - DNA, 203 bp, synthetic construct
  source 1..203: mol_type = other DNA
ggcgcgccagtcctagcaatgaccaacatagtagatgcctttactggtgttaatgatgctattacacaaacttcacaagccctacaaacagttgctactgcacttaacaagatccaggatgttgttaatcaacaaggcaactcattgaaccatttaacttctcagttgaggcagaattttcaagctatcgactcggaccgatg

SEQ ID NO: 6072 - DNA, 203 bp, synthetic construct
  source 1..203: mol_type = other DNA
ggcgcgccagtccttgtgttgcgacaacctaatcttgctctttacaaagaaggcaattattatagaatcacatctcgcataatgtttgaaccacgtattcctaccatggcagattttgttcaaattgaaaattgcaatgtcacatttgttaacatttctcgctctgagttgcaaaccattgtgccagacgactcggaccgatg

SEQ ID NO: 6073 - DNA, 203 bp, synthetic construct
  source 1..203: mol_type = other DNA
ggcgcgccagtccttttgtaatagaacagtttatggccccattaaaaatgtgtaccacatttaccaatcatatatgcacatagaccctttccctaaacgagttattgatttctaaactaaacgacaatgtcaaatgacaattgtacgggtgacattgtcacccatttgaagaattggaattttggttgcgactcggaccgatg

SEQ ID NO: 6074 - DNA, 203 bp, synthetic construct
  source 1..203: mol_type = other DNA
ggcgcgccagtcctgaatgttattctaaccatattcattgttattcttcagtttggacactataaatactccagattgttttatggtttgaagatgcttgtactgtggcttctttggccactcgtacttgctttgtcaatctttgacacctgggctaattgggattctaattgggcctttgttgcattcgactcggaccgatg

SEQ ID NO: 6075 - DNA, 203 bp, synthetic construct
  source 1..203: mol_type = other DNA
ggcgcgccagtccttagcttttttatggccgtatcaacactcgttatgtgggtgatgtacttcgcaaacagtttcagacttttccgacgtgctcgaactttttgggcatggaatcctgaggttaatgcaatcactgtcacaaccgtgttgggacagacatactatcaacccattcaacaagctccaaccgactcggaccgatg

SEQ ID NO: 6076 - DNA, 203 bp, synthetic construct
  source 1..203: mol_type = other DNA
ggcgcgccagtcctcaggcaacactgtggtcttgactttcactactagagtgactgtgcccaaagaccatccacacttgggtaagtttcttgaggagttaaatgcattcactagagaaatgcaacaacatcctcttcttaaccctagtgcactagaattcaacccatctcaaacttcacctgcaactgcgactcggaccgatg

SEQ ID NO: 6077 - DNA, 203 bp, synthetic construct
  source 1..203: mol_type = other DNA
ggcgcgccagtcctagcgcagttttgcgaggtgaccaaaaggataggtagggtgacaggtagtgacggaaagctttaccatatatatgtgtgcatcgatggttgcatactgctgaagctagccaagagggacgagccaagaaccctgaagtggattagaaatttcaccgactgtccattgtgggttaccgactcggaccgatg

SEQ ID NO: 6078 - DNA, 203 bp, synthetic construct
  source 1..203: mol_type = other DNA
ggcgcgccagtcctcagttgctctgatgatggcgcaagtggaagtaaagagaagaagccagataggatcaacaaaggcaaattaaaaatagccccaaaagagcatgagaaggacagcagaactaagccacctgacgctacgattgtagtggaaggagtaaaataccaggttaaaaagaagggtaaagtcgactcggaccgatg

SEQ ID NO: 6079 - DNA, 203 bp, synthetic construct
  source 1..203: mol_type = other DNA
ggcgcgccagtccttaaaggaaagagtacccaagacggcctgtaccacaacaagaataaaccaccagaatctaggaagaaattagaaaaagccctattggcatgggcggtaatagcaattatgttgtaccaaccagttgaagccgaaaatataactcaatggaacctgagtgacaacggcactaatggcgactcggaccgatg

SEQ ID NO: 6080 - DNA, 203 bp, synthetic construct
  source 1..203: mol_type = other DNA
ggcgcgccagtccttatccagcatgctatgtaccttagaggggttagcaggagcttgcatgggatctggccggaaaaaatatgcaaaggagtccccacctacctggccacagacacggaactgaaagaaatacagggaatgatggatgccagcgaggggacaaactatacgtgctgtaagttacagagcgactcggaccgatg

SEQ ID NO: 6081 - DNA, 203 bp, synthetic construct
  source 1..203: mol_type = other DNA
ggcgcgccagtccttttgttatttgaagaggcaggacaggtcgtaaaattagccttacgagcgctgagggatttaaccagggtctggaatagcgcatcaaccacggcattcctcatctgcttgataaaagtattaagaggacagatcgtgcaaggtgtgatatggctgctactagtaactggggcacacgactcggaccgatg

SEQ ID NO: 6082 - DNA, 203 bp, synthetic construct
  source 1..203: mol_type = other DNA
ggcgcgccagtcctaaatggagatttattctactgtaagttggggggcaactggacatgtgtgaaaggtgaaccagtggtctacacgggggggctagtaaaacaatgcagatggtgtggcttcgacttcaatgagcccgacggactcccgcactaccccataggtaagtgcatcttggtaaatgagaccgactcggaccgatg

SEQ ID NO: 6083 - DNA, 203 bp, synthetic construct
  source 1..203: mol_type = other DNA
ggcgcgccagtcctaggttacagaatagtagattcaacggactgtaacagagatggcgttgtaatcagcacagatgggagtcatgagtgcttgatcggtaacacaactgtcaaggtgcatgcatcagatgaaagactgggccctatgccatgcagacccaaagagattgtctctagtgcaggacctgtcgactcggaccgatg

SEQ ID NO: 6084 - DNA, 203 bp, synthetic construct
  source 1..203: mol_type = other DNA
ggcgcgccagtcctggtagcactgttaggaggaagatatgtcctgtggctaatagtgacctacatagttctaacagaacaactcgccgctggtttaccattgggccagggtgaggtagtgttgatagggaacttaattacccacacagacattgaggtcgtagtatatttcttactactctatttggtcgactcggaccgatg

SEQ ID NO: 6085 - DNA, 203 bp, synthetic construct
  source 1..203: mol_type = other DNA
ggcgcgccagtcctgaccaacttcaagagggtaaacgacatatacgaagttgaccaatctggtgaaggggtttaccttttcccgtcaaaacaaaagacaagttcaataacaggtaccatgttgccattgatcaaagccatactcatcagctgcatcagtaataagtggcagttcatatatctattgtacgactcggaccgatg

SEQ ID NO: 6086 - DNA, 203 bp, synthetic construct
  source 1..203: mol_type = other DNA
ggcgcgccagtcctaagggtcgtttgccaatcaaataataagatgacagatgagtctgagtatggagttaaaactgactccggatgcccggaaggagctaggtgttatgtgttcaacccagaggcagttaacatatcagggactaaaggagccatggtccacttacaaaaaactggaggagaattcaccgactcggaccgatg

SEQ ID NO: 6087 - DNA, 203 bp, synthetic construct
  source 1..203: mol_type = other DNA
ggcgcgccagtcctctttagagagatgaactatgattggagcctttatgaggaggacagtctgatgattacacaattggaaatcctcaataatttgttgatatcagaagaactaccgatggcagtaaaaaatataatggccaggactgaccacccagaaccaattcagctggcgtacaacagctacgacgactcggaccgatg

SEQ ID NO: 6088 - DNA, 203 bp, synthetic construct
  source 1..203: mol_type = other DNA
ggcgcgccagtcctaacacaagtgccagtgctattcccaaaaataaagaatggagaggtgactgatagttacgataactataccttcctcaacgcaagaaaattgggggatgatgtacccccttacgtgtatgccacagaggatgaggacttagcggtagagctactgggcttagactggccagaccccgactcggaccgatg

SEQ ID NO: 6089 - DNA, 203 bp, synthetic construct
  source 1..203: mol_type = other DNA
ggcgcgccagtcctagacaccacacacctacagtacgccccaaatgctatcaagacggaggggaaggagacagaattgaaggagctagcccagggggatgtgcagagatgtgtggaagctatgaccaattatgcaagagagggtatccaattcatgaagtctcaggcactgaaggtgaaagaaacccccgactcggaccgatg

SEQ ID NO: 6090 - DNA, 203 bp, synthetic construct
  source 1..203: mol_type = other DNA
ggcgcgccagtcctatacaaaagctggaattacaataatctgtccaagatagttgaaccggctttggccactctgccctatgccgccacagctctcaaactattcgcccccactcgattggagagcgttgtcatattgagtaccgcaatctacaagacctacctatcaatcaggcgcggaaaaagcgacgactcggaccgatg

SEQ ID NO: 6091 - DNA, 203 bp, synthetic construct
  source 1..203: mol_type = other DNA
ggcgcgccagtcctgaactacagggtgacaaaatactatgatgacaatctatcagaaataaagccagtgataagaatggaagggcatgtggaactctactacaagggagccaccatcaaactggacttcaacaacagtaaaacaatactggcaaccgataaatgggagattgatcactccactctggtcgactcggaccgatg

SEQ ID NO: 6092 - DNA, 203 bp, synthetic construct
  source 1..203: mol_type = other DNA
ggcgcgccagtcctttgggtgatgcaagaagaaaataaacagggcaacctgacccccttgtttgaagagctcctgcaacagtgtccacccggaggccagaacaaaactgcacatatggtctctgcttaccaactagctcaagggaactggatgccaaccagctgccatgtttttatggggaccatatccgactcggaccgatg

SEQ ID NO: 6093 - DNA, 203 bp, synthetic construct
  source 1..203: mol_type = other DNA
ggcgcgccagtcctggattcagagaaaaacaaagtcgaagagattattgacaatctgaaaaaaggcagaaacatcaaatactatgaaaccgcgatcccaaagaatgagaagagggacgtcaatgatgactggactgctggtgacttcgtggaagagaagaaacccagagtcatacaataccctgaagccgactcggaccgatg

SEQ ID NO: 6094 - DNA, 203 bp, synthetic construct
  source 1..203: mol_type = other DNA
ggcgcgccagtcctcacccaggtaaccacaaaagatttggagttgataaaggacatacaaaagtactatttcaagaagaaatggcataaatttattgacaccctgaccatgcacatgtcagaagtacccgtaatcagtgctgatggggaagtatacataaggaaagggcaaagaggcagtggacaacccgactcggaccgatg

SEQ ID NO: 6095 - DNA, 203 bp, synthetic construct
  source 1..203: mol_type = other DNA
ggcgcgccagtccttaaaatggccacaaggttagattccagtggtgagaggggtaccatagcatatgagaaagcagtagcattcagcttcctgctgatgtactcctggaacccactaatcagaaggatctgcttactggtgctatcaactgaactgcaagtgaaaccagggaagtcaaccacttactacgactcggaccgatg

SEQ ID NO: 6096 - DNA, 203 bp, synthetic construct
  source 1..203: mol_type = other DNA
ggcgcgccagtccttaaatacgtccaacaaaagagagtcaatccgttctttgctctaactcagcaatggctaacagaaatgaggaatctgctctcccagagtctatcagtaaggaagttcatggttgagatcctcatagaagtcaagaaaggaggatctgctaaaggcagagcagtagaaataatctccgactcggaccgatg

SEQ ID NO: 6097 - DNA, 203 bp, synthetic construct
  source 1..203: mol_type = other DNA
ggcgcgccagtcctccatgctggaggaattgatcagaacatggcaaatagactgggactaagttcagatcaagttgcagaactcgctgctgcagttcaggaaacatcagcaggaaggcaagagagtaatgttcaggctagagaggcaaaatttgctgcaggaggtgtgctcattggaggcagtgatcacgactcggaccgatg

SEQ ID NO: 6098 - DNA, 203 bp, synthetic construct
  source 1..203: mol_type = other DNA
ggcgcgccagtcctagatatcgatgaaggggaagaacctatagaacagagtggcagacagtcagttaccttcaaaagggagatgagtatttcatcccttgctaacagtgtgccgagcagttctgtgagcacatccggtgggaccagattgactaattcattactaaacctcagatcaagactggctgccgactcggaccgatg

SEQ ID NO: 6099 - DNA, 203 bp, synthetic construct
  source 1..203: mol_type = other DNA
ggcgcgccagtcctaaaagcagcaaaagaagccgcctcatccaatgcaacagatgatccagcaatcagcaacagaactcaaggggaatcagagaagaagaataatcaagacctcaaacctgctcaaaatgaccttgatttcgtcagagctgatgtgtgacgtctatttccaatattctacagtatccacgactcggaccgatg

SEQ ID NO: 6100 - DNA, 203 bp, synthetic construct
  source 1..203: mol_type = other DNA
ggcgcgccagtccttaatttaactaagctactgtctttgcactggaatatacaatacctcttacctcatttcttactttaatatcatgttatttttttgataagtcacttaacttgaccaaggtctaccaggtaatgctcgcacaagtgaactgcaatctcaacttagattaaacataatcatgcaaacgactcggaccgatg

SEQ ID NO: 6101 - DNA, 203 bp, synthetic construct
  source 1..203: mol_type = other DNA
ggcgcgccagtcctgactgaatcccacagcagtaccgttcactctgagaaacctgtctgatcctgcaaaagactctcctgtgattgctgaacactactacggactaggagttaaagagcaaaacgttggccctcagactagcagaaatgtcaatttggacagcatcaaattgtacacatcagatgacgcgactcggaccgatg

SEQ ID NO: 6102 - DNA, 203 bp, synthetic construct
  source 1..203: mol_type = other DNA
ggcgcgccagtcctacaaatcaacagatgtaccaggagcaggaccgaaagattcagcagtgaaggaagaaccaccccagaagaggctacctatgttagctgaagaatttgagtgctctggatcggaagacccaatcattcgggagctgctgaaggagaactcactcataaattgtcagcaagggaaagcgactcggaccgatg

SEQ ID NO: 6103 - DNA, 203 bp, synthetic construct
  source 1..203: mol_type = other DNA
ggcgcgccagtcctatgctcagcctccatatcattggagcatcgagaggtcaataagcccggataaaactgagatcgtcaacggtgctgtgcaaactgctgacaggcaaagaccaggaactccgatgccaaagtcccgaggtattcccattaaaaagggcacagacgcgaaatatccatctgctgggacgactcggaccgatg

SEQ ID NO: 6104 - DNA, 203 bp, synthetic construct
  source 1..203: mol_type = other DNA
ggcgcgccagtcctcggaaaacgtgcctgggtcgaagagtggtgcaacccggcatgttcgaggatcacccccctaccaagaaggcaagagtgtcaatgcggagaatgtccaactgaatgcttccactgcggttaaggaaactgataagtcagaagtaaaccccgtagacgacaacgactcacttgatgcgactcggaccgatg

SEQ ID NO: 6105 - DNA, 203 bp, synthetic construct
  source 1..203: mol_type = other DNA
ggcgcgccagtcctataaatacatcatgccttcagatgatttctcaaacactttcttcccgcacgacactgatcgcttgaattatcacgcagatcatttaggtgattatgaccttgaaaccctgtgtgaagagtcggttctaatgggagtgatcaactctataaaattaattaatctggatatgcgctcgactcggaccgatg

SEQ ID NO: 6106 - DNA, 203 bp, synthetic construct
  source 1..203: mol_type = other DNA
ggcgcgccagtcctgtaatatttgatcactgaattgtcagcagaaatacaatgatctaacaacaatctcccacaagtagacaatggtttcaggtcaataataacaacctcaatactaatctttcacataagcattactcattccagccctcagacgataacacaatacttgatacatgtttattgaagcgactcggaccgatg

SEQ ID NO: 6107 - DNA, 203 bp, synthetic construct
  source 1..203: mol_type = other DNA
ggcgcgccagtccttggtaagagtgcctctcatccccaagatcttctggaggaactctgttccctcaaagttactgtgagaagaacagctggatcaactgagaaaattgtgtttggatcatctggccctctaaatcacctcgttccgtggaagaaagtactgactagtggttcaatttttaatgcagtcgactcggaccgatg

SEQ ID NO: 6108 - DNA, 203 bp, synthetic construct
  source 1..203: mol_type = other DNA
ggcgcgccagtcctcataggcggactaagtctccacattaagatcaatggtgtaatcagcaaacggctgtttgctcaaatgggattccaaaaaaacctttgtttctctttgatggacatcaatccttggctcaacagattgacctggaacaacagttgtgagatcagccgagtagcagctgtgttgcacgactcggaccgatg

SEQ ID NO: 6109 - DNA, 203 bp, synthetic construct
  source 1..203: mol_type = other DNA
ggcgcgccagtcctaagacccagtttctaattcaatgactatacaggctatatctcaggcattcggtggaaattatgaaacactgctaagaacattgggttacgctacagaagactttgatgatcttctagaaagtgacagcataacaggtcaaatcatctatgttgatctaagtagctactatataacgactcggaccgatg

SEQ ID NO: 6110 - DNA, 203 bp, synthetic construct
  source 1..203: mol_type = other DNA
ggcgcgccagtcctcacaaaaaacaataactaattgttttctcttgaagaataagatttggtgcatatcattggttgagatatatgacacaggagacaatgtcataagacccaaactattcgcggttaagataccagagcaatgtacataaaaatcaacctcataatttaatggattgatctaatatacgactcggaccgatg

SEQ ID NO: 6111 - DNA, 203 bp, synthetic construct
  source 1..203: mol_type = other DNA
ggcgcgccagtccttacacatgcgagacaaaagtactgaaataatcctaaatccgaatcttatctgcattttcaaatcagacaaaactggaaagaagtgttattatcttacacccgaaatggttctaatgtattgtgatgtcctagagggaaggatgatgatggagacaacagtcaaatcggatatcacgactcggaccgatg

SEQ ID NO: 6112 - DNA, 203 bp, synthetic construct
  source 1..203: mol_type = other DNA
ggcgcgccagtcctgcataaaggaaatgcatcaagaattgagtgagtgtggttttacagatcagaagattcggtctatgtttattgatgatcttttatccattctaaatatcgataatatacatctgttggcagagttcttttctttctttcgtacgtttggccatcctattcttgaggctaaagttgcgactcggaccgatg

SEQ ID NO: 6113 - DNA, 203 bp, synthetic construct
  source 1..203: mol_type = other DNA
ggcgcgccagtcctctgcagaaaaagtgagagaacatatgttggcagataaagttcttgaatatgcccctataatgaaagcacatgctatattctgcgggactataataaatgggtatagggatagacacggaggagcctggcctcctctttacctccccgcacatgcatctaaacatataatccgttcgactcggaccgatg

SEQ ID NO: 6114 - DNA, 203 bp, synthetic construct
  source 1..203: mol_type = other DNA
ggcgcgccagtcctgtgaagtgttgagctataccccaccgaagtcaaccgagccaagaagattggttgacgtttttgtaaatgatgaaaactttgatccatacaacatgctggaatatgtcttatccggtgcttatctcgaggatgaacaattcaatgtttcttatagcttgaaggagaaagagacgacgactcggaccgatg

SEQ ID NO: 6115 - DNA, 203 bp, synthetic construct
  source 1..203: mol_type = other DNA
ggcgcgccagtcctagcaagctggacgattgttcgcaaagatgacctacaaaatgcgtgcatgtcaagtcatagcagaggccctgatagcctcaggtgtcggtaaatattttaaggagaacgggatggttaaggatgagcacgaacttttgaagacactcttccaattgtctatttcctcagttcctccgactcggaccgatg

SEQ ID NO: 6116 - DNA, 203 bp, synthetic construct
  source 1..203: mol_type = other DNA
ggcgcgccagtcctctgatcttaagaaattctgtctcaattggagatacgaatcaatggctatatttgctgaacgtctggatgagatatacggtttacctggattttttaattggatgcacaaacgactagaaagatctgttatctatgttgcagaccctaattgcccccctaatattgacaaacatacgactcggaccgatg

SEQ ID NO: 6117 - DNA, 203 bp, synthetic construct
  source 1..203: mol_type = other DNA
ggcgcgccagtcctctatcactcaaaaagttcatcctaatcttccctacaaggtaaagaaagagatctgtgcaaagcaagctcagctttattttgaaaggttaaggatgaacttaagagccctcggccacaatcttaaagctacagaaactatcatcagtacacatctttttatttattcgaagaaaacgactcggaccgatg

SEQ ID NO: 6118 - DNA, 203 bp, synthetic construct
  source 1..203: mol_type = other DNA
ggcgcgccagtcctttcattatgatggtgctgtgctgtctcaggcactcaaatcaatgtcaagatgttgcttttggtcagagactctggtggatgaaactagatcagcttgtagtaacatcagcactacaatagctaaagctatagaaaatgggttgtcaagaaatgtcggctattgcatcaatatttcgactcggaccgatg

SEQ ID NO: 6119 - DNA, 203 bp, synthetic construct
  source 1..203: mol_type = other DNA
ggcgcgccagtcctatataggtgatccggttacagcatctttggctgatcttaagagaatgattgatcacagtattatgactgaaagcgtattacaaaaagttatgaatcaagaacctggtgatgcgagtttcttggactgggccagtgatccatactcgggcaacttgcctgactcacaaagcatcacgactcggaccgatg

SEQ ID NO: 6120 - DNA, 203 bp, synthetic construct
  source 1..203: mol_type = other DNA
ggcgcgccagtccttgatatcatcaaatacttgctcagttgacttggcacgagcattgagatctcacatgtggagggaattagcgttaggtagagtaatatacggtcttgaggtaccagatgcacttgaggctatggtgggaaggtatataacagggagcttagagtgccaaatttgtgagcagggaacgactcggaccgatg

SEQ ID NO: 6121 - DNA, 203 bp, synthetic construct
  source 1..203: mol_type = other DNA
ggcgcgccagtcctacacgatgtatgggtggttctttgtacctagggattcccaattggatcaggtagatagagagcactcatcaataagagtaccttatgtaggatcaagtacggatgaaagatcggatatcaaactagggaatgtcaaaagaccaactaaggccttgcgttctgctatcagaattgcgactcggaccgatg

SEQ ID NO: 6122 - DNA, 203 bp, synthetic construct
  source 1..203: mol_type = other DNA
ggcgcgccagtcctagtccaaatcaagagaattagactttcctttatggtcaactgaggaacttcatgatgtcctagctaagactgttgctcagaccgttcttgagattataacaaaggctgacaaggatgttttaaagcaacaccttgcaatagactctgacgataacatcaacagcttaatcacagcgactcggaccgatg

SEQ ID NO: 6123 - DNA, 203 bp, synthetic construct
  source 1..203: mol_type = other DNA
ggcgcgccagtcctaggtgaataggaaagttgaatacccatatcacactataggagtttcaggaaatgttgttactaatacagatattgtttatacaggatatgcagacgtcttcaagtgtgaacagtgtgatttgctgatgggtgcttgggcaccaaacgacattccagcactgacgcacaatattccgactcggaccgatg

SEQ ID NO: 6124 - DNA, 203 bp, synthetic construct
  source 1..203: mol_type = other DNA
ggcgcgccagtcctgagcatcacagtgtgtccagtttaagctccccacagaaaatttagtggcacgtaattatgtgttgttgtgtgaggaaattgagcgagaaaatattcctgtaattttccaggattatagtgaagggaatgtctttacgtgtcggattgttagtggagatctaactgctgttggtacgactcggaccgatg

SEQ ID NO: 6125 - DNA, 203 bp, synthetic construct
  source 1..203: mol_type = other DNA
ggcgcgccagtcctcagcatccaatatgtatacagctcgagatgtagcgtctaaaaatttgttagatcagctacataacacccccaatgtgcacatgcactctctgcattccctcccgtatgagaatttcccttgtgaagctctggaatttgcagttgagcaaggtattatcccccctgtgacctttgcgactcggaccgatg

SEQ ID NO: 6126 - DNA, 203 bp, synthetic construct
  source 1..203: mol_type = other DNA
ggcgcgccagtccttcccccggagatcaggtgaaacgctagagttggctaatgccacattgaaccatgtgaataatgtgattgaccgacacgatgaagcaataagtaatgtcaggcaaaatgttgaagtgaagttgacgggtgtgtcccgacaagttggtgctatgttgccgaaagtagaaactgctacgactcggaccgatg

SEQ ID NO: 6127 - DNA, 203 bp, synthetic construct
  source 1..203: mol_type = other DNA
ggcgcgccagtccttatatgagtctataggaacaggcttatgcgtagcgttgtctggtatattgtcatttatagcagtcatgtgtcttggaatcactgatttatctgctgttacattcaataagctgctcacgcagtcttcattggttggacgagctttagtcggtgtgcgtagcttcaaagatgtttcgactcggaccgatg

SEQ ID NO: 6128 - DNA, 203 bp, synthetic construct
  source 1..203: mol_type = other DNA
ggcgcgccagtccttttttggcatctgggattatgtagacaatcaagtgtgtgaaattctttacgggaagagtcgcaagaacttggatttgttgaaagaatatccgagtttggactcgttgttgtccatcttcaactactttcacgacacggtagatgctaatgtgctcattagttgtaaccgtgcagcgactcggaccgatg

SEQ ID NO: 6129 - DNA, 203 bp, synthetic construct
  source 1..203: mol_type = other DNA
ggcgcgccagtccttagcttatgatgatgtattgcagatagtggattcggcccaaaagccaaatcctgagttattcgaatttattaggttgaacaacagtgatccatatcaagtacatatgtccagtgtcagggataaggcaaatacattcatagcaccatcttttgtttttgcaacctcaaacgtaacgactcggaccgatg

SEQ ID NO: 6130 - DNA, 203 bp, synthetic construct
  source 1..203: mol_type = other DNA
ggcgcgccagtcctatccaggcgcgtatgtccccaagtctattcatagtgcagatgcattcagacggcgtttagatctatgcgtttatgtagatgttaaagatgagtttgcacgcatcgtagctggatctaagggtcatcgtaaggtcccttgtgaacagaagatatggctccatcagaatccaggaacgactcggaccgatg

SEQ ID NO: 6131 - DNA, 203 bp, synthetic construct
  source 1..203: mol_type = other DNA
ggcgcgccagtcctagacgcagcaagacatgaagcaggaaattattgcaggaacatacaagatcactccggagacagctgtgtatgagttgcatgttgacactacgttagcaggcaatgctcagtctaaagtctgtgcttatgatggtttggtgtcactaattgaacaggtgaggaaattgcgtgttgcgactcggaccgatg

SEQ ID NO: 6132 - DNA, 203 bp, synthetic construct
  source 1..203: mol_type = other DNA
ggcgcgccagtccttggaagctcattttgtctcgcggagtgcgaacgatggaagcatgttcatcccagccagtgaggttgctgatttgttgtgtcagagacataacaatacgaatttgaatgaggaactggtgtatttgacgtggatgacgcagatcacagataaggagttagcctcgagtttagtatcgactcggaccgatg

SEQ ID NO: 6133 - DNA, 203 bp, synthetic construct
  source 1..203: mol_type = other DNA
ggcgcgccagtcctatttcacaaataacggaatggataagtcaatttggaaacagagcgccgagcgttcagcacaggccattagtcagtgtaagaatgcttggacgcgcataaacgatttcttgaagaatcattggatttccatatctgccgttataggatcagctctcctaatagggggagtgtcgacgactcggaccgatg

SEQ ID NO: 6134 - DNA, 203 bp, synthetic construct
  source 1..203: mol_type = other DNA
ggcgcgccagtcctcacccaatccaacaaaatctgaaattactcggagtcctatccatggatgtttccccgttcttacagcccccgctaccttgtatagcccaacagagaacttattaatcaagaacgcaatgaaagtaacaaagaatgtggagttgctggaagaagacctaattgatgcctgtgttccgactcggaccgatg

SEQ ID NO: 6135 - DNA, 203 bp, synthetic construct
  source 1..203: mol_type = other DNA
ggcgcgccagtcctaggtgattgctggtgatttctcgaattttgatggttcattgaattctcagattttatcacgagtatctgaaattgtcactgattggtatggagatgatgcagaaaatggtctgatcagacatacactacttgagtacttgtttaatgccacctggcttatgaatggtaaggtttcgactcggaccgatg

SEQ ID NO: 6136 - DNA, 203 bp, synthetic construct
  source 1..203: mol_type = other DNA
ggcgcgccagtccttccaactcaaccattctcagccttccggcaatccattaactactctcatcaactgtgtatataacatgatcatttttagatatgtctaccttctagctcagcgagaaaacgggtttcccatgacgctctctggatttactacaaacgtagcttgcattttctatggtgacgattcgactcggaccgatg

SEQ ID NO: 6137 - DNA, 203 bp, synthetic construct
  source 1..203: mol_type = other DNA
ggcgcgccagtccttcgaaaactctccgaacactaggtgcagtaaggctttcatggagtggtttgctatttagcgtacgtgtaccataggcagccccaaaaacacgtgtgaggagaaagtcccagtcactttgggcaaagtagacagccgcgcttgcgtggtgggacttaattaatgcctgctaaccccgactcggaccgatg

SEQ ID NO: 6138 - DNA, 203 bp, synthetic construct
  source 1..203: mol_type = other DNA
ggcgcgccagtcctagttgaaattgataattttgatacaacaaccagtggaggactaattccaggaggtagtgttacaaacagtgaaggttctacaatcttgatgaatgatatcccaatcactaatcagaatgtagtgctgtctaagaatgtaacagataacctgtttgaagtccaggaccaagctctcgactcggaccgatg

SEQ ID NO: 6139 - DNA, 203 bp, synthetic construct
  source 1..203: mol_type = other DNA
ggcgcgccagtccttggcaggttgaaaaacatcaagctatatgggcatgcgccatctgtgacatcttcagtatatccgtctactcagtccggatatgatgatgattgtcccattgtgcatgcgggaactgatgaggattcttctaaacaggggattgtctcaagggttgcagacaccgttggtgcggtcgactcggaccgatg

SEQ ID NO: 6140 - DNA, 203 bp, synthetic construct
  source 1..203: mol_type = other DNA
ggcgcgccagtccttgttggcttcgattatggcgtacccctgtctcttttccctaacaatgccattgatcccacaattgcagtgcctgaaggattggatgagatgtctattgaatacttagcacagcgaccatatatgctcaacagatacactatcagaggtggtgacactcctgatgcgcatggaaccgactcggaccgatg

SEQ ID NO: 6141 - DNA, 203 bp, synthetic construct
  source 1..203: mol_type = other DNA
ggcgcgccagtcctcagattgctggtgcaatatctcccctatggtagtggtgttcaaccaatagaaagtatcctttcacagatcatcgacatctcacaagtcgatgataagggtattgacattgcttttccttccgtctatcccaataagtggatgcgagtgtacgatccagcgaaagttgggtacaccgactcggaccgatg

SEQ ID NO: 6142 - DNA, 203 bp, synthetic construct
  source 1..203: mol_type = other DNA
ggcgcgccagtcctgttagtaacatgtggtagtatggcagcgattggtgaagctacggtcgcattgcaattcgtggacgagacaattgaaattctgagattagagtcagattttgagtccaaagctccagtgaaatttactccaggtaactataccgtggtcactgaagctagtgatgttgaattggtcgactcggaccgatg

SEQ ID NO: 6143 - DNA, 203 bp, synthetic construct
  source 1..203: mol_type = other DNA
ggcgcgccagtcctatatccatccacacatgctggtctggactactccagctcagacacatctacaatgttgactacaatgggtgaacagtttgtctctctcagaatgttaactagacgttccagtcccgttgacattcttagaggcgatttggttactttgcccggaatttcctttggcacagataacgactcggaccgatg

SEQ ID NO: 6144 - DNA, 203 bp, synthetic construct
  source 1..203: mol_type = other DNA
ggcgcgccagtcctgcattatattaacacatccctgaaccctatggctcaaattagcttgccttattatagtccagcagaaaatttagttattgattccaagtctttccctcaattaagtgatttatcaattagtaatttggaaaggacggaaaatgagtactttgtgcttgcaagtgctggtgatgacgactcggaccgatg

SEQ ID NO: 6145 - DNA, 203 bp, synthetic construct
  source 1..203: mol_type = other DNA
ggcgcgccagtcctccacactttctctcaattggcaggatgtccagctttcacttttggacctgccgaattggcttaatttaacacccttcaggtgtagacccgtcattgtgacgcgtgggttgaggtgccatgaatttgtcattcatggtgcatttatctcaacagttttccctaaccgcgcgttgccgactcggaccgatg

SEQ ID NO: 6146 - DNA, 203 bp, synthetic construct
  source 1..203: mol_type = other DNA
ggcgcgccagtccttatccccttgatgcaactgaggttttaacatctcattgtttttgagccccaacgccttggtggatgctcaaagaagattactcttgatgcttggctctcagaaagaatggcacctcaaagttttgagacccgattcttttgagtcgagaaccttacccccaacccttgagattgcgactcggaccgatg

SEQ ID NO: 6147 - DNA, 203 bp, synthetic construct
  source 1..203: mol_type = other DNA
ggcgcgccagtcctcttttcttccaactaaacccctattgatgtgttggtcgtttgccaatcggagggcgacaggcgcaggtcgccccaacagctagtattgtgggaacttgccactgctgatgaaacgaggtagtggcatttagtacctgagaacgctggaggagcatctccccctcttccttcattcgactcggaccgatg

SEQ ID NO: 6148 - DNA, 203 bp, synthetic construct
  source 1..203: mol_type = other DNA
ggcgcgccagtcctgccgagctcttcctcggtcttgttctgaatgcacacatgtctaggggctaaggatgtcctacaggtacccgcacgtaaccttcagagagtgtggatctgagtaggagactgtggtgcgctgctttacagacgtagcccagtttaaaaaacgtctatgcccctacagggtcgcggcgactcggaccgatg

SEQ ID NO: 6149 - DNA, 203 bp, synthetic construct
  source 1..203: mol_type = other DNA
ggcgcgccagtccttgggccgcaccctttccttttacaaacttggttttatggtgacaatggcaggcaacatggtcaacaacttgttcgctctcgctactgaagtgtgttctccaaaacagggtcctctcctcgacacagagatgcccttgcctcttgaattggctgaatttcccaatcagtctgacacgactcggaccgatg

SEQ ID NO: 6150 - DNA, 203 bp, synthetic construct
  source 1..203: mol_type = other DNA
ggcgcgccagtcctttgatgatgataggatgtacttgtcagggcctcctacccgagtcaaaatggcttcttcataccacatgcctcaatgggttgagtcttttgctcgtttttgcttggaactccaccccgtccaacacaggcgtaccttggcccagtcactccgtgactcacaatgtcgtggagctgcgactcggaccgatg

SEQ ID NO: 6151 - DNA, 203 bp, synthetic construct
  source 1..203: mol_type = other DNA
ggcgcgccagtcctgtcactcgcgcccggaggcaggtcacaacaatgaatcaggcaattctggtacaatcgtgaacaactattatatgcaacactaccaaaattccattgaccttgatggcatttcctctcaaaacattggcgaggctggagctggaaccaaccctttttcatccatactcgacgtgccgactcggaccgatg

SEQ ID NO: 6152 - DNA, 203 bp, synthetic construct
  source 1..203: mol_type = other DNA
ggcgcgccagtcctacgatgcactcccgcgccacctgccacctcagcagcttactctctacccacaccagtttctcaacttgcggactaacactactgttgacattgaggtcccctacatgaattttgtgcctgcttctgctccagtaatgcattgtccttggacccttttgatcatggtcatttcaccgactcggaccgatg

SEQ ID NO: 6153 - DNA, 203 bp, synthetic construct
  source 1..203: mol_type = other DNA
ggcgcgccagtcctcactccgctacggggctgggtcagcccctgatgtacagttaaccatgaccataacccccaccgattttgttgccaacggcctgagacagaccgtatctgagggtataccgggcacccagccctacgacaggcagttcctgtccacagagccctcagctccccctcccctctatacgactcggaccgatg

SEQ ID NO: 6154 - DNA, 203 bp, synthetic construct
  source 1..203: mol_type = other DNA
ggcgcgccagtcctcaccatcttggctgccagaccgaagcttcattcccggcaagtttactgactttttgcaggttgccgtcatcccaaccatggccgaggtttctgtgggcaccaaccacaaacccatccccagtttttctgttggcaatacattggaggaccggccgttgttgaacactgatttaacgactcggaccgatg

SEQ ID NO: 6155 - DNA, 203 bp, synthetic construct
  source 1..203: mol_type = other DNA
ggcgcgccagtcctctttcacctccatgacatttcggaacacttacctgtctgctttggctctcaattacacccagtacagaggtagtatttgtgtggactttttgtttacaggcactgccatggcccaagggaaatttgttgttgcttacacgcctcctgggcgtgaacccaaaacattggatgaagcgactcggaccgatg

SEQ ID NO: 6156 - DNA, 203 bp, synthetic construct
  source 1..203: mol_type = other DNA
ggcgcgccagtcctccatgcagggcacatatgccatatgggatcttggcttgaattctagctttaaatttgttataccttacatttcagcttcggcttaccgattcaccaacgaggacgaccgtccatctgtggtgaatgcagtcggttggttgcaagtttaccagctcactaccctgacgtaccctgcgactcggaccgatg

SEQ ID NO: 6157 - DNA, 203 bp, synthetic construct
  source 1..203: mol_type = other DNA
ggcgcgccagtccttggctcctgccgcgcattttggtactttgtcaattcgcgtgaacgcccgccccttgacgcaactcaaaggggcggacgacgaacctctccaagacctggcttttgccctcttcacccgccttcgtaatttgaaagcctatgcgccacgccatttccagcgtgtgcccaattcaccgactcggaccgatg

SEQ ID NO: 6158 - DNA, 203 bp, synthetic construct
  source 1..203: mol_type = other DNA
ggcgcgccagtcctgtgcaacaaactttgaccttctcaagttggctggagacgtcgaatccaacccagggcctaccatctggtccatgatgcctggtggcgagcttatagagtttgccacgaaagtgtcccaggtctacaaaactctgaaggaaaaatgcacagaccccactacgtggattaaggcagcgactcggaccgatg

SEQ ID NO: 6159 - DNA, 203 bp, synthetic construct
  source 1..203: mol_type = other DNA
ggcgcgccagtcctttcgccgcaccttcttcgatgactcgtcgtcggagtctgaggacggtgaaccagaagttccacagtttaggccacaggtttaccctagacctcgcagtgagcgagtggttagacaccccatgacagcccgtcgcgcgcagcgcgtcattgacatgggttactctgactacgagacgactcggaccgatg

SEQ ID NO: 6160 - DNA, 203 bp, synthetic construct
  source 1..203: mol_type = other DNA
ggcgcgccagtcctcggtgacgcgccgctactggaaggtgattgatgtcagcgcagacgaacagtataagacagtggacggcagattggactacgctaaggccacacaaccaacccagatcccccctgaattggctgtgttcaagacacacgtccctcttttgaagggcgctctacgcgactgccagccgactcggaccgatg

SEQ ID NO: 6161 - DNA, 203 bp, synthetic construct
  source 1..203: mol_type = other DNA
ggcgcgccagtcctatgcagcacttgctctttctcttttgacctctatactttctttttctcttgtgatttattcaggggtgaagacctatcaggagttttcccgcaagcacaagcatgtgcgccagccggtgtacaatgcctgggaggactttgatgaggactctatctttgaacagtcacgtgcttcgactcggaccgatg

SEQ ID NO: 6162 - DNA, 203 bp, synthetic construct
  source 1..203: mol_type = other DNA
ggcgcgccagtcctcagctggccgcaattcggcaacacgcgaccagcttgaggcagtggatgtgattgatcaatttgaaatgccgagtgatgctgtcgctattaagtttccagacaagcgcggctcctcttacaaaaatattcttcaccaccttgcctacaccctcccaacccgtggaaagccagtttcgactcggaccgatg

SEQ ID NO: 6163 - DNA, 203 bp, synthetic construct
  source 1..203: mol_type = other DNA
ggcgcgccagtccttcatccttgtcaacaacaacgtggcaggtagagccgttgttcacggtacttacattggatgcacccaaaagatcaccactttagacggattcacttttcccaacgtgagttcatacaaagccactacccatcttgggatgtgtcgcgcgccagtggttgccaacgaaaatggcacgactcggaccgatg

SEQ ID NO: 6164 - DNA, 203 bp, synthetic construct
  source 1..203: mol_type = other DNA
ggcgcgccagtcctaggcttatgcttcctcattgtttgcacagattggtactgacaatggacccatttcagagtatgaagctgttactggcattgagaatttggactcagtggagacgacaacgtcgcccggacttccctacacgacagcggggatcccgagagaggcgctgtttgacccagacaaaacgactcggaccgatg

SEQ ID NO: 6165 - DNA, 203 bp, synthetic construct
  source 1..203: mol_type = other DNA
ggcgcgccagtcctacaacattgtgctgcgtgccgcagcgtatgatgtcttcaccaactacgaggaaggtgacctcgccttcttgacgtacggtgatgacgtactactctgtgctaatcagccactgcctctggagcgctttcgcaagtcgcttgcaaagcttggatacaccattactccagctgacacgactcggaccgatg

SEQ ID NO: 6166 - DNA, 203 bp, synthetic construct
  source 1..203: mol_type = other DNA
ggcgcgccagtcctccacggacttggcggttcatcttggaccgctggagtacgcaaggctcttccgcccgtttgtggaagttgggtactgcgttcgccccttcggggatgcgcgcagggcctggctccgcaattttgacctgtgaggtgctccctaccagataccccagatttacccgttaccctaaacgactcggaccgatg

SEQ ID NO: 6167 - DNA, 203 bp, synthetic construct
  source 1..203: mol_type = other DNA
ggcgcgccagtccttgacctgtgaggtgctccctaccagataccccagatttacccgttaccctaaaattccctcccctttctcttcactcgccgaggccacgccgagtaggaccgagggtacagcgagtcttttagtttaaggtgttagatgtaaggtacgtgggctttcttttggtttacttcttccgactcggaccgatg

SEQ ID NO: 6168 - DNA, 203 bp, synthetic construct
  source 1..203: mol_type = other DNA
ggcgcgccagtccttccagaggagaggtgctggcttttgaagcattagctgaggacattcctgatacccttaatcaccaaactccatttgtaaataatgatgtagaagatgacatatttgatgaaacagagaaattcttagatgtttgctacagtgtgcttatgcaggcatggatagtaacatgcaagcgactcggaccgatg

SEQ ID NO: 6169 - DNA, 203 bp, synthetic construct
  source 1..203: mol_type = other DNA
ggcgcgccagtccttcacaatcaagatctttgctagcaaaccgctactatgctatggtgggagacattggcaagtacattgaacacagcggaatgggaggatttttcttaacacttaaatatggacttggaacaagatggcctacattggctcttgcagcattttctggggaactccagaaattaaaacgactcggaccgatg

SEQ ID NO: 6170 - DNA, 203 bp, synthetic construct
  source 1..203: mol_type = other DNA
ggcgcgccagtccttatttaaatcagcaatattttcagctaggagtagaaacagcaaggaaacagcagggagctgttgacaacaggacagcagaggacctcggcatgactgctgcagacaaagcagacctcactgcaaccatatcaaagctatccttgtcccaattacctaggggtagacaaccaatacgactcggaccgatg

SEQ ID NO: 6171 - DNA, 203 bp, synthetic construct
  source 1..203: mol_type = other DNA
ggcgcgccagtcctggacaaccaaacaaccagacaagtgacaaccagcagagattcaacccccccataccgcaaagaacatcaggtatgagcagtgaagagttccaacattcaatgaatcagtacatccgtgctatgcatgagcaatacagaggctcccaggatgatgatgccaatgatgccacagatcgactcggaccgatg

SEQ ID NO: 6172 - DNA, 203 bp, synthetic construct
  source 1..203: mol_type = other DNA
ggcgcgccagtcctctgattgagaacctgagtaaaatttccactgttacagataccaaaacccgccaaaaacgatttgcaggagtagttgttggacttgctgcattaggagtagccacagccgcacaaataactgcagctgtagcaatagtgaaagctaatgcaaatgctgctgcgataaacaatcttcgactcggaccgatg

SEQ ID NO: 6173 - DNA, 203 bp, synthetic construct
  source 1..203: mol_type = other DNA
ggcgcgccagtcctcatactgggagcatgtccaacaccaactgtacacccggaaatctgcttctgcatgatgcagcgtacatcaatggaataaacaaattccttgtacttaaatcatacaatgggacgcctaaatatggacctctcctaaatattcccagctttatcccctcagcaacatctcccaaccgactcggaccgatg

SEQ ID NO: 6174 - DNA, 203 bp, synthetic construct
  source 1..203: mol_type = other DNA
ggcgcgccagtcctgccggtaactccagcgaacaggctgcagcagcacggagttcctatgtaatccgttatcactcaaacaggttgattcagagtgctgttcttatttgcccattgtctgacatgcacacagcaaggtgtaatctagttatgtttaacaattctcaagtcatgatgggtgcagaaggtcgactcggaccgatg

SEQ ID NO: 6175 - DNA, 203 bp, synthetic construct
  source 1..203: mol_type = other DNA
ggcgcgccagtcctccttaatactattgaatgaagactccagattcaataataattgaaaggctctctatcttatgcaatagttatacgttttggctgtattagaatgttatagattctgctgtttttcccatatgaagcaatccttcaacaccgacttaggttcaattttctcatcatttactgttgcgactcggaccgatg

SEQ ID NO: 6176 - DNA, 203 bp, synthetic construct
  source 1..203: mol_type = other DNA
ggcgcgccagtccttactagggcacttcccgcatgatcttgacatttctgaaataagcccccttcacaataatgattgggatcaaattgccagagaagaatccaatcttgctgaacgacttggagtagctaaatctgaattaattaaacgtgtgcccgcatttagagcaactagatggcgtagtcatgcgactcggaccgatg

SEQ ID NO: 6177 - DNA, 203 bp, synthetic construct
  source 1..203: mol_type = other DNA
ggcgcgccagtcctctgatttagttcacattgttgacacacgatctggtctaatagttatcacccctgaacttgttatttgttttgatcggttaaatagtgttttaatgtattttacatttgagatgactttaatggtaagtgacatgtttgagggaaggatgaatgtcaccgctctctgcactattacgactcggaccgatg

SEQ ID NO: 6178 - DNA, 203 bp, synthetic construct
  source 1..203: mol_type = other DNA
ggcgcgccagtcctcctttattacacaagagattatagatatcctaattggttcaaaagcccttgataaggatgaatcaataactgttactacacaattgttagatatattttccaacctttctccagatttaattgctgagatgttgtgtctcatgagactttggggtcatcccactcttactgctgcgactcggaccgatg

SEQ ID NO: 6179 - DNA, 203 bp, synthetic construct
  source 1..203: mol_type = other DNA
ggcgcgccagtcctgtagaagtctaataaaacaacgacatcagagacatcatattcctatgcccaatccatttaatagacgtctattactcaatttcttagaagatgacagttttgatccagttgccgagcttcgatatgttaccggtggtgaatatctccaagatgacacattttgtgcatcttactcgactcggaccgatg

SEQ ID NO: 6180 - DNA, 203 bp, synthetic construct
  source 1..203: mol_type = other DNA
ggcgcgccagtcctatatcggagatcctcttggtacagctgtggcagatctcaagaggttaattaaatgtggtgctcttgaatcatggatactgtataatttactagcaagaaaaccagggaaaggttcatgggcaactttagcagccgatccatactcattgaatcaagaatatctttatcctcctacgactcggaccgatg

SEQ ID NO: 6181 - DNA, 203 bp, synthetic construct
  source 1..203: mol_type = other DNA
ggcgcgccagtcctcttctacacaagaaatcactctccatttgcacactagctcatcttgttgtgttagaagtgtagatggttgccttatatgtgagagcaatggagaggttcctcagatcactgttccctatactaatacatttgtatatgatcctgatccactagcagattatgagattgcacacccgactcggaccgatg

SEQ ID NO: 6182 - DNA, 203 bp, synthetic construct
  source 1..203: mol_type = other DNA
ggcgcgccagtcctcactaattccaggccctccttctcatcatgtattacgaccactaggagtgtcatccacagcttggtataaagggataagttattgtagatacctagaaacacaaaagatacagactggtgatcatctttatttagccgaaggaagcggtgcttcaatgtcacttctagaactctcgactcggaccgatg

SEQ ID NO: 6183 - DNA, 203 bp, synthetic construct
  source 1..203: mol_type = other DNA
ggcgcgccagtccttatttccaggagatactgtctattataatagtctttttagtagtggagagaatcctccacagagaaactatgcccctcttccaactcaatttgtacagagtgttccatataaattgtggcaagctgatcttgctgatgatagcaatttgataaaagattttgtcccattatggacgactcggaccgatg

SEQ ID NO: 6184 - DNA, 203 bp, synthetic construct
  source 1..203: mol_type = other DNA
ggcgcgccagtcctatggaaacggtgcagttacagacttatcaacaaaggatgcagttgcattcataatacataaagtaggagcagagaaagcatcccttgtccatatagatctcgaatcaactgctaatataaatcagcaaactctgtccagatcccagattcattcattaattatagcaactactgcgactcggaccgatg

SEQ ID NO: 6185 - DNA, 203 bp, synthetic construct
  source 1..203: mol_type = other DNA
ggcgcgccagtcctttagaactatcggtttcagtgcagctctagtaactgctactactcttcacaatgacggattcacaacaatacatcctgatgttgtttgtagttattggcaacaccatcttgaaaatgttgggagagtcggaaaagtaattgatgagatacttgatggtttagccaccaacttctcgactcggaccgatg

SEQ ID NO: 6186 - DNA, 203 bp, synthetic construct
  source 1..203: mol_type = other DNA
ggcgcgccagtcctctgtagctaaagatgctgattccaaaatcagcagtgctctggaggaagaactaggtgtgacagatacagcaaaagagagactaagacaccatctgacaaacctttcaggaggggatggtgcgtaccacaagcctacaggtggtggagctatagaagtggcaattgatcatacagcgactcggaccgatg

SEQ ID NO: 6187 - DNA, 203 bp, synthetic construct
  source 1..203: mol_type = other DNA
ggcgcgccagtcctacataacatttggagtcgaggacactgctgatcgggacaacaagaactggacaaatgacagcaatgaaagatggatgaatcactcgatcagcaaccacacaatcacgattcgtggtgcagaagaacttgaagaagagacaaatgatgaagacatcactgatatagaaaacaagacgactcggaccgatg

SEQ ID NO: 6188 - DNA, 203 bp, synthetic construct
  source 1..203: mol_type = other DNA
ggcgcgccagtcctttgcacgaaggctggccgacagaaaacagagactaagccaggcaaacaataaacgagacaccagcagtgatgctgactatgagaatgatgatgatgctacagcggctgcagggataggaggaatttaacaggatacttggacaatagaagccagatcaaaagtaagaaaaacttcgactcggaccgatg

SEQ ID NO: 6189 - DNA, 203 bp, synthetic construct
  source 1..203: mol_type = other DNA
ggcgcgccagtcctactctcagatgtcatcggactccttgacgtcgtcttatcctacaagcccacagaaattggagaagacagaagctggctccatggtatcatcgacaacccaaaagaaaacaagccatcatgcaaagccgacgataacaacaaagacagagcaatctcaacgtcgacccaagatcacgactcggaccgatg

SEQ ID NO: 6190 - DNA, 203 bp, synthetic construct
  source 1..203: mol_type = other DNA
ggcgcgccagtcctggaaactagcagcacacatagtacaagaataactgatgtcattaccaacccaagtccagagcttgaagatgccgttctacaaaggaacaaaagacggccgacgaccatcaagcgtaaccaaacaagatcagagagaacacagagttcagaactccacaaatcaacaagtgaaaacgactcggaccgatg

SEQ ID NO: 6191 - DNA, 203 bp, synthetic construct
  source 1..203: mol_type = other DNA
ggcgcgccagtcctctgtacgaagaacagttagatctggagaaatgatagtatacatggtagattcgatccatgctcctctactaccatggtccagccgactgagacaagggatgatatataatgccaataaagtagctctagcacctcaatgtctcccagtcgacaaagacatcagattcagggttgcgactcggaccgatg

SEQ ID NO: 6192 - DNA, 203 bp, synthetic construct
  source 1..203: mol_type = other DNA
ggcgcgccagtcctgccaacttgcatggaaaaaagcagtttgctatcctttaatggatgtaaatccacatatgaatctagtcatctgggcagcttcagtagaaatcacaagtgtcgatgctgtgttccaacctgcaattccgaaagaatttcgctattacccaaatgttgttgcaaaaagcatcgggacgactcggaccgatg

SEQ ID NO: 6193 - DNA, 203 bp, synthetic construct
  source 1..203: mol_type = other DNA
ggcgcgccagtcctaaatcaggaggatataagtctacactcctcaataatgacacccattagctctaaatcgtaccattaatcaaatacagatcaattcgatacaatcagttcaaataagaaaaacgtagggacaaagtcctctaccaacatcaaggaagacaagagtctcaaaaagctcagcctaagcgactcggaccgatg

SEQ ID NO: 6194 - DNA, 203 bp, synthetic construct
  source 1..203: mol_type = other DNA
ggcgcgccagtcctcagtctccattagacctgtagacatttctttaaatcttgcatctgccacaaatttcctagaggaatccaagacagagctcatgaaggcaagggcaatcatatcagcagttggaggatggcacaacacagagagtactcagataatcatgataataattgtgtgcatacttataacgactcggaccgatg

SEQ ID NO: 6195 - DNA, 203 bp, synthetic construct
  source 1..203: mol_type = other DNA
ggcgcgccagtcctaaagtgccaaaataatcaaagagacaatcacagaattaatcagacaagaagtaatatcaaggaccataaacatacaaagttcagtacaaagcgggatcccaatattgttaaacaagcaaagcagagatctcacacaattaatagagaagtcatgcaacagacaggaattggctccgactcggaccgatg

SEQ ID NO: 6196 - DNA, 203 bp, synthetic construct
  source 1..203: mol_type = other DNA
ggcgcgccagtcctgactaccttcattatcaattggtgatgcaatatatgcgtattcatcaaacttaatcactcaaggatgtgcagatatagggaagtcatatcaggttttacaattaggttacatatccttaaattcagatatgtatcctgatttaaacccggtaatttctcatacctatgacatcacgactcggaccgatg

SEQ ID NO: 6197 - DNA, 203 bp, synthetic construct
  source 1..203: mol_type = other DNA
ggcgcgccagtcctacgacaacaggaaatcatgttctgtaatagctgcaggaacaaggggttatcagttatgctccttgcccactgtgaatgagactacagactactcgagtgaaggtatagaagatttagtatttgacatattagatctcaagggaaagaccaaatctcatcgatacaaaaatgaagcgactcggaccgatg

SEQ ID NO: 6198 - DNA, 203 bp, synthetic construct
  source 1..203: mol_type = other DNA
ggcgcgccagtcctatataacttttgaccatcctttttctgcaatgtatccgagtgtaggaagtgggataaaaattgaaaatacactcattttcctagggtacggtggcttaacaactccgctccaaggcgacactaagtgtgtgataaacagatgtaccaatgttaatcagagtgtttgcaatgatgcgactcggaccgatg

SEQ ID NO: 6199 - DNA, 203 bp, synthetic construct
  source 1..203: mol_type = other DNA
ggcgcgccagtcctaagaattatgggagcttatcgactctttatttcccaatcttggtgaggatgtatataatattatatcactactagaacctttatcacttgctttaatacagttggatgaccctgtaactaatttaaaaggagctttcatgagacatgttttgactgagctacatacaattttaacgactcggaccgatg

SEQ ID NO: 6200 - DNA, 203 bp, synthetic construct
  source 1..203: mol_type = other DNA
ggcgcgccagtccttattacatgagaaattgatcaaaaatatgaataagtgcaattcaaatgggtattgggatgaaagaaagaaatctaaaaatgaattcaaagctgcagactcatcaaccgaggggtatgagactctgagctgttttttaaccaccgatttgaaaaaatactgtctcaactggagatcgactcggaccgatg

SEQ ID NO: 6201 - DNA, 203 bp, synthetic construct
  source 1..203: mol_type = other DNA
ggcgcgccagtcctctgacaacatcgacttagatacacttagcaatggaagtcctgccatacgtatcccttattttggttctgctactgatgaaagatcagaggctcaactaggttatgttaagaacttaagcaagccggcaaaagcagcaataagaatcgcaatggtttacacttgggcttatggaacgactcggaccgatg

SEQ ID NO: 6202 - DNA, 203 bp, synthetic construct
  source 1..203: mol_type = other DNA
ggcgcgccagtcctaaatgagaaaactttcatttttagctagacatctagcatacttgtgtagtttggcagagatagctaaagagggaccaaaattggaatctatgacatctctcgaacgactcgaatcattgaaagagtatctagaacttacttttttagacgatcctatattaagatatagtcaatcgactcggaccgatg

SEQ ID NO: 6203 - DNA, 203 bp, synthetic construct
  source 1..203: mol_type = other DNA
ggcgcgccagtcctatatagtagacacaaaaaattgtattatcacatttgatagagtattaagagatacaatctttgagtggactcggataaaagacgcagataagaagctaagacttacaggtaaatatgatctatatcctcttagagattcaggtaagttaaaagttatttctagaaggcttgtaacgactcggaccgatg

SEQ ID NO: 6204 - DNA, 203 bp, synthetic construct
  source 1..203: mol_type = other DNA
ggcgcgccagtcctgtccttcactttgaaaagaaagactaagcaaagatcagctggatggaccatgggtgtgattttcatatggatgatgggaaccatattgtcaattgaagttgttaaaaacaacgggggttggctcatgaaaccccgtcttcaagacactggatccacggtgcctgttggaaaaggcgactcggaccgatg

SEQ ID NO: 6205 - DNA, 203 bp, synthetic construct
  source 1..203: mol_type = other DNA
ggcgcgccagtcctttggaagaccgttgtggtgctttgtctggcagctttggcactaccatcatttgcaaccaattgtgtgaccatatcacagagagaaattcttaaaggagtggaaggagtcacatggttcgaggtgcttttggaaaagactagctgcattaccattgcagcacaaaacagaccatccgactcggaccgatg

SEQ ID NO: 6206 - DNA, 203 bp, synthetic construct
  source 1..203: mol_type = other DNA
ggcgcgccagtcctcattgacctctggctagacgatgtgaaacaaagctcggtgatggccagcaaagaattctgcatgaaggtcgaagtgtcagaaactcaaatagctgctaggtgccctactcaaggagatgcaactttgcctatggaagggaaggatgattatgtttgcaagaaaaccttcagtgacgactcggaccgatg

SEQ ID NO: 6207 - DNA, 203 bp, synthetic construct
  source 1..203: mol_type = other DNA
ggcgcgccagtcctcagaggatggggcaatggatgtgctctttttgggaaaggaagtattgtgggctgcgctaaagtagcctgcaatactgctaatgttatgaaaactcatatctatgagcaacaagctgtccagtatgtggttggcatagaggtacatagaggggaagtcatcaaagcaaatgtttccgactcggaccgatg

SEQ ID NO: 6208 - DNA, 203 bp, synthetic construct
  source 1..203: mol_type = other DNA
ggcgcgccagtcctccgtgtgacagttaaaaatgtgaaggaaaattcagatgatcaaggaactctgatcactacaaatccatttgttgaaagcaatggagccactatcttcctggaacttgaaccagtctatggattgtcaacaataaaagttggggacatcacataccaatggaatcagcaagggagcgactcggaccgatg

SEQ ID NO: 6209 - DNA, 203 bp, synthetic construct
  source 1..203: mol_type = other DNA
ggcgcgccagtccttgtcattgggaaggctgtgagaaaaatcaccaacgacatccataaaacaattgtcgttgggagtgctttttggaattcagatcaaagattctcagccattaatttgatggatctaattaggttgccctttgcttttttatttgggggacttggattcatgatgaagatgatcatcgactcggaccgatg

SEQ ID NO: 6210 - DNA, 203 bp, synthetic construct
  source 1..203: mol_type = other DNA
ggcgcgccagtcctgaatgaagttaatgactggtatggggggtacatgtactacccagatgatccagagacattcatcgccagcttggtcaatgataagaaagagcattgtggtacttatccagcaaacgccttggaactagcaatgtggcagaagcttgaatctcagatcaatttgttgttgaaagacgactcggaccgatg

SEQ ID NO: 6211 - DNA, 203 bp, synthetic construct
  source 1..203: mol_type = other DNA
ggcgcgccagtccttgtcattaaggaatggtgttgccgtcactgcaaactgcctccccttaaattcaccatggaggaagagtgctggtacgccatggaaatacgaccaacttccaaagttaatggtttggtgatggcatcagatggtgagaaaccactgtttgaatggtgttcatttgctctcctgaccgactcggaccgatg

SEQ ID NO: 6212 - DNA, 203 bp, synthetic construct
  source 1..203: mol_type = other DNA
ggcgcgccagtcctggcatatatgatggaagtggtgtttgacttgagaccaggcatgctgcttggccttatgttgaacaagacatggaagtttgaaagacttgttgccatgattggttgtctgtcattcttacaacaagccactattgaatggcggacagcctgggttctgctagattgcattgcagtcgactcggaccgatg

SEQ ID NO: 6213 - DNA, 203 bp, synthetic construct
  source 1..203: mol_type = other DNA
ggcgcgccagtccttgagaaagaagaaagtaggatggagactcttattcttggggtgggaatgatagcaacagaattccattgggtgggtttacccctgacagttcttgtccttggcttgaggagatggattgtgaatggaaaagaacaaaggagtctgatagtctatggtggaagatcagagagtgccgactcggaccgatg

SEQ ID NO: 6214 - DNA, 203 bp, synthetic construct
  source 1..203: mol_type = other DNA
ggcgcgccagtcctcaatgatgaaactgagggagaccttcttgagggagtttatagaattacagcagcctccatttttgggagaaagcaagttggaataggtgtcctcaaggaaggagtgttccataccatgtggcacgtcactagaggaagtgctctgcgagtgagagggagagtgctcgccccagacgactcggaccgatg

SEQ ID NO: 6215 - DNA, 203 bp, synthetic construct
  source 1..203: mol_type = other DNA
ggcgcgccagtcctaacagcctggtttgtgccttctttaaacacagccaactcaatggcaaaagtccttagaggtctaggaaagaaagttgtggtgcttacaagcaagaccttccatgataactatccgaagctcaatgatgagaagcctgattttattttgactactgatatctcagaaatgggtgccgactcggaccgatg

SEQ ID NO: 6216 - DNA, 203 bp, synthetic construct
  source 1..203: mol_type = other DNA
ggcgcgccagtccttaacttggatgtggaaagagtcattgaccctagaacaacattgaagcctgttgagaaaggaaatgcagttgaaatcagtggtgaaaggaagataactccagcctctgcagcgcaacgacgcggcagggtcggaaggactaaaggaaagaaggctgattacatttaccaaggtgacgactcggaccgatg

SEQ ID NO: 6217 - DNA, 203 bp, synthetic construct
  source 1..203: mol_type = other DNA
ggcgcgccagtcctcctgcttgctcaatgtgactttacaccatggttggcttggaaagtggcttcagatggcaagagcattgagaaccgagagtggctcaagagtgggccaaaggaacacttggtgacagatgaaaactgtgaagcggttacatacaagactcctggtggaaaggttgaaagactccacgactcggaccgatg

SEQ ID NO: 6218 - DNA, 203 bp, synthetic construct
  source 1..203: mol_type = other DNA
ggcgcgccagtcctcaagggattcaggatggcccaagaatcaatgccaacagcccttcttactgtgatgcaagctctaataataggcactggattgatcatgttcttggggtggatgtgttcgagtaggaaggtggacagaatgatgctgggcactctgttgatagtgggatgtagtgtcacagcatgcgactcggaccgatg

SEQ ID NO: 6219 - DNA, 203 bp, synthetic construct
  source 1..203: mol_type = other DNA
ggcgcgccagtcctaatgttcacccagagaattgttgctggtagtgtcagtggaaaactggacacattgaatggattgagaaatggatttgtgagcacctcgatgtcattgggtgacttgtcgcttttcatctcattctgcagaaacatgagtcctctaactactgtgacagggctggttctagccgccgactcggaccgatg

SEQ ID NO: 6220 - DNA, 203 bp, synthetic construct
  source 1..203: mol_type = other DNA
ggcgcgccagtcctggctatcctcctagctgtcatcaatgtggttgttgtccgtgaaccatgggcaatgcttgaagctggactagtgctcctcgctgcaattaagtttgcggctgatggggctaaagaaactttgataacgcttcctgtcctgagtgggattggtgctttgattagaggggattacttcgactcggaccgatg

SEQ ID NO: 6221 - DNA, 203 bp, synthetic construct
  source 1..203: mol_type = other DNA
ggcgcgccagtcctagctagggaagcactggctaagggaaaaaccaacaccggccatgcggtctccagaggaacagcaaaactagcctggattgatgagaggggtggagtggagttgaaaggaagtgtcgtggacctgggctgtggaagagggggctggagttactatgcggcttcgcaaccaaatgtcgactcggaccgatg

SEQ ID NO: 6222 - DNA, 203 bp, synthetic construct
  source 1..203: mol_type = other DNA
ggcgcgccagtccttgaggtgccagaagaagaagtccagatgagagtagacaaaatcaaggctgagaaatcaggcacctggtgttttgattctaatcacccttatcgcacgtggaactatcatggatcataccgtgtgagggatgtgggaacaagagcttcagcagtcaatcatgttgtgaagttactcgactcggaccgatg

SEQ ID NO: 6223 - DNA, 203 bp, synthetic construct
  source 1..203: mol_type = other DNA
ggcgcgccagtcctaaccaaaggtgggaaagtgagaacatgcacaaaagaagagttcatccaaaaagtaagatctcatgctgctatcggggcctggtcgtcagatatggaagggtggagctcagctgtggaggcagttgacgatcctaggttctggaacatggtgcagaaagaaagagatttacacctcgactcggaccgatg

SEQ ID NO: 6224 - DNA, 203 bp, synthetic construct
  source 1..203: mol_type = other DNA
ggcgcgccagtcctgcagcttatcagaatggcagaagccgaaggagttcttggagcaacttttgaggacttcgggattgacagatggttgcaggaacatggtgaagaccgagttgaaagaatgctggtcagtggtgatgactgtgtagtcaatgctatagatgaaaggtttgggtcaagtctgaattgcgactcggaccgatg

SEQ ID NO: 6225 - DNA, 203 bp, synthetic construct
  source 1..203: mol_type = other DNA
ggcgcgccagtcctgacagtcaaccaggggggatgtgttggagtggaatcaacaggctgtctagccaaggcgtatgcgcaaatgtggcttttgctttatttccacagaagagacctcagaacgctggctctagctgttatgtcagctgtgccaagcaattggattccaacaggacgcaccacttggtccgactcggaccgatg

SEQ ID NO: 6226 - DNA, 203 bp, synthetic construct
  source 1..203: mol_type = other DNA
ggcgcgccagtcctggcaaccagtgggctagccacatgggtatgacgcacccaccctctgcattcttgtaaatactttggccagtcattgtaaataggttagggagccgggcccaacccagctagggatagcctttctggggtaaggactagaggttagtggagacccccggcttttgaagttagggccgactcggaccgatg

SEQ ID NO: 6227 - DNA, 203 bp, synthetic construct
  source 1..203: mol_type = other DNA
ggcgcgccagtcctcctgggaaattagctaaggggataaccactctgatgaacatcctccggactctgctaaacggaatcttgggacgcaaaaaacaaaggagaggaggaactgaaagcctgttccccataatgtttctaactggattgatggctatgcaggtatcccaaaatggtgatggttggctgcgactcggaccgatg

SEQ ID NO: 6228 - DNA, 203 bp, synthetic construct
  source 1..203: mol_type = other DNA
ggcgcgccagtcctaatgtgtgggttaaatatccgctttgtaaacctggaggccacaggctaaaacgatcgctgtcaataactgaacatccatcgtctgtctcactagacaaaccaactttgtggcatcactggaacagtgtcaatgatcgaattggcaagagtgaagagtggatagttaccaatgctcgactcggaccgatg

SEQ ID NO: 6229 - DNA, 203 bp, synthetic construct
  source 1..203: mol_type = other DNA
ggcgcgccagtcctatgcgtgaggaacatctcgacggatatgtctgcaagagaagcttcagtgatagaggctggggaaatggttgtggtttgtttggaaaaggcagcatcgttggatgtgctaaggccacttgtggggcaaatgacatcatcaaaagctactcgtatgattcaccaaaagtcaaatatcgactcggaccgatg

SEQ ID NO: 6230 - DNA, 203 bp, synthetic construct
  source 1..203: mol_type = other DNA
ggcgcgccagtcctgtttttaaatcattggtcaaagctgaagaagtgaccaaaactagtaactcttaccatctcaccggaggacatgttgattgtagagtgagtactctcaatcttcgaatgaagggtttgacgtatcaaatgtgttcttctagctttgtgtggcacaaaagaccagtggccacgcaacgactcggaccgatg

SEQ ID NO: 6231 - DNA, 203 bp, synthetic construct
  source 1..203: mol_type = other DNA
ggcgcgccagtcctattgacttggccatgtggaaagcacttgaggaggagataaactggtttctggaagatcagtcagttgattggaggataatggttggaaatgaagaaaaggttttccacaaaacaaactcaagtggctgggaaagaagagctgggaggaattctctatcatggaagaactgggcgcgactcggaccgatg

SEQ ID NO: 6232 - DNA, 203 bp, synthetic construct
  source 1..203: mol_type = other DNA
ggcgcgccagtcctctagaggattgtgataaaagaggacattctgttagaagtaccacccaaggaggggtaacaatacctgactggtgttgtaaacactgtgttttgccacctttgaaattcaccaatgccgatggatgttggtatgccatggaaatcagaccactgaaaacgacacctggactagttcgactcggaccgatg

SEQ ID NO: 6233 - DNA, 203 bp, synthetic construct
  source 1..203: mol_type = other DNA
ggcgcgccagtccttatgcaggaagtatgacagctttggaagctcagtcatggggagttctctctgtgatgttgctgttttacatgggctttctaccgaagattgcaaaagaaagatggagtgtgccaactgccttcatgtttttcgtctttgccatcacagggttgattgattgcagggattttctccgactcggaccgatg

SEQ ID NO: 6234 - DNA, 203 bp, synthetic construct
  source 1..203: mol_type = other DNA
ggcgcgccagtccttttcaacatgtgactatggagtgggaatcagtttggaaagttttggattccttgggctttgttgtctatgggttcttactttctaagtctggaatgcaaagccacgtgttcatgctgtttgtagtgtcactgacttggatggatagcatagtaatgcaacatgctctagcacttcgactcggaccgatg

SEQ ID NO: 6235 - DNA, 203 bp, synthetic construct
  source 1..203: mol_type = other DNA
ggcgcgccagtcctactgattacacagccatactcggcattgttatggcaataggagcagccatttgcaaaaatggtctggaatcaagtggatggatgatcggaatcatgggaattttcctagtcttttttctcctccaattaagcaaaggagagatgacagctgaatgggctggatactgtgaatggcgactcggaccgatg

SEQ ID NO: 6236 - DNA, 203 bp, synthetic construct
  source 1..203: mol_type = other DNA
ggcgcgccagtcctttccataccatgtggcacgtcacacgtggtgctgtattgaacatctgtgggaggaaaatcgtaccagaatgggccagcatcacagaagatctaatatcatataatggtgggtggagattgttcactagatgggatggaacagaagttcaagttcacgcttacacccctgatggacgactcggaccgatg

SEQ ID NO: 6237 - DNA, 203 bp, synthetic construct
  source 1..203: mol_type = other DNA
ggcgcgccagtcctagttctatagctcaaactgagaagaaggaagaagatgttccacaaccaaagacacttgaaggagatggctggttgtcaaaagggaaaataaccgtaattgatgcccatcctggaagtggtaaaacacatagaatactaccaaatttagttaaaagggctgctgagagaaagatgcgactcggaccgatg

SEQ ID NO: 6238 - DNA, 203 bp, synthetic construct
  source 1..203: mol_type = other DNA
ggcgcgccagtcctaggacacttgttttagctccaacacgggttgtgataaaagagatggaaagtgctctcaaaggaatggatatcagttttcactcatcggccgtgtcaacgaagaccccaggatcacttgttgatgtcatgtgccatgctacttttgtaaataggaaattaattcatactccacagcgactcggaccgatg

SEQ ID NO: 6239 - DNA, 203 bp, synthetic construct
  source 1..203: mol_type = other DNA
ggcgcgccagtcctgatgttgaaaagatgattcctgatgagccatggaaacaaggttatgaatggataacagactttgaaggaagaacagcgtggtttgtgccatcatacaatgcagctcagggaatctcaaaagccttgagagagagaggaaagaaagtcctcattctgacaagcaagacctttcatcgactcggaccgatg

SEQ ID NO: 6240 - DNA, 203 bp, synthetic construct
  source 1..203: mol_type = other DNA
ggcgcgccagtcctgacaactatcctaagatacagtcagaaaaacctgatttcatactcaccactgacatttcggagatgggtgccaatttagatgttgatagggtaattgatccaaggacaactcttaaaccaatggaaaaaggcaatattgtggaggttagcggtgaaatatcaataacgcctgcccgactcggaccgatg

SEQ ID NO: 6241 - DNA, 203 bp, synthetic construct
  source 1..203: mol_type = other DNA
ggcgcgccagtccttatctgattgaaccaaagggaactacattttggacccttccagtggttagtggattaacatcactggtccgaggagatttctttggtttgattcccatttctttcagggtctggctatatgccagaagtgatagacgaggtatagtaaccagtcatcacacattgggtgaaaagcgactcggaccgatg

SEQ ID NO: 6242 - DNA, 203 bp, synthetic construct
  source 1..203: mol_type = other DNA
ggcgcgccagtccttttattcccttgtcaggtcatgtggttgacctgggctgcggccgcggcggctggagctactattgcgcagcacaaacaccagtaaggaaagtcaatgcttataccttaggtactggagctcatgagaaacctcgtctggtcgaaagcttaggttggaacctcatcacctttaagcgactcggaccgatg

SEQ ID NO: 6243 - DNA, 203 bp, synthetic construct
  source 1..203: mol_type = other DNA
ggcgcgccagtcctatgcagggatggagtgatgccaaggaagcagttcatgaccccaggttttggaatatggtggacaaagagaggaaactacacctggaaggaaaatgtgaaatgtgcatctataacatgatgggtaaaagagaaaagaaaccaggtgagtttggatgtgccaagggtagccggacccgactcggaccgatg

SEQ ID NO: 6244 - DNA, 203 bp, synthetic construct
  source 1..203: mol_type = other DNA
ggcgcgccagtcctgaaagattgtctcgtctcttgattagtggtgatgactgcgtggtaaacgcatgtgatgaaaggtttgggagaagcttgacatggttgaacaccatggagaaaatccgcaaggacattgacttgtgggctccatcaaatggatatgagaactttgaaaaagttgagttctgctcacgactcggaccgatg

SEQ ID NO: 6245 - DNA, 203 bp, synthetic construct
  source 1..203: mol_type = other DNA
ggcgcgccagtcctaaccactttcatgagctgatgttgaaagatggacgtcagctggtcgtcccctgcaggagtcaaaatgaattagttggtagagcttctgtaaatcagggtggaagtgcaaccgttgcagggactgcgtgtctagccaaagcctatgcccaaatgtggaatttgttgtattttcaccgactcggaccgatg

SEQ ID NO: 6246 - DNA, 203 bp, synthetic construct
  source 1..203: mol_type = other DNA
ggcgcgccagtcctaagacaaacatcacaacatggaagaatgtggcctacctgcccagaggacaagacatgtgttgtggcagtcttattggcagctcaaaaagagcaacttgggccaaactcattcctggagcagttgaaaaagtgagagggatgattgggaatgaaaattacgtcaactaccttggacgactcggaccgatg

SEQ ID NO: 6247 - DNA, 203 bp, synthetic construct
  source 1..203: mol_type = other DNA
ggcgcgccagtcctcaagacatgtgttgtggcagtcttattggcagctcaaaaagagcaacttgggccaaactcattcctggagcagttgaaaaagtgagagggatgattgggaatgaaaattacgtcaactaccttggagcaatgggacgctatgaatgtgatgatgtctcattccaactgtattaacgactcggaccgatg

SEQ ID NO: 6248 - DNA, 203 bp, synthetic construct
  source 1..203: mol_type = other DNA
ggcgcgccagtccttgcagagatgtcaaaaatgtgatggtgacttatcccacgtgtaagaggaacaccaggaccagacgggatgtcacaatccaagaccatccaccgtctgtcacactcaccaaaccatctcttctcaagcatgtgggaggggctgaggagcatcttcaaaaggttgaaaattggatccgactcggaccgatg

SEQ ID NO: 6249 - DNA, 203 bp, synthetic construct
  source 1..203: mol_type = other DNA
ggcgcgccagtcctttaatgaacagctggaaagttgtattggtgaccgtggccttgctctatggatttgggaacaagctacaaacgtggattctcataattgtgaccttgattgtggctccagcttatgctagcacctgtgttagtgtggccaaaagggatatgatccgtggtgacctcggaacaacccgactcggaccgatg

SEQ ID NO: 6250 - DNA, 203 bp, synthetic construct
  source 1..203: mol_type = other DNA
ggcgcgccagtcctggagaggcgcatctggcagaagaggcaaactctgactacgtgtgtaagcgaggtttcagtgacagaggttggggcaatggatgcggcttatttgggaaagggagcatagtggcatgcatcaagactacatgcaagaatgatgctaacatcataaagagctatgtctatgatgctcgactcggaccgatg

SEQ ID NO: 6251 - DNA, 203 bp, synthetic construct
  source 1..203: mol_type = other DNA
ggcgcgccagtcctaaccaaagaactgctatcttcaaagctttggtgaaagccaatgaaatctccaagtccaacaataagtacattctggatggaggacacttgagttgcaggatcggagtcaatggactgaagatggttggggctacctattctcaatgcacaaaacctttcgaatggatcaagaaacgactcggaccgatg

SEQ ID NO: 6252 - DNA, 203 bp, synthetic construct
  source 1..203: mol_type = other DNA
ggcgcgccagtcctccagtcctaactcaacatggcacagtggtcatggaagtgaagtacacaggtgaaggagccccatgccgtataccattcagagttgaacgagtggacaagcctatggaaaatgttggcaatctggtcacaggaaacccatatgcctcacaaaaggacgctgtggtgttccttgagcgactcggaccgatg

SEQ ID NO: 6253 - DNA, 203 bp, synthetic construct
  source 1..203: mol_type = other DNA
ggcgcgccagtcctgttggagagataggatgtatgattgatgtgggaaggagagagctgacttgtggggatggagttgtggtctggaaccaactggatgattggtgggaaaagtaccaatattatccagatgaacctgctgttttcttgggttccctcatggaagacaaagagaagcattgcggctaccgactcggaccgatg

SEQ ID NO: 6254 - DNA, 203 bp, synthetic construct
  source 1..203: mol_type = other DNA
ggcgcgccagtcctgtgggaggacttgtcatggcttttgatgaagaaccagtgtggaagccatggggtattatgggattgatagtcctgttgtacatgggcttctttccttctctgggcaatggaaaattttcaatgggttttggcatggctgtgttcctgttgtgcgtgactggaatgctctcattacgactcggaccgatg

SEQ ID NO: 6255 - DNA, 203 bp, synthetic construct
  source 1..203: mol_type = other DNA
ggcgcgccagtccttcggtagacccaatagccattgtcgtgacgttgatggctttgggggctgctgtggccaaggatggcactgccgttcagcctctaacactgggactcttttctgcagtcatcttgttcctattgcttcagctgacgggtgggcccctcatagctgaatgggcagggtacgcggatcgactcggaccgatg

SEQ ID NO: 6256 - DNA, 203 bp, synthetic construct
  source 1..203: mol_type = other DNA
ggcgcgccagtccttggaaatccaatgccttgcgctactctggtcatctggacttagaagtcaagaagttgagcgatgggagactggtcaacacagctaaggaaaataccaccaccactgatggactcatactaggggctggaatgctagcttctggctttagctgggtagctgtgcctgtgacttttcgactcggaccgatg

SEQ ID NO: 6257 - DNA, 203 bp, synthetic construct
  source 1..203: mol_type = other DNA
ggcgcgccagtcctacttactgtagctcaatagctcaggccaatgtgccagcagaaaccgaacctgaagtgctgaaaaccaactggacatcaaagggaaaactcaccgtcattgacgctcatccagggagtgggaaaacaaagaaaatattgccacgccttgttgatgaagctgttggaagaaagcttcgactcggaccgatg

SEQ ID NO: 6258 - DNA, 203 bp, synthetic construct
  source 1..203: mol_type = other DNA
ggcgcgccagtcctcgcacactagtccttgctccaacaagggttgttgtgaaggagatggagcaggcactcagaggcaagcctgttagttttcattcttcagcagcgagtaagaaggtgccaggagcactggtggatgttatgtgtcatgcaacttatgtccagcgacggatgatgcctattcctcagcgactcggaccgatg

SEQ ID NO: 6259 - DNA, 203 bp, synthetic construct
  source 1..203: mol_type = other DNA
ggcgcgccagtcctaagaactatgagcttgtcatcatggatgaagcacattggacagacccctctagcattgcggcccgaggattccttgattctcagcggaaggaaaatcacctttcactggtgctcatgactgccacaccacctggaactgatgatccctggcctcaaagcaacgctccaataaaccgactcggaccgatg

SEQ ID NO: 6260 - DNA, 203 bp, synthetic construct
  source 1..203: mol_type = other DNA
ggcgcgccagtccttcagctgctcaaaggagaggaagagtggggcgtgaggagggacgtcaagctgagtacgtctatcagggcgaagttgaccccgatgacggagacttggtgtgctggaaagaggcccagatactcctggataacatggaaggacgattcaaaacggccagtgtcttctatgagcctcgactcggaccgatg

SEQ ID NO: 6261 - DNA, 203 bp, synthetic construct
  source 1..203: mol_type = other DNA
ggcgcgccagtcctcagagcaaagttgacagggtcaccctgggggctctgttgctaactgctggctcagcggttctttggatgggtggagcagccccttgtgtcgtgggtgggagcctgatatgtgggtttgttttactagtagcattgtcaccagaggagggaatgcaacgcactcaagttgactcacgactcggaccgatg

SEQ ID NO: 6262 - DNA, 203 bp, synthetic construct
  source 1..203: mol_type = other DNA
ggcgcgccagtcctactctggctatgtttgtgttgacactctacaccttgatagccgctgttgtcgctaatgaaatggggttcttggaacgaacaaagaaggacttccgagagttttttaggaaagaagtgaacatggacggtgagccaacccagtggagaatttttgacctcgacatctgcccaatgcgactcggaccgatg

SEQ ID NO: 6263 - DNA, 203 bp, synthetic construct
  source 1..203: mol_type = other DNA
ggcgcgccagtcctaatgcccaggcattcttcctctacaagagtagactcgtccacgaaattgacagagccgaagcagtttctaacctcagtaaaggacggaccaacacaggacacgcagtgtcgagggggacaagcaagcttgcttggatgcatgagcgcggttacgttccactcaagggagttgtgcgactcggaccgatg

SEQ ID NO: 6264 - DNA, 203 bp, synthetic construct
  source 1..203: mol_type = other DNA
ggcgcgccagtccttacagcataagggatgttggcacctcagctagtgccccaaatcatgttgtcaagcttctggcatggccttggttgaaaatagagaaagtcgtgttaatggccatgacggatacaactgcctttggacagcagagagtgtttaaagagaaagttgacaccaaagcacccgaacctcgactcggaccgatg

SEQ ID NO: 6265 - DNA, 203 bp, synthetic construct
  source 1..203: mol_type = other DNA
ggcgcgccagtcctagtggagatgactgcgttgtcaacgctttggatgagaggtttggcaaagctctgacatggcttaacaccatggaaaaaacccgtaaagacatagaagcatggaaaccatcacgggcttatagaacctggcaggaagtcgagttttgctcacaccacttccatgagctttttctccgactcggaccgatg

SEQ ID NO: 6266 - DNA, 203 bp, synthetic construct
  source 1..203: mol_type = other DNA
ggcgcgccagtcctcgagacggaaggaagctgatcgtcccgtgccgggaccagcatgaattggttggacggtcaatggtctcgcagggtgggagctctggagtggcagggacagcttgtctggccaaagcatacgcccagatgtggctgatgagctatttccataggagagacctcagaactcttggacgactcggaccgatg

SEQ ID NO: 6267 - DNA, 203 bp, synthetic construct
  source 1..203: mol_type = other DNA
ggcgcgccagtcctcaggatttgtcatgctccagcctgatagacaacccaaccagagcgcagtgggcaaaactactcaaaggggctgtcatgaaagtgagagagatgataggccgagagcattactctgactacttgagcaatatgggtaggtaccaagaagggacggaagagttccacatgtggtaacgactcggaccgatg

SEQ ID NO: 6268 - DNA, 203 bp, synthetic construct
  source 1..203: mol_type = other DNA
ggcgcgccagtcctgtatacgagtttagctcaatcctcgtatacaatattgggcgtcaccaaatatagatttggcataggcaacaccccgatgcgaaggccgaaaagggctaaccatgcccttagtaggactagcaaaaaatcggggactagcccaggtggtgagcttcctggatgaccgaagccctgcgactcggaccgatg

SEQ ID NO: 6269 - DNA, 203 bp, synthetic construct
  source 1..203: mol_type = other DNA
ggcgcgccagtcctagtacagggcagtcgtcaacagttcaacacgcagaataggtttgcgtcttgatatgctgtgtggacgagggcatgcccacggtacatcttaacctatccgggggtcggataggcgaaagtccagtattggactgggagtacagcctgatagggtgttgcagagacccatctgatcgactcggaccgatg

SEQ ID NO: 6270 - DNA, 203 bp, synthetic construct
  source 1..203: mol_type = other DNA
ggcgcgccagtcctccctcaccagcgaggaactagagacatacccactaggcttaaggacttgcccagaaaaggggattgtaggagtggcaacaacaagggcccagtgagtggggtttacataaagccagggccagtttactaccaagattactcaggccccgtctaccatagggccccattggaactcgactcggaccgatg

SEQ ID NO: 6271 - DNA, 203 bp, synthetic construct
  source 1..203: mol_type = other DNA
ggcgcgccagtcctcttcgaggaatccaccatgtgtgaggtgacacgaaggctgggtagaaccactggcagtgatggacttctataccatgtatatgtatgtctagacgggtgtataataatcaagacagccagcagagcgcaacaaaaagtgctcaagtggaccaagaacaccctaaactgtcctttcgactcggaccgatg

SEQ ID NO: 6272 - DNA, 203 bp, synthetic construct
  source 1..203: mol_type = other DNA
ggcgcgccagtcctgtcaggcatacaacacgccatgtatctcagaggggtgaacaggagcttacacggaatatggccagaaaagatatgcactgggatcccgacacacttggcaacagacactgagttaaaaagaatatcaggaatgatggatgcaagtgaggaaaccaattacacttgttgtaggttcgactcggaccgatg

SEQ ID NO: 6273 - DNA, 203 bp, synthetic construct
  source 1..203: mol_type = other DNA
ggcgcgccagtcctgcagagacatgagtggaacaagcacggatggtgtaactggttcaacatagaaccctggatagcattgatgaacagaacccaagccaacttgacggaaggcccccccccgaaggagtgtgccgtcacatgcagatatgacaagaacacggaaactaacatcgtcacacaagctagcgactcggaccgatg

SEQ ID NO: 6274 - DNA, 203 bp, synthetic construct
  source 1..203: mol_type = other DNA
ggcgcgccagtcctggacaggccaacgatgttaactggctgcaaaaaagggaagaacttctccttcgcaggtacggtgataaaggggccctgcaattttgacgtgtccctggaagacatcctgttcaaagatgaagggtgcggtaatatgatgcaggatgcagccatccaagaggtcgacggaatcaccgactcggaccgatg

SEQ ID NO: 6275 - DNA, 203 bp, synthetic construct
  source 1..203: mol_type = other DNA
ggcgcgccagtccttaccgtttttatttttgaagaggtaagtcaggtcgtaaagctggtacttagggcattgagggacttaactaggatctggaatgctgcttcaaccactgcttttttgatatgtttagtcaaagtgttgaggggacaggtaatccagggcatagtgtggctcttactggttacgggcgactcggaccgatg

SEQ ID NO: 6276 - DNA, 203 bp, synthetic construct
  source 1..203: mol_type = other DNA
ggcgcgccagtcctggcacaaggggcaataacttgtgaacccgaataccagtatgcactggcaaggagtaaaaggataggcccactgggagcagaggatctagtgacaacgtggcatgactacaaatttgacctgaaaatacaagaccccttagtaatggtgtattgtaaaaacgaccagttttttgtcgactcggaccgatg

SEQ ID NO: 6277 - DNA, 203 bp, synthetic construct
  source 1..203: mol_type = other DNA
ggcgcgccagtccttggcaagaggtgcaaggcaggagaggccagatacctggccaagatacactggcgggccttgccaacttctgtggtcttcgaaaaggttctggaagaaaacccaccagaggaactaccactagaagataactttgaatttggactttgcccttgtgactctagaccagtcgtgaacgactcggaccgatg

SEQ ID NO: 6278 - DNA, 203 bp, synthetic construct
  source 1..203: mol_type = other DNA
ggcgcgccagtcctgggcaatttcaataccaccttgatcaaccacagtgccttccaactagtctgccccataggatgggtgggaaccattgaatgcacgttggtcaacacggacacactagcaaccacagtagtcaagaggtatacaagaacaacccctttccctatgcgggctgggtgcgtggtgtacgactcggaccgatg

SEQ ID NO: 6279 - DNA, 203 bp, synthetic construct
  source 1..203: mol_type = other DNA
ggcgcgccagtcctggggaaggctggttacaggtttgtgagtgaagaaccatgcaacagggaaggtgttgaaatctccacaaaaggcaagctcaagtgtataatagagaagacacaagtaaaggtatatgctgctgacaacaccttagggcctatgccttgcaaacccatggaaattatatcaagtgacgactcggaccgatg

SEQ ID NO: 6280 - DNA, 203 bp, synthetic construct
  source 1..203: mol_type = other DNA
ggcgcgccagtcctattccttgtagtgagagatgaaccagtaaagaaatgggtaatctgtctataccactgcttaacaatgaagccaataaaaacagcagctgttctagtccttctgatgagtaacgtagtaaatggggaaggcgggagtaaagcaggggcaggaattgacttatacttcctcacaaccgactcggaccgatg

SEQ ID NO: 6281 - DNA, 203 bp, synthetic construct
  source 1..203: mol_type = other DNA
ggcgcgccagtcctactagggatggtagtatttctggtgttggctaggagagaccccatgctcatccctttagtggtggctatagccacattcaagacaactaagtatactgctggcttcagtgtagatgtagctctggccgttctactcatagtgctccttatctgtagttacaccagtgattacttcgactcggaccgatg

SEQ ID NO: 6282 - DNA, 203 bp, synthetic construct
  source 1..203: mol_type = other DNA
ggcgcgccagtccttaagtacagaaaactgctacaatgcctgcttagtataggggcagcagtgttccttataaggagcttgaaatggctaggtggagtcgggctaccatctattgagttgcccactcagaggcccctattctacatactggtgtatctgatcgctacagctttggtaacctcttggaacgactcggaccgatg

SEQ ID NO: 6283 - DNA, 203 bp, synthetic construct
  source 1..203: mol_type = other DNA
ggcgcgccagtcctgtgtggaggaacagggccaccaatcagctgcgggatgaccctagcggactttgaagagagacattacaaaaggatattcataagagaagactcaatgaatacgatgatgtgcaaccgatgccagggaaagcataggaggtttgaaatggaccgggaacctaagagtgccagatacgactcggaccgatg

SEQ ID NO: 6284 - DNA, 203 bp, synthetic construct
  source 1..203: mol_type = other DNA
ggcgcgccagtcctctgtgctgagtgtaataggctgcatcctgctgaggaaggtgacttttgggcagagtcaagcatgttgggcctcaaaatcacctactttgcgctgatggatggaaaggtgtatgatatcacagagtgggctggatgccagcgtgtgggaatctccccagatacccacagagtccccgactcggaccgatg

SEQ ID NO: 6285 - DNA, 203 bp, synthetic construct
  source 1..203: mol_type = other DNA
ggcgcgccagtcctcgagcacctaggctgggtgctacgaggcccggccgtgtgcaagaagatcacaagtcatgaaaaatgccacacgggaattgccgacaagctgactgcattctttggaatcatgccgaggggtactacaccaagagctcccgtgaggttccctaacgcccttctaaagatcagacgcgactcggaccgatg

SEQ ID NO: 6286 - DNA, 203 bp, synthetic construct
  source 1..203: mol_type = other DNA
ggcgcgccagtcctcatatttgaagcctctagtggtagagtagtcggtagggtcaaggtagggaagaatgaaggggccaaaccgactaaactgatgagtgggatacaaacagtgtccaagagcacggctgatatcacagagatggtaaaaaagatagtggcaatgaacaggggtgagttcaaacagatcgactcggaccgatg

SEQ ID NO: 6287 - DNA, 203 bp, synthetic construct
  source 1..203: mol_type = other DNA
ggcgcgccagtcctgatgaaagaaggggacatggctacgggcataacatacgcatcctatggatacttctgccagatgccccaaccaaaactgagggcggccatggtggaatactcatatatcttccttgatgaataccactgtgctacagctgagcagttggcaatcatagggaagatacaccggttcgactcggaccgatg

SEQ ID NO: 6288 - DNA, 203 bp, synthetic construct
  source 1..203: mol_type = other DNA
ggcgcgccagtcctaggcaacatgctagtcttcgtccccactagaaatatggcggtcgagacagcaaagaaattgaaagctaaagggtataattcaggttactactacagtggagaggacccggccaacctaaaagtagttacatcacagtcaccatatgtggtcgtggctacaaatgccatcgaatccgactcggaccgatg

SEQ ID NO: 6289 - DNA, 203 bp, synthetic construct
  source 1..203: mol_type = other DNA
ggcgcgccagtcctatattacagaagccaagagacagccacaggctcaaaggactaccattatgatctgctacaagcccaaaggtatgggattgaagatgggatcaatgtaaccaagtcatttagggagatgaactatgactggagtttgtacgaggaggatagtttactgatcacccaattggaggtcgactcggaccgatg

SEQ ID NO: 6290 - DNA, 203 bp, synthetic construct
  source 1..203: mol_type = other DNA
ggcgcgccagtcctcttcctgaacgctaggaaactaggtgaggatgtgcctgcatacatctatgccacggaagatgaagatttagccgtggacttactaggacttgactggcccgacccgggggtgcaaagtacaactgaaactagcagagctttaaagcaggtcatgggactatccacggctgagaacgactcggaccgatg

SEQ ID NO: 6291 - DNA, 203 bp, synthetic construct
  source 1..203: mol_type = other DNA
ggcgcgccagtccttgctctactggtggccttgttcggatacgtgggctaccaagcactatccaaaagacacatacccattgtcacagacatatatactgtagaagaccacagattagaagacaccacacatctacaatttgcacccaacgcaataagaacagatgggaaggaaacagaattgaaagacgactcggaccgatg

SEQ ID NO: 6292 - DNA, 203 bp, synthetic construct
  source 1..203: mol_type = other DNA
ggcgcgccagtcctcacatggttagcctacgtatttgtcgatgaagacgtgggcactataaaaccgtgtttaggtgagaaggtaatacctgaaaaaacaggtgacgtatctctccagagtgaggtcatcctcgacacaacatcggtcggaatctctgtagtgggaggcagtgacagggcaactactggcgactcggaccgatg

SEQ ID NO: 6293 - DNA, 203 bp, synthetic construct
  source 1..203: mol_type = other DNA
ggcgcgccagtcctagatgtagatgtggttaaaacaaaagcaaaggaactgggggctacggatgacacaaagatagttaaagaggtgggggccaggacatatacaatgaagctgagctcctggtttacccagcagtcaaacaagcatcacagccttctccccctgtttgaggaggttttacttcagtgcgactcggaccgatg

SEQ ID NO: 6294 - DNA, 203 bp, synthetic construct
  source 1..203: mol_type = other DNA
ggcgcgccagtcctcaccatgacgtctatagggatcaaacttgaaaagttgcctgttgtgagggcccaaacagatacaactagtttccatgatgctataagggacaagatcgataagaaagagaacctccagaaccccacactacatactaagctaaaggagatcttcaacaacctcagtagaccagacgactcggaccgatg

SEQ ID NO: 6295 - DNA, 203 bp, synthetic construct
  source 1..203: mol_type = other DNA
ggcgcgccagtcctctatgaagggaagacgcctctcttcttgatatttgacaaagtgaagaaagaatgggatcaattccaggaccctgtcgcggtgagtttcgacaccaaggcatgggatacccaagtgacaagcagggacctggagttgattagagacatccaaaaatactattttaagagaaagtgcgactcggaccgatg

SEQ ID NO: 6296 - DNA, 203 bp, synthetic construct
  source 1..203: mol_type = other DNA
ggcgcgccagtccttaggttcgaggacatagagttttgttcccataccccagtccccgtaagatgggctgaccacaccagcagctacatggcagggaggaacacagccacaatcctgtcaaagatggcaaccagattagattcaagtggagacagaggaacagcggcttacgagaaagctgtagcattcgactcggaccgatg

SEQ ID NO: 6297 - DNA, 203 bp, synthetic construct
  source 1..203: mol_type = other DNA
ggcgcgccagtcctagggagcgggtacgtagtgcaaggcagacattatgaagagctaagtatcactaagagaccagatagacaaacaagtaacggtcttgagagatataacttgggacctatagtgaacttagtcctgaggagattgagggttatgctgatggcttctatcggcagaggcatctgagccgactcggaccgatg

SEQ ID NO: 6298 - DNA, 203 bp, synthetic construct
  source 1..203: mol_type = other DNA
ggcgcgccagtcctagtaagcagctcccaatgtaacataatgtaaataaatgtgactttatgtaaatgcaaggcagtaagcagctcccaatgtaacataatgtaaataaatgtaactttatgtaaatgcaagtagagtagttagagttctaaggacatactacatagagacaacaactacctcattttcgactcggaccgatg

SEQ ID NO: 6299 - DNA, 203 bp, synthetic construct
  source 1..203: mol_type = other DNA
ggcgcgccagtcctaatgtaacataatgtaaataaatgtaactttatgtaaatgcaagtagagtagttagagttctaaggacatactacatagagacaacaactacctcatttttaaaaacagcactttagctggaaggggatattccgacgtccactgttggtctaggaaaaaaccctgaaggcccccgactcggaccgatg

SEQ ID NO: 6300 - DNA, 203 bp, synthetic construct
  source 1..203: mol_type = other DNA
ggcgcgccagtcctggatagtcgtcagtagttcaacgcaggcacggttctgccttgagatgctacgtggacgagggcatgcccaagacttgctttaatctcggcgggggtcgccgaggtgaaaacacctaacggtgttggggttacagcctgatagggtgctgcagaggcccacgaataggctagtatcgactcggaccgatg

SEQ ID NO: 6301 - DNA, 203 bp, synthetic construct
  source 1..203: mol_type = other DNA
ggcgcgccagtcctaccgtagaaaatgctaggcaaggggctgcaaaattgacatcctggctagggaagcaattgggtataatggggaaaaaattagaacacaagagtaaaacgtggttcggagccaatgcacaatcaccttactgtaatgtaacaagaaaaatagggtacgtctggtacacaaacaatcgactcggaccgatg

SEQ ID NO: 6302 - DNA, 203 bp, synthetic construct
  source 1..203: mol_type = other DNA
ggcgcgccagtcctgtattgttgtttgaagaggcaggacaagtagtgaagttggtactaagggccataagggacttgacaagggtctggaacagtgcatcaacaacagcctttcttatatgcctagttaaggtgttaagaggccaggtagtacagggactagtgtggctattactggtaactggtgcacgactcggaccgatg

SEQ ID NO: 6303 - DNA, 203 bp, synthetic construct
  source 1..203: mol_type = other DNA
ggcgcgccagtccttacaaacaagacctgtaccattgccagatgggaggtaactggacgtgcatgagaggtgaagtagtcaaatatgtggggggtccagtaaagaagtgtgagtggtgcggctacgtgtttaagaagagagagggtctcccacactatccaattggtaggtgtatgctaagaaacgagcgactcggaccgatg

SEQ ID NO: 6304 - DNA, 203 bp, synthetic construct
  source 1..203: mol_type = other DNA
ggcgcgccagtcctactggttacagaagcgtggatgacacaccatgcgatagaggtggagtcgtgatcagcaaaaccggtgagctggaatgcttaataggtaagactacagtgaaagtatttagctcggataaaaaattgggacctatgccatgcagaccaaaagaagtcatatccagtgaaggaccgcgactcggaccgatg

SEQ ID NO: 6305 - DNA, 203 bp, synthetic construct
  source 1..203: mol_type = other DNA
ggcgcgccagtcctgtggtagccctgctaggggggaggtatgtcttatggttaatggttgtctacatgatcctggcagatcaaatgacctcagcaataaacctgggccaaggagaggtggttctgataggaaatttaataacacatgaggaccatgaggtggtagtatatttcctcctgttatacttacgactcggaccgatg

SEQ ID NO: 6306 - DNA, 203 bp, synthetic construct
  source 1..203: mol_type = other DNA
ggcgcgccagtcctatagtgaaggatgagccagtaaagaagtggatattgttcctctttcatgctatgaccaacaaccctgtaaagacaatatcagttggactgctaatgttaagtgggctagtgaagggggaaggggcaggaatgacctactgggagggcctcgacctgcagtttaccttgctggtacgactcggaccgatg

SEQ ID NO: 6307 - DNA, 203 bp, synthetic construct
  source 1..203: mol_type = other DNA
ggcgcgccagtcctatgataactgcatcactattagtggcaagaagggacgttaccacataccctttgataataacagtgatagcattaaagaccacctgggtgaatagtggcccggggattgatgcagcaatagcaacaatcacgactgggctattgatgtggacatttataagtgactactacaaacgactcggaccgatg

SEQ ID NO: 6308 - DNA, 203 bp, synthetic construct
  source 1..203: mol_type = other DNA
ggcgcgccagtcctaaaagagtgtcagatgtttatgagatagatgaatcccaggaagccgtatatctgttcccctctaaacagaaggaagggacgatcacagggggtttgctaccactaataaaggccatactgatcagctgcattagtagcaagtggcagtgcttctacctcctatatctggtggtgcgactcggaccgatg

SEQ ID NO: 6309 - DNA, 203 bp, synthetic construct
  source 1..203: mol_type = other DNA
ggcgcgccagtcctaaacataaggtgaggaatgaagtggtagcccactggttcaatgaggaagaggtctatgggatgcccaagctagtgagtgtagtgaaagcagcaacacttaaccggagcaggcattgtatactttgcacagtctgtgaaagcagagactggaaaggagagacctgtccgaagtgtcgactcggaccgatg

SEQ ID NO: 6310 - DNA, 203 bp, synthetic construct
  source 1..203: mol_type = other DNA
ggcgcgccagtccttgccaaagtaataataggatgacagatgagactgaatatggagtgaaaacggactcaggttgcccagagggtgctaggtgctacgtgttcaaccccgaggcagtgaacatatcggggaccaaaggagccatggtacatctacagaaaacaggtggtgaatttacttgcgtgacccgactcggaccgatg

SEQ ID NO: 6311 - DNA, 203 bp, synthetic construct
  source 1..203: mol_type = other DNA
ggcgcgccagtcctgacttaactgacatggtgaaaaagataacaacaatgaatagaggggagtttaagcagatcacactggccacgggtgcaggaaagactacagaattacctagggcggtgatagaagaaataggccggcacaaaagagtgttggtcttgataccactcagggcagcagcagagtcacgactcggaccgatg

SEQ ID NO: 6312 - DNA, 203 bp, synthetic construct
  source 1..203: mol_type = other DNA
ggcgcgccagtcctgatgaataccactgtgcaacgcctgaacaattggccataataggaaaaattcacaggttttcagaacagttgcgagtcgtggcaatgacggcaacgcccgctgggacggtgaccactacagggcagaagcacccgatagaggaatttatagctccagaagtgatgaagggtgaacgactcggaccgatg

SEQ ID NO: 6313 - DNA, 203 bp, synthetic construct
  source 1..203: mol_type = other DNA
ggcgcgccagtcctatgaattatgattggagtctatacgaagaagatagcctgatgatcacgcaactagaaatcctaaataacctattgatatctgaagaactaccagttgctgtgaagaacattatggccagaacagaccaccctgaaccaattcaactggcatacaacagctatgaagtccaagtacgactcggaccgatg

SEQ ID NO: 6314 - DNA, 203 bp, synthetic construct
  source 1..203: mol_type = other DNA
ggcgcgccagtcctccagtgctgttccctaagatcaggaatggagaagtaacagacagctatgacagctattcgttcttgaatgccaggaaactgggcgacgatgtgccagcatacgtctacgccacggaagatgaagacttggcagtggagctacttggtatggactggcccgacccgggaaaccaacgactcggaccgatg

SEQ ID NO: 6315 - DNA, 203 bp, synthetic construct
  source 1..203: mol_type = other DNA
ggcgcgccagtcctcatctgcagtttgcacccaacgcaattagaacggatggtaaagaaactgagctaaaagaactggcacaaggagacatccagaggtgtgcagaggcaatggttgggtacgcacagcaaggggtgcaattcatcaaaacccaagccctgaaggtgcaagagaatcatgtattcaaacgactcggaccgatg

SEQ ID NO: 6316 - DNA, 203 bp, synthetic construct
  source 1..203: mol_type = other DNA
ggcgcgccagtcctgcttttgggggtgagtctataaacgaccacgtgaaacaggctgcaaccgacttagttgtatattacataatcaacagaccccaattcccgggagacactgagacacaacaggagggccggaaattcgtggctagcttactagtctcagccttggctacatacacctacaaaagccgactcggaccgatg

SEQ ID NO: 6317 - DNA, 203 bp, synthetic construct
  source 1..203: mol_type = other DNA
ggcgcgccagtccttggaactatagcaatttatcaaaagtggtagagcctgcacttgcttgtctgccctacgcttcccaggcactcaaattgtttgctccaacgcgcctggagagtgtagtcatcctcagcacagccatttacaagacttacctggcaatcaggcgtggtaggagtgatggtctactgcgactcggaccgatg

SEQ ID NO: 6318 - DNA, 203 bp, synthetic construct
  source 1..203: mol_type = other DNA
ggcgcgccagtcctgcggacaataggatcaggctcccccacgagaactaccttagagtcgtcaccaggtgcagatgtgggtaccggacgaaggcagtaaaaaactgtgcaggtgagttaatactggaggaggaagagggctcattcttctgcagaaacaaatttgggaggggagcacccaactacaaacgactcggaccgatg

SEQ ID NO: 6319 - DNA, 203 bp, synthetic construct
  source 1..203: mol_type = other DNA
ggcgcgccagtcctaaaagatacacaggggctgggtacaaaggtgccttcctaggggatgaacccaaccacaaaagcctgatcgagaggacctgcgcaaccgtgtgcaaggataagatatacttttcaaagatgaagaaaggctgtgccttcacgtatgatctatctctaagcaacttggtaagattgcgactcggaccgatg

SEQ ID NO: 6320 - DNA, 203 bp, synthetic construct
  source 1..203: mol_type = other DNA
ggcgcgccagtcctgtcgacttggttcacaggaacaagcttgaagagaaagatatcccggaacgaactgtaacaacgtggctggcgtatacattcgtcaatgaagacgtgggtaccatcaagccagtcctgggggagaaggtcataccggaagagagtgatgagataaatttgcaaccaacagtaacacgactcggaccgatg

SEQ ID NO: 6321 - DNA, 203 bp, synthetic construct
  source 1..203: mol_type = other DNA
ggcgcgccagtcctgtgaatatgtctaagtgtcaggtaacagtggtaggcgaggccaaaaatatgaccaccggggtggttccactcacagtgaccaaagaggcatgtaatggtcaagaccggtcagttctaaacattggaatggaagaaggggaatacccgggccctgctgtaagcactgtcactgtgcgactcggaccgatg

SEQ ID NO: 6322 - DNA, 203 bp, synthetic construct
  source 1..203: mol_type = other DNA
ggcgcgccagtcctggtgaagctgttcaaagtaaagatgtgcgcccatatgtattggtgataggttccaataaggcaacatcaaacagggcaaagacagctaagaacgttaagttgtataaaggaggagatgctgtcgaagtcagagacctaattaagaaaggggagatgctggtcgtagctttggcccgactcggaccgatg

SEQ ID NO: 6323 - DNA, 203 bp, synthetic construct
  source 1..203: mol_type = other DNA
ggcgcgccagtcctcaagctgaaagaggggatgcaaacctcaaacccttatttgaagaacttctgctacagtgcccacccgggagaacagtcaaaggcggaaccatggtgtcggcataccagcttgcacaggggaactggacgccaactagctgtaaagtatacatggggactataacagcaaaaagacgactcggaccgatg

SEQ ID NO: 6324 - DNA, 203 bp, synthetic construct
  source 1..203: mol_type = other DNA
ggcgcgccagtcctgtaaaaatacacccatatgaagcatatataaaattgaaggagcttatagaagagtacaacatgaaaagggtgactggagatacaggtctaaagagacataatgaatggatcttaaagagaatcaaacaccacgggaacctgaggactaagaaaatactgaacccaggtaaagtacgactcggaccgatg

SEQ ID NO: 6325 - DNA, 203 bp, synthetic construct
  source 1..203: mol_type = other DNA
ggcgcgccagtcctaaaaacaaggtagaggacataattagagatttaaaatctggaagacctatcaagtattacgaaactgcaatcccgaaaaatgagaagagagatgtcaatgatgattgggagagcggcgattttgtagatgaaaagaaaccgagagtgatacagtacccagaggccaaagtcaggcgactcggaccgatg

SEQ ID NO: 6326 - DNA, 203 bp, synthetic construct
  source 1..203: mol_type = other DNA
ggcgcgccagtcctaattggctggtaaacgcagataggccggagagcagaaaaacaggaaaggtctacttgcaaagtggaggccataccgtaagagggaggcattatgaagacctgatattgcctaggatggtgaaaccaacatttcaaggagtagacagatacaaattgggacccatagtcaacgtacgactcggaccgatg

SEQ ID NO: 6327 - DNA, 203 bp, synthetic construct
  source 1..203: mol_type = other DNA
ggcgcgccagtcctaataagtcgcgaccagcaacgagcccaatgccaaagggcttcgtgctgtcgcgcatgctggggattctttggcacgccgtgacaggcacggccagacccccagtgctgaaaatgttctggaaaacggtaccactgcgccaggcggaggctgttctgaagaagataaagagagttcgactcggaccgatg

SEQ ID NO: 6328 - DNA, 203 bp, synthetic construct
  source 1..203: mol_type = other DNA
ggcgcgccagtcctgtcagggtacaaaacggaacgtgcgtcatcctggcaacagacatgggagagtggtgtgaagattcaatcacctactcttgcgtcacgattgaccaggaggaagaacccgttgacgtggactgcttctgccgaggtgttgatagggttaagttagagtatggacgctgtggaaggcgactcggaccgatg

SEQ ID NO: 6329 - DNA, 203 bp, synthetic construct
  source 1..203: mol_type = other DNA
ggcgcgccagtccttggctcatggttgatagttggatggccagagtgactgtcatcctcttggcgttgagtctagggccagtgtacgccacgaggtgcacgcatcttgagaacagagattttgtgacaggaactcaagggaccaccagagtgtccctagttttggaacttggaggctgcgtgaccatccgactcggaccgatg

SEQ ID NO: 6330 - DNA, 203 bp, synthetic construct
  source 1..203: mol_type = other DNA
ggcgcgccagtcctacagctgagggcaagccatccattgatgtatggctcgaagacatttttcaggaaagcccggctgaaaccagagaatactgcctgcacgccaaattgaccaacacaaaagtggaggctcgctgtccaaccactggaccggcgacacttccggaggagcatcaggctaatatggtgcgactcggaccgatg

SEQ ID NO: 6331 - DNA, 203 bp, synthetic construct
  source 1..203: mol_type = other DNA
ggcgcgccagtcctacggtgctggggggagctttcaacaccctttttgggggggttggattcatccctaagatgctgctgggggttgctctggtctggttgggactaaatgccaggaatccaacgatgtccatgacgtttcttgctgtgggggctttgacactgatgatgacaatgggagttggggcacgactcggaccgatg

SEQ ID NO: 6332 - DNA, 203 bp, synthetic construct
  source 1..203: mol_type = other DNA
ggcgcgccagtcctgattatggatgtgccattgacccagaaaggatggaaatccgctgtggagaagggcttgttgtgtggaaagaggtgtcggaatggtatgacggctacgcctatcacccagaatcacctgacacgcttgcacaggctctcagagaggcctttgagagaggcgtttgtggggtcgtgcgactcggaccgatg

SEQ ID NO: 6333 - DNA, 203 bp, synthetic construct
  source 1..203: mol_type = other DNA
ggcgcgccagtcctccccaaaacagacttgaaatggccatgtggagaagcactgctccggaactcaacttggtgctgagtgagggagaagcaaacttgaccatcgtggtagacaaaacagatccggcagactataggggaggcactcccatggttctaaagaagactggaaaagagagcaaggtgtcccgactcggaccgatg

SEQ ID NO: 6334 - DNA, 203 bp, synthetic construct
  source 1..203: mol_type = other DNA
ggcgcgccagtcctgaagcttcaaaagagtgtgacacaggagtgatgggagcagccgtgaagaatggaaaagccatccacacggaccaaagtatgtggatgagctcctttcggaatgacacgggcacgtacatccatgagcttattctcactgatctcaggaactgcacatggccagcaagtcacactcgactcggaccgatg

SEQ ID NO: 6335 - DNA, 203 bp, synthetic construct
  source 1..203: mol_type = other DNA
ggcgcgccagtcctgaggagatcgtgcgctatgtcatagcagttggggtcactttccacttggaattgggaccagagaccatggttcttgtgatgctgcaggcggtcttcaacatgcgcacatgttatctcatggggtttcttgtcaagagggtgatcaccacacgtgaggtggtgactgtttacttccgactcggaccgatg

SEQ ID NO: 6336 - DNA, 203 bp, synthetic construct
  source 1..203: mol_type = other DNA
ggcgcgccagtcctggagtggtggagtggaaccctgagttggtcaatgagggaggtgaggtaagcttgaaggtcagacaggatgccatggggaacttgcacttgacagaggtggaacgggaggagcgtcgtttggccttatggcttgtgttcggcctactggcatcggcttatcattggtccggaatacgactcggaccgatg

SEQ ID NO: 6337 - DNA, 203 bp, synthetic construct
  source 1..203: mol_type = other DNA
ggcgcgccagtcctgtacacgcattccctccggacagtggacacaaaatccatcaatgccagccaggaaagctgaaccttgagggggggagagttctgggggccatcccgatagacctcccacgtggtacttcaggtagcccaatcatcaatgcacagggagatgtgctgggtctgtacggcaatggtcgactcggaccgatg

SEQ ID NO: 6338 - DNA, 203 bp, synthetic construct
  source 1..203: mol_type = other DNA
ggcgcgccagtcctgtcaaccgccggctcttgccacaagggagacagaactgggaggtggccataatggatgaggcacattggaccgacccacacagcatagctgcccgaggccatctttactccttggccaaggagaacagatgtgcactcgtgctgatgactgctaccccacctggcaagagcgagcgactcggaccgatg

SEQ ID NO: 6339 - DNA, 203 bp, synthetic construct
  source 1..203: mol_type = other DNA
ggcgcgccagtcctgcgttccctgaatccaaaggagccatagtgagtgaggaaaaacccattcccgaaggagagtggagagatggctttgattggataacagaatttgagggtcgaacagcctggtttgtgccatcgatagccaagggaggcgccatagcacggacactgagacagaaagggaaaagccgactcggaccgatg

SEQ ID NO: 6340 - DNA, 203 bp, synthetic construct
  source 1..203: mol_type = other DNA
ggcgcgccagtcctttgattggcacgagacgagtgacgacagcatcagctgcgcaacgcagagggcgagttggaaggcatgaaggacgcacggacctctatgtgtattctgggcagtgtgatgatgatgacagctccttagtgcagtggaaagaagcgcagattctgcttgacaacattactacagtgcgactcggaccgatg

SEQ ID NO: 6341 - DNA, 203 bp, synthetic construct
  source 1..203: mol_type = other DNA
ggcgcgccagtcctcggaaatggacctgggaaggtcccgacgagaatgccattgatggtccaggcggcgaactggtcacgttcagaagccccaatggagcggaacggaagctgaagccaatctggaaggacagtagaatgttccgggaggggagagatgtggcagacttcatccagtacgcttccggtcgactcggaccgatg

SEQ ID NO: 6342 - DNA, 203 bp, synthetic construct
  source 1..203: mol_type = other DNA
ggcgcgccagtcctctcacggtactgcaaccagaaccgggaaagcagcgtagtggagaggataaccgactggccttcctgttgattggactggggagcgtggtgggccttgtggcagccaatgagctgggctatctggaacaaacgaaaactgacatttcaggactctttagacgtgaggaccagggacgactcggaccgatg

SEQ ID NO: 6343 - DNA, 203 bp, synthetic construct
  source 1..203: mol_type = other DNA
ggcgcgccagtcctgggatggtttgggacgcatggacgaacatcgacatacagcctgcccgatcctggggaacttatgtgctcattgtctccctctttactccatatatgctccatcagctacaaacaaaaatccagaggctggtgaacagctcagttgcagcgggaacacaggccatgagagaccttcgactcggaccgatg

SEQ ID NO: 6344 - DNA, 203 bp, synthetic construct
  source 1..203: mol_type = other DNA
ggcgcgccagtcctgggggaggcaccccattctttggtgtagctggacatgtcgtggcactcggtgtgacctctttggtaggagcgacgcccacctcccttgcattgggtgttgccttggctgccctccatttggccgtggtcacatctgggctggaggctgaactgacccagagggcgcaccgggcacgactcggaccgatg

SEQ ID NO: 6345 - DNA, 203 bp, synthetic construct
  source 1..203: mol_type = other DNA
ggcgcgccagtccttttttctcagccatggtaaagaatccaatggtggatggagagatcatcaaccccattccggatggagacccaaaaccagctttgtatgagaggaagatgagtttgtttctcgccatcggcctgtgcatagcggccgtagccttgaacaggactgccgcggcgatgacagaagctcgactcggaccgatg

SEQ ID NO: 6346 - DNA, 203 bp, synthetic construct
  source 1..203: mol_type = other DNA
ggcgcgccagtcctgagggaagcacccttggtgacatttggaagcagcggctgaactcatgcaccaaagaagaattttttgcctacaggcgcacaggggtcatggagacaaaccgagaccaagctcgtgaattgcttcgccgaggtgagactaacatggggttggcagtatcgcgaggctgtgccaaacgactcggaccgatg

SEQ ID NO: 6347 - DNA, 203 bp, synthetic construct
  source 1..203: mol_type = other DNA
ggcgcgccagtcctccctcaccccaagggggatgtgtgatggacgtgatcacaaggagagaccagaggggatcaggacaggtcgtcacatacgccctcaacaccatcacaaacatgaaagtccaactcatccgcatgatggaaggagaaggagtcataggaccagctgactcacaggaccctcgtctgcgactcggaccgatg

SEQ ID NO: 6348 - DNA, 203 bp, synthetic construct
  source 1..203: mol_type = other DNA
ggcgcgccagtcctgcgtacgggcagatgtggcttctcaactactttcatcgcagagaccttcgcacccttggtttcgccatatgttctgctgttcccgtgagttgggttcccatgggtcgcaccacttggagcatccacgcgagtggtgaatggatgacaacagaagacatgctgcgcatctggaaccgactcggaccgatg

SEQ ID NO: 6349 - DNA, 203 bp, synthetic construct
  source 1..203: mol_type = other DNA
ggcgcgccagtcctgcctcctggaaggctcaccaggagttaggccgtttaggagcccccgagcataactcgggaggagggaggaagaaaattggcaatcttcctcgggatttttccgcctcctatactaaatttcccccaggaaactgggggggcggttcttgttctccctgagccaccaccatccagcgactcggaccgatg

SEQ ID NO: 6350 - DNA, 203 bp, synthetic construct
  source 1..203: mol_type = other DNA
ggcgcgccagtcctaactcgggaggagggaggaagaaaattggcaatcttcctcgggatttttccgcctcctatactaaatttcccccaggaaactgggggggcggttcttgttctccctgagccaccaccatccaggcacagatagcctgacaaggagatggtgtgtgactcggaaaaacacccgctcgactcggaccgatg

SEQ ID NO: 6351 - DNA, 203 bp, synthetic construct
  source 1..203: mol_type = other DNA
ggcgcgccagtccttcgacgagcgtcgaaagtggccccaaagaagacgcgtcagttgcgggtccaaatgccaaatggacttgtactgatgcgcatgctgggagttctgtggcatgccctgactgggactgcacgaagcccagtactgaaagcgttttggaaagtcgttcctttgaagcaggctactctcgactcggaccgatg

SEQ ID NO: 6352 - DNA, 203 bp, synthetic construct
  source 1..203: mol_type = other DNA
ggcgcgccagtcctggcactgcgtaagatcaagagaacggtgagcaccctcatggtaggcctgcaccgccgaggaagtagaaggacgaccattgactggatgactcccttgttgatcactgtcatgcttggaatgtgcctcacggcaactgtccgtagagagagagatgggtcaatggtgattcgtgccgactcggaccgatg

SEQ ID NO: 6353 - DNA, 203 bp, synthetic construct
  source 1..203: mol_type = other DNA
ggcgcgccagtccttgaagggcgagatgctgcaacccaggttagagtggagaatggcacttgtgtcattcttgctacagacatgggatcatggtgtgatgactcgttggcttacgaatgcgtgaccattgaccagggagaggaacccgttgatgtagactgcttttgcagaggtgttgagaaggtgaccgactcggaccgatg

SEQ ID NO: 6354 - DNA, 203 bp, synthetic construct
  source 1..203: mol_type = other DNA
ggcgcgccagtcctactggagtatggacgttgtggaaggcgtgaaggttcacgttccaggcgctccgtgctgattccgtcacacgcacagcgtgacctgaccgggcggggacaccaatggctcgagggagaggctgtgaaggcacacctgacccgcgttgagggttgggtgtggaagaacaaattgttcgactcggaccgatg

SEQ ID NO: 6355 - DNA, 203 bp, synthetic construct
  source 1..203: mol_type = other DNA
ggcgcgccagtcctgatgcagctccctcctggagataacataatctatgttggtgacctgaaccatcagtggtttcagaaggggagcagcatcggcagggtcctccagaagaccaggaaggggattgagagactcaccgtccttggagaacatgcttgggactttggctcagtgggaggtgtcatgaccgactcggaccgatg

SEQ ID NO: 6356 - DNA, 203 bp, synthetic construct
  source 1..203: mol_type = other DNA
ggcgcgccagtcctcatgactctgggggttggagccgatgtgggctgcgcagtggacacagagcgaatggagctccgatgtggagaaggactggtggtatggagagaggtgtcagaatggtacgacaactacgtgttccacccagagactccggcggttctggcatcggcagttcagagggcctatgacgactcggaccgatg

SEQ ID NO: 6357 - DNA, 203 bp, synthetic construct
  source 1..203: mol_type = other DNA
ggcgcgccagtcctagaggaaatctgtggcattgtccctcaaaatagactggagatggccatgtggagaagctctctagtggagctcaacctggctctagcggagggtgaggcaaacctgactgttgtggtcgacaaggcagaccccagtgactacagggggggcgttcccgggctccttaacaagggcgactcggaccgatg

SEQ ID NO: 6358 - DNA, 203 bp, synthetic construct
  source 1..203: mol_type = other DNA
ggcgcgccagtcctaacccgagtgaccattgacaaggcatgtgacaagagaggggcgtcggtgagaagcactacagagagtgggaaagtcatacccgaatggtgctgtcgcacctgtgagctgcccccggtcacatatcgcactgggactgattgttggtatgccatggagattaggccggtacacaccgactcggaccgatg

SEQ ID NO: 6359 - DNA, 203 bp, synthetic construct
  source 1..203: mol_type = other DNA
ggcgcgccagtcctgacgggactagtctctgtggagagtctgtttcgttaccttgtagcagtcggtctggtgtttcagctggaactgggaccagaggctgtggctatggtgcttctacaggcagtttttgagatgagaacgtgtctactgagtgggtttgtgcttcgtagaagcataaccacgagagacgactcggaccgatg

SEQ ID NO: 6360 - DNA, 203 bp, synthetic construct
  source 1..203: mol_type = other DNA
ggcgcgccagtcctaattgtgacagtgtacttcctcctcctggtgttggagatgggcattccagtgaagggtctggagcatctctggagatggactgatgcgctggcgatgggggccatcatcttcagggcatgcactgcagaggggaagacaggcattggtttgcttttggctgcattcatgacccacgactcggaccgatg

SEQ ID NO: 6361 - DNA, 203 bp, synthetic construct
  source 1..203: mol_type = other DNA
ggcgcgccagtcctctttcactggtcggggatccttatcgtcatgggactgtggaccatttcggagatgcttggctcacccaggagaacggatcttgtgttttcaggatgctccgaagggcgaagtgacagccgtccgctcgatgtaaaaaatggagtgtaccgcatatatactccaggcctgctctgcgactcggaccgatg

SEQ ID NO: 6362 - DNA, 203 bp, synthetic construct
  source 1..203: mol_type = other DNA
ggcgcgccagtcctgggacaaagacagattggagtgggctacggggcaaagggtgtgctacacaccatgtggcatgtcactaggggggctgccctgctggttgatggagttgcagtgggcccctactgggctgatgtgcgggaggatgtggtttgttatggaggcgcctggagtctggaaagcaggtgcgactcggaccgatg

SEQ ID NO: 6363 - DNA, 203 bp, synthetic construct
  source 1..203: mol_type = other DNA
ggcgcgccagtccttggcctgtatggaaacggcctcaagactaatgacacgtatgtcagcagcatagcacagggtgaagtggaaaaaagtagaccaaatctcccacagtcagtagttggcacgggctggacagccaagggacagatcacggtgttggatatgcaccctggctcggggaagacccatcgcgactcggaccgatg

SEQ ID NO: 6364 - DNA, 203 bp, synthetic construct
  source 1..203: mol_type = other DNA
ggcgcgccagtcctgtgccatgctacatatgtcaacagaagactcctcccacaggggagacaaaactgggaggtggctatcatggatgaggctcattggactgacccccacagtatagcggccagaggacacctctactcccttgccaaggaaaacagatgtgctttcgttctcatgacggcaacacccgactcggaccgatg

SEQ ID NO: 6365 - DNA, 203 bp, synthetic construct
  source 1..203: mol_type = other DNA
ggcgcgccagtcctaccggggaagagtgaaccctttcctgagtccaacggagccatagccagtgaggagagacagatccctgatggggagtggcgggacgggtttgactggatcacagagtatgagggtaggacagcctggttcgttccgtcaattgccagaggaggagccatagcaagggctttgagcgactcggaccgatg

SEQ ID NO: 6366 - DNA, 203 bp, synthetic construct
  source 1..203: mol_type = other DNA
ggcgcgccagtcctgcagcgagggaagagtgtcatttgcttaaacagcaagacctttgacaaggagtactcaagagtgaaggatgaaaaacccgactttgtggtgaccacggacatatcagagatgggggcgaatcttgatgtcacccgcgtcattgatggccggacaaacatcaaaccggaggaggtcgactcggaccgatg

SEQ ID NO: 6367 - DNA, 203 bp, synthetic construct
  source 1..203: mol_type = other DNA
ggcgcgccagtcctggacggcaggatcgaactcacagggacgagacgtgtgacaaccgcgtctgctgcacagcgcaggggaagagtgggcaggcaggggggtcgcacagatgaatacatatactcaggccagtgtgatgatgatgacagtggtcttgtgcagtggaaagaggcccagatactcttggacgactcggaccgatg

SEQ ID NO: 6368 - DNA, 203 bp, synthetic construct
  source 1..203: mol_type = other DNA
ggcgcgccagtcctcctgacggcagtggagatgcttgtcctggggcttgcaaccctgggagttgtctggtgttttgttgtgcgcacctcggtcagtaggatggtgttggggaccctagttctcgccacctcactgatcttcctgtgggccggaggtgttggctacgggaacatggctggggtggcactcgactcggaccgatg

SEQ ID NO: 6369 - DNA, 203 bp, synthetic construct
  source 1..203: mol_type = other DNA
ggcgcgccagtccttagagaccaaggggagactgtgcgatggggggagtggaccaatttggacatccagccggcaagatcatggggcacatatgttctggtggtatctttgttcaccccctatatgctgcaccaattgcagacaagaatccagcagttggtgaacagtgcagtggcttcaggagcccacgactcggaccgatg

SEQ ID NO: 6370 - DNA, 203 bp, synthetic construct
  source 1..203: mol_type = other DNA
ggcgcgccagtcctggcagttactgaggcaggagccgtgggagtggctgcagcaatgcagttgctgagacctgagatggacgttttgtggactatgcctgtggcctgtggcatgagtggagtggtcaggggaagcctgtggggccttctgccactcggccacagactgtggctccggaccactgggaccgactcggaccgatg

SEQ ID NO: 6371 - DNA, 203 bp, synthetic construct
  source 1..203: mol_type = other DNA
ggcgcgccagtcctcatggtaaccagcctcgggtggaacctgataaaattcagagcaggcatggatgtgttctcaatggagcctcatcgagcagatgcaatcctatgtgacataggggaaagcaatccagacgcagtggtggaaggagagagatcacggcgtgtgattcttcttatggagcaatggaacgactcggaccgatg

SEQ ID NO: 6372 - DNA, 203 bp, synthetic construct
  source 1..203: mol_type = other DNA
ggcgcgccagtcctaaatcgcaatccaacagcgacatgtgtgttcaaggtcttggctccttatcgtcccgaggtaatagaggcactgcacaggttccaacttcaatggggagggggtcttgtgaggacacctttttcccgaaattccacccatgaaatgtacttctcaactgccatcacggggaacatcgactcggaccgatg

SEQ ID NO: 6373 - DNA, 203 bp, synthetic construct
  source 1..203: mol_type = other DNA
ggcgcgccagtcctggcctgtctatcgaaggcttacggacaaatgtggctgttgagctacttccacaggagggacttgaggactctggggttcgccatatgttcggcagtgcccgtggactgggtcccaacaggaagaacaacctggagcatacatgcaagtggtgcctggatgacaaccgaagacatcgactcggaccgatg

SEQ ID NO: 6374 - DNA, 203 bp, synthetic construct
  source 1..203: mol_type = other DNA
ggcgcgccagtcctgcaagtcaacaggagatgataactcgtacgagctgatctccaacacacaagaaaaatggtgggatgcggcaacgcacgaggctcgtgacggggaaatgatcgctcccgacgcacccctccattggagacaacttcgtgagatcccccaggtgtttaggggcacacgcctgaggtcgactcggaccgatg

SEQ ID NO: 6375 - DNA, 203 bp, synthetic construct
  source 1..203: mol_type = other DNA
ggcgcgccagtcctgcaaaatgggtacgtagttaaccactgcgtatcaggattgcaggccacgaagggtatttgcatatctttctatgcggtattacggcttaaaacccgttgtatcttgtagtttgactgcctgtatcactagtggccattttatttaggttagagacccctgatagtaggagagttcgactcggaccgatg

SEQ ID NO: 6376 - DNA, 203 bp, synthetic construct
  source 1..203: mol_type = other DNA
ggcgcgccagtcctacaaactctttaaaaattgttgaccccggaaaagatggtgacccctgtaagtagttgatctagaagatctatgcgctggcatagtaatccagtgtttcctgttttaggatgacctctgaaagtagatgaccgtggaaagtcacgtagtgccccaataagcacgtttgggcagcgcgactcggaccgatg

SEQ ID NO: 6377 - DNA, 203 bp, synthetic construct
  source 1..203: mol_type = other DNA
ggcgcgccagtcctgttatggcaactgtatcagaacaatggagtcaggttaaaggaaaagttttgaaacttttcttaattttagtcaaatttttaactggtttattactcgtttctctaggtcttaaaattttaaaggatttatccgcattaagtgtaattaaaacatttttatttttactctttggtcgactcggaccgatg

SEQ ID NO: 6378 - DNA, 203 bp, synthetic construct
  source 1..203: mol_type = other DNA
ggcgcgccagtccttggttccgtagttctgttattttagcgtcttccaatcttaccgcagagaacttgcaatcgaaagttcattcgttaaactaccctgtagctttacttaggagatttgatttagttgtagaagtagaaatagcccctggttgtactaagcctcgtgctggacaacctttttccaaacgactcggaccgatg

SEQ ID NO: 6379 - DNA, 203 bp, synthetic construct
  source 1..203: mol_type = other DNA
ggcgcgccagtcctgtgcgaaaacaagtaatgaaggcaaaggaggaatctcatttaacaatagaaccatcggaaaataatcttttggctacacaaggttggttaagttggtttgtagatagctatgaggaagaaaatgatcttgggtatgataacttcttcgatgaagttgttacacccgaccaatatcgactcggaccgatg

SEQ ID NO: 6380 - DNA, 203 bp, synthetic construct
  source 1..203: mol_type = other DNA
ggcgcgccagtccttctcaagaaaaacttggcgctattccacacgtgaaaattgagcaaagtgtttttaacgccacagaggacagtgtgaatatgcagtgtaatggtaatgtagagaacttagcgctacagaattattattccaaagttaatgaaatgttgactgtggaaggatgttcagatcagaatcgactcggaccgatg

SEQ ID NO: 6381 - DNA, 203 bp, synthetic construct
  source 1..203: mol_type = other DNA
ggcgcgccagtcctgaatatggatctaattataaatatgaatctcgatatccttttgaaacagcgtgtgaaggaattgacagtgaccctactttcaattcaataaaaaggaaaacttcagctggatatccattgtgttctaaagttaagaatggcaaacaagaaatatttgggagtgatggtcccttccgactcggaccgatg

SEQ ID NO: 6382 - DNA, 203 bp, synthetic construct
  source 1..203: mol_type = other DNA
ggcgcgccagtccttctctcccctcaggacacttcctaacttccattattaatagtatttttgtaaatatagctatgtgttatgcgtttgtagaatctcaagaaaagggaaatagatctgaggagaacatacgtgttttcttcaacgatttctctatagtaacttatggggatgaccacgtaattggtcgactcggaccgatg

SEQ ID NO: 6383 - DNA, 203 bp, synthetic construct
  source 1..203: mol_type = other DNA
ggcgcgccagtcctttagaacccataaattggtctaatttctttattaaagtgtatagtccattagtaagtaagcagacagaccagctagatctcgtattatgggctagatttaaggatataaaattaggttacccaactgtattacctgttaagacccctactacagatttaattttgcagtcaggacgactcggaccgatg

SEQ ID NO: 6384 - DNA, 203 bp, synthetic construct
  source 1..203: mol_type = other DNA
ggcgcgccagtcctcctaattatatagatagtttttcatatagtagtacaataacctccccaactaccatttggtcgactcatttgtgtcctttcttcctttcgaagacggacatacaaggccaccctcaacccacgcttttgtattatttgtccaacttcttcttatactggagaggttctttaaaacgactcggaccgatg

SEQ ID NO: 6385 - DNA, 203 bp, synthetic construct
  source 1..203: mol_type = other DNA
ggcgcgccagtcctgaggttagcggaggtgatgactttgaattacaagctcccatcaatgaagggtgggtaggctttgattcggcgtcatcttctcaactaaccttacaatccggagatacttttggttcaacgggcattagagacagtagagtcaatactgtggacaataaagtagattttcaaagtcgactcggaccgatg

SEQ ID NO: 6386 - DNA, 203 bp, synthetic construct
  source 1..203: mol_type = other DNA
ggcgcgccagtcctcatctagaatgaacacagaatttctccggacaatgacatccaaccctaagtgtaatagcgaagtgattcaatactatacgacaagaactgatactcaaaaatcagacgtaagtttagccttcatgaacttgaagcctttatttacagcttagtacctgccgcgtccgtgtgggacgactcggaccgatg

SEQ ID NO: 6387 - DNA, 203 bp, synthetic construct
  source 1..203: mol_type = other DNA
ggcgcgccagtcctttttcttagggcctttttcacctgggtaaagtgtagttattgcgtataactctggtatcaataccacccggaagaaattatttatctgccatcatgtctcaattaatccaaaccaaaatctctagttataagaattatgttaaccagaaaattaaggaaggaaggtccaacatccgactcggaccgatg

SEQ ID NO: 6388 - DNA, 203 bp, synthetic construct
  source 1..203: mol_type = other DNA
ggcgcgccagtcctcaccccttgcttcgggcaactccgaattttgtggaagatgttgaatcggatttgaaaaatttgaatgaagcaatccggactacagatgtttttaaaaattatgttgttgagttgacactaggtcatcaagatctcgattttggctattttaagctatacaatcgtgatcttgagcgactcggaccgatg

SEQ ID NO: 6389 - DNA, 203 bp, synthetic construct
  source 1..203: mol_type = other DNA
ggcgcgccagtccttatgaatctccaaatgtaaaacctgtaagagttgaaatgagcttcccaagtggaagagtttctggttccgagatgaatcttgcttctttacaacttgataattatatcaaggaagtgaaggagcagggtgtctccgaccagaatgctgccgaaatttgttcgaagctcgtaacacgactcggaccgatg

SEQ ID NO: 6390 - DNA, 203 bp, synthetic construct
  source 1..203: mol_type = other DNA
ggcgcgccagtcctgcggcgagtcaagtgctcctcaacgtctccagagatatgctcggatcgactgaagaagatctgcttgttatgcaagtacttctggaatccctcctctcaagtgttcatctcaataataattatgtatatatgtggttgaaaggtctcccttcaggacactttttgacagctattcgactcggaccgatg

SEQ ID NO: 6391 - DNA, 203 bp, synthetic construct
  source 1..203: mol_type = other DNA
ggcgcgccagtcctgccagtttgtttaagcaaattggattgtcatatactttggaggataaagatgcgactgtgaatgctccgtatcggagtttgaatgaagtgtcttatctcaagagaaaatttctctgggatgaagacaagcgtcaatacttggcccctttgagtttagagactattctcgaaactcgactcggaccgatg

SEQ ID NO: 6392 - DNA, 203 bp, synthetic construct
  source 1..203: mol_type = other DNA
ggcgcgccagtcctgccagaagctttgtgctcaacgaaaatgtgtgatctgattagaagtaagaaaattcctagttataatatttttaatactgctacatttttaagacccttagttatttagctttaccgcccaggatggggtgcagcgttcctgcaatatccagggcacctaggtgcagccttgtacgactcggaccgatg

SEQ ID NO: 6393 - DNA, 203 bp, synthetic construct
  source 1..203: mol_type = other DNA
ggcgcgccagtcctcgataatgctcctgtaattgattcttcaatcgcaggggaaacgaatctcaaacctagtttagtaacggatttccatgataatagacaacatagtgttatttcctttcttcaacgtcctcagttgatcaaaactgttgaatgggctcctggaactgctcagggatccttgttgaccgactcggaccgatg

SEQ ID NO: 6394 - DNA, 203 bp, synthetic construct
  source 1..203: mol_type = other DNA
ggcgcgccagtcctaaccattgacatacctgatgatcttatgacatctatggtatatgacaagttagatggtttcgccactttcaaggcggatactatcttccgtgttcaagtcaatgctcagccatttcaatgtggccgtcttgtgatggcttacattccaatgcctgattcgttgtcgaccaggaccgactcggaccgatg

SEQ ID NO: 6395 - DNA, 203 bp, synthetic construct
  source 1..203: mol_type = other DNA
ggcgcgccagtcctcgctgagttgaccagggcgatagatcgcattattgcactaccgcatgttcaactcgacattagtgaacaatctgaggttacactgcgagtaccatatatctccccctactctgcctacaatttaattgaaggaagatataggtggggacgtgtggttgttgccgtgtattcccccgactcggaccgatg

SEQ ID NO: 6396 - DNA, 203 bp, synthetic construct
  source 1..203: mol_type = other DNA
ggcgcgccagtccttttcccaactaaaatagctgctagcatcaacggtgtaattcagaaaggttctgatatcttgggtaatgttttaccgcagactaagagttttaccaacccagttgctaaaatttcagatgctgcgtttgacattatttccatgataccaggatttaagaaacctgataaaactaacgactcggaccgatg

SEQ ID NO: 6397 - DNA, 203 bp, synthetic construct
  source 1..203: mol_type = other DNA
ggcgcgccagtccttcacggtgaaactgtacttttccgaccaacacagtactttggtaatgttgatggtgtagagcattctcataaacttggatatcatgcgatgaatcgcattgatttccaacctgatttcgctggtagtaagatggatgaaatgtcatttgattatgttaaacgcataccaaattacgactcggaccgatg

SEQ ID NO: 6398 - DNA, 203 bp, synthetic construct
  source 1..203: mol_type = other DNA
ggcgcgccagtcctcattgattcattttcctattcgaattcaaatgtttatggtgatactctgtggtcaactgcagtttcgccttgttatagatctgccgattatacaacaacaaatggtgctagaaatttttcatttcctacccctacttctcttacttatgcaataggacctttctctttgtggagcgactcggaccgatg

SEQ ID NO: 6399 - DNA, 203 bp, synthetic construct
  source 1..203: mol_type = other DNA
ggcgcgccagtcctcaccgtgccttatgctgggactacccctttcaaacgcattagacctgaaatcaaccctctttcctcttctggaattagtgttgatgatttcaatgtgtttgcaacgggtgttcttggtgtaagagcccttactcccttagttttaggatcaactgttgtaccatccacaattcacgactcggaccgatg

SEQ ID NO: 6400 - DNA, 203 bp, synthetic construct
  source 1..203: mol_type = other DNA
ggcgcgccagtcctaatattagtggaaatgaaaggtggacctgattttgaggttgagtgccctaacagcaccggctggatgccaatacatagtattactccagccgctactggtagggacactgtagactctgagttggtttcgactgcgcaagaacaagctaactttgcgtctactggacaacatgacgactcggaccgatg

SEQ ID NO: 6401 - DNA, 203 bp, synthetic construct
  source 1..203: mol_type = other DNA
ggcgcgccagtcctagggaattgattgtataggcgagttgattagcaaagcttttgagttcgcaagaatctctttttataaatatgttttaaaatctgatgtacctataactcaagaatctccagtaactaagtggtctggtgaagtacaaaaatattacatgaaatatttggaatctcaacttgtatcgactcggaccgatg

SEQ ID NO: 6402 - DNA, 203 bp, synthetic construct
  source 1..203: mol_type = other DNA
ggcgcgccagtcctctccagttactatttatatttctggagatacgggtgtgggcaaaagtacactatcttatcctttatctgccgatattataaagaaaatagcaggtgatacaactcatgatctgaaaaataattggaagaaattgatctatacccgaaattctgagcaagaattttgggatggttcgactcggaccgatg

SEQ ID NO: 6403 - DNA, 203 bp, synthetic construct
  source 1..203: mol_type = other DNA
ggcgcgccagtccttaatttataagggacctgattctcaaaatatatacttaagatctgcatgggagtattcacttgatactcaatctggtgattgtggtgctcctttaattttaagaaaccctatgtgtagaggaaagatctgtggaatacatgtagctggtctaccaactggtggactcggctatgcgactcggaccgatg

SEQ ID NO: 6404 - DNA, 203 bp, synthetic construct
  source 1..203: mol_type = other DNA
ggcgcgccagtcctttgttgatgcattaaaagatgaaaggaaaccgagagagaaagctcataaaacaagagctttttcaggatgtcctttggagtaccttgcggtatgtaagatgtattttcagggtatcgtctcggtattgaccaaatgcaaaaacgaaacgcatattagtgtaggaactaatgtgtcgactcggaccgatg

SEQ ID NO: 6405 - DNA, 203 bp, synthetic construct
  source 1..203: mol_type = other DNA
ggcgcgccagtcctagcgtgagattgatgtcccaattcgttctttagatgaaattgcttatttaaaaagaagtttcgttttagacgaagaaagacaacaatggatcgctcctctgaccctggatactgtattggaaacgccaagttggattcatcgttgtgatgatccgatagaagcaactgtttctacgactcggaccgatg

SEQ ID NO: 6406 - DNA, 203 bp, synthetic construct
  source 1..203: mol_type = other DNA
ggcgcgccagtcctcctgatgcacttatgtcacctatgattagagaaaaattatctggttttacatcttttagtgctagtaccgtctttcatatacaagtaaatgctcatccatttcaatgtggaagattggttttagctgctgtacctgttccagatattttacctctacataggttgaacatgttacgactcggaccgatg

SEQ ID NO: 6407 - DNA, 203 bp, synthetic construct
  source 1..203: mol_type = other DNA
ggcgcgccagtccttatgatgatgttatggattcggatggtaagatagttagagatgaatacgtctatcgtgtagtcgtagaccttcgtgaccagactgaggctactttagtagtcccttttacctcccttactccttataaagtgtgtgcggatgtgtttaattcagcaaatcgtcctaaatacaaccgactcggaccgatg

SEQ ID NO: 6408 - DNA, 203 bp, synthetic construct
  source 1..203: mol_type = other DNA
ggcgcgccagtcctatgtgcttttatatgtttgtgtctgtgtctttcaggtttcttcttgattcttcctgagggtactaatcgaatcatgtattttgttttattattatatacgtttttgttcgctttgtccgttcagtggaccaagttttggcaatagctgacacttgtttcacagcttctttctgccgactcggaccgatg

SEQ ID NO: 6409 - DNA, 203 bp, synthetic construct
  source 1..203: mol_type = other DNA
ggcgcgccagtcctgaaccaatactttactacccattccgttacaactggaatattaagattcttgacctcacagataaggagggtcaagagagtgtcaataagaagtttttaaggaagtttactaaacttaggaagctttgtttgagacttcaaaaggacactgccttctggaaaaatactagaagtcgactcggaccgatg

SEQ ID NO: 6410 - DNA, 203 bp, synthetic construct
  source 1..203: mol_type = other DNA
ggcgcgccagtcctaggttagatatgattcaggatgacatagacaaaatggtcgcacaaagtggccctgttatgagtcagagcttaagtgacagggttgaccgcatgtaccatgagttaatacatacgaatgtcgctcaaatgaatttctctataccgttttcacataatttgtccaaggattcaaagcgactcggaccgatg

SEQ ID NO: 6411 - DNA, 203 bp, synthetic construct
  source 1..203: mol_type = other DNA
ggcgcgccagtccttgtagtcgtcattttaacaatgtgcaggaagcttttaattttacaatgagctttatgagatttttagctttggcttatgccatctttttcctcatttcacgagcaactaagttctttggagcgtcattttctacgatatctactgttctgataactcttattactatgacagtacgactcggaccgatg

SEQ ID NO: 6412 - DNA, 203 bp, synthetic construct
  source 1..203: mol_type = other DNA
ggcgcgccagtcctactgacaagttagttaagaaatttttggtcgattactactcaaaacacatggaaaatgctaaaatgttagcccaagcaggagaggaagactcgtcttttctatcctacgtcattcccccattgtttttagaatcagttgtagatacaaaatctaacttgtttaagaggatttggcgactcggaccgatg

SEQ ID NO: 6413 - DNA, 203 bp, synthetic construct
  source 1..203: mol_type = other DNA
ggcgcgccagtcctaagagtaaagacctggaccttgttgttaagaggttgtcgtattttggtgatgctaaaatatacaatgcctttgacaatataggcacgtggttgactacgatgatcaacaagacagtaaattatgtaaaggttacactcttgggccatgatcctgaagaatttttggagaatcagcgactcggaccgatg

SEQ ID NO: 6414 - DNA, 203 bp, synthetic construct
  source 1..203: mol_type = other DNA
ggcgcgccagtcctgttaagagggctccttctgaaagtggtacattctctactgattgttatactttcgtggaatatgatccatttgaccactgcaacatcgttaaatcaatgtctttcaatgaattgatagatgaggtggttgccatgtatttccacgaaggagagtttgtatcttccgtagataaacgactcggaccgatg

SEQ ID NO: 6415 - DNA, 203 bp, synthetic construct
  source 1..203: mol_type = other DNA
ggcgcgccagtcctcgatttccatcatcgttgacctttgatcaagcagtgttggggatacctggagaagactatgtcaattcaataaaacgtgatacctcttgcggttatcctttcgttaaggaaggatggacacgagctaaaatcttcggtaacggtgatgaatatgacatgtctacctcgggtgttcgactcggaccgatg

SEQ ID NO: 6416 - DNA, 203 bp, synthetic construct
  source 1..203: mol_type = other DNA
ggcgcgccagtcctcaaatgttacgagagaaagtacaggaatgcatagaggcggcgagacaagggaagatattggaccattattttatagatacattaaaggacgaaaggaagcctaaacataaggctcataagtctcgaatgttttctaatggaccaatagattatcttgtttggagtaagatgtatcgactcggaccgatg

SEQ ID NO: 6417 - DNA, 203 bp, synthetic construct
  source 1..203: mol_type = other DNA
ggcgcgccagtccttttaatccgatagtagcggtgttgtctgagcttaaaaatgtagaccatatttccgtggggtccaatgtgtattctacggactgggacgttattgcaaggtacttgaagtcgaaatctcaccatatggtggctggagacttcgagggctttgatgcttcggaacagtccgacatacgactcggaccgatg

SEQ ID NO: 6418 - DNA, 203 bp, synthetic construct
  source 1..203: mol_type = other DNA
ggcgcgccagtcctgttgtattggaaatgcctatgtggaccaaatccagcaaggacattgtaactaatgtattctgtaatttggaacacgccctcaaggagttatcattgcatgataaagaattgtgggaaaaatggagtcctgtattgcattcaaagagtgaggaagtcctgaaaatggtttcttctcgactcggaccgatg

SEQ ID NO: 6419 - DNA, 203 bp, synthetic construct
  source 1..203: mol_type = other DNA
ggcgcgccagtcctctgaaatttcaagatgaggtcagggagattgctcttggcctttcaggttatgagtagttttcttgacttctcttaaaaccaacaatgtgatcttgcttgcggaggcaaaatttgcacagtataaaatctgcaagtagtgctattgttggaatcaccgtacctatttaggtttaccgactcggaccgatg

SEQ ID NO: 6420 - DNA, 203 bp, synthetic construct
  source 1..203: mol_type = other DNA
ggcgcgccagtcctgatagtgcttgaagatggaccgcagatggaagaacctcttccttatgcattccatggacagcatactgataatcgtcaacatacggtggttaatttcttgcaacgtccccaggttattttcgattcgtcttgggcgtctgatctccctcgaaacaaacaatttatggattcgatcgactcggaccgatg

SEQ ID NO: 6421 - DNA, 203 bp, synthetic construct
  source 1..203: mol_type = other DNA
ggcgcgccagtcctaggcgcagcttttaaacaatctgtttcaaagctgggcgaacatttacctttcctcaaatctggagcgaactgggtcagtgagaacattctacaacctgcagatgaaatcataggacctattttatctctttttgggttctcgaagccccttttgcccattaccaatcccaccgtcgactcggaccgatg

SEQ ID NO: 6422 - DNA, 203 bp, synthetic construct
  source 1..203: mol_type = other DNA
ggcgcgccagtccttcacatcagtactcctttggcaatagaacaaatacctataaagggagtcgcagagttccaaataccgtactatgctccatgtttgtcatcttcgtttagagcgaattcggaaacattttactatagttcaggtcggaataatctcgatatagccacttcacctcccaccgtcaacgactcggaccgatg

SEQ ID NO: 6423 - DNA, 203 bp, synthetic construct
  source 1..203: mol_type = other DNA
ggcgcgccagtccttcgctattatgcggttggtgcgggagatgatatggacttttccatctttatcggtacgccgccctgtattcatgcatctcagacggcccagtttaccaagataaaacaaggtaaagtgtatgatttgaggtatgatcagtacgacccttttagggaagtccaggacggtacggccgactcggaccgatg

SEQ ID NO: 6424 - DNA, 203 bp, synthetic construct
  source 1..203: mol_type = other DNA
ggcgcgccagtcctgttcctcaatgctcgtagtattgaggatagcgatttgttgtgagctcctttagagggagggctcactttatctattgcttaattcggtaagccacaaatttttctaagtgtcatgagtttcttctcggttcttctcatgattactaatcgaaccgtgtgtagagtcagaatgttcgactcggaccgatg

SEQ ID NO: 6425 - DNA, 203 bp, synthetic construct
  source 1..203: mol_type = other DNA
ggcgcgccagtccttacaatgtgatcatgtcttttcaacaaacaaacaacaacgcaaccaacaacatcaactcccttgaggagcttgctgctcaagaactaatagcagcacaatttgaaggaaatcttgatggtttcttttgcactttttatgtgcagtccaaaccacaactattggacttagagagtcgactcggaccgatg

SEQ ID NO: 6426 - DNA, 203 bp, synthetic construct
  source 1..203: mol_type = other DNA
ggcgcgccagtcctggacaattgaacggaaatttaacaagaatttgtgattttttggaaaactctctaccgacactaacagcccaaattcaaacaacagttttgacaacaacagacaaatatgtgaatttgaaagaagacttgctaaaggttgccattctacttgtcctagtccgtcttttgatggtccgactcggaccgatg

SEQ ID NO: 6427 - DNA, 203 bp, synthetic construct
  source 1..203: mol_type = other DNA
ggcgcgccagtccttgggatgaaacatacttttcaaacttactttcacaaggctttatggcaggaaaatctctgatagaaatggaagctgaatttgctagtgatgctgaaacgttcaacgcatatattgagtacaaaaagaatattcccaaagaaaccaaatggagcaagtggatgaccattttggaccgactcggaccgatg

SEQ ID NO: 6428 - DNA, 203 bp, synthetic construct
  source 1..203: mol_type = other DNA
ggcgcgccagtcctggagacagtaaaacgcaaaaacagcgaaacacaaaagtagaagttggcaaagaacttgaaaaagaagctgaaactcaaggttgcagcgacccagcagctcatgctttggtgcttgatgtgttgcagaagaatacgtactgtttatattatgagcgaatggtgaaaggagaaatgcgactcggaccgatg

SEQ ID NO: 6429 - DNA, 203 bp, synthetic construct
  source 1..203: mol_type = other DNA
ggcgcgccagtcctggaacgttggcaacatttcatcagagtgctaatgaactgtgtcgtgcatatcagtggctacaagccatccgtcctttggaccaagaaattaccatttatcatgaagataccgacatgtttgattacgagagtgaaagctatacacagcgggattgctatgaatacaatgcgcctcgactcggaccgatg

SEQ ID NO: 6430 - DNA, 203 bp, synthetic construct
  source 1..203: mol_type = other DNA
ggcgcgccagtcctaataacattacagtgcaatgctgctttgaaccaccatcagatatcaaagataccatgagtggagaaacgcctgaaggaaaattttgcgctatcggaaagagtaatatcaaggttggtcaggcggtaaaaacaactttactaaaatcttgtatctatggaatgttgagcaaaccacgactcggaccgatg

SEQ ID NO: 6431 - DNA, 203 bp, synthetic construct
  source 1..203: mol_type = other DNA
ggcgcgccagtcctcaccaactacaacgaactgtcgcacctttgcaaaaagatgttatttacgaaatgctaaactggacacggaacactattgacccaaacgaaattctaatgatgaacataaacacagcttttagagaaatagtataccatggaaagagtgagtaccagaagttgcgtagcggaattcgactcggaccgatg

SEQ ID NO: 6432 - DNA, 203 bp, synthetic construct
  source 1..203: mol_type = other DNA
ggcgcgccagtcctgcaactaacctttggtcatctagtgaccctgtagaaaaacaattgtatacagccaatttcccagaagttctaatttctaatgctatgtaccaagacaaattgaaaggtttcgtaggacttcgcgccacacttgttgtcaaagtacaggttaattcccaacccttccagcaaggtcgactcggaccgatg

SEQ ID NO: 6433 - DNA, 203 bp, synthetic construct
  source 1..203: mol_type = other DNA
ggcgcgccagtccttacgccggtgatttaacactggctgataccagaaagattgaagcagagagaacgcaagagtattccaataatgaagacaatagaataacaactcagtgtagcagaatcgtcgcacaggttatgggagaagatcagcaaattccacgaaatgaagcacagcacggcgttcaccctcgactcggaccgatg

SEQ ID NO: 6434 - DNA, 203 bp, synthetic construct
  source 1..203: mol_type = other DNA
ggcgcgccagtcctttacaagactcttttaattcccttatttcaacgagttcttctgcagtgacgaccacagttttaccatccggcactattaatatgggtccatccacacaagtaattgacccaactgtagaaggcttgatagaggtagaagttccctattacaatatttcacatattacacctgctcgactcggaccgatg

SEQ ID NO: 6435 - DNA, 203 bp, synthetic construct
  source 1..203: mol_type = other DNA
ggcgcgccagtccttgtcctgcactgaacttgtttctgtctctggagtgctctacacttcagtaggggctgtacccgggcggtcccactcttcacaggaatctgcacaggtggctttcacctctggacagtgcattccacacccgctccacggtagaagatgatgtgtgtctttgcttgtgaaaagctcgactcggaccgatg

SEQ ID NO: 6436 - DNA, 203 bp, synthetic construct
  source 1..203: mol_type = other DNA
ggcgcgccagtccttgtgaaaatcgtgtgtaggcgtagcggctacttgagtgccagcggattacccctagtggtaacactagcctctgggcccaaaaggcatgtcatttgaccactcaggtacacaaccccagtgatgcacacgcttagtaatggcttagtaacaaacattgattgatcatttgaaagcgactcggaccgatg

SEQ ID NO: 6437 - DNA, 203 bp, synthetic construct
  source 1..203: mol_type = other DNA
ggcgcgccagtcctactctaccgcaggcattttggcccaatcaagattttccagcatgggggcagtctcgttattttgcagcagtgcgctgtggctttcatattcaagtacagttgaatgttaacatcggttctgctggttgcttgattgccgcgtacatgccaaagacggcccatgatcatatgaaccgactcggaccgatg

SEQ ID NO: 6438 - DNA, 203 bp, synthetic construct
  source 1..203: mol_type = other DNA
ggcgcgccagtcctggttcacctacaacagtggatgtgaccatttttggttcattactcgacttggattttcagtgtcctcgtcctcctggtgcagacacagtaatttacacacaagggaaaagaactgttcgaaagaccaagacatcaaagttcaaatgggtcaggaataaaattgacatagctgaacgactcggaccgatg

SEQ ID NO: 6439 - DNA, 203 bp, synthetic construct
  source 1..203: mol_type = other DNA
ggcgcgccagtcctccagatggtcgaaggggctatttcacctggtcacatacaatctcacctgttaattgggtttttgatgaccacatttatttggaaaacatgcccaatctgagattattctcctcctgttacaactattggaggggctcctttgttattaaactgacagtttatgcgtcaactttccgactcggaccgatg

SEQ ID NO: 6440 - DNA, 203 bp, synthetic construct
  source 1..203: mol_type = other DNA
ggcgcgccagtcctaacaaaggacgcttgaggatggcatttttcccaaacagagaaggcgcctacacacaggatgaagctcagaacgcaatctttgttgtgtgtgatataggcttgaataatacctttgagatgaccatcccctacacttggggcaactggatgagaccaacaagaggaaactccttgcgactcggaccgatg

SEQ ID NO: 6441 - DNA, 203 bp, synthetic construct
  source 1..203: mol_type = other DNA
ggcgcgccagtcctgttccattaagatgtgttaaaggttcagacaggaattcagccggacttggttctctcttcacacaggctgtgggcagaacaatctctaatcgggtacaaatctttgtgagcttccgctgtcctaattttttcttcccactacctgcgcccagggaagccacgtctcgaagcatacgactcggaccgatg

SEQ ID NO: 6442 - DNA, 203 bp, synthetic construct
  source 1..203: mol_type = other DNA
ggcgcgccagtcctgggaaatttttgaaccaatgtggtgacgtggaaaccaacccaggccctgacattgagttggtctataaaaacagaggcttctataagcattatggagttagatttggtggtcatatctaccacttgaattcacaagacattctgtcaaccgcaattacaggcaagtctgacttccgactcggaccgatg

SEQ ID NO: 6443 - DNA, 203 bp, synthetic construct
  source 1..203: mol_type = other DNA
ggcgcgccagtcctaaagccttggggattattggggtcatcttgttgtcagcctctcttctttcattgcttgctgtaccctgggattattcctcacttcaaactgtttataaccaatccattgaaggtgatgcttctggcctcacactcctaagtcaaagatgcatgacttttttttccaatacaatgcgactcggaccgatg

SEQ ID NO: 6444 - DNA, 203 bp, synthetic construct
  source 1..203: mol_type = other DNA
ggcgcgccagtccttgtgaaacttttaataatgatcttgttaagtttattattaagattttggtgcggcttttgtgctacatcgttctttattgccatgcaccaaatatgctgacaaccatgtgtctgggaactcttcttgttttggacattacaacttgtgaaatcttgtctgctaacaccaaagcacgactcggaccgatg

SEQ ID NO: 6445 - DNA, 203 bp, synthetic construct
  source 1..203: mol_type = other DNA
ggcgcgccagtcctctctttcaggcattggttgatggtgatgtgaagagtcttgtctggaaaattgctgagaatatgcaatttgcccaatccaaggatgaacaagctgaggacatggcagcaaccttcaactttgcctctgacatggttaattttgtgccaatggaacagatgagacaagaaggctggcgactcggaccgatg

SEQ ID NO: 6446 - DNA, 203 bp, synthetic construct
  source 1..203: mol_type = other DNA
ggcgcgccagtcctggtggtagggcttggaagaccctctccatggatgaacttgtgaaacaaatcacggcagtttacacacagaggtcagatgcccttatggtttggaaaaggaagttgaataccatcaggaacgaaatgagccctggatcatccaccggcaggatttttgaacccttagaggaaacacgactcggaccgatg

SEQ ID NO: 6447 - DNA, 203 bp, synthetic construct
  source 1..203: mol_type = other DNA
ggcgcgccagtcctaaccctcaaactgcaatttctaagaaggggggtaagcctaagctctcattagtgaaaaccacaaactttgttaatgaagcaccctatatgcaagatcttgaacattgctttgcacaaacggcctacatttcttctccagaaacccaagatataatacattgtgctgccttgagtcgactcggaccgatg

SEQ ID NO: 6448 - DNA, 203 bp, synthetic construct
  source 1..203: mol_type = other DNA
ggcgcgccagtccttcaaaaaaaggaatgtgtgggggccttttggtcactagagtgcatggcacattcaaggttctgggaatgcacattgcaggcaatgggcaagttgcacgagctgcagcagttcactttatatccaatggtgcagctggctttatggatcaaggtgttgttgtggccaaagaaaagcgactcggaccgatg

SEQ ID NO: 6449 - DNA, 203 bp, synthetic construct
  source 1..203: mol_type = other DNA
ggcgcgccagtcctttacaaaagcccatttatttgccatctaagacagctttgaatcccagtcccttgaatggtgtagtccccgtgaaaatggaaccagctgtgcttagtcctcatgacaccaggcttgaagtcatcatgcccagcgttgtgaaaacagcggcagctaagtatagagttaatatttttcgactcggaccgatg

SEQ ID NO: 6450 - DNA, 203 bp, synthetic construct
  source 1..203: mol_type = other DNA
ggcgcgccagtcctttaattaaaagttgaacctgtagcgtcagtaaaacgcagtaaccgcaagcaattgcctgtagcgtcagtaaaacgcaatacacaagatttgagcctgtagcgtcagtaaaacgctgcaaccacaagctattgactgtagcgtcagtaaaacgcaaacattcttgtggcgctcgccgactcggaccgatg

SEQ ID NO: 6451 - DNA, 203 bp, synthetic construct
  source 1..203: mol_type = other DNA
ggcgcgccagtcctgtagcgctcaagtgcagagcttcccggctttaagggttactgctcgtaatgagagcacatgacattttgccaagatttcctagcaattgtcacgggagagaggagcccgttctcgggcacttttctctcaaacaatgttcgcgcgcctccgcgcgccccccctttttcagcccccgactcggaccgatg

SEQ ID NO: 6452 - DNA, 203 bp, synthetic construct
  source 1..203: mol_type = other DNA
ggcgcgccagtccttaagtggatctccaatttggcctgttctgaactacaccatctactgctgtgaagaatgtcctgaaggcaagctggttacagccctgatcaggagccccgctcgtgactctcgatcgacgcggggtcaaaaactgtctaagcagcagcagaaacgcgggagcgtttctttttcctcgactcggaccgatg

SEQ ID NO: 6453 - DNA, 203 bp, synthetic construct
  source 1..203: mol_type = other DNA
ggcgcgccagtccttatttgtttcatgatggcggcgtctaaggtatacagagtgtgcgagcagactctactagcaggcgctgttcggatgatggacaaattcttgcaaaagaaaacagtttttgtgccacagcttgacaaacaggtaaggttgactggtcttcacaattatgacaacacatgctggctcgactcggaccgatg

SEQ ID NO: 6454 - DNA, 203 bp, synthetic construct
  source 1..203: mol_type = other DNA
ggcgcgccagtcctagagacacccaaaacagaagatgtactagttttcgcgccctatgactttgagtcattgggcaaagaccctcctaagttacatcagaggtatgagaaggcgtttgaacgccttagcggagctggtacatcgactccaacgactggcaaccagaacatgtcaggaaacagtggttccgactcggaccgatg

SEQ ID NO: 6455 - DNA, 203 bp, synthetic construct
  source 1..203: mol_type = other DNA
ggcgcgccagtcctcacgctttccagacattacacattcaaagtgggtgagtggcctcattcacaatcacacggccacgcctggatttgtccactgcctggagacaagctgaaaaagatgggcagcttccacgaggttgtcaagtctcaccacctggtcaagaatggctgggatgtggttgtacaagtcgactcggaccgatg

SEQ ID NO: 6456 - DNA, 203 bp, synthetic construct
  source 1..203: mol_type = other DNA
ggcgcgccagtcctcaaggcaaaatttttggttgcttttgtgcctccccacactgctgcgccaaaaacgcgcgacgaagctatggcatgcattcatgctgtgtgggatgttggcctcaattctgcattctcatttaatgtgccttattcttccccatctgacttcatggctgtttattctgcggatgccgactcggaccgatg

SEQ ID NO: 6457 - DNA, 203 bp, synthetic construct
  source 1..203: mol_type = other DNA
ggcgcgccagtcctggatggcgagcccggtgagacagaaccacggcacgctttgtcccctgtggacatgcatgtccacacagacgtcagttttctgcttgacagattctttgatgttgagacaattgaactttcaaatttaacaggctccccaactactcatcttttggatccttttggttccactgccgactcggaccgatg

SEQ ID NO: 6458 - DNA, 203 bp, synthetic construct
  source 1..203: mol_type = other DNA
ggcgcgccagtcctccagcttgcttgggctcgacttctcaacacttgtacatacttcttctccgacttggagttgtctattcagtttaagtttaccaccaccccatcttcagttggagagggctttgtgtgggtcaaatggttcccggttggagcaccaaccaagaccactgatgcctggcagctaaacgactcggaccgatg

SEQ ID NO: 6459 - DNA, 203 bp, synthetic construct
  source 1..203: mol_type = other DNA
ggcgcgccagtcctggagtccacttacaattggctgcccggtgctcactttggctctatattgctgacatctgatgcacatgacaaaggagggtgttacttgcggtaccgctttccgcgagcaagcatgtattgccctcggcccattccaccggctttcactcgccctgctgacaaaactaggcacaacgactcggaccgatg

SEQ ID NO: 6460 - DNA, 203 bp, synthetic construct
  source 1..203: mol_type = other DNA
ggcgcgccagtcctagagacatattctcctttttacaagacggcaaaaatgctttttaaacttgcaacactggctgtgacggcaatgcggaccaaggacccggtggttgtggtcatgctgattgctgattttggattagaggtgtttgacacaggttttttcttttcctattttcaagaaaagctgcacgactcggaccgatg

SEQ ID NO: 6461 - DNA, 203 bp, synthetic construct
  source 1..203: mol_type = other DNA
ggcgcgccagtcctgttcaaggacatgcaacagcgtgctctcgctgtgaaagataaaggcctcttttccctgctgcaaatcccactagtcaacttgcccacaagcaggccagagcctgttgtgtgtatccttcggggtgcatcaggacagggaaaatcttatttggcaaatttgatggctcaggcaatcgactcggaccgatg

SEQ ID NO: 6462 - DNA, 203 bp, synthetic construct
  source 1..203: mol_type = other DNA
ggcgcgccagtcctccccatggctcacttggatgataagggcattccattcacttcccctgttgttatttgtaccacaaacctgcattcatcttttacacccattactgtttcttgtccagaagctctcaagcggaggtttcggtttgatgtgacggtatctgtaaagcctggctttgtacgtactgtcgactcggaccgatg

SEQ ID NO: 6463 - DNA, 203 bp, synthetic construct
  source 1..203: mol_type = other DNA
ggcgcgccagtcctaaacagacaagacacacacaaaatgcccatttttaaacaatcgtggtctgacttgtttaagaaatgttcaactgatgaggagcaaaaaatgttacaatttttgattgacaataaggattcagaaattttgagggcttttgtgtcggaacgctcaattttgttgcatgaagagtacgactcggaccgatg

SEQ ID NO: 6464 - DNA, 203 bp, synthetic construct
  source 1..203: mol_type = other DNA
ggcgcgccagtcctctcgcgggggtattgtggcgcagcaattgtggcaggctcacctgcccgcatcattggcattcattctgctggtactgggtctgtagccttttgctccctggtgtccagagatgcgctggagcgcactctccctcagaaacagggcaacgttgttcgtcttgatgatgatgtgagcgactcggaccgatg

SEQ ID NO: 6465 - DNA, 203 bp, synthetic construct
  source 1..203: mol_type = other DNA
ggcgcgccagtcctccagaaatggcttctgcgcgcagctcatgtttatgctcaacgggtctttgcccgtattggatttgacaaccaggctttgactgagcaggaagccatttgtggcattcccggccttgacaagatggaacaggacaccgctcccgggttgccctatgctcaacaaaacaaaagaagcgactcggaccgatg

SEQ ID NO: 6466 - DNA, 203 bp, synthetic construct
  source 1..203: mol_type = other DNA
ggcgcgccagtcctgatgccccatgtggtggttggtaggcagcttttgggccggtttgtggcaaagtttcatgaggcaaatggatttgagactggttctgctattggatgtgacccagatgtggattggactcggtttggtcttgagctggaacgttataggtatgtgtatgcctgtgattactcccgcgactcggaccgatg

SEQ ID NO: 6467 - DNA, 203 bp, synthetic construct
  source 1..203: mol_type = other DNA
ggcgcgccagtcctctgtacatccattttaaacactgttttaaacaatgtttacattcttgcagctatgatgaaggcttttgagaactttgagccggatgatatccaggtgatttgctatggggatgattgcctcattgcttctgaccttgagattgactttcaaaagttggtgcctgtgttttccagcgactcggaccgatg

SEQ ID NO: 6468 - DNA, 203 bp, synthetic construct
  source 1..203: mol_type = other DNA
ggcgcgccagtccttgaaaagctcctgtctgttgcgcagttggctggccactgcgaaccagaacagtatgagcgcctgtttgagccttttgctgggatgtattacgtccctacttggcgtgatttgcgcctgcagtggctaatgaagcttggatgctaaatctttttctggttttgtttttctttgttcgactcggaccgatg

SEQ ID NO: 6469 - DNA, 203 bp, synthetic construct
  source 1..203: mol_type = other DNA
ggcgcgccagtcctgacacccccagcaaggctgagcagtccgttgagcgaggatttacgtttcagcttgcacagtgggagacatccagaaacatttgggaccatttgacaatccctcttcccatgtgccctggtcttattaaggtctctggaatgtacaaagctttcattgaaacccacgcctacattcgactcggaccgatg

SEQ ID NO: 6470 - DNA, 203 bp, synthetic construct
  source 1..203: mol_type = other DNA
ggcgcgccagtccttcttggttgccggagcgcagttttatacctggaaagttcactgatttcctgcaagtagctgttataccaactttggctgaagtttctgttcaaaactacaaaccagtgccttcctttccagtgagtaatgttttacagactaagcctcttgtaaatactgatttgacttttactcgactcggaccgatg

SEQ ID NO: 6471 - DNA, 203 bp, synthetic construct
  source 1..203: mol_type = other DNA
ggcgcgccagtccttctatgactttccgcaacacttatgtgtctgcgctttctcttcagtacacccagtatagaggttccatttgtatggatttactttttacaggaagtgctatgtgtcaaggaaaatttgttgtgtgttatgtgcctcctggtcgggaacctcagtctttggatgaggccatgcagcgactcggaccgatg

SEQ ID NO: 6472 - DNA, 203 bp, synthetic construct
  source 1..203: mol_type = other DNA
ggcgcgccagtcctgagcaaggaactgcttcgcgtacactcgtgcgcactaaccacataacagcagaatttgtggagaaaacacccctgaatggtttggctgcagtttttacgtcattgtctactagtggttattctactaagcttgtttctgaacccatccccgaagcaactttgtctaccattctgcgactcggaccgatg

SEQ ID NO: 6473 - DNA, 203 bp, synthetic construct
  source 1..203: mol_type = other DNA
ggcgcgccagtccttctgagggtgccacaaatttttctttgttgaagttagcaggggatgttgaacttaaccccggcccaactatttggtcagtgatgcccggtggtgaactcattgaatttgctacaaaggtctctcaagtttacaagaccatcaaagaaaaatgcactgaccctaccacttggattcgactcggaccgatg

SEQ ID NO: 6474 - DNA, 203 bp, synthetic construct
  source 1..203: mol_type = other DNA
ggcgcgccagtcctaggtctatccggcgcacctttttcgacgactcgtcatccgagtccgaagatggagaaccggaggttcctcaattcagaccccaggtctaccctaggccacgcagtatgagagtagtcagacatcccatgacagcgcgacgcgcccaacgcgtcattgacatgggatactctgatcgactcggaccgatg

SEQ ID NO: 6475 - DNA, 203 bp, synthetic construct
  source 1..203: mol_type = other DNA
ggcgcgccagtcctcagcgcgttcattgcgaggagaatcaggcccttttgtccgaggggatttcctccactctctcagttttgaatggtttcttcaatcttttcaaaaatgtgcaatggtttttggatttcctcaaaagctgctatggcaaactttccaagcaattgaaaccaatgcagtctctccgccgactcggaccgatg

SEQ ID NO: 6476 - DNA, 203 bp, synthetic construct
  source 1..203: mol_type = other DNA
ggcgcgccagtcctcaagaagcggtcactcgccgctattggaaggtgattgatgttagcgcagatgatcagtataaaactgtggatggcaggctggactacgccaaagccacgcaacctacccagattccccctgaattggctgtgttcaaaactcatgtccctcttttgaagggcgctctgcgtgaccgactcggaccgatg

SEQ ID NO: 6477 - DNA, 203 bp, synthetic construct
  source 1..203: mol_type = other DNA
ggcgcgccagtcctactgctgaacatcgcagacgcttcgtcgaacaaaatccaacttttcattttaaggaaactgaagctgacttttatgaacgtgttgcattcctttctggcattcatggtcgaaagcaatccattcttaagaaaatcaaggagtggttcgcggacggcgtgcgtgtcagaaatcttcgactcggaccgatg

SEQ ID NO: 6478 - DNA, 203 bp, synthetic construct
  source 1..203: mol_type = other DNA
ggcgcgccagtcctcacattacagctggacgcaattctgcaactcgcgaccagctggaggcagtggatgtaattgatcagtttgacatgccaagtgacgctgtcgcggttaagtttccagacaagcgcggctcctcctacaaaaacatcatgcaccaccttgcctccaccctccctattcgtggaaaacgactcggaccgatg

SEQ ID NO: 6479 - DNA, 203 bp, synthetic construct
  source 1..203: mol_type = other DNA
ggcgcgccagtcctaccaaattgagacccactgtcgcaatcaacacttttgagtgcgacgtggaaccagccgtcctgtccaaattcgacagacggctcgaggaacctgacagttttgagttgacccttctgcacaagaatgacaggcgctatccagaggacacttctatggacaagcacctggaggctcgactcggaccgatg

SEQ ID NO: 6480 - DNA, 203 bp, synthetic construct
  source 1..203: mol_type = other DNA
ggcgcgccagtcctgctgttgaggcttatgcttcctcattgtttgcacagattggtactgacaatggaatcatttcagagtatgaagctgttactggcattgagaatttggactcagtggagacaacaacgtcacctggactaccctacacgacagcggggattccaagagaggcgctgtttgacccacgactcggaccgatg

SEQ ID NO: 6481 - DNA, 203 bp, synthetic construct
  source 1..203: mol_type = other DNA
ggcgcgccagtcctggccgaatgctgcttggaaaatttacagctaaaatgcatgctaacaatggattaggcattggttcagccgttggttgcaatccagatgtagactttactagatttgcttaccaaatcttggaatgggactatgtttatgacattgattacaaaaattttgatgcttcacattctcgactcggaccgatg

SEQ ID NO: 6482 - DNA, 203 bp, synthetic construct
  source 1..203: mol_type = other DNA
ggcgcgccagtcctatgggaatgcaggactggacttgtgctgcctgacagggtcgcggctggccgtctgtactttgtatagtcagttgaaactcaccatggcatgtttgaaaattttctctctgaaacgcaaagataagagccactcatactctcctcgtgagattgagttgaaatataattcagattcgactcggaccgatg

SEQ ID NO: 6483 - DNA, 203 bp, synthetic construct
  source 1..203: mol_type = other DNA
ggcgcgccagtcctggacctctagaatggaaaatggtaataccaataactctggcaacactggagtgatcaattacaatttttactccaactcatacactgacgcagttgatctatctggagcaatgtcttcgcaggaatcaaatgctgctgagaatgctgcatcagggcctacatctcttcttaaagcgactcggaccgatg

SEQ ID NO: 6484 - DNA, 203 bp, synthetic construct
  source 1..203: mol_type = other DNA
ggcgcgccagtcctttgccgatgagggtacatcaggtggcccggcagtctcacggtttgtgacccttagggcccaatcgtggtcgacatctcaagatgtgtattcattccaagctgctcacctgccatatgctcttgttgcacaggaaacaccattcaaggcccttatgtccaaacaccagctgcttacgactcggaccgatg

SEQ ID NO: 6485 - DNA, 203 bp, synthetic construct
  source 1..203: mol_type = other DNA
ggcgcgccagtcctataatccagacaagatgtatagcacatggcactaccaccacacttttgatgatacagataagcattggtacaaaccagaagaacagccatacggtggcatatcacctcagtccctgttttgctttccccatcagctgattaatcctaggacaaattcatcagcaacattgtgtgcgactcggaccgatg

SEQ ID NO: 6486 - DNA, 203 bp, synthetic construct
  source 1..203: mol_type = other DNA
ggcgcgccagtccttaccttatgtggactgtggccccataactgatgtcactgtccactgtccctgggctattgtgattgtggttttgcgccagctactggtggccaacggtggaacacccagtgttgacattaatgtttccttggctccatgcaatgttgagtatcatggactccgtcagagttctgcgactcggaccgatg

SEQ ID NO: 6487 - DNA, 203 bp, synthetic construct
  source 1..203: mol_type = other DNA
ggcgcgccagtcctagaattgtaggcttgttttggcctggacatcacagggctttaacgcaccaatgccaaccactatggctgaagcaatgcaaggccattatgttatctatgacaccggtgtggacagcagtgtagatttagttgttccctatgtggcaccatatgattttacccctgtgcgaactccgactcggaccgatg

SEQ ID NO: 6488 - DNA, 203 bp, synthetic construct
  source 1..203: mol_type = other DNA
ggcgcgccagtcctttctaaagggaccctccaacatctcctccggcttccagggaaacatggattctccacttcagccagctgagacgggatgtgacaaggcaatggcacccagtgcttcaaatgagaaccccgtccctctgtcagttgagagcattggttcgtccagggtttcgttcttctgggacacgactcggaccgatg

SEQ ID NO: 6489 - DNA, 203 bp, synthetic construct
  source 1..203: mol_type = other DNA
ggcgcgccagtcctggtatttccacatctcaacaatcacaaagatgactaatgttgacccgcaatacttgcggttgaacatctcagacatcctgcgggaccctgtaatacgtcagtccctacatgccacctatttgagatgtgggctatctgttgctgtgagagtgatgccagcaaatccagctagtacgactcggaccgatg

SEQ ID NO: 6490 - DNA, 203 bp, synthetic construct
  source 1..203: mol_type = other DNA
ggcgcgccagtcctgcaagaaagagggttgctgctgtggtaacaaacacaactaccctgatgaactgaaccctttttcagagaatgggttctggagccgcttcaagaaagggcacctccaaggtccaatgcaggatgtgagctctttgattaacatcctgaagggtgcagaatggatttaccaccaatcgactcggaccgatg

SEQ ID NO: 6491 - DNA, 203 bp, synthetic construct
  source 1..203: mol_type = other DNA
ggcgcgccagtccttgagaaaatgtgctgcccatgttaacccaagattgatgggcatgtttcctgaatttgacccatctccacctgatcctactcgccccgagccagttgttgtcgtcttgcgcggcgcacctgggcagggtaagagtgtgtgttctgagatgcttgccagaatgctttcttacacctcgactcggaccgatg

SEQ ID NO: 6492 - DNA, 203 bp, synthetic construct
  source 1..203: mol_type = other DNA
ggcgcgccagtcctctcttttaaagttagttgagatgcaagggccaaaaggacaagccaatatggaaatggaaagaactttaatgaagaagaacatagtggaaatgacatatgagaagcacaacgggaggtttcaaactaccacagtcctgtttgtgcgtgatcggatttttctgatcaacactcacacgactcggaccgatg

SEQ ID NO: 6493 - DNA, 203 bp, synthetic construct
  source 1..203: mol_type = other DNA
ggcgcgccagtcctctggcacaccaatagttggcttgatgaagacagaaggtagcagttatatctggtctggtgaatgtctcccatttaaaaatacaatgaacacttatgaaggctgtgttcctcatgtgttaccatataaggccgtgacagcccatggctactgtggctctgtcatggtcgcagatgcgactcggaccgatg

SEQ ID NO: 6494 - DNA, 203 bp, synthetic construct
  source 1..203: mol_type = other DNA
ggcgcgccagtcctctggagtctggaaaggcatttgtggcatacactccttaggagatggtgccataggtgcagcaacagttttgtcaagacagcatttgctcaaccttcttgagggattcctggaattccagggaaaaatttatgatgtgcagaaaacagactttgtgtacacacccactagaacctcgactcggaccgatg

SEQ ID NO: 6495 - DNA, 203 bp, synthetic construct
  source 1..203: mol_type = other DNA
ggcgcgccagtcctggctctttgccttctttcacaagaatcccggttggaatacaggatcagctgttggagttaatccagacttggcctggacacagatcttttatactgcccctagccggaatgtattggctatggattactctggatttgatgcttcacatacttctggcatgttttgcattttgacgactcggaccgatg

SEQ ID NO: 6496 - DNA, 203 bp, synthetic construct
  source 1..203: mol_type = other DNA
ggcgcgccagtcctagcattttctgaccactcttggttatggaactttacagctttcctatattgattctctctgttattctaaacaccactgggatgatgaaacctaccgccttgacggaggattgccttctggatgctctggcacaacaatttttaacaccattatgaacaacattgttgcccgagcgactcggaccgatg

SEQ ID NO: 6497 - DNA, 203 bp, synthetic construct
  source 1..203: mol_type = other DNA
ggcgcgccagtcctcacagtgcacgttccttaaacggggatttgtgctggatggtagtctcgtgcgaccagtcatggaagaacaacatttggctgaattgctaaaatgggctaggccaggaacattgcaggccaagttgctgtccattgcccagttggcatttcatcttccgcgctcggcgtataatccgactcggaccgatg

SEQ ID NO: 6498 - DNA, 203 bp, synthetic construct
  source 1..203: mol_type = other DNA
ggcgcgccagtcctgcgctcggcgtataatcgccttatgctcccatttgaagaggctggatatgaaatccccagccatgaacgcctgaatgaggagtggcgcgagatgttcatttgaatggctacagttgtgagcagtttagtgattttctgcctgttgcttaagtagtttagttgagcccaaaaaaacgactcggaccgatg

SEQ ID NO: 6499 - DNA, 203 bp, synthetic construct
  source 1..203: mol_type = other DNA
ggcgcgccagtcctgagcttccaggttgggaaacctggactgggtctatactgcctgatagggtcgcggctggccgcctgtaactagtatagtcagttgaaaaccccccatggaatctactactactctttcattttgcaactggatccccaagaaacagagagcccgtgtgtaccttaccaccagtgcgactcggaccgatg

SEQ ID NO: 6500 - DNA, 203 bp, synthetic construct
  source 1..203: mol_type = other DNA
ggcgcgccagtccttcacacacgagaagtcgattggaccgtacacatacatggtctcagacatgattatgaaagaaaacagtagaacctcccttgccatggcatacgtggaagggaagacacttgtgttcaacaacggaacacaactaggacaagtacattcatccaatactgggaacaaaccacaagcgactcggaccgatg

SEQ ID NO: 6501 - DNA, 203 bp, synthetic construct
  source 1..203: mol_type = other DNA
ggcgcgccagtcctaagagggctatagtgacagattaatgcaattaacagcaggtaattcttgcataacaacacaagaggcagccaaggcggtggtggcatatggacaatggcccagttacaatatagatgcaggagaacatttagaccttgcaactactcctggtacatctgtagataggttttacacgactcggaccgatg

SEQ ID NO: 6502 - DNA, 203 bp, synthetic construct
  source 1..203: mol_type = other DNA
ggcgcgccagtccttgttttgtggtagccagatggccacaggtaaattacttattgcatataccccacctggtggttcctcccctacaacgagaactgatgcaatgctagctacacatgttatttgggatataggtttacaatcaacatgcaagcttgtggtcccctatatatcatcttcacagtacacgactcggaccgatg

SEQ ID NO: 6503 - DNA, 203 bp, synthetic construct
  source 1..203: mol_type = other DNA
ggcgcgccagtcctggcaaaacaacctgacaagaaccactttgtcatacaatggatgggtaactgtattccagcaaacagcactggttgtacccccaggtgccccaacaacatgtcagttagtggtgacagtgagcgctgcggacaactttgtactaaggatccccactgatacagcatattttgcagcgactcggaccgatg

SEQ ID NO: 6504 - DNA, 203 bp, synthetic construct
  source 1..203: mol_type = other DNA
ggcgcgccagtcctccaattcgactagcatttatactagagtagggaactgcccagcctcatttagaataccatttatgtctgtttgtaactattatacctccttttatgatggtgatggcaattttgaccagaacggtgctgcctatggtattaatcctggtgattttataggaaccatatctattacgactcggaccgatg

SEQ ID NO: 6505 - DNA, 203 bp, synthetic construct
  source 1..203: mol_type = other DNA
ggcgcgccagtcctatgaggtgtgccaaactaagaacgccactgaattaacagagaccaaatgggctaactattcatgctcagttaggtttgatagaggttcatttacagcatggtttgtgggagaagacctgttactggtaccctaccatgcagcaaataattggagtcagacaacacatgtatacccgactcggaccgatg

SEQ ID NO: 6506 - DNA, 203 bp, synthetic construct
  source 1..203: mol_type = other DNA
ggcgcgccagtcctctcttttgaaagctttagacctttatggatatgatttaccctttactacttacttaaaggatgagctgagaccaaaggagaaggtgaagatgggcaaaaccagggttattgagtgttcatcactcaatgataccataatgatgaagcaaacttttggtcgtctgtttcaggtgtcgactcggaccgatg

SEQ ID NO: 6507 - DNA, 203 bp, synthetic construct
  source 1..203: mol_type = other DNA
ggcgcgccagtcctggatatatggtacgctgtgcaaacggcggaaattaatcctaccgttaaccgcccacctactccgagaagcctagtacctaattggatttatcaatggagttgcgctcagcaggtgaccctgacctgccagctccggctgatggacctgggctttccccacaggcgactgtggcccgactcggaccgatg

SEQ ID NO: 6508 - DNA, 203 bp, synthetic construct
  source 1..203: mol_type = other DNA
ggcgcgccagtcctatgggaccgactactttggagagtccgtgtttctattgtttctttaatcaatcttatggtgacaatttatagtgccctgagtattgattggttgttgcttttgacaattattgagacatcacatagacataatgggagctcaagtaagcaggcaaacgtctggtgcgcatgacacgactcggaccgatg

SEQ ID NO: 6509 - DNA, 203 bp, synthetic construct
  source 1..203: mol_type = other DNA
ggcgcgccagtcctcccggatacgggctgaacagggcgcaaacattcattatactaatatcaattattatagagatgcagctagcaatgcagcaagcaaaatggactattcccaggatccggacaagttcacgaaaccagtacttgatgctataactgaaccattacccacgctgaagtcccctagtgcgactcggaccgatg

SEQ ID NO: 6510 - DNA, 203 bp, synthetic construct
  source 1..203: mol_type = other DNA
ggcgcgccagtcctgcactctactggtcttagcaataccagaatgggagattggggtgtctaatgctgatagggcatcctttaatctaacaaaccccgataagaacgggcatactatgactggtcaagaagcttattgcttacataatgggactaacatccattcttcactggtatttccacatcaatcgactcggaccgatg

SEQ ID NO: 6511 - DNA, 203 bp, synthetic construct
  source 1..203: mol_type = other DNA
ggcgcgccagtcctcaatggcgtgcgagtttaacggactgcgcaatgccatcacccaagggctgccagtactcaatacacccggctctgggcagtttgtgactacagataatttccaatcaccaaacttgattccaaattttgatgtgacacaagtctttaatagtccaggtgaaattattaatttaccgactcggaccgatg

SEQ ID NO: 6512 - DNA, 203 bp, synthetic construct
  source 1..203: mol_type = other DNA
ggcgcgccagtcctaggatgatttctcgatgcgcttgttgcgggatacagcagagatttcgcaagacggatttctgcaaggaccaatagatcaagcaatagaaaaagtaatcactgatgtagtgtctgacacgcgtgagtctagtagtgactttagcattggggctgttccagcattgaatgcggtggcgactcggaccgatg

SEQ ID NO: 6513 - DNA, 203 bp, synthetic construct
  source 1..203: mol_type = other DNA
ggcgcgccagtcctaccaggacacacacctaaacaagatgactactgatagggcgaacataaagactgttaccaattatatcatgtctggcagcacgcggacagttgaatcagaagtagctgtggtcgaggattcacttaagcaatatggtccagcaactgggggtgtagtggttgggcagtataagacgactcggaccgatg

SEQ ID NO: 6514 - DNA, 203 bp, synthetic construct
  source 1..203: mol_type = other DNA
ggcgcgccagtcctcaatctctgatcttctctgtagcgttgactcaggggaggtccgagattattgcagacgaaggggctggatagttccagacactcctactgagatcacggtttcccgtgattatggcaaactcagcatcattttacaagcggtaaccacatttgttacaatagcaggggtcatttcgactcggaccgatg

SEQ ID NO: 6515 - DNA, 203 bp, synthetic construct
  source 1..203: mol_type = other DNA
ggcgcgccagtcctcaaggatagggcagtgtggcggagtgattgctaccactggtagggttcttggcatacatgtagggggtaatggagcacagggttttgcagctagcttatttagaaaatactttgccatcacacaaggaagtattgagttcaagagaaggttgagctggcagggcttaagagtgtcgactcggaccgatg

SEQ ID NO: 6516 - DNA, 203 bp, synthetic construct
  source 1..203: mol_type = other DNA
ggcgcgccagtccttagtcaaggtgtataaacgaatctctttgtctgatttgaggatgatagcatatggtgatgatgtaatagcctcactcccttataagattgatgctggaaaattggcgattgctggacgagactatggtctaacaatgactccggctgacaaaggagagacattcactgatgtgacgactcggaccgatg

SEQ ID NO: 6517 - DNA, 203 bp, synthetic construct
  source 1..203: mol_type = other DNA
ggcgcgccagtcctcttgggagaatgtcaccttcttaaagagatactttaggtcagatgagagatttcctttcctaattcatccagttatgcctatgagtgaaattttcgagtccattagatggacacgaaatgcaaaacacacccaagaacatgtcacctccctgtgctatttggcttggcacaatgcgactcggaccgatg

SEQ ID NO: 6518 - DNA, 203 bp, synthetic construct
  source 1..203: mol_type = other DNA
ggcgcgccagtccttagaaacgaggcgtcacgtgccgaaaatccctttgcgtttcacagaaccatcctaaccatgggtgtagtatgggaatcgtgtatggggatgattaggatctctcgtagagggataggtgtgccattcaaatccagggagtactctggctctgacattgggacatttgatgtaaccgactcggaccgatg

SEQ ID NO: 6519 - DNA, 203 bp, synthetic construct
  source 1..203: mol_type = other DNA
ggcgcgccagtcctcggacctggttcagtatccgggttgtcctgtattgttacggtgtatccgtcttggcacactgaaagggtatttttgggtaatcctttcctactgcctgatagggtggcgtgcccggccacgagagattaagggtagcaatttaaacatgagcaaactattttctactgtaggcacgactcggaccgatg

SEQ ID NO: 6520 - DNA, 203 bp, synthetic construct
  source 1..203: mol_type = other DNA
ggcgcgccagtccttccctggttctagagtgacacaaggtgagaggtttttccttattgatcagcgtgagtggaactcaacacagagtgaatggcagttattgggcaagattgacatagtaaaagagttgcttgatcagtcatatgctgttgatggccttttgaaataccattcttatgcgaggtttgcgactcggaccgatg

SEQ ID NO: 6521 - DNA, 203 bp, synthetic construct
  source 1..203: mol_type = other DNA
ggcgcgccagtcctgcttggacgtcattgttcagattaatccaacatcattccaggcagggggtctcatagcagcccttgtaccttatgaccaggttgatattgaatcaattgctgccatgactacttattgccatggcaagttgaattgcaacataaacaacgttgtaagaatgaaggtgccatacacgactcggaccgatg

SEQ ID NO: 6522 - DNA, 203 bp, synthetic construct
  source 1..203: mol_type = other DNA
ggcgcgccagtcctagatgatgcgcaacgaatttcgactgtcgtcatctagcaacattgtcaatttggctaattatgaggatgcaagagccaaagtgtctctagcgctgggacaagaagagttttccagagactcgtcaagtaccgggggggaattgttgcatcatttttcacagtggacgtcgattccgactcggaccgatg

SEQ ID NO: 6523 - DNA, 203 bp, synthetic construct
  source 1..203: mol_type = other DNA
ggcgcgccagtcctcgtgccttgccttcacttttacattccccggcacggtagggccaggcactcagatctggtcaaccacggtggaccctttttcctgtaacttgagggcgtctagcactgtgcaccccactaacttgagctcgattgcgggtatgttctgtttttggagaggtgacattgtatttgcgactcggaccgatg

SEQ ID NO: 6524 - DNA, 203 bp, synthetic construct
  source 1..203: mol_type = other DNA
ggcgcgccagtccttctctgacacaccttacagggtgaatccaacgactcataagtccctctggccttatgcaactggcaagcttgtgtgctatgtgtacaatagactgaacgcacctgccagtgtatcaccaagcgtgtccattaatgtgtacaaaagtgctgtggatctggagttgtatgcacctgcgactcggaccgatg

SEQ ID NO: 6525 - DNA, 203 bp, synthetic construct
  source 1..203: mol_type = other DNA
ggcgcgccagtcctgttttgtgacgggtacacttaggtggtttttaagtcttttccaactgtatcgtggttctctcgacattaccatgacatttgcaggaaaaactaatgtggatggcattgtgtactttgtgcctgagggtgttgcgatagagactgagagggaggagcagacccctttgctcacatcgactcggaccgatg

SEQ ID NO: 6526 - DNA, 203 bp, synthetic construct
  source 1..203: mol_type = other DNA
ggcgcgccagtcctagagcaaaaatctggacaaatggtgctttgccttgtctccacgcatagataggacactcatatgtgagacagccaacctgatggtgggacgcgaggttgagtatgatatctttgtgaagaattgtgagacatatgctcggggtattgcatcaggcgactatgggacaaaagaagcgactcggaccgatg

SEQ ID NO: 6527 - DNA, 203 bp, synthetic construct
  source 1..203: mol_type = other DNA
ggcgcgccagtcctggttaaatatggccaatttggagaagaaagggacacagttcaactcaccattcattatagcatcttctaatctttcccatccttgtccgaagacagtgtactgtacagatgccatcgctaggaggttgcatattaaggtcaaggttagcccgaaagaagaattctctactcatgcgactcggaccgatg

SEQ ID NO: 6528 - DNA, 203 bp, synthetic construct
  source 1..203: mol_type = other DNA
ggcgcgccagtccttgataaatgtccctcgtttgcctaaatttagggacatacgcaatcacttttctactgaggagaacatacgcagggcagaaggcatgccagggactttgtgcactttggaccatgagaggttcacccttgttactgagagcgaccttaagatggtggaggcagctacatatgtctcgactcggaccgatg

SEQ ID NO: 6529 - DNA, 203 bp, synthetic construct
  source 1..203: mol_type = other DNA
ggcgcgccagtcctccaaagacgaattgcgtcctctaagtaaggttatgctgggcaagaccagagccatagaggcttgccccgtttcgttcaccatcctatttcgcaggtatttgggatacgctttggcgcagattcagagccaccctggttttcacacagggatagcagtgggcgtggaccctgacccgactcggaccgatg

SEQ ID NO: 6530 - DNA, 203 bp, synthetic construct
  source 1..203: mol_type = other DNA
ggcgcgccagtcctttgttaattccgttcatcagttgggctccatgagatactatgtccatggttctatgccatctggcacacctgctacatcggtgctcaattctataattaatgttgtgaacatctgccatgtgttgtgtgcattggagaaaataagtgtatttgaggttttcaaattattcaagacgactcggaccgatg

SEQ ID NO: 6531 - DNA, 203 bp, synthetic construct
  source 1..203: mol_type = other DNA
ggcgcgccagtcctgaacattctatgtggatgagtggtccatctgtcatccgcgtatttctgaggagactgtttattcgatgctggcttggaagagcgacaatgcatccatgaaggatctgatagaaacgagtatatggtttatgttccatcatggcccccggaagtatgttagattctgtacttggccgactcggaccgatg

SEQ ID NO: 6532 - DNA, 203 bp, synthetic construct
  source 1..203: mol_type = other DNA
ggcgcgccagtccttgcgcggtgttctgtgccgtgtgggtattgggctctacattccaacttacaaagagctggaggtgaggtatgataggcttgtcaagtataggttcatagatgatagcttttagattttacatatttgagtttccatttctgtgtagttttagtgagtataggagcttatgtatgcgactcggaccgatg

SEQ ID NO: 6533 - DNA, 203 bp, synthetic construct
  source 1..203: mol_type = other DNA
ggcgcgccagtcctcacttgcgcaactcgcgtgactggttagtactcttaccactttccgcctgcctggtcgttcagcgctgctgacaggcactcccattgagggccgttcggcgctccactgaggcgtctacgtttagtgtggctacggtgttgaggccgtttcgcgcggccgactcgcctacgcgccgactcggaccgatg

SEQ ID NO: 6534 - DNA, 203 bp, synthetic construct
  source 1..203: mol_type = other DNA
ggcgcgccagtcctactttaaggtaacaccgagactggtacttggtttctggagacaggctaaggatgcccttcaggtaccccgaggtaacaagcgacactcgggatctgagaaggggattggggcttctatccaagcgcccaatttaaaaagcttctatgcctgaataggtgaccggaggccggcaccgactcggaccgatg

SEQ ID NO: 6535 - DNA, 203 bp, synthetic construct
  source 1..203: mol_type = other DNA
ggcgcgccagtcctggctgaataccattttacagttgtttcgttacgtcgatgaacctttcttcgactgggtctacaactcgcccgagaacctcacgctgcgagcgattgaacagctcgaggaactcactgggcttgagttgcgcgagggaggaccacccgccctcgtgatttggaacatcaagcactcgactcggaccgatg

SEQ ID NO: 6536 - DNA, 203 bp, synthetic construct
  source 1..203: mol_type = other DNA
ggcgcgccagtccttgctctacactggcatcggcacggcctcgcggcccagcgaggtatgcatggttgacggtactgacatgtgtcttgctgatttccacgcaggtatcttcttgaaaggtactgagcatgccgtgttcgccctgttgacttccgacggatggtacgccatagacgatgaggacttttcgactcggaccgatg

SEQ ID NO: 6537 - DNA, 203 bp, synthetic construct
  source 1..203: mol_type = other DNA
ggcgcgccagtccttgctcgctgacaagaagacagaggagactgctcttttggaggaccgcatcctcaccacgaggcacggtaccactacttccaccacacagagttctgttgggatcacctacgggtatgccgacagtgactctttcaggcctggccccaatacctcgggcctcgagactcgtgtggcgactcggaccgatg

SEQ ID NO: 6538 - DNA, 203 bp, synthetic construct
  source 1..203: mol_type = other DNA
ggcgcgccagtcctatggtggtttccaaaacactgaccccaagtccgcagatccaatctacggacatgtgtacaacccctcaaggaacgactgccacggtaggttttctaacctgctggacgtcgcagaggcgtgtcccacactcctcgacttcgatgggaagccatacgtggtgaccaaaaacagcgcgactcggaccgatg

SEQ ID NO: 6539 - DNA, 203 bp, synthetic construct
  source 1..203: mol_type = other DNA
ggcgcgccagtcctcgggcattgaggtcaggggactacccaaaacacctgaggatgcagcacactgttaccattctgaatgggacacaggtctgaactcgagctacacgttcgcggtaccatacctgtcgtccggtgacttctcctacacgcacaccgacaccccagccatggccacaaccaacggctcgactcggaccgatg

SEQ ID NO: 6540 - DNA, 203 bp, synthetic construct
  source 1..203: mol_type = other DNA
ggcgcgccagtcctaggtcacgacaccccgccgggtccataccgatgtggcgtttctccttgaccgcagcacacatgtgcacacgaacaagaccacctttgcggtggacctgatggacaccaaggagaaggcgctagtgggagcaatcctgcgctcagccacatactacttttgtgacctggaaatcacgactcggaccgatg

SEQ ID NO: 6541 - DNA, 203 bp, synthetic construct
  source 1..203: mol_type = other DNA
ggcgcgccagtcctcatgtgtgggcgaacacaagcgcgtgttttggcagcctaacggtgcgccacgcacaacccagttgggcgacaacccaatggtgttctcccacaacaaagtgacccgctttgcaatcccgttcacagcgcctcacaggttgttgtccacggtctacaacggggagtgcgagtacacgactcggaccgatg

SEQ ID NO: 6542 - DNA, 203 bp, synthetic construct
  source 1..203: mol_type = other DNA
ggcgcgccagtcctcaaaaacagtcaccgcaattcgcggtgatagagaggtgttggcgcggaaatactcttccgccaagcactctctgccatccaccttcaacttcgggtttgtgaccgccgacgagccagtcgacgtttactaccggatgaagcgtgcagagctgtactgcccccgtgccctgcttccgactcggaccgatg

SEQ ID NO: 6543 - DNA, 203 bp, synthetic construct
  source 1..203: mol_type = other DNA
ggcgcgccagtccttgcagaacgacatgtccactaaacacggtcccgacttcaaccggttggtgaccgcatttgaggagctgacacaaggagttaaggctatcaaggatggtctcgacgaggccaagccctggtacaaaatcatcaaactcctgagccgcctgtcgtgcatggccgctgtagcagcaccgactcggaccgatg

SEQ ID NO: 6544 - DNA, 203 bp, synthetic construct
  source 1..203: mol_type = other DNA
ggcgcgccagtccttcaccatgacggaccttgtgcctggtatcttggagaaacagcgtgatctcaatgatccgtccaagtatcatgaagcaaaggagtggctcgagaatgcccgccaggcatgcctcaagaacggcaatgtccacatcgccaacctttgcaaagtcacagcaccagcaccaagcaagtcgactcggaccgatg

SEQ ID NO: 6545 - DNA, 203 bp, synthetic construct
  source 1..203: mol_type = other DNA
ggcgcgccagtcctcaagaccagaaccagtggtcgtttgcctccgtggtaaatctggccaaggtaaaagtttccttgcgaacgtgcttgcacaggcaatctccacccacttcacgggcagaaccgactctgtgtggtactgtccaccagaccctgaccacttcgacggctataaccaacaagctgtcgcgactcggaccgatg

SEQ ID NO: 6546 - DNA, 203 bp, synthetic construct
  source 1..203: mol_type = other DNA
ggcgcgccagtccttggtgatggatgatctgggacagaatcccgatggcaaggacttcaagtacttcgcccaaatggtatcaaccacgggattcatcccgcccatggcgtccctcgaggacaaggggaaacctttcaacagcaaggtcatcattgcaacctccaatctgtattctgggttcaccccaccgactcggaccgatg

SEQ ID NO: 6547 - DNA, 203 bp, synthetic construct
  source 1..203: mol_type = other DNA
ggcgcgccagtcctccgttgaaatgaagagactgcaacaagatatgttcaagcctcaaccaccaattctcaacgtctaccaacttgtggatgaggtgattgagagagtcaacctccacgagaaggttgcctcgcagccaatcttcaaacagatctcgcttccttcccaaaagtctgtgctctacttcccgactcggaccgatg

SEQ ID NO: 6548 - DNA, 203 bp, synthetic construct
  source 1..203: mol_type = other DNA
ggcgcgccagtcctcactgaaggttaaagccaaagcccccgtcgtgaaggaaggaccatacgaggggccagtgaagaagcctgtcgctttgaaagtgaaagcaaagaacatgatagtcacggagagtggagcgccacctaccgacttgcaaaagatggtaatggccaacacaaagcctgttgagctcacgactcggaccgatg

SEQ ID NO: 6549 - DNA, 203 bp, synthetic construct
  source 1..203: mol_type = other DNA
ggcgcgccagtcctagtcgatgctgctgcaaatgaaggcacacgttgaccctgaaccacaccacgaggggttaattgtggacaccagagatgttgaagagcgtgtacacgtcatgcgcaaaaccaaacttgcacccaccgttgcacacggtgtgttcaaccccgagtacgggcctgctgcactgtccacgactcggaccgatg

SEQ ID NO: 6550 - DNA, 203 bp, synthetic construct
  source 1..203: mol_type = other DNA
ggcgcgccagtccttcggttgcaacccagatgttgattggcagagattcggaacccattttgcccagtacaaaaacgtgtgggacgtggactattcggcctttgatgctaaccactgcagtgacgccatgaacatcatgttcgaggaggtattccgtccggaatttggcttccaccccaatgcggagtcgactcggaccgatg

SEQ ID NO: 6551 - DNA, 203 bp, synthetic construct
  source 1..203: mol_type = other DNA
ggcgcgccagtcctactcgatgatctcctacggagatgacatcgttgtggctagtgattacgatctggactttgaagcactcaagcctcacttcaaatctgtcggtcagaccatcaccccagctgacaaaagtgacaaaggttttgttcttggtcagtccatcactgacgtcactttcctcaagaggccgactcggaccgatg

SEQ ID NO: 6552 - DNA, 203 bp, synthetic construct
  source 1..203: mol_type = other DNA
ggcgcgccagtcctagggtctctttgagattccaagctacagatcactttacctgcgttgggtgaacgccgtgtgcggtgacgcataatccctcagatgtcacaattggcagaaagactctgaggcgagcgacgccgtaggagtgaaaaggccgaaaggtcttttcccgcttccctgatttttgcgaacgactcggaccgatg

SEQ ID NO: 6553 - DNA, 203 bp, synthetic construct
  source 1..203: mol_type = other DNA
ggcgcgccagtcctgtttaccggactgtctttaagaacttggcaatcaggagccctaaaggagctgtggctataatgaaatggggtgtcggttaccttaagaagagaaagcaaaagaggcaaaaatctagtggtggctatgaaattgaggctgcaagacaggctctctatccaattactttaggagttcgactcggaccgatg

SEQ ID NO: 6554 - DNA, 203 bp, synthetic construct
  source 1..203: mol_type = other DNA
ggcgcgccagtcctatggtcattttttgtggctatcagagtggaaatgaacctgtgtgtgtcgatttcaacaatcagactaacatcgttccttatgagaatgggaaagttatctttgggaacgtcaccattgtccctccaattgatagatttggtcttttgattccaacagacaattatgacactatacgactcggaccgatg

SEQ ID NO: 6555 - DNA, 203 bp, synthetic construct
  source 1..203: mol_type = other DNA
ggcgcgccagtcctgagtgcgttaggatgagtcctggcattgaattgagtgaagaagtttgtggattcatggggccaaagtatgatgtccttttgagaacacaatggggaaaaagagagacagaacacatgcacagaactagaagaagtgttacagagacaacccatgagagctctggtggagaacatcgactcggaccgatg

SEQ ID NO: 6556 - DNA, 203 bp, synthetic construct
  source 1..203: mol_type = other DNA
ggcgcgccagtcctgagaaatttgacatcatagaagctggtggctacacgaaaatgacaacattccttaaacatgacaaatgtttcatggttagggttccagaacatgatgtggttgaaataacagttgttaagaaaacaattaggccaactactgggtgtaaaacattcttactaggggctagtgtccgactcggaccgatg

SEQ ID NO: 6557 - DNA, 203 bp, synthetic construct
  source 1..203: mol_type = other DNA
ggcgcgccagtcctaagattaccatgccattgattccatcattaccttaccaagtaactttaattggtcttgatccaaaatatggtattaccatttatagggttgattcccaggaagagtacacaaatttggccaaagttttaagtgaaaaatatgatctggttaggaaaataacaggttggtatggacgactcggaccgatg

SEQ ID NO: 6558 - DNA, 203 bp, synthetic construct
  source 1..203: mol_type = other DNA
ggcgcgccagtcctagagcactaattggagacaaaatgttgttctgcgaggcaaactgggttgattgtaacactcatgattatgaattaagcttttggacatcagcattgatcacaacaaaaagccgaagttatgaacataaaccttgcaaaattcaacctaaagatgagatctttgaagatgccgatcgactcggaccgatg

SEQ ID NO: 6559 - DNA, 203 bp, synthetic construct
  source 1..203: mol_type = other DNA
ggcgcgccagtcctctaataattccaactgttttccagttaatggtgaatggaataataacgtcaattgtctcaataacagtgttcttttgcgggagcatgaagaatacgttggtaactgcaacagacatagtagaagggatcaatcttggacactggaaaaggactgccatggtgacactaatggtgcgactcggaccgatg

SEQ ID NO: 6560 - DNA, 203 bp, synthetic construct
  source 1..203: mol_type = other DNA
ggcgcgccagtcctctctgctggaaatatcaaattggaattggctatgttcacaatggcactctcaccacccaataccacgtcacttgtggccgagatctttggtggaagggtaaaagttactctccagttgaagagaatgttgtctctgactatgcttgttactttggtccgtggtctttcccgaaacgactcggaccgatg

SEQ ID NO: 6561 - DNA, 203 bp, synthetic construct
  source 1..203: mol_type = other DNA
ggcgcgccagtcctgctggcaactccatcgtatttggaggtgaaagtgtccaggtgggtgagaacccttcctttgctcctcacttggacggtaaaattaaacagttgctcaacacaaggggatgctgggaagaatttgttctaaagtgtggagctggaaaaacaagaggtgtaatcaaggatacaatccgactcggaccgatg

SEQ ID NO: 6562 - DNA, 203 bp, synthetic construct
  source 1..203: mol_type = other DNA
ggcgcgccagtcctagagtctttagtggcattaggatgcaatcatcaggagagggttgtgaattgttctcaattttatttggggttcaatgttatggatggatgacttactttgacatgccagcgtcttggatagctttggctcaccaagctttgccgccacaatggagggagactatcaccccaatgcgactcggaccgatg

SEQ ID NO: 6563 - DNA, 203 bp, synthetic construct
  source 1..203: mol_type = other DNA
ggcgcgccagtcctcccatctggcaaattctttttgtggtcttcattacagtcatagttgtggaaacagtttgtggtataacacagagggagaagtcaactggtgaagtcactcaactagtaaccataggtgcagtgatcttcattatctattacatactggctgatggtgaaatactgaccttaatccgactcggaccgatg

SEQ ID NO: 6564 - DNA, 203 bp, synthetic construct
  source 1..203: mol_type = other DNA
ggcgcgccagtcctcctgatttgaacggtaaaaaggtctacaaaaaatttaattgggaaattggagacttatttaaaaagagaattagatgtgacacatttgtcatggacattggagaatctcatcccaatcaagagattgaagccataggagatctaaaaaggttgaattggtttaaagaaaatgtgcgactcggaccgatg

SEQ ID NO: 6565 - DNA, 203 bp, synthetic construct
  source 1..203: mol_type = other DNA
ggcgcgccagtcctgattgtaagaattggtgcattaaaataatggtaccaactcatgaacaggtgctacatgctctcccaaaaggttccacattaattcgaaacccttggagcagaaattctaccttggaaatgtattgtgttccagggtcgaatgaaccagggagaatggttagtaatgtgattaaacgactcggaccgatg

SEQ ID NO: 6566 - DNA, 203 bp, synthetic construct
  source 1..203: mol_type = other DNA
ggcgcgccagtcctccaccccaacctttgggtaactacaaaagtgaatttcaagagaagttcaaatgggttcaacaatggtacaaatcaaaaaacaagcatggtaggatactaactaatgaggaagttatttcaaaatttaagagtgatggtgctctcggctttaggtgccaacattatggatccatacgactcggaccgatg

SEQ ID NO: 6567 - DNA, 203 bp, synthetic construct
  source 1..203: mol_type = other DNA
ggcgcgccagtcctgttcgccactccttggacatggagcgtggttccacaattcacaccaatgagagatcaaattggaaaaagtttctccttgagaaaatggttccagatctaagtaggagaaataatacagctccaaacatgaattggttggttaggaatggaaacaggggtaatcttttagtttaacgactcggaccgatg

SEQ ID NO: 6568 - DNA, 203 bp, synthetic construct
  source 1..203: mol_type = other DNA
ggcgcgccagtcctgcttcacgcacctcgcgtgaccggccagtactcttaccactttccgcctacttggtcgtcagcgctgttttgggcactcctgttgggggctgttcgacgctccacggtctcctccgtactgacatctacggtgttggggccgccacgtgcgagccgctcgcctggtgtgcttcgcgactcggaccgatg

SEQ ID NO: 6569 - DNA, 203 bp, synthetic construct
  source 1..203: mol_type = other DNA
ggcgcgccagtcctactgtcacccgacgcccgcctttcacccccccccccctaggttctaccgtcgttcccgacgtttgaagggaggaaaccacacgcttgcaacaccactcccggtgtcaacgggatgcaaccgcaagatggaccttcgcccggaagtaaaacggcagctttacacagttttgcccgcgactcggaccgatg

SEQ ID NO: 6570 - DNA, 203 bp, synthetic construct
  source 1..203: mol_type = other DNA
ggcgcgccagtcctcggtccactggcgggtgttagtagcagcactgttgtttcgtagcggagcatggtggccgtgggaactcctccttggtgacaagggcccacggggccgaaagccacgtccagacggacccaccatgtgtgcaaccccagcacggcaacttttactgcgaacaccaccttaaggtgcgactcggaccgatg

SEQ ID NO: 6571 - DNA, 203 bp, synthetic construct
  source 1..203: mol_type = other DNA
ggcgcgccagtcctacactggtactggtactcggtcactggtgacaggctaaggatgcccttcaggtaccccgaggtaacacgggacactcgggatctgagaaggggattgggacttctttaaaagtgcccagtttaaaaagcttctacgcctgaataggcgaccggaggccggcgcctttccattaccgactcggaccgatg

SEQ ID NO: 6572 - DNA, 203 bp, synthetic construct
  source 1..203: mol_type = other DNA
ggcgcgccagtcctccactactaaatccatgaatacgactgactgttttatcgctctgctatacgctctcagagagatcaaagcactgtttctgtcacgaacacaagggaagatggaattcacactttacaacggtgaaaagaaggtcttctactccagacccaacaaccacgacaactgttggctgacgactcggaccgatg

SEQ ID NO: 6573 - DNA, 203 bp, synthetic construct
  source 1..203: mol_type = other DNA
ggcgcgccagtcctacgccatcctccaactgttcaggtacgttgacgagcccttcctcgaatgggtctacgactcacctgagaacctcactctcgaggcgatcaacaaactggaagaaatcacaggtcttgagctacacgaggggggaccgcccgcccttgtcgtctggaacatcaagcacttgctctcgactcggaccgatg

SEQ ID NO: 6574 - DNA, 203 bp, synthetic construct
  source 1..203: mol_type = other DNA
ggcgcgccagtcctggacaccaaatccggccgacgttttggtttttgttccgtacgatcaagaaccattcaacgcagaatggaaagcaaaggttcagaagcggctcaggggcgccgggcaatccagcccgacgaccgggtcacaaaaccaatctggcaacactggcagcattattaacaattactacacgactcggaccgatg

SEQ ID NO: 6575 - DNA, 203 bp, synthetic construct
  source 1..203: mol_type = other DNA
ggcgcgccagtcctccgaacggttcttcaaaacccacctgtttgactgggtcaccagtgacccgtttgggcggtgtcacttgttggagctaccgactgaccacaaaggcgtctacggtagcctgaccgactcgtacgcatacatgaggaatggttgggacgttgaagtcaccgcagtgggtaaccaatcgactcggaccgatg

SEQ ID NO: 6576 - DNA, 203 bp, synthetic construct
  source 1..203: mol_type = other DNA
ggcgcgccagtcctagataacacacgggaaagccgacggtgacgccctggtcgtgctagctagtgctggcaaagactttgacttgcgtctgccggtcgacgcccgaacccaaaccacctctgcgggtgagtctgcggaccccgtgactgccaccgtcgagaactacggtggtgagacacaagtccagacgactcggaccgatg

SEQ ID NO: 6577 - DNA, 203 bp, synthetic construct
  source 1..203: mol_type = other DNA
ggcgcgccagtcctggcgccagcacacggacattgcgttcatactggacaggttcgtgaaagtcaagccaaaggaacaagttaatgtgttggacctgatgcagatccctgcccacaccttggtaggggcgctcctgcgaacggccacctactacttctctgacctggagctggccgtcaagcacgaggcgactcggaccgatg

SEQ ID NO: 6578 - DNA, 203 bp, synthetic construct
  source 1..203: mol_type = other DNA
ggcgcgccagtcctgcgatctcacctgggtcccaaacggcgcccctgagacagcactggacaacactaccaacccaacagcttaccacaaggaacccctcacacggctggcgctgccttacacggctccacaccgtgtcttagcgaccgtctacaacgggagcagtaagtacggtgacaccagcactacgactcggaccgatg

SEQ ID NO: 6579 - DNA, 203 bp, synthetic construct
  source 1..203: mol_type = other DNA
ggcgcgccagtcctccatcatgctggccgacaccggcctcgagattctggacagcaccttcgtggtaaagaagatctccgactcgctctccagtctcttccacgtgccggctcccgccttcagtttcggagccccgatcctgttggccgggttggtcaaagtcgcctcgagtttcttccagtccacaccgactcggaccgatg

SEQ ID NO: 6580 - DNA, 203 bp, synthetic construct
  source 1..203: mol_type = other DNA
ggcgcgccagtcctccgaagacctcgagagagcagaaaagcagctcaaagcacgtgacatcaacgacatatttgccgttcttaagaacggtgagtggctggtcaaactgatcctggccatccgcgactggattaaggcatggatcgcctcagaagagaagtttgtcaccatgacagacctggtgcctgcgactcggaccgatg

SEQ ID NO: 6581 - DNA, 203 bp, synthetic construct
  source 1..203: mol_type = other DNA
ggcgcgccagtcctgcatccttgaaagacaacgggatctcaatgaccccggcaaatacaaggaggccaaggaatggctggacaacgcgcgtcaagcgtgtttgaagagcgggaacgtgcacattgccaatctgtgtaaggtggtcgctccggcgcccagcaagtcgagacccgaaccagtggtcgtgtcgactcggaccgatg

SEQ ID NO: 6582 - DNA, 203 bp, synthetic construct
  source 1..203: mol_type = other DNA
ggcgcgccagtcctgccttcgcggcaaatccggccaagggaaaagctttctcgcgaacgttctcgcgcaggcaatttccacacacttcactggtaggaccgactcggtctggtactgcccgcccgaccctgaccactttgacggttacaatcagcagaccgtcgtcgtgatggacgacttgggccaaacgactcggaccgatg

SEQ ID NO: 6583 - DNA, 203 bp, synthetic construct
  source 1..203: mol_type = other DNA
ggcgcgccagtcctacccagacggcaaagacttcaagtactttgcccaaatggtatccaccacggggttcatcccgcctatggcctcgctcgaggataagggtaaacccttcaacagcaaggtcataatagctacaaccaacctgtactcgggattcaccccaaagaccatggtgtgccccgatgcgccgactcggaccgatg

SEQ ID NO: 6584 - DNA, 203 bp, synthetic construct
  source 1..203: mol_type = other DNA
ggcgcgccagtcctttaaccggaggtttcactttgacatcgacgtgagcgccaaagacgggtacaagatcaacaacaaactggacatagtcaaagcacttgaagacacccacgctaacccggtggcgatgttccaatacgactgcgctcttctcaacggaatggccgttgaaatgaagagaatgcagccgactcggaccgatg

SEQ ID NO: 6585 - DNA, 203 bp, synthetic construct
  source 1..203: mol_type = other DNA
ggcgcgccagtcctcgcgcaagaggtaccaatcggtggatgacccactggacggcgacgtaactcttggcgacgcggaaaagaaccctctggagacgagtggcgctagcgctgtcggtttccgagagagatcccccaccgagcaagggacgcgcgaagacgcgaacgctgagcccgtcgtgttcggtacgactcggaccgatg

SEQ ID NO: 6586 - DNA, 203 bp, synthetic construct
  source 1..203: mol_type = other DNA
ggcgcgccagtcctctgcctacctcgtgcctcgtcatctcttcgcggaaaagtacgacaagatcatgttggacggcagagccttgacagacagtgactacagagtgtttgagtttgagattaaagtaaaaggacaggacatgctctcagacgccgctctcatggtgttgcaccgtgggaatcgcgtgccgactcggaccgatg

SEQ ID NO: 6587 - DNA, 203 bp, synthetic construct
  source 1..203: mol_type = other DNA
ggcgcgccagtcctgtgacatcacgaaacactttcgtgacgtagcgagaatgaagaagggaacccccgtcgtcggtgtgatcaacaatgctgacgtcgggagactcatattctctggtgaagcccttacttacaaggacatcgtcgtgtgtatggatggagacaccatgcctgggctctttgcctacacgactcggaccgatg

SEQ ID NO: 6588 - DNA, 203 bp, synthetic construct
  source 1..203: mol_type = other DNA
ggcgcgccagtcctaggggttgatcgtcgacaccagagatgtggaggagcgtgtccacgtgatgcgcaaaaccaagctcgcgcccaccgtggcgcacggtgtgttcaaccctgagttcgggcctgccgctctgtccaacaaggacccgcgcctgaacgaaggggttgtccttgacgatgtcattttctcgactcggaccgatg

SEQ ID NO: 6589 - DNA, 203 bp, synthetic construct
  source 1..203: mol_type = other DNA
ggcgcgccagtcctcgcccggtctcccctgggctctccaagggaaacgccgcggcgccctgatcgacttcgaaaacggcaccgtcgggcctgaggttgaggcagcactcaagctcatggaaagccgcgagtacaaattcgtctgccaaaccttcctgaaggacgaaattcggccgctagaaaaggtaccgactcggaccgatg

SEQ ID NO: 6590 - DNA, 203 bp, synthetic construct
  source 1..203: mol_type = other DNA
ggcgcgccagtcctgcgctggcaagacacgcattgtcgacgtgttgcctgttgaacacattctctacaccagaatgatgattggcagattctgtgctcagatgcattcaaacaagggaccgcaaattggatcagcggtcggttgtaaccctgacgttgattggcaaagatttggcacacatttcgccccgactcggaccgatg

SEQ ID NO: 6591 - DNA, 203 bp, synthetic construct
  source 1..203: mol_type = other DNA
ggcgcgccagtcctttgttgttgaaggtggaatgccgtccggttgttccgcaacaagcatcatcaacacaattttgaacaacatctacgtgctttacgccctgcgtaggcactatgagggagtcgagctggacacttacaccatgatctcttatggagacgacatcgtggtggcaagtgactacgacccgactcggaccgatg

SEQ ID NO: 6592 - DNA, 203 bp, synthetic construct
  source 1..203: mol_type = other DNA
ggcgcgccagtcctctgattgtttccgcaagcatccggaagccacatactctcggtgcggctccggtccctggattacacccaggtgcatggtcgactacccgtataggctttggcactatccttgtaccatcaattacaccatattcaaagtcaggatgtacgtgggaggggtcgagcacaggctggcgactcggaccgatg

SEQ ID NO: 6593 - DNA, 203 bp, synthetic construct
  source 1..203: mol_type = other DNA
ggcgcgccagtcctggattgtcttgtccgggaagccggcaattatacctgacagggaggttctctaccaggagttcgatgagatggaagagtgctctcagcacttaccgtacatcgagcaagggatgatgctcgctgagcagttcaagcagaaggccctcggcctcctgcagaccgcgtcccgccaagcgactcggaccgatg

SEQ ID NO: 6594 - DNA, 203 bp, synthetic construct
  source 1..203: mol_type = other DNA
ggcgcgccagtcctttttttttttttttccttttttttttttttttttttctttccttcttttttcctttcttttccttccttctttaatggtggctccatcttagccctagtcacggctagctgtgaaaggtccgtgagccgcatgactgcagagagtgctgatactggcctctctgcagatcatgtcgactcggaccgatg

SEQ ID NO: 6595 - DNA, 203 bp, synthetic construct
  source 1..203: mol_type = other DNA
ggcgcgccagtcctaatgcagtattgggtagaaagaaacaaaggtctgccaagacggtgtgggttctcttcagcatgttggctttgatggtggccatggagattgagcaacagggcacgtcattagtcattaagcctcaaaggagtgatgttggacggccagttcgagttagcacaggctactgcatgcgactcggaccgatg

SEQ ID NO: 6596 - DNA, 203 bp, synthetic construct
  source 1..203: mol_type = other DNA
ggcgcgccagtcctttctccgctatggacattgggataacgtgtgagaaaaccatacagtatgagtgtgttactttaaccacatctgaagagccgtttgatgttgattgttactgtaggaatgtcacaaatgtgttggttgagtattcaacgtgcaatccaacagtggaacgtgcaaaaaggtctctgcgactcggaccgatg

SEQ ID NO: 6597 - DNA, 203 bp, synthetic construct
  source 1..203: mol_type = other DNA
ggcgcgccagtcctgtgatccaagatcacccacactctgaaactgtggctaaaccaacactgtggctgaaatggaatacagttaatgatcgagtgggcatgactgaggaatgggtgatgagaaatacctggaaggcaacaattcttaccctggctattatagctgtcactggactcaactggaaaggacgactcggaccgatg

SEQ ID NO: 6598 - DNA, 203 bp, synthetic construct
  source 1..203: mol_type = other DNA
ggcgcgccagtcctcctggagggcatgttgattgccgagttagcctagtgaacctgaagctaaagggaacaacttacccttattgtggtgactcattcgtttggaagcggcgccctacggctacccatcatggtacagttgcaatggaagtcacctaccaaggaactgatgttccgtgcaaggtatctcgactcggaccgatg

SEQ ID NO: 6599 - DNA, 203 bp, synthetic construct
  source 1..203: mol_type = other DNA
ggcgcgccagtcctgttatcgtggaaaaagatggacagaacggaggtaatgcaggaagtttgattacatcaaatccaatcatcacagcacaagggtcatcagtgttcttagaactggaggttccactgggtttttccactattaaggttggtgcagcaaaacagcaatggagacaggatggcagttcacgactcggaccgatg

SEQ ID NO: 6600 - DNA, 203 bp, synthetic construct
  source 1..203: mol_type = other DNA
ggcgcgccagtcctgaaatcaatgacttcaagcatggttacaagtattatcctgaggacccagaaacattcctggcaagtttggttcaagacggtgaaaaacactgtgggtatcaaccttcaaacctgatagagttgcgaatgtggcagtctctagaaaaggaattgaacctttacttggaagaccagcgactcggaccgatg

SEQ ID NO: 6601 - DNA, 203 bp, synthetic construct
  source 1..203: mol_type = other DNA
ggcgcgccagtcctatgattgtgcatggctctccttggatgtggatggagagctatgaagtgaatggaactgtgcaactacaaaagttgactctcacccacacagttgaatgtctctggccaattacacacactcttggaaacagaatggttttggactccaaattgatattgccaaaagaaatgggacgactcggaccgatg

SEQ ID NO: 6602 - DNA, 203 bp, synthetic construct
  source 1..203: mol_type = other DNA
ggcgcgccagtcctggtccagcttctatcttgaatatggttgaaggctattcagaacaaaacaagtgtccctggaatcaaggtcctgtgacagtggaaagaggttattgtgaagggactgaagttgagatatccgaagactgtgaagaaaggggaccttgtacgaggtcaaaaacccaaggaggaacacgactcggaccgatg

SEQ ID NO: 6603 - DNA, 203 bp, synthetic construct
  source 1..203: mol_type = other DNA
ggcgcgccagtcctctggttctttactacctaggcattctaacaaagattgaaaaagggaattggggaccttccttgattgtcacaatctccatcatgatgtggttacatatcatcgatgtaactgaattgttgcattacttgttggctgttggttacacatttgtctggcaaacatctgagcccatgcgactcggaccgatg

SEQ ID NO: 6604 - DNA, 203 bp, synthetic construct
  source 1..203: mol_type = other DNA
ggcgcgccagtcctctgtggattgtggccatgcaagctatttttcagttgagacctgggtttgctgtagggttcgccctgtgcaaaacctggaggtttgaacggattgtcggcatggttgcttgcatgtggacaattcaagagttaacaactccatatgaagccttttggagatttatggatgcactgcgactcggaccgatg

SEQ ID NO: 6605 - DNA, 203 bp, synthetic construct
  source 1..203: mol_type = other DNA
ggcgcgccagtcctggcttgcttgtgtatgcttactcagcctcccactcaacacgacagagttatctctatgtcgtcttgatgctatcactcaccaaaattcagaatgcgacaatcagactggctgttggaatgtttggtaccatgctactaatgttagtaggaaggaagtttgctgagagtgattggcgactcggaccgatg

SEQ ID NO: 6606 - DNA, 203 bp, synthetic construct
  source 1..203: mol_type = other DNA
ggcgcgccagtcctaatacagatccttggataattggagttatggcattggtccttcttttctttctttttcaggttagttctggagagatggtagcagagtgggctgggtaccacgagtggaaaaaggactgtcctaagtctgttggttctataagtcttgaagtgaagagaatggctgatggcagacgactcggaccgatg

SEQ ID NO: 6607 - DNA, 203 bp, synthetic construct
  source 1..203: mol_type = other DNA
ggcgcgccagtcctgtgagttttcattcatcagctgtgtcaagtaaaacacctggaagtctgattgatgtgatgtgtcatgccacatttgttaaccgcaaattaatccatatgcctcaaaagaactatgaacttatcatcatggatgaagcacattggacggacccatccagcatagcggctaggggacgactcggaccgatg

SEQ ID NO: 6608 - DNA, 203 bp, synthetic construct
  source 1..203: mol_type = other DNA
ggcgcgccagtcctaggaccgcctggtttgttccctcccagaatgctgcgcaagggattgcgaaaaccttaagggagcatgggaagaaagttgctatcttgacaagtaaaacctttcatgatgtgtatccaaaattgaaaactgaaaagcctgattttattttgacaacagacatttctgaaatgggtcgactcggaccgatg

SEQ ID NO: 6609 - DNA, 203 bp, synthetic construct
  source 1..203: mol_type = other DNA
ggcgcgccagtcctgctcccgtgtggctggacaccagactaaccagagaaaggaaagatttggctgggttcatagaatatgctgagaagaggagaagtagtgttttaacagccatcccaggactgctttatagtaggttcttgtcagcctttgacaccatttacatctactccacttctgatccatctcgactcggaccgatg

SEQ ID NO: 6610 - DNA, 203 bp, synthetic construct
  source 1..203: mol_type = other DNA
ggcgcgccagtccttggattggaggagctcctttgagtctggttgcagcactggttttgatatcatttattttgcttgtgtgcttaataccagagcagggaatgcagaggacccaaatagacaccacattggctacactggttttggctattgtgacatttggcttacttgtgtttgccaatgagatgcgactcggaccgatg

SEQ ID NO: 6611 - DNA, 203 bp, synthetic construct
  source 1..203: mol_type = other DNA
ggcgcgccagtcctagatggcttgaaaacacaaagaaagatttgtttggccagcctcaaactagtcctagtgtgaatactggaggaatcatccaggatctccttcagcttgatattagaccaatgaatgtgtggggaacctatgttgcactggtgacggttgctcggccacaagcgctccataatctacgactcggaccgatg

SEQ ID NO: 6612 - DNA, 203 bp, synthetic construct
  source 1..203: mol_type = other DNA
ggcgcgccagtcctaaaatgttcactaagaagatagtgtcgggagtggtcgcaggaaaggagagtgcaatggaaagactcccgaccggtggagcttggatgaatctcaggatgggtgacctcactcttctggcaacaaccttgaagggaatgacctgtttcaatctattgggaggtttaacctttgctcgactcggaccgatg

SEQ ID NO: 6613 - DNA, 203 bp, synthetic construct
  source 1..203: mol_type = other DNA
ggcgcgccagtccttggttgaatgagatgcaaaaaattaggaaggacattgacctgtggaaaccttcagcaggtcattgcaactgggaggaagtagagttctgttccaaccactttcacaagcttgttatgagagatgggagaaccttggttgttccttgcagacatgaagttgagcttgtggggcgtcgactcggaccgatg

SEQ ID NO: 6614 - DNA, 203 bp, synthetic construct
  source 1..203: mol_type = other DNA
ggcgcgccagtcctgccagcgtcaaccagggtggttcaacagggatttctgggactgcttgtttagctaaggcatatgcacaaatgtggctgcttctttacttccacaggagagatctcagaattttgggaatggcaatttgttcagcagttccagccaactgggttccaacaggacgaacgacctggcgactcggaccgatg

SEQ ID NO: 6615 - DNA, 203 bp, synthetic construct
  source 1..203: mol_type = other DNA
ggcgcgccagtcctactaatggaaaaaatgcgagtgagggcaactctgggattagctcaatgggtgtgacgaccctacccttccgcatttgtaaataattgagccagtcatttccgtagggaagagagttattcgctcctctcgagattgagcggcctgctccttggagcatgagatgggaggcccgacgactcggaccgatg

SEQ ID NO: 6616 - DNA, 203 bp, synthetic construct
  source 1..203: mol_type = other DNA
ggcgcgccagtcctagcaaagctgaaaggactagcggttagaggagaccccttccatctctggtatcaaatttcatggagtttactccatggtggctagaacccatagcgggggtgaaccacattggctaaggttcaccagcttttgctcccgcgtttttcaaattgcctcatcttgaatggggggcgcgactcggaccgatg

SEQ ID NO: 6617 - DNA, 203 bp, synthetic construct
  source 1..203: mol_type = other DNA
ggcgcgccagtcctacacctataatcttattatgtgtaggtgccttaatatttaccaaactagcatcaactatagaagtgggattagagaccacagtcagaagagctaaccgtgtactaagtgatgcactcaaaagataccctaggatggacataccaaaaatcgctagatctttctatgatttatttcgactcggaccgatg

SEQ ID NO: 6618 - DNA, 203 bp, synthetic construct
  source 1..203: mol_type = other DNA
ggcgcgccagtcctggcttaggcataataggtatgtatcgcgggagagtgccaaacacagaactattttcagcagcagaaagctatgccaagagtttgaaagaaagcaataaaattaacttttcttcattaggactcacagatgaagaaaaagaggctgcagaacactttctaaatgtgagtgacgaccgactcggaccgatg

SEQ ID NO: 6619 - DNA, 203 bp, synthetic construct
  source 1..203: mol_type = other DNA
ggcgcgccagtcctgattatgaccatgaacaatcccaaaggcatattcaagaagcttggagctgggacccaagttatagtagaactaggagcatatgtccaggctgaaagcataagtaaaatatgcaagacttggagccatcaaggaacaagatatgtgctgaagtccagataacagccaagcaacctcgactcggaccgatg

SEQ ID NO: 6620 - DNA, 203 bp, synthetic construct
  source 1..203: mol_type = other DNA
ggcgcgccagtcctctcaaaacagtctctgctgaccaattggcaagagaggaacaaattgagaatcccagacaatctaggtttgttctaggagcaatagcactcggtgttgcaacagcagctgcagtcacagcaggtgttgcaattgccaaaaccatccggcttgagagtgaagtcacagcaattaagcgactcggaccgatg

SEQ ID NO: 6621 - DNA, 203 bp, synthetic construct
  source 1..203: mol_type = other DNA
ggcgcgccagtcctaacagaaggtttctaaatgttgtgcggcaattttcagacaatgctggaataacaccagcaatatctttggacttaatgacagatgctgaactagccagggccgtttctaacatgccgacatctgcaggacaaataaaattgatgttggagaaccgtgcgatggtgcgaagaaagcgactcggaccgatg

SEQ ID NO: 6622 - DNA, 203 bp, synthetic construct
  source 1..203: mol_type = other DNA
ggcgcgccagtcctagtatggttgcactgtctcctcttggggctctggttgcttgctacaaaggagtaagctgttccattggcagcaacagagtagggatcatcaagcagctgaacaagggttgctcctatataaccaaccaagatgcagacacagtgacaatagacaacactgtatatcagctaagccgactcggaccgatg

SEQ ID NO: 6623 - DNA, 203 bp, synthetic construct
  source 1..203: mol_type = other DNA
ggcgcgccagtcctaaaataaaatttgggacaaatcataatgtctcgcaaggctccatgcaaatatgaagtgcggggcaaatgcaacagaggaagtgagtgtaagtttaaccacaattactggagttggccagatagatacttattaataagatcaaactatctattaaatcagcttttaaggaacaccgactcggaccgatg

SEQ ID NO: 6624 - DNA, 203 bp, synthetic construct
  source 1..203: mol_type = other DNA
ggcgcgccagtcctggaagggctagggttgagaagtaatctgcaaggtatgttaactaataaactatatgaaactgtagattatatgctaagcttatgttgcaatgaaggtttctcacttgtgaaagagttcgaaggttttattatgagtgagatccttaggattactgaacatgctcaattcagtaccgactcggaccgatg

SEQ ID NO: 6625 - DNA, 203 bp, synthetic construct
  source 1..203: mol_type = other DNA
ggcgcgccagtcctagaagagcaaagtggtctatatagatatcacatgggcggtattgaaggatggtgtcaaaaactctggacaatggaagctatatctttattggatgttgtatctgtaaagacacggtgtcaaatgacatctttattaaacggtgacaaccaatcaatagatgtaagtaaaccagtcgactcggaccgatg

SEQ ID NO: 6626 - DNA, 203 bp, synthetic construct
  source 1..203: mol_type = other DNA
ggcgcgccagtcctcaagttatctgaaggtttagatgaagtgaaggcagattatcgcttagcagtaaaaatgctaaaagaaataagagatgcatacagaaatataggccataaacttaaagaaggggaaacatatatatcaagggatcttcagtttataagcaaggtgattcaatctgaaggagtgatcgactcggaccgatg

SEQ ID NO: 6627 - DNA, 203 bp, synthetic construct
  source 1..203: mol_type = other DNA
ggcgcgccagtcctagctgttggatcagaacgacaagcaaaagtaacaagtgacatcaatagaacagcagttaccagtatcttaagtctttccccaaatcaacttttcagtgatagtgctatacactacagcagaaatgaagaagaagtgggaatcattgcagaaaacataacacctgtttatcctcacgactcggaccgatg

SEQ ID NO: 6628 - DNA, 203 bp, synthetic construct
  source 1..203: mol_type = other DNA
ggcgcgccagtcctaatgagatgggtgtataaagggacaccaggcttgcgacgattactcaacaagatctgtcttgggagtttaggcattagctacaaatgtgtaaaacctttattacctaggtttatgagtgtaaatttcttacatagattatctgtcagtagtagacctatggaattcccagcatccgactcggaccgatg

SEQ ID NO: 6629 - DNA, 203 bp, synthetic construct
  source 1..203: mol_type = other DNA
ggcgcgccagtcctggacttcaaaatattcctatgtgtctttaaaactaaacttttatgtagttggggatctcaagggaaaaacattaaagatgaagatatagtagatgaatcaatagataaattgttaaggattgacaatactttttggagaatgttcagcaaagttatgtttgaaccaaaggttaacgactcggaccgatg

SEQ ID NO: 6630 - DNA, 203 bp, synthetic construct
  source 1..203: mol_type = other DNA
ggcgcgccagtccttatgaaagacctaaatcctaaagttttgtactttattggagaaggagcaggaaattggatggccagaacagcatgtgaatatcctgatattaaatttgtatatagaagtctgaaagatgaccttgatcatcattatcctctggaataccagagagtgataggtgaattaagcagcgactcggaccgatg

SEQ ID NO: 6631 - DNA, 203 bp, synthetic construct
  source 1..203: mol_type = other DNA
ggcgcgccagtcctttataatcctagagtgccaaggagttgcgtgtcatcattgattgggaagatcaaggaaacaatttgttccaataatatcgtacatcttgactaagtcgaacaaggggaagtcgatatggatcgtgggaccagaagaatctgggtgtcgcaaaatcaaggtgatactgatttagacgactcggaccgatg

SEQ ID NO: 6632 - DNA, 203 bp, synthetic construct
  source 1..203: mol_type = other DNA
ggcgcgccagtcctactgcctgaagaggagactacagaagcaaatgcagggcaatttctctcatttgcgagtttgtttcttcccaaactggttgtgggagagaaggcttgcttggaaaaagtccagcgacaaattcaggttcatgcagaacagggtttaattcaatatcccactgcatggcaatcagtcgactcggaccgatg

SEQ ID NO: 6633 - DNA, 203 bp, synthetic construct
  source 1..203: mol_type = other DNA
ggcgcgccagtccttggacacatgatggtaatcttcagattgatgaggactaatttcttgattaaatatttactgatccaccagggtatgcatatggtagctggccacgatgccaatgatgctgtcattgctaattcagttgctcaggctcgcttttcaggactcctaattgtcaaaaccgttcttgacgactcggaccgatg

SEQ ID NO: 6634 - DNA, 203 bp, synthetic construct
  source 1..203: mol_type = other DNA
ggcgcgccagtccttcatattctgcaaaaaaccgaccaaggagtaagacttcaccctttggcccgaacagccaaagtgcgtaatgaggttaatgcatttaaggccgccctaagctcacttgctaagcatggggaatatgccccttttgctcgccttctcaatctctcgggagttaacaacctagaacacgactcggaccgatg

SEQ ID NO: 6635 - DNA, 203 bp, synthetic construct
  source 1..203: mol_type = other DNA
ggcgcgccagtcctaataccgttccctgggcctataagcaacaacccagaccaagatcatctggaggatgatcctagagactccagagacaccatcattcctaatggtgcaattgaccccgaggatggtgattttgaaaattacaatggctatcatgatgatgaagttgggacggcaggtgacttggtcgactcggaccgatg

SEQ ID NO: 6636 - DNA, 203 bp, synthetic construct
  source 1..203: mol_type = other DNA
ggcgcgccagtcctacaaggaggtcaatacaactggcaccgaggcccagaacgtacgaccgccaatcgaagactctcaccagtgcacgaagaggacacccttatggatcaaggtgatgatgatccctcaagcttacctccgctggaatctgatgatgacgatgcatcaagtagccaacaagatcccgacgactcggaccgatg

SEQ ID NO: 6637 - DNA, 203 bp, synthetic construct
  source 1..203: mol_type = other DNA
ggcgcgccagtcctgaatgcgcttaaaggaaaaatcgatgatccaaacagctatgtaccagatgctgtgcaagaggcttacaagaaccttgacagtacatcgaccctgaccgaggaaaattttgggaaaccttatatatctgctaaagacctgaaggagatcatgtatgatcatctacctggttttggcgactcggaccgatg

SEQ ID NO: 6638 - DNA, 203 bp, synthetic construct
  source 1..203: mol_type = other DNA
ggcgcgccagtcctctgcaacctggacagacgaaactccagcaggagcagtcaatgctcttcgtcctgggctctcactccatcccaagcttcgtccaattctcctgccggggaagacaggaaagaaaggacatgcttcagacttaacatcacctgacaagattcaaacaatcatgaatgcaataccggcgactcggaccgatg

SEQ ID NO: 6639 - DNA, 203 bp, synthetic construct
  source 1..203: mol_type = other DNA
ggcgcgccagtcctgaattgcaaccgatgtcccatcagcaacaaaacgctggggatttcgttcaggtgtgcctcccaaggtggtcagctatgaagccggagaatgggcagaaaattgctacaatctggagatcaaaaagtcagacggaagtgaatgcctccctctccctcccgacggtgtacgaggatcgactcggaccgatg

SEQ ID NO: 6640 - DNA, 203 bp, synthetic construct
  source 1..203: mol_type = other DNA
ggcgcgccagtcctgcatttccaaattccatcaacccacaccaacaactcctcagatcagagcccggcgggaactgtccaaggaaaaattagctaccacccacccgccaacaactccgagctggttccaacggattcccctccagtggtttcagtgctcactgcaggacggacagaggaaatgtcgaccgactcggaccgatg

SEQ ID NO: 6641 - DNA, 203 bp, synthetic construct
  source 1..203: mol_type = other DNA
ggcgcgccagtcctccaaggtctaaccaacggagagacaatcacaggtttcaccgcgaacccaatgacaaccaccattgccccaagtccaaccatgacaagcgaggttgataacaatgtaccaagtgaacagccgaacaacacagcatccattgaagactcccccccatcggcaagcaacgagacaatcgactcggaccgatg

SEQ ID NO: 6642 - DNA, 203 bp, synthetic construct
  source 1..203: mol_type = other DNA
ggcgcgccagtcctttaccactccgagatggatccgatccaaggctcgaacaactccgcccagagcccacagaccaagaccacgccagcacccacaacatccccgatgacccaggacccgcaagagacggccaacagcagcaaaccaggaaccagcccaggaagcgcagccggaccaagtcagcccggcgactcggaccgatg

SEQ ID NO: 6643 - DNA, 203 bp, synthetic construct
  source 1..203: mol_type = other DNA
ggcgcgccagtcctgtcttctatgtgagacccacctacggcatgagggcctcggacaggaccaagctgattctgtattagaggtctaccaaagactccacagtgataaaggagggaattttgaggctgccctgtggcaacaatgggaccgacagtcattaataatgttcatctctgcttttctcaacacgactcggaccgatg

SEQ ID NO: 6644 - DNA, 203 bp, synthetic construct
  source 1..203: mol_type = other DNA
ggcgcgccagtcctcagtcaccaggctgttctcagtagtctgtccttggaagctcttggggagacaaaaagaggtcccagagagtcccaacaggttggcataaggtcattaacaccagcatagtcggctcgaccaagactgtaagcgagtcgatttcaactaaaaagattatttcttgttgtttaaaccgactcggaccgatg

SEQ ID NO: 6645 - DNA, 203 bp, synthetic construct
  source 1..203: mol_type = other DNA
ggcgcgccagtccttttgatgtaagtcaaaaaggcatggctcttctgacaagactcaaaacaaatgactttgctcctgcctgggcgatgacaagaaatcttttcccacatctgttccagaacccaaattcggttattcaatctcccatctgggctttgagggtaattttggcagccggattgcaggatcgactcggaccgatg

SEQ ID NO: 6646 - DNA, 203 bp, synthetic construct
  source 1..203: mol_type = other DNA
ggcgcgccagtcctctattttcgctaattgcattgagcactgctaataggtttgtatcacgttaaagatttagagtgtatgaattgtgcagatttaaacttgggttttgccttatgcttcataggtggtctttttgaaatggagattatcagcatttcttaaatgggaggagttagcaatcagaaattcgactcggaccgatg

SEQ ID NO: 6647 - DNA, 203 bp, synthetic construct
  source 1..203: mol_type = other DNA
ggcgcgccagtcctggagataaatggacatcgggatagaacaatgcctaactattgggcggcttccatttttacatgtgtatataaccaatcttttcctatctttgcttatattggtgtaactttattttaataacatgtcaatgctatactgttaagagaaggtctgaggaagattaagaaaaaggccgactcggaccgatg

SEQ ID NO: 6648 - DNA, 203 bp, synthetic construct
  source 1..203: mol_type = other DNA
ggcgcgccagtcctcttgcaatcaattccttgatgaaattattaattacactcttcatgatgcagcctttcttgattactatctcaaggcaacaggtgcacaggaccatttgacaaacattgcaactagagagaagcttaaaaacgaaattctaaacaatgattatgtccatcaattgttcttctggccgactcggaccgatg

SEQ ID NO: 6649 - DNA, 203 bp, synthetic construct
  source 1..203: mol_type = other DNA
ggcgcgccagtcctatgtgctaggttacaatcctccaaacaaattctccactaaaagggtgccggaacaatttctagaacaagaggatttttcaatcgaaagtgtcctgaattatgcacaggaattacattatttattaccacagaataggaatttttccttttctctcaaagaaaaggaattaaatacgactcggaccgatg

SEQ ID NO: 6650 - DNA, 203 bp, synthetic construct
  source 1..203: mol_type = other DNA
ggcgcgccagtcctttaagttacgatcagcggtcatgggagacaatcagtgtataaccgtattgtctgtttttccacttaaaacagaccctgaagagcaggagcaaagcgccgaagacaatgctgcaagagtagcagcaagtcttgcaaaagtaaccagtgcatgtgggatctttcttaaaccagatgcgactcggaccgatg

SEQ ID NO: 6651 - DNA, 203 bp, synthetic construct
  source 1..203: mol_type = other DNA
ggcgcgccagtcctcaaaccctgtcatgagtcgctttgcagcggatattttttccaggacaccgagtggtaaacgtctccaaatattaggttatcttgaagggaccaggactctattggcctccaaaatcataaacaacaacagtgagacacctgtacttgataagctgaggaagatcaccctacaaacgactcggaccgatg

SEQ ID NO: 6652 - DNA, 203 bp, synthetic construct
  source 1..203: mol_type = other DNA
ggcgcgccagtcctcgcagtatctcaaggtggtggtactcaaagtatttctgagtgatatagaaggaatattatggattaatgattacttggctccattattcggggctggttacttgattaaaccgattacatcaagtgcccggtcaagtgaatggtacctttgcttatcaaatttgatatctactacgactcggaccgatg

SEQ ID NO: 6653 - DNA, 203 bp, synthetic construct
  source 1..203: mol_type = other DNA
ggcgcgccagtcctacaggagatcggcccatcagactcacaaggcatgtcttggtgttatcagagatgctttgcaagcacaagtccagcgaggcgtgtactggttgagtcacatcgcacagtatgctacaaagaatctccattgtgaatacataggccttggtttcccatctctagaaaaggtcctatcgactcggaccgatg

SEQ ID NO: 6654 - DNA, 203 bp, synthetic construct
  source 1..203: mol_type = other DNA
ggcgcgccagtcctatcacaggtataatctagttgatactggactcggtccattgtcgtcagttattagacatttaactaacctccaggcagagatacgagacttagtattagattataacctgatgagggagagtcgcactcaaacgtaccattttattaagactgcaaaaggcagaatcacaaagtcgactcggaccgatg

SEQ ID NO: 6655 - DNA, 203 bp, synthetic construct
  source 1..203: mol_type = other DNA
ggcgcgccagtccttaacatagactgaaaatgctaagaagagattggagtaaaagtataaaataaatttaattaaacttcaaagtgattaaatgataatgatcttgggaactcgatatgacctcaagtcaaaaataatgtcaatataattgtttagtaatatgagtgataatgtaaattttgataactcgactcggaccgatg

SEQ ID NO: 6656 - DNA, 203 bp, synthetic construct
  source 1..203: mol_type = other DNA
ggcgcgccagtcctgcaccagtgtaccgatagcagtaagaaacgagctattcaaaagatttgtgtcttaattagtaatgatctaaaggagaatggattattagaagaggctaaaacattcaaaccagagtataaatcaatcgcccaagtatatggtaaattcttcaaacgatacatcgccgaaaaggacgactcggaccgatg

SEQ ID NO: 6657 - DNA, 203 bp, synthetic construct
  source 1..203: mol_type = other DNA
ggcgcgccagtccttgattacattgagtgtttgagccatcatttaacatcaactgttgacattgacgttcaccagcaagattgtggtaatttaagcgttgtaatatttgcaaaagataataacattaagaaacagctgcagattcaggtatccgcttgagtggccatggagccgtcggtaattttatgcgactcggaccgatg

SEQ ID NO: 6658 - DNA, 203 bp, synthetic construct
  source 1..203: mol_type = other DNA
ggcgcgccagtcctgcgtatctgttgacagaacatcaaattgaacagattaaacagaacagtgttgaccctaacaatacaccaaagattgaagtgaggagtcagttctaactgtttactttgcaggagaggaggtaccgagttctgggactcacgtccatcgccactttacttggttacaacctcacgcgactcggaccgatg

SEQ ID NO: 6659 - DNA, 203 bp, synthetic construct
  source 1..203: mol_type = other DNA
ggcgcgccagtcctacggtgtgacaaggtgaagcatgacccatcttcgtgtgctaatggtgtgtgctgctaatcgctggactgccggagggaaaccggcacaaggcgtggccgccactggccgttgatgatcatgtggaactgagctttgctcaggccgactcacattaagtataatttagaactgaccgactcggaccgatg

SEQ ID NO: 6660 - DNA, 203 bp, synthetic construct
  source 1..203: mol_type = other DNA
ggcgcgccagtcctaagctttgctgacactaagagctaatgactctggaaattgagcttcgaaaggtaccgggcaaccatgctttccgaggggctcttgggactggaaagtagaggatcccgctgggatgtcaaccaccctctaccaacggtgtcggagtgctcccttaataggacaatttgactgaccgactcggaccgatg

SEQ ID NO: 6661 - DNA, 203 bp, synthetic construct
  source 1..203: mol_type = other DNA
ggcgcgccagtccttaacgtcactttcaactactgcttcagcagttaactcgtttgcttattcttactgtaatgttccagtggagagttgggattttaacatgattaaactgactgctgaaactagttgtgcttcacttactgcaatgactaatttggttaatacattagtgcctgatgatagggttacgactcggaccgatg

SEQ ID NO: 6662 - DNA, 203 bp, synthetic construct
  source 1..203: mol_type = other DNA
ggcgcgccagtcctgtattccattctagtaatcaacacttgttacacggtgatgcaaatcctgataatatcatgagtgatagtgaaggttacttgaaattggttgacccagtttgcttgcttgaaaatcaagtgaatatggtaaatatagagtacgaatcgttaacccaagaagctgagaagaaagtacgactcggaccgatg

SEQ ID NO: 6663 - DNA, 203 bp, synthetic construct
  source 1..203: mol_type = other DNA
ggcgcgccagtcctaatcatcgaccaatgatgcctgagctatcagtgcttaatgatttaacttactatgatactggtgaagtgagagatttggttaccgaagatctagatgatgaagatgacgtttaataacacaatatatatattcattgagactaaggaaactcttaacacagatgtacgacctgccgactcggaccgatg

SEQ ID NO: 6664 - DNA, 203 bp, synthetic construct
  source 1..203: mol_type = other DNA
ggcgcgccagtcctatttggatccaaacatatcagaggtcaaactgtggttggaatatttcatagggagtgaagatttcttcgggttcaatggaccaaatgtggttgtgtcaaagtctttgttagctgccaaacgttttgaagttgttgttaatcacttaaggaaggttgcagcttttgaattggatgcgactcggaccgatg

SEQ ID NO: 6665 - DNA, 203 bp, synthetic construct
  source 1..203: mol_type = other DNA
ggcgcgccagtcctatgagtctaaagaagtgatgactgaatggcttaaatacataatgatcgatccagtttatagatcatataaaaatagaggtgcttttggtaatctgaatcaacatgtgtttgcaaggactaagagtgagggattgtcatggtctcttattgacattggtacgacaaattttgaatcgactcggaccgatg

SEQ ID NO: 6666 - DNA, 203 bp, synthetic construct
  source 1..203: mol_type = other DNA
ggcgcgccagtccttaaagccgactaagaaactagctggctcatacgttaagaaattcaacttagttgatgatgtgctggttgaggaatcgttgaaagatttgcgtaatgagggtctatacaagatggctgatataacacgtaggatgattgatgctgatataacgcctgaaaacgtgaagaagggaacgactcggaccgatg

SEQ ID NO: 6667 - DNA, 203 bp, synthetic construct
  source 1..203: mol_type = other DNA
ggcgcgccagtcctctcatgggtcaagaaaaattaatagattggacatattattcaagggtggtacatcatctgccagtagtacaaacgaacatgctactgttaacggtaggttcagatacaggtcggagttatatcgggaacgtgatgtaaattcgtcgacagtattcaagacagcaacagctggaccgactcggaccgatg

SEQ ID NO: 6668 - DNA, 203 bp, synthetic construct
  source 1..203: mol_type = other DNA
ggcgcgccagtcctgaacaatttatgcagcttcattgatgacagtgcttccggctgttaggttattaagttcaagggctagtaacatgggagctttgagtactcaaggaagtctcgtagaccgtgcaccacatgatgtgatggctcctcaattggctgtgacttccagtgatgacgtctcaaaggtttcgactcggaccgatg

SEQ ID NO: 6669 - DNA, 203 bp, synthetic construct
  source 1..203: mol_type = other DNA
ggcgcgccagtcctgtctaatgcctgagtattgtgagaaacatttgaatgaattagtgtacaagacgttagatgataaggtcattcgcgactatacatctgatatcattatttctaatatttgtaaaggtaagttaagtaaagcgccaaaactagcattttatgctaatttctatctttcattgactacgactcggaccgatg

SEQ ID NO: 6670 - DNA, 203 bp, synthetic construct
  source 1..203: mol_type = other DNA
ggcgcgccagtcctcttacgatatctctgatcgtacgtatcctaagtttgttaacataacatccagcttgtcaaacagtaatagacgtggttttcagattgaagctatgaagcatgttatatatatggctagacgtggtgtggctgtactcgccaacacacatccaacaaaaattggaaatactgtatcgactcggaccgatg

SEQ ID NO: 6671 - DNA, 203 bp, synthetic construct
  source 1..203: mol_type = other DNA
ggcgcgccagtcctgcgattcaacctgatactgctactgcacaactgatcaaaacatattcaaacccaaaacagcgtggagataagggagaaattgtttacgatggagggcagagctctaagcttgccgaggttgttgatcagaccactgagccgcacaatgcagatggagctgtaaaggatgggaggcgactcggaccgatg

SEQ ID NO: 6672 - DNA, 203 bp, synthetic construct
  source 1..203: mol_type = other DNA
ggcgcgccagtcctatagctccagtgaagttagatttagagaagcaaaaacttgataaattaaagttatttgaagcatcacctttcgaccctttgacagtgaagaataatcaagatgttgtggacaagttgtacgctactcagtcatcatcaattcaagaagttgtgccgacgaagacttttgccacacgactcggaccgatg

SEQ ID NO: 6673 - DNA, 203 bp, synthetic construct
  source 1..203: mol_type = other DNA
ggcgcgccagtccttcattgttgccattagtcgacgcgaatttgaaggaggcatcctcatattacttcaaaaaattgatgccaagcattagcaatgttccagttgacgctcgtactttgcaatcagctacatctgccttggccgctgatacaggtctcgtagaccgtgcaccacatgtttctatgctgcgactcggaccgatg

SEQ ID NO: 6674 - DNA, 203 bp, synthetic construct
  source 1..203: mol_type = other DNA
ggcgcgccagtcctaagacgagtgctaactggaaagggtatagcatattagtatcacggtacagaagcctaattcctaatgaactatttgagtcccttagaaacattagcggtgaatacaacattaatccgcaagatgagcactctttcttctttgccttagcacagataaatgctgatgaagaattccgactcggaccgatg

SEQ ID NO: 6675 - DNA, 203 bp, synthetic construct
  source 1..203: mol_type = other DNA
ggcgcgccagtcctgctgacaagccattaatctctgagactatgttaaagatattgactattgatggaactacagggaaagatgggtacaggaactggttggataagctagttggtcataattacccggtttatgttgaaccggttgtcaacatcgtgaatttcattagtgcacgcttcatagctgaccgactcggaccgatg

SEQ ID NO: 6676 - DNA, 203 bp, synthetic construct
  source 1..203: mol_type = other DNA
ggcgcgccagtcctatgagagcgcaacatgagtatgtaagtccaagctcatcaagagtgtatattaaagacccagctgtagtgtacacgcgatcctaagattgtgatgtgattagatgtggtggaatactatcttacgcttcataggtgtggttgccgacgttgcgtagtggacaaatagaacccgaccgactcggaccgatg

SEQ ID NO: 6677 - DNA, 203 bp, synthetic construct
  source 1..203: mol_type = other DNA
ggcgcgccagtcctatcatgcaaacttatcaggtaaatgtttgatgctgtataacagcgagaaggatatcttcgaagggttgggatttaaggttaagggttcaagaatcaatgtttcaaaaactcagatcttgcgcaattatgagattaactttgaaaccattatcggtgtcgaaccgaatggattgacgactcggaccgatg

SEQ ID NO: 6678 - DNA, 203 bp, synthetic construct
  source 1..203: mol_type = other DNA
ggcgcgccagtcctcgttgtacgccatagtaggtggtggtcagatcacttcgcatgactttgttaacgccatcataactgatcaagagcagttaattgatttcactcaatctgagagggcattatctactcaagtggtgaaattagtttccttcattttaaaggattcgtttacagcaaaaggactgacgactcggaccgatg

SEQ ID NO: 6679 - DNA, 203 bp, synthetic construct
  source 1..203: mol_type = other DNA
ggcgcgccagtcctataaggctgatcatgaacgtgaggctgaactgactgatctaattaacaggattcgtgagaatgaagtcaccgttaatggtattctagagaaccagaaagctataacagctgctgaacgtgcagatttactattagaggttgtcgcttcgaccgctaagtcagtgtcggcagcagcgactcggaccgatg

SEQ ID NO: 6680 - DNA, 203 bp, synthetic construct
  source 1..203: mol_type = other DNA
ggcgcgccagtcctatgaccttagaaatacaacacttcattgcaaactagaaggtaagcaaaatatcgctggatatacagtctatgagtatctgattggaccttgggctcattacggtgacatagactactcagttgtagttgatacgctcaatgaggagacgaaatggtattgtgagattattggtacgactcggaccgatg

SEQ ID NO: 6681 - DNA, 203 bp, synthetic construct
  source 1..203: mol_type = other DNA
ggcgcgccagtcctacacttggaatcagtataatgcaggtaattggactaacattaaaccgtaagtaaattatcaatcttcggacatatgtaagcgtgggacacgtcaaaacagtgataacctggtcggcggagctacaaatccgcttgtcaggggaaactggatgtactaatgggatttgacccgaccgactcggaccgatg

SEQ ID NO: 6682 - DNA, 203 bp, synthetic construct
  source 1..203: mol_type = other DNA
ggcgcgccagtcctagctttgatctttatcgtctttcagattcatgatagctcacaacgcagaggtggtgtttgtactcttttcgatgtattatacaattacctcgtacagcgcaaactgaatcaggagagtgagttcttaagctatggcacgtacaaggaaaagaagtacatatacatcaatgggaacgactcggaccgatg

SEQ ID NO: 6683 - DNA, 203 bp, synthetic construct
  source 1..203: mol_type = other DNA
ggcgcgccagtcctttttgggaagacgtacaacattggtcagctgtactacagacagttgaatgttgaagtcaatactttgaagaaggtgttagccaatattgatgatcattcaagggttaagatgcacggtaattcacgtgatggctttgtaaaacgtcttgatgatgctgggaaaagtcgtgctaccgactcggaccgatg

SEQ ID NO: 6684 - DNA, 203 bp, synthetic construct
  source 1..203: mol_type = other DNA
ggcgcgccagtcctgtcagatgcaaagttggatgataggattgtacaaggtaagggatcacgttatatgtctgcaagtgtatacagatcacgcctgaatacagaatccactactactaataacgctcagagtcccgtttctgaccctgtcaatgcaagtgctaacgtaaaaacgtcaccagctggtaccgactcggaccgatg

SEQ ID NO: 6685 - DNA, 203 bp, synthetic construct
  source 1..203: mol_type = other DNA
ggcgcgccagtcctccacactgatgaatcagtgatgaagaaggaagatcatggagttattgttaatgaaagcacaacatttaaaattaattcagatgttgtctttgacgccgcagaggcaacttttgcagacacaagctccggtttgtcctcattgctaaaaactaagatgaagttttgattatcgatcgactcggaccgatg

SEQ ID NO: 6686 - DNA, 203 bp, synthetic construct
  source 1..203: mol_type = other DNA
ggcgcgccagtccttaagatgaagttttgattatcgattagtcgattgtcttcgattctcatctcagaatgagagtttagaatcggtggttgatagggtcatccacgccctgtcctgctgacgaactctcgttcggagtccattgttttgttagaggtgttgtagcgcctaggtaatttagaactgaccgactcggaccgatg

SEQ ID NO: 6687 - DNA, 203 bp, synthetic construct
  source 1..203: mol_type = other DNA
ggcgcgccagtcctgaaggattgttgttgttgcatgggggattagcgccaataacattagtgcgtgtttatcacgatgttaatgttggtggtctagtgaccggttcgatcgcagcatccgtttcaactctattgcgtaattgcatgttatacagttttgatatctatttcactccgaatggtgtttgtcgactcggaccgatg

SEQ ID NO: 6688 - DNA, 203 bp, synthetic construct
  source 1..203: mol_type = other DNA
ggcgcgccagtccttacttcatctcggcgtaatgatgacgttctcggaacgtgagctattgtgggcttgtcgggctccacattggccgttcaggaaggtgtgagcttatggccgccttctgagagctgatttgttctccactggatggtggggtagcagggaatgaactggtggtataattgactgaccgactcggaccgatg

SEQ ID NO: 6689 - DNA, 203 bp, synthetic construct
  source 1..203: mol_type = other DNA
ggcgcgccagtcctgctgccacgcaagtggaagtcgtgaatggaacgtgcatcattctcgccacagacatggggagttggtgtgatgattcaatcatgtacgagtgcgtcactattgactcgggagaagaaccagttgatgtggactgtttctgcaggggcgtcgagcgggtgtccctggaatacgggcgactcggaccgatg

SEQ ID NO: 6690 - DNA, 203 bp, synthetic construct
  source 1..203: mol_type = other DNA
ggcgcgccagtcctaggtgtgggaagccagttggcggcagaagcaggaggtcggtgtcgattccagtgcatgctcatagtgatcttaccggaagagggcataagtggcttaggggggactcagtcaagacgcatctgacacgtgtggaaggctgggtatggaagaataagctcctgacgatggcctttcgactcggaccgatg

SEQ ID NO: 6691 - DNA, 203 bp, synthetic construct
  source 1..203: mol_type = other DNA
ggcgcgccagtccttgtgcagttgtgtggatggtcacagacagcttaccgacaaggttcattgtcataacagtggccctttgtctggctcccacatatgccactcggtgcacacacctgcagaaccgggactttgtttcagggatccaagggacgactagagtctcattggtgttggaattgggtggccgactcggaccgatg

SEQ ID NO: 6692 - DNA, 203 bp, synthetic construct
  source 1..203: mol_type = other DNA
ggcgcgccagtcctcacacgggtgactatttggcagctaatgagtcccacagcaatcgaaaaacggcatcttttacaacgcagtccgagaagaccatcttgacactgggagattatggagacatctctctcacgtgccgggtgactagtggagtggatcctgcccaaactgtggtattggaactggaccgactcggaccgatg

SEQ ID NO: 6693 - DNA, 203 bp, synthetic construct
  source 1..203: mol_type = other DNA
ggcgcgccagtcctggcatcctgttgaagtctctggctggagtgcccgtggccaacatagagggcagtaagtaccatctccagagtggtcatgtcacctgtgatgtgggccttgaaaaactcaagatgaaaggaatgacatacacggtctgtgagggatcaaagtttgcttggaagaggccgccaacccgactcggaccgatg

SEQ ID NO: 6694 - DNA, 203 bp, synthetic construct
  source 1..203: mol_type = other DNA
ggcgcgccagtcctgctctgcacacagcttttggtgcagcattcaacaccatttttggaggagtgggatttctcccacgtattctgttgggggtggccctggcttggctggggctcaactcacggaaccctaccctctcagtcgggtttttgatcactggtggacttgtgttaacaatgacactggggcgactcggaccgatg

SEQ ID NO: 6695 - DNA, 203 bp, synthetic construct
  source 1..203: mol_type = other DNA
ggcgcgccagtcctgttggtgccgacatgggctgtgcaattgatgccaacaggatggagctacgttgtggtgagggccttgttgtgtggagagaggtcactgattggtatgatggctatgcattccacccagaatcgccccctgttcttgcggcatctctaaaggaagcatatgaggagggagtctgtcgactcggaccgatg

SEQ ID NO: 6696 - DNA, 203 bp, synthetic construct
  source 1..203: mol_type = other DNA
ggcgcgccagtcctgggattgtgccccagaaccggcttgagatggccatgtggagacgtgtggaggctgtgctcaacttggcccttgcagagagtgatgccaacctcacggtggttgtggatagaagggatcctagtgactacaggggaggcaaagtggggatcttaaagcggtcaggcaaggagatgcgactcggaccgatg

SEQ ID NO: 6697 - DNA, 203 bp, synthetic construct
  source 1..203: mol_type = other DNA
ggcgcgccagtcctaagacttcatggaagggatggagccaatcctttgtgtggagtgtcccagaatcgccacggcgttttatggttgggattgaggggactggggagtgtccacttgataaacgccgaacaggagtcttcacggtggcagagtttgggatgggaatgaggaccaagatcttcttggatcgactcggaccgatg

SEQ ID NO: 6698 - DNA, 203 bp, synthetic construct
  source 1..203: mol_type = other DNA
ggcgcgccagtcctctacgggagactagttcttcagactgtgacaccggagtcatgggggctgcagtcaagagcggtcatgccgtccacaccgatcagagtctctggatgaagtcacacaggaacgcaacgggagtgttcatatcagaactgatagtgaccgacttacggaactgcacatggccagcccgactcggaccgatg

SEQ ID NO: 6699 - DNA, 203 bp, synthetic construct
  source 1..203: mol_type = other DNA
ggcgcgccagtcctctggtgaggtcgatggtgctggctgacaacggagccatgttaagtgaaggtggagtccctggcattgtggccgtattcgtggtcctggagctagtcattaggagacgcccaacaactggcacctcagtggtgtggtgtggagtggtcgttcttggcctagtcgtaactgggctacgactcggaccgatg

SEQ ID NO: 6700 - DNA, 203 bp, synthetic construct
  source 1..203: mol_type = other DNA
ggcgcgccagtcctacctatttcttgctcctcgtgctggagcttgggtttccagaggcctcactgagcaacatttggaagtgggctgactccttggcaatgggaacattgattctacaggcgtgcagtcaagagggcagagcccgagtgggctatctcctggcagctatgatgacccaaaaggacatgcgactcggaccgatg

SEQ ID NO: 6701 - DNA, 203 bp, synthetic construct
  source 1..203: mol_type = other DNA
ggcgcgccagtcctgccataatccacacaggcttgaccatttttctatcagccgccacggcaatggcggtctggagcatgatcaagggtcaacgggaccagaagggactgtcctgggccacaccacttgtaggcctcttcggaggcgaaggtgtgggtcttagactgctggcgtttcgaaggcttgcacgactcggaccgatg

SEQ ID NO: 6702 - DNA, 203 bp, synthetic construct
  source 1..203: mol_type = other DNA
ggcgcgccagtcctgagcgaaggaacagacggtctttcagtgaaccactaacagtggtgggcgtcatgctcactgtggcaagtgggatggtgagacacacatcccaggaggctctgtgcgctcttgtggctggggcctttctcctcctcatgatggtgctgggaacacggaagatgcagctcatcgcacgactcggaccgatg

SEQ ID NO: 6703 - DNA, 203 bp, synthetic construct
  source 1..203: mol_type = other DNA
ggcgcgccagtcctgaatggtgcggtgaagtggaatggaacccagacctagtgaatgaggggggagaggtcaatctgaaagtgaggcaggacgccatggggaatctccatctcactgaggtggagaaggaagaacgcgctatggcgttatggcttcttgcagggttggtggcttcagcttttcactggcgactcggaccgatg

SEQ ID NO: 6704 - DNA, 203 bp, synthetic construct
  source 1..203: mol_type = other DNA
ggcgcgccagtcctgccggcattctgatagtattggctatatggacattctttgagatgctgagctcggggcgaaggtctgaacttgtcttctctggacaggggaccgggaccgaaaggaatcggccttttgagatcaaggatggagcctaccgcatctacagtcccggtttgctgtggggacatcgccgactcggaccgatg

SEQ ID NO: 6705 - DNA, 203 bp, synthetic construct
  source 1..203: mol_type = other DNA
ggcgcgccagtcctcagattggagtggggtatggagccaagggagtcctgcacaccatgtggcacgtcacaaggggagcagccctggttgtggaagaggcaatctccggaccctattgggctgacgtcagggaagatgttgtatgctatggtggagcatggagccttgagagccggtggaggggtgagcgactcggaccgatg

SEQ ID NO: 6706 - DNA, 203 bp, synthetic construct
  source 1..203: mol_type = other DNA
ggcgcgccagtcctaccgtccaggtgcacgcatttccaccagggagaccccaagagacacaccaatgtcagccgggagaactcatcctggagaatggtaggaaacttggagcagttcctattgacctgagcaaaggtacctcgggaagtccgataatcaatgctcagggagaggtggtgggtctttaccgactcggaccgatg

SEQ ID NO: 6707 - DNA, 203 bp, synthetic construct
  source 1..203: mol_type = other DNA
ggcgcgccagtcctgagctcgtgaggcagtgtgcaaaccgagggatgagaactctagttcttgcccctacccgggtggttctgaaggagatggagaaggcgcttgctggcaagaaggtccgcttccactcacccgcggtagaagggcagagcacagcgggagccgttgttgacgttatgtgccatgcccgactcggaccgatg

SEQ ID NO: 6708 - DNA, 203 bp, synthetic construct
  source 1..203: mol_type = other DNA
ggcgcgccagtcctgtggagatgactggaaccagaaagatcacgacagcatcggcagctcaacgccggggcagggtgggaaggacatctggacgcactgatgagtacatatactctggacagtgtgacgatgatgacaccagcctcgttcaatggaaggaggcacagatactcttggacaacattacccgactcggaccgatg

SEQ ID NO: 6709 - DNA, 203 bp, synthetic construct
  source 1..203: mol_type = other DNA
ggcgcgccagtcctacactgaggggtccagttgctactttttatggacccgagcagatgaagatgccagaagtggctggccactacaggctgaatgaggagaaaaggaaacacttccggcacttgatgacccaatgtgactttacgccttggctggcatggcatgttgctaccaacaccagcaatgtgcgactcggaccgatg

SEQ ID NO: 6710 - DNA, 203 bp, synthetic construct
  source 1..203: mol_type = other DNA
ggcgcgccagtcctgttgaggtggccgttctaggggtggccactcttggcatactgtggtgctttgtggcaagaacttcggttagccgaatgtttttgggcacggttgtgctctttgctgccctcttgttgctgtggattggtggagtggactacggatacatggcagggatagccctgatattctaccgactcggaccgatg

SEQ ID NO: 6711 - DNA, 203 bp, synthetic construct
  source 1..203: mol_type = other DNA
ggcgcgccagtcctatcttcctcactgtgctgcagccagagccggggaaacagcgaagtagcgatgataatagactggcatacttcctcctaggactccttagcttggctggacttgtgacggctaacgaaatgggcatgctggataaaacaaaagctgaccttgcagggctaatgtggcacggagagcgactcggaccgatg

SEQ ID NO: 6712 - DNA, 203 bp, synthetic construct
  source 1..203: mol_type = other DNA
ggcgcgccagtcctcaaaggcatccagcctgggaggagtggacaaatgtggacatccagccagcacgatcctgggggacgtatgtgttgatcgtctctctgttcaccccctacatgttgcaccagcttcagacaaaaatacaacaactggtgaatagttcggtggctagtggtgctcaggctatgagacgactcggaccgatg

SEQ ID NO: 6713 - DNA, 203 bp, synthetic construct
  source 1..203: mol_type = other DNA
ggcgcgccagtcctgaggctggggctgttggtctagctgcgttgggccagttggtccatcccgagactgagacactctggacaatgccaatggcgtgtggtatggcgggactcgtgcgagggagcttctggggcctgttgcccatgggacaccgattatggctcaagacaactggaacacgcagaggacgactcggaccgatg

SEQ ID NO: 6714 - DNA, 203 bp, synthetic construct
  source 1..203: mol_type = other DNA
ggcgcgccagtcctggtgccgatggagaaactcttggggacatctggaagaggcggctgaatggttgctctagggaggagttttttcagtaccgacgaagtggagtcatggagacggaacgtgacagggctcgagagcttctgaagagaggtgagacaaacatgggactggctgtctctcgagggacgcgactcggaccgatg

SEQ ID NO: 6715 - DNA, 203 bp, synthetic construct
  source 1..203: mol_type = other DNA
ggcgcgccagtcctcctgacgcgtcctgcgtgttcaaggttttggccccgtatagaccagaggtacttgaggctcttcacagattccagcttcaatggggcggggggctagtccgcgtccccttttcccgcaattccacgcatgagatgtacttctccactgctgttagtggcaacatcgtcaattcacgactcggaccgatg

SEQ ID NO: 6716 - DNA, 203 bp, synthetic construct
  source 1..203: mol_type = other DNA
ggcgcgccagtcctgtgaacatccagtccaggaagttgttagccagatttggagaccagcggggacctgccaaggttcccgaagtggatctggggactggcacacgctgtgtggtactggcagaggataaggttagggaagctgatgtggccgaaagaataactgctctcaaaacccaatatggtgaccgactcggaccgatg

SEQ ID NO: 6717 - DNA, 203 bp, synthetic construct
  source 1..203: mol_type = other DNA
ggcgcgccagtcctgctcgcccctccagctcgggaggctgcgtcatggacatcataactagaagagaccaacgtggttcaggtcaggtggtgacttacgctctgaacaccctcacgaacatcaaggtgcagctcatccgcatgatggagggagagggcgtgatcgggccatcagactcacaggatcctcgactcggaccgatg

SEQ ID NO: 6718 - DNA, 203 bp, synthetic construct
  source 1..203: mol_type = other DNA
ggcgcgccagtccttcggagggttactccagctgggaagaggttcccttctgctctcaccatttccatgagctgacgatgaaggacggcagggtcataattgtcccatgcagagatcaagatgagctggtggggcgggcaagagtgtctcctgggtgtggctggagcgtcagggaaacagcatgtctccgactcggaccgatg

SEQ ID NO: 6719 - DNA, 203 bp, synthetic construct
  source 1..203: mol_type = other DNA
ggcgcgccagtccttcaaaggcctacggacagatgtggctgttaagctactttcacaggagggatctgagaacgcttggtttggcaatctgctcagctgtgcccattgactgggtcccgcagggacgaaccacatggagcatccacgcgagtggagcgtggatgaccacagaggacatgctggaagtgcgactcggaccgatg

SEQ ID NO: 6720 - DNA, 203 bp, synthetic construct
  source 1..203: mol_type = other DNA
ggcgcgccagtcctgagccccaacgacgaactgtggcagcacaccatttggtgacgggaagctggtcgctcccgacgcaggccgtcgtaagaactttgtgagaccaaagcctcccagagagggccgaactgggaggttatgaaggcccctggctttggccaggaggggggagagggaaaattggcattcgactcggaccgatg

SEQ ID NO: 6721 - DNA, 203 bp, synthetic construct
  source 1..203: mol_type = other DNA
ggcgcgccagtcctcgtaagaactttgtgagaccaaagcctcccagagagggccgaactgggaggttatgaaggcccctggctttggccaggaggggggagagggaaaattggcattccctctcaggagatttcctccccctacaactaaatttccccctgccatgcagggggggcggttcttgttctcgactcggaccgatg

SEQ ID NO: 6722 - DNA, 203 bp, synthetic construct
  source 1..203: mol_type = other DNA
ggcgcgccagtcctacacgaaaacacatgctcaaactaaagactgttttttcttgatgttgaaagctattgctatggctaaagaacatatcttcattgaagatgggtccttttactccatagctattgctcttcgcttaataaacgcatcattggcaacgattttaaacaaacccgacatgctcaaatcgactcggaccgatg

SEQ ID NO: 6723 - DNA, 203 bp, synthetic construct
  source 1..203: mol_type = other DNA
ggcgcgccagtcctttacgaaattttctgcattcgacggacgaacgattgaaacggacatgacatacgcacaagtaactgaggaatgttctatgaagatggcttctcgctttaatcaacatatggacttcaccaattatttggacgcatacaggaaccccacatatgaacctgaagatattgtggagccgactcggaccgatg

SEQ ID NO: 6724 - DNA, 203 bp, synthetic construct
  source 1..203: mol_type = other DNA
ggcgcgccagtcctaccaagtcgcagattgtgattgtaatacatgtgattgctgtaacgacccggaactattggataggctttctacagtggccagaattcatggcacgaattgcgtgtgtctgttgactcgtttctatcaaggatttaaaacagccgatctttatgatatgactaagcaaattagtacgactcggaccgatg

SEQ ID NO: 6725 - DNA, 203 bp, synthetic construct
  source 1..203: mol_type = other DNA
ggcgcgccagtcctccccggtatacgataaccgtgtaacaattaagaagaacacaatcttagctgcacagaatctattacccgcttttgccaaaattgaaccaatcgagaagactatggacatacaaacagtacccgcatgtaaaggatgtgataactgctctcctatcgatgctcaacgatctttgccgactcggaccgatg

SEQ ID NO: 6726 - DNA, 203 bp, synthetic construct
  source 1..203: mol_type = other DNA
ggcgcgccagtcctctgaacaagacaaaggttcgattgtcatcgctagagacgtagtttaccgcaatcttttcagattcacggtggtgttgaacgaaaacggaacggaaaaacgacgcggatttggacaaatattcatgttaggaggtcgattaggtatgataccgaaacacttcctttacgtgatggcgactcggaccgatg

SEQ ID NO: 6727 - DNA, 203 bp, synthetic construct
  source 1..203: mol_type = other DNA
ggcgcgccagtcctggttggacataatggatggaacgccgtatgctacaatgaactcgttttttgagcatacttcgtctattttttatggtgatgacttcataatgaatatacgaccagaggttattgatgtttacaatcaagaaactctcacacccgttcttaagaagaatttggaaatgacaatgacgactcggaccgatg

SEQ ID NO: 6728 - DNA, 203 bp, synthetic construct
  source 1..203: mol_type = other DNA
ggcgcgccagtcctgctgatgtagaattaaaattacaagtcaacgctcaaccattccaagctgggcgtttattattagtttatattccaggttataaatatataggcgaggatcgacagaaatattatgacgatcgcactaatgttgacgatgctagcttggttccgttgactggttcccctcgtgtccgactcggaccgatg

SEQ ID NO: 6729 - DNA, 203 bp, synthetic construct
  source 1..203: mol_type = other DNA
ggcgcgccagtcctgatcctaatgcctcttacagttctgtagttgacttgcgttctgacacagatgtaacgttcaacgttccattcgtttcagttcagccatggaaattatctagcgcagatgtcacatcacctttgaaggattatcagcactctgttggtaggttgtacgtactcattcttaatgaacgactcggaccgatg

SEQ ID NO: 6730 - DNA, 203 bp, synthetic construct
  source 1..203: mol_type = other DNA
ggcgcgccagtcctttacgtgccacttccacagtgtctgatactatctcatgtcttgttgaagtttctggagcatcagattttgaattatctatgccacgacaaccgaagatttacccaacgttaagggccgccaaatcaacaactctgaatagagttatacgtggtattgcacaggtcaacgtagctcgactcggaccgatg

SEQ ID NO: 6731 - DNA, 203 bp, synthetic construct
  source 1..203: mol_type = other DNA
ggcgcgccagtcctgaatctacaccggtatccccagaaatcatccaaaagacaggtgaagtaggagaatctagtatgagacaaccgcaagggacatctttcactagctctgcactaactgtaggagaaaaagtaacatcgttacgacaaattttaaagcgatttcatttaatctattctaatttaactcgactcggaccgatg

SEQ ID NO: 6732 - DNA, 203 bp, synthetic construct
  source 1..203: mol_type = other DNA
ggcgcgccagtcctgcggcgcgtattcgattgatcccagagaatggcgctacagaagctaatgctggtccagttcaagaagacaatactgtcatcgatgagactagaacagctgctgatgtatatatgccacgaaatcttgaaggaactttcgaatttcaggtgcctcattactcgaggtatcctctccgactcggaccgatg

SEQ ID NO: 6733 - DNA, 203 bp, synthetic construct
  source 1..203: mol_type = other DNA
ggcgcgccagtcctaacctgcccctctaacgccagacgagcggcataaaactcgaacttctggcacgttccaccaccccttctcctatcccaacccccattgcgctctcaaggtcgcgcttttccgagactagctcggattcaaaaagttcctggcaccctttaccccttcaggcccttaaggtaggacgactcggaccgatg

SEQ ID NO: 6734 - DNA, 203 bp, synthetic construct
  source 1..203: mol_type = other DNA
ggcgcgccagtcctactgaccttgtgctgtgatctcggtgcggaagtgctactgcgtagtgattgtaagatccttttgtggttctgccctggcaaggctacagagtgctgtgatccgctgcggatgccatcctggtaacaggacccccagtgtgcgcaacagtatgttcacggtcttccgtgttcacccgactcggaccgatg

SEQ ID NO: 6735 - DNA, 203 bp, synthetic construct
  source 1..203: mol_type = other DNA
ggcgcgccagtcctacattcggaacactgctttcgtgaaacagtgtgtgtccaatccctgtgatcagtatcaaccacaccacctaggaatgctaggaaggtaccccggttcgccgggatctgatcctaggctaattgtctacggtggtgctcctttttattttccacttcaactcactggttacaactcgactcggaccgatg

SEQ ID NO: 6736 - DNA, 203 bp, synthetic construct
  source 1..203: mol_type = other DNA
ggcgcgccagtcctgcgcagattccgtgtggagacacgtgagaaaaccctctattcttacgtggaccccgcggttgacgcctacttaaagcgcgaacgaaggtttcccttctcccttcccaaaccctcccatttctacgactgcctcttttgcaaccatccctctgaagacgatgaggattcactcctcgactcggaccgatg

SEQ ID NO: 6737 - DNA, 203 bp, synthetic construct
  source 1..203: mol_type = other DNA
ggcgcgccagtcctcaccctcgacggagagtatggcgatccctgtccacttcactctggtgttcttgaccccaaacccagataccaaaagccccctgaggacattcttgaggattctaactggtgtgacgtccttaacgaggatgttacttacagcactgattctctccagaatgccttcgaccaactcgactcggaccgatg

SEQ ID NO: 6738 - DNA, 203 bp, synthetic construct
  source 1..203: mol_type = other DNA
ggcgcgccagtcctggctcttgctctgctccccggttctgctcaggtgaaggactcttcccacatctccaaactctacttcaagctcttctctctttcccaattccctggtgtccctaccacacctctttctctccccaagcccactggcaacatcatctcccaaggccaaagtcagaccaacatttacgactcggaccgatg

SEQ ID NO: 6739 - DNA, 203 bp, synthetic construct
  source 1..203: mol_type = other DNA
ggcgcgccagtcctttctacccagcacggtaacgcgatgatcaccaccggttccaccgccccagtggtcgtcgcatacccacctaccccctccgtgccccttcccaaccccgactgcccttccgaacctggtccgtcaggtgaccgcacatggctcctggacactttcgagtggtcccaggaaaaccccgactcggaccgatg

SEQ ID NO: 6740 - DNA, 203 bp, synthetic construct
  source 1..203: mol_type = other DNA
ggcgcgccagtcctcatgtggtggtgcctggctggtcagaatggaatgcagtacaacaccctagccaaccccacctaccccttttccgcctccaccaactggggcacccagaatggggttgcggcaactgcttacccgctacctgcttcttttgtgcaggcgtatccagactgcccctggaccgccatcgactcggaccgatg

SEQ ID NO: 6741 - DNA, 203 bp, synthetic construct
  source 1..203: mol_type = other DNA
ggcgcgccagtcctgcacgatacccatgcctacttcaactgtggctggcgcatgcaggtggtggtgaacggtactcagttccacgctggtgcccttctcatatacgccgtcccggaacgccccctgcttccgaacggtgttgaatatgagcacaccacctttgtctacccctacaccatcctcaacctcgactcggaccgatg

SEQ ID NO: 6742 - DNA, 203 bp, synthetic construct
  source 1..203: mol_type = other DNA
ggcgcgccagtcctctaccagtctaacaccgcaacattggaggtcccctacgtcggttgcacacccaataccaccacctgtgtgcactcgccgtggactttctacattgcgatcctcacccccttggctgtagcttcctcctccaaccagaccctttctgtttcagtttacataactcctgttaattccgactcggaccgatg

SEQ ID NO: 6743 - DNA, 203 bp, synthetic construct
  source 1..203: mol_type = other DNA
ggcgcgccagtcctcttcacagggtcttcccagcattacggccgcctagttgtatgctactcaccgccaagcggcgctcctcccgctaccatcacggaagcgatgcgcggcacctacactgtgtgggacatcaattcttcctccactcttgacttcaccattcctttcatctcccaatcctactggaacgactcggaccgatg

SEQ ID NO: 6744 - DNA, 203 bp, synthetic construct
  source 1..203: mol_type = other DNA
ggcgcgccagtcctcgcgcaagtcaccttccactattttccccccggcgcaacaccctatgacgccacctctcccaatgcttccactgacctggctaactgtttcaccgtcgatgctcagatcccaccgacatcgatggacacagtctgcctgtccttcccctacctttcagttctttctgctattcccgactcggaccgatg

SEQ ID NO: 6745 - DNA, 203 bp, synthetic construct
  source 1..203: mol_type = other DNA
ggcgcgccagtcctcacttcctactttggattctctaacttccagggcggtagcgatgtgctcaacaccacgcttggaactattgtgatctatgttgggtggcagggcgatgcccctacgggcaccgctcttactatctatcagaagatcgcttttggcaacttccgtggtttcgttcctcgcaaccccgactcggaccgatg

SEQ ID NO: 6746 - DNA, 203 bp, synthetic construct
  source 1..203: mol_type = other DNA
ggcgcgccagtcctgcccaaacttactgcctactcccaacccaacatggtaacgaagacgaacgccatcgtcaagttgccagtttaccggccaatggcgaccaccaaagccatggtgcgccgtcaatgtgccggggagtccctcttccaaccctgtctctgctctcgcgtttacattgttcgcgcacacgactcggaccgatg

SEQ ID NO: 6747 - DNA, 203 bp, synthetic construct
  source 1..203: mol_type = other DNA
ggcgcgccagtcctgcgcatgacctacacccactgggccctgcgttgtgtcgacagcgatggaacacgccagatttccctttctcgcttcaagttgtctgctgttgtggcatacgaggatccggaaggagaggtctaccgagaggtagaacctttccactggtccttggccgtcgcgatggtgggcagcgactcggaccgatg

SEQ ID NO: 6748 - DNA, 203 bp, synthetic construct
  source 1..203: mol_type = other DNA
ggcgcgccagtcctcccttgggactattctgcttccaacaactgcacccactttgtctctaacatcaccggtgttgaacttcccaacactggcttctcccttgctctcggaatcggggcactggcgatcggggctggtgttatggccgttcaaactgccaaaggccgtatcacccgccaggggttgctcgactcggaccgatg

SEQ ID NO: 6749 - DNA, 203 bp, synthetic construct
  source 1..203: mol_type = other DNA
ggcgcgccagtccttgcggatctggcaccacagcttcgcacctatttcactgagagaaacaccactctgggcgctctcttctattggctggcaaccaagcttggtttgttagtcactccagaggaggcggaagttgccgccatcgagcctcaaggcgtgcgggacttaaaggaaggtgtccaggctgtcgactcggaccgatg

SEQ ID NO: 6750 - DNA, 203 bp, synthetic construct
  source 1..203: mol_type = other DNA
ggcgcgccagtcctcctgtatgggccacctggcactgggaaatccttgcttggctccctccttgcctctgtcctcgctcagaagctctctggtgatcccaacgatgtgtactcccccacatcagcttcctgtgaatacttcgatgggtacacaggacaagtcgtccacttcattgacgacttgggacacgactcggaccgatg

SEQ ID NO: 6751 - DNA, 203 bp, synthetic construct
  source 1..203: mol_type = other DNA
ggcgcgccagtccttgaatttaacgatttcgaccagctcgttgacgcgatcgttgctaggttggatcgggcctctggtgttagctcccgccttgctgctctcatcaagcggcagggtgcccactcagagcgcaccttcgagaccgctccttctgagatcgacgcggacgaggttctcgaaatcctctccgactcggaccgatg

SEQ ID NO: 6752 - DNA, 203 bp, synthetic construct
  source 1..203: mol_type = other DNA
ggcgcgccagtcctgaccaagaaagaggacacaccggatgaaccgcaagcggcttattcgggcatgcctcaacttggtaagaaagacgccaaggcaaagggcccaaaacccgcccccaccaggggcgtcgtgcgacaagccggcccctcccctgctcttcccaagattgccgacaacgtcttgccaatcgactcggaccgatg

SEQ ID NO: 6753 - DNA, 203 bp, synthetic construct
  source 1..203: mol_type = other DNA
ggcgcgccagtcctgatctggacccctacctcccgccagtatcgtgacctccgtcgctttctgggctcccacccctaccctactggccacctcatctctgctttccaaggcgttccgatgttcatacggttctccaagaatcatatggtcactctggacgtcgaatctgttgtccacgaacccgtcgccgactcggaccgatg

SEQ ID NO: 6754 - DNA, 203 bp, synthetic construct
  source 1..203: mol_type = other DNA
ggcgcgccagtcctgtatgacttggactacaagtgttttgatgccaccctcccttcctgcgcattcagaattgttgaagattacctcgtgaaattgactggcgacgagcgcgtccgcgcgtacgtcgaaaccatcaggcattccaagcatgtctatggtagtcagacttacgagatgatcggcggcaacgactcggaccgatg

SEQ ID NO: 6755 - DNA, 203 bp, synthetic construct
  source 1..203: mol_type = other DNA
ggcgcgccagtcctgctcaatctctgtgcagcttgacctcagaactctggcctcccactgttcgtcctggtagaatagacaagcttttcactatccctaagaccactctctccgtggcattttcctctcagtgtcctgctccctcacgggactgcacccaggaactgtgagcttccccccctgtccttcgactcggaccgatg

SEQ ID NO: 6756 - DNA, 203 bp, synthetic construct
  source 1..203: mol_type = other DNA
ggcgcgccagtcctcctcagaactctggcctcccactgttcgtcctggtagaatagacaagcttttcactatccctaagaccactctctccgtggcattttcctctcagtgtcctgctccctcacgggactgcacccaggaactgtgagcttccccccctgtccttgaaatttctattcttttcttgccgactcggaccgatg

SEQ ID NO: 6757 - DNA, 203 bp, synthetic construct
  source 1..203: mol_type = other DNA
ggcgcgccagtcctgtgatagggtggctcaattgaccttaggaaacagcactatcactactcaagaggcagcgaacatcacagttgcctatggtgaatggccatcgtacttaagtgatttggatgctaccgctgtagacaagactaccaaaccaggcgtttcatgtgatagattctacacattacctgcgactcggaccgatg

SEQ ID NO: 6758 - DNA, 203 bp, synthetic construct
  source 1..203: mol_type = other DNA
ggcgcgccagtcctgaaagaaatgggaggcaactactaaaggatgggagtggaaacttccagacgcactgacagagcttggcgtttttggacagaattgtcagttccatttcttatataggtgtgggtggtctatacacgtgcaatgtaatgccacgaagtttcatcagggcacattactagtggtagcgactcggaccgatg

SEQ ID NO: 6759 - DNA, 203 bp, synthetic construct
  source 1..203: mol_type = other DNA
ggcgcgccagtcctgagcaatagcccaaggtattcctactacaaacacgccaggttcctaccagttcctcactactgatgaagatagtagtgcatgtatacttcctgatttcacaccaacccaagaaatccacattccaggagaggtcaagaatctacaggcactgtgtcaagttgagtccttactggcgactcggaccgatg

SEQ ID NO: 6760 - DNA, 203 bp, synthetic construct
  source 1..203: mol_type = other DNA
ggcgcgccagtcctcacttgagataactttcatgtttactgggtcattcatgacaacggggaagctgctgttagcctatacccctccaggtggtagtgcaccagctagtagagaagatgccatgcttggcactcatgtaatatgggattttggattacagagctccataaccctagttgtcccttggacgactcggaccgatg

SEQ ID NO: 6761 - DNA, 203 bp, synthetic construct
  source 1..203: mol_type = other DNA
ggcgcgccagtcctatgctagtgatgagggcatgatggaaactagacatgtcgtcaatacaaacacagtatcagaaacatctatagagagcttctatggtcgttgtggtctcgtatccatcaaagaaatagccgataacaagcaggttgagaaatggttggttaattttaatgaatttgtacagctaacgactcggaccgatg

SEQ ID NO: 6762 - DNA, 203 bp, synthetic construct
  source 1..203: mol_type = other DNA
ggcgcgccagtcctctaacccatcagcaatctttagtgccaacactgttcctgctagattcagcgtcccgtttgtgggaacagcaaatgcgtacacgattatgtacgacggatacaatgtgtttggatcaaacagaccatcagctgattatggcatgatcaacagcagtcacatgggtagcatggcctcgactcggaccgatg

SEQ ID NO: 6763 - DNA, 203 bp, synthetic construct
  source 1..203: mol_type = other DNA
ggcgcgccagtccttcaggtgccagcatggagtgatcggtgttgtgactgctgggggccagggagtggttggatttgctgatgtgcgcgacctcttctgggttgagcatgaagcaatggaacaaggccttactgattacattcagcaacttggaaacagttttggtcagggttttacagcagaaattacgactcggaccgatg

SEQ ID NO: 6764 - DNA, 203 bp, synthetic construct
  source 1..203: mol_type = other DNA
ggcgcgccagtcctccaattatgccagtcaactttcagagatgttaattggcgctgacggtatggtggagaggtgcctgcaaacctttgtgaaagtgatctcagcggttgtaattgccaccaggtctcaaggtgatgttcctactatacttgcaacccttgctctcatcggatgcgatggtagtccctcgactcggaccgatg

SEQ ID NO: 6765 - DNA, 203 bp, synthetic construct
  source 1..203: mol_type = other DNA
ggcgcgccagtcctaagcgagagaaaggcaagagtttaccaccaatttaaagactttaccattactggaagcgcaggtcgcaactttggaacactcctgcccaaccactgaacaacaggagaccatctttggaaacattcagtacctagctcaccactgcaggagatatgccccactttatgcagctgcgactcggaccgatg

SEQ ID NO: 6766 - DNA, 203 bp, synthetic construct
  source 1..203: mol_type = other DNA
ggcgcgccagtcctatgcgattcctccagacagtgaccattttgacggataccagcagcaggccgtggtagttatggatgatctcaaccagaacccggatgggaaagatatggttgctttttgtcaaatggtctccaccgtgccttaccatgtacctatggctgccattgaagagaagggaatgctctcgactcggaccgatg

SEQ ID NO: 6767 - DNA, 203 bp, synthetic construct
  source 1..203: mol_type = other DNA
ggcgcgccagtccttcactaagccacaaggcaagattgattgggttgaaccctctaagaaacatgggtttccagtgattaatgcaccatccaaaaccaaacttgagcccagtgttttctttgatgtgtttgagggagtcaaagaaccagctgctcttcatccaaaggaccccaggcttgaggttaactcgactcggaccgatg

SEQ ID NO: 6768 - DNA, 203 bp, synthetic construct
  source 1..203: mol_type = other DNA
ggcgcgccagtccttggaagaagcactcttttccaaatacactggtaacgtagacattgagatgccagaggaaatgaaagaggcggtggatcattatgctaatcagcttttggcactagacataccaactgagccacttagcatggaggaagccatttatggcacggaaggccttgaagctctggattcgactcggaccgatg

SEQ ID NO: 6769 - DNA, 203 bp, synthetic construct
  source 1..203: mol_type = other DNA
ggcgcgccagtccttacgaggagttttgccgcaagatcagatcagtaccagttggcagagctcttcacttaccatcatactcttcactgctgcgagagtggtatgagaagttttaaattacagttcaattgattatccggattggcctaaacttcaattggatacaatacacccaccggatggggtgtcgactcggaccgatg

SEQ ID NO: 6770 - DNA, 203 bp, synthetic construct
  source 1..203: mol_type = other DNA
ggcgcgccagtcctctcacactcatttcccccctcgcctgtcacaggcaacccccaccccttctcttacgggagttagggccaaggatctgttgcataggcgttgtatcccctaaccttttacctacccatcccaataggactggtatttcggttttgattgagtaatggatactgattctatacctgcgactcggaccgatg

SEQ ID NO: 6771 - DNA, 203 bp, synthetic construct
  source 1..203: mol_type = other DNA
ggcgcgccagtcctttacccattcaggggaaaaatggagtttctttcatggatctgacttgatatgaccaagagtcaacactttgcgtgttggccgtatggaatgctttaaggtttattctttggattatgacttcagggttggccgcccaggataaaaggcaattgtggtaagtgatgttagtcattcgactcggaccgatg

SEQ ID NO: 6772 - DNA, 203 bp, synthetic construct
  source 1..203: mol_type = other DNA
ggcgcgccagtcctagtccttgacgaatgcgtcccgtctgtcccgacggtgaggcgtatggcgcatgctcatggcattacccaatggtgtatctgtgaggggggggctcctcacacttagtctagtgctacctgacagggccgcggctggtcgtttgtgtatggtataaccagtagtaatcccccatgcgactcggaccgatg

SEQ ID NO: 6773 - DNA, 203 bp, synthetic construct
  source 1..203: mol_type = other DNA
ggcgcgccagtcctgattgctttaacttcccctcctcccttaccaagacattctctaagatggcaatctatgaggatgactcctcggagtcaattacatgctgtaactggattccacggaatcgtcgtaacaaagtaagaaaacaaaaacccaggagtaaggcctccagagtcgagatgtcaccagggcgactcggaccgatg

SEQ ID NO: 6774 - DNA, 203 bp, synthetic construct
  source 1..203: mol_type = other DNA
ggcgcgccagtcctcctcttgtcaccttggccgatgatggctatctctatgtgcataaacataaaggtgagactaaatttgttaggagggatgaaattctcacaaaatatggcagatgtattgttgagatggaagaagtttttcaatgtggacaagtccaatcaaatcaaacgggaaacaaaccatcgcgactcggaccgatg

SEQ ID NO: 6775 - DNA, 203 bp, synthetic construct
  source 1..203: mol_type = other DNA
ggcgcgccagtccttacacatttgattcattaaattggcaaaatacacagtatggagagtggacatgccccttgccaggcgcccttatggacactggggtgtttggacagaacttgagattccactatttatatagatctggtttttgtgtacatgtacaggtgaatgcttcttccttccatcagggtcgactcggaccgatg

SEQ ID NO: 6776 - DNA, 203 bp, synthetic construct
  source 1..203: mol_type = other DNA
ggcgcgccagtccttgtttattggttgccatggtgcccgaacatcagacaccaaaacagcaaaacaatgacttccaatactatgagactaaggaattttgtggaactgaatatccaacagaacagttgaccctcttcccacatcaattcttaaacctgagaacaaataattctgttacaattgtttaccgactcggaccgatg

SEQ ID NO: 6777 - DNA, 203 bp, synthetic construct
  source 1..203: mol_type = other DNA
ggcgcgccagtcctccttacacaaattgcaccccttctggttttggattgagtcataattttgttactttagtaattaggattgttgttcctctgtcctattcaacaggtgcttccactcaaatccctattactgtaagtgttgcccccatgtgttcttcatttgctggtttgagatctgcagttaaacgactcggaccgatg

SEQ ID NO: 6778 - DNA, 203 bp, synthetic construct
  source 1..203: mol_type = other DNA
ggcgcgccagtcctaatgtaaatatttctaagagtgctactgtacagggagaatcagactcaattccatctgctctaaatgctcacattgaacaagcggtcacaagtgcattaaacacccggccacaacacagccatgacaatgggcttgagattatacagggagatgcacccgctctaactgctgcacgactcggaccgatg

SEQ ID NO: 6779 - DNA, 203 bp, synthetic construct
  source 1..203: mol_type = other DNA
ggcgcgccagtcctaaaggccccttcactgcttggtggtggaaagatgatataattataacctcatatcatgcttgcaatgattggtatgcatatcttgaaaggaaaaacccagtttttaggtatagaattagtatgtcaactaagagatggtggaagaacccttaccttgttgaggccgttggcgtgcgactcggaccgatg

SEQ ID NO: 6780 - DNA, 203 bp, synthetic construct
  source 1..203: mol_type = other DNA
ggcgcgccagtcctactgaatatagattcccccaatactgtgaattgctaaactttagagatcaccaacagagagacctatggagttgtgtgggtgatgctgagccaggtttttgtggtagtatgctcttttctgaaggcaaagtcatagggatgctcactgccaaatctgaatgtacatatgctgatcgactcggaccgatg

SEQ ID NO: 6781 - DNA, 203 bp, synthetic construct
  source 1..203: mol_type = other DNA
ggcgcgccagtcctggagtggagggctttctcaaggacaaattatttaactctttgttttccattcttgttaaggccataggatctcttgtgatctacataaatgctaaagatgaatgtaagctttctacccttttagctcttggtagcatgttaggtgtggatttcatgtcaaaagaccccttcacacgactcggaccgatg

SEQ ID NO: 6782 - DNA, 203 bp, synthetic construct
  source 1..203: mol_type = other DNA
ggcgcgccagtcctgatctggaatttgccaaatctcttatgaaatcttctctgttccctgtttgtacatccactggttcctatactgctctaggactgtttgaccaatggcttgttcttcccgctcactcaaaccccaaggattctattgttttcaaaggtgagagtgttaaaatagtcgactctatgcgactcggaccgatg

SEQ ID NO: 6783 - DNA, 203 bp, synthetic construct
  source 1..203: mol_type = other DNA
ggcgcgccagtcctggtttggatctgaacacatctgctgggtacccctacaacacaatggggataaggaagagagacttaatcccacacagaggtgaaccattgacacaattgcagaaagctctcgatttacatggttatgatcttcccttctctacttatctaaaggatgaacttagacccaaggcacgactcggaccgatg

SEQ ID NO: 6784 - DNA, 203 bp, synthetic construct
  source 1..203: mol_type = other DNA
ggcgcgccagtcctgttgttcatggagggatgccatcaggatgttcagggacctccatttttaattctatcattaataatttagttgttaggactttagttcttaagtgctataaaggaatcaacttagatttactaagaatccttgcttatggagatgacttacttgtctcatacccatttccattgcgactcggaccgatg

SEQ ID NO: 6785 - DNA, 203 bp, synthetic construct
  source 1..203: mol_type = other DNA
ggcgcgccagtcctgaccctgcggtgcttgctgatgcgggcaaggagttaggcctcacaatgaccccagctgataaatctgattcttttagtggttgtagtaagttaactgaagttactttcttgaagagatcttttgtctttgatgaacaattcccttttctttgccacccagtgttccctatgtctcgactcggaccgatg

SEQ ID NO: 6786 - DNA, 203 bp, synthetic construct
  source 1..203: mol_type = other DNA
ggcgcgccagtcctgaaattcatgagtccattagatggactaggagtgctgcaacaacacaggaacatgtgacatcgttgtgcttattggcttggcataacggaaaggaagtttatgaagaattttgtgaaaagattcgcagcactccagttgggcgagctttatctttgccatcttttgaggtgcttcgactcggaccgatg

SEQ ID NO: 6787 - DNA, 203 bp, synthetic construct
  source 1..203: mol_type = other DNA
ggcgcgccagtcctcaccaagtgaattcttttcacttgatgacttgtgtcgccaacaaattttaaagatggtttatattgaccaatacgcttttcacatgttacatgaagacataaattgtatagggtttactctatcaatttatgatgaagataaacgaatgaaggacataacttattgggatctgacgactcggaccgatg

SEQ ID NO: 6788 - DNA, 203 bp, synthetic construct
  source 1..203: mol_type = other DNA
ggcgcgccagtcctattgtgaatatcatgaaaatttatatgatgcactaatgtcggccgaatttgaacaagtttggtttacattattgcttaaatatcttgattttgtaccagtaccaatgaattggagaggaatgccagaatttcctaccatttatgtatcaaaacatttttggtatgaattatatccgactcggaccgatg

SEQ ID NO: 6789 - DNA, 203 bp, synthetic construct
  source 1..203: mol_type = other DNA
ggcgcgccagtcctcttataaaaacaggactccgatagttattgaggcacaaacatcaggagataatatgactcttaaacaaccacgaccagttgttatagaagctcagacatctgctgattgtgttactttagctaaaaacacacaacgaatgattgaagcatttgcaagttctgatactgtaacaccgactcggaccgatg

SEQ ID NO: 6790 - DNA, 203 bp, synthetic construct
  source 1..203: mol_type = other DNA
ggcgcgccagtcctgtgataaaacttatacgctaaatgatgttaagaaaggacaatatatattgcgacaaggattagaatatacgatgccgacaattgatggtgattgtggagccccactaatcatcaatgaaacacaggttactagaaagatagctggtatacatgttgctggtgcagcatgtggtccgactcggaccgatg

SEQ ID NO: 6791 - DNA, 203 bp, synthetic construct
  source 1..203: mol_type = other DNA
ggcgcgccagtcctgagcttatgcagaatctataacccaaaaagatttggagcgtacatttagtaaaatagatgttacgatgcaaatccaattggatttagattcttcattagatttttctagaaccgaacccaaaattcctgctggagtcgaatttggaccggaagctctcactttttgtgatcttccgactcggaccgatg

SEQ ID NO: 6792 - DNA, 203 bp, synthetic construct
  source 1..203: mol_type = other DNA
ggcgcgccagtcctggagtagctccccaggatatccttggataaaggatagagtgaaaggaactaaaggaaaacaaggctggtttggtactgatggagaatttattctcaacgaagatgtcgaattagccgtacaacgacgactacaagcagctcgtgaaggaaaacgattacctgtgatgtgggtcgcgactcggaccgatg

SEQ ID NO: 6793 - DNA, 203 bp, synthetic construct
  source 1..203: mol_type = other DNA
ggcgcgccagtcctcgatgagagattttagtaaacatgtttccctcgtctcttatggagatgataatgtaattaacttcagtgatgaagttagtgcatggtataacatgtctactattgcagaggctttttcaacacttggattcacttatacagatgagctcaagggagttagaggcgaggtaccaacgactcggaccgatg

SEQ ID NO: 6794 - DNA, 203 bp, synthetic construct
  source 1..203: mol_type = other DNA
ggcgcgccagtcctttcgaaataccatacctgctgataaccaagaaaacgattctaccaatgtacataacacgaaactcgcgtcgacctcagcggagaatgccattgagaaggaacaaatcaccacctttcatgatgtggaaactccaaataggatcgatacccccatggctcaggatacttcatcggcgactcggaccgatg

SEQ ID NO: 6795 - DNA, 203 bp, synthetic construct
  source 1..203: mol_type = other DNA
ggcgcgccagtcctctaggagcatggatgatacgcacagtattattcagtttctacaacgccccgttctcattgacaacattgagattgttgcaggaacaactgccgataacaacacagcactcagtagatatgtgctagatagaacaaacccgcaaaaatacattaaacaatggacattaccatcaacgactcggaccgatg

SEQ ID NO: 6796 - DNA, 203 bp, synthetic construct
  source 1..203: mol_type = other DNA
ggcgcgccagtcctcccgtgcaggtgttacaggttatccgggagtcgaactagatttccaattagacaattcagttgagatgactattccatatgcatcttttcaagaagcatatgatttagttagtgggaatgaagattttgtgcagttgtacctttttacaattgcaccggttttgggaccttcagcgactcggaccgatg

SEQ ID NO: 6797 - DNA, 203 bp, synthetic construct
  source 1..203: mol_type = other DNA
ggcgcgccagtcctctgaatcagcgaattcaaaagtagacctttcagtctatatgtggttagataacatatctctcgttatccccacatatagattgaatccaaatcttccaaccggacaaactctaacccgcatagttcagaattccgattctgataaactcaaagaagcacttaagattgctaagtcgactcggaccgatg

SEQ ID NO: 6798 - DNA, 203 bp, synthetic construct
  source 1..203: mol_type = other DNA
ggcgcgccagtcctacccgataagtaacggagatgattggggcggtgtaataccagtgggaatgccttgctactctaagactattagagcagttaaaggcgccacttcgacgtcaaaaaccgaagtgatggacccagcaccgtgtgaatatgttgcaaatcttttctcatattggcgtgcaactatgtcgactcggaccgatg

SEQ ID NO: 6799 - DNA, 203 bp, synthetic construct
  source 1..203: mol_type = other DNA
ggcgcgccagtcctgaactcaaactcagcgaccaagaaggaaggttgatccagaacagtataacaatagagagaatggttctctccgcatttgatgaaaggaggaacaggtacctagaggaacatcccagtgcggggaaggacccgaagaagaccggaggtccaatctaccgaaggagagacgggaaacgactcggaccgatg

SEQ ID NO: 6800 - DNA, 203 bp, synthetic construct
  source 1..203: mol_type = other DNA
ggcgcgccagtccttgggtgagagagctgattctgtatgacaaagaggagataaggagaatttggcgtcaagcgaacaatggagaagacgcaactgctggtctcactcatatgatgatctggcattccaacctaaatgatgccacataccagagaacaagagccctcgtgcggactggaatggacccccgactcggaccgatg

SEQ ID NO: 6801 - DNA, 203 bp, synthetic construct
  source 1..203: mol_type = other DNA
ggcgcgccagtcctgagagaatgtgcaacatcctcaaagggaaatttcaaacagcagcacaaagagcaatgatggatcaggtgcgagaaagcagaaatcctgggaatgctgaaattgaagatctcatctttctggcacggtctgcactcatcctgagaggatccgtagcccataagtcctgcttgcctcgactcggaccgatg

SEQ ID NO: 6802 - DNA, 203 bp, synthetic construct
  source 1..203: mol_type = other DNA
ggcgcgccagtcctgcttgtgtgtacgggctcgctgtggccagtggatatgattttgagagggaagggtactctctggttgggatagatcctttccgtctgcttcagaacagtcaggtcttcagtcttattagaccaaatgagaatccagcacataaaagtcaattggtatggatggcatgccattctcgactcggaccgatg

SEQ ID NO: 6803 - DNA, 203 bp, synthetic construct
  source 1..203: mol_type = other DNA
ggcgcgccagtcctggaaacaccaatcaacagagagcatctgcaggacaaatcagtgtacagcccactttctcagtacagagaaatcttcccttcgaaagaccgaccattatggctgcgtttaaggggaataccgagggcagaacatctgacatgaggactgaaatcataaggatgatggaaagtgcccgactcggaccgatg

SEQ ID NO: 6804 - DNA, 203 bp, synthetic construct
  source 1..203: mol_type = other DNA
ggcgcgccagtcctttggtctggacatcagaactgccactcgtgaaggaaagcatatagtggagcggattctggaggaagaatctgacgaggcacttaaaatgactatcgcttcagtgcctgcttcacgctacctaactgaaatgactcttgaggaaatgtcaagggattggttaatgctcattcccacgactcggaccgatg

SEQ ID NO: 6805 - DNA, 203 bp, synthetic construct
  source 1..203: mol_type = other DNA
ggcgcgccagtcctaaatgacattccatggagcaaaggaagttgcactcagttactcaactggtgcgcttgccagttgcatgggtctcatatacaaccggatgggaacagtgaccacagaagtggctcttggcctagtatgtgccacttgtgaacagattgctgatgcccaacatcggtcccacaggccgactcggaccgatg

SEQ ID NO: 6806 - DNA, 203 bp, synthetic construct
  source 1..203: mol_type = other DNA
ggcgcgccagtcctagatggcgactaccaccaacccactaatcaggcatgagaacagaatggtactagccagcactacggctaaggccatggagcagatggctggatcaagtgagcaggcagcagaagccatggaagtcgcaagtcaggctaggcaaatggtgcaggctatgaggacaattgggactccgactcggaccgatg

SEQ ID NO: 6807 - DNA, 203 bp, synthetic construct
  source 1..203: mol_type = other DNA
ggcgcgccagtcctagaattgctccacacagagcataatggaatgctgtgtgcaacaagcctgggacatcccctcattctagacacatgcactattgaaggactagtctatggcaacccttcttgtgacctgctgttgggaggaagagaatggtcctacatcgtcgaaagatcatcagctgtaaatggcgactcggaccgatg

SEQ ID NO: 6808 - DNA, 203 bp, synthetic construct
  source 1..203: mol_type = other DNA
ggcgcgccagtcctaggactatttggagccatagctggattcatagaaggaggttggccaggactagtcgctggctggtatggtttccagcattcaaatgatcaaggggttggtatggctgcagatagggattcaactcaaaaggcaattgataaaataacatccaaggtgaataatatagtcgacaacgactcggaccgatg

SEQ ID NO: 6809 - DNA, 203 bp, synthetic construct
  source 1..203: mol_type = other DNA
ggcgcgccagtcctgcatggtccagctcaagctgccatgatgggaaggcatggttacatgtttgtgtcactggggatgatagaaatgcgactgctagcatcatttatgatgggatgcttaccgacagtattggttcatggtctaagaacatcctcagaactcaggagtcagaatgcgtttgcatcaatcgactcggaccgatg

SEQ ID NO: 6810 - DNA, 203 bp, synthetic construct
  source 1..203: mol_type = other DNA
ggcgcgccagtcctacaagcagcgtatatatagaagtattgcatttgactcaaggaacttgctgggagcagatgtacacaccaggaggggaggtaagaaatgatgatgttgaccaaagtttaatcattgctgctaggaacattgtcaggagagcaacagtatcagcagacccattggcttcactcctgcgactcggaccgatg

SEQ ID NO: 6811 - DNA, 203 bp, synthetic construct
  source 1..203: mol_type = other DNA
ggcgcgccagtcctgcaatcttacgaaaggggagaaagctaatgtattgatagggcaaggagacgtagtgttggtaatgaaacggaaacgggactctagcatacttactgacagccagacagcgaccaaaagaattcggatggccatcaattagtgtcgaattgtttaaaaacgaccttgtttctactcgactcggaccgatg

SEQ ID NO: 6812 - DNA, 203 bp, synthetic construct
  source 1..203: mol_type = other DNA
ggcgcgccagtcctaaacgatggaagttgtccagcaaacgagagtggataagctgacccaaggtcgccagacttatgactggacattgaatagaaaccagccggctgcaactgctttggccaacaccatagaagtattcagatcgaacggtctaacagccaatgagtcaggaaggttaatagatttcccgactcggaccgatg

SEQ ID NO: 6813 - DNA, 203 bp, synthetic construct
  source 1..203: mol_type = other DNA
ggcgcgccagtcctcaaatgttgtgagaaagatgatgactaactcacaagacacagagctctcctttacagttaccggagacaacaccaaatggaatgagaatcagaatcctcgaatatttctagcaatgataacatacatcacaaggaaccaacctgaatggtttagaaatgtcttgagcattgccccgactcggaccgatg

SEQ ID NO: 6814 - DNA, 203 bp, synthetic construct
  source 1..203: mol_type = other DNA
ggcgcgccagtcctagggaatacaagcaggagtggatagattctataggacttgcaagctagttggaatcaacatgagcaaaaagaagtcttacataaatcggacaggaacatttgagttcacaagctttttctaccgctatgggtttgtagccaacttcagcatggagctgcccagctttggagtttcgactcggaccgatg

SEQ ID NO: 6815 - DNA, 203 bp, synthetic construct
  source 1..203: mol_type = other DNA
ggcgcgccagtcctcatttgaattgaagaagctgtgggagcagacccgctcaaaggcaggactgttggtttcagatggagggccgaatttatacaacatccggaatcttcacattccagaagtttgcttgaagtgggagttgatggatgaagattaccagggaagactgtgtaaccctctgaacccgtcgactcggaccgatg

SEQ ID NO: 6816 - DNA, 203 bp, synthetic construct
  source 1..203: mol_type = other DNA
ggcgcgccagtcctttgtcagtcataaggaagttgaatccgtcaacaatgctgtggtaatgccagcccatggtccggccaagagcatggaatatgatgccgttgcaactacacattcatggattcccaagagaaatcgctccattctcaacactagccaaaggggaattcttgaggatgaacaaatgtcgactcggaccgatg

SEQ ID NO: 6817 - DNA, 203 bp, synthetic construct
  source 1..203: mol_type = other DNA
ggcgcgccagtcctaccagaagtgctgcactctattcgagaaattcttccctagcagttcatatcggaggccagttggaatttccagcatgatggaggccatggtgtctagggcccgaattgatgcacggattgacttcgagtctggaaggattaagaaagaagaatttgctgagatcttgaagatctcgactcggaccgatg

SEQ ID NO: 6818 - DNA, 203 bp, synthetic construct
  source 1..203: mol_type = other DNA
ggcgcgccagtccttcagatcgatagcaagctggatccagagtgagttcaacaaggcatgtgaattgaccgattcgagctggatagaactcgatgagataggggaagatgttgccccaattgagcacattgcaagcatgagaaggaactacttcacagcggaagtgtctcattgcagggccactgagtcgactcggaccgatg

SEQ ID NO: 6819 - DNA, 203 bp, synthetic construct
  source 1..203: mol_type = other DNA
ggcgcgccagtcctagatgaaatgggggatggaaatgagacgctgccttcttcaatctcttcaacagattgagagcatgatcgaggctgagtcttctatcaaagagaaagacatgaccaaagaattctttgaaaacagatcggagacatggccaattggagagtcacctaagggagtggaggaaggctcgactcggaccgatg

SEQ ID NO: 6820 - DNA, 203 bp, synthetic construct
  source 1..203: mol_type = other DNA
ggcgcgccagtccttgcgcttcttgcgtgaccggttagtactcttaacactctccgcctacttggtcgtcagcgctgtcttgggcacatctgttggggttagttcgacgctctacggtatcccccgcgtgacgaactacggtgttggggccgcttcgtgcgagccgatcgcctggtgtgtttcggctgcgactcggaccgatg

SEQ ID NO: 6821 - DNA, 203 bp, synthetic construct
  source 1..203: mol_type = other DNA
ggcgcgccagtcctcactagcgagtgttagtagtagtactgttgcttcgtagcggagcatgacggccgtgggaatccctccttggcaacaaggacccacggggccgaaagccacgtcctgaaggacccgtcatgtgtgcaaccccagcacggcagctttattatgaaacccactttaaggtgacactgcgactcggaccgatg

SEQ ID NO: 6822 - DNA, 203 bp, synthetic construct
  source 1..203: mol_type = other DNA
ggcgcgccagtcctgaatcggtaccgccttgcgaccaagcgaagtgtgtatggtggacggcacggacatgtgcctggctgacttccacgctggcattttcctgaaaggacaggaacacgctgtgtttgcctgtgtcacctccaacgggtggtacgcgattgacgacgaggacttttacccctggacgccgactcggaccgatg

SEQ ID NO: 6823 - DNA, 203 bp, synthetic construct
  source 1..203: mol_type = other DNA
ggcgcgccagtcctcggacccgtccgatgtcctggtatatgttccgtacgatcaagaaccactcaacggagaatggaaagcaaaggttcagaaacgactcaagggagccgggcaatccagcccggcaaccgggtcgcagaaccagtcaggcaacactggaagcatcattaacaactactacatgcagccgactcggaccgatg

SEQ ID NO: 6824 - DNA, 203 bp, synthetic construct
  source 1..203: mol_type = other DNA
ggcgcgccagtcctaataccagaattccatggacacacaacttggtgacaacgctattagcggaggctccaacgaaggttccacggacaccacttccacacacacaaacaacacccaaaacaacgattggttctcgcgcctagccagttcggccttcaccggactgtttggcgctcttttggccgacacgactcggaccgatg

SEQ ID NO: 6825 - DNA, 203 bp, synthetic construct
  source 1..203: mol_type = other DNA
ggcgcgccagtcctggtttttcaagaaacacctgtttgattggacaccaaatctatcgtttggacactgtcactacctggaactcccctccgaacacaaaggcgtgttcggcagcctcatggactcctacgcctacatgaggaacgggtgggacattgaggtgaccgctgttggaaaccagttcaatgcgactcggaccgatg

SEQ ID NO: 6826 - DNA, 203 bp, synthetic construct
  source 1..203: mol_type = other DNA
ggcgcgccagtcctgtggttgcctcctcgtcgcactcgtcccggagctgaaagaacttgacacgcggcagaagtaccagttgaccctcttcccacaccagttcatcaacccacgcaccaacatgacggctcacatcaacgtgccgttcgtgggtgtcaacaggtacgaccaatacaagctccacaagccgactcggaccgatg

SEQ ID NO: 6827 - DNA, 203 bp, synthetic construct
  source 1..203: mol_type = other DNA
ggcgcgccagtcctccacagaacccgagcgggccgcgcactgtatacattctgagtgggacactggtcttaattctaagttcaccttttccattccttacctctctgctgctgactacgcttacactgcttctgacgtggccgagaccacgagtgtgcagggatgggtgtgcatttatcagattacgccgactcggaccgatg

SEQ ID NO: 6828 - DNA, 203 bp, synthetic construct
  source 1..203: mol_type = other DNA
ggcgcgccagtcctttgctgttcttgcacagcgggtaagcaacaggctgcccacctccttcaactacggtgctgtgaaggctgacaccatcacggagctgttgatccgcatgaagcgtgcggagacatactgccccaggcctttgctagctcttgacaccacccacgaccgccgtaagcaggagatcacgactcggaccgatg

SEQ ID NO: 6829 - DNA, 203 bp, synthetic construct
  source 1..203: mol_type = other DNA
ggcgcgccagtcctctgataccggccttgagattctggacagcacgtttgtcgtgaagaagatctccgactcgctctccagtctctttcacgtcccggcccccgtcttcagtttcggagccccgattctgttggctgggttggtcaaggtcgcctccagtttcttccggtcaacacccgaagacctcgcgactcggaccgatg

SEQ ID NO: 6830 - DNA, 203 bp, synthetic construct
  source 1..203: mol_type = other DNA
ggcgcgccagtcctagcaacgggacctcaacgacccaagcaagtacaaggaggctaaggagtggctcgacaacgcgcgccaagcgtgtttgaagagcgggaacgtccacattgccaacctgtgcaaagtggtcgccccggctcccagcaagtcgggacccgatcccgtggtcgtttgtctccgtggcacgactcggaccgatg

SEQ ID NO: 6831 - DNA, 203 bp, synthetic construct
  source 1..203: mol_type = other DNA
ggcgcgccagtcctagccccaaccacctctacagaatgtctaccaacttgttcaggaggtgattgaccgggttgagctccacgagaaagtgtcgaaccacccgatcttcaaacaaatctcaattccttcccaaaagtccgtgttgtactttctcatcgagaagggacagcacgaagcagcaattgaatcgactcggaccgatg

SEQ ID NO: 6832 - DNA, 203 bp, synthetic construct
  source 1..203: mol_type = other DNA
ggcgcgccagtcctagcccaccaaacccgcggaagagcaaccacaagctgaaggaccctacgccgggccgctcgagcgtcagaaacctctgaaagtgaaagctaagctgccacagcaggagggaccctacgctggcccgatggagagacagaaaccactgaaagtgaaagtgaaagccccggtcgcgacgactcggaccgatg

SEQ ID NO: 6833 - DNA, 203 bp, synthetic construct
  source 1..203: mol_type = other DNA
ggcgcgccagtcctaggaaggaccttacgagggaccggtgaagaagcctgtcgctttgaaagtgaaagctaagaacctgattgtcactgagagtggtgccccaccgaccgacttgcaaaagatggttagtggcaacacaaagcctgttgagctcatcctcgacgggaagacagtagccatctgctgtgcgactcggaccgatg

SEQ ID NO: 6834 - DNA, 203 bp, synthetic construct
  source 1..203: mol_type = other DNA
ggcgcgccagtcctctactggagtgtttggcaccgcctacctcgtgcctcgtcatcttttcgctgagaagtatgacaagatcatgttggacggcagagccatgacagacagtgattacagagtgtttgagtttgagattaaagtaaaaggacaggacatgctctcagacgccgcgctcatggtgctgccgactcggaccgatg

SEQ ID NO: 6835 - DNA, 203 bp, synthetic construct
  source 1..203: mol_type = other DNA
ggcgcgccagtcctctggcctctttgcctacagagccgccaccaaggctggctactgtggaggagctgttctcgccaaggacggcgccgacacattcatcgttggcacacactccgcaggtggcaatggagttggatactgctcttgtgtttccaggtccgtgctccagaggatgaaggcacacattgcgactcggaccgatg

SEQ ID NO: 6836 - DNA, 203 bp, synthetic construct
  source 1..203: mol_type = other DNA
ggcgcgccagtcctaccctgaaccacaacacgaggggttgatcgttgacaccagagatgtggaagagcgtgtgcacgtcatgcgcaaaaccaagctagcacccaccgtggcacacggtgtgttcaaccctgagtttgggcccgccgccctgtccaacaaggacccgcgcctgaacgaaggagttgtcccgactcggaccgatg

SEQ ID NO: 6837 - DNA, 203 bp, synthetic construct
  source 1..203: mol_type = other DNA
ggcgcgccagtcctccatggagccagacaccgcgcctggccttccctgggctctccaggggaagcgccgcggcgcgctgatcgacttcgagaacggcacggtcggacccgaagttgaggctgccttgaagctcatggagaaaagagaatacaagtttgcttgccagaccttcctgaaggacgaggttccgactcggaccgatg

SEQ ID NO: 6838 - DNA, 203 bp, synthetic construct
  source 1..203: mol_type = other DNA
ggcgcgccagtcctcctacgagaacaaacgcatcactgttgaaggcgggatgccgtctggctgttccgcaactagcatcatcaacacaattctgaacaacatctacgtgctctacgcgctgcgtagacactatgagggagttgagctggacacttacaccatgatttcctacggggatgacatcgtggcgactcggaccgatg

SEQ ID NO: 6839 - DNA, 203 bp, synthetic construct
  source 1..203: mol_type = other DNA
ggcgcgccagtccttcgcaagtgattacgatctggactttgaggctcttaagccccacttcaaatctcttggccaaaccatcactccagctgacaaaagcgacaaaggttttgttcttggtcactccattgccgatgtcactttcctcaaaagacacttccacatggattatggaactgggttttacacgactcggaccgatg

SEQ ID NO: 6840 - DNA, 203 bp, synthetic construct
  source 1..203: mol_type = other DNA
ggcgcgccagtcctaacctgtgatggcttcgaagaccctcgaggccatcctctcctttgcacgccgtgggaccatacaggagaagttgatctccgtggcaggactcgcagtccactctggacctgacgagtaccggcgtctctttgagcccttccagggtctctttgagattccaagctacagatcaccgactcggaccgatg

SEQ ID NO: 6841 - DNA, 203 bp, synthetic construct
  source 1..203: mol_type = other DNA
ggcgcgccagtcctactctgacagagaatgaaaatcccgaagacattgactgctggtgctatggagtgcccaacgtgtatgtcacatacggacgttgcaaacatgatggacaaccgcgaaggaacagacgatccgtggctttgacaaaccatgttgaagaaacattgaacacccgtggagagaggtggcgactcggaccgatg

SEQ ID NO: 6842 - DNA, 203 bp, synthetic construct
  source 1..203: mol_type = other DNA
ggcgcgccagtccttacaaggcaaccctctcagaacataagacagccaaccattgcccaacggcaggagaagcctttttagatgaagagagtgatgaccaacatatttgcaaacgtgggttctctgaccgaggctggggaaatggatgtgggttatttggaaaaggaagtattgtcgcctgctcaaaacgactcggaccgatg

SEQ ID NO: 6843 - DNA, 203 bp, synthetic construct
  source 1..203: mol_type = other DNA
ggcgcgccagtcctgatgagccacacgctacaacagtcaccgtcacgagcatggggaaccaagaaggatccctgaaggcatccatggttggggctacaaaaatctcttattctgaaaacaaatatcacatcaaaggaggacatgcagtttgccaaatacaactacagggactaaccatgaaaggaagccgactcggaccgatg

SEQ ID NO: 6844 - DNA, 203 bp, synthetic construct
  source 1..203: mol_type = other DNA
ggcgcgccagtccttacccaacatcgccgcgtgaaattgctgccgtcattgcacaaacattctcaaatggcgcatgtgggctcaactctgtggatgagttagaacaccaaatgtggaaaggaattgaagatgaaattaaccacgttctaagtgagaatggtctggatctgtctgtagtcgtgcaggaccgactcggaccgatg

SEQ ID NO: 6845 - DNA, 203 bp, synthetic construct
  source 1..203: mol_type = other DNA
ggcgcgccagtcctggaacttggcaaattaccagattggaattacaatcatacagggaatgtctttggcctccaatgcacacagcaggaatcacttctgtgatggaaagtgatttgttcatgccccgagagctgggaggacctgtcaccttacataaccatatcccaggttacgcgacacaggtttatcgactcggaccgatg

SEQ ID NO: 6846 - DNA, 203 bp, synthetic construct
  source 1..203: mol_type = other DNA
ggcgcgccagtcctccatggtcacacgtcctgatgggcacaggtctgttaatagtgtcaactgtgcacccagctggattggttctggccgctttcgcattctggtattatcagtacaccaagcaacgcagcaatattctatgggaactaccagaagtcgccgagcggacaccaatgttgactgaaggacgactcggaccgatg

SEQ ID NO: 6847 - DNA, 203 bp, synthetic construct
  source 1..203: mol_type = other DNA
ggcgcgccagtcctgacctgcatccaggatctgggaaaacccgacaagtactgcccgctcttcttaggaaatgtgtggaaaaaaggcttagaacactcgtcctggctccaacaaaagtagtgttgagtgaaatgcatgaagcagttaaagacttaccagttaggttccacacgagcgccgcgctggaacgactcggaccgatg

SEQ ID NO: 6848 - DNA, 203 bp, synthetic construct
  source 1..203: mol_type = other DNA
ggcgcgccagtcctttggcagcagttgtgttaatgacagcaacacctcctggaacaagtgatccattcccggagtctaatgggacaatagaagacacacaggtgactattccagatgaaccttggaaaagaggcaacgaatggatacttgatgatccccggccaactgcgtggttcctgccttccatccgactcggaccgatg

SEQ ID NO: 6849 - DNA, 203 bp, synthetic construct
  source 1..203: mol_type = other DNA
ggcgcgccagtcctggagatttggtgtgctggaaagaagcgttgatgatcctggataacatggaaatccctggaggattcacgatgagcctctttggtagtgaggctaggaaagtcgagcacgttccaggggaataccgtttaaaaccagaagcaaggaaacggttcaggcaactgatgaggaagtatcgactcggaccgatg

SEQ ID NO: 6850 - DNA, 203 bp, synthetic construct
  source 1..203: mol_type = other DNA
ggcgcgccagtcctagaatgtttgctgacggacagacccaaaaagcgttcatagagtacgcaacaacaacacgatcaataacagccgtgatcgaaaaggtggctatggtgccagaggccttaaaagacaaggtgcaggatgctttcgacacctactacactttgtacaaggcagaagaaaaatcacgccgactcggaccgatg

SEQ ID NO: 6851 - DNA, 203 bp, synthetic construct
  source 1..203: mol_type = other DNA
ggcgcgccagtcctagttaccaaatcgctcttgaacagatacctgatgccctaataacgacattgtgcttgggagccttggctgcagccacaggaggaatccttctctatttgttgctgccaaaaggaatgtctcgcatgacactggctttcttcactatgttggtaacgggggctggtttatggatgcgactcggaccgatg

SEQ ID NO: 6852 - DNA, 203 bp, synthetic construct
  source 1..203: mol_type = other DNA
ggcgcgccagtcctgtcaactatggagccatatcattacagggaatatcccagggagcggctgccctttttcagatggacaaggggtatcctttcatgcggttgagaattccgctggttctgctgttggcaggggccatcaacaacctcactgccatcacagcaggactagggttcctatgtgctatgcgactcggaccgatg

SEQ ID NO: 6853 - DNA, 203 bp, synthetic construct
  source 1..203: mol_type = other DNA
ggcgcgccagtcctgctgcagtaggaatggctcatgccttatggaatgcccaggcaaatcgcagaggtggcacaggatccggaatgaccccaggggaggcttggaagaaacagctgaataagcttgggaaaacacaatttgagcagtacaagagatcatgcatacttgaagtggacaggacacatgcccgactcggaccgatg

SEQ ID NO: 6854 - DNA, 203 bp, synthetic construct
  source 1..203: mol_type = other DNA
ggcgcgccagtcctgtaatggccttcaccctgggtgtgcaagggcatgaaaagccaataatgagaacaactctagggtggaatctcataagattcaaggacaagacagatgtgttcaacatggaagtaatccctggggacacactgttatgtgacattggagaaagttcaccgagcattgcagtggaacgactcggaccgatg

SEQ ID NO: 6855 - DNA, 203 bp, synthetic construct
  source 1..203: mol_type = other DNA
ggcgcgccagtcctattgatgaggacaagataagacgacgggtggaccttctaagagaagagtacaagaagacctggttccatgatttaaaccatccatacaggacgtggcattacattggctcttacttgacaagaggaggaggaacagcggcatccatgaccaatggcatagtcaaactcatgtcacgactcggaccgatg

SEQ ID NO: 6856 - DNA, 203 bp, synthetic construct
  source 1..203: mol_type = other DNA
ggcgcgccagtcctcaaccatgggacgcagtggctggggtggcatgcatggccatgactgacacaacaccatttggacagcagagagtgtttaaagagaaagtggataccaaaccgccagaacccaacaagacagtgcgtcatgtgatggccatgactaatagctggatcatgaaatacttggccaggcgactcggaccgatg

SEQ ID NO: 6857 - DNA, 203 bp, synthetic construct
  source 1..203: mol_type = other DNA
ggcgcgccagtcctgaatgtagaacatgtgtgtacaacatgatggggaaacgagagaagaaaccatctgaatttgggaaagccaaagggagccgagccatatggtatatgtggctcggagctcggtttcttgagtttgaggcactgggtttcttaaatgaagatcactgggtctcccggaagaactctcgactcggaccgatg

SEQ ID NO: 6858 - DNA, 203 bp, synthetic construct
  source 1..203: mol_type = other DNA
ggcgcgccagtcctctgatcgggagggctaggatttcccctggaaatggctggttggttagagagactgccccattaagcaaggcctatgctaacatgtggaaactgttttactttcaccgtagagatctaaggctgatggctaatgcaatcaactcagctgtccccattgactgggtcccaacgggacgactcggaccgatg

SEQ ID NO: 6859 - DNA, 203 bp, synthetic construct
  source 1..203: mol_type = other DNA
ggcgcgccagtcctatgattggcacatcaaagagaagcagttgggctgaagctcttcctcacactgtacaaaaggtgagaggcattgtggggacacaagagaggtaccgtgattaccttgaaactcaaaacaggttcaggaccatagtccaacatcttgttggagatatcctgtgagagcaataaaaacgactcggaccgatg

SEQ ID NO: 6860 - DNA, 203 bp, synthetic construct
  source 1..203: mol_type = other DNA
ggcgcgccagtcctattttaaagacaaaagtgtcaggccaagattgagaaaatcttgccacagcttggcagactgtgcagcctgcagccctagagggagactgaccaactccctttagtagaaaaggtcagggaagaacttgaggatgggtgtggcctcaagatctcttctcaaaaaacggactgaaccgactcggaccgatg

SEQ ID NO: 6861 - DNA, 203 bp, synthetic construct
  source 1..203: mol_type = other DNA
ggcgcgccagtcctaccacacctagatgaagatagtaggggagcctccgccaatggtggctttacatattgagctactgcattggtcgatggggactagcggttagaggagaccctctcctacgcatggattttgcaatatgttgacatcagggaaagaccgggtgtttgtcggttccggagagctcccgactcggaccgatg

SEQ ID NO: 6862 - DNA, 203 bp, synthetic construct
  source 1..203: mol_type = other DNA
ggcgcgccagtcctggtcgatggggactagcggttagaggagaccctctcctacgcatggattttgcaatatgttgacatcagggaaagaccgggtgtttgtcggttccggagagctccggaggccagggcgccgtttgcccgtagtttataactggccttcggggatcgaaggagttgccaaacactcgactcggaccgatg

SEQ ID NO: 6863 - DNA, 203 bp, synthetic construct
  source 1..203: mol_type = other DNA
ggcgcgccagtcctgtcaaggttgagccacatacaggaaactatgtcgcggccaatgaaacccacagtgggaggaaaaccgcattgttcacagtctcttcggaaaaaacaattctaaccatgggcgaatacggagacgtgtcgctgatgtgcagagtcgctagtggcgtcgatctggcacaaaccgttcgactcggaccgatg

SEQ ID NO: 6864 - DNA, 203 bp, synthetic construct
  source 1..203: mol_type = other DNA
ggcgcgccagtcctgttcttgagctcgacaagacagcagaacacctccccacggcatggcaggttcacagagattggtttaacgatctagctctgccttggaaacatgagggaatggtgggttggaacaatgctgaacgcctggttgagtttggagttcctcatgccgtgaagatggatgtttacaaccgactcggaccgatg

SEQ ID NO: 6865 - DNA, 203 bp, synthetic construct
  source 1..203: mol_type = other DNA
ggcgcgccagtcctgagatgcagctccccccaggagacaacatcatctatgttggggaactaaaacaccagtggttccagaaggggagtagcattggtagagttttccagaaaacaaggaaaggcatagagaggctgacagtgctgggggaacatgcgtgggacttcggttccactggcggatttttgcgactcggaccgatg

SEQ ID NO: 6866 - DNA, 203 bp, synthetic construct
  source 1..203: mol_type = other DNA
ggcgcgccagtcctaccatgacgcttggagtgggggctgacgttggatgtgctgtggacactgaaagaatggaacttcgctgtggtgaaggtttggtcgtgtggagagaggtgtcagaatggtatgataactatgctttttaccctgaaacaccggcggcccttgcttcggctttgaaggagatggttcgactcggaccgatg

SEQ ID NO: 6867 - DNA, 203 bp, synthetic construct
  source 1..203: mol_type = other DNA
ggcgcgccagtcctgatcaaggtggcctggtgcgctcgatggtggtggctgacaatggagagctgctcagcgaaggaggaatccctggaattgtggcagtgttcgtggtccttgaatacatcattcgcaaaaggccgagtgcaggactgacggttgtgtggggaggagtcgtggtcttggcgctgcttcgactcggaccgatg

SEQ ID NO: 6868 - DNA, 203 bp, synthetic construct
  source 1..203: mol_type = other DNA
ggcgcgccagtcctgtcactggcatggtaacgctgcagagcatgctgcgttatgttattgctgtgggggtgacatttcacctcgagctagggccagaaatcgtggctttgatgctgctccaggcagtgttcgagctaagggtcggactcctcggtgcgtttgtgctgcgcagaagtctaacaacccgccgactcggaccgatg

SEQ ID NO: 6869 - DNA, 203 bp, synthetic construct
  source 1..203: mol_type = other DNA
ggcgcgccagtcctgaggtggtgaccatctattttctcctcttggtcctggaacttggtctgccgagcgcaaacctggaggccttgtgggggtgggcagacgcattagccatgggagcaatgatattcagagcttgcacggctgagggaaaaaccggactgggactcctgttggtggctctcatgacccgactcggaccgatg

SEQ ID NO: 6870 - DNA, 203 bp, synthetic construct
  source 1..203: mol_type = other DNA
ggcgcgccagtccttggggacaccgccaggtcggagttggctttggttctaagggcgtcctccacacaatgtggcacgtgactaggggagctgccatattcattgacaatgcagtggctggaccctattgggcagatgtgaaggaggatgttgtgtgctacgggggagcctggagcctggaggagaaacgactcggaccgatg

SEQ ID NO: 6871 - DNA, 203 bp, synthetic construct
  source 1..203: mol_type = other DNA
ggcgcgccagtccttggaaaggagaaaaggttcaagttcatgcctttcctccaggaagagctcatgaagtgcatcagtgccaacctggagaattggttctggatactggaaggaggattggtgcaatacccattgatctggcgaaagggacatccggcagccccatactcaacgcccagggggcggtgcgactcggaccgatg

SEQ ID NO: 6872 - DNA, 203 bp, synthetic construct
  source 1..203: mol_type = other DNA
ggcgcgccagtcctagacaaaaagggaagagtgtgatttgcctaaacagcaagacctttgaaaaagactattccagagttagagatgagaaaccagattttgtggtgacaacagacatttcagaaatgggggcaaatcttgatgtgagtcgcgtcatagatgggcgaacgaacattaagccagaggagcgactcggaccgatg

SEQ ID NO: 6873 - DNA, 203 bp, synthetic construct
  source 1..203: mol_type = other DNA
ggcgcgccagtcctgtggcatatgcttcgggacggcggagtcttggggacatgctgacaggaatgtcaggggttcctgagctcctgcgccacagatgcatgagtgccatggatgtcttttacacactgctttatgaggagcctggcagcagagcaatgaagatggcagagagagatgctccagaagcccgactcggaccgatg

SEQ ID NO: 6874 - DNA, 203 bp, synthetic construct
  source 1..203: mol_type = other DNA
ggcgcgccagtcctcttgtgttctacaccttgttgacagtgctgcagcctgaagctggcaagcagaggagcagcgacgacaacaagctggcttacttcctcctgacactctgcagcctagctggcctggtggctgccaacgagatgggattcctggaaaagaccaaggcagatttatctgctgtgctacgactcggaccgatg

SEQ ID NO: 6875 - DNA, 203 bp, synthetic construct
  source 1..203: mol_type = other DNA
ggcgcgccagtcctcaggccatgcgagatcttggggggggaactcctttctttggagtggctggacacgtcctgactctcggagtggtatccctagtgggagcgacaccaacctccttggtggtgggcgtaggactagcagcttttcacctggccatcgtggtgtccggcctggaggctgagctgacccgactcggaccgatg

SEQ ID NO: 6876 - DNA, 203 bp, synthetic construct
  source 1..203: mol_type = other DNA
ggcgcgccagtcctcagagagcccacaaagttttcttctcggcaatggtacgcaatcccatggtggacggagatgtcatcaacccatttggagatggggaagtgaaacctgccctgtatgaaaggaagatgagcttgatactggcgatgatcctgtgtttcatgtctgtggttttgaaccgaacggtgcgactcggaccgatg

SEQ ID NO: 6877 - DNA, 203 bp, synthetic construct
  source 1..203: mol_type = other DNA
ggcgcgccagtcctcccgcagttacggaggcatcggctgtaggactggcagcagcagggcagcttatcaggcctgaggctgacacgctctggaccatgccggtggcttgtgggctgagtggtgtggtcaggggaagcctatgggggtttctgcctcttgggcacaggctatggctgagaacttccggacgactcggaccgatg

SEQ ID NO: 6878 - DNA, 203 bp, synthetic construct
  source 1..203: mol_type = other DNA
ggcgcgccagtcctagaatggtgacaagcctgggttggaatttaatcaagtttagggctggaatgaatgtgtttaccatgcaaccacatcgcgctgatactgtgatgtgcgatattggagagagtagcccggacgccgccattgaaggtgagagaacccgcaaagtgatactgctcatggagcagtggcgactcggaccgatg

SEQ ID NO: 6879 - DNA, 203 bp, synthetic construct
  source 1..203: mol_type = other DNA
ggcgcgccagtcctcaatacagtgatacctggcatgtggatagggaacacccataccgaacgtggcagtactggggtagctatcgcacagcgcccactggctctgcagcttcactgattaatggagttgtgaagctcctcagctggccgtggaatgcacgggaagatgtggtgcggatggcaatgacacgactcggaccgatg

SEQ ID NO: 6880 - DNA, 203 bp, synthetic construct
  source 1..203: mol_type = other DNA
ggcgcgccagtcctttgaagaagctgtcgctgttggagggaggtcttttctatgcggacgacacagccggatgggacaccagggtcaccaatgcggatctggaagatgaagagcagatcctgcgttacatggaaggtgaacacaaacagctggcagccactgttatgcaaaaggcatatcatgccaagcgactcggaccgatg

SEQ ID NO: 6881 - DNA, 203 bp, synthetic construct
  source 1..203: mol_type = other DNA
ggcgcgccagtccttcacacaaccccaggctgctacgagtggagaggtggctgcgtgaccacggagaagaacgccttggaagaatgctgatcagtggagatgattgtgtggtgagacccatagatgacaggtttagcaaggccctctacttcttgaatgatatggccaagactagaaaggacatcggccgactcggaccgatg

SEQ ID NO: 6882 - DNA, 203 bp, synthetic construct
  source 1..203: mol_type = other DNA
ggcgcgccagtcctgaatgggagcattcagctggcttctcaagctgggaggaggttcccttctgctcgcaccatttccatgagttggtgatgaaggacggacgcaccctggtcgtgccatgccgagatcaggacgaactggtggggagggcacgcgtctcaccggggtgtggttggagtgtccgcgagcgactcggaccgatg

SEQ ID NO: 6883 - DNA, 203 bp, synthetic construct
  source 1..203: mol_type = other DNA
ggcgcgccagtcctgctggccggtggtagaaaaccccccaacagggtgccaaacggcaacacgccagtgagagtggcgacgggaacatggtcgctcccgacgtagggcactctatccaattttgtgagaccccccgcaccatggaaggccaaacatggtgcatgaagggaaaggcccccggaagcttgcgactcggaccgatg

SEQ ID NO: 6884 - DNA, 203 bp, synthetic construct
  source 1..203: mol_type = other DNA
ggcgcgccagtcctggaaaacgagtcaaacaagtggccccaccaccaactaggggtcacatggagagaggactctctctcttaaccaagaacgacaatgtgtcgcgacaggcaaaacggcaacgaaaccctcggcaacagctttctggaatctttggcggtggtgttggcgcctggctgcgtgtgctacgactcggaccgatg

SEQ ID NO: 6885 - DNA, 203 bp, synthetic construct
  source 1..203: mol_type = other DNA
ggcgcgccagtcctcacatggacatcggaacggcaatcttatggcttgccctggcaacggcatctctcggacagcgtatgtttaagcaactgaactctcttcgtaagcgcgtgaagcgcctcgaaaaacaacgtagtggaccgaaccttgtcatgatcattgggctcttggctcttggcttatgctatcgactcggaccgatg

SEQ ID NO: 6886 - DNA, 203 bp, synthetic construct
  source 1..203: mol_type = other DNA
ggcgcgccagtcctgattgtggatcaagcgttgaagggtttcatctacggtatcaccgttgtgtgccccaagtgcgacgtcgacgagctccccaaccacaagtctcaaaccaagttggcttgttggaggaagtggagatgattggcttcaggttctttcgtgaaaatgttcccgtcatcgtggtgtgccgactcggaccgatg

SEQ ID NO: 6887 - DNA, 203 bp, synthetic construct
  source 1..203: mol_type = other DNA
ggcgcgccagtcctatcgtgagggatgtcccgacccaattccaatttggcgacgttggcaccatcacgctcacgtgtggtgtcacaacagaccgcatagctggacactactatcacattcgtgagggagtcaaagctggattggtacttcgtgaggccgtggattcttggcctggcatgatcaaaatgcgactcggaccgatg

SEQ ID NO: 6888 - DNA, 203 bp, synthetic construct
  source 1..203: mol_type = other DNA
ggcgcgccagtcctggtgggttcacttccggcatggacaaaattgtcagatggggaattacaactgctaatgaaataaagatcgatggtctcatcaaccctcaaattgattggcaaacttcggtgcttagggacatacgatccatttctttcacgtgcgaaatgatctttgacaacatctcgttcagccgactcggaccgatg

SEQ ID NO: 6889 - DNA, 203 bp, synthetic construct
  source 1..203: mol_type = other DNA
ggcgcgccagtcctgaggatctgctgggaaacttgcggttctcatggtcttggttcccgagtagctggctggtcatggctttcataggtttggcgctattccttgttttcggaagagttggatcttttgttgtttttgtggtgatcatagctgtgtacgtgcggtcggtttctgctgacgtcggatgccgactcggaccgatg

SEQ ID NO: 6890 - DNA, 203 bp, synthetic construct
  source 1..203: mol_type = other DNA
ggcgcgccagtcctgtcactcatggacggcttgagggggatatgggattgttgccaactctctttgggtcatttcctgagaaaccctctgacaaggttatccggattgtggcgtcaagacctgatatccggcgtctctgtggaaaagcggtttctttccagtttcagtacacagggtttcgacgggctcgactcggaccgatg

SEQ ID NO: 6891 - DNA, 203 bp, synthetic construct
  source 1..203: mol_type = other DNA
ggcgcgccagtcctggaactatgcctgagataccaaaacctaagccaaaaatcgtggaggagccaataggagatgaatatgaccctgaagttgatgacatcctacacaactacggaaaagctcatgcctgttcggattttcgctcgtcgaactcacggacaggagttgggttcgacaggtccattctgcgactcggaccgatg

SEQ ID NO: 6892 - DNA, 203 bp, synthetic construct
  source 1..203: mol_type = other DNA
ggcgcgccagtcctaatctcctgtgtctcgcggtgtctcttcagttgatcggagcgaaaacacgggtttctacactgacgcgcctggttctcaccatcctagccatgctcatatttggaatgcccaacatattttcatctgtggggctttctgcttgggtcttgttggcagcatcatcatctttgcggcgactcggaccgatg

SEQ ID NO: 6893 - DNA, 203 bp, synthetic construct
  source 1..203: mol_type = other DNA
ggcgcgccagtcctctttatggcttgctagaactgtcagcggcagcgattctaatcggggcctacaacggaatatctcagacactcccaccggaagtcttggtattttgcctcgtgatgggttggaagacgtccctggccattctcaccgttgtgtctctgatgttcagtttgcacgcatgctacaggcgactcggaccgatg

SEQ ID NO: 6894 - DNA, 203 bp, synthetic construct
  source 1..203: mol_type = other DNA
ggcgcgccagtcctattgtcgtcctggtcggatgtgcgttaacctctgtatccttctttcttggagccttgtacgtagttgtagcttccagcacaaatctaccacttcatgtggtgcgctacatccgcataagactttcggagcagaacagatctgacgatcttcttggcattggagtgtccggcggtcgactcggaccgatg

SEQ ID NO: 6895 - DNA, 203 bp, synthetic construct
  source 1..203: mol_type = other DNA
ggcgcgccagtcctgttagtgatgactttggaaaaggatcatccggctcaccattcttcattaatggtgaccccgttgggttctatggtttcgggttttatgtggatggtatctaccgttcgatcgtggccggtggaaagcccactgatgtcaatgaacctatcggtgacgatgccaccaggcgtttccgactcggaccgatg

SEQ ID NO: 6896 - DNA, 203 bp, synthetic construct
  source 1..203: mol_type = other DNA
ggcgcgccagtcctatcacatggcatcccggaaaaggcaagacgcgccgggtcattgtcgaggaaaccaaacagaattacgcggccaacctgcgaaccatcatcctgaccccaacccgagtcgtcatggctgaggtgattgaagcattgaaaaactacgacatcaagtgtgacaaaaatttgtcgtaccgactcggaccgatg

SEQ ID NO: 6897 - DNA, 203 bp, synthetic construct
  source 1..203: mol_type = other DNA
ggcgcgccagtcctcaggccaatgcattggcagctgcgatccccggtgcggtcccactgcatcgtgcaaatttctctgccaactatgcccaggccagtagtgaagagacaaccttggtcgtgtcgacggatatctcggagatgggagccaaccttggagtcgacctcgtcattgatactcggaaagcgcgactcggaccgatg

SEQ ID NO: 6898 - DNA, 203 bp, synthetic construct
  source 1..203: mol_type = other DNA
ggcgcgccagtcctgtggtcgtgtggatcctggggtttctggtagcaatgctcaagcccacgaagatgtcttatgagtcgatgccgtctggggaccctttcaatggtggcatggtactcacagcccctagcgtcctccactacatgggagttcctctcggattctgtgtcatcatctttcttgctatgcgactcggaccgatg

SEQ ID NO: 6899 - DNA, 203 bp, synthetic construct
  source 1..203: mol_type = other DNA
ggcgcgccagtcctgaaccacaggaaactcaaagtcaagcatctactatctcggggtcattcttcacttctcgcgttaggggggagagggccacgatgttggactcgctgcaggtcttcttcttcgtaactgtgctaatgaatgaattcatcatctgggtgcaggagaactggatcgcacagatgtaccgactcggaccgatg

SEQ ID NO: 6900 - DNA, 203 bp, synthetic construct
  source 1..203: mol_type = other DNA
ggcgcgccagtcctgtgatgaaacaccccgaaatggtgagcactgtgggcggattcagacttgacagaattccgttcagagccgtgcttccatctggtttcgccatagtcaccacatccagcttgtccagctcactcgtcggtcttgcagcgtcaagcttgttcctaaccatcgcgtattatcagaaccgactcggaccgatg

SEQ ID NO: 6901 - DNA, 203 bp, synthetic construct
  source 1..203: mol_type = other DNA
ggcgcgccagtcctctggctgcccttgttgcacgattttctcggcacttggatagtatcgtcctgccccctcccgatttactcaagggaacccgagccgacccaactgccagcgtagcttctatggatgtgagtgatatggaggatcgtgtcaaacgaataaaacatgaaaaccagaccacctggtttcgactcggaccgatg

SEQ ID NO: 6902 - DNA, 203 bp, synthetic construct
  source 1..203: mol_type = other DNA
ggcgcgccagtcctgtcgatccagaacatccgtacaaaagcttcaagtactttggatcatttgtgactgatgatgttaaggttggtgggcaggcaattaacccgctcgtaagaaaaatcatgtggccttgggaagcgataacttcggttgttggattcctcatgaccgacgtctccacatactcgcaacgactcggaccgatg

SEQ ID NO: 6903 - DNA, 203 bp, synthetic construct
  source 1..203: mol_type = other DNA
ggcgcgccagtcctataggatcatggagcaagaatgtaccgtggagagatgtccaggatgccgttcaagatcaagccttctggaacctcgtcggacaagagcgacgccttcatctccaagggaaatgcgagatgtgtctttacaacactatgggaaagaaggagaagaaaccgagcctggctggtgagcgactcggaccgatg

SEQ ID NO: 6904 - DNA, 203 bp, synthetic construct
  source 1..203: mol_type = other DNA
ggcgcgccagtcctgccaagggatctcgaaccatctggtacatgtggctaggaagccgtttcctcgaatttgaggctcttggtttccttaacgctgaccactgggtgagccgggaaaacttccccggtggtgttggaggtctaggagtgaactacttcggatattacctaaaagacatcgctggtcgacgactcggaccgatg

SEQ ID NO: 6905 - DNA, 203 bp, synthetic construct
  source 1..203: mol_type = other DNA
ggcgcgccagtcctggtaaatatctctttgctgacgacatagctggatgggacacaaaaatcagctctgaggaccttgaagatgaggagaccttgttaaccgagctcacagccaatccataccataaagctctaattagagccaccatgaagctcgcttaccagaacatcgttgccatgttcccacgacgactcggaccgatg

SEQ ID NO: 6906 - DNA, 203 bp, synthetic construct
  source 1..203: mol_type = other DNA
ggcgcgccagtcctacccattcaaagtatggtagtgggacggtcatggatgtggtgggacggcgagatcaacgaggctctgggcaagtagtgacatatgccttgaacactgtgaccaatggcaaagtacaagtcgctagggtattggagagcgaaggattgctcaacgctgacatcaatgtgattgaccgactcggaccgatg

SEQ ID NO: 6907 - DNA, 203 bp, synthetic construct
  source 1..203: mol_type = other DNA
ggcgcgccagtcctaagtggcttaccaagaacatggaaaacgtcctgagtaacatggttatagcaggggatgatgtagtcgtctctactgacaacagagagttctcatcctctctcgagtaccttgagctgacgggaaagacgcggaagaacattccccaaggtgcaccctcccgaatggagtgcaatcgactcggaccgatg

SEQ ID NO: 6908 - DNA, 203 bp, synthetic construct
  source 1..203: mol_type = other DNA
ggcgcgccagtcctatgtgggccttgtacttctttcaccgacgtgatcttcgcttaggatttgtagccattacctcttctgtccccacaaactggtttcccattggacgcacctcttggtcaattcaccaacatcatgagtggatgacaacatgcgacatgctacgtgtgtggaatgacgtgtggatccgactcggaccgatg

SEQ ID NO: 6909 - DNA, 203 bp, synthetic construct
  source 1..203: mol_type = other DNA
ggcgcgccagtcctcacgacaacccatggatgaccatgaaggagcccatcaatgcctgggaagatatcccctatcttcataaaaaacaagacattgaatgtggcagtcttattggttccaaggaaagagccacctgggctcgcgacatggagaacagcgttctgagtgtccgcaagatcctggactcccgactcggaccgatg

SEQ ID NO: 6910 - DNA, 203 bp, synthetic construct
  source 1..203: mol_type = other DNA
ggcgcgccagtccttggagtttgcatctgtctctatcccaagccctcagtggtttaagacagggggtatttggaactgatttccataacccctcatgcgcgacttttagagcagggcacgaaagtgtcgggcatgacgcacccgctcccccgagtcccctgaaaatagggtgggcaatgcactcctgacgactcggaccgatg

SEQ ID NO: 6911 - DNA, 203 bp, synthetic construct
  source 1..203: mol_type = other DNA
ggcgcgccagtcctggcacgaaagtgtcgggcctgacgcacccgctcccccgagtcccctggaaacagggtgggcctcgaaaaatccaccgtaggaaggagcccaatcctacaagaaccctctggtcataggcacctgacctgggataagagtggcgccttatctcatatttagctagctggtggactcgactcggaccgatg

SEQ ID NO: 6912 - DNA, 203 bp, synthetic construct
  source 1..203: mol_type = other DNA
ggcgcgccagtcctgattgtgagcgatttgcgtgcgtgcatcccgcttcactgatctcttgttagatctttttgtaatctaaactttataaaaacatccactccctgtaatctatgcttgtgggcgtagatttttcatagtggtgtttatattcatttctgctgttaacagctttcagccagggacgtcgactcggaccgatg

SEQ ID NO: 6913 - DNA, 203 bp, synthetic construct
  source 1..203: mol_type = other DNA
ggcgcgccagtcctctggaaacagacggaatttgtcctgaaaatcatgtgatggtggattgtcgccgacttcttaaacaagagtgttgtgtgcagtctagcctaatacgtgaaattgttatgaatgcaagtccatatgatttggaggtgctacttcaagatgctttgcagtcccgtgaagcagttttgcgactcggaccgatg

SEQ ID NO: 6914 - DNA, 203 bp, synthetic construct
  source 1..203: mol_type = other DNA
ggcgcgccagtcctgttacaacccccttaggtatgtctttagaggcatgctatgtgagaggttgtaatcctaaaggatggaccatgggtttgtttcggcgtagaagtgtgtgtaacactggtcgttgcactgttaataagcatgtggcctatcagttatatatgattgatcctgcaggtgtctgtcttcgactcggaccgatg

SEQ ID NO: 6915 - DNA, 203 bp, synthetic construct
  source 1..203: mol_type = other DNA
ggcgcgccagtcctggtgcaggtcaattcgtgggttgggtcatacccttagcctttatgcctgtgcaatcccggaaatttattgttccatgggttatgtacttgcgtaagcgtggcgaaaagggtgcttacaataaagatcatggacgtggcggttttggacatgtttatgattttaaagttgaagatcgactcggaccgatg

SEQ ID NO: 6916 - DNA, 203 bp, synthetic construct
  source 1..203: mol_type = other DNA
ggcgcgccagtcctctttctccatgtaaggagcttgaaggtgtaggtgctaaagttagtgcctttttacagaaattagaggataatcccctatttttatttgatgaggctggcgaggaagttcttgctcctaaattgtattgtgcctttacagctcctgaagatgatgactttcttgaggaaagtgatcgactcggaccgatg

SEQ ID NO: 6917 - DNA, 203 bp, synthetic construct
  source 1..203: mol_type = other DNA
ggcgcgccagtcctgttgaagaagatgatgtagaaggtgaggaaactgatttaactgtcacaagtgctggacagccttgtgttgctagtgaacaggaggagtcttctgaagtcttagaggacactttggatgatggtccaagtgtggagacatctgattcacaagttgaagaagatgtagaaatgtcgcgactcggaccgatg

SEQ ID NO: 6918 - DNA, 203 bp, synthetic construct
  source 1..203: mol_type = other DNA
ggcgcgccagtcctgattttgttgatcttgaatctgtgattcaggattatgaaaatgtttgttttgagttttatactacagagccagaatttgttaaagttttgggtctgtatgtgcctaaagcaactcgcaacaattgctggttgcgatcagttttggcagtgatgcagaaattgccctgtcaatttcgactcggaccgatg

SEQ ID NO: 6919 - DNA, 203 bp, synthetic construct
  source 1..203: mol_type = other DNA
ggcgcgccagtccttggaaatgcattaaatgtgatttagctcttaagcttaaaggcttggatgctatgttcttttatggtgatgttgtttcacatatatgcaagtgtggtgagtctatggtacttattgatgttgatgtgccatttacagcccactttgctcttaaagataagttgttttgtgcatttcgactcggaccgatg

SEQ ID NO: 6920 - DNA, 203 bp, synthetic construct
  source 1..203: mol_type = other DNA
ggcgcgccagtcctgtgtttatgaggttttatattattattgcctcttttattaagctctttagcttgtttaggcatgttgcctatggttgtagtaaatctggttgtttgttttgttacaagaggaatcgtagtctacgtgttaaatgtagtactatcgttggtggcatgatacgctattacgatgttcgactcggaccgatg

SEQ ID NO: 6921 - DNA, 203 bp, synthetic construct
  source 1..203: mol_type = other DNA
ggcgcgccagtcctatggctaatggtggcactggcttttgttcaaaacatcaatggaattgcattgattgtgattcttataaaccaggtaatacttttattactgttgaggccgctcttgatctatctaaggaattgaaacggcccattcagcctacagatgttgcttatcatacggttactgatgttcgactcggaccgatg

SEQ ID NO: 6922 - DNA, 203 bp, synthetic construct
  source 1..203: mol_type = other DNA
ggcgcgccagtccttgtaataacttggtgccaacatatttgaagagtgacaacattgtggcagctgatttaggtgttctgattcaaaattctgcaaagcatgtgcagggtaatgttgctaaaatagctggtgtttcctgtatatggtctgtggatgcttttaatcagtttagttctgatttccagcatcgactcggaccgatg

SEQ ID NO: 6923 - DNA, 203 bp, synthetic construct
  source 1..203: mol_type = other DNA
ggcgcgccagtcctaaattgaagaaagcatgttgtaaaactggtttgaaactgaagcttacttataataagcagatggctaatgtctctgttttaactacaccctttagtcttaaagggggtgcagtttttagttattttgtttatgtgtgttttgtgttgagtttggtctgttttattggactgtggcgactcggaccgatg

SEQ ID NO: 6924 - DNA, 203 bp, synthetic construct
  source 1..203: mol_type = other DNA
ggcgcgccagtccttttatccgttttccagaagtgttgcgagaagggcttgtacgtatcgtgcgtactcgttctatgtcgtattgcagagttggattatgtgaggaagctgatgagggtatatgctttaattttaatggttcttgggtgcttaataatgattattatagatcattgcctgggacctttcgactcggaccgatg

SEQ ID NO: 6925 - DNA, 203 bp, synthetic construct
  source 1..203: mol_type = other DNA
ggcgcgccagtcctgataagtgttctgtagaagattttaatgtgtgggctctgtccaatggatttagccaagttaaatctgaccttgttatagatgctttagcttctatgactggtgtgtctttggaaacactgttggctgctattaagcgtcttaagaatggtttccaaggacgtcagattatgggtcgactcggaccgatg

SEQ ID NO: 6926 - DNA, 203 bp, synthetic construct
  source 1..203: mol_type = other DNA
ggcgcgccagtcctagttgctcttttgaggatgaattgacacctagcgatgtttatcaacaactcgctggtatcaagttacaatcaaaacgcactagattgtttaaaggcactgtttgttggattatggcttctacatttttgtttagttgcataattacagcatttgtgaaatggactatgtttatgcgactcggaccgatg

SEQ ID NO: 6927 - DNA, 203 bp, synthetic construct
  source 1..203: mol_type = other DNA
ggcgcgccagtcctggtacaatttcttctacagttagattgcaagctggaactgctactgaatatgcttccaactcatctatattgtctttatgtgcgttttctgtagatcctaagaaaacgtatttagattttatacaacaaggaggaacacctattgccaattgtgttaaaatgttgtgtgaccatcgactcggaccgatg

SEQ ID NO: 6928 - DNA, 203 bp, synthetic construct
  source 1..203: mol_type = other DNA
ggcgcgccagtcctgtgtcttatgttttgacacatgatgtttgtcgagtttgtggattttggcgggatggaagttgttcatgtgttagcactgacactactgttcaatcaaaagatactaattttttaaacgggttcggggtacgagtgtagatgcccgtctcgtaccctgcgccagtggtttatctacgactcggaccgatg

SEQ ID NO: 6929 - DNA, 203 bp, synthetic construct
  source 1..203: mol_type = other DNA
ggcgcgccagtcctgctatgagcgtgtaaaagattgtaagtttgtggctgaacacgatttctttacatttgatgtagaaggtagtcgtgtgccacacattgtacgcaaggatttaacaaagtatactatgttggatctttgctatgcattgcgacattttgatcgcaatgattgcatgctgctttgtgcgactcggaccgatg

SEQ ID NO: 6930 - DNA, 203 bp, synthetic construct
  source 1..203: mol_type = other DNA
ggcgcgccagtcctctaatacatgttttgggcctcttgttaggcaaatttttgtggatggtgtgccttttgttgtttcaattggctaccattataaagaacttggtattgtgatgaatatggatgtggatacacatcgttatcgcttgtctttaaaagacttgcttttatatgctgctgatccagcttcgactcggaccgatg

SEQ ID NO: 6931 - DNA, 203 bp, synthetic construct
  source 1..203: mol_type = other DNA
ggcgcgccagtcctctgtacttatgggttgggattatcctaagtgtgatcgtgctatgccaaacctactacgtattgttagtagtttggtattagcccgaaaacatgagacatgttgttcgcaaagcgataggttttatcgacttgcgaatgaatgcgcacaagttttgagtgaaattgttatgtgtgcgactcggaccgatg

SEQ ID NO: 6932 - DNA, 203 bp, synthetic construct
  source 1..203: mol_type = other DNA
ggcgcgccagtcctaaaaagcatataaatttttgaatataaatgattgcactcgtattgttccggccaaggtcagggtggagtgctatgataagtttaaaattaatgacaccactcgtaagtatgtgtttactaccataaatgcattacctgagatggtgactgatattgttgttgtagatgaagttacgactcggaccgatg

SEQ ID NO: 6933 - DNA, 203 bp, synthetic construct
  source 1..203: mol_type = other DNA
ggcgcgccagtcctgtatgcttaccaattatgagctttctgttattaatgctcgtattcgcgctaagcattatgtttatattggtgatcctgctcaattgccagcaccacgtgtgttattgagcaagggtacacttgaacctaaatattttaacactgttactaagctcatgtgttgcttagggccagcgactcggaccgatg

SEQ ID NO: 6934 - DNA, 203 bp, synthetic construct
  source 1..203: mol_type = other DNA
ggcgcgccagtcctttacccttgatgggtattgtaagctttttataactaaagaagaagctgttaaacgcgtgcgtgcctgggttggctttgatgctgaaggtgctcatgccacgcgtgatagcattgggacaaatttcccacttcaattaggattttccacaggaattgattttgttgtggaagccacgactcggaccgatg

SEQ ID NO: 6935 - DNA, 203 bp, synthetic construct
  source 1..203: mol_type = other DNA
ggcgcgccagtcctctggtttgtttgctgatagagatggttacagctttaaaaaggctgtggcgaaagctcctcctggtgaacaatttaagcacctcatccctttgatgacgagaggtcatcgctgggatgttgttagacctagaatagtacaaatgtttgcagatcatttaattgatctgtctgattcgactcggaccgatg

SEQ ID NO: 6936 - DNA, 203 bp, synthetic construct
  source 1..203: mol_type = other DNA
ggcgcgccagtcctgtgttgtgctagttacatgggcagccaactttgagctcacttgtctccgctactttgcaaaagtagggcgtgagatttcttgtaatgtatgcactaaacgtgccacagtttacaattctagaactggttactatggttgttggcgccatagtgttacatgtgattacttgtatacgactcggaccgatg

SEQ ID NO: 6937 - DNA, 203 bp, synthetic construct
  source 1..203: mol_type = other DNA
ggcgcgccagtcctttgttaagtctgttaagactcttttgtattcttttgaggcacataaggactcttttaaagacggtttgtgtatgttttggaactgtaatgtggataagtatccaccgaatgcagttgtatgtagatttgacactagagtgttgaataatttaaatcttcctggctgtaatggagcgactcggaccgatg

SEQ ID NO: 6938 - DNA, 203 bp, synthetic construct
  source 1..203: mol_type = other DNA
ggcgcgccagtcctaagattttcagtttatgctttggtgtaacgatgagaaagttatgactttctatcctcgtttgcaagctgcatctgactggaagcctggttattctatgcctgtattatataagtatttgaattctccaatggaaagagttagtctctggaattatgggaagccagttactttgccgactcggaccgatg

SEQ ID NO: 6939 - DNA, 203 bp, synthetic construct
  source 1..203: mol_type = other DNA
ggcgcgccagtcctatttgtgtaagcccaaggttgagatagatggaaatgttatgcatgccaattatttgttttggagaaattccacagtttggaacgggggtgcttatagcctgtttgatatggctaaattcccgcttaagttggctggtactgccgtaataaatttaagagcagaccagattaatgcgactcggaccgatg

SEQ ID NO: 6940 - DNA, 203 bp, synthetic construct
  source 1..203: mol_type = other DNA
ggcgcgccagtcctagattaaatttgagaatcctcacatcctaggaagatgcatagttttagatgttaaaggtgtagaagaattgcatgacgatttagttaattacattcgtgataaaggttgtgttgctgaccaatccaggaaatggattggccattgcaccatagctcaactcacggatgcagcaccgactcggaccgatg

SEQ ID NO: 6941 - DNA, 203 bp, synthetic construct
  source 1..203: mol_type = other DNA
ggcgcgccagtccttgtccattaaggaaaatgttgattttataaacagcatgcaattcaattataaaatcaccatcaacccctcatcaccggctagacttgaaatagttaagctcggtgctgaaaagaaagatggtttttatgaaaccatagttagtcactggatgggaattcgttttgaatacacatcgactcggaccgatg

SEQ ID NO: 6942 - DNA, 203 bp, synthetic construct
  source 1..203: mol_type = other DNA
ggcgcgccagtcctcacccactgataagctagctatgattatgggttattgttgtttagatgtggtacgtaaagagctagaagaaggcgatcttcccgagaatgatgatgatgcttggtttaagctatcgtaccattatgaaaacaattcttggttcttccgacatgtctacaggaaaagttttcattcgactcggaccgatg

SEQ ID NO: 6943 - DNA, 203 bp, synthetic construct
  source 1..203: mol_type = other DNA
ggcgcgccagtccttccttaccaacggcttttgctgttataggagatttaaagtgtacttcagatactagttatattaatgataaagacaccggtcctcctcctataagtactgatactgttgatgttactaatggtttgggtacttattatgttttagatcgtgtgtatttaaatactacgttgtttcgactcggaccgatg

SEQ ID NO: 6944 - DNA, 203 bp, synthetic construct
  source 1..203: mol_type = other DNA
ggcgcgccagtcctctgggtaatcatcgcaaagaactatggcatttggatacaggtgttgtttcctgtttatataagcgtaatttcacatatgatgtgaatgctgattatttgtattttcatttttatcaagaaggtggtactttttatgcatattttacagacactggtgttgttactaagtttttgcgactcggaccgatg

SEQ ID NO: 6945 - DNA, 203 bp, synthetic construct
  source 1..203: mol_type = other DNA
ggcgcgccagtcctagtgattttatgagtgagattaagtgtaaaacacaatctatagcaccacctactggtgtttatgaattaaacggttacactgttcagccaatcgcagatgtttaccgacgtaaacttaatcttcccaattgcaatatagaagcttggcttaatgataagtcggtgccctctccacgactcggaccgatg

SEQ ID NO: 6946 - DNA, 203 bp, synthetic construct
  source 1..203: mol_type = other DNA
ggcgcgccagtcctcctcgacctgcaggtgttcttactaatcatgatgtagtttatgcacaacactgtttcaaagctcctaaaaatttctgtccgtgtaaattgaatggttcgtgtgtaggtagtggtcctggtaaaaataatggtataggcacttgtcctgcaggtactaattatttaacttgtgatcgactcggaccgatg

SEQ ID NO: 6947 - DNA, 203 bp, synthetic construct
  source 1..203: mol_type = other DNA
ggcgcgccagtccttgtacaggaggtgccgaaattagggacctcatttgtgtgcaaagttataaaggcatcaaagtgttgcctccactgctctcagaaaatcagatcagtggatacactttggctgccacctctgctagtctatttcctctttggacagcagcagcaggtgtaccattttatttaaatcgactcggaccgatg

SEQ ID NO: 6948 - DNA, 203 bp, synthetic construct
  source 1..203: mol_type = other DNA
ggcgcgccagtcctgtcttaaatcagagctacatcaatctcaaggacattggtacatatgaatattatgtaaaatggccttggtatgtatggcttttaatctgccttgctggtgtagctatgcttgttttactattcttcatatgctgttgtacaggatgtgggactagttgttttaagaaatgtggtcgactcggaccgatg

SEQ ID NO: 6949 - DNA, 203 bp, synthetic construct
  source 1..203: mol_type = other DNA
ggcgcgccagtcctcaacccaagcaaactgctacctctcagcaaccatcaggagggaatgttgtaccctactattcttggttctctggaattactcagtttcaaaagggaaaggagtttgagtttgtagaaggacaaggtgtgcctattgcaccaggagtcccagctactgaagctaaggggtactggcgactcggaccgatg

SEQ ID NO: 6950 - DNA, 203 bp, synthetic construct
  source 1..203: mol_type = other DNA
ggcgcgccagtcctgacattgtcgatcgggacccaagtagcgatgaggctattccgactaggtttccgcctggcacggtactccctcagggttactatattgaaggctcaggaaggtctgctcctaattccagatctacttcgcgcacatccagcagagcctctagtgcaggatcgcgtagtagagcccgactcggaccgatg

SEQ ID NO: 6951 - DNA, 203 bp, synthetic construct
  source 1..203: mol_type = other DNA
ggcgcgccagtcctaaaccacagcgtcagcgtggtcataagaatggacaaggagaaaatgataatataagtgttgcagtgcccaaaagccgcgtgcagcaaaataagagtagagagttgactgcagaggacatcagccttcttaagaagatggatgagccctatactgaagacacctcagaaatataacgactcggaccgatg

SEQ ID NO: 6952 - DNA, 203 bp, synthetic construct
  source 1..203: mol_type = other DNA
ggcgcgccagtcctgagaatgaaccttatgtcggcatctggtggtaacccctcgcagaaaagtcgagataaggcactctctatcagaatggatgtcttgctgctataatagatagagaaggttatagcagactatagattaattagttgaaagttttgtgttgtaatgtatagtgttggagaaagtgacgactcggaccgatg

SEQ ID NO: 6953 - DNA, 203 bp, synthetic construct
  source 1..203: mol_type = other DNA
ggcgcgccagtccttgccattccttctgtagccgttcgcacctatagcgaagccgctgcacaaggttttcaggcatgccgttttgttgcttttggcttacaggattgtgtaaccggtattaatgatgatgattatgtcattgcattgactggtactaatcagctctgtgccaaaattttacctttttccgactcggaccgatg

SEQ ID NO: 6954 - DNA, 203 bp, synthetic construct
  source 1..203: mol_type = other DNA
ggcgcgccagtccttgatagaccccttaatttgcgaggttggctcattttttctaacagcaattatgttcttcaggactttgatgttgtttttggccatggtgcaggaagtgtggtttttgtggataagtacatgtgtggttttgatggtaaacctgtgttacctaaaaacatgtgggaatttagggacgactcggaccgatg

SEQ ID NO: 6955 - DNA, 203 bp, synthetic construct
  source 1..203: mol_type = other DNA
ggcgcgccagtccttgtgtctttatggcgtgttacagctgttcattctgatggaatgtttgtggcatcatcttcttatgatgcactcttgcatagaaattcattagaccctttttgctttgatgttaacactttactttctaatcaattacgtctagcttttcttggtgcttctgttacagaagatgtcgactcggaccgatg

SEQ ID NO: 6956 - DNA, 203 bp, synthetic construct
  source 1..203: mol_type = other DNA
ggcgcgccagtcctatttaaacgacttggtgattatgttcttactgaaaacgctcttgttcgtttgactactgaagttgttcgtggtgttcgtgatgctcgcataaagaaagccatgtttactaaagtagttgtaggtcctacaactgaagttaagttttctgttattgaacttgccactgttaatttcgactcggaccgatg

SEQ ID NO: 6957 - DNA, 203 bp, synthetic construct
  source 1..203: mol_type = other DNA
ggcgcgccagtcctgcgtcttgttgattgtgcacctgtagtttgccctaaaggtaagattgttgttattgctggacaagcttttttctatagtggtggtttttatcgttttatggttgatcctacaactgtattaaatgatcctgtttttactggtgatttattctacactattaagtttagtggtttcgactcggaccgatg

SEQ ID NO: 6958 - DNA, 203 bp, synthetic construct
  source 1..203: mol_type = other DNA
ggcgcgccagtccttaagcttgatggttttaaccatcagtttgttactgctagttctgctacagatgccattattgctgttgagctgttgttattggattttaaaactgcagtttttgtgtacacatgtgtggttgatggctgtagtgtcattgttagacgtgatgctacattcgctacacatgtgtgcgactcggaccgatg

SEQ ID NO: 6959 - DNA, 203 bp, synthetic construct
  source 1..203: mol_type = other DNA
ggcgcgccagtcctactgttgagtattgatgatggccatttatggaatctttttgttgaaaagtttaattttgttacagattggttaaaaactcttaagcttacacttacttctaatggtcttttaggtaattgtgccaaacgttttagacgtgttttggtaaaattgcttgatgtctataatggtttcgactcggaccgatg

SEQ ID NO: 6960 - DNA, 203 bp, synthetic construct
  source 1..203: mol_type = other DNA
ggcgcgccagtccttcttgaaactgtctgtagtgtcgcatacactgctggtgtttgcatcaaatattatgctgttaatgttccatatgtagttattagtggttttgtaagtcgtgtaattcgtagagaaaggtgtgacatgacttttccttgtgttagttgtgtcacctttttctatgaatttttagacgactcggaccgatg

SEQ ID NO: 6961 - DNA, 203 bp, synthetic construct
  source 1..203: mol_type = other DNA
ggcgcgccagtccttcatcaattagaatgtattgttgatgactctgttagagaagaggttgatataattgaacaaccttttgaagaagttgaacatgtgctctcaattaagcaacctttttctttttcttttagagatgaattgggtgttcgtgttttagatcaatctgataataattgttggattagcgactcggaccgatg

SEQ ID NO: 6962 - DNA, 203 bp, synthetic construct
  source 1..203: mol_type = other DNA
ggcgcgccagtccttgtttgttttgttgatgttgattttcatagtgtagaaatagaagctggtgaagttaaaccttttgctgtatataaaaatgttaaattttatttaggtgatatttcacaccttgtaaactgtgtttcttttgactttgttgtcaatgctgctaatgaaaatctcttgcatggaggcgactcggaccgatg

SEQ ID NO: 6963 - DNA, 203 bp, synthetic construct
  source 1..203: mol_type = other DNA
ggcgcgccagtcctacttgttgaagcttataattctattttatttgaaaatggtattccacttatgcctcttcttagttgtggtatttttggtgtaaggattgaaaattctcttaaagctttgtttagttgtgacattaataaaccattgcaagtttttgtttattcttcaaatgaagaacaagctgtcgactcggaccgatg

SEQ ID NO: 6964 - DNA, 203 bp, synthetic construct
  source 1..203: mol_type = other DNA
ggcgcgccagtcctaaaggcagcactttttgcttctttggatgtaaagccatatggttaccctaatgattttgttggtggttttagagttcttgggaccaccgacaataattgttgggttaatgcaacttgtataattttacagtatcttaagcctacttttaaatctaagggtttaaatgttctttgcgactcggaccgatg

SEQ ID NO: 6965 - DNA, 203 bp, synthetic construct
  source 1..203: mol_type = other DNA
ggcgcgccagtcctgcttaatggtattgcttatacaacattttcaggttcttttgataacggtcactatgtagtttatgatgctgctaataatgctgtctatgatggtgctcgtttattttcttcagatttgtctactttagctgttacagctattgttgtagtaggtggttgtgtaacatctaatgtcgactcggaccgatg

SEQ ID NO: 6966 - DNA, 203 bp, synthetic construct
  source 1..203: mol_type = other DNA
ggcgcgccagtccttccaacaattgttagtgagaaaatttctgttatggataaacttgatactggtgcacaaaaatttttccaatttggtgattttgttatgaataacattgttctgtttttaacttggttgcttagtatgtttagtcttttacgtacttctattatgaagcatgatattaaagttatcgactcggaccgatg

SEQ ID NO: 6967 - DNA, 203 bp, synthetic construct
  source 1..203: mol_type = other DNA
ggcgcgccagtccttgagtttttagctacatttattgtctgcaaaatcgttttatttgttagacatattattgttggctgtaataatgctgactgtgtagcttgttctaaaagtgctagacttaaacgtgtaccacttcaaactattattaatggtatgcataaatcattctatgttaatgctaatggcgactcggaccgatg

SEQ ID NO: 6968 - DNA, 203 bp, synthetic construct
  source 1..203: mol_type = other DNA
ggcgcgccagtccttgttaatgatggacgtgttgatgacggttacatttgtggtgatggtcttatagaccttcttgttaatgtactctcaatctttagttcatcttttagcgttgtggctatgtctggacatatgttgtttaattttctttttgcagcatttattacatttttgtgctttttagttaccgactcggaccgatg

SEQ ID NO: 6969 - DNA, 203 bp, synthetic construct
  source 1..203: mol_type = other DNA
ggcgcgccagtccttgttgagttttgttatttacaccaaattgagttaggtagtggtgctcatgttggttctgattttactggtagtgtttatggtaattttgatgaccaacctagtttgcaagttgagagtgccaaccttatgctatcagataatgttgttgcctttttgtatgctgctttgttgaacgactcggaccgatg

SEQ ID NO: 6970 - DNA, 203 bp, synthetic construct
  source 1..203: mol_type = other DNA
ggcgcgccagtccttggttgtaggtggtggttgtgttcaactagagttaatgttgatggttttaatgaatgggctatggctaatggttatacaagtgtttctagtgttgagtgctattctattttggcagcaaaaactggtgttagtgttgaacaattgttagcttccattcaacatcttcatgaaggcgactcggaccgatg

SEQ ID NO: 6971 - DNA, 203 bp, synthetic construct
  source 1..203: mol_type = other DNA
ggcgcgccagtccttaaagaagcacgctctgttaatagaaaatctaaagttattagtgctatgcactctttactttttggaatgttaagacgtttggatatgtctagtgttgaaactgttttgaatttagcacgtgatggtgttgtgccattgtcagttatacctgcaacttcagcttctaaactaaccgactcggaccgatg

SEQ ID NO: 6972 - DNA, 203 bp, synthetic construct
  source 1..203: mol_type = other DNA
ggcgcgccagtccttattgttagtccagatcttgaatcttattctaagattgtttgtgatggttctgttcattatgctggagttgtttggacacttaatgatgttaaagacaatgatggtagacctgttcatgttaaagagattacaaaggaaaatgttgaaactttgacatggcctcttatccttaacgactcggaccgatg

SEQ ID NO: 6973 - DNA, 203 bp, synthetic construct
  source 1..203: mol_type = other DNA
ggcgcgccagtcctacaagctggtaaacaaactgaattggctgttaattctggacttttaactgcttgtgctttttctgttgatccagcaactacttacttggaagctgttaaacatggtgcaaaacctgtaagtaattgtattaagatgttatctaatggtgctggtaatggtcaagctataacaaccgactcggaccgatg

SEQ ID NO: 6974 - DNA, 203 bp, synthetic construct
  source 1..203: mol_type = other DNA
ggcgcgccagtccttagtgtagatgctaacaccaatcaagattcttatggtggagcgtctatttgtttgtattgtcgggcccacgttcctcaccctagtatggatggttactgtaagtttaagggtaaatgtgttcaggttcctattggttgtttggatcctattaggttttgtttagaaaataatgtcgactcggaccgatg

SEQ ID NO: 6975 - DNA, 203 bp, synthetic construct
  source 1..203: mol_type = other DNA
ggcgcgccagtcctgtgtaatgtttgtggttgttggttgggacacgggtgtgcttgtgaccgtacaactattcaaagtgttgacatttcttatttaaacgagcaaggggttctagtgcagctcgactagaaccctgcaatggcacggacatcgataagtgtgttcgtgcttttgacatttataataaacgactcggaccgatg

SEQ ID NO: 6976 - DNA, 203 bp, synthetic construct
  source 1..203: mol_type = other DNA
ggcgcgccagtcctaatgtttcattcttgggtaagtgtttgaagatgaactgtgttcgttttaaaaatgctgatcttaaggatggttattttgttataaagaggtgtactaagtcggttatggaacacgagcaatccatgtataacctacttaacttttctggtgctttggctgagcatgatttctttcgactcggaccgatg

SEQ ID NO: 6977 - DNA, 203 bp, synthetic construct
  source 1..203: mol_type = other DNA
ggcgcgccagtcctacttggaaagatggcagagtcatttatggtaatgttagtagacataatcttactaaatatactatgatggacttggtctatgctatgcgtaactttgatgaacaaaattgtgatgttctaaaagaagtattagttttaactggttgttgtgacaattcttattttgatagtaagcgactcggaccgatg

SEQ ID NO: 6978 - DNA, 203 bp, synthetic construct
  source 1..203: mol_type = other DNA
ggcgcgccagtcctggttggtatgacccagttgaaaatgaagatatacatagagtttatgcatctcttggcaaaattgtagctagagctatgcttaaatgcgttgctctatgcgatgcgatggttgctaaaggtgttgttggtgttttaacattagataaccaagatcttaatggtaacttttatgatcgactcggaccgatg

SEQ ID NO: 6979 - DNA, 203 bp, synthetic construct
  source 1..203: mol_type = other DNA
ggcgcgccagtcctgttaaagattttgacttttaccgttataataagcctaccattttagatatttgtcaagctagagttacatataagatagtctctcgttattttgacatttatgaaggtggctgtattaaggcatgtgaagttgttgtaacaaatcttaataagagtgctggttggccattaaatcgactcggaccgatg

SEQ ID NO: 6980 - DNA, 203 bp, synthetic construct
  source 1..203: mol_type = other DNA
ggcgcgccagtcctagagctttgcctaacatgatacgtatgatttcagccatggtgttgggctctaagcatgttaattgttgtactgcaacagataggttttataggcttggtaatgagttggcacaagttttaacagaagttgtttattctaatggtggtttttattttaagccaggtggtacgactcgactcggaccgatg

SEQ ID NO: 6981 - DNA, 203 bp, synthetic construct
  source 1..203: mol_type = other DNA
ggcgcgccagtccttcattcattgatgattattatggttatcttaggaaacatttttcaatgatgattctctctgatgacggtgttgtctgttataacaaggattatgctgagttaggttatatagcagacattagtgcttttaaagccactttgtattaccagaataatgtctttatgagtacttctcgactcggaccgatg

SEQ ID NO: 6982 - DNA, 203 bp, synthetic construct
  source 1..203: mol_type = other DNA
ggcgcgccagtcctcttattggtaaacaaaagataactacaatacagggtcctcctggtagtggtaagtcacattgttccattggacttggattgtactacccaggtgcgcgtattgtttttgttgcttgtgcccatgctgctgttgattccttatgtgcaaaagctatgactgtttatagcattgatcgactcggaccgatg

SEQ ID NO: 6983 - DNA, 203 bp, synthetic construct
  source 1..203: mol_type = other DNA
ggcgcgccagtcctattaaccagcgtttatcatataaacatattgtttatgttggtgatccacaacaacttcctgcacctagagtaatgattactaaaggtgttatggagcctgttgattataacgttgttactcaacgtatgtgtgctataggccctgatgtttttcttcataaatgttatagatgtcgactcggaccgatg

SEQ ID NO: 6984 - DNA, 203 bp, synthetic construct
  source 1..203: mol_type = other DNA
ggcgcgccagtcctaaccaccacacattctgtaacattcatagaaacgagcatgatgcctctggtgatgctgttatgacacgttgtttggcagtacatgattgttttgtcaaaaatgttgattggactgtaacgtacccctttattgcaaatgagaaatttatcaatggctgtgggcgtaatgtccagcgactcggaccgatg

SEQ ID NO: 6985 - DNA, 203 bp, synthetic construct
  source 1..203: mol_type = other DNA
ggcgcgccagtcctggacatgttgttcgtgcagccttgaaattgtataaacctagtgttattcatgacattggtaatcctaaaggtgtacgttgtgctgttactgatgccaaatggtactgttatgacaagcaacctgttaatagtaatgtcaagttgttggattatgattatgcaacccatggtcaacgactcggaccgatg

SEQ ID NO: 6986 - DNA, 203 bp, synthetic construct
  source 1..203: mol_type = other DNA
ggcgcgccagtccttttgttaaattaaaacctatgccctttttttactttgatgacagtgattgtgatgttgtgcaagaacaagttaattatgtaccccttcgcgctagtagttgtgttactcgttgtaatataggtggtgctgtttgttcaaaacatgcaaatttgtatcaaaaatatgttgaggcacgactcggaccgatg

SEQ ID NO: 6987 - DNA, 203 bp, synthetic construct
  source 1..203: mol_type = other DNA
ggcgcgccagtcctcttattggtattaattatttaggtgactttattcaaggtccttttatagctggtaacactgttcatgctaattatatattttggcgtaattctactattatgtctttgtcatacaattcagttttagatttaagtaagtttgaatgtaaacataaagccactgttgttgttacacgactcggaccgatg

SEQ ID NO: 6988 - DNA, 203 bp, synthetic construct
  source 1..203: mol_type = other DNA
ggcgcgccagtcctgtaatgctaatctctctatgttacaattaggtgttcctgacaattcttcaactattgttacgggtttattgccaactcattggttttgtgctaatcagagtacatctgtttactcagccaatggtttcttttatattgatgttggtaatcaccgtagtgcttttgcgctccatacgactcggaccgatg

SEQ ID NO: 6989 - DNA, 203 bp, synthetic construct
  source 1..203: mol_type = other DNA
ggcgcgccagtcctccacacataatggccgtgtagttaactacactgtttgtgatgattgtaatggttatactgataacatattttctgttcaacaggatggccgcattcctaatggtttcccttttaataattggtttttgttaactaatggttccacactagtggacggggtctctagactttatccgactcggaccgatg

SEQ ID NO: 6990 - DNA, 203 bp, synthetic construct
  source 1..203: mol_type = other DNA
ggcgcgccagtccttaccacccactgtgcgtgaaattgttgttgctagaactggccagttttatattaatggttttaagtatttcgatttgggtttcatagaagctgtcaattttaatgtcacgactgctagcgccacagatttttggacggttgcatttgctacttttgttgatgttttggttaatgcgactcggaccgatg

SEQ ID NO: 6991 - DNA, 203 bp, synthetic construct
  source 1..203: mol_type = other DNA
ggcgcgccagtcctctgaaggtaattctattactggtgtaccttatcctgtctctggtattcgtgagtttagtaatttagttttaaataattgtaccaaatataatatttatgattatgttggtactggaattatacgttcttcaaaccagtcacttgctggtggtattacatatgtttctaactctgcgactcggaccgatg

SEQ ID NO: 6992 - DNA, 203 bp, synthetic construct
  source 1..203: mol_type = other DNA
ggcgcgccagtcctttgactataagtcttgtactaaaggtctttctattgctgaccttgcttgtgctcagtactacaatggcataatggttttgccaggtgttgctgatgctgaacgtatggccatgtacacaggttctcttataggtggcatggtgctcggaggtcttacatcagcagccgccataccgactcggaccgatg

SEQ ID NO: 6993 - DNA, 203 bp, synthetic construct
  source 1..203: mol_type = other DNA
ggcgcgccagtcctttactttgctttattcaaacctcttactgctagaggtcgtgttgcttgttttgttttaaaactattgacactatttgtctatgtgcctttattggttctttttggtatgtatcttgacagttttataattttttctacgctgttgtttcgattcatacatgttggctattatgccgactcggaccgatg

SEQ ID NO: 6994 - DNA, 203 bp, synthetic construct
  source 1..203: mol_type = other DNA
ggcgcgccagtccttgacctttatgttgctattagaggttcttgtgaaaagaacctacaacttatgcgtaaggttgacttgtataatggtgctgtcatttacatttttgccgaagagcctgttgttggtatagtctactcttctcaactatacgaagatgttccttcgattaattgatgacaatggtacgactcggaccgatg

SEQ ID NO: 6995 - DNA, 203 bp, synthetic construct
  source 1..203: mol_type = other DNA
ggcgcgccagtcctgggtcagttgcctaaatatgtaatagttgctacgcctagtaccacaattgtttgtgaccgtgttggtcgctctgttaatgaaacaagccagactggttgggcattctacgtccgtgctaaacatggtgatttttctggtgttgcctctcaggagggtgttttgtcagaaagagacgactcggaccgatg

SEQ ID NO: 6996 - DNA, 203 bp, synthetic construct
  source 1..203: mol_type = other DNA
ggcgcgccagtcctgaagttgcttcatttaatctaaactaaacaaaatggctagtgtaaattgggccgatgacagagctgctaggaagaaatttcctcctccttcattttacatgcctcttttggttagttctgataaggcaccatatagggtcattcccaggaatcttgtccctattggtaagggtacgactcggaccgatg

SEQ ID NO: 6997 - DNA, 203 bp, synthetic construct
  source 1..203: mol_type = other DNA
ggcgcgccagtcctaacccagggctgataagccttctcagttgaagaaacctcgttggaagcgtgttcctaccagagaggaaaatgttattcagtgctttggtcctcgtgattttaatcacaatatgggggattcagatcttgttcagaatggtgttgatgccaaaggttttccacagcttgctgaatcgactcggaccgatg

SEQ ID NO: 6998 - DNA, 203 bp, synthetic construct
  source 1..203: mol_type = other DNA
ggcgcgccagtcctcgtttagcgcatgataagggtttagtcttacacacaatggtaggccagtgatagtaaagtgtaagtaatttgctatcatattaacatgtctagaggaaagtcagaactttttctgtttgtgttgttggagtacttaaagatcgcatacgcgcgccaacaatggaagagccaacacgactcggaccgatg

SEQ ID NO: 6999 - DNA, 203 bp, synthetic construct
  source 1..203: mol_type = other DNA
ggcgcgccagtcctttcgaagatgaagctcctcttgctagcaaatttattttagacaattatggtctagtcaaagaaatgagatcaaagtttgcaaacaaacctctgaataaagaagtagttgcacacatgttagaaaaacaattcaatccggaaagtagattcttgcctgttttcggagctataaggcgactcggaccgatg

SEQ ID NO: 7000 - DNA, 203 bp, synthetic construct
  source 1..203: mol_type = other DNA
ggcgcgccagtcctaaggtcttaccctttacttatttcgccccaaaacagggaatgtttgaaggaaggcttttctttagcaacgatagctttgttgagcctggagtaaataacaatgtattttcttggagtaaggctgacagttctaaaatatattgtcatggaatagcgataagggtacctttagttcgactcggaccgatg

SEQ ID NO: 7001 - DNA, 203 bp, synthetic construct
  source 1..203: mol_type = other DNA
ggcgcgccagtcctctcaatgccaggatgaacagtgatcagtttgcagttaatataactggagacaatagtaaatggaatgaatgccaacaacctgaggcttatttagcacttttggcttacatcaccaaagactcctctgatttaatgaaagacttatgcagtgttgctccagtgcttttctgtaatcgactcggaccgatg

SEQ ID NO: 7002 - DNA, 203 bp, synthetic construct
  source 1..203: mol_type = other DNA
ggcgcgccagtcctataaaaaccatagaaaataaagatggattattaattgctgatggtgggaaactgatgaacaacattagcacccttcatattcctgaggaagtactgaagtttgaaaaaatggatgaacaatatagaaatagggtattcaaccccaaaaatccctttactaactttgacaaaactcgactcggaccgatg

SEQ ID NO: 7003 - DNA, 203 bp, synthetic construct
  source 1..203: mol_type = other DNA
ggcgcgccagtcctattgatatatttagagcacatggcccaataagggttgaagaaaatgaagcagtagtttcaactcatagcttcagaactagagcaaacagaaccctattgaatacagatatgagagcaatgatggcagaagagaaaagatatcaaatggtttgcgacatgtttaaaagcgtgtttcgactcggaccgatg

SEQ ID NO: 7004 - DNA, 203 bp, synthetic construct
  source 1..203: mol_type = other DNA
ggcgcgccagtcctgatagatttgtgctcattgaaggaagaaaaagaggaactgcagtgtctttacaaaatgagctatgtaaaagttatgatcttgaaccactaccttttctttgtgacatttttgacagggaggaaaaacaattcgttgaaattggaataacaagaaaagcagatgatagctattttcgactcggaccgatg

SEQ ID NO: 7005 - DNA, 203 bp, synthetic construct
  source 1..203: mol_type = other DNA
ggcgcgccagtcctaatattaaattaccaataaaacattatgagcagaataaatttcgacaaatacgtctaccaaagggaccaatggcaccctatacccacaagttcttaatggaagaagcatggatgtttacaaaaattagtgatccagaaagatcaagagctggtgaaattctcattgatttcttccgactcggaccgatg

SEQ ID NO: 7006 - DNA, 203 bp, synthetic construct
  source 1..203: mol_type = other DNA
ggcgcgccagtcctactgtatttgaagcaggacacacaacagttagaatgaagaaaggagagtcagttattggaagagaagtccctctttatttatactgtaggacaactgccctttccaaaatcaagaatgactggctatcaaaggctagaagatgtttcatcacaactatggacacagtggaaacccgactcggaccgatg

SEQ ID NO: 7007 - DNA, 203 bp, synthetic construct
  source 1..203: mol_type = other DNA
ggcgcgccagtcctactccagggtgcatgttgatccaaaagcaaaagccatacattggagaagctgatgatcaccatggagatcaagaaatgagggagttgctgtcaggactggactatgaagctagatgcatatcacaatcagggtgggtgaatgaaaccagcccttttacggaagaatacctccttcgactcggaccgatg

SEQ ID NO: 7008 - DNA, 203 bp, synthetic construct
  source 1..203: mol_type = other DNA
ggcgcgccagtcctccaggttgctgggtaattgacaataacatttgtgatcaaagttgtcaaaactttattttcaagttcaacgaaactgcacctgttccaaccattccccctcttgacacaaaaattgatctgcaatcagatcctttttactggggaagcagcttgggcttagcaataactgctgctcgactcggaccgatg

SEQ ID NO: 7009 - DNA, 203 bp, synthetic construct
  source 1..203: mol_type = other DNA
ggcgcgccagtcctattttcaagttcaacgaaactgcacctgttccaaccattccccctcttgacacaaaaattgatctgcaatcagatcctttttactggggaagcagcttgggcttagcaataactgctgctatttcattggcagctttggtgatctctgggatcgccatctgcagaactaaatgacgactcggaccgatg

SEQ ID NO: 7010 - DNA, 203 bp, synthetic construct
  source 1..203: mol_type = other DNA
ggcgcgccagtccttgccttggtgtatgtggttggctgccagacttactctgaaagatgagtttgccaatttctgtgcatatgcaggaagaagagcctttgaagtcttcaatattgcaatggagaaaattggaatttgttcctttcaagggacaataatgaacgatgatgaaattgaatcaatagaggcgactcggaccgatg

SEQ ID NO: 7011 - DNA, 203 bp, synthetic construct
  source 1..203: mol_type = other DNA
ggcgcgccagtcctgggcagagtttgctcaaagatttgctcttcaggcaaatacttcaagagaaggcgctcaaatcagcaattcagcagtttttgcagtggaaaggaagataaccacagatgtccaaagagttgaagagctactaaataaagttcaagctcatgaagatgaaccattacaaacactttcgactcggaccgatg

SEQ ID NO: 7012 - DNA, 203 bp, synthetic construct
  source 1..203: mol_type = other DNA
ggcgcgccagtcctgcctctttgggattagggataattactatgttgtatttattagtaaaaatcataattgaacttgtcaatggttttgtgctcggcagatgggagagatggtgtggagatataaagaccacaattatgcctgaaattgactcgatggaaaaagatattgccctttctagggagagacgactcggaccgatg

SEQ ID NO: 7013 - DNA, 203 bp, synthetic construct
  source 1..203: mol_type = other DNA
ggcgcgccagtcctttcccatcgctttggagcattactcacaatgttttcgctaccatcagccacaatgctcaatcatgtcaaattagctgaccagtcaccagaagctgatatcgaaagggtagagatcgatggctttgaggagggatcattccgcttaatccccaatgcacgttcaggtatgagccgcgactcggaccgatg

SEQ ID NO: 7014 - DNA, 203 bp, synthetic construct
  source 1..203: mol_type = other DNA
ggcgcgccagtcctgactgcgccagaccaacctgctgcttctattgagaaacgcctgcaaaaatatcgtcagcaaggcaggatcaacccgagatatctcctgcaaccggaggctcgacgaataatccagaatgtaatccggaagggaatggtggtcagacatttcctcacctttgaactgcagcttgccgactcggaccgatg

SEQ ID NO: 7015 - DNA, 203 bp, synthetic construct
  source 1..203: mol_type = other DNA
ggcgcgccagtcctcctcatggcattataccagacccttggtgagcaggcccgatatttggccctattggagtcaccacatttgatggattttgctgcagcaaactacccactgctatatagctatgctatgggaataggctatgtgttagatgtcaacatgaggaactacgctttctccagatcatacgactcggaccgatg

SEQ ID NO: 7016 - DNA, 203 bp, synthetic construct
  source 1..203: mol_type = other DNA
ggcgcgccagtcctcaacccgttctcatctgtcactgggacaactcaggtgcccgctgcagcaacaggtgacacactcgagagttacatggcagcggatcgactgaggcagagatatgctgatgcaggcacccatgatgatgagatgccaccattggaagaggaggaagaggacgacacatctgcaggcgactcggaccgatg

SEQ ID NO: 7017 - DNA, 203 bp, synthetic construct
  source 1..203: mol_type = other DNA
ggcgcgccagtcctaaatctgatgacacggttcatcgaggaacccagagagaatcctatcgcaaccagttcccccatcgattttaagaggggcagggataccggcgggttccatagaagggagtactcaatcggatgggtgggagatgaagtcaaggtcactgagtggtgcaatccatcctgttctcccgactcggaccgatg

SEQ ID NO: 7018 - DNA, 203 bp, synthetic construct
  source 1..203: mol_type = other DNA
ggcgcgccagtcctaatcaccgctgcagcaaggcgatttgaatgcacttgtcaccagtgtccagtcacttgctctgaatgtgaacgagatacttaatacagtgagaaatttggactctcggatgaatcaactggagacaaaagtagatcgcattctctcatctcagtctctaatccagaccatcaagacgactcggaccgatg

SEQ ID NO: 7019 - DNA, 203 bp, synthetic construct
  source 1..203: mol_type = other DNA
ggcgcgccagtcctatgacatagttggacttaaagcagggatggctactttagaaggaatgattacaactgtgaaaatcatggacccgggagttcccagtaatgttactgtggaagatgtacgcaagacactaagtaaccatgctgttgttgtgccagaatcattcaatgatagtttcttgactcaatcgactcggaccgatg

SEQ ID NO: 7020 - DNA, 203 bp, synthetic construct
  source 1..203: mol_type = other DNA
ggcgcgccagtccttcaaccaggcttccagtgaggctcagctaattgacctcaagaaagcaatcatccgcagtgcaatttgatcaagaaacacccaattacactacactggtatgacactgtactaaccctgagggttttagaaaaaacgattaacgataaataagcccgaacactacacactacctgcgactcggaccgatg

SEQ ID NO: 7021 - DNA, 203 bp, synthetic construct
  source 1..203: mol_type = other DNA
ggcgcgccagtcctaggcagccatgccatccatcagcattcccgcagaccccaccaatccacgtcaatcaataaaagcgttcccaattgtgatcaacagtgatgggggtgagaaaggccgcttggttaaacaactacgcacaacctacttgaatgacctagatactcatgagccactggtgacattcacgactcggaccgatg

SEQ ID NO: 7022 - DNA, 203 bp, synthetic construct
  source 1..203: mol_type = other DNA
ggcgcgccagtcctttaggaagacatccagcaaagcggaagagatggtctttgaaattgttaagtatccgagaatatttcggggtcatacattaatccagaaaggactagtctgtgtctccgcagaaaaatttgttaagtcaccagggaaaatacaatctggaatggactatctcttcattccgacatcgactcggaccgatg

SEQ ID NO: 7023 - DNA, 203 bp, synthetic construct
  source 1..203: mol_type = other DNA
ggcgcgccagtcctaaatcatgggtactataattcaatttctggtggtctcctgtctattggcaggagcaggcagccttgatccagcagccctcatgcaaatcggtgtcattccaacaaatgtccggcaacttatgtattatactgaggcctcatcagcattcattgttgtgaagttaatgcctacaacgactcggaccgatg

SEQ ID NO: 7024 - DNA, 203 bp, synthetic construct
  source 1..203: mol_type = other DNA
ggcgcgccagtccttggccaccatttctgcattcattaacaatcaagaagtcatggcccaattaccaacacgtgttatggtgactggcagcttgatccaagcctatcccgcatcgcaatgcaccattacacccaacactgtgtactgtaggtataatgatgcccaagtactctcagatgatactatggcgactcggaccgatg

SEQ ID NO: 7025 - DNA, 203 bp, synthetic construct
  source 1..203: mol_type = other DNA
ggcgcgccagtcctcttgcctccaaggtaacttgacaagatgcaccttctctccagtggttgggagctttctcactcgattcgtgctgttcgatggaatagtttatgcaaattgcaggtcgatgttgtgcaagtgcatgcaacctgctgctgtgatcctacagccgagttcatcccctgtaactgtcacgactcggaccgatg

SEQ ID NO: 7026 - DNA, 203 bp, synthetic construct
  source 1..203: mol_type = other DNA
ggcgcgccagtcctgaatggagaattttgtttatcataaataagcattccaccactcacgatctgatctcagtgagaaaaatcaacctgcaactcttggaacaagataagacagtcatccattagtaatttttaagaaaaaaacgataggaccgaacctagtattgaaagaaccgtctcggtcaatctcgactcggaccgatg

SEQ ID NO: 7027 - DNA, 203 bp, synthetic construct
  source 1..203: mol_type = other DNA
ggcgcgccagtcctcatcaatcagttctatttttcaattgctgagggtcgcaatctgacacttggcccacttcttaatatgcctagtttcattccaactgccacgacaccagagggctgcaccaggatcccatcattctcgctcactaagacacactggtgttatacacacaatgttatcctgaatggcgactcggaccgatg

SEQ ID NO: 7028 - DNA, 203 bp, synthetic construct
  source 1..203: mol_type = other DNA
ggcgcgccagtcctttctactcaaccagagagggatgactacttttctgccgctcctccagaacaacgaattattataatgtactataatgatacaatcgtggagcgcataattaatccacccggggtactagatgtatgggcaacattgaacccaggaacaggaagcggggtatattatttaggttgcgactcggaccgatg

SEQ ID NO: 7029 - DNA, 203 bp, synthetic construct
  source 1..203: mol_type = other DNA
ggcgcgccagtccttcagtctgggatcctggcatgtcctcttcgacaggatctaaccaatgagtgtttagttctgcccttttctaatgatcaggtgcttatgggtgctgaagggagattatacatgtatggtgactcggtgtattactatcaaagaagcaatagttggtggcctatgaccatgctgtacgactcggaccgatg

SEQ ID NO: 7030 - DNA, 203 bp, synthetic construct
  source 1..203: mol_type = other DNA
ggcgcgccagtccttaccagtacatttggatcagaagcaaccttcactggttcttatctcaacacagcaactcagcgtatcaatccgacgatgtatatcgcgaacaacacacagatcataagctcacagcaatttggatcaagcggtcaagaagcagcatatggccacacaacctgttttagggacaccgactcggaccgatg

SEQ ID NO: 7031 - DNA, 203 bp, synthetic construct
  source 1..203: mol_type = other DNA
ggcgcgccagtcctaggctctgttatggtatactgtatctatattattgaattgtcctcatctctcttaggacaatttcagattgtcccatttatccgtcaggtgacactatcctaaaggcagaagccttcaggtctgacccagccaatcaaagcattataccagaccatggaatgcataccaaacatcgactcggaccgatg

SEQ ID NO: 7032 - DNA, 203 bp, synthetic construct
  source 1..203: mol_type = other DNA
ggcgcgccagtccttgaccgcagggatattgatcttaagacagttgtggcagcatggcatgactcagactggaaaagaataagtgatttttggattatgatcaaattccagatgagacaattaattgttaggcaaacagatcataatgattctgatttaatcacgtatatcgaaaatagagaaggcatcgactcggaccgatg

SEQ ID NO: 7033 - DNA, 203 bp, synthetic construct
  source 1..203: mol_type = other DNA
ggcgcgccagtcctaatcatcataacccctgaactggtagcattatttaacactgagaatcatacactaacatacatgacctttgaaattgtactgatggtttcagatatgtacgaaggtcgtcacaacattttatcactatgcacagttagcacttacctgaatcctctgaagaaaagaataacatacgactcggaccgatg

SEQ ID NO: 7034 - DNA, 203 bp, synthetic construct
  source 1..203: mol_type = other DNA
ggcgcgccagtcctaactaatagtttcacccaggatgaattaagaactgtgacaactaatttgatatccccattccaagatctgaccccagatcttacggctgaattgctctgtataatgaggctttggggacaccccatgctcactgccagtcaagctgcaggaaaggtacgcgagtctatgtgtgccgactcggaccgatg

SEQ ID NO: 7035 - DNA, 203 bp, synthetic construct
  source 1..203: mol_type = other DNA
ggcgcgccagtcctattcacacttaagcattggaaggaagtctctcttataaaattcaagaaatgttttgatgcagacgcaggtgaggaactcagtatatttatgaaagataaggcaattagtgccccaaaacaagactggatgagtgtgtttagaagaagcctaatcaaacagcgccatcagcatcacgactcggaccgatg

SEQ ID NO: 7036 - DNA, 203 bp, synthetic construct
  source 1..203: mol_type = other DNA
ggcgcgccagtcctattaattaaatcaggatgtatggattactggatcctttataacttattagggagaaaaccgggaaacggctcatgggctactttagcagctgacccgtactcaatcaatatagagtatcaataccctccaactacagctcttaagaggcacacccaacaagctctgatggaactcgactcggaccgatg

SEQ ID NO: 7037 - DNA, 203 bp, synthetic construct
  source 1..203: mol_type = other DNA
ggcgcgccagtccttagatcgataatgaggaaatcactagaaattaagcccttatccaataggaagcttaatgaaatactggattacaacatcaattacctagcttacaatttggcattactcaagaatgctattgaacctccgacttatttgaaggcaatgacacttgaaacatgtagcatcgacatcgactcggaccgatg

SEQ ID NO: 7038 - DNA, 203 bp, synthetic construct
  source 1..203: mol_type = other DNA
ggcgcgccagtccttggtatcgagataggaggggatccccgtgataatcctcctatccgtgtaccgtacattggctccaggactgatgagaggagggtagcctcaatggcatacatcaggggtgcctcgagtagcttaaaagcagttcttagactggcgggagtgtacatctgggcattcggagataccgactcggaccgatg

SEQ ID NO: 7039 - DNA, 203 bp, synthetic construct
  source 1..203: mol_type = other DNA
ggcgcgccagtccttctggagaattggatagatgcactggatttgtctcacactagagttaacatcacacttgaacagctgcaatccctcaccccacttccaacctctgccaatctaacccatcggttggatgatggcacaactaccctaaagtttactcctgcgagctcttacaccttttcaagtttcgactcggaccgatg

SEQ ID NO: 7040 - DNA, 203 bp, synthetic construct
  source 1..203: mol_type = other DNA
ggcgcgccagtccttatgtattgtgggtgggaactactattggaactatcctatcaaatgtattatctgagggtagttgggtggagtaatatagtggattattcttacatgatcttgagaagaatcccgggtgcagcattaaacaatctggcatctacattaagtcatccaaaacttttccgacgagccgactcggaccgatg

SEQ ID NO: 7041 - DNA, 203 bp, synthetic construct
  source 1..203: mol_type = other DNA
ggcgcgccagtccttatcaacctagatatagttgcccccttaaatgctcctcattttgcatctctggactacatcaagatgagtgtggatgcaatactctggggctgtaaaagagtcatcaatgtgctctccaatggaggggacttagaattagttgtgacatctgaagatagccttattctcagtgacgactcggaccgatg

SEQ ID NO: 7042 - DNA, 203 bp, synthetic construct
  source 1..203: mol_type = other DNA
ggcgcgccagtcctgttgtcatcaactgcttggtataagggtataagctgctgcaggtaccttgagcgattaaagctaccacaaggtgatcatttatatattgcagaaggtagtggtgccagtatgacaatcatagaatacctattcccaggaagaaagatatattacaattctttatttagtagtggcgactcggaccgatg

SEQ ID NO: 7043 - DNA, 203 bp, synthetic construct
  source 1..203: mol_type = other DNA
ggcgcgccagtcctattcatcatcaatcgagtcggcccaaggacttgcagtttagtacatgtagatttggaatcaagtgcaagcttaaatcaacaatgcctgtcaaagccgataattaatgctatcatcactgctacaactgttttgtgccctcatggggtgcttattctgaaatatagttggttgcccgactcggaccgatg

SEQ ID NO: 7044 - DNA, 203 bp, synthetic construct
  source 1..203: mol_type = other DNA
ggcgcgccagtccttgcacggaatctcatcgatatcgagccagtcgcaactttcatagaatttgaacaattgatctgcacaatgttgacaacccacttgaaggaaataattgatataacaaggtctggaacccaggattatgaaagtttattactcactccttacaatttaggtcttcttggtaaaatcgactcggaccgatg

SEQ ID NO: 7045 - DNA, 203 bp, synthetic construct
  source 1..203: mol_type = other DNA
ggcgcgccagtccttgttgcaaaggtatgtgggtcgtattgctttgccttttcctaacctggctcctcctacaattctaacctgcttgataagtgtgattacctgagtaatagactaatttcgtcctggtaattagcattttctagtaaaaccaatactatctcaagtcctaagagaaggtgagaagacgactcggaccgatg

SEQ ID NO: 7046 - DNA, 203 bp, synthetic construct
  source 1..203: mol_type = other DNA
ggcgcgccagtccttgaagaggagacaacagaagctaatgctggtcagtttttatcctttgccagtttgtttctacccaaacttgtcgttggggagaaagcgtgtctggaaaaagtacaaaggcagattcaggtccatgcagaacaagggctcattcaatatccaacttcctggcaatcagttggacacgactcggaccgatg

SEQ ID NO: 7047 - DNA, 203 bp, synthetic construct
  source 1..203: mol_type = other DNA
ggcgcgccagtcctcatgatggtgatcttccgtttgatgagaacaaactttttaatcaagttcctactaatacatcaggggatgcacatggtcgcaggccatgatgcgaatgacacagtaatatctaattctgttgcccaagcaaggttctctggtcttctgattgtaaagactgttctggaccacatcgactcggaccgatg

SEQ ID NO: 7048 - DNA, 203 bp, synthetic construct
  source 1..203: mol_type = other DNA
ggcgcgccagtcctttatccacaactctcagccattgctttgggtgttgcaactgcccacgggagcacgctggctggtgttaatgtaggggagcaatatcagcaactgcgtgaggctgctactgaagctgaaaagcaactccaacaatatgctgaaacacgtgagttggacaaccttgggcttgatgacgactcggaccgatg

SEQ ID NO: 7049 - DNA, 203 bp, synthetic construct
  source 1..203: mol_type = other DNA
ggcgcgccagtcctatttcccgggccgatctatgatgaaacccaccccaacccttctgatgataatcctgatgattcacgtgatacaactatcccaggtggtgttgttgacccgtatgatgatgagagtaataattatcctgactacgaggattcggctgaaggcaccacaggagatcttgatctcttcgactcggaccgatg

SEQ ID NO: 7050 - DNA, 203 bp, synthetic construct
  source 1..203: mol_type = other DNA
ggcgcgccagtcctcaatttggacgacgacgatgacgacagccaaccaggaccaccagacagggggcagagcaaggaaagagcggctcggacacatggcctccaagatccgaccttggacggagcgaaaaaggtgccggagttgaccccaggttcccaccaaccaggcaacctccacatcaccaagcccgactcggaccgatg

SEQ ID NO: 7051 - DNA, 203 bp, synthetic construct
  source 1..203: mol_type = other DNA
ggcgcgccagtcctgggttcaaacaccaaccaaccacaaggcaatatgtcatctactctccagagtatgacccctatacaggaagaatcagagcccgatgatcagaaagatgatgatgacgagagtctcacatcccttgactctgaaggtgacgaagatgttgagagcgtatcaggggagaacaaccccgactcggaccgatg

SEQ ID NO: 7052 - DNA, 203 bp, synthetic construct
  source 1..203: mol_type = other DNA
ggcgcgccagtccttccatttgaggcaatcaattattatcacctaatgagtgatgagcccattgcttttagcactgaaagtggcaaggaatatatcttcccagattctcttgaagaagcctacccgccttggttgagtgagaaggaggccttagagaaagaaaatcgttatctggtcattgatggccacgactcggaccgatg

SEQ ID NO: 7053 - DNA, 203 bp, synthetic construct
  source 1..203: mol_type = other DNA
ggcgcgccagtccttggtgcaggttatctgcaaaattggtaaggataataatatcctagacataattcatgcagaattccaagcaagcttggctgagggagactccccccagtgtgcattaatccagataacaaaacggatccctgctttccaagatgcctctcctccaattgtgcatatcaagtctccgactcggaccgatg

SEQ ID NO: 7054 - DNA, 203 bp, synthetic construct
  source 1..203: mol_type = other DNA
ggcgcgccagtcctgtcaaggaactctcactgatcaagcctgaatccaagatagaaccagcccaaagggcctccccagagtctcttacaagcttagccaatcaattaacatgcataagcgatccatacttcgcccaatcagtgtccgatgttcaccccttcaagcctccttcctagcaaattgacctacgactcggaccgatg

SEQ ID NO: 7055 - DNA, 203 bp, synthetic construct
  source 1..203: mol_type = other DNA
ggcgcgccagtcctatctttttaccataatcttgttctcagtaccatttgataagggtacacttgccaatacgcccccatcctaagggtctcgcaatggggggtcttagcctactccaattgcccagggacaaatttcggaaaagctctttctttgtttgggtcatcatcttattccaaaaggcctttcgactcggaccgatg

SEQ ID NO: 7056 - DNA, 203 bp, synthetic construct
  source 1..203: mol_type = other DNA
ggcgcgccagtccttctggtgttcctcccaaggtggtcagctatgaagcgggagaatgggctgaaaattgctacaatcttgaaataaagaagccggacgggagcgaatgcttacccccaccgccagatggtgtcagaggctttccaaggtgccgctatgttcacaaagcccaaggaaccgggccctgccgactcggaccgatg

SEQ ID NO: 7057 - DNA, 203 bp, synthetic construct
  source 1..203: mol_type = other DNA
ggcgcgccagtcctcatcgtcgagaattacaaagggaagaatctccgaccgggccaccaggaagtattcggacctggttccaaagaattcccctgggatggttccattgcacataccagaaggggaaacaacattgccgtctcagaattcgacagaaggtcgaagagtaggtgtgaacactcaggagacgactcggaccgatg

SEQ ID NO: 7058 - DNA, 203 bp, synthetic construct
  source 1..203: mol_type = other DNA
ggcgcgccagtcctccattacagagacagctgcaacaattataggcactaacggcaaccatatgcagatctccaccatcgggataagaccgagctccagccaaatcccgagttcctcaccgaccacggcaccaagccctgaggctcagacccccacaacccacacatcaggtccatcagtgatggccacgactcggaccgatg

SEQ ID NO: 7059 - DNA, 203 bp, synthetic construct
  source 1..203: mol_type = other DNA
ggcgcgccagtcctccgaggaaccaacaacaccaccgggaagctcccccggcccaacaacagaagcacccactctcaccaccccagaaaatataacaacagcggttaaaactgtcctgccacaggagtccacaagcaacggtctaataacttcaacagtaacagggattcttgggagtcttgggcttccgactcggaccgatg

SEQ ID NO: 7060 - DNA, 203 bp, synthetic construct
  source 1..203: mol_type = other DNA
ggcgcgccagtcctgaaaacgcagcagaagacaaactaacaccaaagccacgggtaagtgcaatcccaacttacactactggactgcacaagaacaacataatgctgctgggattgcctggatcccgtactttggaccgggtgcggaaggcatatacactgaaggcctgatgcataaccaaaatgcctcgactcggaccgatg

SEQ ID NO: 7061 - DNA, 203 bp, synthetic construct
  source 1..203: mol_type = other DNA
ggcgcgccagtccttactctttctcaatactatataagttccttcccaagaataatattgatgaagattaagaaaaagtgacattgtgcccacttttgtaatcttcatccacctacacattcatattcaggaatctttgaattaaccctcacacttgcttaggaaagagcctatcctctacaagaatccgactcggaccgatg

SEQ ID NO: 7062 - DNA, 203 bp, synthetic construct
  source 1..203: mol_type = other DNA
ggcgcgccagtcctacgcttacttgcccccccaagcgttaatgaagggctccctcctgcaccaggggaatatacttggtcagaagatagtacaacttagcctgtagggaggacaagtaaaacaagatgcccttatcctctatagatggtatttttagagagggggacaggataggaataaagataatgcgactcggaccgatg

SEQ ID NO: 7063 - DNA, 203 bp, synthetic construct
  source 1..203: mol_type = other DNA
ggcgcgccagtccttagtatagtcttaggtatagggtagtcctacacgtactatattatacagtctaaacttgtaaaattaaactacaagaacatgatgaaaattaatgagaaggttccaagattgacttcaatccaaacaccttgctctgccaattttcatctccttaagatatatgattttgttcccgactcggaccgatg

SEQ ID NO: 7064 - DNA, 203 bp, synthetic construct
  source 1..203: mol_type = other DNA
ggcgcgccagtcctacaagcctaagattccattagagataaccagaatggctaaagccacaggccggtacaacttggtaacaccaaaacgggagctagagcaaggagttgtgtttagcgacctatgcaacttcctagtgactccaactgtgcaaggatggaaggtttactgggctggacttgagtttgcgactcggaccgatg

SEQ ID NO: 7065 - DNA, 203 bp, synthetic construct
  source 1..203: mol_type = other DNA
ggcgcgccagtcctctggggaggcaatccttgccaccataggactttttcaattcctctattttatgatggctacccaacatacacaatatcctgatgcaagattgtcttccccaattgtcttagaccaatgtgacctagtgacaagagcatgtggactttactctgagtattcgctgaaccctaaaccgactcggaccgatg

SEQ ID NO: 7066 - DNA, 203 bp, synthetic construct
  source 1..203: mol_type = other DNA
ggcgcgccagtcctatgccacagttcgtggaagtagttttgtcacagacctggaaaaatacaatctggccttcaggtatgaattcacagctcccttcatcaaatattgcaaccaatgctatggggttcgcaatgtctttgattggatgcacttcctaattccgcaatgttacatgcatgttagtgattcgactcggaccgatg

SEQ ID NO: 7067 - DNA, 203 bp, synthetic construct
  source 1..203: mol_type = other DNA
ggcgcgccagtcctatattttaccatgccgtgttgcagctgcctttcatacatatttctctgttcggatcttacaacatcatcaccttggtttccataagggttcagaccttggacaattggcaatcaataaacctcttgatttcgggaccattgcactatccttagcagttcctcaggtattgggtgcgactcggaccgatg

SEQ ID NO: 7068 - DNA, 203 bp, synthetic construct
  source 1..203: mol_type = other DNA
ggcgcgccagtcctcaggcgggttaaatgtccctggatcacaggatttaacatctttccttcgtcagattgtcagaaggagtatcacactttcggcaaggaacaagttaatcaacacgttatttcacgcttctgcagatcttgaagacgaattagtatgtaaatggttactttcttcaacgcccgtgacgactcggaccgatg

SEQ ID NO: 7069 - DNA, 203 bp, synthetic construct
  source 1..203: mol_type = other DNA
ggcgcgccagtcctggtttagttacctagaccattgtgacccagctttaatggaagcaattcaaccaattaagtgtactgttgatattgctcaaattcttagagaatactcctgggctcatatccttgatggtagacagttaataggggcaacactgccatgtatacctgagcagttccaaaccacatcgactcggaccgatg

SEQ ID NO: 7070 - DNA, 203 bp, synthetic construct
  source 1..203: mol_type = other DNA
ggcgcgccagtcctggttaaaaccttacgagcaatgtgtggaatgttcatccacaaacaattctagtccatatgtatcagttgcattaaaaaggaacgtggttagtgcttggcctgatgcatctagattggggtggacgattggtgatgggattccctacataggctcaagaactgaggacaaaatagcgactcggaccgatg

SEQ ID NO: 7071 - DNA, 203 bp, synthetic construct
  source 1..203: mol_type = other DNA
ggcgcgccagtcctatgaactgatttatgattcagatccactaagaggaggtctcaactgcaacttatcgattgacagtcctttgatgaagggcccacgtttaaatattattgaggatgacttaatacggttgccacatttatccggctgggaattagcaaaaacagtcttgcaatcaataatctctgcgactcggaccgatg

SEQ ID NO: 7072 - DNA, 203 bp, synthetic construct
  source 1..203: mol_type = other DNA
ggcgcgccagtcctaaacccaggcaaactgtctccatgtcgtacaatgtgctcttcaacagcaagtacaaagagggtcatattggctaagtcatcttaccaaatacaccacaagtagattgcacaatagttatattgcatttggttttccttcattagagaaggtcctatatcataggtataaccttgcgactcggaccgatg

SEQ ID NO: 7073 - DNA, 203 bp, synthetic construct
  source 1..203: mol_type = other DNA
ggcgcgccagtcctgtttattgactcttccaatacacagagttggaagcaccgattcaaggtttctaagacgccctatcgattatgttgataatgtaaataatagcttttcctgtctattatgacttaaataatcatatctataacgaccatcacagctaagtcgttgccctagttcatatattaaatcgactcggaccgatg

SEQ ID NO: 7074 - DNA, 203 bp, synthetic construct
  source 1..203: mol_type = other DNA
ggcgcgccagtcctctagtgggagtgaagagggtagtcatgggcttgttggatggaagaggaccagtgcgattcgtgctggccttgatgacattcttcaagttcaccgcgcttgccccgacgaaggccttgctaggccgttggaagcgcatcaacaagaccacggcaatgaaacacctgactagcttccgactcggaccgatg

SEQ ID NO: 7075 - DNA, 203 bp, synthetic construct
  source 1..203: mol_type = other DNA
ggcgcgccagtcctaaaaaggaattaggaacaatgatcaacgtggttaacaatcggggcacaaaaaagaagagaggcaacaatggaccaggactagtgatgatcataacactcatgacggttgtttcaatggtttcctctttaaagctttccaacttccaggggaaagtcatgatgaccatcaacgcgcgactcggaccgatg

SEQ ID NO: 7076 - DNA, 203 bp, synthetic construct
  source 1..203: mol_type = other DNA
ggcgcgccagtcctgggtatgcttttgtagctgtcctcttgggctggatgctgggaagcaacaatggacaaagggtcgttttcgtcgttctcttacttcttgtggcgcctgcttatagcttcaactgccttggtatgagcaacagagacttccttgagggagtctctggtgctacctgggttgacgtgcgactcggaccgatg

SEQ ID NO: 7077 - DNA, 203 bp, synthetic construct
  source 1..203: mol_type = other DNA
ggcgcgccagtcctgttttggaaggtgacagctgcataaccatcatggccaaggacaagccgaccattgacattaagatgatggaaactgaagccacgaacctggctgaagtgagaagctactgctatctagccactgtctcagatgtttcaactgtctccaactgtccaacaactggggaggcccaccgactcggaccgatg

SEQ ID NO: 7078 - DNA, 203 bp, synthetic construct
  source 1..203: mol_type = other DNA
ggcgcgccagtcctaccgaggcatactacatcatgtcagtgggcaccaaacacttccttgtccatagagaatggtttaatgacttggccctcccatggacttcaccagctagctcaaattggagaaatagagagatactactagagttcgaagagccccatgccacaaagcaatcagttgtggcgcttcgactcggaccgatg

SEQ ID NO: 7079 - DNA, 203 bp, synthetic construct
  source 1..203: mol_type = other DNA
ggcgcgccagtcctggttcccaggaaggtgctttgcaccaggccttggcaggagctgttccagtgtctttctcgggcagtgtcaagctcacatctggtcatctcaagtgtcgagtcaagatggaaaagttgacactaaaaggcaccacctacggcatgtgcacggaaaagttttcttttgcaaaaaatcgactcggaccgatg

SEQ ID NO: 7080 - DNA, 203 bp, synthetic construct
  source 1..203: mol_type = other DNA
ggcgcgccagtcctccggctgacacgggtcacggcactgtggtccttgaactgcagtacacgggatctgacggaccttgcaaaatcccaatttccattgtggcatcactttccgatctcacccccattggtagaatggttacagcaaacccttatgtggcttcatccgaagccaacgcgaaagtgttgcgactcggaccgatg

SEQ ID NO: 7081 - DNA, 203 bp, synthetic construct
  source 1..203: mol_type = other DNA
ggcgcgccagtcctgtcggagggattttcaattctgtaggaaaggcggtacatcaggtctttggaggagccttcagaactctcttcggtggcatgtcctggatcacccagggtctaatgggagctctgcttctatggatgggggtgaatgcgagagatcgatccatcgcactggtgatgttagccacgcgactcggaccgatg

SEQ ID NO: 7082 - DNA, 203 bp, synthetic construct
  source 1..203: mol_type = other DNA
ggcgcgccagtcctatcgagcaagcccacgcgaaaggaatatgtggattgaggtccgtctcacgtctggaacacgtgatgtgggagaacatcagagatgaactcaacaccctcctcagagagaatgcagtagatctaagtgtcgtggttgagaagccaaaaggaatgtacaaatcagcaccacagagacgactcggaccgatg

SEQ ID NO: 7083 - DNA, 203 bp, synthetic construct
  source 1..203: mol_type = other DNA
ggcgcgccagtcctatcatgtccaccagggtttggctgaaagtcagagaacacaacactactgactgcgacagctcaataattgggacggctgttaaaggagacatagctgtgcacagtgacctctcctactggattgaaagccacaagaacacgacatggaggctcgagagggctgtctttggagagcgactcggaccgatg

SEQ ID NO: 7084 - DNA, 203 bp, synthetic construct
  source 1..203: mol_type = other DNA
ggcgcgccagtcctagacccatgaaacatgatgagacgacgctggtaaaatccagcgtcagtgcccatcggagtgacatgattgatccttttcagttgggccttctggtgatgtttctggccacccaggaggtcctgaggaagaggtggacggccagattgactgttccggctattgtgggagctctacgactcggaccgatg

SEQ ID NO: 7085 - DNA, 203 bp, synthetic construct
  source 1..203: mol_type = other DNA
ggcgcgccagtcctacgaaccaagagaacatcctgctggctctgggggcagcattctttcagatggcggccaccgatttgaacttttctctcccaggaattctcaatgccactgccacagcttggatgctcctgagggctgccacccagccatccacttcagccatcgtcatgcctttgctttgcctgcgactcggaccgatg

SEQ ID NO: 7086 - DNA, 203 bp, synthetic construct
  source 1..203: mol_type = other DNA
ggcgcgccagtcctctggctcctggcatgagactgctctacctggacacgtatagaatcactctcatcatcatcggcatctgcagcctgataggggagcgccgtagggcggccgcaaagaagaaaggggcggtactgctagggttagcactaacatcaacagggcagttctctgcatcagttatggcgcgactcggaccgatg

SEQ ID NO: 7087 - DNA, 203 bp, synthetic construct
  source 1..203: mol_type = other DNA
ggcgcgccagtcctgggacctaccaggctggagtgggcgtcatgtatgaaggagttcttcacaccctgtggcacaccacaagaggggcagctatcagaagtggtgaaggaaggctcactccctactggggtagtgtgaaagaagacaggatcacctatggtgggccatggaagtttgacaggaagtggcgactcggaccgatg

SEQ ID NO: 7088 - DNA, 203 bp, synthetic construct
  source 1..203: mol_type = other DNA
ggcgcgccagtcctaatggtctcgatgatgttcagctcatcatagtggctcccggaaaggcagccataaacatccaaaccaaaccaggcatcttcaaaacgccacagggggaaataggagcagtcagcctggactatcctgaagggacctcaggctccccaatactggacaagaatggtgacatcgtgcgactcggaccgatg

SEQ ID NO: 7089 - DNA, 203 bp, synthetic construct
  source 1..203: mol_type = other DNA
ggcgcgccagtcctggcttgtacgggaatggagtcatcttgggcaacggctcgtatgtcagtgccatcgtgcaaggcgaaagagaagaagaacccgttcctgaagcgtacaacgcagacatgttaagaaagaagcagctgacagtgctggacctgcatccaggagcgggaaagaccaggaggatactccgactcggaccgatg

SEQ ID NO: 7090 - DNA, 203 bp, synthetic construct
  source 1..203: mol_type = other DNA
ggcgcgccagtcctccccagatcatcaaagatgccatccagcgccgccttcgtacagctgtgctggctccaacccgtgtggtggctgcagaaatggctgaggccctcaagggccttcgggtccgatacctgaccccagcggtcaacagagagcatagtggcacagagatagtggatgttatgtgtcatcgactcggaccgatg

SEQ ID NO: 7091 - DNA, 203 bp, synthetic construct
  source 1..203: mol_type = other DNA
ggcgcgccagtcctgccactctaacccacagactcatgtcacctctaagagctccaaactacaacctctttgtgatggatgaggctcacttcactgacccggcgagcatagcagcacgaggctacattgctacaaaagttgagttgggtgaagcggcagcaatattcatgactgcgactccccctggccgactcggaccgatg

SEQ ID NO: 7092 - DNA, 203 bp, synthetic construct
  source 1..203: mol_type = other DNA
ggcgcgccagtcctggcgaagggagagtgatcttgagcaacccctcaccaatcactagtgctagtgctgcccagaggagagggagagtaggtagaaatcctagtcagataggtgatgagtaccactatggaggaggcacaagcgaagatgacacgatcgcagctcattggactgaagcaaagatcatgcgactcggaccgatg

SEQ ID NO: 7093 - DNA, 203 bp, synthetic construct
  source 1..203: mol_type = other DNA
ggcgcgccagtcctaatggtatacagtacaccgacaggaagtggtgttttgatggaccaaggtcaaacatcattctggaagacaacaatgaagtcgaaattgtcacccgcacaggtgaacgcaagatgctgaagccacgctggttggatgccagggtctacgctgaccatcagtcgctcaagtggttccgactcggaccgatg

SEQ ID NO: 7094 - DNA, 203 bp, synthetic construct
  source 1..203: mol_type = other DNA
ggcgcgccagtcctaaggactttgcggctggtaagcgatcagcagtgggattccttgaagtcctggggagaatgcctgagcacttcgcaggcaagaccagagaggcttttgataccatgtatctggtggcgacagctgagaagggaggaaaagcccaccgcatggcccttgaagagttgccggacgctcgactcggaccgatg

SEQ ID NO: 7095 - DNA, 203 bp, synthetic construct
  source 1..203: mol_type = other DNA
ggcgcgccagtcctcttgaaaccataacactcattgtggctttggccgtgatgacagcaggagttttcttgctcctcgttcagaggagaggcataggtaagctggggcttggcggtatggtgctaggcctagccactttcttcttgtggatggctgacgtctcaggcaccaagatcgcaggaaccttacgactcggaccgatg

SEQ ID NO: 7096 - DNA, 203 bp, synthetic construct
  source 1..203: mol_type = other DNA
ggcgcgccagtccttccagcacacgtcaaccacaaagtgctctgccgctaccctccatgaacgctttggcattggatttgcgaccagcaacagcgtgggccttatacggagggagcacagtggttctcacgcccttgatcaaacatcttgtaacatcagaatacatcacaacatctctggcttcaatacgactcggaccgatg

SEQ ID NO: 7097 - DNA, 203 bp, synthetic construct
  source 1..203: mol_type = other DNA
ggcgcgccagtcctgctgaagctttgagggcggctcaacggagaacagcggccggaatcatgaaaaatgctgtggtagatggtttggtggctacggatgttcctgaactggagagaaccacccccctcatgcaaaagaaggtaggccagattttactgattggagtcagcgcggcggcattgttagtccgactcggaccgatg

SEQ ID NO: 7098 - DNA, 203 bp, synthetic construct
  source 1..203: mol_type = other DNA
ggcgcgccagtcctaacccgtgtgttacaactgttcgggaagccggcatcctcatatcagcggcactcctgactctctgggacaacggagccattgcagtatggaattccaccaccgcgaccggactttgtcacgtcatccgtggcaattggttggctggagcctctatagcttggactctgataaagcgactcggaccgatg

SEQ ID NO: 7099 - DNA, 203 bp, synthetic construct
  source 1..203: mol_type = other DNA
ggcgcgccagtcctcctggacatgaggaaccgatgcttatgcaaagctatggctggaaccttgtcactatgaagagcggagtggacgtgtattataaaccatctgagccgtgcgacacgcttttctgtgacattggagaatcatcttctagtgctgaggtggaagaacaacgcaccctgaggattttgcgactcggaccgatg

SEQ ID NO: 7100 - DNA, 203 bp, synthetic construct
  source 1..203: mol_type = other DNA
ggcgcgccagtcctaggattcaaagattgaaagaggagtatgcagccacatggcaccatgacaaggaccacccatatcggacctggacctaccacggaagttatgaagtgaaaccgaccggttcagcaagctccttggtcaacggagttgtccgcctaatgagcaagccctgggatgcaattctcaaccgactcggaccgatg

SEQ ID NO: 7101 - DNA, 203 bp, synthetic construct
  source 1..203: mol_type = other DNA
ggcgcgccagtcctgagctgacctacaaacacaaggtggtgaaagttatgcgacctggcacagatgggaagaccgtcatggatgtgatttcccgagaagatcagagaggaagtggacaggttgtgacctatgctctcaacacattcaccaacattgccgtccagcttattagactgatggaagctgaacgactcggaccgatg

SEQ ID NO: 7102 - DNA, 203 bp, synthetic construct
  source 1..203: mol_type = other DNA
ggcgcgccagtcctgcaacgtgggctgaaaacatctacgcagccattaaccaggtgagagccattattggccaggaaaaatacagggattacatgctttcacttagaagatatgaagaagttaatgtccaggaggacagggttttgtaaataagtgtttagggttttgcaatttaattaaatatgcaacgactcggaccgatg

SEQ ID NO: 7103 - DNA, 203 bp, synthetic construct
  source 1..203: mol_type = other DNA
ggcgcgccagtcctctgggttaacaaagctgaccgctgatgatgggaaagcccctcagaaccgtttcggagagggaccctgcctattggaagcgtccagcccgtgtcaggccgcaaagcgccacttcgccaaggagtgcagcctgtacggccccaggaggactgggttaccaaagccgaaaggccccccgactcggaccgatg

SEQ ID NO: 7104 - DNA, 203 bp, synthetic construct
  source 1..203: mol_type = other DNA
ggcgcgccagtcctacggcccaagcgaacagacggtgatgcgaactgttcgtggaaggactagaggttagaggagaccccgtggaacttaggtgcggcccaagccgtttccgaagctgtaggaacggtggaaggactagaggttagaggagaccccgcatcataagcatcaaaaaaacagcatattgacgactcggaccgatg

SEQ ID NO: 7105 - DNA, 203 bp, synthetic construct
  source 1..203: mol_type = other DNA
ggcgcgccagtcctgtgaagggaccgtgtgttctagacatggtagttgtgtaggtacaagaggacttcatttgaatatcctcgatcccggacctaaattaccttgtggatttccggaggaatttaggaaaccacctccttcgggaggctagtaggagcttacatgactctcggattgggaagtccgagcgactcggaccgatg

SEQ ID NO: 7106 - DNA, 203 bp, synthetic construct
  source 1..203: mol_type = other DNA
ggcgcgccagtcctcctttaagagaaataagattgcatgtgctgaaaagcaaggtcaagtgcaatccaatcaaactggcaattctccaaatgtaacaccagttaatgccactaatgggtcacaagtaacaactattaattactatggggcacaatatgcacaggcatataatccatccagtcagacaacgactcggaccgatg

SEQ ID NO: 7107 - DNA, 203 bp, synthetic construct
  source 1..203: mol_type = other DNA
ggcgcgccagtcctggtacataacagcctggctacagacaaaattggttcatccagctggtgttccaaccaccagtcccattgtagtgtatgcttcagctagtaataacttcaccttcaagtgcccaatagatagtgcatacttccagggacttggtgaccaaataacttcacaagtggaagggttgacgactcggaccgatg

SEQ ID NO: 7108 - DNA, 203 bp, synthetic construct
  source 1..203: mol_type = other DNA
ggcgcgccagtcctcaactagagtcacaaaggcaacattttctgcacaagacactgatgtagagtttttcttctcaaggtatatgcttataggatctgttggaagtcgacaaggaacccaggactttgccaaatttgacatgtcttttgaggccattaagggagctagtagggcaattagaacaaaatcgactcggaccgatg

SEQ ID NO: 7109 - DNA, 203 bp, synthetic construct
  source 1..203: mol_type = other DNA
ggcgcgccagtcctttcagatgtttacatatatgaggtttgacttggatgtggttctggagccgctagaagagattccttatcaggtgatgtactgccccactgggtcagttgtaccagcaaactctatagataattggaacacaacttgtaatgcagtgattactcaacgacctggtaagaatgtttcgactcggaccgatg

SEQ ID NO: 7110 - DNA, 203 bp, synthetic construct
  source 1..203: mol_type = other DNA
ggcgcgccagtcctagttcaagtacagagagcaatcagttttggatttggctgagaaaatacttgagtcaaagagagtgctccttgagatgcagaagacagacaataggatttacctcactttggtgaagtatgctgaaaaggccagtaaattcattcagaattcaaggaaaagaccatttgaaccaacgactcggaccgatg

SEQ ID NO: 7111 - DNA, 203 bp, synthetic construct
  source 1..203: mol_type = other DNA
ggcgcgccagtcctgagagaagaagtttaccactcctgatttactgattggcaagttgactggttacagaagggagaaaattaatacaaatgacatggttgatgcactgtttcaagggccgaggaaagttgtaagtctgaaacctactctcaagttcctggacgatgaagaactcaaaactccagtgacgactcggaccgatg

SEQ ID NO: 7112 - DNA, 203 bp, synthetic construct
  source 1..203: mol_type = other DNA
ggcgcgccagtcctagctcatgccagagtgcattgaagatctcattagaagtgtgcatgaccaacgcatcattgactggtgcgaagaccagggatacatttttgaaccacacatgcagcactttatagtagagagagagagtaaatggctgaagacagtaataaagactacagtcacttctttggctgcgactcggaccgatg

SEQ ID NO: 7113 - DNA, 203 bp, synthetic construct
  source 1..203: mol_type = other DNA
ggcgcgccagtcctttttgggagctgtgtgtggattgatctatgcagcttggagactctggccaacatctgagcaaggagcatacactggaaatcagagagctgttttgaaaagacctgagttaagaacagtgcaagtgcaggggcctggaactcatccagatcttcagtatatccaggcattgctcacgactcggaccgatg

SEQ ID NO: 7114 - DNA, 203 bp, synthetic construct
  source 1..203: mol_type = other DNA
ggcgcgccagtcctctgagagacccgccaggaaaagtgtcaatgtcagatcgacaacttcacttcaaccatcggtttggcatgacattgttccaggtgagaaggaacctgcagttttgagtaagtttgacaagagatgtgaggtggactttgagaaggctctattctccaaatacgagcagaatgtggcgactcggaccgatg

SEQ ID NO: 7115 - DNA, 203 bp, synthetic construct
  source 1..203: mol_type = other DNA
ggcgcgccagtcctccatcttcaattcaatcattaataacatcattgtgagaactctggtcttggacacctacaaaggtatcgatctcgaccaactccgtattctggcctacggtgatgacctactggtgtcctatccatttccacttgacccagaggcattagcaagggctggaaaggtgtatggtccgactcggaccgatg

SEQ ID NO: 7116 - DNA, 203 bp, synthetic construct
  source 1..203: mol_type = other DNA
ggcgcgccagtcctttaaaatgacacctgcagacaagagtgaacactttgatgggccaaagaaaatctgggaggtgaccttcctgaagaggggctttaagcctgattctcggtacccatttctcattcatccagtgtacccaatggatcaggtgtacgagtctctcagatggactaggaaaccttctgcgactcggaccgatg

SEQ ID NO: 7117 - DNA, 203 bp, synthetic construct
  source 1..203: mol_type = other DNA
ggcgcgccagtcctgcaggagggtcaagtgtattggtgtggctagccaaagggaatagcccctcctaatgaggttgttgggcgcggcgtcccaactcaaacaaaacgcgtcggataatttcttaacacataatcactttaatcattagttgttaggattttaatcattagtttagatatagtttgttacgactcggaccgatg

SEQ ID NO: 7118 - DNA, 203 bp, synthetic construct
  source 1..203: mol_type = other DNA
ggcgcgccagtcctgtgaaacctcgcgtcattctggaggccacaacatccggtgatgcacaaacgcagtatagatctaaaccaaaaattgaagcattcacgtcggcggatgtaataaccattactaaacccaaagtgatggttgaggcagtgtcatctggcgatagtataactcaaaacaaacctaaacgactcggaccgatg

SEQ ID NO: 7119 - DNA, 203 bp, synthetic construct
  source 1..203: mol_type = other DNA
ggcgcgccagtcctaagtttcacccaattgagattaagcaagaatacaccaaagctgactttccatatgctccaggagacatgtttggtcccataggtaagtgcccccaccagttatttgagcccggtaaaacagatattcgacctagtgtaatttatggtaaggtaaaacctcctattacgaaaccccgactcggaccgatg

SEQ ID NO: 7120 - DNA, 203 bp, synthetic construct
  source 1..203: mol_type = other DNA
ggcgcgccagtcctattaaaggaaatgatatttcagaatatatttctagtataaatcgacaatcatccccaggttacccatggattttagatcgtaaaccaggctttccaggtaagactcaatggtttgggaacgatgaagattacaaaattgatcctgacgtgatgcaaaaagtacatgaaagaattcgactcggaccgatg

SEQ ID NO: 7121 - DNA, 203 bp, synthetic construct
  source 1..203: mol_type = other DNA
ggcgcgccagtcctgaaaacgcaaaacaaggaatacggaccccaactttttgggttgacacgctcaaggatgagcgacgacctattgagaaagttgatgcactcaaaacacgcgtcttttcgaacggacccatggattttaatttggctttccgcaaatattttctaggatttatagcgcatttaatgcgactcggaccgatg

SEQ ID NO: 7122 - DNA, 203 bp, synthetic construct
  source 1..203: mol_type = other DNA
ggcgcgccagtcctgacggctattggcatttacgaaatatggaatactttttataaaacgtttctcttctggttaccagcaacataggaaattgtcgttgaactacatgttgtaaggctttagagaaataagggagtgtcctatttaggatgaggtgctccggtggcagccccaccaaaacctctagccgactcggaccgatg

SEQ ID NO: 7123 - DNA, 203 bp, synthetic construct
  source 1..203: mol_type = other DNA
ggcgcgccagtcctaccagacaagaactcacagttttccatgatgttgaacaacctcgcgtcgctcttccaattgctccgcaaacgactagctctcttgctaagcttgattctacagcgacaattgtggattttctttctagaactgttgtcctcgatcaattcgagcttgttcaaggtgaatcaaaccgactcggaccgatg

SEQ ID NO: 7124 - DNA, 203 bp, synthetic construct
  source 1..203: mol_type = other DNA
ggcgcgccagtcctgtggccggaagattttggctaacatattccccatatgaacataaagtagataaggcaagacgccagcaatataatagtagagctggagtgacagcatatcctggaatagaaatggatgttcaaatcaatgattcagcagaaatggttatcccatttgcttcctacaaagaagctcgactcggaccgatg

SEQ ID NO: 7125 - DNA, 203 bp, synthetic construct
  source 1..203: mol_type = other DNA
ggcgcgccagtcctgtccccggcaagtattattcccatgtaaaagcgatagataatagtgtagctttagctttgagtaatgagaacgagcttctcccacttagcgacatctttccctcagcggtagatgagatggacttggcatatgtgtgtgctaatcctggagtgaaggaagtcattacgcggtcgcgactcggaccgatg

SEQ ID NO: 7126 - DNA, 203 bp, synthetic construct
  source 1..203: mol_type = other DNA
ggcgcgccagtcctcctaaggcggattggcataattatgttgatctttccgcttacgataaagtggataccgcaaattcttacaaatatattttagatttaacaaatgattcagaaattactattagagtgccatttattagcgataggttagctttaagtacaattggtgctaatagttatggtgagcgactcggaccgatg

SEQ ID NO: 7127 - DNA, 203 bp, synthetic construct
  source 1..203: mol_type = other DNA
ggcgcgccagtcctttatgtgagactagaaatgccacaatgcagatcaacatttccaatgaagcatcaggaaacagtatcgatattttccaggataataatgcaggtgtgagtccaaatgcagtaatgggtaaaattgcgggtgaacgtctagttaacttgcgaccactactgcgctgcttccgatctcgactcggaccgatg

SEQ ID NO: 7128 - DNA, 203 bp, synthetic construct
  source 1..203: mol_type = other DNA
ggcgcgccagtcctacgatttgttatgcgcctgcagactatagctactatttgtggtattaaatatgttgcacaacctacagaagatgtagtagatggagatgtagttatacgtgaacctgtacatttattatctgctgatgcaatagttttaaagcttcctagtttgatgaaagttatgactcatatcgactcggaccgatg

SEQ ID NO: 7129 - DNA, 203 bp, synthetic construct
  source 1..203: mol_type = other DNA
ggcgcgccagtcctttcagtcaagtcttatgatgatttggtttattcaggtgtagtaggttgtaaatctattgttaaagaaactgctcttattactcatgcactttacttagattatgttcaatgtaagtgtggtaatcttgaacaaaatcatattcttggcgttaataattcttggtgtaggcaactcgactcggaccgatg

SEQ ID NO: 7130 - DNA, 203 bp, synthetic construct
  source 1..203: mol_type = other DNA
ggcgcgccagtcctagtagaagatgatgttattgagaatgtcaaatcttctttatcatcttatgagtattgtcaaccacctaaatctgtagaaaaaatttgtattatagataatatgtacatgggtaagtgtggtgataaatttttccctattgtcatgaatgataaaaatatttgtcttttagatcacgactcggaccgatg

SEQ ID NO: 7131 - DNA, 203 bp, synthetic construct
  source 1..203: mol_type = other DNA
ggcgcgccagtccttgattttgttgctgttgtttgtgatgctatagagaatgctttaaactcttgtaaagagcatccagtggttggttatcaagttcgtgcatttttaaataaacttaatgagaatgttgtttatttatttgatgaggctggtgatgaagcaatggcctctcgtatgtattgtactttcgactcggaccgatg

SEQ ID NO: 7132 - DNA, 203 bp, synthetic construct
  source 1..203: mol_type = other DNA
ggcgcgccagtcctcaatgacgatgaagatgttgttactggtgacaatgacgatgaagatgttgttactggtgacaatgacgatgaagatgttgttactggtgacaatgacgatgaagatgttgttactggtgacaatgacgatgaagatgttgttactggtgacaataacgatgaagagattgttaccgactcggaccgatg

SEQ ID NO: 7133 - DNA, 203 bp, synthetic construct
  source 1..203: mol_type = other DNA
ggcgcgccagtccttggtgacaatgatgaccaaattgttgttactggtgatgatgtagatgatattgaaagtatttatgactttgatacttataaagctcttttagtttttaatgatgtctataatgatgctttgtttgttagttatggttctagtgttgaaacagaaacatattttaaagttaatggcgactcggaccgatg

SEQ ID NO: 7134 - DNA, 203 bp, synthetic construct
  source 1..203: mol_type = other DNA
ggcgcgccagtccttggacataatatgactctaatagcagcggacttaccttgtacattacatttttcattatttgatgacaatttttgtgctttttgcacccctaaaaaaatttttattgctgcatgtgctgtggatgtaaacgtttgtcattctgtagctgttataggtgatgaacaaatagatggcgactcggaccgatg

SEQ ID NO: 7135 - DNA, 203 bp, synthetic construct
  source 1..203: mol_type = other DNA
ggcgcgccagtccttattgttaatcctgctaatgggcatatgctccatggtggtggagttgcaaaagctatagctgtagctgcaggtaaaaaattttctaaagaaactgctgctatggttaaatctaaaggtgtttgccaagtaggagattgttatgtttctaccggtggtaaattatgtaaaacaatcgactcggaccgatg

SEQ ID NO: 7136 - DNA, 203 bp, synthetic construct
  source 1..203: mol_type = other DNA
ggcgcgccagtcctttttgtttcaaattcttctgttatacaagaagttttattgcttcgtcatgatatacaattgaataatgacgttcgtgattatttgttgtctaagatgactagtcttcctaaagattggcgtcttatcaataaatttgatgttattaacggtgttaaaactgttaagtattttgacgactcggaccgatg

SEQ ID NO: 7137 - DNA, 203 bp, synthetic construct
  source 1..203: mol_type = other DNA
ggcgcgccagtcctcagaccacataggttagttgctcttgttttagctaaaggtcattttaaatttgatgaaccatcagatgctactgattttattcgtgttgttttgaaacaagctgatttatcaggtgcaatttgtgaattagaacttatttgtgattgtggtattaaacaagaaagtcgtgttggcgactcggaccgatg

SEQ ID NO: 7138 - DNA, 203 bp, synthetic construct
  source 1..203: mol_type = other DNA
ggcgcgccagtccttgttgatgctgttatgcattttggtacattagcaaagactgatctttttaatggttataagattggctgtaattgtgcaggtagaattgtccattgtactaaattgaatgtaccatttttgatttgttctaatactcctctgagtaaggatttacctgatgatgttgttgcagccgactcggaccgatg

SEQ ID NO: 7139 - DNA, 203 bp, synthetic construct
  source 1..203: mol_type = other DNA
ggcgcgccagtccttaacatgtttatgggtgtaggtgtaggccattatacacatttgaaatgtggttcaccttaccaacattatgatgcttgtagtgttaaaaaatatacaggtgttagtggttgtttaactgactgcttgtatcttaaaaatttaacccagacttttacatctatgttgactaattacgactcggaccgatg

SEQ ID NO: 7140 - DNA, 203 bp, synthetic construct
  source 1..203: mol_type = other DNA
ggcgcgccagtcctttatcttcctaatattagtgtttttcctatttttgtgggaagaattgttatgtggataaaggctacttttggtttggttacaatttgtgatttttattctaagttaggtgtaggttttacaagtcatttttgtaatggtagttttatatgtgaattgtgtcattctggttttgacgactcggaccgatg

SEQ ID NO: 7141 - DNA, 203 bp, synthetic construct
  source 1..203: mol_type = other DNA
ggcgcgccagtccttatgttggatacatatgcagctatagattttgttcagtatgaagtagatagacgtgttttatttgattatgttagtttagtcaaattaattgttgaactcgttattggttattcattatacacagtatggttttatccattattttgtcttattggtttacaattatttactaccgactcggaccgatg

SEQ ID NO: 7142 - DNA, 203 bp, synthetic construct
  source 1..203: mol_type = other DNA
ggcgcgccagtcctgagacatggctttcatgttttacattttttaacttatgcatttgctagtgatagtgttcagtgctatacaccacatattcagatttcttataatgatttttatgctagtggttgtgttttatcatctttgtgtactatgtttaaaagaggtgatggtacaccacatccttattgcgactcggaccgatg

SEQ ID NO: 7143 - DNA, 203 bp, synthetic construct
  source 1..203: mol_type = other DNA
ggcgcgccagtcctatacgccgaagagggtatatgttttaattttaatagttcctgggttttgaataatgattattatagaagtatgcctggaactttttgtggtagagatctttttgatttgttttatcaattttttagtagtttaattcgtcctatagatttcttttctcttactgctagttctatcgactcggaccgatg

SEQ ID NO: 7144 - DNA, 203 bp, synthetic construct
  source 1..203: mol_type = other DNA
ggcgcgccagtccttacttatggtagtatgactttgaatggtttatggttagatgacaaagtttattgtcctcgtcatgttatatgttcatcctctaatatgaacgaacctgattattctgccttattgtgtagagttactctaggtgattttactataatgtctggtcggatgagtttaacagttgtcgactcggaccgatg

SEQ ID NO: 7145 - DNA, 203 bp, synthetic construct
  source 1..203: mol_type = other DNA
ggcgcgccagtccttaaagaaacaatttattggattttgatatctacatttttgtttagttgtataatttctgcatttgttaaatggactatatttatgtatattaatacacatatgattggtgttacattatgtgtactttgttttgttagttttatgatgttactagttaaacataagcatttttacgactcggaccgatg

SEQ ID NO: 7146 - DNA, 203 bp, synthetic construct
  source 1..203: mol_type = other DNA
ggcgcgccagtccttttgactatgtatataattcctgtactctgtaccttgttttatgtaaattatttagttgtttataaggaaggttttagaggttttacttatgtctggctctcatattttgttcctgctgtgaattttacttatgtttatgaagtattttatggttgtattttatgtgtttttgccgactcggaccgatg

SEQ ID NO: 7147 - DNA, 203 bp, synthetic construct
  source 1..203: mol_type = other DNA
ggcgcgccagtcctacagttagaaaaagcatgtaatatagctaagtctgtgtatgaacgtgataaagctgtagctcgcaaacttgaacgtatggcagacctagcacttactaacatgtataaagaggctcggattaatgataagaagagtaaagttgtttccgctttgcagacaatgctttttagcatcgactcggaccgatg

SEQ ID NO: 7148 - DNA, 203 bp, synthetic construct
  source 1..203: mol_type = other DNA
ggcgcgccagtcctggttcgtaaattggataatcaggctttaaattctattctggataatgctgttaaaggttgtgtacctttgagtgctattccagcattggctgctaatactttaactatagtaataccagataaacaagtttttgataaagttgttgataatgtttatgttacatatgctggtagcgactcggaccgatg

SEQ ID NO: 7149 - DNA, 203 bp, synthetic construct
  source 1..203: mol_type = other DNA
ggcgcgccagtcctggtgtagttatgaacttagatgttgacacacaccgttatcgtttgtctcttaaagatttacttctttatgcagcagatcctgctatgcacgttgcatctgctagtgctctgcttgatttacgaacttgttgttttagtgtagctgccattacaagtggtataaaatttcaaactcgactcggaccgatg

SEQ ID NO: 7150 - DNA, 203 bp, synthetic construct
  source 1..203: mol_type = other DNA
ggcgcgccagtcctttgagtgatgatggtgttgtctgttataactctgattatgctagtaagggttatatagctaatataagtgtttttcaacaagttttgtactatcagaataatgtctttatgtctgaatctaaatgttgggttgaaaatgatattactaatggtcctcatgaattttgttcccaacgactcggaccgatg

SEQ ID NO: 7151 - DNA, 203 bp, synthetic construct
  source 1..203: mol_type = other DNA
ggcgcgccagtcctcagagtgtaggtgcatgcgttgtttgttcatcacaaacttctttgcgttgtggcagttgtatacgtaagcctttgttatgttgtaaatgttgttatgaccatgttatggcaactaatcataaatatgttttgagtgtctcaccttacgtttgtaatgcacctaactgtgatgtgcgactcggaccgatg

SEQ ID NO: 7152 - DNA, 203 bp, synthetic construct
  source 1..203: mol_type = other DNA
ggcgcgccagtcctgaagttgatgattatgttctggcaaatgagtgtattgaacgtttaaagttatttgctgcagaaactcaaaaggcaactgaagaggcttttaaacaaagctatgcttctgctaccattcaagagattgttagtgatagagaagttattttgtgttgggagacaggtaaagttaaacgactcggaccgatg

SEQ ID NO: 7153 - DNA, 203 bp, synthetic construct
  source 1..203: mol_type = other DNA
ggcgcgccagtcctcttgctataggtctagctgtttattactacacagcacgtgtagtttatactgctgctagtcatgctgctgtagatgcattgtgtgaaaaagcttataagtttttaaatattaacgattgtacacgtattattcctgctaaagttcgtgtagattgttatgataagtttaaaattcgactcggaccgatg

SEQ ID NO: 7154 - DNA, 203 bp, synthetic construct
  source 1..203: mol_type = other DNA
ggcgcgccagtccttctatgcctgttttgtataagtatttgaatgttccattagagagagtctctttatggaattatggtaaacctattaatttgcctacaggctgtatgatgaatgttgctaagtacactcaattatgtcagtatttgaatactacaacattagctgttcctgttaatatgcgtgttcgactcggaccgatg

SEQ ID NO: 7155 - DNA, 203 bp, synthetic construct
  source 1..203: mol_type = other DNA
ggcgcgccagtccttaatggtagtaatgatgtatggcttcttaacaaggtaagattttatcgtgccttatattctaatatggccttttttcgttatcttacttttgttgatattccttataatgtttctctttctaagtttaattcttgtaaaagtgatattttatcacttaacaatcctatttttatcgactcggaccgatg

SEQ ID NO: 7156 - DNA, 203 bp, synthetic construct
  source 1..203: mol_type = other DNA
ggcgcgccagtcctactttgcttcgtttagttcatactgattctttttcttgtaataattttgatgaatctaagatatatggtagttgttttaagagtattgttttagataaatttgccatacccaactccagacgatctgatttgcagttgggcagttctggttttctgcaatcttctaattataaacgactcggaccgatg

SEQ ID NO: 7157 - DNA, 203 bp, synthetic construct
  source 1..203: mol_type = other DNA
ggcgcgccagtccttgtccttgtgctaaaccttcttttgcttcaagttgcaagagtcataaaccaccttctgcttcctgtcctattggtactaattatcgttcttgtgagagtactactgtactcgaccacactgactggtgtaggtgttcttgtttacctgatcctataactgcttatgaccctaggcgactcggaccgatg

SEQ ID NO: 7158 - DNA, 203 bp, synthetic construct
  source 1..203: mol_type = other DNA
ggcgcgccagtccttcttgttctcaaaaaaagtctctggttggtgttggtgaacattgtgcagggttcggtgttgatgaagaaaagtgtggtgtattggatggatcatataatgtttcttgtctttgtagtactgatgcctttctaggttggtcttatgacacttgcgtcagtaacaaccgttgtaatcgactcggaccgatg

SEQ ID NO: 7159 - DNA, 203 bp, synthetic construct
  source 1..203: mol_type = other DNA
ggcgcgccagtcctgtctgttctaattatgcagcttgccatgacttattgtcagagtatggcactttttgtgataatattaatagtattttagatgaagttaatggtttacttgatactactcaattgcatgtagctgatactcttatgcaaggtgtcacacttagctccaatcttaatactaatttgcgactcggaccgatg

SEQ ID NO: 7160 - DNA, 203 bp, synthetic construct
  source 1..203: mol_type = other DNA
ggcgcgccagtcctcttctttgtgtacaatcctttaatggtattaaagttttgcctcctattttgtctgaatctcaaatttctggttacaccacagccgctactgttgctgctatgtttccaccatggtcagcagcagctggcataccattttctcttaatgtacaatatagaattaatggtttgggtcgactcggaccgatg

SEQ ID NO: 7161 - DNA, 203 bp, synthetic construct
  source 1..203: mol_type = other DNA
ggcgcgccagtcctgagaaggttaatgagtgtgttaaaagtcaatctcctcgtattaatttttgtggtaatggtaatcatattttgtcattagttcaaaatgctccttatggtttgttgtttatgcattttagttataaacctatttcttttaaaactgttttagtaagtcctggtttgtgtatatcacgactcggaccgatg

SEQ ID NO: 7162 - DNA, 203 bp, synthetic construct
  source 1..203: mol_type = other DNA
ggcgcgccagtcctgtcaacctattgttggttactgtattgtacctttaaatgtttggtgtcgcaagtttggcaaatttgcttctcactttacattacgtagtcacgatatttcccatagtaataattttggtgttgtaactagttttactacttatggtaatactgtttctgaggctgtgtctagatcgactcggaccgatg

SEQ ID NO: 7163 - DNA, 203 bp, synthetic construct
  source 1..203: mol_type = other DNA
ggcgcgccagtcctatggccccaaggtctccggctttgaagactttctggaggattgtgccattacaacaggcacaggcagctttgaagcgcatccggaaagtggtgggttcgctgttgcagaatcttcaaaaaagaggaaaacgcagatcggctgtggattggacaggagcggtcacgatggtgattcgactcggaccgatg

SEQ ID NO: 7164 - DNA, 203 bp, synthetic construct
  source 1..203: mol_type = other DNA
ggcgcgccagtcctcatgccaaattgacggataccaaagtggcggcgaggtgcccaacgactgggccagcaaccctccctgaagagcaccagaagaacatggtgtgcaaaagagatcagagtgataggggatgggggaaccactgcgggctgttcggaaaaggtagcattgttggatgtacgaagtttcgactcggaccgatg

SEQ ID NO: 7165 - DNA, 203 bp, synthetic construct
  source 1..203: mol_type = other DNA
ggcgcgccagtcctgattgcgaggtcaacaagaaagccactgggagagtgtttgacatcaccaagattgtgtacacggtgaaggtggaaccacacactggcacatatgtggcagcaaatgagacaaacagcgacagaaagtcagttgagttcaccgcacagtcggaaaagaagaccatctccttggggcgactcggaccgatg

SEQ ID NO: 7166 - DNA, 203 bp, synthetic construct
  source 1..203: mol_type = other DNA
ggcgcgccagtcctagctatggtgaggttggactctcttgcagggtgaattctggcattgacgttgaccaaaccgtggtgctggagttggaaggccaggcactccaccccaaggggtgggctgtgcacaaagactggtttggagacctggcactaccatggaaacaccatgaggcggagatctgggaacgactcggaccgatg

SEQ ID NO: 7167 - DNA, 203 bp, synthetic construct
  source 1..203: mol_type = other DNA
ggcgcgccagtcctgtcgatgtggcaaatctcataacccctaacccaaccattgagaatgaagggggtgggtacattgagatgcaacttcctcccggggacaacacaatttatatcggcaatcttcaccaagcatggttccagaaagggagctccataggcagagtgtttgaaaagacacgcaaggggcgactcggaccgatg

SEQ ID NO: 7168 - DNA, 203 bp, synthetic construct
  source 1..203: mol_type = other DNA
ggcgcgccagtcctatccagagactggcagcagttggagagcacgcatgggactttggttccgtgggcggcttctttgggtcaattggaaaggcagtgcacatggtcctggggggactgttcggtgtcttgtttggaggcattgggtttatccccaagatgctgatgggagctgccttgatttggcttcgactcggaccgatg

SEQ ID NO: 7169 - DNA, 203 bp, synthetic construct
  source 1..203: mol_type = other DNA
ggcgcgccagtcctggaataaacatgaaaaacaccaccttgtctcttagctttctggccacaggtggactcatcctgatgatgacacttggcgttggggcagaccaaggatgttccattgacagtgagagaatggagctcagatgtggagcaggactggccgtttggaaggaaaccgcagagtggtatcgactcggaccgatg

SEQ ID NO: 7170 - DNA, 203 bp, synthetic construct
  source 1..203: mol_type = other DNA
ggcgcgccagtcctgacggctatgcgttccaccctgagtccccgggagagctggctgcagcgctcgtggaggcagccaagaacaacgtgtgtggaatagtgccccaaaacaggctagaactggcaatgtggagatcgcgcagagatgagatcaatctacacctcgctgaagcagaggccaatctcacacgactcggaccgatg

SEQ ID NO: 7171 - DNA, 203 bp, synthetic construct
  source 1..203: mol_type = other DNA
ggcgcgccagtcctaagtccagaggcaatgcaaccggtttctatattcaggagctgcatgtcatggacttgcgtaactgcacttggccagatgagtacaccattgacaacaagggggtgatagagtcacacctgtttctcccggtgacgctggctgggccgagaaccatgtacaaccagatcccaggacgactcggaccgatg

SEQ ID NO: 7172 - DNA, 203 bp, synthetic construct
  source 1..203: mol_type = other DNA
ggcgcgccagtccttatgctgtgcagctgtctgggccgtggaatcaaacacctctgcgcgtgaaacgagaaccatgccctgggacagaggtcaagattgaccctggatgtcctggcagaggagcttctgtgcgtagcaccacggaaagcgggaaggtgattccggagtggtgctgtagaacttgcacacgactcggaccgatg

SEQ ID NO: 7173 - DNA, 203 bp, synthetic construct
  source 1..203: mol_type = other DNA
ggcgcgccagtccttactgggcggacatcagagaggatgtagtgtgctatgggggtgcctggaacctgccaaccaagtgggagggcgaggtggtacagcttcatgctttccctccgggaagggctcatgagatcaagcaatgtcagcctggcagactcaacctgggtaatgggagggtcatgggagcgcgactcggaccgatg

SEQ ID NO: 7174 - DNA, 203 bp, synthetic construct
  source 1..203: mol_type = other DNA
ggcgcgccagtcctggatggatgtcaaaaggagagatcacggtgattgacatgcatccaggtgcggggaagactcatagagtcctccctgaactcatcaggcaatgcatagacaggaggcttcgaaccctgattctggccccaacaagggtggttttaagggagatggagcaggctctgaaaggcaagcgactcggaccgatg

SEQ ID NO: 7175 - DNA, 203 bp, synthetic construct
  source 1..203: mol_type = other DNA
ggcgcgccagtcctatgggggccaactttgatgtcgacagggtgatcgatggcaggaataacatcaagcctgaggaaattgacggagcagtcgaactcattggggtcaggaaagtcaccactgcgtcggctgcccagagaagaggcagggtggggcgcaaggaaggaagaagggaccggtatgtgtaccgactcggaccgatg

SEQ ID NO: 7176 - DNA, 203 bp, synthetic construct
  source 1..203: mol_type = other DNA
ggcgcgccagtccttctggccagtgtgatgatgatgacagcatgctggtacagtggaaagaagcccaaatgctgttggacaatatcacaacccttaggggaatggcggcagtcttttacggtcctgaacaggaacggatgcccgaggtggctggcttctacaggctcaccgaggagaagaggaagtaccgactcggaccgatg

SEQ ID NO: 7177 - DNA, 203 bp, synthetic construct
  source 1..203: mol_type = other DNA
ggcgcgccagtcctttccggcatctcttgtcacagaatgatttcacaccctggctggcatggcatgtggctaagaacacagcgggaccgattgaccgaagttggacttgggagggaccggagggcaacgctatagagggccagaatggtgaggtcgtccggttcagaactcctggtggcgctgagaaacgactcggaccgatg

SEQ ID NO: 7178 - DNA, 203 bp, synthetic construct
  source 1..203: mol_type = other DNA
ggcgcgccagtcctatcttgaaaccaacctggagagacatgcgcatgttccgagaggggcgtgacatccgagagtttgtccagtatgcaagttgccgcaggggagcgtctgaactgctgatgggaatgagtgaagtcccaggtttgatgaggaacagagtgctgggggcttatgacgtgttctacacccgactcggaccgatg

SEQ ID NO: 7179 - DNA, 203 bp, synthetic construct
  source 1..203: mol_type = other DNA
ggcgcgccagtcctctcatttctttgtgtctcatgtgggctgggggcatgtcttatggacatatggcgggggtttctctcgtcttttatgctttcctgactgtgatacagcccgaacctggcaaacagagaagcgccgatgacaacagattggcgttcacactccttgtcctgggattggtaattggacgactcggaccgatg

SEQ ID NO: 7180 - DNA, 203 bp, synthetic construct
  source 1..203: mol_type = other DNA
ggcgcgccagtcctacagtggcagccaatgagcttggttggcttgagaggaccaaggctgacttaggccagcttctctggaaacccacggaggaagccgataggggagggtggaccgagtggaccaacattgacattcagccggcacgttcgtggggaacttatgtgcttgtggtgtctctcttttcgcgactcggaccgatg

SEQ ID NO: 7181 - DNA, 203 bp, synthetic construct
  source 1..203: mol_type = other DNA
ggcgcgccagtcctccatacatgattcatcagatgcagaccagagtccaacgtctggtcaacagtgccgtggtgtcgggtggccagaccatccgtgagataggagggggagcacctttctttggagtgaaggggcacgtcatcacaatggggataagttccctagttggggcaactccactatcactgcgactcggaccgatg

SEQ ID NO: 7182 - DNA, 203 bp, synthetic construct
  source 1..203: mol_type = other DNA
ggcgcgccagtcctgaaagaaagctcagcctcatgcttgcagtcggcctgggcgccctggctgtgtccctcaacagaactgcgtgggccttggcagaggctggggcgctgatggtggcagctgtgggtcaactggtgtcaaccgaaggcgagttttggtggacaatgccggtggcgtgcggaatggcacgactcggaccgatg

SEQ ID NO: 7183 - DNA, 203 bp, synthetic construct
  source 1..203: mol_type = other DNA
ggcgcgccagtcctttagaaaccgacaggaccaaggctagggaactcttgagacgtggagagacaaacatggggttggccgtctcacgcggaactgccaagttggcgtggctagaggaaagaggttatgccaccgtcaagggggaggtcgtagacctgggctgtggacgcggtggatggtcatactaccgactcggaccgatg

SEQ ID NO: 7184 - DNA, 203 bp, synthetic construct
  source 1..203: mol_type = other DNA
ggcgcgccagtcctgccgcttccagacccaccgtattgagtgtgaaggcatacaccatcggagggaaaggacacgaggaaccccgtatggtcaccagcttgggatggaacctcgtgaagttcagaagtggaatggatgtgttttctatggaggcccacagagcagacacggtgatgtgtgacattggacgactcggaccgatg

SEQ ID NO: 7185 - DNA, 203 bp, synthetic construct
  source 1..203: mol_type = other DNA
ggcgcgccagtcctgagagtgatccggacccagagaaggaaggggagagaagccgcagagtgatccagctcatgagccgctggaagcagcggaacccagacgcctcctgtgtattcaaggtgctggctccttacagacctgatgtcattgaggcactccacagattccagctgctgtggggtggggggcgactcggaccgatg

SEQ ID NO: 7186 - DNA, 203 bp, synthetic construct
  source 1..203: mol_type = other DNA
ggcgcgccagtcctctggtgagaaaccctttctccagaaactcgacccatgagatgtactacacgacgggggtttgtggaaacatcatcaatgctgtcaatgtgacatcaaaacgactgttgagtaggtatggtgatgctgctggacccgtccttgttcctgaggtagatttgggaactggaactcgtcgactcggaccgatg

SEQ ID NO: 7187 - DNA, 203 bp, synthetic construct
  source 1..203: mol_type = other DNA
ggcgcgccagtccttgcgtggcactggccagtgacgtggtgaagccaaaggatgtggaagagaggatcaacgccctaaagagacagtactcagacacgtggcatgtggacaaagaacacccatatcggacatggcagtattgggggagttaccgaacagcggccacaggctcggcggcgtccttgatccgactcggaccgatg

SEQ ID NO: 7188 - DNA, 203 bp, synthetic construct
  source 1..203: mol_type = other DNA
ggcgcgccagtcctacactcacgaacgtgaaggtacagctcatcaggatgatggaaggtgagggcgtcattgggccctctgacgcacaggatcctaggctccgccgagttgaacaatggcttcatgcccacggggcagaaaggttgactcggatgttggtcagtggtgacgactgtgtggtgagaccccgactcggaccgatg

SEQ ID NO: 7189 - DNA, 203 bp, synthetic construct
  source 1..203: mol_type = other DNA
ggcgcgccagtcctattgatgacaggttcggcacggccctctacttcctgaatgacatggcgaaagtgagaaaggacatcggcgagtgggagccatccatcggtttcgctaggtgggaggaagttccattttgctcccaccacttccatgagcttgccatgaaggatggaagaacgctgatagtgccacgactcggaccgatg

SEQ ID NO: 7190 - DNA, 203 bp, synthetic construct
  source 1..203: mol_type = other DNA
ggcgcgccagtcctgatatgttgtgcgcgtcattgattggccataccgagagggctgactgggcacggcacatatggactggggtcatgaaggttcgagccatgataggtagggagacgtatgtggactacctgtcgcacatggacaggcatgaggccccatggctccctgtctacgaaagctccatccgactcggaccgatg

SEQ ID NO: 7191 - DNA, 203 bp, synthetic construct
  source 1..203: mol_type = other DNA
ggcgcgccagtcctgtggaccagtgaaaactttgtgagactgaccatccctcaaggccgagtgggatgcgtatgaaggcccctggagagatccaggaggggggagagaggaaaattggcagcctctctcaggagatttcctccccctataccaaattccccaggaatctggggggcggttcttgttctcgactcggaccgatg

SEQ ID NO: 7192 - DNA, 203 bp, synthetic construct
  source 1..203: mol_type = other DNA
ggcgcgccagtcctgattttgataatgatgaattgaaacgtttaggaaatttattaaaacaggaagaagaccctcttcatgatcctgactcggaaaatagttatgatgctcctccccctcctcatccgtccctacattcgtcgcgtccctcagataatgatgatttactttcatctacagatgaggctcgactcggaccgatg

SEQ ID NO: 7193 - DNA, 203 bp, synthetic construct
  source 1..203: mol_type = other DNA
ggcgcgccagtccttcttaacggtcttgtgattgctgatgagaaaattcaaacgcattttccttataattatttaggtttctccttgtatcctcgtacctataacacccaactagtaaagctgcaaactgatcatttgaaaactctaaatgattttcagaaacttttaggagatattaactggatccgcgactcggaccgatg

SEQ ID NO: 7194 - DNA, 203 bp, synthetic construct
  source 1..203: mol_type = other DNA
ggcgcgccagtcctggagcctccctttatctgtgttccttatgctttagaacaacaggattggctttttcaattttcagataattgggccatagcatttgcgaattaccccggacgaattattcatcattaccctcctgataaattattgcaatttgctagctctcatgcttttatttttccaaaaatcgactcggaccgatg

SEQ ID NO: 7195 - DNA, 203 bp, synthetic construct
  source 1..203: mol_type = other DNA
ggcgcgccagtcctagttcgccgacaacctattcctaacgctacacttatatttacagacggctcttccaatgggactgcagccttaattattaatcatcaaacttattatacacaaaccagtttctcttctgctcaagttgtggaattatttgcagtccaccaagcattgctaacagtacctacttccgactcggaccgatg

SEQ ID NO: 7196 - DNA, 203 bp, synthetic construct
  source 1..203: mol_type = other DNA
ggcgcgccagtcctatcttgttctacttgtcctcaattctttgtccttcctcaatatggtgtcaaccctcgaggtttacgccctaatcatctctggcaaacagacgttactcacattcctcaatttgggcgtctgaaatatgttcatgtttcaatcgacaccttttccaactttctcatggcttccctcgactcggaccgatg

SEQ ID NO: 7197 - DNA, 203 bp, synthetic construct
  source 1..203: mol_type = other DNA
ggcgcgccagtcctttggggagaacgatcctcatgcaaaaaaccacttgtacgatggaaagatccacttaccaatctgtggtatgggcctgaccctgtattaatatggggacgagggcatgtttgtgtttttccacaggatgccgaagcaccgcgctggattccggaaaggctggtacgcgcggcagacgactcggaccgatg

SEQ ID NO: 7198 - DNA, 203 bp, synthetic construct
  source 1..203: mol_type = other DNA
ggcgcgccagtcctccaccctcaggaagtcttaagagcttttggagctcaaatgtgttttggttttgcaacatggcttaaaaagcaggaaatctgattatgtaagaaaccagtaattatgtaagtaaatgatctcaagttacttaacttgcttatatatactgctgcacaataaagcaaggtatcagccgactcggaccgatg

SEQ ID NO: 7199 - DNA, 203 bp, synthetic construct
  source 1..203: mol_type = other DNA
ggcgcgccagtcctagagaaacccgtcaagggcgactatatcaggctgatatgagttttgtgaaaaattacctgctacctaagctaccactgaatgattgctattatgcatggactaatatagacaggtttgaagcagctgtactgagcgtgcgcaacagacagctttcaggtcctcaaggtgctattcgactcggaccgatg

SEQ ID NO: 7200 - DNA, 203 bp, synthetic construct
  source 1..203: mol_type = other DNA
ggcgcgccagtcctgcttggtggtaagtgtgattttatgttttctttgattttcttgtagacttgttcctgacgctgctacaggagcagaagactaacaagcttcatttatttttccaggtaagcaaacatgtctgctgctgatgcttatcgtccaggtggcaagctgcctctagatgagctaatgcacgactcggaccgatg

SEQ ID NO: 7201 - DNA, 203 bp, synthetic construct
  source 1..203: mol_type = other DNA
ggcgcgccagtcctaagaatgaatagagcaattcctgtgggaccggaaccttcaagtcaagccaaccgcggaggggggccatatcaaactcactttgctataggaataatgtactccaaggctttccaaggcttgcttagatttgctaatgctttacctcctgaattgagccctgtaaaacagcttgtcgactcggaccgatg

SEQ ID NO: 7202 - DNA, 203 bp, synthetic construct
  source 1..203: mol_type = other DNA
ggcgcgccagtccttaatcagttagaaaattataggcgtaagacatctgataccagggtatggtacagagtgtacttagacatgacaagacttctaatttctgtggctcctccaggagcagcaaacaaactcagacaggcagcagcaggtataactcactcaaaagcccccaatgctgaaagcctgagcgactcggaccgatg

SEQ ID NO: 7203 - DNA, 203 bp, synthetic construct
  source 1..203: mol_type = other DNA
ggcgcgccagtcctaggcattgtgcggttcgcagctgctgcttttgtacctactgtagaaaatattgatagattttttgaagactcgctaacgaactttgccaaagaagacttagacacctggcaacaactccacgagcagtttatcaaactctttcaccctccagatgtcggagtccaccttgttagcgactcggaccgatg

SEQ ID NO: 7204 - DNA, 203 bp, synthetic construct
  source 1..203: mol_type = other DNA
ggcgcgccagtccttgctgatgttcaactttctcaggtcctaccgcccgctcctccttcttcggaccaacaaccggcttattccgcaggagagccctcagccaagaaggcgcggattggtacccctgacgagtctgacccggccttgcttctgcagcctcataccaatacaatgtccgtggaaccagccgactcggaccgatg

SEQ ID NO: 7205 - DNA, 203 bp, synthetic construct
  source 1..203: mol_type = other DNA
ggcgcgccagtcctcaggttagctattatgacaggtgttgataatgatgggactgccatttggaaacgccctgaaggcatggatgttggcagactcccattaaattatgttccagggccagctctaatgatgccaacagacacccaaattagaaacacaactttcagagatcctgtggctattggaaacgactcggaccgatg

SEQ ID NO: 7206 - DNA, 203 bp, synthetic construct
  source 1..203: mol_type = other DNA
ggcgcgccagtccttcctgctacaagtgacaggtatagtgtagctcctttagtccatcaaccatggtctgtccgtacagaagaatggctagcaaacaaaacagactatgctgttcataattatttaggaggtgttgcatacactagaagaaagcatgaagagtcttatgataaacatgaggaggaccgcgactcggaccgatg

SEQ ID NO: 7207 - DNA, 203 bp, synthetic construct
  source 1..203: mol_type = other DNA
ggcgcgccagtccttgctgtttggaacccaaatcctttatcatatgattgccaaatatggactaaaattcctaatacagaatgtcatttttttgctcaatatcctcttttgggaggttggggagttcttactcctcctccaatgatttttgtgaagctcaggtcacaaccaggccctcctagtccaggcgactcggaccgatg

SEQ ID NO: 7208 - DNA, 203 bp, synthetic construct
  source 1..203: mol_type = other DNA
ggcgcgccagtcctccaagaagtacagttctaagacgaaccgcggcacgaaacgtgcgccgcgcgatcaggaggttgggacgggtgcgcaagaaagtactcgtaatgacgttgcttggtatgctcgttatcctcatattttggaggaagctacgcgcctgccttttgcttatcctattgggcagtattcgactcggaccgatg

SEQ ID NO: 7209 - DNA, 203 bp, synthetic construct
  source 1..203: mol_type = other DNA
ggcgcgccagtcctatgatactggatactctgttgcaagcgctactgagtggtctaagtacgtagatactagcctgaccattcctggtgtgatgtgtgttaactttacacccaccccgggtgaatcttataataagaattcacctatcaatatagctgcacagaatgtctacacgtatgtgcggcacacgactcggaccgatg

SEQ ID NO: 7210 - DNA, 203 bp, synthetic construct
  source 1..203: mol_type = other DNA
ggcgcgccagtcctctgaagatgttttcgctaaccaggcgcaatgggaatacttcgtcaacatggtggcatacagggctggagcgttcgctgctcctgcaagtatgacttattatgagcgtcacgcgtggatgtccaatggtctgtacgtggatcaagatgtcacacgagctcaaatctacatgttcacgactcggaccgatg

SEQ ID NO: 7211 - DNA, 203 bp, synthetic construct
  source 1..203: mol_type = other DNA
ggcgcgccagtccttctttaaggcgttcggtgctgatggtctggttaaactgctggctgttgacagcactaccatgacattgcccacatacgatcccctcatcctggctcaaattcatagtgctagggctgtgggcgcacctatcctggaaacttccactcttactggtttcccaggccgtcagtggccgactcggaccgatg

SEQ ID NO: 7212 - DNA, 203 bp, synthetic construct
  source 1..203: mol_type = other DNA
ggcgcgccagtcctattgctcaggagtcgtttggtccctttgctcagctgaatgattggaccatccttacgggtgaaactctggctcggatgcatgaagtatgtgtcaccagcatgttcgatgttcctcagatgggcttcaacaaataaatgttggcctggggtgtgtgtgcgttaagcacacacctccgactcggaccgatg

SEQ ID NO: 7213 - DNA, 203 bp, synthetic construct
  source 1..203: mol_type = other DNA
ggcgcgccagtcctgtagtgtggatgtttcctttcgctgttaatattcgtgagctgcaggtctatcaaccactaatccttacgttccaaagattgggattggtgccagcgtgggttagcatggaagctgttgataggcgtatcactaagatgtttgatacaaaaggaccacgtgatgtggtggtctgtcgactcggaccgatg

SEQ ID NO: 7214 - DNA, 203 bp, synthetic construct
  source 1..203: mol_type = other DNA
ggcgcgccagtcctacagacttctccaagttcgaccagcattttaatccaacgtgccagagtgtagccaaagagctgttggctgatctgcttacaggtcaggaagccgtcgactggttagaacgtgtgttcccaattaaatatgctatacccttagcttataattggggtgaaatcaggtatggtatccgactcggaccgatg

SEQ ID NO: 7215 - DNA, 203 bp, synthetic construct
  source 1..203: mol_type = other DNA
ggcgcgccagtcctcatggaatgggatcgggttctggcggcactaacgccgatgagacgttggtgcatagggtgctgcaacacgaagcagcgattagccaccataccactcttaacccaaattcgcagtgtctgggtgacgatggcgttttaacttacccaggtatatctgcggaggatgtaatgcaacgactcggaccgatg

SEQ ID NO: 7216 - DNA, 203 bp, synthetic construct
  source 1..203: mol_type = other DNA
ggcgcgccagtccttcatactcgcgccacggtctcgatatgaacctagagaaacagtatgtgagcaaacaagactgcacatatttacgcaggtggcatcatacagattatcgcgtagacggcatgtgtgtgggagtgtactcaaccatgcgggcgttaggcaggttggctatgcaagagcgctactatcgactcggaccgatg

SEQ ID NO: 7217 - DNA, 203 bp, synthetic construct
  source 1..203: mol_type = other DNA
ggcgcgccagtcctgacccagacgtatggggtgagaagatggtcaccctacgttatctatccatcattgagaatgtgaagtatcatcctctaaaggaagagttcctggacttttgcatcaaaggggataaaactagacttggactaggaatcccaggctttctggacaacatcgctggtgaggcccagcgactcggaccgatg

SEQ ID NO: 7218 - DNA, 203 bp, synthetic construct
  source 1..203: mol_type = other DNA
ggcgcgccagtccttatcgacatgatgccagatttccttggctacaccaagtcgttgcagtatgatggtgatctgcgacgtaatgctgctgccggtattgaaaactggtgggttgttcaagcattgaaatcgagacgctgacgatcgagatggtgcagcaaaccattgggactaacagtcccaactgccgactcggaccgatg

SEQ ID NO: 7219 - DNA, 203 bp, synthetic construct
  source 1..203: mol_type = other DNA
ggcgcgccagtcctgaaaaggggaaatggacaacgaacacagagactggagcaccccaactcaatccgattgatggaccactacctgaggataatgagccgagtgggtatgcacaaacagattgtgtattggaagcaatggctttccttgaagaatcccacccagggatctttgaaaactcgtgtcttcgactcggaccgatg

SEQ ID NO: 7220 - DNA, 203 bp, synthetic construct
  source 1..203: mol_type = other DNA
ggcgcgccagtcctaacacaatgacaaaagacgcagaaagaggcaaattgaagaggcgggcaattgcaacacccgggatgcaaatcagaggattcgtgtactttgtcgaaacactagcgaggagtatctgtgagaaacttgagcaatctggactccccgtcggagggaatgaaaagaaggctaaattgcgactcggaccgatg

SEQ ID NO: 7221 - DNA, 203 bp, synthetic construct
  source 1..203: mol_type = other DNA
ggcgcgccagtcctggcacagcctcattgagtcctggaatgatgatgggcatgttcaatatgctgagtacagtcttaggagtttcaatcctgaatcttgggcagaagaggtacaccaaaaccacatactggtgggacggactccaatcctctgatgatttcgctctcatagtgaatgcaccaaatcatcgactcggaccgatg

SEQ ID NO: 7222 - DNA, 203 bp, synthetic construct
  source 1..203: mol_type = other DNA
ggcgcgccagtcctgagggaatagaagcaggggtggataggttctataggacttgcaaactagttggaatcaatatgaccaagaagaagtcttacataaatcggacaggaacatgtgaattcacaagcttcttctaccgctatgggttcgtagccaacttcagtatggagctgcccagctttggagtgcgactcggaccgatg

SEQ ID NO: 7223 - DNA, 203 bp, synthetic construct
  source 1..203: mol_type = other DNA
ggcgcgccagtccttcattcgagctgaagaagctgtgggagcagacccgctcaaaggcaggactgttggtttcagatggaggaccaaacccatacaatatccggaatctccacattccggaggctggcttgaagtgggaattgatggatgaagactaccagggcagactgtgtaatcctctgaacccgcgactcggaccgatg

SEQ ID NO: 7224 - DNA, 203 bp, synthetic construct
  source 1..203: mol_type = other DNA
ggcgcgccagtcctttgctgatggatgcccttaaattaagcatcgaagacccgagtcatgagggggaggggataccgctatatgatgcaatcaaatgcatgaaaacatttttcggctggaaagagcccaacattgtaaaaccacatgaaaaaggcataaaccccaattacctcctggcttggaagcagcgactcggaccgatg

SEQ ID NO: 7225 - DNA, 203 bp, synthetic construct
  source 1..203: mol_type = other DNA
ggcgcgccagtcctggctccatcgggaaggtgtgcagaaccttactggctaaatctgttttcaacagtctatatgcatctccacaactcgaggggttttcagctgaatcaagaaaattgcttctcattgttcaggcacttagggacaacctggaacctggaaccttcgatcttggggggctatatgaacgactcggaccgatg

SEQ ID NO: 7226 - DNA, 203 bp, synthetic construct
  source 1..203: mol_type = other DNA
ggcgcgccagtcctgcatatgagagaatgtgcaacatcctcaaagggaaattccaaacagcagcacaaagagcaatgatggatcaggtacgggaaagcagaaatcctgggaatgctgagattgaagatctcatatttctggcacggtctgcactcatcctgagaggatcagtggcccacaagtcctgccgactcggaccgatg

SEQ ID NO: 7227 - DNA, 203 bp, synthetic construct
  source 1..203: mol_type = other DNA
ggcgcgccagtcctgggcatatggagtaaaagggttttcatttaaatacggcaatggtgtttggatcgggagaaccaaaagcactaattccaggagcggctttgaaatgatttgggatccaaatgggtggactggaacggacagtagcttctcggtgaaacaagatatcgtagcaataactgattggtcgactcggaccgatg

SEQ ID NO: 7228 - DNA, 203 bp, synthetic construct
  source 1..203: mol_type = other DNA
ggcgcgccagtccttctgggttgagctaatcagagggcggcccaaagagagcacaatttggactagtgggagcagcatatctttttgtggtgtaaatagtgacactgtgggttggtcttggccagacgatgccgagttgccattcaccattgacaagtagtttgttcaaaaaactccttgtttctactcgactcggaccgatg

SEQ ID NO: 7229 - DNA, 203 bp, synthetic construct
  source 1..203: mol_type = other DNA
ggcgcgccagtcctagaagaaaaaagagaggactatttggagctatagcaggttttatagagggaggatggcagggaatggtagatggttggtatgggtaccaccatagcaatgagcaggggagtggatacgctgcagacaaagaatccactcaaaaggcaatagatggagtcaccaataaggtcaaccgactcggaccgatg

SEQ ID NO: 7230 - DNA, 203 bp, synthetic construct
  source 1..203: mol_type = other DNA
ggcgcgccagtcctgactcaaatgtcaagaacctttatgacaaggtccgactacagcttagggataatgcaaaggagctgggtaatggttgtttcgagttctatcacaaatgtgataatgaatgtatggaaagtgtaaaaaacggaacgtatgactacccgcagtattcagaagaagcaagactaaaccgactcggaccgatg

SEQ ID NO: 7231 - DNA, 203 bp, synthetic construct
  source 1..203: mol_type = other DNA
ggcgcgccagtcctattccatggggctaaggaggtcgcactcagctactcaaccggtgcacttgccagttgtatgggtctcatatacaacaggatgggaacggtgaccacagaagtggcttttggcctagtgtgtgccacttgtgagcagattgcagattcacagcatcggtctcacagacagatggccgactcggaccgatg

SEQ ID NO: 7232 - DNA, 203 bp, synthetic construct
  source 1..203: mol_type = other DNA
ggcgcgccagtcctcttcaaatgcatttatcgtcgccttaaatacggtttgaaaagagggccttctacggaaggggtacctgagtctatgagggaagagtatcggcaggaacagcagagtgctgtggatgttgacgatggtcattttgtcaacatagagctggagtaaaaaactaccttgtttctactcgactcggaccgatg

SEQ ID NO: 7233 - DNA, 203 bp, synthetic construct
  source 1..203: mol_type = other DNA
ggcgcgccagtcctaaattgaagtcactaatgctactgaactggttcagagttcctcaacaggtggaatatgcgacagtcctcatcagatccttgatggagaaaactgcacactaatagatgctctattgggagaccctcagtgtgatggcttccaaaataagaaatgggacctttttgttgaacgcacgactcggaccgatg

SEQ ID NO: 7234 - DNA, 203 bp, synthetic construct
  source 1..203: mol_type = other DNA
ggcgcgccagtccttaccagagaaacaaactagaggcatatttggcgcaatcgcgggtttcatagaaaatggttgggagggaatggtagacggttggtacggtttcaggcatcaaaattctgagggaacaggacaagcagcagatctcaaaagcactcaagcagcaatcaaccaaatcaatgggaagccgactcggaccgatg

SEQ ID NO: 7235 - DNA, 203 bp, synthetic construct
  source 1..203: mol_type = other DNA
ggcgcgccagtccttaactgactcagaaatgaacaaactgtttgaaagaacaaagaagcaactgagggaaaatgctgaggatatgggcaatggttgtttcaaaatataccacaaatgtgacaatgcctgcatagggtcaatcagaaatggaacttatgaccatgatgtatacagagatgaagcattaacgactcggaccgatg

SEQ ID NO: 7236 - DNA, 203 bp, synthetic construct
  source 1..203: mol_type = other DNA
ggcgcgccagtccttggtggggacatctgggtgacaagagaaccttatgtgtcatgcgaccctgacaagtgttaccaatttgcccttggacagggaacaacactaaacaacgtgcattcaaatgacacagtacatgataggaccccttatcggaccctattgatgaatgaattaggtgttccatttcacgactcggaccgatg

SEQ ID NO: 7237 - DNA, 203 bp, synthetic construct
  source 1..203: mol_type = other DNA
ggcgcgccagtcctggagtcagaatgcgtttgtatcaatggaacttgtacagtagtaatgactgatgggagtgcttcaggaaaagctgatactaaaatactattcattgaggaggggaaaatcattcatactagcacattgtcaggaagtgctcagcatgtcgaggagtgctcctgctatcctcgatacgactcggaccgatg

SEQ ID NO: 7238 - DNA, 203 bp, synthetic construct
  source 1..203: mol_type = other DNA
ggcgcgccagtccttgccttgagaattttagagcctatgtggatggattcgaaccgaacggctgcattgagggcaagctttctcaaatgtccaaagaagtgaatgccaaaattgaaccttttctgaagacaacaccaagaccaatcaaacttcctaatggacctccttgttatcagcggtccaaattccgactcggaccgatg

SEQ ID NO: 7239 - DNA, 203 bp, synthetic construct
  source 1..203: mol_type = other DNA
ggcgcgccagtcctgtattgtcagaattgcaggacattgaaaatgaggagaagatcccaaggactaaaaacatgaagaaaacgagtcaactaaagtgggctcttggtgaaaacatggcaccagagaaagtagactttgacaactgcagagacataagcgatttgaagcaatatgatagtgacgaacctcgactcggaccgatg

SEQ ID NO: 7240 - DNA, 203 bp, synthetic construct
  source 1..203: mol_type = other DNA
ggcgcgccagtcctgagaaggggaagtggacgacaaatacagaaactggggcaccccaactcaacccaattgatggaccactacctgaggataatgagccaagtggatatgcacaaacagactgtgtcctggaggctatggccttccttgaagaatcccacccaggtatctttgagaactcatgccttcgactcggaccgatg

SEQ ID NO: 7241 - DNA, 203 bp, synthetic construct
  source 1..203: mol_type = other DNA
ggcgcgccagtcctggcacagcatcattgagccctgggatgatgatgggcatgttcaacatgctaagtacggttttaggagtctcggtactgaatcttgggcaaaagaaatacaccaagacaacatactggtgggatgggctccaatcctccgacgattttgccctcatagtgaatgcaccaaatcatcgactcggaccgatg

SEQ ID NO: 7242 - DNA, 203 bp, synthetic construct
  source 1..203: mol_type = other DNA
ggcgcgccagtccttaccaaaagtgctgcaacttgttcgagaaatttttccctagtagttcatataggagaccgattggaatttctagcatggtggaggccatggtgtctagggcccggattgatgccagaattgacttcgagtctggacggattaagaaggaagagttctctgagatcatgaagatccgactcggaccgatg

SEQ ID NO: 7243 - DNA, 203 bp, synthetic construct
  source 1..203: mol_type = other DNA
ggcgcgccagtcctgttgtttttcccaatgaagtgggagccaggatactaacatcagaatcgcaattaacaataactaaagagaaaaaagaagaactccgagattgcaaaatttctcccttgatggttgcatacatgttagagagagaacttgtccgaaaaacaagatttctcccagttgctggcggacgactcggaccgatg

SEQ ID NO: 7244 - DNA, 203 bp, synthetic construct
  source 1..203: mol_type = other DNA
ggcgcgccagtcctagtgtgatgggaatggttggagtattaccagatatgactccaagcacagagatgtcaatgagaggaataagagtcagcaaaatgggtgtggatgaatactccagtacagagagggtggtggttagcattgatcggtttttgagagttcgagaccaacgcgggaatgtattattgcgactcggaccgatg

SEQ ID NO: 7245 - DNA, 203 bp, synthetic construct
  source 1..203: mol_type = other DNA
ggcgcgccagtccttccgccgtcttgagagggtttctcattataggtaaggaagacagaagatacggaccagcattaagcatcaatgaactgagtaaccttgcaaaaggggaaaaggctaatgtgctaatcgggcaaggagacgtggtgttggtaatgaaacgaaaacgggactctagcatacttactcgactcggaccgatg

SEQ ID NO: 7246 - DNA, 203 bp, synthetic construct
  source 1..203: mol_type = other DNA
ggcgcgccagtcctagggatcatgaagacagaaggaacacttgagaactgtgaaaccaaatgccaaactcctttgggagcaataaatacaacactaccttttcacaatgtccacccactgacaataggtgaatgccccaaatatgtaaaatcggagaaattggtcttagcaacaggactaaggaatgtcgactcggaccgatg

SEQ ID NO: 7247 - DNA, 203 bp, synthetic construct
  source 1..203: mol_type = other DNA
ggcgcgccagtcctcagcatgggggtttatcaaatccttgccatttatgctacagtagcaggttctctgtcactggcaatcatgatggctgggatctctttctggatgtgctccaacgggtctctgcagtgcagaatctgcatatgattgtaagtcattttataattaaaaacacccttgtttcctgacgactcggaccgatg

SEQ ID NO: 7248 - DNA, 203 bp, synthetic construct
  source 1..203: mol_type = other DNA
ggcgcgccagtccttttcaaatgcatttatcgcttctttaaacacggtctgaaaagagggccttctacggaaggagtacctgagtctatgagggaagaatatcgaaaggaacagcagagtgctgtggatgctgacgatagtcattttgtcagcatagagctggagtaaaaaactaccttgtttctactcgactcggaccgatg

SEQ ID NO: 7249 - DNA, 203 bp, synthetic construct
  source 1..203: mol_type = other DNA
ggcgcgccagtcctgtacccttgcaaaaggagaaaaggctaatgtactaattgggcaaggagacgtggtgttggtaatgaaacgaaaacgggactctagcatacttactgacagccagacagcgaccaaaagaattcggatggccatcaattaatgttgaatagtttaaaaacgaccttgtttctactcgactcggaccgatg

SEQ ID NO: 7250 - DNA, 203 bp, synthetic construct
  source 1..203: mol_type = other DNA
ggcgcgccagtcctaacagcttaacaatagagagaatggtgctctctgcttttgacgagagaaggaataaatatctggaagaacatcccagcgcggggaaggatcctaagaaaactggaggacccatatacaagagagtagatggaaagtggatgagggaactcgtcctttatgacaaagaagaaatacgactcggaccgatg

SEQ ID NO: 7251 - DNA, 203 bp, synthetic construct
  source 1..203: mol_type = other DNA
ggcgcgccagtcctaggcgaatctggcgccaagccaataatggtgatgatgcaacagctgggctgactcacatgatgatctggcattccaatttgaatgatacaacataccagaggacaagagctcttgttcgcaccggaatggatcccaggatgtgctctttgatgcagggttcgactctccctaggcgactcggaccgatg

SEQ ID NO: 7252 - DNA, 203 bp, synthetic construct
  source 1..203: mol_type = other DNA
ggcgcgccagtcctgctgcacaaagagcaatgatggatcaagtgagagaaagccggaacccaggaaatgctgagatcgaagatctaatctttctggcacggtctgcactcatattgagagggtcagttgctcacaaatcttgtctgcccgcctgtgtgtatggacctgccatagccagtgggtacaaccgactcggaccgatg

SEQ ID NO: 7253 - DNA, 203 bp, synthetic construct
  source 1..203: mol_type = other DNA
ggcgcgccagtccttgtgtagcatggtccagctcaagttgtcacgatggaaaagcatggttgcatgtttgtgtcactggggatgataaaaatgcaactgctagcttcatttatgacgggaggcttatggacagtattggttcatggtctcaaaatatcctcaggacccaggagtcggaatgcgtttgtcgactcggaccgatg

SEQ ID NO: 7254 - DNA, 203 bp, synthetic construct
  source 1..203: mol_type = other DNA
ggcgcgccagtcctatcaatgggacttgcacagtagtaatgactgatggaagtgcttcaggaagagccgatactagaatactattcattgaagaggggaaaattgtccatattagcccattgtcaggaagtgctcagcatgtagaggagtgttcctgttatcctcgatatcctgacgtcagatgtatccgactcggaccgatg

SEQ ID NO: 7255 - DNA, 203 bp, synthetic construct
  source 1..203: mol_type = other DNA
ggcgcgccagtccttctggtattttctctgttgagggcaaaagatgcatcaataggtgcttttatgtggagttgataaggggaaggcaacaggagactagagtatggtggacctcaaacagtattgttgtgttttgtggcacttcaggtacttatggaacaggctcatggcctgatggggcgaacatccgactcggaccgatg

SEQ ID NO: 7256 - DNA, 203 bp, synthetic construct
  source 1..203: mol_type = other DNA
ggcgcgccagtcctgaagaattggaatgtataatagatgcatttgaaaaaggaaaagatatcaccattgatttagacgctatgaacggtgaagttaaattagatggaaattcatgttcatataattcaactgctgctcttgtttcgactattttgggtacacctattaaaatgtataatgaatctggacgactcggaccgatg

SEQ ID NO: 7257 - DNA, 203 bp, synthetic construct
  source 1..203: mol_type = other DNA
ggcgcgccagtcctatacctgatttaactgaactggtggatgctgaaaagcaaataaaagaaatggctgcacatttacaactagaggctattacggtacaggttgaatcacaatttttagcaggaattagtgctgctgcagctaatgaagcgtttaaatttataattggctcagttttatctaccagacgactcggaccgatg

SEQ ID NO: 7258 - DNA, 203 bp, synthetic construct
  source 1..203: mol_type = other DNA
ggcgcgccagtccttcaacaatgttagtggctctatcatctcagcctttcgctacatatcctttagactataaaagatctgtacaaagagcgttacaacttttatcaaatagaacagctcaaatagcagatttaaccagattaatagtatacaattatactacattatctgcttgtatagttatgaatcgactcggaccgatg

SEQ ID NO: 7259 - DNA, 203 bp, synthetic construct
  source 1..203: mol_type = other DNA
ggcgcgccagtcctgagaagaccggtgactattcagctataacgaatgcattacttcgggatactccaatcatattgaaaggtgcgattccatatgttactaactcatcagtaattgatgttttatctaaagtggacaccacagtgttcgcaagcattgtaaaagatagggacatttcaaagttaaaacgactcggaccgatg

SEQ ID NO: 7260 - DNA, 203 bp, synthetic construct
  source 1..203: mol_type = other DNA
ggcgcgccagtccttgtcagatgctgtatatgatcagattactgtaacgtatagcgataatgtcaatatggaaatgtataaagaatattctgaacgtatagagaatgaaatatttaccattttaaaagataaaataatacatgaagataaaagattagaagaatacgaattatcagcgttactatcaacgactcggaccgatg

SEQ ID NO: 7261 - DNA, 203 bp, synthetic construct
  source 1..203: mol_type = other DNA
ggcgcgccagtcctgacgtagaacaagagctatttttatattaccatatcagtattttatcgctcaacattcatttgctgaaataatgcttaactatgcaaaacgtgaaagagagtattcagagttttattctcaagcaaatcaagtattatcgtatggagatgtaactagatatcttgattcaaatacgactcggaccgatg

SEQ ID NO: 7262 - DNA, 203 bp, synthetic construct
  source 1..203: mol_type = other DNA
ggcgcgccagtcctaattgcatctgtgaagagaatggtaatgtagataagctagagggctaaacatcttctatgcggcctacataccatgtagcatgaatcacgactgggtttagtccatgcttgcataggggcaaatatgcatgatatggatgatccccagaaggatgaaatgtgaactatgtggctcgactcggaccgatg

SEQ ID NO: 7263 - DNA, 203 bp, synthetic construct
  source 1..203: mol_type = other DNA
ggcgcgccagtcctatgacagcaatggatggagagatacctgatggatattgtgtacattctcctacaacataccgaaaaagtgaatactatttactcattgataaacatatcattaaaagacaaaaaataaaagttactaaatccttaatgtataatgccataaatactatatactcagataatgtacgactcggaccgatg

SEQ ID NO: 7264 - DNA, 203 bp, synthetic construct
  source 1..203: mol_type = other DNA
ggcgcgccagtcctttaaacgtgacctcggatccatgctagacaccatcaaccggcggccaagcaagaagagaggagggaccagatcgttgctcggattggctgcgctaattggactggcgagttcattgcagttatcaacctatcaggggaaagtgttaatgtcaatcaacaagactgacgctcaaacgactcggaccgatg

SEQ ID NO: 7265 - DNA, 203 bp, synthetic construct
  source 1..203: mol_type = other DNA
ggcgcgccagtcctgcgccataaacattcctagtgccaacggagcaaacacttgcattgtgagggctctagatgtgggggtcatgtgcaaagatgacatcacatacctgtgcccagtgctttcagcgggaaatgatcccgaggacattgactgttggtgtgacgtcgaagaggtgtgggtgcactacgcgactcggaccgatg

SEQ ID NO: 7266 - DNA, 203 bp, synthetic construct
  source 1..203: mol_type = other DNA
ggcgcgccagtcctgaagctgtgttacagtgatggcaccagagaaaccaacactggacttcaaggtgatgaagatggaggctaccgagttagccactgtgcgtgagtattgttacgaagcaaccttggacacgctgtcaacagtggcaaggtgccctacaacaggagaggctcacaacaccaaaaggacgactcggaccgatg

SEQ ID NO: 7267 - DNA, 203 bp, synthetic construct
  source 1..203: mol_type = other DNA
ggcgcgccagtcctgtgacccaacatttgtctgcaaaagagatgttgtggaccgcggatggggtaacggatgtggcctgtttggaaaagggagcattgacacatgcgctaagttcacatgcaaaaacaaggcaacagggaagacgatcttgagagaaaacatcaagtatgaggttgcaatttttgtgccgactcggaccgatg

SEQ ID NO: 7268 - DNA, 203 bp, synthetic construct
  source 1..203: mol_type = other DNA
ggcgcgccagtcctatgtcttcactgtcaaggagaagtcatggctagtgaacagggactggtttcacgacttgaaccttccatggacgagccctgccacaactgattggcgcaacagagaaacactggtggaatttgaggaaccgcatgccaccaagcaaactgtagtagccctaggatcgcaagaagcgactcggaccgatg

SEQ ID NO: 7269 - DNA, 203 bp, synthetic construct
  source 1..203: mol_type = other DNA
ggcgcgccagtcctgtgccctgcacacagcattggctggagctattccagccactgttagcagctcaaccctaaccttgcaatcagggcatctgaaatgcagagctaagcttgacaaggtcaaaatcaagggaacgacatatggcatgtgtgattctgccttcaccttcagcaagaacccaactgacacgactcggaccgatg

SEQ ID NO: 7270 - DNA, 203 bp, synthetic construct
  source 1..203: mol_type = other DNA
ggcgcgccagtcctcagggcacgggacagtgattgtggaactgcagtatactggaagcaacggaccctgccgagttcccatctccgtgactgcaaacctcatggatttgacaccggttggaagactggtcacggtcaatccttttataagcacagggggagcgaacaacaaggtcatgatcgaagttgcgactcggaccgatg

SEQ ID NO: 7271 - DNA, 203 bp, synthetic construct
  source 1..203: mol_type = other DNA
ggcgcgccagtcctaaccaccctttggcgattcttacatcgtcgtcggaagaggcaccacccagattaactaccactggcacaaagaaggaagcagcattggtaaggctttggcgaccacatggaaaggagcccaacggctagccgtcttaggggacacagcgtgggactttggatctattggaggagcgactcggaccgatg

SEQ ID NO: 7272 - DNA, 203 bp, synthetic construct
  source 1..203: mol_type = other DNA
ggcgcgccagtcctctcgattgtggctcacaatccgggaggaaaacacaacggaatgcgattcggcaatcatcggcacagctataaaaggagacagagctgttcacagtgacctatcgtattggattgagagcaaaaagaatgagacatggcaactggaacgagccgtcatgggagaagtgaaatcttcgactcggaccgatg

SEQ ID NO: 7273 - DNA, 203 bp, synthetic construct
  source 1..203: mol_type = other DNA
ggcgcgccagtcctcaggaacaacagtcaccgttactgaacattgtggaaacaggggagcgtcgctgcgcacaaccacagcgagtggcaagctggtcactgattggtgttgcaggagctgttccttgccaccactgcgatacaccacaaaagatggatgctggtatggaatggaaatccggccggtgacgactcggaccgatg

SEQ ID NO: 7274 - DNA, 203 bp, synthetic construct
  source 1..203: mol_type = other DNA
ggcgcgccagtcctaggaggaggaagcaaagcttgtgaaatctcgagtgacagctggagttgcaggagggatggaaccattccaacttggtctcctggtagcattcatagccacacaagaagtgctgaaacgcagatggactgggaagctgaccctgacctcactagcagtatgtttggcactgttgacgactcggaccgatg

SEQ ID NO: 7275 - DNA, 203 bp, synthetic construct
  source 1..203: mol_type = other DNA
ggcgcgccagtcctaaaacatcttgatggttattggagcagcttttctccaaatggcggccaatgacttgaagcttgaggtccttccgatactcaacgccatgtccattgcgtggatgctgataagggcaatgaaagaaggtaaagtggcgatgtacgctcttcccatcttgtgtgctttgactccagcgactcggaccgatg

SEQ ID NO: 7276 - DNA, 203 bp, synthetic construct
  source 1..203: mol_type = other DNA
ggcgcgccagtcctgaatgaggatggctgggcttgatgtcatcagatgtttgttgttgataattgggattgtaacacttctgaatgaaagaagagaaagtgtggccaagaaaaaaggcggctacttgctcgcagcggccctctgccaagctggagtgtgcagtcccttgattatgatgggaggcttaacgactcggaccgatg

SEQ ID NO: 7277 - DNA, 203 bp, synthetic construct
  source 1..203: mol_type = other DNA
ggcgcgccagtcctgtgcacgattccattggttcattccattcggagtactggggttttggctacttggcaaacactcgaagcgaggaggagcattgtgggacgtgccgtcaccaaaagtgtatccaaagtgtgagacaaaaccaggaatctatcgaatcatgactagaggaattttgggcactttcccgactcggaccgatg

SEQ ID NO: 7278 - DNA, 203 bp, synthetic construct
  source 1..203: mol_type = other DNA
ggcgcgccagtcctcttttccagattcaaattctcccatactggatgttgaggcccaggttccggataaggcgtggagcaccgggtatgagtggatcaccaacttcacagggaggactgtgtggtttgttcccagtgtgaaaagtgggaacgaaattgccatctgcctacaaaaagcaggaaagcgagcgactcggaccgatg

SEQ ID NO: 7279 - DNA, 203 bp, synthetic construct
  source 1..203: mol_type = other DNA
ggcgcgccagtccttcatcctcaatggacccatggcaatcacatcagcgagcgcagcacagcgcagaggccgcattggaagaaatccttcgcagattggagatgagtaccattatgggggtgcaaccaatgaggacgaccatgatctggccaactggactgaagcaaagattctccttgacaacatatcgactcggaccgatg

SEQ ID NO: 7280 - DNA, 203 bp, synthetic construct
  source 1..203: mol_type = other DNA
ggcgcgccagtcctacctcccaaacggactggtggcacaaatgtaccagcccgagcgagataaggttttcaccatggatggggagtttcgattgcgtggagaagaaaggaagaactttgttgagctgatgcgcaacggtgacctcccagtgtggttagcttacaaagtagcctctaatggacacagttcgactcggaccgatg

SEQ ID NO: 7281 - DNA, 203 bp, synthetic construct
  source 1..203: mol_type = other DNA
ggcgcgccagtcctaccaagaccgctcatggtgttttacaggacaaaccaacaacacaatcctggaagacaacaacgaagttgaagttttcaccaaaactggagacaggaaaattctcaggccaaagtggatggatgcgcgggtctgctgcgactaccaagcgctcaagtcatttaaagagtttgcagcgactcggaccgatg

SEQ ID NO: 7282 - DNA, 203 bp, synthetic construct
  source 1..203: mol_type = other DNA
ggcgcgccagtcctcagggaagagatcagcgctgggcatgatggaggtcatgggtagaatgccaaatcacttctgggaaaagacagttgccgctgcagacacactgtatctcctaggaaccagtgaggcaaacagtagggcacacaaagaggcactggcagaactgccagattccctggaaacgcttccgactcggaccgatg

SEQ ID NO: 7283 - DNA, 203 bp, synthetic construct
  source 1..203: mol_type = other DNA
ggcgcgccagtcctgtgtactattaggtttgaccaatggaatgccattcactgctatggatctatcggtgccattattggtgctagggtgttggaatcagatgaccctgccaagtttggccgttgcagtgatgcttttggctatccactatgcattcatgatcccaggctggcaggctgaagcaatgacgactcggaccgatg

SEQ ID NO: 7284 - DNA, 203 bp, synthetic construct
  source 1..203: mol_type = other DNA
ggcgcgccagtcctccaagggaaagcgtggaggaggaaaaggagccactcttggagagatctggaagtcaagactgaatcagttgacacgagccgaattcatggcatacaggaaagatggaatcgtggaagtagacagagcccccgccaggaaagccaggagagaagggcgtctcacaggtggccacccgactcggaccgatg

SEQ ID NO: 7285 - DNA, 203 bp, synthetic construct
  source 1..203: mol_type = other DNA
ggcgcgccagtcctcagtgtccagagggtcagcaaaattaagatggataacagaaagaggattcgtcaaacccatgggaaaggttgttgacttaggctgtggacgaggagggtggagctactactgcgcaaccctgaagcatgttcaagaagtgaaaggattcacaaagggcggaccaggccatgaagcgactcggaccgatg

SEQ ID NO: 7286 - DNA, 203 bp, synthetic construct
  source 1..203: mol_type = other DNA
ggcgcgccagtcctgccataaggtggtgaaagtcatgagaccagggcctgatggtaaaacctacatggatgtcatctccagagaagaccaaaggggcagtggacaggtggtcacatatgccctgaacaccttcaccaacctggccgttcaactgataagatgcatggaggctgaaggggtggtagatgcgactcggaccgatg

SEQ ID NO: 7287 - DNA, 203 bp, synthetic construct
  source 1..203: mol_type = other DNA
ggcgcgccagtcctaggatgacattacgagagtgagacttggacggttggccaaagcggtcgagtggctgaggaagaatggacctgaacgattgagcagaatggcagtgagtggggacgactgtgttgtgaaaccaattgatgacagatttgccactgcactccactttctcaacaacatgtcaaagacgactcggaccgatg

SEQ ID NO: 7288 - DNA, 203 bp, synthetic construct
  source 1..203: mol_type = other DNA
ggcgcgccagtccttcagaaaggacattcaggagtggaaaccttcaacaggctggcacaactggcaagaggtgcccttctgctcacaccacttcaatgaactaatgctgaaggatgggcggaccatcgtggtgccatgtaggagccaggatgagctgattggcagagccagaatctcaccaggagcagcgactcggaccgatg

SEQ ID NO: 7289 - DNA, 203 bp, synthetic construct
  source 1..203: mol_type = other DNA
ggcgcgccagtcctctatggcatcttcacaacctcttaagatgaaatttagcgagtatctagaccagcgcatgcaggacagggcaggtgggaaggtacagtggaaagaccataagaaagtgtgggaaaggttaaaattaaggtggacacaagaaggttatttggcagggggagcaccaaccagggttccgactcggaccgatg

SEQ ID NO: 7290 - DNA, 203 bp, synthetic construct
  source 1..203: mol_type = other DNA
ggcgcgccagtcctagctgagcacaatggaaggagaattaagagagggaaagcagagagcgaaggacagcgaagtggatttgaataggcagcacgtatttaggaaggaagggactaagcagagagaaaaagcagaagaggagctgagaataggcacttgggctatcgaggagaccagaagatttataacgactcggaccgatg

SEQ ID NO: 7291 - DNA, 203 bp, synthetic construct
  source 1..203: mol_type = other DNA
ggcgcgccagtccttgctaagaactccagcagtgatggggatagccacggacatgaaggagggtggggtccctactatctcaccagccaccccagccgaaaaccaaacccccacccagcgcctctatccagacctgccagaagattccagacccccaccctactccccatcagcctcaccatcacctacgactcggaccgatg

SEQ ID NO: 7292 - DNA, 203 bp, synthetic construct
  source 1..203: mol_type = other DNA
ggcgcgccagtcctctgtacaagcacctgtattgacagtaagagggggcgtgataaagggagaagtgcacctggtagaaggaacaatagatgtggagaactcggagccgccccaacgctctatggacactgacgatttggggcccgccggagggcggtctaccagaggtcctgactcattggaagaagcgactcggaccgatg

SEQ ID NO: 7293 - DNA, 203 bp, synthetic construct
  source 1..203: mol_type = other DNA
ggcgcgccagtcctaacaactaccaagtctgcatggaggtgcctcagcgtggctcctacagttgcaaaccctgacctcagggttcagattaggacttggggacatgagagcactgttggctagggcaacagaccacgtgactatgaatgtcataatgaaaacagctggactagatcacctgccaggaccgactcggaccgatg

SEQ ID NO: 7294 - DNA, 203 bp, synthetic construct
  source 1..203: mol_type = other DNA
ggcgcgccagtcctcacagccaccgtatcaacctccaccacctcccctttcgccacagtacccccaggcttatccggggtatggctatcctcccaggggaccaccacaggcaggaggacattggggatcacgttacatgaataatggtgcctgttacaattgtggacagccggggcatcaagcaagaacgactcggaccgatg

SEQ ID NO: 7295 - DNA, 203 bp, synthetic construct
  source 1..203: mol_type = other DNA
ggcgcgccagtcctatactccctgggaatgaagatgcccaccaccacctgaggctgaggtccaacgttactctgtatataccgaacccacagtttcatgtcaaatagagggggtgaaccatcgatttctagtggatactggttgcacctactcagccattaagacaatgcaacccttatcaatggattcgactcggaccgatg

SEQ ID NO: 7296 - DNA, 203 bp, synthetic construct
  source 1..203: mol_type = other DNA
ggcgcgccagtcctcagaagatggggtggaagtctccatcaactctccgaaatctgggagggtgcttctcctaccttcacttccggtcccaccgctgtcgttaacgcaagaagtctactggctaaaatgcacccagactggcccgtccaccccagccatacagtttcaatttaacacctggagaagaccgactcggaccgatg

SEQ ID NO: 7297 - DNA, 203 bp, synthetic construct
  source 1..203: mol_type = other DNA
ggcgcgccagtcctttatctacgcactccacccatataagacacccctacccgaggttcactgcaccatgaacgttacggatgatgaagataacccatataccgaggactgggatgaaaacatgtcacaccaaactcccagtatccgttgtctgtctattgtatgtggacccgagggtgtggcagcaccgactcggaccgatg

SEQ ID NO: 7298 - DNA, 203 bp, synthetic construct
  source 1..203: mol_type = other DNA
ggcgcgccagtcctctgtcatcctaccttcacatctcaaaccatggtaccagctggcccctgactcatcaccccacgttactcttgccgtaggaaatgggttcgaagcaagaagcctgggtcctatgatacgacgtgcatctaaacttgattgggtgcccacagcaactcctggaataatgaaggcatcgactcggaccgatg

SEQ ID NO: 7299 - DNA, 203 bp, synthetic construct
  source 1..203: mol_type = other DNA
ggcgcgccagtcctgactagcagtcccaccggtcagagtgcagcttacccaccaaggccaacttcctgtttaccgatctcaatatcgtttgaagtatgaacagattgaagggatcaggcccaccgtggaaggactgctgggagctgactgcatctatgctaccagctcaccatggaacactcccataccgactcggaccgatg

SEQ ID NO: 7300 - DNA, 203 bp, synthetic construct
  source 1..203: mol_type = other DNA
ggcgcgccagtccttccctgtccccaaagctgatgggaagacgtaccgaatggttcaagacttccgagctgtcaatgatgtcaccacaggggtggacctcccggtaccagatcctcacgtttctttgagcaatctttcacccaaacaccaatacttcaccgtggtggaccttgccaatgcctttttcacgactcggaccgatg

SEQ ID NO: 7301 - DNA, 203 bp, synthetic construct
  source 1..203: mol_type = other DNA
ggcgcgccagtccttgtccacagctcaccgtaactcaattttacaccaccccaggcccaccacagtctccggactgctctcattccttggactgactggctacagccgtactcacattcctgattacacctgcagaaccgaaccattgagagaaattgtcaggcaggctggggctaggaatcttcatgcgactcggaccgatg

SEQ ID NO: 7302 - DNA, 203 bp, synthetic construct
  source 1..203: mol_type = other DNA
ggcgcgccagtccttctcagcggtggcactcccgaaaaaggtggccatcatgaaatgtaaaggccaccaggtattgaactccagaatcagcaagggaaatgatgcagctgaccaagccgcgaagaaggcaggaggatactcacctggacagatggtactcagagtggacccacccagtacggaattgacgactcggaccgatg

SEQ ID NO: 7303 - DNA, 203 bp, synthetic construct
  source 1..203: mol_type = other DNA
ggcgcgccagtcctcagggacaaaattgacgtgggtggaagccctgcccctggcactgatggccatgaggtcctcaccaggtgcagggacacatctatcaccccatgagataatgacaggccgagtgatgcctgggccgccaagagagggaggtcatatgcccgctcttgatgtccaccagataggaacgactcggaccgatg

SEQ ID NO: 7304 - DNA, 203 bp, synthetic construct
  source 1..203: mol_type = other DNA
ggcgcgccagtcctcgtacgaagtgaaggaagttacttcacactcagtccaggtcaaaggtaaatcaggcgcaccttggcaccacctgacacattgtacaccagcaccagcacctgacagaacgctgacagaagtcagaagcgacttgatcgcctccaatttggctataaattctgagagccccgacacgactcggaccgatg

SEQ ID NO: 7305 - DNA, 203 bp, synthetic construct
  source 1..203: mol_type = other DNA
ggcgcgccagtcctgtccagactggtctgattggtctaaagggaatcttgttggaggatggaggaaggtcctaactttatctactactccaacggggttgaaatttgttattcgaccgaaagaaagcctaggctgtagtcagtttgtactggctccatatgtgtctaactcattagattggagtttgccgactcggaccgatg

SEQ ID NO: 7306 - DNA, 203 bp, synthetic construct
  source 1..203: mol_type = other DNA
ggcgcgccagtcctcggcctccgatggtagtttgacacatgccctagatggccttaggactctgaatggtaaaatgaagtcacactccggtattgactcctcttcctgggacaattggatggatgtgtttgggaaatacaaaactttgatttcctccatcctagtctcaatttctgtcttttctgctgcgactcggaccgatg

SEQ ID NO: 7307 - DNA, 203 bp, synthetic construct
  source 1..203: mol_type = other DNA
ggcgcgccagtcctataatgcactttggactgaaatttcatggcaagacctcctcctcaaggtagtctcacacaaattggaatatttgtcattgtctcaggttcttggaaacaggattttgcgtcgcaaattcaacattcgctctcacatgttgagaatgttgctatcggcgatacgcatggacctggcgactcggaccgatg

SEQ ID NO: 7308 - DNA, 203 bp, synthetic construct
  source 1..203: mol_type = other DNA
ggcgcgccagtcctaaagagaattgaaacttgaaggaaaagtgcaacagcgaattgatcaagtcaaagcagagaatgcagaagattggagagagtatgacagaggtggacctgtcccttcacgagacagagatacctactgccagattcttttggagaacgaactggaacgactcatgcaatccacctcgactcggaccgatg

SEQ ID NO: 7309 - DNA, 203 bp, synthetic construct
  source 1..203: mol_type = other DNA
ggcgcgccagtcctttggcttgcgtattcttcagacttctggtttaggagagtatcgcgctgttgtctcacaacagtatgccattttgcgacggcttcacgaccgtcttggactgagaggactgaatgccaaaggacagcgaatggcacccatcataattcagttgtatggagagacaggacaaggaacgactcggaccgatg

SEQ ID NO: 7310 - DNA, 203 bp, synthetic construct
  source 1..203: mol_type = other DNA
ggcgcgccagtcctaacatcaagattttgctcaggttccaaaccctgagctatttgaaatcattcgagcaggaaacactttcccctatcctttgcatatggctgacattgctgacaaaaacacaacaacttttcagtcacgcattgtcattttgacgaccaaccaaaagaagccaaaagtggaatcctcgactcggaccgatg

SEQ ID NO: 7311 - DNA, 203 bp, synthetic construct
  source 1..203: mol_type = other DNA
ggcgcgccagtcctaacacaaagttgtgttgaaggctcttggcgttgttgctatggctgttggggtgtataagattggtagtgcacttgctggacttgtttcaaaaagagacactcaacctaaagtgtctgcaagtgcgcaatcaccttatgctccccgacctgtggcgctgcgtcagtcagcctatccgactcggaccgatg

SEQ ID NO: 7312 - DNA, 203 bp, synthetic construct
  source 1..203: mol_type = other DNA
ggcgcgccagtcctatccgacaacacgggcaacaaaaaccaccatcaacaaaattgtgaaagcgacaggacaagcagcggataatagcgcgcgtgacatcatcacaagcgttatgaaccgaggcatgtactccttgagcgtcgattctcgcgttctagggagtgcaacgttcttaactggaaaaatttcgactcggaccgatg

SEQ ID NO: 7313 - DNA, 203 bp, synthetic construct
  source 1..203: mol_type = other DNA
ggcgcgccagtcctcgtgtgtttcagcatctggtgtccaacgagtaacgcctggggcaggaccacctgtctatggtgaatacgaaattggagacactcaatatagaacctacacgcgtgactattggagatatgccctcaacactacctacggggactgtggaggactaatcttcttgaacaacaaaacgactcggaccgatg

SEQ ID NO: 7314 - DNA, 203 bp, synthetic construct
  source 1..203: mol_type = other DNA
ggcgcgccagtccttgagtcaccgtaagattcttggaatgcacgttatgggactttcgcaactagattctggctttgccctctcggtttaccgagaggatgtacaagcttacgttcgactagtacgacaggacgatccttcactggtgacaccctgtgcagagcccatcataacgacagcagtccagtcgactcggaccgatg

SEQ ID NO: 7315 - DNA, 203 bp, synthetic construct
  source 1..203: mol_type = other DNA
ggcgcgccagtcctgtttgccatttgctggagacttccaccccttgggaaaaagtccgttccctagcacaaatcctggaaagagtaagattgaaaagtcagaactccatcctgacaattgtgctgtggcatggagggaacccgtttctcatcccgcactgttgaaacccatcacagtgaggcctgaggcgactcggaccgatg

SEQ ID NO: 7316 - DNA, 203 bp, synthetic construct
  source 1..203: mol_type = other DNA
ggcgcgccagtcctacggtattcccttcccaagtggcacgacattcgacccccttcattaccgactggaaaagtgtggacagcgtgcaaaatgtctagaccaacagcttttggacattgtgcgtcgttcatacaccaccgaacttcgacaaattttgcagactcacaagcaccctgagtacaagtcagcgactcggaccgatg

SEQ ID NO: 7317 - DNA, 203 bp, synthetic construct
  source 1..203: mol_type = other DNA
ggcgcgccagtcctgaattgttttgaatgatctcgccggtgatcttccagaccatcaacgagaacatgatgatattcgttctgtgctgttcctcgaccttgtacattccacccaccttgctcgggatgtcctctattcatggacacattcactcccaagtggtcattttctcacagcaattgtaaattcgactcggaccgatg

SEQ ID NO: 7318 - DNA, 203 bp, synthetic construct
  source 1..203: mol_type = other DNA
ggcgcgccagtcctctttgtacgtaaatctgatcttcagatatcttcttgcaaaatcttcaaaattgacttcacacatccaaattgaccagctgtgtcgtcggatgaaacttgtttcatacggcgatgaccacattgtctctatcccttctggatacgagaaaattttcaaccaatccactcttccaacgactcggaccgatg

SEQ ID NO: 7319 - DNA, 203 bp, synthetic construct
  source 1..203: mol_type = other DNA
ggcgcgccagtccttttggcgctcaaaatccctcaacccgcgctctatcacagagagtagcgtagagtgggcttgccatgagctagccctccacgatgagtcaacatttcaggagtggacgaaaaagattgggttagtctgcaaagatgcaattaattttgtgcctaatctgtctgcgcaacgcgtggcgactcggaccgatg

SEQ ID NO: 7320 - DNA, 203 bp, synthetic construct
  source 1..203: mol_type = other DNA
ggcgcgccagtcctgcgcgaaatcacccacttcacagaggatgaccgcgtactcaccgacgcagtgacagaaattacttcattacccctctctttactacagtatggagacgagccacgagaacatagtgtaatatcctttcttcaaagaccggagaaaatcgctacagtgacgtggactacggctcacgactcggaccgatg

SEQ ID NO: 7321 - DNA, 203 bp, synthetic construct
  source 1..203: mol_type = other DNA
ggcgcgccagtcctaacaaagacgactaacttggtatccttgccaattccatcgtctgtgttgacgactatgtacagagagaagctgagaggctttggcctgcttcgcgcagacattgtctttaagctgcaattcaactcacagcccttccaagctgggagattgattgcgacatacattccagttcccgactcggaccgatg

SEQ ID NO: 7322 - DNA, 203 bp, synthetic construct
  source 1..203: mol_type = other DNA
ggcgcgccagtccttgcctatcttttacaaagaacgcgtatggctcgagcaagtctcacaagactgacctcgttacctaacgtgattattgacattagtaagcagactgaatgtaatatcacattaccctacgtaagctcgtttacccactatgatttaacaagtggcggaggagattggggcttgttcgactcggaccgatg

SEQ ID NO: 7323 - DNA, 203 bp, synthetic construct
  source 1..203: mol_type = other DNA
ggcgcgccagtcctcgacctttgggtctatagtcccctcagtagtgcgtcttctcagacaatcaacatctcaatacgagcctacctcgacaatgtacgcttgggtgcgcccacgcaacaatcgttagtcacagcggaaaagatgctaaaagcaaacgtacagacacgggatttatcccggggtacatccgactcggaccgatg

SEQ ID NO: 7324 - DNA, 203 bp, synthetic construct
  source 1..203: mol_type = other DNA
ggcgcgccagtccttagttgtggctcgatctcagcgcgcgcccaaggaggaaagcagacagccggctcgggcgatggatccttcggatctctcctgaataagggcacaaaaagtgtcactatgcaggagcgatccgcagggactatctcccgagttggacatagtatacgtgagggccttgtcaggggcgactcggaccgatg

SEQ ID NO: 7325 - DNA, 203 bp, synthetic construct
  source 1..203: mol_type = other DNA
ggcgcgccagtccttgactatcatagcgtaaggttaaagatcgtctacgatccaatggcgcagtccgctgctgccgtgacgtatgatgcatccgaatactgctactcaatagttgtagatttccgtgacaagactgacatatatgtgcgtttaccattcatttccgcaacaccttggaaattggtacccgactcggaccgatg

SEQ ID NO: 7326 - DNA, 203 bp, synthetic construct
  source 1..203: mol_type = other DNA
ggcgcgccagtcctgattgtcgacattcgaacagggcctccctatgccaacaacacagtctcagattgcgctttggtggatgttgtaggagcattgtttgcctttagagcgggcgggtttcgatggaaagcctgggactccggttctgagctcatatcagcctatctcgttccttttggaccatacaacgactcggaccgatg

SEQ ID NO: 7327 - DNA, 203 bp, synthetic construct
  source 1..203: mol_type = other DNA
ggcgcgccagtcctctcttccctttggtatgtatcctagatacagtcactattggggggcagcccttagctaacttagatttaaggcagattagtttatagtcaaattaggcagagcgaagcaactttcttgaggtaagtggtcatccactgtcacttcgagggggcttgccgacactctagataagtcgactcggaccgatg

SEQ ID NO: 7328 - DNA, 203 bp, synthetic construct
  source 1..203: mol_type = other DNA
ggcgcgccagtcctagaactcagagagtcgttggaagacgggaaggaagcccgacgactgagcagtccaccccaggcgtgattctggtcgcccggtggatcaagcatggaagccgtcataaaggagctgagctgactctgctggtggcctcgcgtaccactgtggccaggcggtagctgggacgtgcacgactcggaccgatg

SEQ ID NO: 7329 - DNA, 203 bp, synthetic construct
  source 1..203: mol_type = other DNA
ggcgcgccagtcctgcccaccaccatggggagcagcaagagcaagcccaaggaccccagccagcgccggcgcagcctggagccacccgacagcacccaccacgggggattcccagcctcgcagacccccaacaagacagcagcccccgacacgcaccgcacccccagccgctcctttgggaccgtggccgactcggaccgatg

SEQ ID NO: 7330 - DNA, 203 bp, synthetic construct
  source 1..203: mol_type = other DNA
ggcgcgccagtcctcttcttggtccgggagagcgagacgacaaaaggtgcctattgcctctccgtttctgactttgacaacgccaaggggctcaatgtgaagcactacaagatccgcaagctggacagcggcggcttctacatcacctcacgcacacagttcagcagcctgcagcagctggtggcctacgactcggaccgatg

SEQ ID NO: 7331 - DNA, 203 bp, synthetic construct
  source 1..203: mol_type = other DNA
ggcgcgccagtcctcggcaccaccagagtggccataaagactctgaagcccggcaccatgtcctcggaggccttcctgcaggaagcccaagtgatgaagaagctccggcatgagaagctggttcagctgtacgcagtggtgtcggaagagcccatctacatcgtcactgagtacatgagcaaggggagcgactcggaccgatg

SEQ ID NO: 7332 - DNA, 203 bp, synthetic construct
  source 1..203: mol_type = other DNA
ggcgcgccagtcctcttcacctcgacagagcccccagtaccagcctggagagaacctataggcctggagctcctcctggcaccagaggcctcgctgtggggcacaggggcctggctccgtgcagaggggccacgttttggggagcagccccagagcaggatgtggcatggtgaggtgtcgggtgctcccgactcggaccgatg

SEQ ID NO: 7333 - DNA, 203 bp, synthetic construct
  source 1..203: mol_type = other DNA
ggcgcgccagtcctcctggtgcagaggaaaaggaggtatatgggttaatcaatcaaaggaaattaatgagacagagccgttcagctttactgcgaactgtacagctagtaatttgggtaatgtcagcggatgttgtggaaaaacgaccacgattctcccatcaggggcgtggatcgacagcacacaagcgactcggaccgatg

SEQ ID NO: 7334 - DNA, 203 bp, synthetic construct
  source 1..203: mol_type = other DNA
ggcgcgccagtcctaaagcggggtctcggttgtaacgcgcttaggaagtcccctcgaggtatggcagatatgctcttgcacgggtcaggtataatgtgcagtttgactgaggggaccatgatgtgtataggcgtcaagcggggcttcggttgtacgcggataggaatcccctcaggacaattctgcttcgactcggaccgatg

SEQ ID NO: 7335 - DNA, 203 bp, synthetic construct
  source 1..203: mol_type = other DNA
ggcgcgccagtcctggaatatgatggcgtcttccctgttttgcccttagactattcaggttgcctctgtggattagggctggaggcagcacggatagtctgatggccaaataaggcaggcaagacagctatttgtaactgcgaaatacgcttttgcatagggagggggaaatgtagtcttatgcaatacgactcggaccgatg

SEQ ID NO: 7336 - DNA, 203 bp, synthetic construct
  source 1..203: mol_type = other DNA
ggcgcgccagtcctgaaagcgggtgcatgcatggccattttccagcacaggttcagctggtatggcatgcatgcatcgactgcttgggggtgtccctgacccccttaattcaacgtctagcccacgatacgggcaccctacccaatttgtatccctttacctcccatggattgacttgtatggacttgcgactcggaccgatg

SEQ ID NO: 7337 - DNA, 203 bp, synthetic construct
  source 1..203: mol_type = other DNA
ggcgcgccagtcctgatctaaattggattatcctttacttgtggtggttagccaaccatgctctggtgtaatgattccatgtgttcatctggctaagtaccgacctaggaggtggtgctgaaatattgcaagccactagcgtcgttatgcttagcctctggatacatgggattaattgcattctgtaccgactcggaccgatg

SEQ ID NO: 7338 - DNA, 203 bp, synthetic construct
  source 1..203: mol_type = other DNA
ggcgcgccagtcctaagcaatttcaggcctaggggcagtggaaagtgtggcatccactaattcagccattgccactgccaatgcaacaactacacagacaataccagacccaacggagggttccactgatgatttctactcctgttcttatgaagtaggagctcaaggggataacatttctagattggcgactcggaccgatg

SEQ ID NO: 7339 - DNA, 203 bp, synthetic construct
  source 1..203: mol_type = other DNA
ggcgcgccagtcctgaaagagaaaaccacgcaggaggcccattcacaaacccaagaatccaccacaggagccaagagtcatcattcaaccaggacctggggcagcaaacctttcaaactctagtgttatagcaatggctgaaagcacagcacttgccaatgaagggacagctgttgactattccacagcgactcggaccgatg

SEQ ID NO: 7340 - DNA, 203 bp, synthetic construct
  source 1..203: mol_type = other DNA
ggcgcgccagtccttggacctccaagttccagacagaggacatgcctctctcattcggttctttgcctatttttctggagagatcattctcactattgttaacaatggcactacaccagcaatggtagcacattcctactctatggatgatctcagttcagaatatgctgttacagcaatgggaggtgcgactcggaccgatg

SEQ ID NO: 7341 - DNA, 203 bp, synthetic construct
  source 1..203: mol_type = other DNA
ggcgcgccagtcctaactgtcaccacgttcagttacaatggttcatcaggttgagacaattgacgttgaggggaagaaggtgacgatagtggattcacctgaaacaccaaattatgatggccccatttctgcctttttttacttgattgaggcaggcaggttcacagctgaagacaaggagtacatcccgactcggaccgatg

SEQ ID NO: 7342 - DNA, 203 bp, synthetic construct
  source 1..203: mol_type = other DNA
ggcgcgccagtcctaaatgatgagaaaacgctttccaggctttgagaaatccactattttgattttgaaccgagcagatgaattgaaaactgatgatgatataagaaattgggttaagacatctggagagttggactctctagtgagagcctgtggggggcgtatagctaaatttcaccggcacaaaacgactcggaccgatg

SEQ ID NO: 7343 - DNA, 203 bp, synthetic construct
  source 1..203: mol_type = other DNA
ggcgcgccagtccttaaacagggctaagttattagagaaagcagccacccttcctgagtttgtctctcatttgccaagacttgtctacaaggatagaaaaatgtaccgccattatggtgtgcagtgtggttccacagtcttccacatggactcagagaacatccttgagtcagcattaaatggtgaagcgactcggaccgatg

SEQ ID NO: 7344 - DNA, 203 bp, synthetic construct
  source 1..203: mol_type = other DNA
ggcgcgccagtcctgccctggtgttgggaagagttttttatcaaattacattgttaaagaaatagccaaattaaagcattggaagagttatgccaacccaactggaagtaagcatatggatgggtatgtgtcacaggagattcatgtttttgatgattttggtcaaaatcgggaagaagaggactattcgactcggaccgatg

SEQ ID NO: 7345 - DNA, 203 bp, synthetic construct
  source 1..203: mol_type = other DNA
ggcgcgccagtcctctttaatctgtaatcttatttctagtgttccatttattactccaaaagcaagtgtagaggctaagggcacccaatacagaggacgccttgttgtcgtcacaaccaatagacgggattttacttcctgtaagttgactgacccagatgcactggaaaggcgctttcctattcgcccgactcggaccgatg

SEQ ID NO: 7346 - DNA, 203 bp, synthetic construct
  source 1..203: mol_type = other DNA
ggcgcgccagtcctttaatatccggccattgcaaaagtataatcacaagggccgtttggatgtggcaacagccatgagagatggaagcttgcagggaggaacttgctgggaaagggatataggccaattaggtcttgaatgttggaatcccataaatggccaaatcttaattgatgaaattatgagtgcgactcggaccgatg

SEQ ID NO: 7347 - DNA, 203 bp, synthetic construct
  source 1..203: mol_type = other DNA
ggcgcgccagtcctaaacactccctaaagattttaaggtagctgttaagaaacacattgaaaaactagaaactgaattggaagatcagagcgggcgggtgaattttagacatatttgtaacagactcgtcaatgtgagtaatgaggatgaagtagccactggtttagccattggtgggaaaaatgtttcgactcggaccgatg

SEQ ID NO: 7348 - DNA, 203 bp, synthetic construct
  source 1..203: mol_type = other DNA
ggcgcgccagtcctactatcgcggcaatggctggttggtttggaaagatcaggaccagtatatggtgcaagatgtgacaaagattaggccttttggttccacaacaactgcatcaggcacgacatcatgtcaaacatacatatataattgcaagactgggcctggttcctgtggtggtgtgcttgtagcgactcggaccgatg

SEQ ID NO: 7349 - DNA, 203 bp, synthetic construct
  source 1..203: mol_type = other DNA
ggcgcgccagtcctgagtattgggatgccatgatactatctcatatgagtcagctgtgagtagtgatgttatacctatgaactgggacacttcacctggcattaagtataagggggagactaaacgacaactggtgctgaagtcctcattcagacaggatgttctgaagcaactacagagtccatccacgactcggaccgatg

SEQ ID NO: 7350 - DNA, 203 bp, synthetic construct
  source 1..203: mol_type = other DNA
ggcgcgccagtcctttggaattaatcctttttgtgagtgggacaatttgttggcaaacctccaaccttataatttgtgtcttgacttttctggattcgatggctctctgagtgcccaaattcttgaagaagcagttgatgtattgtcttattttcacaatgacccagccttagtgaaaagaattcatgcgactcggaccgatg

SEQ ID NO: 7351 - DNA, 203 bp, synthetic construct
  source 1..203: mol_type = other DNA
ggcgcgccagtcctcaccaactatctattcaactcattatgtaactgatgagatatggcaggtagaaggagggatgtgttcaggatctccatgtaccactgtggtcaattctattgtgaatcagcttgcatgttacaccattttagctgtcttgggctatgacatcaaccaatgttatgtcgttagttcgactcggaccgatg

SEQ ID NO: 7352 - DNA, 203 bp, synthetic construct
  source 1..203: mol_type = other DNA
ggcgcgccagtcctggacccgcaaaattattggtgtccttgacaaagaagtcttggaagggaagatacagtggtgcaagggaccagaagcattcaaacagcaacttgactctttcttgctggaagcagctctgcatggagaagaatactaccatgaggtgacatctaagcttaaggcccggtgccccgcgactcggaccgatg

SEQ ID NO: 7353 - DNA, 203 bp, synthetic construct
  source 1..203: mol_type = other DNA
ggcgcgccagtcctgaaggaggagaaaaagaagaaggagaagaggggtgtgcggagcacatctcagccggtctccggcggtgcgcagcaccgccgcggaggcggaacaggtcctagggccggaggtctactaggacgtttgggagctggctggggatcgattctccaggaggacattgtgcacgcactcgactcggaccgatg

SEQ ID NO: 7354 - DNA, 203 bp, synthetic construct
  source 1..203: mol_type = other DNA
ggcgcgccagtcctcatgcacttagtgctggtgctacactctgttttcatcgcaattgatcgacgcttgcgctcactgacacggcgcgtgactgctcttgaggctaaacgctctgcgaagaacgctgtacggatcgcattcatgctcaccggcgtgatgatggtgctgggcgccgtcgtcattgatatcgactcggaccgatg

SEQ ID NO: 7355 - DNA, 203 bp, synthetic construct
  source 1..203: mol_type = other DNA
ggcgcgccagtccttgagtttcgcaccggagcagccgagatatatggcggccaatggatgcgtgaattgctcgctgattgtcacgtgaacgcgtcattctcgactgacgtgtgtcctggaggatctcagctgaacatgggtgagatcaatggtaaagaacgtgtttgctcaacccagccctacaatcgcgactcggaccgatg

SEQ ID NO: 7356 - DNA, 203 bp, synthetic construct
  source 1..203: mol_type = other DNA
ggcgcgccagtccttttggaacggattgtggtctggggagacgccagggctaatgaagttttggtgaaaaacattttggaaccccagctcgtctgggataatgccattgccacgcaggacggttttcgtgatgttggctattcttgtcagatcatgcttgacaaactggttagcggtagttttaaggacgactcggaccgatg

SEQ ID NO: 7357 - DNA, 203 bp, synthetic construct
  source 1..203: mol_type = other DNA
ggcgcgccagtcctctgcccggggatcaagtcttcagtcttcgtccaaagcggtttcggatacgacggagtggtgatgacaagcttgtccaaagcaactaatgagagctgctctgtggggctgacgtgccacggatgctacctccttgcgacgaagatggtgttcggacctggaacttcgaccgcaagcgactcggaccgatg

SEQ ID NO: 7358 - DNA, 203 bp, synthetic construct
  source 1..203: mol_type = other DNA
ggcgcgccagtcctcggatcaggagggttcgtctggaaaagcttgtcacaatggccgacccgggaacattcagttgaactcgatgaccaacacttgatcacggctcttgttacggaacagttgaagaagacgaacaaggtgtgtatcatttgtgaggacgtcttgcaatgcgccgccgctcgtagtgccgactcggaccgatg

SEQ ID NO: 7359 - DNA, 203 bp, synthetic construct
  source 1..203: mol_type = other DNA
ggcgcgccagtcctcaagcccgtggcaaaaccaacagattactgccccacgtacctggccggatcgtttgtgaaaaatgacataggcgcgtacaccgatgggatgatgtggatgaaaagcaggaaggtgaacggaacgtggacattggtcgacctggaactgacgcagagccatcaatgcatttggcccgactcggaccgatg

SEQ ID NO: 7360 - DNA, 203 bp, synthetic construct
  source 1..203: mol_type = other DNA
ggcgcgccagtcctagaggtgaccattgacgctgacggcgaagacatggacgagatgacatcaatgttcgggacaatgaaggcagtcgtaccgccagtggaagggtcctatccggatttccggctcagcccatctgtggagggagtttctcccctactggtgggcgcgcttttgcacctgctgaccatcgactcggaccgatg

SEQ ID NO: 7361 - DNA, 203 bp, synthetic construct
  source 1..203: mol_type = other DNA
ggcgcgccagtcctgttcaatctgaaatcacagttcgtacctgtggactcgatggtactgctgaactatgttgtgacgcatcctgcagttgcgacggccatggtaacaggaggtgccctggtgatctattccattcgcgtgtacaagagctggggatgctctccgaacttgtggaggagtggacttcgcgactcggaccgatg

SEQ ID NO: 7362 - DNA, 203 bp, synthetic construct
  source 1..203: mol_type = other DNA
ggcgcgccagtcctcgcttcgaggcgctcattagtggctggaatgtgcttggcggggttgtacgtgctctcaacgtgtctcgagttgtatcagatgccgacgacggcatcggtggtgttcctaggaggactactgatcgggatagtgaccaggatggctcctccagcgcacttggagttggttccggtcgactcggaccgatg

SEQ ID NO: 7363 - DNA, 203 bp, synthetic construct
  source 1..203: mol_type = other DNA
ggcgcgccagtcctggctggaatgggagtgccgttggattgcgaggaagagcccacaacacttccgtctggattagaaggaacttagggaccggatggagtggaattcacgaacttgacggacaacagtagagtgtcaacggggttgctggtttacgtcggctgcatgggaatcatggccatcaataccgactcggaccgatg

SEQ ID NO: 7364 - DNA, 203 bp, synthetic construct
  source 1..203: mol_type = other DNA
ggcgcgccagtcctctacgtcggggtcatcctgatgtgtgcttgttggtggacaaacgcgcccgagtggctacctctctacgtggctggagtatcggtctttcgatccaatgaggtgaatgatgtcctcatcacccctccagagtatgagcaggaagcacagctaagcaacgacttcgggcacctgcccgactcggaccgatg

SEQ ID NO: 7365 - DNA, 203 bp, synthetic construct
  source 1..203: mol_type = other DNA
ggcgcgccagtcctttgccacgcgacactaacgcagtatctgatggagaaaggcattgacagcattcgattctccaccatcataatggacgaatgtcacttcctggaccccctgtccatcgcctgtcgtggggtcatggattactacaatggaaaaggggttgccgtggtgtacatgagtgcgactcccgactcggaccgatg

SEQ ID NO: 7366 - DNA, 203 bp, synthetic construct
  source 1..203: mol_type = other DNA
ggcgcgccagtcctactgacccgcgaatcgtttgacgttgcgatcggaaaggcccgcaagcaggagacacagttcatcgtgtcgacagacatcagcgaaatgggagcaaatctcggtgtgcagacggtcattgacacgcgtgtggcagtgaagcctgtcattagcgaaggttccgtcatgctggagaacgactcggaccgatg

SEQ ID NO: 7367 - DNA, 203 bp, synthetic construct
  source 1..203: mol_type = other DNA
ggcgcgccagtcctggaaatcgagaacttccagccacagggcagatacctcttggcgcctgaaagtcgaccccggttcatcaacttcatcaagaaggatgttccagtctggcttgcgtggcactgggcgaatgcgtttgaacacaagcactcagtgctgtttcaaggacagaatgcgacgagcttgaacgactcggaccgatg

SEQ ID NO: 7368 - DNA, 203 bp, synthetic construct
  source 1..203: mol_type = other DNA
ggcgcgccagtcctcacgaacctagagcggcttggtacatcctaccgctcggcgattgagattctccatgaaatctctaacgttgatgatccaatggtttcaaacgtggtgatgggaaagtcgctacaagcttgggcggctgtcatcattgggatggtcactgggattgtgctactcgtcatgtttgtcgactcggaccgatg

SEQ ID NO: 7369 - DNA, 203 bp, synthetic construct
  source 1..203: mol_type = other DNA
ggcgcgccagtcctagtggtttgtcggatcgtgaagtggctgttcggtggaaagacaactgcacaacaaagccccccgtactcaagcttcccaacgttacaaacagcaggattttgtcaattcggctcaatggtgatggctatcggaccactatgtgcggtggttgctggcattcctcccgctttcgtcgactcggaccgatg

SEQ ID NO: 7370 - DNA, 203 bp, synthetic construct
  source 1..203: mol_type = other DNA
ggcgcgccagtcctttttgttgcggtgttgggattgttcgtgataatgtgctgtagcgctaataacgtgcaccgggcttacactactgacaccgtcacgctcgttgtcatcggtgtttgcgtgtgtgtcatgggagttgttgcgtgggaaatggatctacttcccaacatccgacgggatctaggttacgactcggaccgatg

SEQ ID NO: 7371 - DNA, 203 bp, synthetic construct
  source 1..203: mol_type = other DNA
ggcgcgccagtcctgcgcaagttgttttcgaacgaagaacagtccgcaacggtaatcggaggcatccagctcgctttgatttcctgggagacgatggtgccaatcgcttttgctgggttcttcgcaactacgttcgtgacgaagatctatgggtgcatggtaggaggaatctacctggttttagctcacgactcggaccgatg

SEQ ID NO: 7372 - DNA, 203 bp, synthetic construct
  source 1..203: mol_type = other DNA
ggcgcgccagtcctcgtggcgcatcagtctcgcatggcgctacggtcgctggtgaagacagacgcttgcggactgggatacagatggaaggaaatgcttaacgcgcttgacaaaaatgcgtttgacaagtaccgatcccgaggagtgaacgagacagacaagggtgatttcgtctcgcggggcggtttcgactcggaccgatg

SEQ ID NO: 7373 - DNA, 203 bp, synthetic construct
  source 1..203: mol_type = other DNA
ggcgcgccagtcctgaaaggacacaacctagccgtgctaaaagccggtgttgacgtgtacgcgactgagccgcgagactgcaacacgattgtgtgtgacataggcgagagtgacccccggcctgaggtggagaagacaagaacgctgaaagtgctgacgatgctcgagaaatggttagtccacaatcccgactcggaccgatg

SEQ ID NO: 7374 - DNA, 203 bp, synthetic construct
  source 1..203: mol_type = other DNA
ggcgcgccagtcctttatcacgtcttaggggctctaattgggcgcctcaagcgtaatgacccggtgcagcaggatgctcctccaaagctcgagatgggcactcgaagtgacccccgggcaaaagtgaagctgcaggaccagacaatcgttgcaggtcgcgtgaagaggttgcgagaggaaaacgccagcgactcggaccgatg

SEQ ID NO: 7375 - DNA, 203 bp, synthetic construct
  source 1..203: mol_type = other DNA
ggcgcgccagtcctcacatggttcgtggaccgtgaacacccttaccaatcgttcaactaccacgggtcatttgtcactgacgacatctctcccggagggcagactgtcaacccgatgatgcgccgaataatgtggccgtgggatttcctctcccgtgtgacgacgttcatgatgacagatgtgtcaaccgactcggaccgatg

SEQ ID NO: 7376 - DNA, 203 bp, synthetic construct
  source 1..203: mol_type = other DNA
ggcgcgccagtcctgatgatcgatgggtggttaggttcccatctggaagagattttgagtggaatggtcgtggccggggatgatgtggttgtggcaaccaacaatgaaaacttccacaccagtctaaggtacatcaccgccgcgtcaaaaacgcgcaagaacttgcaaccaaccgagccttccccgagcgactcggaccgatg

SEQ ID NO: 7377 - DNA, 203 bp, synthetic construct
  source 1..203: mol_type = other DNA
ggcgcgccagtcctgtacacaaactgggaacatgttgaattctgttcccatcactaccatcctctcgtgctgcaagacggtcgtgagatcattgctccgtgtcgtgaccaacacgagatcattggccgagcacggatccagaaaggggggatcgtggacatgtcagctgccgggtgcttagcaaaggccgactcggaccgatg

SEQ ID NO: 7378 - DNA, 203 bp, synthetic construct
  source 1..203: mol_type = other DNA
ggcgcgccagtcctcgtgtggattgtcaacaacccatggatggcagtgaaagacccagtgaagacatggtcagagataccatacctcccgaagacgaaggacataaattgtggaagtttgattggtgagcgggacagggcagcgtggtcgaagaatatcgtggccacagttagcacaactcgacgaatcgactcggaccgatg

SEQ ID NO: 7379 - DNA, 203 bp, synthetic construct
  source 1..203: mol_type = other DNA
ggcgcgccagtcctcatcgagcaagaagctggaagtcagaagttcacggaagggttgcggatacttgggcgataccgagctccaaccgacgacgtgttctggtgagaatcacgcgaatcgtagagaaccacatctctagaaaaggttaacgttgcgaagcaacgggaaccccgtaaggaaggacaaggcgactcggaccgatg

SEQ ID NO: 7380 - DNA, 203 bp, synthetic construct
  source 1..203: mol_type = other DNA
ggcgcgccagtcctcaagctttgagcattgacaacgctccggccccagtcccccaggttatgggagaataaccccgacgtgctggaagggcacgaatcaccgcaaggtgagggcgcacaggatagaatccaggtgactgacgccacctcccgaaatgtgtatagtaacagagcatgcctgcagcagcacgactcggaccgatg

SEQ ID NO: 7381 - DNA, 203 bp, synthetic construct
  source 1..203: mol_type = other DNA
ggcgcgccagtcctgcgtgtacgtgacatacgggaagtgcaaggccgacggggccccgcgacgctcgagaaggtcagtcgagatcacgagccacataacggaagggttgaacacccgccaggaaacgtgggccattgaccgttatggaaaactccagctagaaaaagtggaaagatgggtaatacgcacgactcggaccgatg

SEQ ID NO: 7382 - DNA, 203 bp, synthetic construct
  source 1..203: mol_type = other DNA
ggcgcgccagtccttcatcaaactccaactacatacctctgagagggattccacttcagctgactggaagagaagcatagagttcaacatgctttccggacaacaggtggttgtgttcactggatatggaactgtgacactcagttgcaacctgaaaaccaccatggacttgggcaattattacattgcgactcggaccgatg

SEQ ID NO: 7383 - DNA, 203 bp, synthetic construct
  source 1..203: mol_type = other DNA
ggcgcgccagtcctccatcctgggctctgataggtttcttgttaacaaaaactgggccactgacctgccactgccttggacgccggcttctgctgatgcttggcgtgaaaaacactacctggtacacttcgaggagccacatgcaacctcagtggcagtgacaactctgggggaccaggaaggggctgcgactcggaccgatg

SEQ ID NO: 7384 - DNA, 203 bp, synthetic construct
  source 1..203: mol_type = other DNA
ggcgcgccagtcctgtcacataattattggtaatggagaggacaggctcacacaccgatggcaccagcctgggagcaccataggcaaggcgtttagagtgacaatgaggggcatggaaagaatgaccatcattggagatgacgcctgggactttggttccactggcggaatcttcaataccataggcacgactcggaccgatg

SEQ ID NO: 7385 - DNA, 203 bp, synthetic construct
  source 1..203: mol_type = other DNA
ggcgcgccagtcctaggccattcacactgtgtttggaggtgcgttctcggcaatattcggaggggttaattggattgtgaaaatcctcataggcaccatctttttgtggctgggagtgaacgccagaaatggcacgttgacccttgtgctgctcataactggtggtgttttggtctttcttggaacagcgactcggaccgatg

SEQ ID NO: 7386 - DNA, 203 bp, synthetic construct
  source 1..203: mol_type = other DNA
ggcgcgccagtcctgagtgggggctgagactggctgcgccgtgtctttagagcagaaggagctgaaatgcggtgatggcgtgttcatcttccgcgacacgaatgactttttgtcaaaataccgtctgtgtccattgtcaccccaggagcttgctagcataatacaggcaacgagtgagcgtggggcctcgactcggaccgatg

SEQ ID NO: 7387 - DNA, 203 bp, synthetic construct
  source 1..203: mol_type = other DNA
ggcgcgccagtccttggttgccttgtccatatcccaagtggtactgtctgacaaaatcggattcctagactggatggacgctgttgggctagtggctgccgtggtgcaggccttgattgagttgaaatcagaaaattgggcaatgctcggactactagctctgaaccccatggggtcgaagttggttgcgactcggaccgatg

SEQ ID NO: 7388 - DNA, 203 bp, synthetic construct
  source 1..203: mol_type = other DNA
ggcgcgccagtcctcaaagacaaccatcgtcacgctcctaggacttgcagggctcgcaattttgcaaaagcgggacacgagtgcaagaaggacatatcccaagttgataggggcagcaatggttctgttggggttcacccgtgggtggatcctaggattgctcacaatgctgagccagcagagcttgacgactcggaccgatg

SEQ ID NO: 7389 - DNA, 203 bp, synthetic construct
  source 1..203: mol_type = other DNA
ggcgcgccagtccttgcagataatcgcatgtgtccctcgccaaaaagtcaagaacgtgacaacaacgcctggagtgttcgccctgaaaacgggagaagaaattggagcggtatcactggattaccctgcaggaacctcaggttctcccatcatcaacaagaaaggtgatatcattggcttatatggaacgactcggaccgatg

SEQ ID NO: 7390 - DNA, 203 bp, synthetic construct
  source 1..203: mol_type = other DNA
ggcgcgccagtcctatggaatcctgactgagaataaggactttgtgtctgccatcgctcaggctgactcatgtgacctgcgtaccccagaagttgatgttgagtttagaaaaggagagatcaaggtgctggatctgcaccccggagcggggaagacccggaaggttctgccagagttgttacggaaatcgactcggaccgatg

SEQ ID NO: 7391 - DNA, 203 bp, synthetic construct
  source 1..203: mol_type = other DNA
ggcgcgccagtcctgccttgagcggcggctgcggaccttagtgctggctccgaccaaggtggtgctgacagagatgtatgaagcactcaaggacatgcctatccggtatcatacaagtgctgcaatcgagacaaagaaatcaggagctctcattgacatcatgtgccatgctacgctggcaaatcggtcgactcggaccgatg

SEQ ID NO: 7392 - DNA, 203 bp, synthetic construct
  source 1..203: mol_type = other DNA
ggcgcgccagtcctggtcgatgacaacaatactggaaagggttgtgcaggtgccagggctcatgaaggacaacttgcaagaggcctgggacacataccacaccctgctgagagcagatgaaaattctagtagacacagaatggcgctggataacatccccgaacccatgctcagtactatgtgtgtggcgactcggaccgatg

SEQ ID NO: 7393 - DNA, 203 bp, synthetic construct
  source 1..203: mol_type = other DNA
ggcgcgccagtcctcgtcagtcgcgtccatgaccatgggaatttttctgtacatgctcgctccaaagggaacgtcacgaaagacgctcgcctttgtgacaatggttgccgcttcagtgggactatgggatggagatgtctcagttgtcaagattgctagcatgatgctggttttcttcatactgtgtgcgactcggaccgatg

SEQ ID NO: 7394 - DNA, 203 bp, synthetic construct
  source 1..203: mol_type = other DNA
ggcgcgccagtccttcattctaattccagacgcaggactgcagagatcaacgcaggataactacttggcatattttgtgattgtgctcctgatgcttgtggggctcgttgcagccaatgagaatggatacctcgaaaaaaccaaagcggatattttcggtcacaagcaaatgaggacaatgccagtgacgactcggaccgatg

SEQ ID NO: 7395 - DNA, 203 bp, synthetic construct
  source 1..203: mol_type = other DNA
ggcgcgccagtcctacggctcatggatgtcttttgacctgcgaccaggtagtgcatgggcagtttatgcctttgtggtggggatattctctccgctttatcatcatgcagagagcatcaactatggagccatttccttgcaaggcatcacccagagcgcagcagctttcttccaaatggacaaaggctcgactcggaccgatg

SEQ ID NO: 7396 - DNA, 203 bp, synthetic construct
  source 1..203: mol_type = other DNA
ggcgcgccagtccttcacctcttccctgcctcagttggtgaacggcgttccctcgccggtttggaacacgcaagtggcggtaggtgtggctgggcttcttagaggaaactacttggctctcatcagcactggccatgctctatggagtgtgcgaggcaatcgccgaggtggtggaggaacatccacaacgactcggaccgatg

SEQ ID NO: 7397 - DNA, 203 bp, synthetic construct
  source 1..203: mol_type = other DNA
ggcgcgccagtcctctttgggagagctttggaaaaaacagctcaacaagatgactaaaaaacagtttgagtcctacaagaaatcagggatcattgaagtggatcgcacggcagcgcaagatgccataaggagaaacatcctagacggatccgctgtgtcaaggggcagtgcaaagatgaggtggatggcgactcggaccgatg

SEQ ID NO: 7398 - DNA, 203 bp, synthetic construct
  source 1..203: mol_type = other DNA
ggcgcgccagtcctggagccgagccatatggtacatgtggctgggggcacgcttcctggagtttgaagccctaggtttcttgaatgaggaccactggattgccagacgccactctagagcaggagtggaaggcattggactgcagtacctagggtatgtgctggaagaactggaggggaagaaaggagcgactcggaccgatg

SEQ ID NO: 7399 - DNA, 203 bp, synthetic construct
  source 1..203: mol_type = other DNA
ggcgcgccagtcctatgcaaacatgtggaaactgttttatttccaccgaagggacctgaggctcatggcaaacgccatcagttcagctgtccccgttgactgggtcccgacaggaagaacgacatggtccttgcatggaaaaggtgaatggatgacgtctgaggacatgttggaagtctggaatagggcgactcggaccgatg

SEQ ID NO: 7400 - DNA, 203 bp, synthetic construct
  source 1..203: mol_type = other DNA
ggcgcgccagtccttgaagaaactgcgaaacatagtgacaaacttgatgaagggattgtccggacgcaggaaaagaagaagcccaccagcctcaatcattttgctactgctccccctaatggcatactcagctagtgtgacacgtcagcatggagctggattgttattgaatgtgacctttgctgatgcgactcggaccgatg

SEQ ID NO: 7401 - DNA, 203 bp, synthetic construct
  source 1..203: mol_type = other DNA
ggcgcgccagtccttcggaaagacctttgaggtacaagggggtaactgttcagtcaataccttggaagccggaaaatggtgtgatgactatgtggaatacgcttgtgtcactctgactgagggtgaggaacctgatgacctagactgttggtgctatggggtggacaatgtgagagtgacatatgggacgactcggaccgatg

SEQ ID NO: 7402 - DNA, 203 bp, synthetic construct
  source 1..203: mol_type = other DNA
ggcgcgccagtccttagctctggcatatttcattggaacatcagtagtccagaaagtagtcatcgccatactgctgctaggaattggaccagcttattccacacattgccttggtatccccaaaagagacttcatacggggacttgatggaaacacatgggtctcagttgtgttggagcaaggaggctcgactcggaccgatg

SEQ ID NO: 7403 - DNA, 203 bp, synthetic construct
  source 1..203: mol_type = other DNA
ggcgcgccagtcctgtgtgaccctgattgcagacaacaaaccatcagttgacgtgtggctcagttcaattgtggtcgacacgccaacacttgtccggaaaatctgctatgaaagttcagtcacaggttcaaaagctgaaggagcttgtcctactatgggtgatgcgcacttgactgaggaaggaaatgcgactcggaccgatg

SEQ ID NO: 7404 - DNA, 203 bp, synthetic construct
  source 1..203: mol_type = other DNA
ggcgcgccagtcctaagaatgggaatgcaaaagatccttctctgacagaggttggggcaacggctgtggtctttttggtaaaggcagcatagttgcttgcgcaaagttctcatgcaccaaagagatggaagtgtaccaaattgactctacaaaaatagaatacactatcagtgctcaagttcattctgcgactcggaccgatg

SEQ ID NO: 7405 - DNA, 203 bp, synthetic construct
  source 1..203: mol_type = other DNA
ggcgcgccagtcctgagccaaaaaagaggattgggttaaccacaccaaactcatcaagtttgttcccacaacaggaacatccacagtgacttttacaggttatggtaactttggccttgaatgtcatgttcaaatgatggtagatcttggtaactcttacctagtcaaagtgggtacagacgcatggccgactcggaccgatg

SEQ ID NO: 7406 - DNA, 203 bp, synthetic construct
  source 1..203: mol_type = other DNA
ggcgcgccagtcctaggtgacaaatggagctccatgcaggattccagtcatagcatcagattcgatggctggcactgaaaatcgtggcagcgtcatcacaactaatccaatagctgcattgaacaatgatgaagtgctggttgagatcagtcccccttttggggaaagctacatcatagttggttcagcgactcggaccgatg

SEQ ID NO: 7407 - DNA, 203 bp, synthetic construct
  source 1..203: mol_type = other DNA
ggcgcgccagtcctgttcactcaattggaaacagcgtgaggtgaaatgtggagatggaatgtttgtcttcaaagacacagatgattggttcacgaaataccagtatattccagaagatcccaagacaatggccgggttaattgcccaggcccacgaggaaggactatgtggactcaactcagttggagcgactcggaccgatg

SEQ ID NO: 7408 - DNA, 203 bp, synthetic construct
  source 1..203: mol_type = other DNA
ggcgcgccagtcctaaaacatcatttttagtccatccagaaagaacggcacctttataattgacggaaagagcaaatcagaatgtcctttcaataagagggtctggaactcaatcaaagtggaagaatttggcacaggaatctatcaaacaagagtgtttatgcgccctgactatgattactccaagtcgactcggaccgatg

SEQ ID NO: 7409 - DNA, 203 bp, synthetic construct
  source 1..203: mol_type = other DNA
ggcgcgccagtcctgagtgatagaatctgacatgttcatgccacgcagtctagccgggcccgttagccgccacaatcacatacccggatacaaagtgcagtctagtggtccatggcacaacactccattggaagtaaaaagagaagaatgccctggaactcacgtcactgtggaagaaacatgtgatgcgactcggaccgatg

SEQ ID NO: 7410 - DNA, 203 bp, synthetic construct
  source 1..203: mol_type = other DNA
ggcgcgccagtccttggcctccaagggcgatgttgatcctttctctttgggactcctcatgctttttctttgtagtgacatgttcctgatgaagaggttttcgatgcgtgctctcattgctgggagcatcatcatgctgggagccatgacattaggaagcttgacatatcttgacctcttacgctatgcgactcggaccgatg

SEQ ID NO: 7411 - DNA, 203 bp, synthetic construct
  source 1..203: mol_type = other DNA
ggcgcgccagtccttggtcacggttgggatgtacatggctgaagccaatagtggaggagatgtgacacacctggctctcatagcggtttttcgggtgcgggctggctttgttagcgtgctggccctaaaacaaatgtggagccctagagagagatttgtcgcagcttgtggaatagttatggttcagacgactcggaccgatg

SEQ ID NO: 7412 - DNA, 203 bp, synthetic construct
  source 1..203: mol_type = other DNA
ggcgcgccagtccttagcactgggagacatcatgaatactaatctcatggagtggctgaatgcagctggcatgtcaatactcgtcatcaagtcaatagtcgatccgagaaagtgcaatgtggtgctccctttactctgtcttctcacaccacttacgacgacagaaattcaaagggctgtgatgctatcgactcggaccgatg

SEQ ID NO: 7413 - DNA, 203 bp, synthetic construct
  source 1..203: mol_type = other DNA
ggcgcgccagtccttctgttctgtggtcatttccgtgaccgtactgcaaaccgacagcgtctcaacaagaaagtctatccctcttatagccttgaccatttgttcattctttaaatggacaagccctttccttggcctggtgtgttacttagcttttacacgcattccccagcgctcatggccattggcgactcggaccgatg

SEQ ID NO: 7414 - DNA, 203 bp, synthetic construct
  source 1..203: mol_type = other DNA
ggcgcgccagtcctcccttgtgttggcccccacccgggtagtcctcagtgaaatgaaggaagccatgcctaaaatgagcatcaaattccacacccaagcattttcaaacactgctacaggaaaagaaatcattgatgcaatgtgtcatgctacgttaacccatagaatgttggagcctactcgggtgacgactcggaccgatg

SEQ ID NO: 7415 - DNA, 203 bp, synthetic construct
  source 1..203: mol_type = other DNA
ggcgcgccagtcctctaactgggaagtagttatcatggatgaagcccactttatggacccagctagcattgccgcaagaggatgggcagcacatagatcaagagcgagggaatgtgccaccatcttcatgtctgctacacctcctggaaccagcaatgaattccctgagtccaatggaaccatagaggcgactcggaccgatg

SEQ ID NO: 7416 - DNA, 203 bp, synthetic construct
  source 1..203: mol_type = other DNA
ggcgcgccagtcctcctcaggcattgtcatgttctttttggcacccaaagggctcagccgcatgtcgatggcaatgatgaccatgttggtgtctgcttacttgatgtctttgggaggtatgaacccagtgcaggtgtcctgtgtaatgctggtattcttcatattcatggtggtgttgatacctgaaccgactcggaccgatg

SEQ ID NO: 7417 - DNA, 203 bp, synthetic construct
  source 1..203: mol_type = other DNA
ggcgcgccagtcctcagggacacagcgatcaacatatgacaaccagctcatctatctgcttgttggagtgatgagtgtcatcctcatggtcacagccaatgagatgggtatgctggaaaaaaccaagagagacatctttggcacaaccgtcgtggaagagggaaagaagtggacctttccagaactagcgactcggaccgatg

SEQ ID NO: 7418 - DNA, 203 bp, synthetic construct
  source 1..203: mol_type = other DNA
ggcgcgccagtccttgtctgtcgtcatactcttgctgagtgcttggaatggaataacactgcttcccctgtttgcaggaatgggagctgcagccctgcactggggatttatcctaccaggactgcgtgcccaagctgccaaggccgctcaaaaaagagtgtaccatggagtggcgaagaatcctgtggcgactcggaccgatg

SEQ ID NO: 7419 - DNA, 203 bp, synthetic construct
  source 1..203: mol_type = other DNA
ggcgcgccagtccttgttggaaggaaatacaaatgcatactggaatgggccgattgctgtagcattcactgggctgatgagaggcaattattatgcgaccattggcttgatgtacaatggatggctagcaaaacagaccaggagaggaagggctgcaggagttactcttggtgaagtgtggaaaaggccgactcggaccgatg

SEQ ID NO: 7420 - DNA, 203 bp, synthetic construct
  source 1..203: mol_type = other DNA
ggcgcgccagtccttgtcaggaagagtaattgacctggggtgtggacgaggtggctggagctattattcggctgcgcaaaaagaagtcatgagcgtcaaaggttacacgctgggaatcaatggacatgaaaaacccgtgcacatgcaaaccctaggctggaacattatcaaattcaaggataaatctgcgactcggaccgatg

SEQ ID NO: 7421 - DNA, 203 bp, synthetic construct
  source 1..203: mol_type = other DNA
ggcgcgccagtcctatgtcttcaccatgccagctgaaccatgtgagacacttctttgtgacataggggaatcatcatcaaattttcttattgaaaaagatagaactctcaaagtcctggaaaattttgaaaggtggaaacacgtcaatactgagaacttctgtgttaaagtcttgtgcccttaccatccgactcggaccgatg

SEQ ID NO: 7422 - DNA, 203 bp, synthetic construct
  source 1..203: mol_type = other DNA
ggcgcgccagtcctattacttgggtagctacttgtgtaaagccactggcagttcttcatccatgctgaatggcattgttaaaatgctatccatgccttgggacaagtttgaatccgtgacattactggctatgactgatacaaccccctttggacaacagcgcgtcttcaaagagaaggttgacacaacgactcggaccgatg

SEQ ID NO: 7423 - DNA, 203 bp, synthetic construct
  source 1..203: mol_type = other DNA
ggcgcgccagtcctgagccccttctccaccacctggcaccagagccatcatgagagttgtcaactcctggctgtttaaacacctggctagagagatgcgacctaggatctgcacaaaagaagagttcatttccaaggtcaggagtcatgctgcaattggtgcatacttggaagaacatgaaaattggacgactcggaccgatg

SEQ ID NO: 7424 - DNA, 203 bp, synthetic construct
  source 1..203: mol_type = other DNA
ggcgcgccagtcctgaagcgctagcgaagctgtccaagacccacggttttggaagcttgtggatgaagaacggaaactccacctacaaggcaaatgcaggacctgtgtttacaacatgatgggcaagagagagaaaaaacctgctgagttcggaaaagccaaaggaagtagagccatctggtacatgtcgactcggaccgatg

SEQ ID NO: 7425 - DNA, 203 bp, synthetic construct
  source 1..203: mol_type = other DNA
ggcgcgccagtcctggtatacaaaccaaaacagacaggaccggacctgcctgatgtcagcccgtcataatgacgccatggctaagctgtgaggccatgctggctgggatagccgcgaccacccgcgtaatggggttcctggattgctcgatccggggtaaaaaatttttagggagcctccgcctgctgcgactcggaccgatg

SEQ ID NO: 7426 - DNA, 203 bp, synthetic construct
  source 1..203: mol_type = other DNA
ggcgcgccagtccttgtggaccaaaattgatttctttatattacatcaagatatcaattgtaccggttttacattaactatagtagataaggatgaaagaacaaaggacctcgagtattttgaccttaattgtgagtattatgagaatttgtatgatgcattaatggattctgagttttctaaaacttcgactcggaccgatg

SEQ ID NO: 7427 - DNA, 203 bp, synthetic construct
  source 1..203: mol_type = other DNA
ggcgcgccagtcctggtttacattgttgctaaaatatattgattatgctccaattagtacgaacagtcgaggaatgccccgcccggagaccatctgtgtttcaaaacattggtggtatgagttatataggattggattcttgaataagttgtaccgatgtggagactgggatagtattttacttctcccgactcggaccgatg

SEQ ID NO: 7428 - DNA, 203 bp, synthetic construct
  source 1..203: mol_type = other DNA
ggcgcgccagtcctatgcaaagtgtgaagcgaaattctttggatcaataagtgttattgatgtctgcatagatatcattagtgctttgttgcaagtgagcttcgctaaacctggactcaagttagcttctattgcagtagaagtgttcagacttattaagaaatatgtctcaggaattaagattaacacgactcggaccgatg

SEQ ID NO: 7429 - DNA, 203 bp, synthetic construct
  source 1..203: mol_type = other DNA
ggcgcgccagtcctgacgcagagttgatctgtgtgctgaagtacgtaataaggttgagtttacgaaggaaggatattcaaagactaaaggatgcatggtaagacgcttggataaggatttagttaagaagaagactggagacatatgttcaacagaatgttatttagtagacttggttaatcccgagacgactcggaccgatg

SEQ ID NO: 7430 - DNA, 203 bp, synthetic construct
  source 1..203: mol_type = other DNA
ggcgcgccagtcctctggagagaaataccaaactgatttagaatatgaagattttttagatatgtgtttggagaaaactcaggagtgtagagataattctgctaagttgaacgaatttctgatgaactatgctgaaagtcgatcaaaacgacccgaacaaaaacacgataagtgccctgaattggaatcgactcggaccgatg

SEQ ID NO: 7431 - DNA, 203 bp, synthetic construct
  source 1..203: mol_type = other DNA
ggcgcgccagtcctttggtaagcatgtttccatggtctcttatggagatgacaatgtcataaacttcagtgatgaagtatgtgaatggtataacatggaaactattgctaaagcatttgaaacccttggattcacctatactgatgagcttaagggcgtaaatggcgaagtaccaaaatggcgatcaacgactcggaccgatg

SEQ ID NO: 7432 - DNA, 203 bp, synthetic construct
  source 1..203: mol_type = other DNA
ggcgcgccagtccttgcctggcgattcacaacaagaaagcaatactcccaacgtacacaatacggaactcgcttcgtccactagtgaaaactcggttgagacccaagaaatcacaacctttcatgatgtggaaactccaaataggatcgatacccccatggctcaggatacttcatcggctaggaacacgactcggaccgatg

SEQ ID NO: 7433 - DNA, 203 bp, synthetic construct
  source 1..203: mol_type = other DNA
ggcgcgccagtcctaggctggcggaaaagctcaaaagcttgccaattttaagtacctgcgatgtgatgttcaggtgaagttagtacttaatgcgaatccctttgtagcaggaagaatgtatctagcatatagtccttacgatgataaagttgacacggcccgtagtgttttacaaacatcgcgagctgcgactcggaccgatg

SEQ ID NO: 7434 - DNA, 203 bp, synthetic construct
  source 1..203: mol_type = other DNA
ggcgcgccagtcctaagttcagaaaaataatccttctgggtataaatatattatgcatgtcttgactggctatgaacctgaagtaaagaatgtaacaatgcaagtgaacgctccaaaaacgaaaacaagtcaaaaatctacctcagaaaatcccaaagttggaccaatatctgaagtggcttctggagcgactcggaccgatg

SEQ ID NO: 7435 - DNA, 203 bp, synthetic construct
  source 1..203: mol_type = other DNA
ggcgcgccagtcctccagagcaggaaacgatgactttacctttggttggatgataggtccaccccagctacaaggcgaatcacgctccgtagccccctagatgtgcactgggagacagacaaatctccctatgtatggctatagtctaaatttttcacaaaatttcagtttagaccgaaaaccgacaccgactcggaccgatg

SEQ ID NO: 7436 - DNA, 203 bp, synthetic construct
  source 1..203: mol_type = other DNA
ggcgcgccagtcctatgtggtgctggagcatggaggctgcgtcacagtacgggttgaagggaaacccacactagactttgaattggtacaaacaaaggccacgggactagcggctgtgagggcttattgttaccaggcaaaggtcagtgatatccaaatctcagcggcatgtccagcggtacagctgacgactcggaccgatg

SEQ ID NO: 7437 - DNA, 203 bp, synthetic construct
  source 1..203: mol_type = other DNA
ggcgcgccagtcctggaccatgcttgaggtggaacccccttacggagacagctacatcgtcattggggtcggagacggaaggctcaagcagcattggttcaagaaagggagtgtaattggaggagctttcagcaccaccatgaaaggggcgaaacgcctagcagttttgggagacgcggcatgggactcgactcggaccgatg

SEQ ID NO: 7438 - DNA, 203 bp, synthetic construct
  source 1..203: mol_type = other DNA
ggcgcgccagtccttggaaatcaggcctgtgagtgagagagaagaaaccctgataaggtcaaaagtctccgctggagacgggaatgagatagacaccttctcactaggactactggttgcaatgttggtgacacaggaaggcctgaggaaacgctgggctactcgccatatcatggtggcttcactgacgactcggaccgatg

SEQ ID NO: 7439 - DNA, 203 bp, synthetic construct
  source 1..203: mol_type = other DNA
ggcgcgccagtcctggcgctggacgccacgagagtcaatgctactggccatatcggcttgtttcttacacctcgtgttttcagagctaagtactgacatcacaacgctggctcataatttttccctagccttgctgatactacgagccatcatccaaacagacgtcagctctgtgacacttccagtgtcgactcggaccgatg

SEQ ID NO: 7440 - DNA, 203 bp, synthetic construct
  source 1..203: mol_type = other DNA
ggcgcgccagtccttgtctatgatggctccttcattccagctctcagtcctaggaactttcagaatggcagtggcagtttatgttatcgtcaatctgatgatgtcaaaacggaatgatgccgtaaagaaagcggcccccagcgtggtggcagcagctctgggacaattcggaatggtgaatgcaacggcgactcggaccgatg

SEQ ID NO: 7441 - DNA, 203 bp, synthetic construct
  source 1..203: mol_type = other DNA
ggcgcgccagtcctgactctttggaaaaactcaggtaggagtcggagtgatgcatgaaggggtgtttcacaccatgtggcacgtcactagaggggccgctttgaaaagcggagaaggaagattagacccttactggggagacgtgaagaaggacctgatttcatatggagggccatggaagttggaagcgactcggaccgatg

SEQ ID NO: 7442 - DNA, 203 bp, synthetic construct
  source 1..203: mol_type = other DNA
ggcgcgccagtcctcgcctggcagcgacaatccctttccagcttccaacgcccccataacagacacagaagctcagattcctgacaaggcctggagcacaggcttcgattggatcacagaatatggaggaaagacagtctggttcgttcctagtgtccgcatgggaaacgagattgccgcttgcttgacgactcggaccgatg

SEQ ID NO: 7443 - DNA, 203 bp, synthetic construct
  source 1..203: mol_type = other DNA
ggcgcgccagtcctgcatgctccttgataacatccatatgcaaaatggtctcatagctcaattgtatggccctgaacaagacaaatgtttcgccactgatggagaatttaaattgagagagaaggaaagagccactttcctggagttcctgaaggcggacttgccagtgtggctgtcatttaaggcagcgactcggaccgatg

SEQ ID NO: 7444 - DNA, 203 bp, synthetic construct
  source 1..203: mol_type = other DNA
ggcgcgccagtcctctagttctggggttcagtaccatgacaggaaatggtgctttgatggaccagacaacaatttggtcttggaagacaatgttccagttgagatctggacgaagtcaggggaaaggaagaagctaaaacccagatggagtgacgccaggacgtattgtgaccatggtgctctcaccgcgactcggaccgatg

SEQ ID NO: 7445 - DNA, 203 bp, synthetic construct
  source 1..203: mol_type = other DNA
ggcgcgccagtcctctttcaaagagtttgctgggggaagaaggagtgtgacgacaggccttctagaaggagttgggagactgccagaacatcttggccaacgcctgaaagaatccattgacaccctgtacttagctttcacagctgaagttggctcgcgcccccatcgagaggctatgcaagaaatgccgactcggaccgatg

SEQ ID NO: 7446 - DNA, 203 bp, synthetic construct
  source 1..203: mol_type = other DNA
ggcgcgccagtcctgagtctttcacaagaccgagaggaaatccacagaattcacactcctgactcctccggatttaaggccagccacggcatggagcatatatgccattggaaccaccctcatcactccactgatccaccacatgattactactcactatgcaaacttctctttgatggccatggcaacgactcggaccgatg

SEQ ID NO: 7447 - DNA, 203 bp, synthetic construct
  source 1..203: mol_type = other DNA
ggcgcgccagtcctatcaagcaggcagtctcttcggcatgcagacaggagctccattctcaaaaatggactgggcagtgccggccattgtggtcggatgctggcaacaactaactcctgccacactgatgacggctttggtcttgctagctgtccactatatctacatgattccgggatggcaggctgcgactcggaccgatg

SEQ ID NO: 7448 - DNA, 203 bp, synthetic construct
  source 1..203: mol_type = other DNA
ggcgcgccagtcctaagaccttcaaagttggagtgagtgcgccaccctatcagccgctgcagccgccacgctttgggaaggatccccaggaaagatttggaatgcgtcaacggcttgttcactggtgaacatcttcagaggccacacgctagcagccgtacctttcatgttcaccatactgcggaacacgactcggaccgatg

SEQ ID NO: 7449 - DNA, 203 bp, synthetic construct
  source 1..203: mol_type = other DNA
ggcgcgccagtcctctggaaatacagggaaaagaggaggtgttgagggggaaactctaggggagaaatggaaacaccttctcaatgccatggacaagtatgagttctccaggtacaaggtaaatggcatctttgaggtggatcgtgaaccagcccgtatggccctggccaacggtcttgtgacgagtgcgactcggaccgatg

SEQ ID NO: 7450 - DNA, 203 bp, synthetic construct
  source 1..203: mol_type = other DNA
ggcgcgccagtccttggagccgtggcttaagaacaaacctgaattctgcataaaagtgttgtgcccgtacagaccaaaagtcattgagcgcctaagcgccttgcagagaacctatggagggggactcgtaagggtcccgctttcaaggaacagcacacatgaaatgtactggacttctgggacggcagcgactcggaccgatg

SEQ ID NO: 7451 - DNA, 203 bp, synthetic construct
  source 1..203: mol_type = other DNA
ggcgcgccagtcctaggcaaaggtgaacaaccatgcagcaatgggttccatctttgaggaggagcatcaatggcagacggccaaggaagcagtggaagatccagggttctgggctctggttgacagagagagagaagctcatttggctggacggtgtgaaacctgtgtctacaacatgatgggaaaaccgactcggaccgatg

SEQ ID NO: 7452 - DNA, 203 bp, synthetic construct
  source 1..203: mol_type = other DNA
ggcgcgccagtcctgttacgtcttgagagacatatccagaaggcctggaggaaagatgtacgctgatgacacagccggctgggatacccgcataacagaaaaagacttggacaatgaggcaaaaattatagaccagatggaaggtgaacacaagcagttggccaaggccatcatggaactcacgtacacgactcggaccgatg

SEQ ID NO: 7453 - DNA, 203 bp, synthetic construct
  source 1..203: mol_type = other DNA
ggcgcgccagtcctggcacaaagtggtgaaagtcatgcgcccaggccctgggggaaaaacatacatggacatcatttcccgggaggaccagagaggtagtgggcaagtggtcacatatgctttgaacaccttcacaaatatgattgtgcaactcactcgatgtgcagaggcagaaggtgtcctgatcccgactcggaccgatg

SEQ ID NO: 7454 - DNA, 203 bp, synthetic construct
  source 1..203: mol_type = other DNA
ggcgcgccagtcctcgtcaatgagagaaaggaaattgacgccagcggagcatagagctcttctcctatggttggatactgaaggagtgaaaagactgaaaaagatggccatcagtggagatgattgtgtggtgaagggagaggatgaaagattcgccactgcactgtacttcctcaatgccatggcaacgactcggaccgatg

SEQ ID NO: 7455 - DNA, 203 bp, synthetic construct
  source 1..203: mol_type = other DNA
ggcgcgccagtcctccgcatggaccgtcagagaatcggctgggctggccaaagcttatgcgcaaatgtggaagttgatgtacttccacagacgcgacttacggctcatggccaatgcaatctgctcggccgtccccaaagactgggtccccacgggcagaaccacgtggtcaatacatggaaaaggagcgactcggaccgatg

SEQ ID NO: 7456 - DNA, 203 bp, synthetic construct
  source 1..203: mol_type = other DNA
ggcgcgccagtcctcaccggataaaggtagacggtgctgcctgcaacctttctgcggaaggaataaccgcagtcaataaaaccaaaaagagggagttgagaaccctttgggccgcccaggcctgggattgaaccgttgatcccaggcgaagggactagaggttagaggagacccagcctttctcaccacgactcggaccgatg

SEQ ID NO: 7457 - DNA, 203 bp, synthetic construct
  source 1..203: mol_type = other DNA
ggcgcgccagtcctacccaaggcccaaccttgctgaacctttaggcaggtaaaaggactagaggttagaggagaccccttggcaaaacagttaacgcaccaaaagaaacagcatattgacacctgggatagaccggagaatttgctgcctcgcaacacctcccacccggcacagaacgccgacatggtcgactcggaccgatg

SEQ ID NO: 7458 - DNA, 203 bp, synthetic construct
  source 1..203: mol_type = other DNA
ggcgcgccagtcctcctcagtgaaaggaaccaacatgtgcacgatcagggctttggacgtaggctacacttgcgcttatgacacaacttacgagtgccctcacctggaagtgaccatggatccggaagacatagattgttggtgcacacttgaatctgtttatgttaactacggactctgcaagcaaacgactcggaccgatg

SEQ ID NO: 7459 - DNA, 203 bp, synthetic construct
  source 1..203: mol_type = other DNA
ggcgcgccagtcctttatggccaaggacaaaccaacactagacatcaagttgataagaatggaagccaaggacctggccacggttcgtagttactgctaccaggccactgtcaccgactcgtcaactgaggccagatgccctaccatgggtgaagcccacaactccaaatctcttgacgccagctacgcgactcggaccgatg

SEQ ID NO: 7460 - DNA, 203 bp, synthetic construct
  source 1..203: mol_type = other DNA
ggcgcgccagtcctacaacaaacattggcttgtcaaccgtgactggttccatgatctggatctaccctggactggacccgccactgagtcgtggaagaaccgtgagagcctcatcgagtttgaggagccccatgctactcgacaaacagtagttgctttgggtaaccaagagggcgctctgcatacggcgactcggaccgatg

SEQ ID NO: 7461 - DNA, 203 bp, synthetic construct
  source 1..203: mol_type = other DNA
ggcgcgccagtccttcaatgtgcatgctgacaccggttgtgctattgacatggcacgtcgtgagctgaaatgtggaagtggtatcttcatccacaacgatgttgagacatggaggaacaattacaaataccacccactcacgccacgcggctttgccaaggtcattcagatgtcaaaggataaaggtgcgactcggaccgatg

SEQ ID NO: 7462 - DNA, 203 bp, synthetic construct
  source 1..203: mol_type = other DNA
ggcgcgccagtcctgctttggatggaagaattggggaaagagctttatcttttcaaccgaaacagccaactccacattcattgtcgatggaccagaaagtaaagagtgcccaacatcagaccgggcttggaactccctagaattggaggatttcgggttcggaatcatctcaaccaagattttcctaacgactcggaccgatg

SEQ ID NO: 7463 - DNA, 203 bp, synthetic construct
  source 1..203: mol_type = other DNA
ggcgcgccagtcctaggtcaacgagcaacggggaaactcatgcgactcagcggtgattggaacagccgtcaagggcaatgaagctgtccatagtgacttgggattctggatccagagcacaaagaatgaatcctggcaactggagagagcagtccttggggaggtcaagtcgtgcacatggccggaaacgactcggaccgatg

SEQ ID NO: 7464 - DNA, 203 bp, synthetic construct
  source 1..203: mol_type = other DNA
ggcgcgccagtcctgccacacattgtggggcgacggagttgaggagagtgacttgattattccaatcacgctggccggaccaaaaagccaccacaacatgcgcccagggtacaagactcaaaccaaagggccctggcatgaggagacacctctcgtcatcgagtttgctgaatgtccagggaccacagcgactcggaccgatg

SEQ ID NO: 7465 - DNA, 203 bp, synthetic construct
  source 1..203: mol_type = other DNA
ggcgcgccagtccttgacccaggaagagagttgtggcggtagaggaccatcaattaggacaacaacagcaagtggaaggaccatacgcaattggtgttgcaagaactgcacccttcctccactccgatttatggccggggaaaactgctggtatggcgtggaagtcagacccaagcgcgagaatgaggcgactcggaccgatg

SEQ ID NO: 7466 - DNA, 203 bp, synthetic construct
  source 1..203: mol_type = other DNA
ggcgcgccagtcctaaaccctaatcaagtcaaaagtctcagcggggaatggccagaccattgagcccttccaactcgggatcctaatggcatttgtgttcacccaagaagtcctgaggaggaggtggacggcgaacctagcgttgcccacctcagccttgctaatggcttgtttcatctttggcggctcgactcggaccgatg

SEQ ID NO: 7467 - DNA, 203 bp, synthetic construct
  source 1..203: mol_type = other DNA
ggcgcgccagtcctgtttgggaaaacggggatggcctgccagtgaagtactaacagccgtgggcatgactttcgctcttgcggggagtgttgccagactggacggagggactatggccatcccattggccaccatggccatactggctgttgcctatgtcctctcaggaaaatccactgacatgtggtcgactcggaccgatg

SEQ ID NO: 7468 - DNA, 203 bp, synthetic construct
  source 1..203: mol_type = other DNA
ggcgcgccagtccttgaaagcccgcctccgaacggtcatactggttcccaccagagtcgtcgccgctgaaatggcagaggcacttcgtggtctccccatcaggtatcaaacatcagccgtcaaggcagaacactctgggaatgagatagtggatgccatgcgccacgcaacactgacacagcgcctgccgactcggaccgatg

SEQ ID NO: 7469 - DNA, 203 bp, synthetic construct
  source 1..203: mol_type = other DNA
ggcgcgccagtccttaacaccagcaaaagtgccgaactacaacgtgtttgtgatggatgaagcccacttcactgacccagcaagtatagcggcaagggggtacatttcaaccaaggtggaacttggggaggctgcggccatcttcatgactgcaacaccgccgggaacgactgacccctttccagactcgactcggaccgatg

SEQ ID NO: 7470 - DNA, 203 bp, synthetic construct
  source 1..203: mol_type = other DNA
ggcgcgccagtcctataggaagagctacgactctgagtaccagaagtgcaaaggcaatgactgggacttcgtcataacaactgacatttccgaaatgggggccaattttggcgctcatagggtcattgacagtaggaagtgcgtgaaaccagtcattctggacggagatgacagagtcctcatgaatgcgactcggaccgatg

SEQ ID NO: 7471 - DNA, 203 bp, synthetic construct
  source 1..203: mol_type = other DNA
ggcgcgccagtccttgatgtgtgtggcatcactgggaatgttcactctgatggttcaccggaggggtctgggcaagactggactgggaaccctagtgctcgcgacggtcacggtcctcctatggatctcagatgtgccagccccaaagatagctggagttctcctaattgcattcctgctgatgatcgcgactcggaccgatg

SEQ ID NO: 7472 - DNA, 203 bp, synthetic construct
  source 1..203: mol_type = other DNA
ggcgcgccagtccttcctcatcccagaacccgaaaagcaaaggagccagacagataaccatttggcaatctttctcgtgtgcgttcttctgttgattggggccgtttccgccaacgaaatggggtggcttgagacaaccaaaaaagacatcggaaagctgttccgctcaagtggagacacacaagagccgactcggaccgatg

SEQ ID NO: 7473 - DNA, 203 bp, synthetic construct
  source 1..203: mol_type = other DNA
ggcgcgccagtcctagtcgacctggcaatcttgggcacccgaggtgagagcagccactgcatgggcaggttatgctgggctcacagtgttcttaacaccacttttccggcatctcatcaccacccagtatgtgagcttttccctgaccgcaattacagcccaggcctcggctttgtttggtctgagcgcgactcggaccgatg

SEQ ID NO: 7474 - DNA, 203 bp, synthetic construct
  source 1..203: mol_type = other DNA
ggcgcgccagtcctggcacatcgaccttgaacatccgtaccggacatggcactaccacggaagctacgaggttcagcccactggatcagccaactcaatggtcaatggcgtggtgcgcctgttgtctaagccatgggacgcaattaccagcgtggtaaccatggcaatgactgacacgaccccctttgcgactcggaccgatg

SEQ ID NO: 7475 - DNA, 203 bp, synthetic construct
  source 1..203: mol_type = other DNA
ggcgcgccagtcctgccaacaaagggtgtttaaagagaaggtggatacacgggccccagacccagcggtgggagttgctcaggcactggacatcacaacaggctggctatggaccttcctggctagaagcaagaaacccaggatgtgcacgcgtgaggagtttatcgcgaaggtcaatagcaacgcggcgactcggaccgatg

SEQ ID NO: 7476 - DNA, 203 bp, synthetic construct
  source 1..203: mol_type = other DNA
ggcgcgccagtcctcattgggcgcggtgtttgatgagcagaaccagtggtcaacggctagagaagcagtggaagacccagccttctggaacctagttgatgaggagcgcaaagcccacctggcaggacgctgtgaaacatgcatctacaacatgatgggaaagcgagagaaaaaactaggagagttcgcgactcggaccgatg

SEQ ID NO: 7477 - DNA, 203 bp, synthetic construct
  source 1..203: mol_type = other DNA
ggcgcgccagtcctacctggagggtggaaacatgtttgctgatgacactgcaggctgggataccagaatcacgagggctgatcttgaaaacgaagccaaagtgatgaacatgatggatggagaacataaacaactcgccaaggctataatcgaattgacctacaggcataaagtagtcaaggtcatgccgactcggaccgatg

SEQ ID NO: 7478 - DNA, 203 bp, synthetic construct
  source 1..203: mol_type = other DNA
ggcgcgccagtcctggcctgcgcggggagggaagacagtcatggacatcatctccagggaggaccagagagggagtggccaagtagtcacctatgcacttaacaccttcaccaacctggcggctcaactagtgagatgcatggagggggaggaactgttgacggagagtgacgtgcacggcttgagcccgactcggaccgatg

SEQ ID NO: 7479 - DNA, 203 bp, synthetic construct
  source 1..203: mol_type = other DNA
ggcgcgccagtcctcgaagaagaagcaagcagtccggaactggttgatccaaaatggaagagagaggctttcgcgcatggctgtcagtggagatgactgcgtggtgaaacccattgatgaccgattcgcgagcgcccttcatttcctcaatggcatggcaaagatcaggaaagatacccaggaatggacgactcggaccgatg

SEQ ID NO: 7480 - DNA, 203 bp, synthetic construct
  source 1..203: mol_type = other DNA
ggcgcgccagtcctaaatccgcaacttgatcggggatgagaagtatgtggactgcatggtgtcccagcacaggttcgaaacaccttcgcccgtgctgttcaccggcgccatctaaacccaaaagaccaaaaaaggacaattgtgtcaggccatggaaacatgccacccaaagcttgtagagggtgcagcgactcggaccgatg

SEQ ID NO: 7481 - DNA, 203 bp, synthetic construct
  source 1..203: mol_type = other DNA
ggcgcgccagtcctcctgcgccaagccccaggaggactgggttaccaaagccgttaggcccccacggcccatttcaggagacagcgcgactcctggaggaaggactagaggttagaggagacccgtggaacatcgctgaggcccaaaccagcccgaagctgtaggactggtggaaggactagaggttacgactcggaccgatg

SEQ ID NO: 7482 - DNA, 203 bp, synthetic construct
  source 1..203: mol_type = other DNA
ggcgcgccagtccttggcttccatgaccgacttcgtgcaccttcccaaaaagaagagtggggtttccataattgggaggatgctggttttttcattcacagcagcggtcagagtcaccctagaaaacggcatgtctttgatgaaaattcaaaaggctgacgttggaaaggtcatcaccatacgcactgcgactcggaccgatg

SEQ ID NO: 7483 - DNA, 203 bp, synthetic construct
  source 1..203: mol_type = other DNA
ggcgcgccagtcctaccgaggtgaaaacaggtgcatagtgcaagcaatggatgtgggcgaggattgtgaggacacgatgaagtatctctgcccagccatcgaaaacccttcagaacctgatgacattgactgttggtgtgacaaggcagacgccatggtgacctacgggagatgttcaaaaactcgaccgactcggaccgatg

SEQ ID NO: 7484 - DNA, 203 bp, synthetic construct
  source 1..203: mol_type = other DNA
ggcgcgccagtcctccccagacaagcccacaatagatttggaactaacatcaacgatagccaaatcgatggcagtgactagaacttactgtgtgcaagctcaagtttcggaactgtccgtggaaactagatgtccaaccatgggcgaagcgcacaattccaagtcaagcgacgctgcctacgtgtgcacgactcggaccgatg

SEQ ID NO: 7485 - DNA, 203 bp, synthetic construct
  source 1..203: mol_type = other DNA
ggcgcgccagtcctagaaaggattcagtgacagaggctggggaaatggatgtgggctctttgggaaaggtagcatggagacatgtgcaaagttttcatgtcagaccaaagcggaagggaggattattcaacgggagaacttggaatataccatccacatgaacgtccacgcctcacaggagaccggcccgactcggaccgatg

SEQ ID NO: 7486 - DNA, 203 bp, synthetic construct
  source 1..203: mol_type = other DNA
ggcgcgccagtcctacagctggcttgtcaatagagactggtttcacgatgtaaaccttccatggataggaggagcagaaggtcattggaaaaacagagagtccttggtggagttcggaaaaacccatgccaccaagcgagaagtgctagccctaggttcacaagaagggacattgcaagtggctctagcgactcggaccgatg

SEQ ID NO: 7487 - DNA, 203 bp, synthetic construct
  source 1..203: mol_type = other DNA
ggcgcgccagtcctcgggcgccatgatagcgaaatttggttcaaatgtggcaactataaatagtggacatctaaagtgcaggctgaaattggacaaactcaaaataaaaggcaccacgtaccacatgtgtaagggctcgtttgctttcacaaaaacgccttctgacacaggccacggcacggtgctgccgactcggaccgatg

SEQ ID NO: 7488 - DNA, 203 bp, synthetic construct
  source 1..203: mol_type = other DNA
ggcgcgccagtccttagaattgacttattctggatcagatgggccatgcagggtgcccatatcaatgtctgtgagcctgagcaacatagagcccgttggtaggatggtaactgtaaaccccatagtgctatcctcttccccccagaaaacaatcatgatcgaagtggaaccaccatttggagactcctcgactcggaccgatg

SEQ ID NO: 7489 - DNA, 203 bp, synthetic construct
  source 1..203: mol_type = other DNA
ggcgcgccagtccttcatcatcgctggaacaggcgaaccaagggcgcactaccactggaggaaatcaggaagcagcattggggcagcgtttgctaccaccatcaagggagccaggcgacttgccgtgatcggtgatgacgcatgggacttcggctctgtgggaggaatattaaactcagttgggaaagcgactcggaccgatg

SEQ ID NO: 7490 - DNA, 203 bp, synthetic construct
  source 1..203: mol_type = other DNA
ggcgcgccagtcctgagtcagatcagttggcaggttggaacatgaaatgtggagagccaatgctagggagataaacgccatccttcttgagaatgaaaagaacctgagtgttgtcgtcttggaaagtgaatactacagaaaggccaagaacctgatgcccataggcgacgaaatgccatttggatggacgactcggaccgatg

SEQ ID NO: 7491 - DNA, 203 bp, synthetic construct
  source 1..203: mol_type = other DNA
ggcgcgccagtcctaatacactgaggactgtgatcagaaagtgattggagccgcggtcaaaggagaattagccgctcatagtgatctaggctattggattgagagcaggtcaaaaaacggtagctgggaacttgaacgtgcttatctactagaatcaaaatcatgcagctggcccgcgacccacacaccgactcggaccgatg

SEQ ID NO: 7492 - DNA, 203 bp, synthetic construct
  source 1..203: mol_type = other DNA
ggcgcgccagtccttttggaatggaggagtggaggaatcagagttgataatacccaagagtagagcaggcccagtgtcacaccacaacaccagaaaaggctaccataaccaaattaaaggaccatggcaccttaccccattggagatcaggtttgaaagttgcccaggaacgaccgttgtgactaccgcgactcggaccgatg

SEQ ID NO: 7493 - DNA, 203 bp, synthetic construct
  source 1..203: mol_type = other DNA
ggcgcgccagtcctctctccatgaggccatggctgcagttggcattctatgtgccctctttggagccctggcggaaactgaggttgacttggctggaccgttggccgcggctgggctcatcgtcatggcttatgttatctcaggcagaagcaatgatctgagtatcaaaaaagttgaggatgtgaaatcgactcggaccgatg

SEQ ID NO: 7494 - DNA, 203 bp, synthetic construct
  source 1..203: mol_type = other DNA
ggcgcgccagtcctggagtgatgaagcagaagtcactggagagagtgtcagctaccacgtgagcctagatgttcgaggagacccaacattaacggaggactcaggacctggactggaaaaggtgctgctgaaggttggattaatggcaattagcgggatttaccccgtggccattcccttcgccttggcgactcggaccgatg

SEQ ID NO: 7495 - DNA, 203 bp, synthetic construct
  source 1..203: mol_type = other DNA
ggcgcgccagtcctgagcttggttctttctagaaaagaggtgcaagcgcgcgggagctctttgggacatcccttccccgcgggaagcaaagccagccaaggttgaggacggagtctaccgcatcttttctaggaagctgtttggcgaaagccaaattggagcaggcgttatggtaaagggcactttcccgactcggaccgatg

SEQ ID NO: 7496 - DNA, 203 bp, synthetic construct
  source 1..203: mol_type = other DNA
ggcgcgccagtcctaagtaaggcacattcaaacgaaacctggaatcttcaaaaccagtgagggagaaatcggggctctcgaccttgactgcatggctggaacttctgggtctccaatcgtgaacaagaacggggaagtggttggactgtatggaaatggtgttctcattaaaggggatcgctacgtgacgactcggaccgatg

SEQ ID NO: 7497 - DNA, 203 bp, synthetic construct
  source 1..203: mol_type = other DNA
ggcgcgccagtccttcttggcccctacccgtgtggtggcttcagaaatgtatgaagccttaagaggagagcctattagatacatgactccagcggtgcagagtgagagaactggaaatgaaatagtcgatttcatgtgtcactcgactttcaccatgaaactgttccaaggagtcagagttcccaattcgactcggaccgatg

SEQ ID NO: 7498 - DNA, 203 bp, synthetic construct
  source 1..203: mol_type = other DNA
ggcgcgccagtcctcacaaagaagaggaaggattggtagaaaccctgaaaagcttggagacatctatgcttacagtggaaatgtgagctcagacaacgaaggacacgtgagctggacagaagctagaatgttgttggacaacgtccatgttcaaggaggagtggtggcccaactgtatacgcctgaaacgactcggaccgatg

SEQ ID NO: 7499 - DNA, 203 bp, synthetic construct
  source 1..203: mol_type = other DNA
ggcgcgccagtccttgttattggaaaacaaccaggaaatagaagtgtggactaggcaaggacaaaggagagtgttgaaaccacggtggttagacggtagaattacttctgaccacttgaacttgaaaagctttaaggaatttgcatccgggaaaaggtcagccttgagcatccttgacttgattgcggcgactcggaccgatg

SEQ ID NO: 7500 - DNA, 203 bp, synthetic construct
  source 1..203: mol_type = other DNA
ggcgcgccagtccttagttctggttagaggaaaaggaccagggaagttggcgtttgggatggtttccatcggcgtgatgacctggctgttgtggtctgcaggagtcgacccagggaagatcgcagctgccgttatcctggtctttctgctgctcgtggtgctgattcctgaacctgaaaagcagaggtcgactcggaccgatg

SEQ ID NO: 7501 - DNA, 203 bp, synthetic construct
  source 1..203: mol_type = other DNA
ggcgcgccagtcctctgtgcaggacaaccagttagctatgctcatgttactcatagcgaccatcctaggaggggtggcagcaaatgaaatgggatggctggaaaaaacaaaagcagatctgtcatgggttgtgagagggaggagctcgaccaccaccccggtggttgaattggacatgaaacctgccacgactcggaccgatg

SEQ ID NO: 7502 - DNA, 203 bp, synthetic construct
  source 1..203: mol_type = other DNA
ggcgcgccagtcctctgcttggacactgtacgcgttggcaacaacgcttctcactcccctttttcagcatttgattgtcactaaatatgccaatatttctttgatggctattgcttcacaagctggaaccctctttagcatggacagtggtatccccttctcctccattgagttgagtgtgcctttgccgactcggaccgatg

SEQ ID NO: 7503 - DNA, 203 bp, synthetic construct
  source 1..203: mol_type = other DNA
ggcgcgccagtccttcgcccttgggtgctggacccagataacaccctgtagtcttattctcgcatgcgtgctcttgtcaacgcactatgcgattttgctccccggcatgcaggcacaggcagctcgagatgcccagagaaggacagcagccggcataatgaagaacgcagtggttgatggcatcgtggcgactcggaccgatg

SEQ ID NO: 7504 - DNA, 203 bp, synthetic construct
  source 1..203: mol_type = other DNA
ggcgcgccagtcctagatgaataccttggaattccaccgatacagacggagccacatcatggaagttgaccgagagccagcgagagctgccctcaagtcaggggactttactagaggagctgccgtatcaagagggagtgccaaattaaggtggatgcatgagcgaggatacatccgactgcatgatacgactcggaccgatg

SEQ ID NO: 7505 - DNA, 203 bp, synthetic construct
  source 1..203: mol_type = other DNA
ggcgcgccagtcctatggcagttatgtcgtgaagccttcaggaagcgcctcctcccaggtgaacggcgtggtcaagctgttgtcgaaaccatgggatgtgagctcagaagtcacgggaatgtccatgaccgacacaaccccctttggccaacagagagtgttcaaggaaaaagttgacaccaaggcgccgactcggaccgatg

SEQ ID NO: 7506 - DNA, 203 bp, synthetic construct
  source 1..203: mol_type = other DNA
ggcgcgccagtcctacacccgaatcaccgagtgtgacttgaggaatgaagcgcacatcatggaatacatggaaaatgaacatcgaaagctagcgcgtgccatctttgaacttacctacaaacacaaagttgtgaaagtgatgagaccaggaaaaggagtaccccttatggacatcatttcacgagaagcgactcggaccgatg

SEQ ID NO: 7507 - DNA, 203 bp, synthetic construct
  source 1..203: mol_type = other DNA
ggcgcgccagtcctaccacttccacagacttcaaatgaaagatggtagagagctagtggtaccatgtcgttctcaagatgagctaattggaagggccagggtgacgcagggtcctggagacctcatgagctcagcatgtctggccaaggcctatgcccagatgtggcagctgctgtatttccacagaacgactcggaccgatg

SEQ ID NO: 7508 - DNA, 203 bp, synthetic construct
  source 1..203: mol_type = other DNA
ggcgcgccagtcctggagccaagcccggaggggatccggcccccgacttccggaggttgccacaccttgtaaatatgtacatacagagtcagatccgaaaggccaccagtttggtgcagaactggtgctatctgtgaacactcccaggaggactgggtaaacaaagccattagggaccatcacggccccgactcggaccgatg

SEQ ID NO: 7509 - DNA, 203 bp, synthetic construct
  source 1..203: mol_type = other DNA
ggcgcgccagtcctgagggggagaagaacgcgaactcccccaaaggactagaggttagaggagacccgtgattagggagatgagggagcccatctcagggaaagctgtaaccctgggggaaggactagaggttagaggagaccctcccacaaagaagcgcaaacacaaaacagcatattgacacctggcgactcggaccgatg

SEQ ID NO: 7510 - DNA, 203 bp, synthetic construct
  source 1..203: mol_type = other DNA
ggcgcgccagtcctgcgagcagacgtgttcggggggctcaccgcccggtaatcctgggagacgtcccaggatcaggggaggaccagggacgcctggtggacccctcggcagaggatcattgtgttctgatcccaccgccgcgtctagagaggcgcgctctgccatctgactctttctcttgcctctaccgactcggaccgatg

SEQ ID NO: 7511 - DNA, 203 bp, synthetic construct
  source 1..203: mol_type = other DNA
ggcgcgccagtcctgacctcgcccagagtcccccaccatgggtgccgccctccgccaagatcgctgttgtctctagtccagagaacactcaaggaccatctgcggggaggccatccgctcctccccgaccccccatctacccggcaacagacgacttgctccttctctctgagcccccgccctatccgcgactcggaccgatg

SEQ ID NO: 7512 - DNA, 203 bp, synthetic construct
  source 1..203: mol_type = other DNA
ggcgcgccagtcctgcggccctgccacctcctctggcccctccggcggtgggaccggcgccgggccaggcgcccgatagttccgatcctgagggaccagccgcggggaccaggagtcgccgtgcccgcagtccggcagacgactcgggtcctgactccactgtgattttgcccctccgagccataggacgactcggaccgatg

SEQ ID NO: 7513 - DNA, 203 bp, synthetic construct
  source 1..203: mol_type = other DNA
ggcgcgccagtcctgcgtactgtaaagagaagggtcactgggacgaggagatcgccccggcgtgtactgggaggtagacttcacagaagtgaagcctggccggtatggaaacaggtatctgctggtattcatagatactttttccggatgggtagaagcttttcctaccaaaactgaaacggccctgacgactcggaccgatg

SEQ ID NO: 7514 - DNA, 203 bp, synthetic construct
  source 1..203: mol_type = other DNA
ggcgcgccagtccttgggtcccgatgataattttctccctgtcttatttactcatttaaaggctttagaagttgtgaggacccagatctgggaccagatcaaggaggtgtacaagcccggtaccgtggcaatcccccacccgttccaggtcggggaccaagtgcttgtcagacgccatcgacccggcacgactcggaccgatg

SEQ ID NO: 7515 - DNA, 203 bp, synthetic construct
  source 1..203: mol_type = other DNA
ggcgcgccagtcctgctgagctggacctgaacatgacccgctcccattctggtggcgagctggagagcttggctcgtgggaaaaggagcctgggttccctgagcgttgccgagccagccatgattgccgagtgcaagacacgaaccgaggtgttcgagatctcccggcgcctcatcgaccgcaccaatcgactcggaccgatg

SEQ ID NO: 7516 - DNA, 203 bp, synthetic construct
  source 1..203: mol_type = other DNA
ggcgcgccagtcctaagacggcactgaaggagaccctcggagcctaagggcatcggcaggagaatatgggcagcgggtctcctgccagcggcctccagcatcttgcccagcagctcaagaagagaaaaaaggactgaactccaccaccatcttcttcccttaactccaaaaacttgaaataagagtgtcgactcggaccgatg

SEQ ID NO: 7517 - DNA, 203 bp, synthetic construct
  source 1..203: mol_type = other DNA
ggcgcgccagtcctgaaagagactgatagggtcgctgtttgaaaaaaactggctccttcctctgcacctggcctgggccacacccaagtgctgtggactggcccgaggggccctgcacgtggccctgagcacctctcagcgtagcctgcctagtccctagacccctagccagctccaaggggaggcaccgactcggaccgatg

SEQ ID NO: 7518 - DNA, 203 bp, synthetic construct
  source 1..203: mol_type = other DNA
ggcgcgccagtcctctccaagcaggccaggctacctcgggggtctagagcgccagaagaaccaaaactggtatgaagggtggttcaatagctccccttggttcactaccctactatcaaccatcgccgggcccctattactcctccttctgttgctcattctcgggccctgcatcatcaataggttagcgactcggaccgatg

SEQ ID NO: 7519 - DNA, 203 bp, synthetic construct
  source 1..203: mol_type = other DNA
ggcgcgccagtcctgcaaggcacggaaattaccctggtaaaaagcccaaagcataggggaagtacagctaaaggtcaagtcgagaaaaacaaggagaacagggccaaacaggatatctgtggtcatgcctgggccggcccagggccaaagacagatggttcccagaaatagatgagtcaacagcagttcgactcggaccgatg

SEQ ID NO: 7520 - DNA, 203 bp, synthetic construct
  source 1..203: mol_type = other DNA
ggcgcgccagtccttctagggtgcccctcaactgtttcaagaactcccacatgaccggagctcacccctggccttatttgaactgaccaattaccttgcttctcgcttctgtacccgcgctttttgctataaaatgagctcagaaactccactccgcgcgccagtcctccgagagactgagtcgcccgcgactcggaccgatg

SEQ ID NO: 7521 - DNA, 203 bp, synthetic construct
  source 1..203: mol_type = other DNA
ggcgcgccagtccttataaaatgagctcagaaactccactccgcgcgccagtcctccgagagactgagtcgcccgggtacctgtgtgttcaataaaacctcttgctatttgcatccgaagccgtggtctcgttgttccttgggagggtctctcctaactgattgactgcccacctcgggggtctctcacgactcggaccgatg

SEQ ID NO: 7522 - DNA, 203 bp, synthetic construct
  source 1..203: mol_type = other DNA
ggcgcgccagtccttttcaaagggggccctggggtctttgtcgcggagatgcgctagcatcttcgcggtaaagaacaccccaggggtaacccctttgaacgcgggactgcgatagtgccaccccacgtctttcccactcctaacccgactcccacctcgggtccaatgaaaggaccaaataattcatccgactcggaccgatg

SEQ ID NO: 7523 - DNA, 203 bp, synthetic construct
  source 1..203: mol_type = other DNA
ggcgcgccagtccttggaatatgacagggttattttctttatcttatttctactttcacgggttctatccgtgaaaagggtacgtgttgccccttccttcttcggagaattcacacggcggtctttccgtctctcgacaagtgtgaatgcaacatgccggaaacggtgaagaaaacagttttctgcggcgactcggaccgatg

SEQ ID NO: 7524 - DNA, 203 bp, synthetic construct
  source 1..203: mol_type = other DNA
ggcgcgccagtcctaagtctagagtgcgcatcgaaacagctgtagcgacctcacagtagcagcggactcccctcttggcgacaagagcctctgcggccaaaagccccgtggataagatccactgctgtgagcggtgcaaccccagcaccctgattcgatgaacgttctttacggaaccagaggatggtcgactcggaccgatg

SEQ ID NO: 7525 - DNA, 203 bp, synthetic construct
  source 1..203: mol_type = other DNA
ggcgcgccagtccttaccattgattcaagatgtgttgatggaaccacaaggcaactccaactcctcggacaaaaacaattctcagtcgtcaggtaatgaaggtgtcattattaacaattattactcaaaccaatatcaaaattcaattgacctttccgctaatgctaacggcgttggcaaagaaaacacgactcggaccgatg

SEQ ID NO: 7526 - DNA, 203 bp, synthetic construct
  source 1..203: mol_type = other DNA
ggcgcgccagtcctaagtaccatacgtgaacatttgcccaacatcatcctggacacagcatgcaaattggaccattgtggtggctgttctttcccctttgcagtacgctgcaggctcagccacggaagtggacattactctgtccatacaacctgtgaaaccagtattcaatggcttaagacactcagcgactcggaccgatg

SEQ ID NO: 7527 - DNA, 203 bp, synthetic construct
  source 1..203: mol_type = other DNA
ggcgcgccagtcctttgtctttacgggtagtgctatgacaaaaggaaaattcttgatatcgtacacaccacctggtgcagggaaaccaacgactagagaccaagccatgcaagccacctatgctatttgggatctaggattgaattctagttacaacttcactgtccctttcatttcccccacacattcgactcggaccgatg

SEQ ID NO: 7528 - DNA, 203 bp, synthetic construct
  source 1..203: mol_type = other DNA
ggcgcgccagtcctataactctttttctttggaatctgcttcaggagttatgaacaatattctcttgacaccattgcctagtgacagactcaaggaaaacgagtttggtttagatgagcaacatagatggttaagctttcaatcagcaactagctcaacccccccttatagaactaaacaagactggacgactcggaccgatg

SEQ ID NO: 7529 - DNA, 203 bp, synthetic construct
  source 1..203: mol_type = other DNA
ggcgcgccagtcctcacacatgtggctggttggagctggttctacgaatcaaatttcgtttgttctgccttatacttctccactatctgtcctacctgctgtttggtttaacggattctctgacttttctaacacctcacgctttggtgttgctccaacatctgacttcggaagattgtttgtacaggcgactcggaccgatg

SEQ ID NO: 7530 - DNA, 203 bp, synthetic construct
  source 1..203: mol_type = other DNA
ggcgcgccagtccttttacgcaatgcactcggctggtggtggcggtatggctgctgctacgataatcactcaggaaatggttgaagctgctgagaaggccttagattgtctaactcctcaaggtgcaatagttgaaattggtattgatacggttgtgcacgttccgcgaaaaaccaaactacgcaggacgactcggaccgatg

SEQ ID NO: 7531 - DNA, 203 bp, synthetic construct
  source 1..203: mol_type = other DNA
ggcgcgccagtcctcagtagcgcacccctgcttccaaccaaagtttgaacctgccgtcctttcacgttacgaccctaggactacaaaagacgtagaccaggtcgctttctctaagcacacaactaatttggaagagcttccatctgttttctccatggttgcaaaagaatatgctaatagagtgtttacgactcggaccgatg

SEQ ID NO: 7532 - DNA, 203 bp, synthetic construct
  source 1..203: mol_type = other DNA
ggcgcgccagtcctgatcggatcgcaacgtgttacccaggaatccacttgggtgtacgcggccgttctgacgttggaattctgtagatgaaagttagctaggagcttttaattggaaatgagaacaaaaaaaaaaaaaaaaaaaaaaaaaaaaaaaaaaaaaaaaaaaaaaaaaaaaaaaaaaaaaaacgactcggaccgatg

SEQ ID NO: 7533 - DNA, 203 bp, synthetic construct
  source 1..203: mol_type = other DNA
ggcgcgccagtcctggtgttccagactagttcctgaggtaccaagttgtgaggggctatgggaaaacccctttgatccacactgcctgatagggtcgcggctggtcgagtcccatacactataataccagttgactttcatgcaatggacactctaactaaaaacattgaagatgaaactgtcaagatcgactcggaccgatg

SEQ ID NO: 7534 - DNA, 203 bp, synthetic construct
  source 1..203: mol_type = other DNA
ggcgcgccagtcctacaatgtcctcggcccttcaacgaccagggtaagaagaaaccacggcggaggccaatccataaaccaaagagccctcctcaggaatctcgcatcatcatccagcctgggccaggagctgcaaatctatccaattccagtgtggtcaccatggctgagagtgtggctctagctaacgactcggaccgatg

SEQ ID NO: 7535 - DNA, 203 bp, synthetic construct
  source 1..203: mol_type = other DNA
ggcgcgccagtccttgaaggtactgcagttgactattcaacagctgggtgtgcatcatctgtggatgatatagtcatggtgcttagacgctggcagattgtgggtgattttcagtgggctaacacagtgacccctggcaacaggattagtaggtttcaggtggtttttaatcgaatgccaacttttgccgactcggaccgatg

SEQ ID NO: 7536 - DNA, 203 bp, synthetic construct
  source 1..203: mol_type = other DNA
ggcgcgccagtccttacgccagccaccctcatcttgcccttcactaataccacatggcgaaaaagcacacgtgaaaattatggctatataacctggcatgttgtgaatcgcctgacagtcaactcaacatccccatccacaattagctgtgtcattttgatgcgagttggtaaggattttcagtttaccgactcggaccgatg

SEQ ID NO: 7537 - DNA, 203 bp, synthetic construct
  source 1..203: mol_type = other DNA
ggcgcgccagtcctagctcccctgtatgggaacctgcagatggccgccaatgatcagggtgattccaatcagcttggtgacgatgaaccagtgtgttttctcaattttgagactgcaaatgtgccaatacaaggggagtcgcacaccttggtgaaacatttttttggccgtcaatggctggttcgtaccgactcggaccgatg

SEQ ID NO: 7538 - DNA, 203 bp, synthetic construct
  source 1..203: mol_type = other DNA
ggcgcgccagtccttgttcaacatactggtgaggtacaagagatggatttgccagtgcctgaccggggtcatgcatctctactgcgcttctttgcctatttctctggagaagtgattctgaccattgtcaataatggaacaacaccctgcatggttgcacactcttatacaacagacaatctcacttccgactcggaccgatg

SEQ ID NO: 7539 - DNA, 203 bp, synthetic construct
  source 1..203: mol_type = other DNA
ggcgcgccagtccttgaatatgctgtcactgccatggggggtattcttatcccagcgaactctgccaagaatattagtatcccattttattctgtcacacctctacgccccacccgacccatgccagcatctcaggggggtggcttgacttttggcaggttgtatatctggacacaatctgggagcatcgactcggaccgatg

SEQ ID NO: 7540 - DNA, 203 bp, synthetic construct
  source 1..203: mol_type = other DNA
ggcgcgccagtcctccttcgcccatttcgcttctgtttgagacttaaaacacttgcctttgagctccatttggaaattgaatcagaccaatttcgaaatgtcagagacctcactactgagggagttgaacccaatccaggccctattatggttgttggtaaatcaggatccggcaaaagtgtattgtgcgactcggaccgatg

SEQ ID NO: 7541 - DNA, 203 bp, synthetic construct
  source 1..203: mol_type = other DNA
ggcgcgccagtcctctatatttgtgaacataccactcgtcctaagcaccaaaaattggttgagatggtctctggcaccttgaatcaattaaatggcatctccagtgctaaagatttgtgcttgagattgcagcatgtcttgaataagcttcaccaggtcaattttgagccagaattggaatggacacacgactcggaccgatg

SEQ ID NO: 7542 - DNA, 203 bp, synthetic construct
  source 1..203: mol_type = other DNA
ggcgcgccagtcctccgacccgaacctcttggtatttggatttcaggtgggccaggtgttgggaagagttttttatccaactatatagttaaacaaatagcaaagaaaaggcattggaagtcttatgcaaatccaacagggtcaaagcatatggatgggtatgtttcacaggaaatccatgtttttgacgactcggaccgatg

SEQ ID NO: 7543 - DNA, 203 bp, synthetic construct
  source 1..203: mol_type = other DNA
ggcgcgccagtccttcctgacgcactagagcgtaggtttccaatccgactcaatattaggccccttcagaaatacaatcataaaggtaggttggatgttgctactgcaatgagggatggcagtctacagaatggcacctgctgggaacgtgacattggtgggttgggccttgaacactggaatccaatcgactcggaccgatg

SEQ ID NO: 7544 - DNA, 203 bp, synthetic construct
  source 1..203: mol_type = other DNA
ggcgcgccagtcctcaatggagacatacttgtagatgagatcctctcagagctgcaggttagacatgaagtggccaattttatgaatcagggcaaggtgcgtaggctaagtgatttggacacaatgtttgaagaattggatgaattaaaacttgattttgattttgaccgcctggaagaacaggctagcgactcggaccgatg

SEQ ID NO: 7545 - DNA, 203 bp, synthetic construct
  source 1..203: mol_type = other DNA
ggcgcgccagtccttgccacaggattggcagttggtggcaagtatgtcttaacttttggacattctaagtttactcaattggactccatcagggatatggtctttaattcacctgccaaaggaacaccaattacttatgatgggctaccaacagatctccaactcttggattgtgacataccccaccacgactcggaccgatg

SEQ ID NO: 7546 - DNA, 203 bp, synthetic construct
  source 1..203: mol_type = other DNA
ggcgcgccagtcctatttaaagatgtgtctaagctcatagccacagatgattaccgaggtaatggctggttggtgtggaaagatgatgatcaatatatgattcaagaggtcactaaaatcagaccctttggacaaactacaactgcttctggcacaacatcatgccaaacatacatttataattgtaacgactcggaccgatg

SEQ ID NO: 7547 - DNA, 203 bp, synthetic construct
  source 1..203: mol_type = other DNA
ggcgcgccagtcctctacatttgttccaagctgaaagctcgctgtcctgtcttggaaatacaaccatggggtgttgccaggatgcgagcatatactgcctgcatgattatataacctgcaggcatagcagttccagggatctgctgtagtcaattaaaacctgggctcttcgtggttacggggttttccgactcggaccgatg

SEQ ID NO: 7548 - DNA, 203 bp, synthetic construct
  source 1..203: mol_type = other DNA
ggcgcgccagtcctacttttagaatagttttgctaatcaattccccgtctaggttgatttagttagtatttagtataagaccaatggtgatataaagaccacacctaatctccactttcggtgtgtgaccctaagccattggacttctttactttactattcctccccaccctaaaaaaaaaaaaaaacgactcggaccgatg

SEQ ID NO: 7549 - DNA, 203 bp, synthetic construct
  source 1..203: mol_type = other DNA
ggcgcgccagtcctgccgggaagactgggtcctttcttggataaacccactctatgcccggccatttgggcgtgcccccgcaagactgctagccgagtagcgttgggttgcgaaaggccttgtggtactgcctgatagggtgcttgcgagtgccccgggaggtctcgtagaccgtgcaccatgagcaccgactcggaccgatg

SEQ ID NO: 7550 - DNA, 203 bp, synthetic construct
  source 1..203: mol_type = other DNA
ggcgcgccagtcctaaatcctaaacctcaaagaaaaaccaaaagaaacaccaaccgtcgcccacaagacgttaagtttccgggcggcggccagatcgttggcggagtatacttgttgccgcgcaggggccccaggttgggtgtgcgcgcgacaaggaagacttcggagcggtcccagccacgtggaagcgactcggaccgatg

SEQ ID NO: 7551 - DNA, 203 bp, synthetic construct
  source 1..203: mol_type = other DNA
ggcgcgccagtcctgggtaaggtcatcgataccctaacgtgcggctttgccgacctcatggggtacatccctgtcgtgggcgccccgctcggcggcgtcgccagagctctcgcgcatggcgtgagagtcctggaggacggggttaattttgcaacagggaacttacccggttgctccttttctatcttcgactcggaccgatg

SEQ ID NO: 7552 - DNA, 203 bp, synthetic construct
  source 1..203: mol_type = other DNA
ggcgcgccagtcctatctcagtgctggataccggtctcaccgaatgtggccgtgcagcggcccggcgccctcacgcagggcttgcggacgcacatcgacatggttgtgatgtccgccacgctctgctctgccctctacgtgggggacctctgcggtggggtgatgctcgcagcccaaatgttcattgtcgactcggaccgatg

SEQ ID NO: 7553 - DNA, 203 bp, synthetic construct
  source 1..203: mol_type = other DNA
ggcgcgccagtcctctcgccgcagcaccactggtttgtccaagactgcaattgctccatctaccctggtaccatcactggacaccgcatggcatgggacatgatgatgaactggtcgcccacggctaccatgatcttggcgtacgcgatgcgtgtccccgaggtcattatagacatcattagcggggccgactcggaccgatg

SEQ ID NO: 7554 - DNA, 203 bp, synthetic construct
  source 1..203: mol_type = other DNA
ggcgcgccagtcctgttgtgccccacggactgttttaggaagcatcctgataccacttacctcaaatgcggctctgggccctggctcacgccaaggtgcctgatcgactacccctacaggctctggcattacccctgcacagttaactataccatcttcaaaataaggatgtatgtgggaggggttgacgactcggaccgatg

SEQ ID NO: 7555 - DNA, 203 bp, synthetic construct
  source 1..203: mol_type = other DNA
ggcgcgccagtcctgcacaggctcacggctgcatgcaatttcactcgtggggatcgttgcaacttggaggacagagacagaagtcaactgtctcctttgttgcactccaccacggaatgggccattttaccttgctcttactcggacctgcccgccttgtcgactggtcttctccacctccaccaaaacgactcggaccgatg

SEQ ID NO: 7556 - DNA, 203 bp, synthetic construct
  source 1..203: mol_type = other DNA
ggcgcgccagtcctcatcgtggacgtacaattcatgtatggcctatcacctgccctcacaaaatacatcgtccgatgggagtgggtaatactcttattcctgctcttagcggacgccagggtttgcgcctgcttatggatgctcatcttgttgggccaggccgaagcagcactagagaagctggtcatcgactcggaccgatg

SEQ ID NO: 7557 - DNA, 203 bp, synthetic construct
  source 1..203: mol_type = other DNA
ggcgcgccagtcctcgcatctgtgcatggccagataggagcggctctgctggtaatgatcactctctttactctcacccccgggtataagacccttctcagccggtttttgtggtggttgtgctatcttctgaccctgggggaagctatggtccaggagtgggcaccacctatgcaggtgcgcggtggcgactcggaccgatg

SEQ ID NO: 7558 - DNA, 203 bp, synthetic construct
  source 1..203: mol_type = other DNA
ggcgcgccagtcctccgtgatggcatcatatgggccgtcgccatattctacccaggtgtggtgtttgacataaccaagtggctcttggcggtgcttgggcctgcttacctcctaaaaggtgctttgacgcgcgtgccgtacttcgtcagggctcacgctctactgaggatgtgcaccatggcaaggcacgactcggaccgatg

SEQ ID NO: 7559 - DNA, 203 bp, synthetic construct
  source 1..203: mol_type = other DNA
ggcgcgccagtcctctccagtgctgagggggacttagtagggtggcccagcccccctgggactaaatctttggagccgtgcacgtgtggagcggtcgacctgtacctggtcacgcggaacgctgatgtcatcccggctcgaagacgcggggacaaacggggagcgctactctccccgagacctctttccgactcggaccgatg

SEQ ID NO: 7560 - DNA, 203 bp, synthetic construct
  source 1..203: mol_type = other DNA
ggcgcgccagtcctcaccttgaaggggtcctcaggaggcccggtgctatgccccaggggccacgctgtcggagtcttccgggcagctgtgtgctctcggggcgtggctaagtccatagatttcatccccgttgagacactcgacatcgtcacgcggtcccccacctttagtgacaacagcacaccacccgactcggaccgatg

SEQ ID NO: 7561 - DNA, 203 bp, synthetic construct
  source 1..203: mol_type = other DNA
ggcgcgccagtccttgatcaagcagagacagctggggtcagactaactgtgctggctacagctacgccccctgggtcagtgacaaccccccaccccaacatagaggaggtggcccttgggcaggagggcgagatccccttctatgggagggcgattcccctgtcttacatcaagggaggaagacatctcgactcggaccgatg

SEQ ID NO: 7562 - DNA, 203 bp, synthetic construct
  source 1..203: mol_type = other DNA
ggcgcgccagtcctgatcttctgccattcaaagaaaaagtgtgacgagctcgcggcggcccttcggggtatgggcttgaactcagtggcatactacagagggttggacgtctccgtaataccaactcagggagacgtagtggtcgtcgccaccgacgccctcatgacagggtatactggggactttgacgactcggaccgatg

SEQ ID NO: 7563 - DNA, 203 bp, synthetic construct
  source 1..203: mol_type = other DNA
ggcgcgccagtcctagcctcaggaatgtttgacagtgtagtgctctgtgagtgctacgacgcaggggccgcatggtatgagctcacaccatcggagaccaccgtcaggctcagggcgtatttcaacacgcccggtttgcctgtgtgccaagaccatcttgagttttgggaggcagttttcaccggcctcgactcggaccgatg

SEQ ID NO: 7564 - DNA, 203 bp, synthetic construct
  source 1..203: mol_type = other DNA
ggcgcgccagtcctcacacacatagatgcccacttcctttcccaaacaaagcaatcgggggaaaatttcgcatacttaacagcctaccaggctacagtgtgcgctagggccaaagccccccccccgtcctgggacgtcatgtggaagtgtttgactcgactcaagcccacactcgtgggccccacacccgactcggaccgatg

SEQ ID NO: 7565 - DNA, 203 bp, synthetic construct
  source 1..203: mol_type = other DNA
ggcgcgccagtcctcatcatcggccgcttgcacattaaccagcgagccgtcgttgcgccggacaaggaggtcctctatgaggcttttgatgagatggaggaatgtgcctctagggcggctctcattgaagaggggcagcggatagccgagatgctgaagtccaagatccaaggcttattgcagcaagccgactcggaccgatg

SEQ ID NO: 7566 - DNA, 203 bp, synthetic construct
  source 1..203: mol_type = other DNA
ggcgcgccagtcctcaccagtccgctgtcaacaagcaccactatccttctcaacattttggggggctggctagcatcccaaattgcaccacccgcgggggccactggcttcgttgtcagtggcctagtgggagctgccgtaggcagtataggcttaggtaaggtgctagtggacatcctggcagggtacgactcggaccgatg

SEQ ID NO: 7567 - DNA, 203 bp, synthetic construct
  source 1..203: mol_type = other DNA
ggcgcgccagtccttggtgcgggcatttcgggggctctcgtcgcattcaagatcatgtctggcgagaagccctccatggaggatgtcgtcaacttgctgcctggaattctgtctccgggtgccttggtagtgggagtcatctgcgcggccattctgcgccgacacgtgggaccgggggaaggcgccgtcgactcggaccgatg

SEQ ID NO: 7568 - DNA, 203 bp, synthetic construct
  source 1..203: mol_type = other DNA
ggcgcgccagtcctccaatggatgaatagactcattgcctttgcttccagaggaaatcacgtcgcccccacccactacgtgacggagtcggatgcgtcgcagcgtgtgacccaactacttggctcccttaccataaccagcctgctcagaagactccacaactggattactgaggactgccccatccccgactcggaccgatg

SEQ ID NO: 7569 - DNA, 203 bp, synthetic construct
  source 1..203: mol_type = other DNA
ggcgcgccagtcctatgcggcggctcgtggctccgcgatgtgtgggactgggtttgcaccatcctaacagactttaaaaattggctgacctccaaattattcccaaagatgcccggcctcccctttgtctcctgtcaaaaggggtacaagggcgtgtgggccggcactggcatcatgaccacacggtgcgactcggaccgatg

SEQ ID NO: 7570 - DNA, 203 bp, synthetic construct
  source 1..203: mol_type = other DNA
ggcgcgccagtcctctcagagtacgcggaggtgacgcagcacgggtcataccactacataacaggactcaccactgataacttgaaagtcccctgccaactaccctctcccgagttcttttcctgggtggacggagtgcagatccataggtttgcccccacaccgaagccgtttttccgggatgaggtcgactcggaccgatg

SEQ ID NO: 7571 - DNA, 203 bp, synthetic construct
  source 1..203: mol_type = other DNA
ggcgcgccagtcctgagccagctatcggcaccatcgctgcgagccacctgcaccacccacggcaaagcctatgatgtggacatggtggatgctaacctgttcatggggggcgatgtgactcggatagagtctgggtccaaagtggtcgttctggactctctcgacccaatggtcgaagaaaggagcgacgactcggaccgatg

SEQ ID NO: 7572 - DNA, 203 bp, synthetic construct
  source 1..203: mol_type = other DNA
ggcgcgccagtcctccttgagccttcgataccatcagaatacatgctccccaagaagaggttcccaccagctttaccggcctgggcacggcctgattacaacccaccgcttgtggaatcgtggaaaaggccagattaccaaccggccactgttgcgggctgtgctctccctcctcctaggaaaacccccgactcggaccgatg

SEQ ID NO: 7573 - DNA, 203 bp, synthetic construct
  source 1..203: mol_type = other DNA
ggcgcgccagtcctggccctttcggagacaggttccatctcttccatgccccccctcgagggggagcttggagatccagacctggagcctgagcaggtagagccccaaccccccccccaggggggggtggcagctcccggctcggactcggggtcctggtctacttgctccgaggaggacgactccgtcgactcggaccgatg

SEQ ID NO: 7574 - DNA, 203 bp, synthetic construct
  source 1..203: mol_type = other DNA
ggcgcgccagtcctgaagatggccctttatgacattacacaaaaacttcctcaggcggtgatgggggcttcttatggattccagtattcccccgctcagcgggtagagtttctcttgaaagcatgggcggaaaagaaggaccctatgggtttttcgtatgatacccgatgctttgactcaaccgtcaccgactcggaccgatg

SEQ ID NO: 7575 - DNA, 203 bp, synthetic construct
  source 1..203: mol_type = other DNA
ggcgcgccagtccttagcatggggaacaccatcacatgctacgtgaaagccttagcggcttgtaaagctgcagggataatcgcgcccacaatgctggtatgcggcgatgacttggttgtcatctcagaaagccaggggaccgaggaggacgagcggaacctgagagccttcacggaggctatgaccagcgactcggaccgatg

SEQ ID NO: 7576 - DNA, 203 bp, synthetic construct
  source 1..203: mol_type = other DNA
ggcgcgccagtcctcgtttgcggtcgatatctcttcaattgggcggtgaagaccaagctcaaactcactccattgccggaagcgcgcctcctggatttatccagctggttcaccgtcggcgccggcgggggcgacatttatcacagcgtgtcgcgtgcccgaccccgcttattgctctttggcctactcgactcggaccgatg

SEQ ID NO: 7577 - DNA, 203 bp, synthetic construct
  source 1..203: mol_type = other DNA
ggcgcgccagtcctctggggtgaccgggtcctttcttggagcaacccgctcaatacccagaaatttgggcgtgcccccgcgagatcactagccgagtagtgttgggtcgcgaaaggccttgtggtactgcctgatagggtgcttgcgagtgccccgggaggtctcgtagaccgtgcaacatgagcacacgactcggaccgatg

SEQ ID NO: 7578 - DNA, 203 bp, synthetic construct
  source 1..203: mol_type = other DNA
ggcgcgccagtcctggtaaagtcatcgataccctaacgtgcggattcgccgacctcatggggtacatcccgctcgtcggcgctcctgtaggaggcgtcgcaagagccctcgcgcatggcgtgagggcccttgaagacgggataaatttcgcaacagggaacttgcccggttgctccttttctatcttccgactcggaccgatg

SEQ ID NO: 7579 - DNA, 203 bp, synthetic construct
  source 1..203: mol_type = other DNA
ggcgcgccagtcctcttcttgctctgttctcttgcttaattcatccagcagccagtctagagtggcggaatacgtctggcctctacgtccttaccaacgactgttccaatagcagtattgtgtatgaggccgatgatgtcattctgcacacacccggctgtgtaccttgtgtccaggacggcaatacacgactcggaccgatg

SEQ ID NO: 7580 - DNA, 203 bp, synthetic construct
  source 1..203: mol_type = other DNA
ggcgcgccagtcctagacctcgacgccatcaaacggtccagacctgtaactgctcgctgtacccaggccatctttcaggacatcgaatggcttgggatatgatgatgaattggtcccccgctgtgggtatggtggtggcgcatgtcctgcgtttaccccagaccttgttcgacataatggccggggcccgactcggaccgatg

SEQ ID NO: 7581 - DNA, 203 bp, synthetic construct
  source 1..203: mol_type = other DNA
ggcgcgccagtcctggatggggccccttaacagatgctaacatcaccggtccttctgatgacagaccatactgctggcactacgcacctagaccttgtgacattgtcccggcatcaagtgtctgcggccctgtgtactgcttcacaccatcgccagtggtcgtaggcactactgatgccaggggcgtgcgactcggaccgatg

SEQ ID NO: 7582 - DNA, 203 bp, synthetic construct
  source 1..203: mol_type = other DNA
ggcgcgccagtcctgatcttttctgccccactgactgcttcaggaaacatcccgagaccacgtacagccggtgtggtgcagggccctggttgacacctcgttgcatggttgactacccataccggctttggcattacccatgtacagtcgatttcagattgttcaaggtgaggatgtttgtgggtgggcgactcggaccgatg

SEQ ID NO: 7583 - DNA, 203 bp, synthetic construct
  source 1..203: mol_type = other DNA
ggcgcgccagtcctgtcacgctgaacgccgtcgctgctgctgggacacatggtatcggctggtacctggtagctttttgcgcggcgtggtacgtgcggggtaaactcgtcccgctggtgacctacagcctgacgggtctttggtccctagcattgctcgtcctcttgctcccccaacgtgcgtatgctcgactcggaccgatg

SEQ ID NO: 7584 - DNA, 203 bp, synthetic construct
  source 1..203: mol_type = other DNA
ggcgcgccagtcctgggagtagggatggtgtcatcctgctaacaagcctgctttatccatccttaatttttgacatcactaagctgctgatggcagtattgggcccattatacttaatacaggctaccattactaccaccccctactttgtgcgtgcgcatgtactggtccgcctttgcatgctcgtgcgactcggaccgatg

SEQ ID NO: 7585 - DNA, 203 bp, synthetic construct
  source 1..203: mol_type = other DNA
ggcgcgccagtcctcgctccgtgataggggggaaatacttccagatgatcatactgagcattggcagatggttcaacacctacctatacgaccacctagcgccaatgcaacactgggccgctgctggtctcaaagacctagcagtggccactgaacctgtaatatttagtcccatggaaatcaaggtccgactcggaccgatg

SEQ ID NO: 7586 - DNA, 203 bp, synthetic construct
  source 1..203: mol_type = other DNA
ggcgcgccagtcctatcacctggggtgcggatacagcggcttgcggagatattctttgcgggctgcccgtctctgcacgattaggccgtgaggtgttgttgggacctgctgatgactatcgggagatgggctggcgtctgttggccccgattacagcatacgcccagcaaactaggggccttcttgggcgactcggaccgatg

SEQ ID NO: 7587 - DNA, 203 bp, synthetic construct
  source 1..203: mol_type = other DNA
ggcgcgccagtcctactattgtgactagcttgactggcagagacaagaacgtggtgaccggtgaagtgcaggtgctttctacggctacccagaccttcctaggtacaacagtagggggggttatatggactgtttatcatggagcaggttcgagaacgctcgcgggcgccaaacatcccgcgctccaacgactcggaccgatg

SEQ ID NO: 7588 - DNA, 203 bp, synthetic construct
  source 1..203: mol_type = other DNA
ggcgcgccagtcctctcgcctgtctcaagggttcctctggaggtcccgttatgtgcccttcggggcatgttgcggggatctttagggctgctgtgtgcaccagaggtgtagcaaaatccctacagttcataccagtggaaacccttagcacgcaggctaggtctccatctttctctgacaattcaactcgactcggaccgatg

SEQ ID NO: 7589 - DNA, 203 bp, synthetic construct
  source 1..203: mol_type = other DNA
ggcgcgccagtcctcctcctgctgttccacagagctatcaagtaggatacctccatgccccgaccggcagcggtaagagcacaaaggtcccggccgcttatgtagcacaaggatataatgtcctcgtactaaatccatcggtggcggccacattaggcttcggctccttcatgtcgcgtgcctatgggcgactcggaccgatg

SEQ ID NO: 7590 - DNA, 203 bp, synthetic construct
  source 1..203: mol_type = other DNA
ggcgcgccagtcctttcgattctgtcatagattgcaacgtggctgttgaacagtacgttgacttcagcctggaccccaccttttccattgagacccgcactgctccccaagatgcggtttcccgcagccaacgtcgcggccgaacgggtcgaggtagactcggtacgtaccgatatgtcgcctccggtcgactcggaccgatg

SEQ ID NO: 7591 - DNA, 203 bp, synthetic construct
  source 1..203: mol_type = other DNA
ggcgcgccagtcctacgccccttctatatcggctggggcctgtccaaaatgaaacctgcttgacacaccccatcacaaaatacctcatggcatgcatgtcagccgatctggaagtaaccaccagcacctgggtgttgctcggaggggtcctcgcagccctagcggcctactgcttgtcagtcggctgccgactcggaccgatg

SEQ ID NO: 7592 - DNA, 203 bp, synthetic construct
  source 1..203: mol_type = other DNA
ggcgcgccagtccttcagtcaccagtcccctgacgaccaaccaaactatgttttttaacatactcggggggtgggttgccacccatttggcagggccccagagctcctccgcgttcgtggtaagcggcttggcaggcgctgccatagggggtataggcctgggcagggtcttgcttgacatcctggcacgactcggaccgatg

SEQ ID NO: 7593 - DNA, 203 bp, synthetic construct
  source 1..203: mol_type = other DNA
ggcgcgccagtcctggatacggagctggtgtctcaggcgccttggtagcttttaagatcatgggaggagaatgccccactgctgaggacatggtcaacctgttgcccgccatactatctccgggtgctctcgtcgtcggtgtgatatgcgcagccatactgcgccgacacgtaggacctggggagggacgactcggaccgatg

SEQ ID NO: 7594 - DNA, 203 bp, synthetic construct
  source 1..203: mol_type = other DNA
ggcgcgccagtcctgcggtacagtggatgaacaggctcatcgcgttcgcatcccggggcaaccacgtctcaccgacgcactatgttcccgagagcgatgctgcggcaagggtcaccgcattgctgagttctctaactgtcacaagtctgctccggcggttacaccagtggatcaatgaagactacccacgactcggaccgatg

SEQ ID NO: 7595 - DNA, 203 bp, synthetic construct
  source 1..203: mol_type = other DNA
ggcgcgccagtcctagcccttgtagcgacgattggctacgtaccatctgggactgggtttgctcggtgttggccgacttcaaggcatggctctctgctaagattatgccagcgctccctgggctgcccttcatttcctgtcaaaagggatacaagggcgtgtggcggggggacggtgtgatgtcaacacgactcggaccgatg

SEQ ID NO: 7596 - DNA, 203 bp, synthetic construct
  source 1..203: mol_type = other DNA
ggcgcgccagtcctgctgccaacagctacgttgaggtgcgtcgggtgggggacttccattacatcacgggggccacagaagatgagctcaagtgtccgtgccaagtgccggctgctgagttctttactgaagtggatggagtgagacttcaccgctacgcccctccatgtaagcccctgttgagagatcgactcggaccgatg

SEQ ID NO: 7597 - DNA, 203 bp, synthetic construct
  source 1..203: mol_type = other DNA
ggcgcgccagtccttccgccagccaactatcagctccgtcgttgaaggccacttgccagacgcataggcctcatccagacgctgagctagtggacgccaacttgttatggcggcaagagatgggcagcaacattacacgggtggagtctgagacaaaggttgtggttcttgattcgttcgagcctctgcgactcggaccgatg

SEQ ID NO: 7598 - DNA, 203 bp, synthetic construct
  source 1..203: mol_type = other DNA
ggcgcgccagtcctccacggggcgctccaccggtgcctccccctcggaggaaaaggacaattcagctggacggctctaatgtgtccgcggcgctagccgcgctagctgaaaaatcattcccgtcctcgaaaccacaggaagagaatagctcatcctccggggtcgacacacagtccagcactacttcccgactcggaccgatg

SEQ ID NO: 7599 - DNA, 203 bp, synthetic construct
  source 1..203: mol_type = other DNA
ggcgcgccagtcctaaggtgcccccttctccgggaggggagtccgactcagagtcatgctcgtctatgcctcctctcgagggagagccgggcgacccggacttgagttgcgactcttggtccaccgttagtgacagcgaggagcagagcgtggtctgctgctctatgtcgtattcttggaccggcgcccgactcggaccgatg

SEQ ID NO: 7600 - DNA, 203 bp, synthetic construct
  source 1..203: mol_type = other DNA
ggcgcgccagtcctttaaaggaggtaaaggagcgagcgtctagggtaaaggctcgcatgctcaccatcgaggaagcgtgcgcgctcgtccctcctcactctgcccgatcgaagttcgggtatagtgcgaaggacgttcgctccttgtccagcagggccattaaccagatccgctccgtctgggaggaccgactcggaccgatg

SEQ ID NO: 7601 - DNA, 203 bp, synthetic construct
  source 1..203: mol_type = other DNA
ggcgcgccagtcctttgctggaagacaccacaactccaattccaaccaccatcatggcgaagaacgaggtgttttgcgtggaccccgctaaagggggccgcaagcccgctcgcctcattgtgtaccctgacctgggggtgcgtgtctgtgagaaacgcgccctgtatgacgtgatacagaagttgtcacgactcggaccgatg

SEQ ID NO: 7602 - DNA, 203 bp, synthetic construct
  source 1..203: mol_type = other DNA
ggcgcgccagtcctacagcggctgcaaaggccgcaaacctccggaacccggactttcttgtctgcggagatgatttggtcgtggtggctgagagtgatggcgtcgatgaggatagagcagccctgagagccttcacggaggctatgaccaggtattctgctccacccggagatgctccacaggccactcgactcggaccgatg

SEQ ID NO: 7603 - DNA, 203 bp, synthetic construct
  source 1..203: mol_type = other DNA
ggcgcgccagtcctaccaagaccaacctcactccattgccagccgctggccagttggatttgtccagctggtttacggttggtgtcggcgggaacgacatttatcacagcgtgtcgcgtgcccgaacccgccatttgctgctttgcctactcctactaacagtaggggtaggcatctttctcttgccacgactcggaccgatg

SEQ ID NO: 7604 - DNA, 203 bp, synthetic construct
  source 1..203: mol_type = other DNA
ggcgcgccagtcctacggttggtgtcggcgggaacgacatttatcacagcgtgtcgcgtgcccgaacccgccatttgctgctttgcctactcctactaacagtaggggtaggcatctttctcttgccagctcgatgagctggtaagataacactccatttcttttttgttttttttttttttttttttcgactcggaccgatg

SEQ ID NO: 7605 - DNA, 203 bp, synthetic construct
  source 1..203: mol_type = other DNA
ggcgcgccagtcctttcccgggtggtggccagatcgttggcggagtttacttgttgccgcgcaggggccccagattgggtgtgcgcgcgactcggaagacttcggagcggtcgcaacctcgtggaagacgccaacctatccccaaggcgcgtcgacccgagggaaggtcctgggcacaaccaggatatcgactcggaccgatg

SEQ ID NO: 7606 - DNA, 203 bp, synthetic construct
  source 1..203: mol_type = other DNA
ggcgcgccagtcctgtaggcgcccccgtgggtagcgtcgccagggccctggcacatggtgtcagggctttggaggacgggatcaattatgcaacagggaatctccccggttgctccttttctatcttcctcttggcacttctttcgtgcctgactgtccccgcttcggccgttaactatcgcaatgtccgactcggaccgatg

SEQ ID NO: 7607 - DNA, 203 bp, synthetic construct
  source 1..203: mol_type = other DNA
ggcgcgccagtccttcaggcatctaccatgtcaccaatgactgcccgaattcaagcatagtgtatgaggccgaccatcacatcatgcaccttccaggttgcgtgccctgcgtgagagaggggaatcagtcacgctgctgggtggcccttactcctaccgtcgcagcgccatacatcggcgcaccgcttcgactcggaccgatg

SEQ ID NO: 7608 - DNA, 203 bp, synthetic construct
  source 1..203: mol_type = other DNA
ggcgcgccagtcctacaggccacagaatggcctgggacatgatgatgaactggagtccaacaaccaccttagttctcgcccaggtcatgaggatcccaaccactctggtagacttactctctggaggccactggggtgtcctcgtgggggtggcctatttcagcatgcaggccaattgggccaaagtccgactcggaccgatg

SEQ ID NO: 7609 - DNA, 203 bp, synthetic construct
  source 1..203: mol_type = other DNA
ggcgcgccagtcctaatgacagcttaaacactgggttcttggctagcttgttctacacccacaagtttaacagctcagggtgttccgaacggctcgcgtgctgcaagagccttgacagctacggccaaggctggggcccactcggggtcgctaacatcagcggctcgtctgatgacaggccttattgccgactcggaccgatg

SEQ ID NO: 7610 - DNA, 203 bp, synthetic construct
  source 1..203: mol_type = other DNA
ggcgcgccagtccttggcactacgcgcctcggccatgcgggattgtgccagcatccagtgtgtgtggccccgtgtattgtttcactcccagccctgtcgtggtcggtactactgatcacgtcggggtccctacttacacctggggggagaacgagactgatgtcttccttttgaactcgaccagaccgcgactcggaccgatg

SEQ ID NO: 7611 - DNA, 203 bp, synthetic construct
  source 1..203: mol_type = other DNA
ggcgcgccagtcctccgcatggtgcgtggtttggatgcgtgtggatgaacagtaccgggttcaccaaaacctgtggcgcccctccatgcgaggttaacaccaataatgggacctggcactgccccaccgattgcttcaggaagcatccggagactacctacgccaagtgcggatcagggccttggatccgactcggaccgatg

SEQ ID NO: 7612 - DNA, 203 bp, synthetic construct
  source 1..203: mol_type = other DNA
ggcgcgccagtcctgtgctcgcgttcctgcttctcgcggacgcgagagtctctgcctacctatggatgatgtttatggtaagtcaagttgaggcggctctgtccaacctaattaacatcaatgctgcttcagccgctggtgcccaaggcttctggtacgccatcctcttcatctgcattgtctggcatcgactcggaccgatg

SEQ ID NO: 7613 - DNA, 203 bp, synthetic construct
  source 1..203: mol_type = other DNA
ggcgcgccagtcctgtcaagggccggttcccagctgctgctgcctacgcagcctgcgggctgtggccctgttttctcctgcttctgatgctgcctgagagggcttatgcatacgaccaggaagtggcagggtcccttggcggcgccatcgttgtcatgctgaccattctgacactgtctccgcactaccgactcggaccgatg

SEQ ID NO: 7614 - DNA, 203 bp, synthetic construct
  source 1..203: mol_type = other DNA
ggcgcgccagtccttccttcctgggtactgcggttaacggcgtgatgtggaccgtctaccacggggcgggtgccaagaccatcagcggcccgaagggacctgtcaatcaaatgtacactaatgttgaccaagacttggtggggtggccagcaccccccggagtcagatctcttgctccgtgcacctgccgactcggaccgatg

SEQ ID NO: 7615 - DNA, 203 bp, synthetic construct
  source 1..203: mol_type = other DNA
ggcgcgccagtcctcctgctgaaaccacaacaaggctgaaagcttacttcgacacaccaggccttcctgtgtgccaagaccatctggaattctgggagagcgtctttacagggttaacccacatagacggtcatttcctatcccagaccaagcaatcgggtgagaatttcccgtatcttgttgcttaccgactcggaccgatg

SEQ ID NO: 7616 - DNA, 203 bp, synthetic construct
  source 1..203: mol_type = other DNA
ggcgcgccagtccttgcatgtcagctgatctcgaggtagtgacaagtacgtgggtcttggtgggcggcgtcctggcagctctggctgcttactgtctttcagtgggcagcgtagtgattgttgggagagtcgtcctgtcgggccaacctgctgtcattcctgatcgcgaagtgctctaccaacagttccgactcggaccgatg

SEQ ID NO: 7617 - DNA, 203 bp, synthetic construct
  source 1..203: mol_type = other DNA
ggcgcgccagtcctgacgaaatggaggagtgttccaaacacctcccactagtcgagcacgggttacaactggctgagcagttcaagcagaaggccttaggtctcctaaatttcgctggcaagcaagcccaagaggcaacaccagtgatccagtctaacttcgctaaacttgagcagttttgggcgaaccgactcggaccgatg

SEQ ID NO: 7618 - DNA, 203 bp, synthetic construct
  source 1..203: mol_type = other DNA
ggcgcgccagtcctgtgctaacatccatgctgacagacccatcacacataacggcggaatcggcgcgtcggagattggctcgagggtcacgaccctcgctagctagttcctcggcgagtcagctttcgccccgtcttcttcaggccacgtgtaccgctccccatgactcccctggtactgatctcctccgactcggaccgatg

SEQ ID NO: 7619 - DNA, 203 bp, synthetic construct
  source 1..203: mol_type = other DNA
ggcgcgccagtcctctggccgcaaagacctttggccagtcagagccgagctcagaccgtgatacagaccttaccaccccaactgagaccacagactcgggccccatcgtcgtggatgatgcatccgatgacggatcttattcgtcaatgcctccactagagggggagcccggtgacccggacttgacacgactcggaccgatg

SEQ ID NO: 7620 - DNA, 203 bp, synthetic construct
  source 1..203: mol_type = other DNA
ggcgcgccagtcctctgatcgtgtatccggatctcggatcccgggtttgcgagaagagagcgcttcacgacgtcatcaaaaaaactgccttagccgtgatgggagccgcttatggcttccaatactccccagcgcagcgggtggaatttcttctgactgcttggaagtcgaagaacgacccaatggggcgactcggaccgatg

SEQ ID NO: 7621 - DNA, 203 bp, synthetic construct
  source 1..203: mol_type = other DNA
ggcgcgccagtcctgggtatcggagatgtcgcgcaaccggcgtctacaccaccagcttcgggaacacgctgacgtgctatctcaaagccacggccgccatcagggcggcggcgctgagagactgcactatgttggtttgcggtgatgacttagtcgtcatcgctgagagcgacggcgtagaggaggaccgactcggaccgatg

SEQ ID NO: 7622 - DNA, 203 bp, synthetic construct
  source 1..203: mol_type = other DNA
ggcgcgccagtcctggagtcacctactctatcactccgctggatttaccggcaatcattcaaagactccatggcttaagcgcgttcacgctgcacggatactctccacacgaactcaaccgggtggccggagccctcagaaaacttggggtacccccgctgagagcgtggagacatcgggcccgagcacgactcggaccgatg

SEQ ID NO: 7623 - DNA, 203 bp, synthetic construct
  source 1..203: mol_type = other DNA
ggcgcgccagtcctgtccgcgctaagcttatcgcccagggaggtagagccaaaatatgtggcatatacctctttaactgggcggtaaaaaccaaactcaaactcactccattgcctgccgctgccaaactcgatttatcgggttggtttacggtaggcgccggcgggggagacatttatcacagcatgcgactcggaccgatg

SEQ ID NO: 7624 - DNA, 203 bp, synthetic construct
  source 1..203: mol_type = other DNA
ggcgcgccagtcctttacggtaggcgccggcgggggagacatttatcacagcatgtctcatgcccgaccccgctatttactcctgtgcctactcatacttacagtaggggtaggcatcttcctgctgcctgctcggtaggcagcttaacactccgaccttagggtcccctttttttttttttttttggcgactcggaccgatg

SEQ ID NO: 7625 - DNA, 203 bp, synthetic construct
  source 1..203: mol_type = other DNA
ggcgcgccagtcctccttggcccctttacgccaatgaaggcctcgggtgggcagggtggttgctctccccccgaagctctcggcctaattggggccccaatgacccccggcggaaatcccccaatttgggtagggtcatccataccctaacgtgcggattcccccacctcatggggtacatcccgctccgactcggaccgatg

SEQ ID NO: 7626 - DNA, 203 bp, synthetic construct
  source 1..203: mol_type = other DNA
ggcgcgccagtcctgtaggcggccccgttgggggcgtctcaagggctctcgcacacggtgtgaaggttcttgaagacgggataaactatgcaacagggaatctacccggttgccctttctctatctttgtccttgcacttctttggtgcctgaccgtccccgcttccgcagttccttaccgtaatgctcgactcggaccgatg

SEQ ID NO: 7627 - DNA, 203 bp, synthetic construct
  source 1..203: mol_type = other DNA
ggcgcgccagtccttggcactatcccccacgaccgtgcggggtggtgccagcccgggatgtctgcggtccagtctactgtttcacacctagcccagtggtcgttggcactactgaccgcagagggtgtcccacttataactggggcagcaacgagactgacatccttctcttgaataacattaggccccgactcggaccgatg

SEQ ID NO: 7628 - DNA, 203 bp, synthetic construct
  source 1..203: mol_type = other DNA
ggcgcgccagtcctctcaccccccggtgtttggtgcactacccttaccggttgtggcattacccgtgcaccgtaaattacaccatctttaaggtgcgcatgttcatcggaggcctagagcacaggcttgaagcggcatgcaattggacctatggtgagcggtgtgaccttgaagacagagatagggcccgactcggaccgatg

SEQ ID NO: 7629 - DNA, 203 bp, synthetic construct
  source 1..203: mol_type = other DNA
ggcgcgccagtcctcatgtcaagggcaggttggtccctggggccacctacctttgcttgggcgtttggccactactcttagtccgtctcctccggccccacagggccctggccctggactcaagcgatggcgggactgtgggttgtcttgtgctaattgttcttacaatctttacacttacccctgggcgactcggaccgatg

SEQ ID NO: 7630 - DNA, 203 bp, synthetic construct
  source 1..203: mol_type = other DNA
ggcgcgccagtccttacaaaaagaaggtagtgctggtcatgtggtggcttcagtatttcatagcccgagtggaggccatcatccacgtgtgggtgcccccgttgcaggttaagggtggtcgtgacgctgtcatcatgctcacatgcctcttccaccctgccttggggtttgagatcacaaaaatcctccgactcggaccgatg

SEQ ID NO: 7631 - DNA, 203 bp, synthetic construct
  source 1..203: mol_type = other DNA
ggcgcgccagtcctgaccatcttgcccccatgaaggattgggcagcgtctgggctccgcgaattaacggtggccacagaacccatcgtattctccgcgatggagacgaaggtcatcacgtggggggctgacacggccgcgtgtgggaacatacttgctgttcttccggtatcagctagacggggccgccgactcggaccgatg

SEQ ID NO: 7632 - DNA, 203 bp, synthetic construct
  source 1..203: mol_type = other DNA
ggcgcgccagtcctgaaattttcctggggccggccgacgacatcaagacgtcgggttggcgactcctcgcccctatcaccgcgtatgcgcagcagacgcgaggggtactgggcgccatagttctcagcctgaccggccgggacaaaaatgaagccgagggtgaggtgcagttcttatccacggcaacacgactcggaccgatg

SEQ ID NO: 7633 - DNA, 203 bp, synthetic construct
  source 1..203: mol_type = other DNA
ggcgcgccagtcctttcttcgccgacggggggtgctcgggcggcgcgtatgacgtaatcatatgcgacgagtgccattcccaggacgctaccaccatccttgggataggcacagtccttgaccaggcagagacggctggagctaggctcgttgtcttggcgacggccattccccccggcagtgtaacgcgactcggaccgatg

SEQ ID NO: 7634 - DNA, 203 bp, synthetic construct
  source 1..203: mol_type = other DNA
ggcgcgccagtcctgagactactacagtgccccaggacgcagtgtccagaagccagcgtaggggccgtacagggagaggtaggcacggcatataccggtatgtttcgtctggggagagaccgtccggcattttcgactctgtggtgctctgtgagtgctacgatgccgggtgtgcatggtatgatctgcgactcggaccgatg

SEQ ID NO: 7635 - DNA, 203 bp, synthetic construct
  source 1..203: mol_type = other DNA
ggcgcgccagtcctactcctgctgagactaccgtgaggttgcgtgcttacctgaacacccccgggctccctgtctgtcaagaacatctggaattctgggaaggggtgttcacagggcttactaacatcgacgcccacatgctgtcacaggcaaagcagggtggggaaaacttcccataccttgtggcacgactcggaccgatg

SEQ ID NO: 7636 - DNA, 203 bp, synthetic construct
  source 1..203: mol_type = other DNA
ggcgcgccagtccttttgatgagatggaggagtgctcagcctccttgccctatgtggacgaggcacgtgccatcgccgggcaatttaaggagaaagtgcttggcctcattggcacggctggccagaaagctgaaactctgaaaccggcagctacgtccatgtggagcaaggccgagcagttctgggcacgactcggaccgatg

SEQ ID NO: 7637 - DNA, 203 bp, synthetic construct
  source 1..203: mol_type = other DNA
ggcgcgccagtcctaagcatatgtggaactttgtcagtgggatccaataccttgctggcctttcgaccttgccgggtaatcccgccgtggccacgttgatgtctttcaccgccgcggtgacctcccctcttacaacacatcagaccctcctttttaatattctaggagggtgggtggcctcacagatccgactcggaccgatg

SEQ ID NO: 7638 - DNA, 203 bp, synthetic construct
  source 1..203: mol_type = other DNA
ggcgcgccagtcctctgcaggcaaaactcctcccgcaactccccggagtgcccttcttctcatgccagaaggggtacaagggtgtatggcgcggggatggagtgaactccaccaagtgtccttgcggagcgacgatatctggtcacgtgaagaacggaaccatgagaatcgtcggcccgaagctgtgccgactcggaccgatg

SEQ ID NO: 7639 - DNA, 203 bp, synthetic construct
  source 1..203: mol_type = other DNA
ggcgcgccagtcctagtaacacctggcaaggcaccttcccaatcaacgccacaacaacagggcccagcgtacctgccccggcccccaactacaagttcgccttgtggagggtgggcgccgcggactacgcggaggtgcgccgtgtaggggactaccactacataacgggggtgacacaagacaatctgcgactcggaccgatg

SEQ ID NO: 7640 - DNA, 203 bp, synthetic construct
  source 1..203: mol_type = other DNA
ggcgcgccagtcctaccgtcttaacatcaatgctgtcagatcccgcccacatcacggcggaaacggccaagcgcaggctaaatcgagggtctccaccctctctggcaaactcctcggccagtcagctctcagccccctctctcaaggccacctgcactatacaaggccaccacccagatgcagacctccgactcggaccgatg

SEQ ID NO: 7641 - DNA, 203 bp, synthetic construct
  source 1..203: mol_type = other DNA
ggcgcgccagtcctggggaccctgacctttcgtcagggtcatggtcaaccgtcagcggtgaggacaacgtggtgtgttgctccatgtcatacacctggactggggcgctcatcaccccttgctctgctgaagaggaaaaattacccatcaatcccttaagcaacaccttattacgccaccacaatcttcgactcggaccgatg

SEQ ID NO: 7642 - DNA, 203 bp, synthetic construct
  source 1..203: mol_type = other DNA
ggcgcgccagtcctgggaagaagcctgcacggctgatagtctaccccgaccttggagtccgcgtctgcgagaagcgggctttgtacgacgtagctcaaaaactgccgacagcccttatggggccctcgtatgggtttcagtactccccagcgcagcgggttgacttcttactgaaggcgtggaaatctcgactcggaccgatg

SEQ ID NO: 7643 - DNA, 203 bp, synthetic construct
  source 1..203: mol_type = other DNA
ggcgcgccagtcctcaggggacacacgaagatgaagcgagcctgagagccttcactgaggctatgaccaggtactccgctcccccgggtgatcccccggttccagcttatgacctggagctcgtaacatcttgctcctcgaacgtgtccgtcgcccgcgatgcttcaggcaacagaatttactatctccgactcggaccgatg

SEQ ID NO: 7644 - DNA, 203 bp, synthetic construct
  source 1..203: mol_type = other DNA
ggcgcgccagtcctctagcatttgaaatgtatgggtcagtttattctgttactccgctggatcttccagctatcattcaaagactccatggacttagcgcgttttcactccattcatactctccgagcgagatcaatagggtggctagttgcctcaggaagcttggggtaccccctttgagagcttggcgactcggaccgatg

SEQ ID NO: 7645 - DNA, 203 bp, synthetic construct
  source 1..203: mol_type = other DNA
ggcgcgccagtcctacgctgaccggctggacttgtccagctggttcaccgttggcgctggcgggggggacatttatcacagcatgtcccgtgcccgaccccgcaacttactcctgtgcctactcctacttagcgtaggggtaggcatctttttactccccgctcggtgagctgggagctaaacactcccgactcggaccgatg

SEQ ID NO: 7646 - DNA, 203 bp, synthetic construct
  source 1..203: mol_type = other DNA
ggcgcgccagtcctgccagccccttaacggggcgacactccaccatgatcactcccctgtgaggaactactgtcttcacgcagaaagcgtctagccatggcgttagtatgagtgtcgtgcagcctccaggcccccccctcccgggagagccatagtagtctgcggaaccggtgagtacaccggaattgcgactcggaccgatg

SEQ ID NO: 7647 - DNA, 203 bp, synthetic construct
  source 1..203: mol_type = other DNA
ggcgcgccagtcctccaggacgaccgggtcctttccattggatcaaacccgctcaatgcctggagatttgggcgtgcccccgcaagactgctagccgagtagcgttgggttgcgaaaggccttgtggtactgcctgatagggtgcttgcgagtgccccgggaggtctcgtagaccgtgcaacatgagccgactcggaccgatg

SEQ ID NO: 7648 - DNA, 203 bp, synthetic construct
  source 1..203: mol_type = other DNA
ggcgcgccagtcctggtcactggggtgtcctgatcgccatcgcctacttcggcatgtcaggcaattggttgaaggtaatcgctgtgttattcctgtttgcaggggtagaggcaaccaccaccgtcggcagagcggccggccgttctgcttatctcttcacctccattttctcgtctggtccaaatcagcgactcggaccgatg

SEQ ID NO: 7649 - DNA, 203 bp, synthetic construct
  source 1..203: mol_type = other DNA
ggcgcgccagtcctaagatacagcttattaacaccaatggtagctggcacataaataggaccgctctaaactgtatcgacagtctccaaactgggtttcttagcgcgttgttctaccgcagcaatttcaactccacgggttgctcagaacggcttggcgcatgcaagcccttggaacacttccagcagcgactcggaccgatg

SEQ ID NO: 7650 - DNA, 203 bp, synthetic construct
  source 1..203: mol_type = other DNA
ggcgcgccagtcctggatggggccctataacccacaagtccaacatcacagggccgtctgaggaccggccctactgctggcactatgctcctagggagtgtagtgtagtgccggcgtcatcagtgtgtggtcctgtttactgcttcacacctagccctgtcgtggtgggcaccaccgacaggctgggccgactcggaccgatg

SEQ ID NO: 7651 - DNA, 203 bp, synthetic construct
  source 1..203: mol_type = other DNA
ggcgcgccagtcctcagctcctgtgccctactgactgcttccggaaacatccggaggccacatatcagaagtgtgggtcggggccctggctgacccccaggtgtctggtggactatccctacagattgtggcactatccatgcactgtcaactacacaatacacaaggttcgcatgttcattgggggccgactcggaccgatg

SEQ ID NO: 7652 - DNA, 203 bp, synthetic construct
  source 1..203: mol_type = other DNA
ggcgcgccagtccttgggacaatagtcaggctgcatcacttggggtcgttgcccttctggtgttgacaatctttaccctcagccctatgtacaaacagctgctcacacacgctatctggtggaaccaatacatgttggctcgggctgaagctatgatacatgattgggtgccagatttgcgggtcaggcgactcggaccgatg

SEQ ID NO: 7653 - DNA, 203 bp, synthetic construct
  source 1..203: mol_type = other DNA
ggcgcgccagtcctggcggtagggatgccatcattctgctcacctgcttgttacacccacatctcgggtttgaggtcacaaagattttgttagccatcttagcccctctgtatatcctccagcacagtctgctcaaggtgccctactttgtgcgcgcccacatcctcctgcgggcttgtatgttcttccgactcggaccgatg

SEQ ID NO: 7654 - DNA, 203 bp, synthetic construct
  source 1..203: mol_type = other DNA
ggcgcgccagtcctcgcaaagtggcggccggtaaatatgtgcaagcttgcctcttgaggttgggcgcctggactggcacatacatatacgatcatctagctcctctcagtgagtgggcgagcgacggcttgcgtgatctagccgtagctgttgagccagtcatcttttcccccatggagaaaaagatccgactcggaccgatg

SEQ ID NO: 7655 - DNA, 203 bp, synthetic construct
  source 1..203: mol_type = other DNA
ggcgcgccagtcctattacgtggggtgcagacaccgctgcgtgtggcgacatcttgaggggtctccctgtgtccgcgagactaggggacttggtgctgctgggacccgcggatgacatgcgtcacggaggttggaagcttctggctcccatcaccgcatacgcccaacagacgcggggactggttggccgactcggaccgatg

SEQ ID NO: 7656 - DNA, 203 bp, synthetic construct
  source 1..203: mol_type = other DNA
ggcgcgccagtcctccgcctgcggtgcctcagacctaccaggtggggtacctgcacgctccgacgggtagcggtaaaagtactcgtgtcccggcagcttacgccacccagggatacaaggtgctagttctgaatccgtctgtagcggcaacgctgagcttcggggcatacatgagcaaagctcatggtcgactcggaccgatg

SEQ ID NO: 7657 - DNA, 203 bp, synthetic construct
  source 1..203: mol_type = other DNA
ggcgcgccagtcctcatctcatcttctgtcactcaaagaagaaatgcgacgaactgtctaaacaactaacctcattaggtctcaatgctgtcgcattctatagaggtgtcgatgtggctgtgatccccacctcaggcgacgtcgtcgtctgcgcgacggacgcccttatgaccggctacacgggcgaccgactcggaccgatg

SEQ ID NO: 7658 - DNA, 203 bp, synthetic construct
  source 1..203: mol_type = other DNA
ggcgcgccagtcctggattgactcacatagatgcccacttcttgtcccagacgaagcaggggggcgagaactttgcctacctcgtggcctatcaggccacggtgtgtgccagagccaaagcccccccgccgtcatgggacgtgatgtggaaatgtctcaccagacttaagccgaccctcacaggtcctcgactcggaccgatg

SEQ ID NO: 7659 - DNA, 203 bp, synthetic construct
  source 1..203: mol_type = other DNA
ggcgcgccagtcctacccccctcctatatcgtctgggggctgtccaaaatgagatagtaacaacacatccaatcacaaagtacatcatgacctgcatgtctgcagacctggaagtcatcacaagtacgtgggtaatcgtaggtggagtccttgccgcattagcagcctactgtttgacagtgggctgtcgactcggaccgatg

SEQ ID NO: 7660 - DNA, 203 bp, synthetic construct
  source 1..203: mol_type = other DNA
ggcgcgccagtcctgttgtcatctgtggcaggatcgtgacaagcggcaagcctgcggttgtccctgatcgggaggtcctgtaccagcagtttgatgagatggaggagtgctctaagcacatcccctacctagttgagggtcagcagattgctgagcagttcaagcaaaaggtccttgggctgctccagcgactcggaccgatg

SEQ ID NO: 7661 - DNA, 203 bp, synthetic construct
  source 1..203: mol_type = other DNA
ggcgcgccagtcctacttgctcatgcggggctcaaattgctggacacgtgaagaacgggtctatgaagatcacaggaccccggatgtgcagcaacacttggcatggaacgtttccgatcaacgccacaactaccagccctagtgtgccggtaccggcccccaactacaaacgcgctctctggcgagttcgactcggaccgatg

SEQ ID NO: 7662 - DNA, 203 bp, synthetic construct
  source 1..203: mol_type = other DNA
ggcgcgccagtcctgaggtgagcttctctgtgggcctcctagagtttgttgtggggtctcagctcccttgtgagccagagcctgacgtgaccgtagtcacgtcaatgctcactgacccctcacacatcaccgcagagacagcctctcggcgcttgaagaggggatctcccccctccctggcgagttcacgactcggaccgatg

SEQ ID NO: 7663 - DNA, 203 bp, synthetic construct
  source 1..203: mol_type = other DNA
ggcgcgccagtccttccgccagccagttgtcagcgccatcacttaaagccacttgcacggcgaacggagaccacccggacgccgagctgatcgaggccaatctcctatggagacaggagatgggaagcaacatcacccgggttgagtcggagaccaaagttgtcatcctcgactcgtttgatcctctgcgactcggaccgatg

SEQ ID NO: 7664 - DNA, 203 bp, synthetic construct
  source 1..203: mol_type = other DNA
ggcgcgccagtcctgttgcagagtatgacgacagggagatatcagtgtcagcagagtgccatagaccacctaggcctaagttccctcctgctctcccgatttgggccagacctgactacaatccacctctcctacagaaatggcaaatgcccggatacgagccccccgtcgtgtctggatgtgcgttgcgactcggaccgatg

SEQ ID NO: 7665 - DNA, 203 bp, synthetic construct
  source 1..203: mol_type = other DNA
ggcgcgccagtcctcctccagctaaaccaacacctatcccgccaccaaggcggaagaggctcatacagctggacgagtctgctgtatcgcaagctctacaacagctggctgataaggtgtttgtggaggacactagcacctcagagccgagctccggcctcggagggtcaatagccggcccatcatctcgactcggaccgatg

SEQ ID NO: 7666 - DNA, 203 bp, synthetic construct
  source 1..203: mol_type = other DNA
ggcgcgccagtcctcctgacccgacaacagcagatgacacgtgttctgacgcgggatcctttagctcaatgccccccctcgagggggaacctggagacccagacttgagcactggttcctggtccactgttagtgaagaggacgatgtcgtctgttgctctatgtcatacacttggacgggggccttgcgactcggaccgatg

SEQ ID NO: 7667 - DNA, 203 bp, synthetic construct
  source 1..203: mol_type = other DNA
ggcgcgccagtcctaccgtgatgggatctgcatacggtttccagtactccccctcccaacgggtagagtacttgctcaaaatgtggcgctcgaagaaaacgccaatggggttttcatatgacaccaggtgcttcgattcgaccgtcaccgagcgggatatccgaactgaagaggacatctaccaatctcgactcggaccgatg

SEQ ID NO: 7668 - DNA, 203 bp, synthetic construct
  source 1..203: mol_type = other DNA
ggcgcgccagtccttgccaactagaccctaccgcgaggaaagcaatatcatccctcacagaacgcctctattgtggtggcccgatgtttaactccaaaggggaatcatgtggctatcgcagatgccgtgccagtggggtgctcactaccagtttggggaacaccctcacttgttatcttaaggcacagcgactcggaccgatg

SEQ ID NO: 7669 - DNA, 203 bp, synthetic construct
  source 1..203: mol_type = other DNA
ggcgcgccagtcctgaccttgagctgataacatcatgctcgtccaacgtctccgtagcccacgatggcaccggacagagatattactacctcacccgtgactgtaccactccacttgcgcgagctgcttgggagacagctcgccatacccctgtcaattcgtggttgggcaacatcatcatgtacgcccgactcggaccgatg

SEQ ID NO: 7670 - DNA, 203 bp, synthetic construct
  source 1..203: mol_type = other DNA
ggcgcgccagtcctcatgggtactctccaactgaactcaacagggtgggagcgagcctcaggaagcttggggcgccacccttaagagcttggagacatcgagccagagctgtcagagccaaactcattgcccaaggtgggaaagcagcgatatgcggcaagtacctctttaactgggcagtgaagacccgactcggaccgatg

SEQ ID NO: 7671 - DNA, 203 bp, synthetic construct
  source 1..203: mol_type = other DNA
ggcgcgccagtcctaagctcaaactcactccattggctgcggcaagccagcttgatttgtcaggctggtttgtcgcaggctacgacgggggggacatttatcacagcgtgtcccgggctcgaccccgtctgttactccttggcctactcctactcactgtaggggtaggcatctttttactccccgctcgactcggaccgatg

SEQ ID NO: 7672 - DNA, 203 bp, synthetic construct
  source 1..203: mol_type = other DNA
ggcgcgccagtcctcgggcaactccgcagcggaaccgactactttgggtgtccgtgtttccttttattcctatattggctgcttatggtgacaattgaaagattgttaccatatagctattggattggccatccggtgtcaaacagagcaatcatttatttgtttgttggttttatacctctgaacttcgactcggaccgatg

SEQ ID NO: 7673 - DNA, 203 bp, synthetic construct
  source 1..203: mol_type = other DNA
ggcgcgccagtcctcggcaggatttctcgcaagatcccagtaagtttaccgaaccggtaaaggatatcatgttaaaaactctaccagcgctgaattcaccaaaagcagaggagtgtgggtatagtgacagagttcgatcaataaccttaggcaactccacaatcaccactcaggaatgtgcaaatgtgcgactcggaccgatg

SEQ ID NO: 7674 - DNA, 203 bp, synthetic construct
  source 1..203: mol_type = other DNA
ggcgcgccagtcctggcctgttcgggcagaatatgcactaccattatctcggcagatcagggtatacaatacacgtacaatgcaatgcttcaaagttccaccagggatgcgtgctggtggtgtgtgtacctgaggctgagatggggtgtgctcaaacggattccacattcgagcacacagagttgacccgactcggaccgatg

SEQ ID NO: 7675 - DNA, 203 bp, synthetic construct
  source 1..203: mol_type = other DNA
ggcgcgccagtccttgcaacactattagagcatatcagattcccgtgcaagccaacaatgctaacacaaccacaccgattttcagcttccaagtggacccaggttatagttctgtgctaaataggacactactaggtgagatgctgaattattacgcacattggtctggcagcatcaagttgacatttcgactcggaccgatg

SEQ ID NO: 7676 - DNA, 203 bp, synthetic construct
  source 1..203: mol_type = other DNA
ggcgcgccagtcctttgttctgtggttcagccatggccaccgggaaattgctattggcatattccccaccaggtgcatcagtcccagaaagtagaaaagacgccatgcttggcacacacataatatgggacctgggcttgcagtcaagctgtgtcttgtgtgtgccatggatcagtcaatcacattatcgactcggaccgatg

SEQ ID NO: 7677 - DNA, 203 bp, synthetic construct
  source 1..203: mol_type = other DNA
ggcgcgccagtcctactgacctgcaaggcgacaccgatcaacgaaacggacaggtggtggataccaaagctactaacccaacgaactcaactgcggtaccggcgcttactgcagtggaaactgggcacacatcgcaggttgtgcctggcgatactattcagaccagacacgttgtgaacttccactcacgactcggaccgatg

SEQ ID NO: 7678 - DNA, 203 bp, synthetic construct
  source 1..203: mol_type = other DNA
ggcgcgccagtcctctaagatgtgaacacggggtcattggcgtcgtgactatgggtggtgagggcgttgttggtttcgctgacgtgcgcgacctcttgtggttagaggatgatgcaatggaacagggtgttaaagactatgttgagcaattgggaaacgcctttggctcaggtttcaccaaccagatacgactcggaccgatg

SEQ ID NO: 7679 - DNA, 203 bp, synthetic construct
  source 1..203: mol_type = other DNA
ggcgcgccagtccttactccttaccaccagaccctgatcattttgacggttacaaacagcaggctgtcgtgatcatggacgacttgtgccaaaatccagatggcaaggatgtgtccttattttgccagatggtgtcgagtgtcgactttgtgccgccaatggcagcacttgaggaaaagggcattctacgactcggaccgatg

SEQ ID NO: 7680 - DNA, 203 bp, synthetic construct
  source 1..203: mol_type = other DNA
ggcgcgccagtcctgtgagtagggctttcatctgcctgcaagcactaactacatttgtctctgtggcggggataatatacattatctacaagttatttgctggtttccagggagcttacactggtttgcctaaccagaaacccaaagtgccgaccctgagacaggctaaagttcaaggaccagcttttcgactcggaccgatg

SEQ ID NO: 7681 - DNA, 203 bp, synthetic construct
  source 1..203: mol_type = other DNA
ggcgcgccagtcctgaatttgcagtggccatgatgaaaagaaacgccagtactgtaaaaaccgagtacggcgagttcacaatgctcggcatctacgacaggtgggcagtgttgccccgtcatgctaagcctgggcccaccattttgatgaatgatcaagaagtgggcgtggttgatgccaaagagctgcgactcggaccgatg

SEQ ID NO: 7682 - DNA, 203 bp, synthetic construct
  source 1..203: mol_type = other DNA
ggcgcgccagtcctaagggcaaatccaggcttattgaggcatcgagtctaaatgactcagtggccatgaggcagacctttgggaacctgtacaagacattccacttgaacccaggtatagtaacaggcagtgcagttggctgcgatcctgatttattctggagcaagattccagtcatgctcgacggccgactcggaccgatg

SEQ ID NO: 7683 - DNA, 203 bp, synthetic construct
  source 1..203: mol_type = other DNA
ggcgcgccagtcctttcaaaggtggcgggagagttggcctcacgctgtttagcgtgagagctggctctcctgccccttcccctgagccggggatcttggctcattcccctcttttctatcctccctcattggactttacggatgacccggcataaacttgacaaccgatgttggatttcccttgtggccgactcggaccgatg

SEQ ID NO: 7684 - DNA, 203 bp, synthetic construct
  source 1..203: mol_type = other DNA
ggcgcgccagtcctacgccacatacaccacctccagtgatgtttcgtttggaccaagacctcctcttggctcagacatagctctctcaaatgccgctgctgctaatacgggtgcattaaatcagttgaaatttgtagaagtgcaacagtttgtattgagaaataacaccaacccattcacaggcattgcgactcggaccgatg

SEQ ID NO: 7685 - DNA, 203 bp, synthetic construct
  source 1..203: mol_type = other DNA
ggcgcgccagtcctatgctccatctctcgcccttgctggtgagggacatttgattgacacacacacccctggagggtatgcacctattagtgatttgattgacctgtctcacataccatccatggttacaaatgacacaacagattaccattactttgattggactgatacaactaataaggatgaaacgactcggaccgatg

SEQ ID NO: 7686 - DNA, 203 bp, synthetic construct
  source 1..203: mol_type = other DNA
ggcgcgccagtcctttataggtaaatttaattttaagctaaacagtgtccccaattcggcaattttagcgaattcatattctttttttagagggcctataatttttcatgttatcgctgctgcatcaacgatgcatagaggtaggctcagagtttgctttagaccaaattctaatcaggaatatagtgcgactcggaccgatg

SEQ ID NO: 7687 - DNA, 203 bp, synthetic construct
  source 1..203: mol_type = other DNA
ggcgcgccagtcctctcctcagtcaatggctgtatattattctcttttagacatttcccagagtaattgctgtactcttgctgtcccttttaattcggaaacgtggatgaggagcactgatgatgtgttgggaagactccagatttttgttaataaccagcttgctgctaacaggactgctgctaatccgactcggaccgatg

SEQ ID NO: 7688 - DNA, 203 bp, synthetic construct
  source 1..203: mol_type = other DNA
ggcgcgccagtcctacactcttgtcaagcatttatttggaaggttcacatatttgggctactacactcccgacagtggtggatggaagaaggtggccctcaacattccaaaacgtggtgtggttaatttgatgagagccttctgttactggtctggtgaagctgtattgtgtataacaaataatgatgcgactcggaccgatg

SEQ ID NO: 7689 - DNA, 203 bp, synthetic construct
  source 1..203: mol_type = other DNA
ggcgcgccagtcctacctgattacacttctggttgcccaaacttatgatgtgtttgttaatgccctgagtcttgtgtttggccgcttgccccgtaatgtgtatgatgttgctcgccgtgtattctcttcccgccccactcaacaaggctttgcttccttcacctctgcgctgcgcgcatgtgagtggtcgactcggaccgatg

SEQ ID NO: 7690 - DNA, 203 bp, synthetic construct
  source 1..203: mol_type = other DNA
ggcgcgccagtccttgattggtatgctttgtggcgcatctctatttacccttgccactcatgctttctcatttgtctccaattgtttttcacatggtgaggatccgccaggacctggccctgactgtgtgcgtttaccagagtcagcatatgaggggtgttccacgcggaaaacagccaggcaactggcgactcggaccgatg

SEQ ID NO: 7691 - DNA, 203 bp, synthetic construct
  source 1..203: mol_type = other DNA
ggcgcgccagtccttcatcttaggtggtagaaaaatgtactttaatacgcattatgcttcagttatcttggacaaagatgttactgtgtgtacacccaataagaagtactttacaagattaactaaggtaagttcaaattatgacacaatgattgttcaattggatattcctgagttgttgccaagcacgactcggaccgatg

SEQ ID NO: 7692 - DNA, 203 bp, synthetic construct
  source 1..203: mol_type = other DNA
ggcgcgccagtcctgtggtggtttgctcgttggaaagattgatggagcttttaaagcactaggctttcacgctgctggaagtcttgagcgtggctttgccaacgcatttaattctgtcccccctctttcaactgtgcctgatttccctgaatctattaatttatctggattattttcaaatgatgttgcgactcggaccgatg

SEQ ID NO: 7693 - DNA, 203 bp, synthetic construct
  source 1..203: mol_type = other DNA
ggcgcgccagtcctcttgcaccagtgttctaaattcaattgttaatgttttaatggctaggtacatttgtgctcttatggacattgactacccggtcatggtggcatatggagatgataatgttgtatcatttgatgaggagatagacatagagagaatggtttccttgtataagacagaattcggtgcgactcggaccgatg

SEQ ID NO: 7694 - DNA, 203 bp, synthetic construct
  source 1..203: mol_type = other DNA
ggcgcgccagtcctttgattggactgaagagggctatgttgagcctgatcgacggcaaggggccaatacgatttgtgttggctctcttggcgttcttcaggttcacagcaattgctccgacccgagcagtgctggatcgatggagaggtgtgaacaaacaaacagcgatgaaacaccttctgagttttcgactcggaccgatg

SEQ ID NO: 7695 - DNA, 203 bp, synthetic construct
  source 1..203: mol_type = other DNA
ggcgcgccagtcctaagaaggaactagggaccttgaccagtgctatcaatcggcggagctcaaaacaaaagaaaagaggaggaaagaccggaattgcagtcatgattggcctgatcgccagcgtaggagcagttaccctctctaacttccaagggaaggtgatgatgacggtaaatgctactgacgtccgactcggaccgatg

SEQ ID NO: 7696 - DNA, 203 bp, synthetic construct
  source 1..203: mol_type = other DNA
ggcgcgccagtccttatggaagatgcaccaagacacgccactcaagacgcagtcggaggtcactgacagtgcagacacacggagaaagcactctagcgaacaagaagggggcttggatggacagcaccaaggccacaaggtatttggtaaaaacagaatcatggatcttgaggaaccctggatatgcccgactcggaccgatg

SEQ ID NO: 7697 - DNA, 203 bp, synthetic construct
  source 1..203: mol_type = other DNA
ggcgcgccagtcctggcgacagctgcgtgactatcatgtctaaggacaagcctaccatcgatgtgaagatgatgaatatggaggcggccaacctggcagaggtccgcagttattgctatttggctaccgtcagcgatctctccaccaaagctgcgtgcccgaccatgggagaagctcacaatgacaaacgactcggaccgatg

SEQ ID NO: 7698 - DNA, 203 bp, synthetic construct
  source 1..203: mol_type = other DNA
ggcgcgccagtcctcgtgctgacccagcttttgtgtgcagacaaggagtggtggacaggggctggggcaacggctgcggactatttggcaaaggaagcattgacacatgcgccaaatttgcctgctctaccaaggcaataggaagaaccatcttgaaagagaatatcaagtacgaagtggccatttttcgactcggaccgatg

SEQ ID NO: 7699 - DNA, 203 bp, synthetic construct
  source 1..203: mol_type = other DNA
ggcgcgccagtcctgtccatggaccaactactgtggagtcgcacggaaactactccacacaggttggagccactcaggcagggagactcagcatcactcctgcggcgccttcatacacactaaagcttggagaatatggagaggtgacagtggactgtgaaccacggtcagggattgacaccaatgcacgactcggaccgatg

SEQ ID NO: 7700 - DNA, 203 bp, synthetic construct
  source 1..203: mol_type = other DNA
ggcgcgccagtccttactacgtgatgactgttggaacaaagacgttcttggtccatcgtgagtggttcatggacctcaacctcccttggagcagtgctggaagtactgtgtggaggaacagagagacgttaatggagtttgaggaaccacacgccacgaagcagtctgtgatagcattgggctcacaacgactcggaccgatg

SEQ ID NO: 7701 - DNA, 203 bp, synthetic construct
  source 1..203: mol_type = other DNA
ggcgcgccagtcctgagggagctctgcatcaagctttggctggagccattcctgtggaattttcaagcaacactgtcaagttgacgtcgggtcatttgaagtgtagagtgaagatggaaaaattgcagttgaagggaacaacctatggcgtctgttcaaaggctttcaagtttcttgggactcccgcacgactcggaccgatg

SEQ ID NO: 7702 - DNA, 203 bp, synthetic construct
  source 1..203: mol_type = other DNA
ggcgcgccagtcctggggtgttcacctcagttgggaaggctgtccatcaagtgttcggaggagcattccgctcactgttcggaggcatgtcctggataacgcaaggattgctgggggctctcctgttgtggatgggcatcaatgctcgtgataggtccatagctctcacgtttctcgcagttggaggacgactcggaccgatg

SEQ ID NO: 7703 - DNA, 203 bp, synthetic construct
  source 1..203: mol_type = other DNA
ggcgcgccagtccttgcccaggaactacggtcaccctgagtgagagctgcggacaccgtggacctgccactcgcaccaccacagagagcggaaagttgataacagattggtgctgcaggagctgcaccttaccaccactgcgctaccaaactgacagcggctgttggtatggtatggagatcagaccacgactcggaccgatg

SEQ ID NO: 7704 - DNA, 203 bp, synthetic construct
  source 1..203: mol_type = other DNA
ggcgcgccagtcctcaggagaacattttgttgatgttggcggctgttttctttcaaatggcttatcacgatgcccgccaaattctgctctgggagatccctgatgtgttgaattcactggcggtagcttggatgatactgagagccataacattcacaacgacatcaaacgtggttgttccgctgctacgactcggaccgatg

SEQ ID NO: 7705 - DNA, 203 bp, synthetic construct
  source 1..203: mol_type = other DNA
ggcgcgccagtcctgccctgctaacacccgggctgagatgcttgaatctggatgtgtacaggatactgctgttgatggtcggaataggcagcttgatcagggagaagaggagtgcagccgcaaaaaagaaaggagcaagtctgctatgcttggctctagcctcaacaggacttttcaaccccatgatccgactcggaccgatg

SEQ ID NO: 7706 - DNA, 203 bp, synthetic construct
  source 1..203: mol_type = other DNA
ggcgcgccagtcctcttgctgctggactgattgcatgtgatcccaaccgtaaacgcggatggcccgcaactgaagtgatgacagctgtcggcctaatgtttgccatcgtcggagggctggcagagcttgacattgactccatggccattccaatgactatcgcggggctcatgtttgctgctttcgtgcgactcggaccgatg

SEQ ID NO: 7707 - DNA, 203 bp, synthetic construct
  source 1..203: mol_type = other DNA
ggcgcgccagtcctctgctcggcagttatcaagcaggagcgggcgtgatggttgaaggtgttttccacaccctttggcatacaacaaaaggagccgctttgatgagcggagagggccgcctggacccatactggggcagtgtcaaggaggatcgactttgttacggaggaccctggaaattgcagcaccgactcggaccgatg

SEQ ID NO: 7708 - DNA, 203 bp, synthetic construct
  source 1..203: mol_type = other DNA
ggcgcgccagtcctattctgccacagatcatcaaagaggccataaacagaagactgagaacagccgtgctagcgccaaccagggttgtggctgctgagatggctgaagcactgagaggactgcccatccggtaccagacatccgcagtgcccagagaacataatggaaatgagattgttgatgtcatgcgactcggaccgatg

SEQ ID NO: 7709 - DNA, 203 bp, synthetic construct
  source 1..203: mol_type = other DNA
ggcgcgccagtccttgtcatgctaccctcacccacaggctgatgtctcctcacagggtgccgaactacaacctgttcgtgatggatgaggctcatttcaccgacccagctagcattgcagcaagaggttacatttccacaaaggtcgagctaggggaggcggcggcaatattcatgacagccaccccacgactcggaccgatg

SEQ ID NO: 7710 - DNA, 203 bp, synthetic construct
  source 1..203: mol_type = other DNA
ggcgcgccagtcctacagaaggagaagggagagtgatcctgggagaaccatctgcagtgacagcagctagtgccgcccagagacgtggacgtatcggtagaaatccgtcgcaagttggtgatgagtactgttatggggggcacacgaatgaagacgactcgaacttcgcccattggactgaggcacgacgactcggaccgatg

SEQ ID NO: 7711 - DNA, 203 bp, synthetic construct
  source 1..203: mol_type = other DNA
ggcgcgccagtcctgcgttcaaggacttcgcctcgggaaaacgttctcagatagggctcattgaggttctgggaaagatgcctgagcacttcatggggaagacatgggaagcacttgacaccatgtacgttgtggccactgcagagaaaggaggaagagctcacagaatggccctggaggaactgccacgactcggaccgatg

SEQ ID NO: 7712 - DNA, 203 bp, synthetic construct
  source 1..203: mol_type = other DNA
ggcgcgccagtcctgttcaggcaagtgcactattcacactcgcgcgaggcttccccttcgtcgatgttggagtgtcggctctcctgctagcagccggatgctggggacaagtcaccctcaccgttacggtaacagcggcaacactccttttttgccactatgcctacatggttcccggttggcaagctcgactcggaccgatg

SEQ ID NO: 7713 - DNA, 203 bp, synthetic construct
  source 1..203: mol_type = other DNA
ggcgcgccagtcctgaggcaatgcgctcagcccagcggcggacagcggccggaatcatgaagaacgctgtagtggatggcatcgtggccacggacgtcccagaattagagcgcaccacacccatcatgcagaagaaagttggacagatcatgctgatcttggtgtctctagctgcagtagtagtgaaccgactcggaccgatg

SEQ ID NO: 7714 - DNA, 203 bp, synthetic construct
  source 1..203: mol_type = other DNA
ggcgcgccagtcctggagggcatccagtctctaggggcacagcaaaactgagatggctggtcgaacggaggtttctcgaaccggtcggaaaagtgattgaccttggatgtggaagaggcggttggtgttactatatggcaacccaaaaaagagtccaagaagtcagagggtacacaaagggcggtccccgactcggaccgatg

SEQ ID NO: 7715 - DNA, 203 bp, synthetic construct
  source 1..203: mol_type = other DNA
ggcgcgccagtcctaccaccatggccatgactgacactactcccttcgggcagcagcgagtgttcaaagagaaggtggacacgaaagctcctgaaccgccagaaggagtgaagtacgtgctcaacgagaccaccaactggttgtgggcgtttttggccagagaaaaacgtcccagaatgtgctctcgacgactcggaccgatg

SEQ ID NO: 7716 - DNA, 203 bp, synthetic construct
  source 1..203: mol_type = other DNA
ggcgcgccagtcctatgggaaagagagagaaaaaacccggagagttcggaaaggccaagggaagcagagccatttggttcatgtggctcggagctcgctttctggagttcgaggctctgggttttctcaatgaagaccactggcttggaagaaagaactcaggaggaggtgtcgagggcttgggcctccgactcggaccgatg

SEQ ID NO: 7717 - DNA, 203 bp, synthetic construct
  source 1..203: mol_type = other DNA
ggcgcgccagtcctgtgattggcccagatgatgtggagaaactcacaaaagggaaaggacccaaagtcaggacctggctgtttgagaatggggaagaaagactcagccgcatggctgtcagtggagatgactgtgtggtaaagcccctggacgatcgctttgccacctcgctccacttcctcaatgctcgactcggaccgatg

SEQ ID NO: 7718 - DNA, 203 bp, synthetic construct
  source 1..203: mol_type = other DNA
ggcgcgccagtcctatgtcaaaggttcgcaaagacatccaagagtggaaaccgtcaactggatggtatgattggcagcaggttccattttgctcaaaccatttcactgaattgatcatgaaagatggaagaacactggtggttccatgccgaggacaggatgaattggtaggcagagctcgcatatctcgactcggaccgatg

SEQ ID NO: 7719 - DNA, 203 bp, synthetic construct
  source 1..203: mol_type = other DNA
ggcgcgccagtcctccagggcgaaaggactagaggttagaggagaccccgcggtttaaagtgcacggcccagcctggctgaagctgtaggtcaggggaaggactagaggttagtggagaccccgtgccacaaaacaccacaacaaaacagcatattgacacctgggatagactaggagatcttctgctcgactcggaccgatg

SEQ ID NO: 7720 - DNA, 203 bp, synthetic construct
  source 1..203: mol_type = other DNA
ggcgcgccagtcctagctgtaggtcaggggaaggactagaggttagtggagaccccgtgccacaaaacaccacaacaaaacagcatattgacacctgggatagactaggagatcttctgctctgcacaaccagccacacggcacagtgcgccgacaatggtggctggtggtgcgagaacacaggatctcgactcggaccgatg

SEQ ID NO: 7721 - DNA, 203 bp, synthetic construct
  source 1..203: mol_type = other DNA
ggcgcgccagtcctttaaaactgggctcgggttgtacccacccgagctgcccatgtggcgtggtgctcttgtatcccggtacacttgcacgccagtttgcctctccttaccccgtaacatatctagaagaatgtgcataacggaccaataggtggtggcaacccatgccactgacggtcaagtacttccgactcggaccgatg

SEQ ID NO: 7722 - DNA, 203 bp, synthetic construct
  source 1..203: mol_type = other DNA
ggcgcgccagtccttgtttccccggtgtgatgtggaatagactctctcagggttgaagccataagcatcgttatccgctacgtgcctacgcaaaacctagtagcattttgaagcttacttggttggccgctcagccactaacccgtggtaggcctggcagatgaggctgggcgcaccccactggcgaccgactcggaccgatg

SEQ ID NO: 7723 - DNA, 203 bp, synthetic construct
  source 1..203: mol_type = other DNA
ggcgcgccagtcctagtggcccagcctgcgtggctgcctgcccctctttgaggggaagccatttaagtgacaaggtgtgaagagtctcgtgtgctccacgtagaatccttccggcccctgaatgtggctaatcctaaccccgcagctattgcacacaatccagtgtgttgatagtcgtaatgggcaaccgactcggaccgatg

SEQ ID NO: 7724 - DNA, 203 bp, synthetic construct
  source 1..203: mol_type = other DNA
ggcgcgccagtcctggttggtggtggaagttgcctgattgccttaaagatatgggcatcttcgggcaaaatctgtaccatcatgcattgggtaggtcagggtacataatacacacccaatgtaatgccacaaaattcaatagtggttgtctaatagtggctgttgtaccagaacaccagctagcttaccgactcggaccgatg

SEQ ID NO: 7725 - DNA, 203 bp, synthetic construct
  source 1..203: mol_type = other DNA
ggcgcgccagtcctattgtagtaccatggatgagcggcaccttccatagacggactaaagctgacaattacacccaggctggatatgtgtcactatggtaccagactgattttgtgtcaccaaatgatgggattgggacaatcgttgctacatgctccggatgtcctgatttgtctgttagaatgctgcgactcggaccgatg

SEQ ID NO: 7726 - DNA, 203 bp, synthetic construct
  source 1..203: mol_type = other DNA
ggcgcgccagtcctcgtgacacaccaatgatgaaacaggaaaaagatttgactcaaaacccagttgaggactacatagacaaggtggtcgacactgtactacaggtcccaaacacccaacccagtggtccacaacacagtattcaaccaagtgctttgggcgctatggaaattggggcatcttcaacccgactcggaccgatg

SEQ ID NO: 7727 - DNA, 203 bp, synthetic construct
  source 1..203: mol_type = other DNA
ggcgcgccagtccttttgaaatgtttacatatgctagatttgacatggaagttactgttgtcaccaacaacacaggtttggtacaaatcatgtttgtaccacctggtatagatgcaccagatagtattgactcccgtctatgggattctgcctccaacccgagtgttttctatcaaccaaaatcaggtcgactcggaccgatg

SEQ ID NO: 7728 - DNA, 203 bp, synthetic construct
  source 1..203: mol_type = other DNA
ggcgcgccagtcctagtgatctctttgtccatacagccactatgatttacaggaatgcgcacttaaccagcttgaatgacaaaaccgttctactggctctcagtgcagatctccaggtggacgcagctgaccagccaggcccagataccatcccacaatgtgactgcttggagggctgctactatagccgactcggaccgatg

SEQ ID NO: 7729 - DNA, 203 bp, synthetic construct
  source 1..203: mol_type = other DNA
ggcgcgccagtcctatcacagctggtggagacaatcatgtagctttcacagatctaagaccctattcatgtttagacactcaccaaggtcctattcaggactatgtgacacaattagggagtgcctttggtagcggtttcactgacacacttaaagaccaattgacagatgtgagtgcccatattaaacgactcggaccgatg

SEQ ID NO: 7730 - DNA, 203 bp, synthetic construct
  source 1..203: mol_type = other DNA
ggcgcgccagtcctgacaaaattacttcaaaggtagttaaatggctagtacgtatcatcagtgcacttaccataatgatacgtaacagtactgacacacccactgtacttgcaacccttgctcttttaggctgtcacaagtcaccatggtcatttctcaaggaccggttatgtcagtggttaaacatccgactcggaccgatg

SEQ ID NO: 7731 - DNA, 203 bp, synthetic construct
  source 1..203: mol_type = other DNA
ggcgcgccagtcctaaaatagatctttatcaagaacaggttaaaggattttccaaagttgatgaaccagctcagcaggaactactaattaaagttgaaaaactgaagaaaggtttagacagcctagcacctctgtatgcagttgaaaacaaaagagttacaaacatctataaagaactcaaagcattgcgactcggaccgatg

SEQ ID NO: 7732 - DNA, 203 bp, synthetic construct
  source 1..203: mol_type = other DNA
ggcgcgccagtcctgcccaaggaccatacacaggcatgcctactacacccaagaagaaacctgagttaagaagagcaaccttgcaaggtcctgaacatgaatttttgaatgcccttattagaagaaactgccatatcattaccactgacaaaggagaatttaacctactaggtatatactctaactgtcgactcggaccgatg

SEQ ID NO: 7733 - DNA, 203 bp, synthetic construct
  source 1..203: mol_type = other DNA
ggcgcgccagtcctgctgtagtaccaacacatgctgaacctggtgacgtggtagatattgatggaaggttagttagagtgcttaaacaacaagtcctcactgatatgaatgatgtggatacggaagtaactgtgttgtggcttgaccagaatgaaaagttcagagacataagaagatttatacctgaacgactcggaccgatg

SEQ ID NO: 7734 - DNA, 203 bp, synthetic construct
  source 1..203: mol_type = other DNA
ggcgcgccagtcctcaactttacatgcttgacatcaacccagaaccaatcaccatggaacaagcaatatatggttatgctaacttggaaccattggaccttaccactagccctggtttcccttatgtgtctttgggcgtgaaaaagaaagacatcttaaacaacgctactaaagacacaaggaaaatgcgactcggaccgatg

SEQ ID NO: 7735 - DNA, 203 bp, synthetic construct
  source 1..203: mol_type = other DNA
ggcgcgccagtcctcaacagatgttagatctgtatggtattgatctaccctacataactttcctaaaggatgaactccgcgccccagagaaaattaaggctggtaagaccaggattgtggaggctgctagtgtcaatgatacagtgtactttagaacaacttttggcaatctatacagtacttttcatcgactcggaccgatg

SEQ ID NO: 7736 - DNA, 203 bp, synthetic construct
  source 1..203: mol_type = other DNA
ggcgcgccagtcctgcaaacccaggtatcttaacaggctcagctgtggggtgtaatccagatgtgttttggtcacaaatgcatgctatgttagatggagaactcattgcttttgattacaccaattatgatggcagcttggaaccagtgtggtttaaagcgcttgggaaagtgttagatcagcttggccgactcggaccgatg

SEQ ID NO: 7737 - DNA, 203 bp, synthetic construct
  source 1..203: mol_type = other DNA
ggcgcgccagtcctaccaagacaacagtttcaagtgatgaacatcgaacgtctaaactggatccgtaactggacatgttagggcaaggacttcccccctggtaacaggagcctggctggccaaaagccccgctcattgagcctagcatgttgtcgaccctggactgttcagtttagttagtacatggacgactcggaccgatg

SEQ ID NO: 7738 - DNA, 203 bp, synthetic construct
  source 1..203: mol_type = other DNA
ggcgcgccagtcctattcacttgtcacggttcttctgaactcggtctctagtatgacagcctaaggatgccctccaggtaccccggggtaacaagtgacacccgggatctgaggaggggactactttacgtagtttaaaaaacgtctaagctgttatggtgaccagaggctggcacctttcacttttacgactcggaccgatg

SEQ ID NO: 7739 - DNA, 203 bp, synthetic construct
  source 1..203: mol_type = other DNA
ggcgcgccagtcctaacttggtttcaacaacactctcgtaactgctgaccttgacggaaatgaaaagatcatacacggtttgcctaatagacatgataattgttggctcaattcgcttatgcaaatgaccaactgggttggagaagggtttttcaaaaacacctatgacaaccctgatctaattcctccgactcggaccgatg

SEQ ID NO: 7740 - DNA, 203 bp, synthetic construct
  source 1..203: mol_type = other DNA
ggcgcgccagtcctatcacacagacatcactaccactcagtctaccgttggaatcacccacgggtacgcacactccgagctcgaccaagtcaatgctgccagtggtactcacgaacatgtagaccacgtgtctcgtatttacatgaaaaaactttttacttggtccatgagcgacgccacagggtattcgactcggaccgatg

SEQ ID NO: 7741 - DNA, 203 bp, synthetic construct
  source 1..203: mol_type = other DNA
ggcgcgccagtccttgcctatgacaatctccaacggtggtagtgatctcaccagtcttgatgttcgggctagtttcacaccccttaatgttaaggttgctggacctatgcccaacaaacaaggtattgtacctgtggcagccaaagctggttattcagggttttgcaccactagtcccatcaccgcggcgactcggaccgatg

SEQ ID NO: 7742 - DNA, 203 bp, synthetic construct
  source 1..203: mol_type = other DNA
ggcgcgccagtcctcccaacattgtataactctggaatgggataccggattgaattctgagacagtgtttaatataccctacatttcccagacttattacacttcaactcactccagtacagctgacattggtaatgtttcaggtagagtacagatataccaagttacagcaccttcctctacttcagcgactcggaccgatg

SEQ ID NO: 7743 - DNA, 203 bp, synthetic construct
  source 1..203: mol_type = other DNA
ggcgcgccagtcctagttattagttctgttctcttctggtagagatttccagctgcgttgcccagttgagcctgtgaaacaagtcactgacgttggagaaacaggtaggtacaagatcttggatgcaactcaacaaaacggacactcggctaacaccttccgtcttcacaccgatgtttctttcgctccgactcggaccgatg

SEQ ID NO: 7744 - DNA, 203 bp, synthetic construct
  source 1..203: mol_type = other DNA
ggcgcgccagtcctttgaccgctacgcactactcagtgttgtctctggaaacgcaagcaatacacaccagagatacaccaatcttgaccctaccaaactgcctgccgacacgttcatgaaaaagctcattgactcttgcacctactacttttctgacttggaagttacagttattgcaaaaggtgaagcgactcggaccgatg

SEQ ID NO: 7745 - DNA, 203 bp, synthetic construct
  source 1..203: mol_type = other DNA
ggcgcgccagtcctctttttacagagttctacctacgaaatacgctggtagaactctctttgtaaaacaagaacagtttgagccattcaaccacggaggttttggtgagattatcactacagggagagaggccaccaaacacagagtacttatcagaatgaaaagagcagaaatgtactgtcctcgagcgactcggaccgatg

SEQ ID NO: 7746 - DNA, 203 bp, synthetic construct
  source 1..203: mol_type = other DNA
ggcgcgccagtcctctctttacccttccgcctcagtgacacagctttccaccagacgaaaacttaggctaacgggtgaaattgttaagcaaggagccacgaatttcgaacttttacaacaagctggtgacgtggagaccaacccaggacccgcatctttcagtaaactaattgaagactttggatgttcgactcggaccgatg

SEQ ID NO: 7747 - DNA, 203 bp, synthetic construct
  source 1..203: mol_type = other DNA
ggcgcgccagtcctgattagaggtttttgacaccagagtcatgatggacaatcttgtagacaggtttaaaccatactttcatgttagtccacccaaatttgactttaagactgaagttttagacaaggtcagggacttctttgctactgacgaggaagaagaggagtttgatgctactaaccccttcacgactcggaccgatg

SEQ ID NO: 7748 - DNA, 203 bp, synthetic construct
  source 1..203: mol_type = other DNA
ggcgcgccagtccttcctggtgcctgatgagtacgctgaagcacacaactggctggaaaggaaaagagaagttctcctccaggctaatcagtatgctcttgctaagctctgtgaacccaaggttggaccaccacctgaaacaaggcctgaaccagtggttatcttgttcagaggggattccggccaggcgactcggaccgatg

SEQ ID NO: 7749 - DNA, 203 bp, synthetic construct
  source 1..203: mol_type = other DNA
ggcgcgccagtcctacaaactcaaagtaaaccctctcattacaactgagagtgggaaccctccaactgacatgcagttggtggtactcaagaacacacaaccaatttcactagttagagatggacaaattgtcgccacttgttgtgctcttggcgtttttggaaccacctatttagttccctaccacccgactcggaccgatg

SEQ ID NO: 7750 - DNA, 203 bp, synthetic construct
  source 1..203: mol_type = other DNA
ggcgcgccagtcctgcatactcgtcaaagatggttctcacacagtcatcataggcatccatagtgcaggaggtaacggaaaaggttacgctagttgtgtcactcgttccgcactcctcgcactgaggggcagagaaaggcccgagctcgaagggcttatgttaggagaacgacctggagagaaagttccgactcggaccgatg

SEQ ID NO: 7751 - DNA, 203 bp, synthetic construct
  source 1..203: mol_type = other DNA
ggcgcgccagtcctctctttaccgtctctgtgctgctgagtatgcctcacatcttcacaatgttcttggcaagaccggtgcgcctttgaccaacgttgaggccgtgctcggtattgacggactcgacgccatggagcccaatactgcccccggtctaccttgggctcttcagcacaaacgcagacatgcgactcggaccgatg

SEQ ID NO: 7752 - DNA, 203 bp, synthetic construct
  source 1..203: mol_type = other DNA
ggcgcgccagtcctcttgtcactcaacccagctcatgtcagttatggctgacgaggttttctcagacgcatacggttttgatgagagggcacgttacgctgtgaaatccttgtgcaagacagtccatgcatacgaggacaagcgtatcaccatagatggtggtttaccttcaggttgtagtgccaccacgactcggaccgatg

SEQ ID NO: 7753 - DNA, 203 bp, synthetic construct
  source 1..203: mol_type = other DNA
ggcgcgccagtcctacaccataacacctgaagacaagtctgacaatggttttactttaggtaagaacattacagatgtcacatttcttaaacgcgctttcgaacgcgattgtgtcctagggttttacaaacccgtgatgaactccaaggttttggaggccatcctgtcctttgcacggcgtggcacaccgactcggaccgatg

SEQ ID NO: 7754 - DNA, 203 bp, synthetic construct
  source 1..203: mol_type = other DNA
ggcgcgccagtccttccaggagaagctaacctcagtggcaggtcttgctttccacagtggagaagaagagtacaacagacttttctctccatttgtggggagtttcgagattccgtcatacaggtgccttcgcctgagatgggtacacaaaatgtcaaattgaattgaacataaccaaactaactccacgactcggaccgatg

SEQ ID NO: 7755 - DNA, 203 bp, synthetic construct
  source 1..203: mol_type = other DNA
ggcgcgccagtcctttccccgggagggtctgacggtaagctgtacccacggctgaagtatgacctaccgttaaccggctacctacttcgagaagtctagtaataccattgaagttttgttggcgttacgctcaacacactaccccgtgtgtagttttggctgatgagtcacggcattccccacgggcgcgactcggaccgatg

SEQ ID NO: 7756 - DNA, 203 bp, synthetic construct
  source 1..203: mol_type = other DNA
ggcgcgccagtcctgccataacaactggactctttgtgtagtgccagttgttcccctagattactcagatggagcaaccacagtagttccagtcactgtaaccttggccccaatgtgttgtgagtttgatgggttaagaaatgcagtttcacagggcttgccagttaaggcaactccaggatcttatccgactcggaccgatg

SEQ ID NO: 7757 - DNA, 203 bp, synthetic construct
  source 1..203: mol_type = other DNA
ggcgcgccagtcctgcaagatattgatagcatacacccctccaggaggtagcgcacctacagatcgaaagagtgctatgttaggcacccacataatttgggattttgggctacaatcctcagccacccttgttattccctggattagtaatacatgtatgcgaaatgttgctagcttggcctatcaggcgactcggaccgatg

SEQ ID NO: 7758 - DNA, 203 bp, synthetic construct
  source 1..203: mol_type = other DNA
ggcgcgccagtcctttgatgcagagttcaccatgctagtgtgtgcggatgaagagattaacccttataatatacagtacatgtatgttccaccaggtagcggtgttccatctgatcatgattcttacttgtggcaatcaggtaccaacccatccatatacgtaaaatccactgatccacccgctcaatcgactcggaccgatg

SEQ ID NO: 7759 - DNA, 203 bp, synthetic construct
  source 1..203: mol_type = other DNA
ggcgcgccagtcctataactacatgcggttcaagaccaaatcccgcattgaacctgtatgtttgttaatacatgggagcccaggtgcagggaagtccgttgtatccagcctggtggggcgtgccattgctgaaaagatgaacagctcagtttattcccttccaccagacccagatcattttgatggttcgactcggaccgatg

SEQ ID NO: 7760 - DNA, 203 bp, synthetic construct
  source 1..203: mol_type = other DNA
ggcgcgccagtcctctataatctgtggaaaagccctgatgttcagtgataggcggacttcagtgcgttacaccactgatatgctggtctcagagatgtttagggaatactcacacaggaactcaattggcaatgtgcttgaggcactctttcagggaccaccagtctacaaggaattgaaaatttcagcgactcggaccgatg

SEQ ID NO: 7761 - DNA, 203 bp, synthetic construct
  source 1..203: mol_type = other DNA
ggcgcgccagtccttgagaagaaatgagaaattcagggacatccgagggtttttgccaaatgaaccaggagaaattggtgatgcagtgcttgctattaatactagcaggttcccaaacatgtttattcctgtaggaaaggtgactgaatatggatttctcaatctaagtgggacaccaacacacagagcgactcggaccgatg

SEQ ID NO: 7762 - DNA, 203 bp, synthetic construct
  source 1..203: mol_type = other DNA
ggcgcgccagtccttgctcatgtacaacttccctactaaatcagggcagtgcggtggagtgctaatggcaacaggaaaagttctaggaatccatgtgggaggcaatggacaccaaggctttgctgctactcttttgaggtcttactttaatgaagaacagggtcagattgaatggattgagaccaacacgactcggaccgatg

SEQ ID NO: 7763 - DNA, 203 bp, synthetic construct
  source 1..203: mol_type = other DNA
ggcgcgccagtcctaagaatcaggctatccaataatcaatgcccccaccaagaccaaattggaacccagtgtgttccacgatatctttgagggaaagaaagaaccagcagtcctgaacccaagagacccacgtttgaagactgattttgaggaagccattttctccaagtatgtagggaatgtgaacgcgactcggaccgatg

SEQ ID NO: 7764 - DNA, 203 bp, synthetic construct
  source 1..203: mol_type = other DNA
ggcgcgccagtcctgtccagtgtggttcgctgcactaaaactggtactggaaaagttaggttacactagtgatgaaaccaagtatattgactacttgtgtaactcataccacttgtataaaaacaagcattactttgtgagaggagggatgccatcgggatgttctggcacttctatcttcaacagtacgactcggaccgatg

SEQ ID NO: 7765 - DNA, 203 bp, synthetic construct
  source 1..203: mol_type = other DNA
ggcgcgccagtccttctccccgggaggggctaatggtacgctgtgcccacggcggaaatgagccctaccgttaaccggcagtctacttcgggaagcccagtaactacattgaaactttgaggcgttacactcagcacataaccccaatgtgtagttctggtcgatgagccttggcatcccccacaggccgactcggaccgatg

SEQ ID NO: 7766 - DNA, 203 bp, synthetic construct
  source 1..203: mol_type = other DNA
ggcgcgccagtcctaacttttaccactgatcaagataaaaatgggagcgcaggtgtctactcaaaagactggtgcgcatgaaactggtaacgttgccactggaggctcaacaataaattacacctccataaattattataaggattcagcatctaattcagctaacagacaggacttctctcaagacccgactcggaccgatg

SEQ ID NO: 7767 - DNA, 203 bp, synthetic construct
  source 1..203: mol_type = other DNA
ggcgcgccagtccttgtatcattatttaggtcgagcagggtacaccttccatgtacaatgcaacgcttccaggtttcaccaagggtgtcttcttgtagtgtgcgtaccagaagcagaaatggggtgttctaacgtgaacaatcaacccagttttgaacagttggctaatggagacacggcacatgtttcgactcggaccgatg

SEQ ID NO: 7768 - DNA, 203 bp, synthetic construct
  source 1..203: mol_type = other DNA
ggcgcgccagtccttcactgaagatgccgcaactggtgaacagggagtacagacagccgtttgcaacgcagcaatgggagttggtgtggggaacctgaccatctacccccatcagtggataaatttaagaacaaacaacagtgctacaatagtcatgccatatattaattgtgtaccaatggacaatacgactcggaccgatg

SEQ ID NO: 7769 - DNA, 203 bp, synthetic construct
  source 1..203: mol_type = other DNA
ggcgcgccagtccttgcaaagacataataacttgacactgatgataataccatttgttgagttagattactctgcaggggcaactacattcgttcccattaccgtgactgttgcccctatgtgcgcagagtataacggccttcgcctagcctcaccacagggcttgccaacaatgaatacaccaggtacgactcggaccgatg

SEQ ID NO: 7770 - DNA, 203 bp, synthetic construct
  source 1..203: mol_type = other DNA
ggcgcgccagtcctcaacgggtaagttgattctggcttattcacctccaggtgctggtgccccaacaaacaggaaacaggccatgctgggcacccacgttatatgggacttaggattgcaatctagctgtgtgctgtgtgtcccatggatcagccaaacccactacaggtatgtagtggtcgacacatcgactcggaccgatg

SEQ ID NO: 7771 - DNA, 203 bp, synthetic construct
  source 1..203: mol_type = other DNA
ggcgcgccagtccttctaccctgtgtccttccaaggccctggcattgtgcagatggcggcaaatgagtactaccccgaaagagcgcaaacacatgtcttgctggctaatggcccagcacaacctggtgattgcggcgggttgctgtgttgtacgcatggagtggttggcatcctcacagcgggtggtgcgactcggaccgatg

SEQ ID NO: 7772 - DNA, 203 bp, synthetic construct
  source 1..203: mol_type = other DNA
ggcgcgccagtccttacagttcaagtccaaatgccgcattgaacctgtgtgtctgctgttgcacggagctccaggagcgggtaaatcagtagccaccaatttgattggcagagcaattgcagagaagttaaatagctcagtatattctctaccacctgatccggaccactttgatggatataaacaaccgactcggaccgatg

SEQ ID NO: 7773 - DNA, 203 bp, synthetic construct
  source 1..203: mol_type = other DNA
ggcgcgccagtcctaggcagtggttattatggacgatttatgtcaaaaccccgatggaaaggatgtgtccctgttctgtcagatggtatctagtgttgactttgttccaccaatggctgcactagaagaaaagggaattttgttcacatcaccgtttgtgttggcttcaaccaatgctagctccatcccgactcggaccgatg

SEQ ID NO: 7774 - DNA, 203 bp, synthetic construct
  source 1..203: mol_type = other DNA
ggcgcgccagtcctatgccccaactgtttcagatagtagggctcttgcaagaagattccattttgacatgaacatagagatcctagacatgtaccagcagagcgggaagttgaacatgccattggcagccaagtcatgtgatgatgagtgtattccggcgaatttcaaaaaatgttgtcccttagtgtcgactcggaccgatg

SEQ ID NO: 7775 - DNA, 203 bp, synthetic construct
  source 1..203: mol_type = other DNA
ggcgcgccagtcctatatgccgcccccacctgctattgctgatttgttgaagagcgtggatagtgaagaattgagggaatactgtaaggagaaaggttggattattccagaacaggcctctagcctagtcaccgaaaaacatataagtagggcctttatttgcctacaagccctcactacctttatttcgactcggaccgatg

SEQ ID NO: 7776 - DNA, 203 bp, synthetic construct
  source 1..203: mol_type = other DNA
ggcgcgccagtcctataggaacgaaaagttcagggacattagagggtttataccaaaggaggaatctgagattggtgacgccatcctggctatgaatactagcaagtttccaaacatgttcataccagtgggtcaggtcactgagtatggtttcttaaacctgagtggagtccccacacaccgcatgccgactcggaccgatg

SEQ ID NO: 7777 - DNA, 203 bp, synthetic construct
  source 1..203: mol_type = other DNA
ggcgcgccagtccttcatgtacaactttccaacaagagccgggcagtgtggtgggatactgatggccactggtaaagtactcggcattcatgttggcggtaatggtcaccaagggtttgctgctgcactgctcagacactacttcgctgatgaacagggtgaaattgagtggacggtgcctagtaaggcgactcggaccgatg

SEQ ID NO: 7778 - DNA, 203 bp, synthetic construct
  source 1..203: mol_type = other DNA
ggcgcgccagtcctttaataatataataatcaggacccttttgttgaaagtgtataagaacattgatcttgataaatttaggatgattgcatatggagatgacgtaattgcatcatacccatattcaatagatgcaggcctacttgctaaggcggggaaggagtacggtctgacaatgacaccagctgcgactcggaccgatg

SEQ ID NO: 7779 - DNA, 203 bp, synthetic construct
  source 1..203: mol_type = other DNA
ggcgcgccagtcctgcctgtgggaaaatgccttctactcccagcctactctacattacgtagaaagtggcttgattcattttaattaggcccatatttgactttaatttggctaattgggttaaccctgtcacgtatctggacgtgacataagcgtgacaggggtaaatttagcacaaccagagtgctcgactcggaccgatg

SEQ ID NO: 7780 - DNA, 203 bp, synthetic construct
  source 1..203: mol_type = other DNA
ggcgcgccagtcctaatcccctacgtccttgattcaggtgtcccattatctcaagctcttatatacccacatcaatggatcaatctgaggacaaacaactgcgccacgatagtgatgccatacattaatgctgtgccttatgacagtgctttaaaccactgcaattttgggttagctattatccctgtcgactcggaccgatg

SEQ ID NO: 7781 - DNA, 203 bp, synthetic construct
  source 1..203: mol_type = other DNA
ggcgcgccagtccttgccactgctgatgatggacaagcagattctacaatgatacagtatatgtacataccaccaggtgctcccaaaccaacacagagagattcatttgaatggcagtcagccaccaatccttccatctttgttaggatggctgacccaccagcccaagtttctgtccctttcatgtccgactcggaccgatg

SEQ ID NO: 7782 - DNA, 203 bp, synthetic construct
  source 1..203: mol_type = other DNA
ggcgcgccagtcctgatgaaacacattagagcttgggtgccaagaccattcagaagccagccataccttctaaagaattatccaaacatggatggtacaaatttgaagtgcgctagcaccagcagagccaagataacaaccacaggggccttcggtcaacagtccggtgctatctatgtctgcaattacgactcggaccgatg

SEQ ID NO: 7783 - DNA, 203 bp, synthetic construct
  source 1..203: mol_type = other DNA
ggcgcgccagtcctggaaaagatcctcaaaaacttggtcaagattgtgtcagcactggtcatagtaatcaggagtgactacgacctagtcacgatgactgcaacacttgctttgatcggttgccacacaagcccatgggcatggttgaaatcaaaagtgtgtagcttccttggcctaccgatagcgcacgactcggaccgatg

SEQ ID NO: 7784 - DNA, 203 bp, synthetic construct
  source 1..203: mol_type = other DNA
ggcgcgccagtcctcaagaacaaacaacggattgaacctgtatgtttgatcatccgcggcgctccaggcacaggaaagtcactcgccacaggcatcattgctagagctattgcagaaaaataccactctagtgtttactccttgccaccagacccagaccattttgatggttaccgccagcaagttgtcgactcggaccgatg

SEQ ID NO: 7785 - DNA, 203 bp, synthetic construct
  source 1..203: mol_type = other DNA
ggcgcgccagtccttgtcatctacaaattgtttgctggttttcagggtgcttattcgggtatgcctaaaactgcactgaagaagccagtgttgagaactgccacagtgcaaggaccctgccttgactttgccttgtccctacttcgtaggaatattagacaagtgcagacagacaaaggccactttaccgactcggaccgatg

SEQ ID NO: 7786 - DNA, 203 bp, synthetic construct
  source 1..203: mol_type = other DNA
ggcgcgccagtcctcatgctcggcgtgcgtgaccgcattgctgtactgcctcgccatgctgagccaagtggaaccatctggatcgaaggcaagcaggtcaaagtcttagatgctgttgagttggtagatgaacaacaagtcaatcttgaactcactcttgttactcttgacatgaacgaaaagttcagcgactcggaccgatg

SEQ ID NO: 7787 - DNA, 203 bp, synthetic construct
  source 1..203: mol_type = other DNA
ggcgcgccagtcctcaaagctgggcaatgtggtggagtggtcaccagtgttggtaaaattattggaattcatgttggaggaaatgggcgccagggcttttgtgcagccttgaagcggtgttacttcaccactgagcaaggtgagattcaatggatgaaaccaaatagtgagactggtagatacaatatcgactcggaccgatg

SEQ ID NO: 7788 - DNA, 203 bp, synthetic construct
  source 1..203: mol_type = other DNA
ggcgcgccagtccttcaagcagctcaccattacgccaaccagctcaagcagctgaacatagacacatccaaaatgtctatggttgatgcctgttatggaactgaaaacctggaagcaatagaccttagcactagtgctggttacccatacaatgcattaggcgtcaagaaaaggcagattctgaaccccgactcggaccgatg

SEQ ID NO: 7789 - DNA, 203 bp, synthetic construct
  source 1..203: mol_type = other DNA
ggcgcgccagtcctcgggcatctattcgaggctttccacgccaatccaggcactattactggatctgctgtcggctgcaacccagacactttctggagcaagattcctatactcctaccaggatcactctttgcctttgattacacaggttatgatgctagtttgagccctgcatggtttagagctctcgactcggaccgatg

SEQ ID NO: 7790 - DNA, 203 bp, synthetic construct
  source 1..203: mol_type = other DNA
ggcgcgccagtccttgttaccccgggcttagtaccaatagactgccatcgcggttgaaggggaaaacgctcgttatccggctctctactgcgagaagcctagtaacgccttagaaatgctcaagcgttgcgctcagcacaaccccagtgtagctcaggtcgatgagtcactgcattccccacgggcgacgactcggaccgatg

SEQ ID NO: 7791 - DNA, 203 bp, synthetic construct
  source 1..203: mol_type = other DNA
ggcgcgccagtccttcgatgctattaaagaatcctctgtcccactcaagtcaccatcagctgaagcgtgtgggtatagcgatcgtgttgcgcagctgacactaggaaactccacagtcacaactcaagaagcagcaaacatcactgtcgcttatggtgagtggcccgagtattgtccagatacagatgcgactcggaccgatg

SEQ ID NO: 7792 - DNA, 203 bp, synthetic construct
  source 1..203: mol_type = other DNA
ggcgcgccagtcctgtttctgcattcatgttcagtgcaatgcgagcaagttccatcagggtactctacttgttgttgctataccagaaatgacagttgcgagatctagtggtgacaccaagcccaccactgcaccccacccttcttacgcagctgcacagcctggcccaaatggcaaagagtttgcttcgactcggaccgatg

SEQ ID NO: 7793 - DNA, 203 bp, synthetic construct
  source 1..203: mol_type = other DNA
ggcgcgccagtccttgtgtgcaagctttcgagtggatcctggtcgggcagggccatgggaatcaacgttagtgggacagtactgcaagtactacacacaatggtcgggctcgctggaagtcactttcatgttcacaggctcctttatggccacaggcaaaatgttgatcgcttacacaccgccaggtgcgactcggaccgatg

SEQ ID NO: 7794 - DNA, 203 bp, synthetic construct
  source 1..203: mol_type = other DNA
ggcgcgccagtcctctcacataagcagtgcactgacagcagcagacacacgcccaagcacacatcaagtagcgactggcaacactcctgcgctgcaagctgcagagactggggcgacatcgaatgctagtgatgagagtatgatcgagactcggtgtgtagtcaacaaacacagtgttgctgaaactacgactcggaccgatg

SEQ ID NO: 7795 - DNA, 203 bp, synthetic construct
  source 1..203: mol_type = other DNA
ggcgcgccagtcctgtgtagaacattttttctcaagggcagcattagttggttatattagcatactgacatcaacaacgaccgctaatggcttcacaaattgggatattgacatcatgggttttgtccaacagcgcaggaaagtggaaggtttcacatacatgaggtttgatgctgagttcacatttgcgactcggaccgatg

SEQ ID NO: 7796 - DNA, 203 bp, synthetic construct
  source 1..203: mol_type = other DNA
ggcgcgccagtcctttgccaccgcagacgacgggcaagcagacacgacgatgctccagtatatgtacatcccacctggagctcccaaacccactcaaagggactcattcgagtggcaatctgcaaccaacccatctctgtttgttcggatgagtgaacctcctgcacaagtgtcagttcctttcatgtcgactcggaccgatg

SEQ ID NO: 7797 - DNA, 203 bp, synthetic construct
  source 1..203: mol_type = other DNA
ggcgcgccagtcctggatgaagcacattagggcatggatccccaggcccttaagaaaccagccttatgtgctaaagaattaccctaactttgatggaacaaacatcaagtgcagctccaccagcaggcagagcatcaccaccacaggagcttttggtcaacagtctggtgcagtctatgtttgcaactcgactcggaccgatg

SEQ ID NO: 7798 - DNA, 203 bp, synthetic construct
  source 1..203: mol_type = other DNA
ggcgcgccagtccttagttgggtttgctgacttgagggacctattgtggctagaagatgatgtcatggagcaaggagtcacagattacattaaaggcctgggtgatgcttttggcactggcttcaccgactccatatctagagagatttccaacttgagagaccagttactcgggtctgagggagtggcgactcggaccgatg

SEQ ID NO: 7799 - DNA, 203 bp, synthetic construct
  source 1..203: mol_type = other DNA
ggcgcgccagtccttcaagagcaaacaacgtattgaaccagtatgtttaattattagaggcccaccaggcacaggaaaatcccttgccacaggcatcatagctagagccattgctgagaaatacaactctagtgtctactctctcccaccagaccccgatcattttgacgggtacaggcaacaagtggcgactcggaccgatg

SEQ ID NO: 7800 - DNA, 203 bp, synthetic construct
  source 1..203: mol_type = other DNA
ggcgcgccagtccttgacagttatggatgatttgtgtcaaaatcctgacggaaaggacatctcccttttctgccagatggtttctactgttgagttcatcccacccatggcctcacttgaagaaaaagggctcccgtttacttccaagtttgtgattgcatctaccaactccagtaatattattgtaccgactcggaccgatg

SEQ ID NO: 7801 - DNA, 203 bp, synthetic construct
  source 1..203: mol_type = other DNA
ggcgcgccagtcctaagcaatacaactgaaagatagaaagtccaaggtgagatatagcttagattctgttgtttctgagctcattagggagtataataacaggtgtagtgttggtaacacaattgaagcactgttccaaggaccccctgttttcaaacctattaagatctctatggaccaaccggccccgactcggaccgatg

SEQ ID NO: 7802 - DNA, 203 bp, synthetic construct
  source 1..203: mol_type = other DNA
ggcgcgccagtccttagagttggtgctgagggatctaggttacgatgagcaggccatatcagtgatagagggcatcaaccattcccaccatatctatagaaacaagacatattgtgtgcttgggggtatgccatccggatgctctggtaccagtatattcaactctatgatcaataacatcattatcacgactcggaccgatg

SEQ ID NO: 7803 - DNA, 203 bp, synthetic construct
  source 1..203: mol_type = other DNA
ggcgcgccagtcctggaccttgctgatcagaaccttcaaggggattgacctggatgagttgaatatggtggcatatggtgatgatgtgcttgctagctaccctttccccatagattgtcaggaacttgctaacacagggaaagaatatggcttgatcatgacacctgcagataagagtagctgtttcacgactcggaccgatg

SEQ ID NO: 7804 - DNA, 203 bp, synthetic construct
  source 1..203: mol_type = other DNA
ggcgcgccagtcctatgaggtcaactgggaaaatgccacatttcttaagagagggtttaaaccagataaacagtttcctttcctcatacatcctaccatgcccatgaaagagatccatgagtcgatcaggtggaccagggatgcgcgcaacacacaagaccacgtgcgctcactgtgtcttcttgcttcgactcggaccgatg

SEQ ID NO: 7805 - DNA, 203 bp, synthetic construct
  source 1..203: mol_type = other DNA
ggcgcgccagtcctgggtttgccgtacatgtgcagtgcaatgccagcaagtttcaccagggggctttattagtggtagctatacctgaatggacccaaggacgcggactaacgagcagcaccaacacttacatggagtactcacagaccaaccctggaaagaatggtggcacgttcaatcacccttatcgactcggaccgatg

SEQ ID NO: 7806 - DNA, 203 bp, synthetic construct
  source 1..203: mol_type = other DNA
ggcgcgccagtcctaattatgatgcaggggccactcctcttgttccaattaccatcaccatcgctcccatggcatgcgagttttcaggtctacgaaaggcaatctcccaagggttgccagcccaactgaccccaggttccactcagtttgtaacaacggacaatgacagttcccagccattaatcccacgactcggaccgatg

SEQ ID NO: 7807 - DNA, 203 bp, synthetic construct
  source 1..203: mol_type = other DNA
ggcgcgccagtcctggcttaagcaacacatcagcatctgatgcagtcattgagactgccaacacaccagcattgcaggcagccgaaacaggagccacgtcaaacgcagatgatgcagggctgatcgaaaccagggatgtcattaacacacaacgcccaactgaaacaactgtgcaggcgttctatgctcgactcggaccgatg

SEQ ID NO: 7808 - DNA, 203 bp, synthetic construct
  source 1..203: mol_type = other DNA
ggcgcgccagtcctagggctggtttagttggaatggtagatatcattcatagtgacagcaactcacccaagtttgcatcgtggaccatcgacacgatggcttttgtccaacaacggcgaaagctcgaaatgttcacgtacatgaggtttgctgcggagttcacctttgtagtgtcaactgaatccacacgactcggaccgatg

SEQ ID NO: 7809 - DNA, 203 bp, synthetic construct
  source 1..203: mol_type = other DNA
ggcgcgccagtcctacaaagatacctaacactatgattcagtatatgtacgtaccaccaggagcaccaatacccacgactagcaatgggtacgaatggcaatctggcaccaacccatcagttattgtacgtatgaatgaggcaccagctagagtgcgagttcccttcattagcccagcaggtgcatatcgactcggaccgatg

SEQ ID NO: 7810 - DNA, 203 bp, synthetic construct
  source 1..203: mol_type = other DNA
ggcgcgccagtcctgcctggttttatgatggctacactgattttggtactcatccctcaccaaatggtaaaggagatgcaaattatggattgaatccagccaatcagtttggcacttttgcaacccgcattattggaaacggggcaatctccgcgattaggattagaatttacatgaaaccaacgcaacgactcggaccgatg

SEQ ID NO: 7811 - DNA, 203 bp, synthetic construct
  source 1..203: mol_type = other DNA
ggcgcgccagtcctagacacttggctaatgagtttgacgcccagtcaatggtgtgggagagttatgagagagatcttctagtgtccaccactacagcccatggttgtgacgtaattgcccgatgcaattgtaacactggtgtgtatttctgccgtagcaagggaaaacactacccagtctgctttcaacgactcggaccgatg

SEQ ID NO: 7812 - DNA, 203 bp, synthetic construct
  source 1..203: mol_type = other DNA
ggcgcgccagtcctaaagcgttaatcaagattgtaagtgctcttgtgattatagttaggaatcatgaagatctcatcacagtaacggccactctagccctcattggatgttctgggtcaccatggcaatggttaaagaccaaagtatgccagtacttgcaaataccagtagtggaaaaacaaggagatcgactcggaccgatg

SEQ ID NO: 7813 - DNA, 203 bp, synthetic construct
  source 1..203: mol_type = other DNA
ggcgcgccagtcctgatttatgtcagaacccagatgggaaagatgtgagcttgctatgtcagatggtttccacagtggattttattccacctatggctagcttagaggaaaagggaattctatatacttcccctttcatgattgcatctactaaccatggttccatcactgctccaaccatctcggatcgactcggaccgatg

SEQ ID NO: 7814 - DNA, 203 bp, synthetic construct
  source 1..203: mol_type = other DNA
ggcgcgccagtcctgcagacttgttgaagtcagttgattctgaggaagtgagacaatactgtcaagagaagggttggataataccagtcactgagtgtcagacagaaagacacctcagtagagctttgactattctccaagctgtttcaacatttgtggctgtagctgggtgtatctacatagtgtaccgactcggaccgatg

SEQ ID NO: 7815 - DNA, 203 bp, synthetic construct
  source 1..203: mol_type = other DNA
ggcgcgccagtcctaagctgtttgctggatttcaaggggcatacactggattgcctttcaacaaacccaaagttccaaccataaggcaggcaaaggtacaaggaccttctttcgaatttgcagtggcaatgatgaagaggaattcagccattattaaaacaggacaaggtgagttcaccatgctcggtcgactcggaccgatg

SEQ ID NO: 7816 - DNA, 203 bp, synthetic construct
  source 1..203: mol_type = other DNA
ggcgcgccagtcctcaatgtggtggagtgttgatggcaactggtaaagtcataggtattcacgttggtggtaatggacatcaaggatttgctgccacactactcagagactacttcaatgaagaacaaggtgaaattgagtggatggagacaaacaaagaatcaggttacccaattatcaatgcaccacgactcggaccgatg

SEQ ID NO: 7817 - DNA, 203 bp, synthetic construct
  source 1..203: mol_type = other DNA
ggcgcgccagtcctgaccactatgctgggcaattaatgacccttgacattgacattagtgagatgtgccttgaggatgctgtttatgggactgaagggcttgaagcacttgacctgacaactagtgcaggatacccttatgtgacaatgggaatcaaaaagagagacatattatcaaagaaaactagacgactcggaccgatg

SEQ ID NO: 7818 - DNA, 203 bp, synthetic construct
  source 1..203: mol_type = other DNA
ggcgcgccagtcctcttgaaaaattaggttatgattacaaggctggcaggtacatttcgtacttgtgtcactcataccacctttacaaaaacaagcactattttgtgcgaggtggtatgccttcagggtgttctggtacatcaatcttcaactccatgataaacaacatcataattcgaacattgttgcgactcggaccgatg

SEQ ID NO: 7819 - DNA, 203 bp, synthetic construct
  source 1..203: mol_type = other DNA
ggcgcgccagtcctctgttgggcgatgtctactgctacctgcatacacaacactcaggcgcaagtggctcgaccaattctaaaatggttttcaatttgaccttaattcggcctaattggaagaccctgtcacgtatctggacgtgacaaaagcgtgacaggggtaaatttagcacaaccagagtgcttcgactcggaccgatg

SEQ ID NO: 7820 - DNA, 203 bp, synthetic construct
  source 1..203: mol_type = other DNA
ggcgcgccagtcctaaagccccgtggataagatccactgctgtgagcggtgcaaccccagcaccctggttcgatggccattctctatggaaccagaaaatggttttctcaagccctccggtagagaagccaagaatgtcctgaaggtaccccgcgcgcgggatctgatcaggagaccaattggcagtgcgactcggaccgatg

SEQ ID NO: 7821 - DNA, 203 bp, synthetic construct
  source 1..203: mol_type = other DNA
ggcgcgccagtcctaggcgtaatcatcaacaactactattcaaatcaataccaaaactcaattgatctttcagccaatgccaacggtgttggaaaagaaaattcaaaaccgcaaggtcagttgatgaatattcttggtagcgcggcggatgcattcaagaacatcgcgcctcttctcatggaccaggacgactcggaccgatg

SEQ ID NO: 7822 - DNA, 203 bp, synthetic construct
  source 1..203: mol_type = other DNA
ggcgcgccagtcctcactgaagaaatgaccaacctttctgatagagtgtcttcggacaccgcaggcaacacggccacaaacactcaatctacagtaggccgtttgtttgcatttggtacaagacacaagggtaaacatccagcttcctgtgctgacacagccactgacaaagtactcgctgccgagagcgactcggaccgatg

SEQ ID NO: 7823 - DNA, 203 bp, synthetic construct
  source 1..203: mol_type = other DNA
ggcgcgccagtcctgtactacacctttaaaatagccacttggtccacccaaaaagcatttgatcatgtaaggattccttttccccacgtcctatcaggaagcaaaggaggcgtttttggttctactctaagacgccactacttgtgtaagtgtggttggagaatacaggtacagtgtaatgcttcacacgactcggaccgatg

SEQ ID NO: 7824 - DNA, 203 bp, synthetic construct
  source 1..203: mol_type = other DNA
ggcgcgccagtccttgccttgaatcatcagaatcattggcagtggactgtctatccacatcaaattcttaacctcaggactaacactacgtgtgacttagaagtgccttatgttaacatttgtcccacgtcctcgtggacccagcacgctaactgggttttggtagtggctgttttgtctcctcttcacgactcggaccgatg

SEQ ID NO: 7825 - DNA, 203 bp, synthetic construct
  source 1..203: mol_type = other DNA
ggcgcgccagtcctatattcttcaggttcttcccccaatgtagacattactgtgtctgttcaacccgtaaagcctgtctttaacggtctcagacatacagttttggaggaccagagccccataccagtcacaattagagagcatgctggaacattctattccaccactccggacactaccgttcccatcgactcggaccgatg

SEQ ID NO: 7826 - DNA, 203 bp, synthetic construct
  source 1..203: mol_type = other DNA
ggcgcgccagtcctagctatgcaagccacatatgcgatttgggacttgggcctcaactctagctacaatttcaccgtcccattcatctccccgacacactaccgccaaacctcttatacaactccctcaatcacttccgttgacggttggctctcaatttggcaactaaccccactcacttacccagccgactcggaccgatg

SEQ ID NO: 7827 - DNA, 203 bp, synthetic construct
  source 1..203: mol_type = other DNA
ggcgcgccagtccttaacaccccacagagtgccgatatactaactttggtttcaggtggggatgacttcactctcagaatgccggtgactcctagtaagtacacgccccatggagtggataacgcagaaaaaggcaaggttgcaaatgacaacgcttcagcagactttgtagcagtccctatagctctcgactcggaccgatg

SEQ ID NO: 7828 - DNA, 203 bp, synthetic construct
  source 1..203: mol_type = other DNA
ggcgcgccagtccttcctgaaaaccagacaaaagtggccttcttttacgacagggcggtcctagcgtccgcccttgtcaatgctcaggacctgaactcaaacttttctcttcaagacgcagcaaatgtgatgaacaatgcacttttgacaccactcccaagcaaccgtcttgatgactcaacatatggcgactcggaccgatg

SEQ ID NO: 7829 - DNA, 203 bp, synthetic construct
  source 1..203: mol_type = other DNA
ggcgcgccagtcctctacaccccatgtcgcgcgccagtggatctgtctgaacaaactatcccctacactccatcattgtcagatacccgtgatccacatatgtgggttgttggacccggtgctactaatcaaatttcttttgtcattccttacacttctcctttgtccgtattaccagctgtttggttcgactcggaccgatg

SEQ ID NO: 7830 - DNA, 203 bp, synthetic construct
  source 1..203: mol_type = other DNA
ggcgcgccagtccttaatgggttttctgattttgacaacaaaacacggtttggtgttgcaccaaacgctgactttggtcgattgttcgttcagggtgcagacaggttctcggtccactaccggtacaaaaagatgagagtgttttgtccaagaccaactgtgtttttcccgtggcccgccaactcagtcgactcggaccgatg

SEQ ID NO: 7831 - DNA, 203 bp, synthetic construct
  source 1..203: mol_type = other DNA
ggcgcgccagtccttggacgccttctcgtctgtatgggcgagaagccctgtcagcttcccgtctctactcccaagtgtttctaccacatcgtttttactggctccagaaattcctttggtgtgtccatctacaaagctagatacagaccctggaagcagccccttcacgatgagttgtacgactatggcgactcggaccgatg

SEQ ID NO: 7832 - DNA, 203 bp, synthetic construct
  source 1..203: mol_type = other DNA
ggcgcgccagtcctcctacacaatccagatttgaccactactgtctgtctgtctttgatggctggaatagatgttctcactaatgatagtgtttttaactggctgtccactaaactatccaagttcttccacacccctgcccctcccattgttcctcttttgcaacaacagtctcctgttagagaagccgactcggaccgatg

SEQ ID NO: 7833 - DNA, 203 bp, synthetic construct
  source 1..203: mol_type = other DNA
ggcgcgccagtcctaaatgataactttaatttggcaaagaacatagaatgggcaataaaaacaattaaaagaatagtagaatggattacttcatggttcaaacaggaagaaacaagtcctcaagctaagttagataaaatgttagcagactttccagaacactgttcttccattcttgctatgagaaacgactcggaccgatg

SEQ ID NO: 7834 - DNA, 203 bp, synthetic construct
  source 1..203: mol_type = other DNA
ggcgcgccagtccttgctggacaaggaaagtccgtgaccagtcaaatcatcgcccaagcagtctccaaacttttgtttggtcgtcaatcagtttattctctcccaccggattcagattacttagatggttacgagaatcaatattcagtaatcatggatgatctgggacaaaatcccgatggcgaagacgactcggaccgatg

SEQ ID NO: 7835 - DNA, 203 bp, synthetic construct
  source 1..203: mol_type = other DNA
ggcgcgccagtccttttcaaagtattttgtcaaatggtttcaagcacaaattttctcccaaacatggcccacctggaaaagaaaggaactccattcacttctaacttcataatagcaacgaccaaccttcccaagtttcggcctgtcaccgtagcacactacccagctgttgatagaagaattaccttcgactcggaccgatg

SEQ ID NO: 7836 - DNA, 203 bp, synthetic construct
  source 1..203: mol_type = other DNA
ggcgcgccagtcctcaaccttcaacaagtggttaagatggtaaagaataccatcgataacaaagtggaaaacttgaagaaaatgaacacattggttgctcaatcacctggaaatgacatggattacgtgttgacctgtttgagacaaactaatgcagctttgcaagaccaaattgatgaacttcaagacgactcggaccgatg

SEQ ID NO: 7837 - DNA, 203 bp, synthetic construct
  source 1..203: mol_type = other DNA
ggcgcgccagtccttgcttactctggaggcaagaaaggtgagaagcaaacacttcaaattttggacgtacaaggcggaggaaagatcgtagcccaggctggaaacccaattatggattatgaagtaaacattgcaaagaatatggttacccccatcaccttcttttatgcagacaaggcacaagtcaccgactcggaccgatg

SEQ ID NO: 7838 - DNA, 203 bp, synthetic construct
  source 1..203: mol_type = other DNA
ggcgcgccagtcctaggacctttgttcaaggacaattctaggaaattttgttctaaagatgatgacttcccggctagaaacgagactgttacaggaattatgaatactggagtcccttttgtcttcactggaaagtttttggttggcaatcagccggttaacacaaccactggtgcatgtttcaatcacgactcggaccgatg

SEQ ID NO: 7839 - DNA, 203 bp, synthetic construct
  source 1..203: mol_type = other DNA
ggcgcgccagtcctttgtatacactatagagctacaacacatcgaggatggtgcgggtcggcactcatctgtcatgtcaacggcaagaaggccgtgtatgcaatgcactcagctggtggtggcggcatggctgccgctacgataatcactcaggaaatgattgaagctgctgaaaaggccttggattgcgactcggaccgatg

SEQ ID NO: 7840 - DNA, 203 bp, synthetic construct
  source 1..203: mol_type = other DNA
ggcgcgccagtcctagcaaagactagaattgtagacgtacccccatttcatcactgtatatggggacgtcaactattagggcgctttgcttctagatttcaaacaaatcctggcttggatcttggttcagcgattggcacggaccctgacacagattggaccgctttcgcctttcaactcttacagtacgactcggaccgatg

SEQ ID NO: 7841 - DNA, 203 bp, synthetic construct
  source 1..203: mol_type = other DNA
ggcgcgccagtcctagttaagggtggtctcccgtcagggtgtgccgctacaagcatgttgaacacaattataaacaacatagtaatcagagcagctttacacttgacctattctaactttgaatttgatgacatcaaagttttgtcttatggtgatgatttactcattgccacaaattatcaaattaacgactcggaccgatg

SEQ ID NO: 7842 - DNA, 203 bp, synthetic construct
  source 1..203: mol_type = other DNA
ggcgcgccagtccttaccaatgttattggtgtggtctgcgagttctagcctactcgtttctcccccgaccattcactcacccacgaaaagtgtgttgtaaccataagatttaacccccgcacgggatgtgcgataaccgtaagactggctcaagcgcggaaagcgctgtaaccacatgctgttagtcccgactcggaccgatg

SEQ ID NO: 7843 - DNA, 203 bp, synthetic construct
  source 1..203: mol_type = other DNA
ggcgcgccagtcctctttatggctgcaagatggctacccacctcggatcactgaactggagctcgaccctccttagtaagggaaccgagaggccttcgtgcaacaagctccgacacagagtccacgtgactgctaccaccatgagtacatggttctcccctctcgacccaggacttctttttgaatatcgactcggaccgatg

SEQ ID NO: 7844 - DNA, 203 bp, synthetic construct
  source 1..203: mol_type = other DNA
ggcgcgccagtcctccacggctcgatccagagggtggggcatgacccctagcatagcgagctacagcgggaactgtagctaggccttagcgtgccttggatactgcctgatagggcgacggcctagtcgtgtcggttctataggtagcacatacaaatatgcagaactctcatttttctttcgatacacgactcggaccgatg

SEQ ID NO: 7845 - DNA, 203 bp, synthetic construct
  source 1..203: mol_type = other DNA
ggcgcgccagtcctcagggaggcctcaacggaggggccttcacagctaccctacatagacactttttgatgaagtgcgggtggcaggtgcaggtccaatgtaatttgacacaattccaccaaggcgctcttcttgttgccatggttcctgaaaccacccttgatgtcaagcccgacggtaaggcaaagcgactcggaccgatg

SEQ ID NO: 7846 - DNA, 203 bp, synthetic construct
  source 1..203: mol_type = other DNA
ggcgcgccagtcctagcttacaggagctgaatgaagaacagtgggtggaaatgtctgacgattacgggaccgggaaaaacatgccttttcagtctcttggcacatactatcggccccctaactggacttggggtcccaatttcatcaacccctatcaagtaacggttttcccacaccaaattctgaaccgactcggaccgatg

SEQ ID NO: 7847 - DNA, 203 bp, synthetic construct
  source 1..203: mol_type = other DNA
ggcgcgccagtcctataaccgaccttttgcaactggcccgcatacccactctcatggcatttgagcgggtgcctgaacccgtgcctgcctcagacacatatgtgccctacgttgccgttcccacccagttcgatgacaggcctctcatctccttcccgatcaccctttcagatcccgtctatcagaaccgactcggaccgatg

SEQ ID NO: 7848 - DNA, 203 bp, synthetic construct
  source 1..203: mol_type = other DNA
ggcgcgccagtcctaccctggttggcgccatcagttcaaatttcgccaattaccgtgggtgtatccaaatcactctgacattttgtggacccatgatggcgagagggaaattcctgctctcgtattctcccccaaatggaacgcaaccacagactctttccgaagctatgcagtgcacatactctattcgactcggaccgatg

SEQ ID NO: 7849 - DNA, 203 bp, synthetic construct
  source 1..203: mol_type = other DNA
ggcgcgccagtccttgggacataggcttgaactctagttggaccttcgtcgtcccctacatctcgcccagtgactaccgtgaaactcgagccattaccaactcggtttactccgctgatggttggtttagcctgcacaagttgaccaaaattactctaccacctgactgtccgcaaagtccctgcattcgactcggaccgatg

SEQ ID NO: 7850 - DNA, 203 bp, synthetic construct
  source 1..203: mol_type = other DNA
ggcgcgccagtcctaagttcctgtttgatcgatctcgattattgaatgtaatcaaggtactggagaaggacgccgttttcccccgccctttccctacacaagaaggtgcgcagcaggatgatggttacttttgtcttctgaccccccgcccaacagtcgcttcccgacccgccactcgtttcggcctgcgactcggaccgatg

SEQ ID NO: 7851 - DNA, 203 bp, synthetic construct
  source 1..203: mol_type = other DNA
ggcgcgccagtccttccagctttgtctacgaccagctgcatgtgcccttccactttactgggcgcactccccgcgctttcgctagcaagggtgggaaggtatctttcgtgctcccttggaactctgtctcgtctgtgctccccgtgcgctgggggggggcttccaagctctcttctgctacgcggggtcgactcggaccgatg

SEQ ID NO: 7852 - DNA, 203 bp, synthetic construct
  source 1..203: mol_type = other DNA
ggcgcgccagtcctggcgatatcgagaccaatcctggtcctgcttctgacaacccaattttggagtttcttgaagcagaaaatgatctagtcactctggcctctctctggaagatggtgcactctgttcaacagacctggagaaagtatgtgaagaacgatgatttttggcccaatttactcagcgagcgactcggaccgatg

SEQ ID NO: 7853 - DNA, 203 bp, synthetic construct
  source 1..203: mol_type = other DNA
ggcgcgccagtcctctagtgggggaaggctctgtcgccttggccgccacgctatccaaccaagcttcagtaaaggctcttttgggcctgcactttctctctcgggggctcaattacactgacttttactctttactgatagagaaatgctctagtttctttaccgtagaaccacctcctccaccagctcgactcggaccgatg

SEQ ID NO: 7854 - DNA, 203 bp, synthetic construct
  source 1..203: mol_type = other DNA
ggcgcgccagtcctgacacccccgtcgacgaggcgttgggtagagttctctcccccgctgcggtcgatgaggcgcttgtcgacctcactccagaggccgacccggttggccgtttggctattcttgccaagctaggtcttgccctagctgcggtcacccctggtctgataatcttggcagtgggactccgactcggaccgatg

SEQ ID NO: 7855 - DNA, 203 bp, synthetic construct
  source 1..203: mol_type = other DNA
ggcgcgccagtcctgcggtcgctaagaaagtggtcgtccccattaccttcatggttcccaacagaccttctgggcttacacagtccgctcttctggtgaccggccggaccttcctaatcaatgaacatacatggtccaatccctcctggaccagcttcacaatccgcggtgaggtacacactcgtgatcgactcggaccgatg

SEQ ID NO: 7856 - DNA, 203 bp, synthetic construct
  source 1..203: mol_type = other DNA
ggcgcgccagtcctgacattctgaccgtcaaagaagcaattctgggcatccccggactagaccccatggatccccacacagctccgggtctgccttacgccatcaacggccttcgacgtactgatctcgtcgattttgtgaacggtacagtagatgcggcgctggctgtacaaatccagaaattcttacgactcggaccgatg

SEQ ID NO: 7857 - DNA, 203 bp, synthetic construct
  source 1..203: mol_type = other DNA
ggcgcgccagtcctgacggtgactactctgaccatgtcttccaaacttttctgaaagatgagatcagaccctcagagaaagtccgagcgggaaaaacccgcattgttgatgtgccctccctggcgcattgcattgtgggcagaatgttgcttgggcgctttgctgccaagtttcaatcccatcctggccgactcggaccgatg

SEQ ID NO: 7858 - DNA, 203 bp, synthetic construct
  source 1..203: mol_type = other DNA
ggcgcgccagtccttttagccctgcgctgggaccgtatctcagatccctggctgtctcggtgcacgcttacggcgagcgtcgcatcaagattaccggtggcctcccctccggttgtgccgcgaccagcctgctgaacacagtgctcaacaatgtgatcatcaggactgctctggcattgacttacaagcgactcggaccgatg

SEQ ID NO: 7859 - DNA, 203 bp, synthetic construct
  source 1..203: mol_type = other DNA
ggcgcgccagtcctttttgcgagaaatgggacgtctgcgcacgaaacgcgccgtcgcttgaggaggacttgtacaaacacgatctacgcaggtttccccaactgacacttaccgtgcaacttgaaatcccgcctggtctttccaggtctagaggggtgacaatttgtactgtggttgactccacgctccgactcggaccgatg

SEQ ID NO: 7860 - DNA, 203 bp, synthetic construct
  source 1..203: mol_type = other DNA
ggcgcgccagtcctactgatactggtactcaaacactggtggcaggctaaggatgcccttcaggtaccccgaggtaacacgcgacacttgggatctgagaaggggactgaggcttctttaaaagcgctcggtttaaaaagcttctacgcctgaacaggtgaccggaggccggcacctttctctacaatcgactcggaccgatg

SEQ ID NO: 7861 - DNA, 203 bp, synthetic construct
  source 1..203: mol_type = other DNA
ggcgcgccagtcctcatcctccagttgtttaggtacgtcgatgaacctttcttcgactgggtctataactcgcccgagaatcttacgcttgatgctatcaagcagttggaaaacttcaccgggcttgagttgcacgagggcggaccacctgcccttgtgatctggaacatcaaacacttgctccaaaccgactcggaccgatg

SEQ ID NO: 7862 - DNA, 203 bp, synthetic construct
  source 1..203: mol_type = other DNA
ggcgcgccagtcctaattacacacgggaaggctgaaaatgacaccttggtagtgtcggctagcgccggcaaagactttgagttgcgcctcccaattgacccccggccacaaaccactgctactggggagtccgcagaccctgtcaccaccaccgtggagaactacggcggtgagacacaagtccagagcgactcggaccgatg

SEQ ID NO: 7863 - DNA, 203 bp, synthetic construct
  source 1..203: mol_type = other DNA
ggcgcgccagtcctacgccaccacacggacgtcggcttcatcatggaccgatttgtgaagataaacagcctgagccccacacatgtcattgacctcatgcacacccacaaacacgggatcgtgggtgcgttacttcgtgcagccacgtactacttctccgacttggagattgttgtgcggcacgatggcgactcggaccgatg

SEQ ID NO: 7864 - DNA, 203 bp, synthetic construct
  source 1..203: mol_type = other DNA
ggcgcgccagtcctacctgactttaaccggttggtgtccgcttttgaggaattggccactggggttaaagctatcagaaccggtctcgatgaggccaaaccctggtacaagctcatcaagctcctaagccgcctgtcgtgcatggccgctgtggcagcacggtccaaggacccagtccttgtggccatcgactcggaccgatg

SEQ ID NO: 7865 - DNA, 203 bp, synthetic construct
  source 1..203: mol_type = other DNA
ggcgcgccagtcctcatgctggccgacaccggtctcgagattctggacagcactttcgtcgtgaagaaaatctccgactcgctctccagtctctttcacgtgccggcccccgccttcagtttcggagccccgattctgttggccgggttggtcaaggtcgcctcgagtttcttccggtccacacccgacgactcggaccgatg

SEQ ID NO: 7866 - DNA, 203 bp, synthetic construct
  source 1..203: mol_type = other DNA
ggcgcgccagtcctagaccttgagagagcagagaaacagctcaaagcacgtgacattaacgacatcttcgccattctcaagaacggcgagtggctggtcaaactgatccttgccatccgcgactggattaaggcatggattgcctcagaagagaagttcgtcaccatgacggacttggtgcctggcatcgactcggaccgatg

SEQ ID NO: 7867 - DNA, 203 bp, synthetic construct
  source 1..203: mol_type = other DNA
ggcgcgccagtcctctgctgtgctactggagtgtttggcactgcttacctcgtgcctcgtcatcttttcgcagagaagtatgacaagatcatgttggaaggcagagccatgacagacagtgattacagagtgtttgagtttgagattaaagtaaaaggacaggacatgctctcagacgcggcactcatcgactcggaccgatg

SEQ ID NO: 7868 - DNA, 203 bp, synthetic construct
  source 1..203: mol_type = other DNA
ggcgcgccagtcctggtgcttcaccgtgggaaccgcgtgagagacatcacgaaacactttcgtgatacagcaagaatgaagaaaggcacccccgtcgtcggtgttgtcaacaacgccgatgttgggagactgattttctctggtgaggcccttacctacaaggacattgtagtgtgcatggatggagacgactcggaccgatg

SEQ ID NO: 7869 - DNA, 203 bp, synthetic construct
  source 1..203: mol_type = other DNA
ggcgcgccagtcctcaccatgcccggcctctttgcctacaaagccgccaccaaggctggctactgtggaggagccgttcttgccaaggacggggctgacacatttatcgtcggcactcactctgcaggtggcaatggagttggatactgctcatgcgtttccaggtccatgcttcaaaagatgaaggccgactcggaccgatg

SEQ ID NO: 7870 - DNA, 203 bp, synthetic construct
  source 1..203: mol_type = other DNA
ggcgcgccagtcctagttgttctcgatgaagtcattttctccaaacacaaaggagacgtaaagatgaccgaagaggacaaagcgctgttccgccgctgcgccgctgactacgcgtcacgcctgcacagcgtgctgggtacggcaaatgccccattgagcatctacgaggcaatcaagggcgttgatggcgactcggaccgatg

SEQ ID NO: 7871 - DNA, 203 bp, synthetic construct
  source 1..203: mol_type = other DNA
ggcgcgccagtcctactcgacgccatggagccggacactgcacctggcctcccctgggccctccagggaaaacgccgcggtgcgctcatcgacttcgagaacggcacggtcggacccgaagttgaggctgccttgaagctcatggagaaaagagaatacaagtttgcttgtcagaccttcctgaaggacgactcggaccgatg

SEQ ID NO: 7872 - DNA, 203 bp, synthetic construct
  source 1..203: mol_type = other DNA
ggcgcgccagtcctgcaaagatttggcacacatttcgcccaatacagaaacgtgtgggatgtggattactcggcctttgatgcaaaccactgcagtgacgctatgaacatcatgtttgaggaggtgttccgcacagactttggcttccacccaaacgctgaatggatcctgaagactctcgtgaacaccgactcggaccgatg

SEQ ID NO: 7873 - DNA, 203 bp, synthetic construct
  source 1..203: mol_type = other DNA
ggcgcgccagtcctactaggctcacagtcgtacctcctccaggctgacgactgtcgcccttctagggcctacgaccttcaagttacggttttggcgttcttcccgcggccggatcgcctgcgcgaacgctggctcttcacccgaaggcctacctttcaccccccccccccataaagaacgtttccgtccgactcggaccgatg

SEQ ID NO: 7874 - DNA, 203 bp, synthetic construct
  source 1..203: mol_type = other DNA
ggcgcgccagtcctttttatgaagacaactgactgtttcaacgttttgctcgagatccttcacaggttcagacacacattcaagataaatagagagatggaattcacactctacaacggagagaagaagaccttctacagcaggcccaatacgcacgggaattgctggctcaactcgttgttgcagctcgactcggaccgatg

SEQ ID NO: 7875 - DNA, 203 bp, synthetic construct
  source 1..203: mol_type = other DNA
ggcgcgccagtcctctttcgatacgtcgatgagcctctcttcgagtctgagtacctgtcacctgaaaataagacattggatatgatcaaacaactttctgattacactaaactagacttgtcagacggtgggccacccgccctcgtcctgtggctgatcaaggactgtcttcaaactggcgttggcaccgactcggaccgatg

SEQ ID NO: 7876 - DNA, 203 bp, synthetic construct
  source 1..203: mol_type = other DNA
ggcgcgccagtcctcagcactcgccctagcgagatctgtgtgatcaacggggttgtcatgaccctggctgatttccacgccggcattttcatcaagggtaccgaacacgctgtgttcgccctcaacacatctgagggctggtacgccattgatgatgaggtgttctacccttggacacctgaccctgacgactcggaccgatg

SEQ ID NO: 7877 - DNA, 203 bp, synthetic construct
  source 1..203: mol_type = other DNA
ggcgcgccagtcctacacaagctttttgattggacactcgaacagcaatttggcacaacgcacattttggaactccccacagatcataagggcatctatgggcagctggttgactcacacgcgtacatccgaaacggatgggacgtgcaagtgtcggccactgccacacagtttaacggaggctgcctcgactcggaccgatg

SEQ ID NO: 7878 - DNA, 203 bp, synthetic construct
  source 1..203: mol_type = other DNA
ggcgcgccagtcctgttggtggccatggtgcctgagctgtgtaaactggctgacagagagaaataccaactcactctcttcccacaccaattcttgaacccacgcaccaacaccaccgcacacattcaggtaccatacctgggtgttgacagacacgaccagggaactcgtcacaaggcgtggaccctcgactcggaccgatg

SEQ ID NO: 7879 - DNA, 203 bp, synthetic construct
  source 1..203: mol_type = other DNA
ggcgcgccagtcctcgtcgtgatggtggtggcaccatacactaacgaccagacaattggctcactaaaagctgaggtctacgttaacattgcaccaaccaatgtgtacgtggccggtgagaaacccgccaaacagggaattttccctgtggccgttgctgacggctacggtggttttcagaacaccgacgactcggaccgatg

SEQ ID NO: 7880 - DNA, 203 bp, synthetic construct
  source 1..203: mol_type = other DNA
ggcgcgccagtccttgaaacaccagagatggcctcacactgctatcacgctgagtgggatactgggttgaactcaacatttaccttcaccgtgccgtacatttcagcagcggattacgcctacacctactctgatgagcctgaacaggcttcagtacaaggttgggttggtgtgtatcagatcactgacgactcggaccgatg

SEQ ID NO: 7881 - DNA, 203 bp, synthetic construct
  source 1..203: mol_type = other DNA
ggcgcgccagtcctcaccgacgtcgctttccttctcgaccggttcactctggttgggaaaaccatggaaaacaaaatggttctggatttgttgaccacgaaggagaaatcactggttggcgcactcctgcgtgcggccacgtattacttctctgatttggaggtggcatgcgtcgggaacaacaaatgcgactcggaccgatg

SEQ ID NO: 7882 - DNA, 203 bp, synthetic construct
  source 1..203: mol_type = other DNA
ggcgcgccagtcctcggaaacatccgcggggacctcgccgctgtggctgggaggatcgccagtgagacccacatcccgacgacatttaatttcgggatgatttacacagaggcagaggtggacgtgtacctgaggatgaaaagggcggaactctactgtccccgacccgttctcacgcactacgaccacgactcggaccgatg

SEQ ID NO: 7883 - DNA, 203 bp, synthetic construct
  source 1..203: mol_type = other DNA
ggcgcgccagtcctcatgtccaccaagcacggacccgacttcaaccgtctggtgtccgcatttgaggaattgacaaagggagttaaggctatcaaggacggtctcgatgaggccaaaccctggtacaaagtcattaaactcctcagccgcctgtcgtgcatggccgctgtcgcagctcgctccaaggacgactcggaccgatg

SEQ ID NO: 7884 - DNA, 203 bp, synthetic construct
  source 1..203: mol_type = other DNA
ggcgcgccagtccttttccggtccacgcccgaagacttggagagagcagagaaacaactcaaggcacgtgacatcaacgacatcttcgccatcctcaagaacggcgaatggctggtcaaacttatcctggctatccgcgactggatcaaagcctggatttcctcggaggagaagtacatctccatgaccgactcggaccgatg

SEQ ID NO: 7885 - DNA, 203 bp, synthetic construct
  source 1..203: mol_type = other DNA
ggcgcgccagtcctacccgtggtcgtttgcctccgtggcaaatccggccagggcaagagcttccttgctaatgtgctcgcacaagcaatctcaacccacttcactggcagaaccgactctgtctggtactgcccacctgaccccgaccacttcgacggttacaaccaacaaactgtcgttgtcatggacgactcggaccgatg

SEQ ID NO: 7886 - DNA, 203 bp, synthetic construct
  source 1..203: mol_type = other DNA
ggcgcgccagtcctaggacagcacgaagcggcaattgaattctacgaagggatggtacatgacagcattaaagaggaacttaagcccttgttggagcaaaccagcttcgccaagcgtgctttcaagcgcctcaaggagaacttcgaggtcatcactctcgttgttgtgctgttggcaaacatcatcatcgactcggaccgatg

SEQ ID NO: 7887 - DNA, 203 bp, synthetic construct
  source 1..203: mol_type = other DNA
ggcgcgccagtcctcaaaactgacgatgaagtgaactctgagccagccaaacccgcggagaaaccacaagctgaaggaccctatgctggcccccttgaacgacaacagccgctgaaacttaaggctaagctccctcaggctgagggaccttacgtcgggccactagagagacaacaaccactgaaattcgactcggaccgatg

SEQ ID NO: 7888 - DNA, 203 bp, synthetic construct
  source 1..203: mol_type = other DNA
ggcgcgccagtcctgagagcaagactgcctgtggccaaggaagggccatatgaaggaccagtgaagaagcctgtcgctttgaaactgaaagcaaaagccccgattgtcactgaaagcggatgcccaccgactgacttgcaaaagatggtcatggcaaacgtcaagcctgttgagcttatcctcgacggcgactcggaccgatg

SEQ ID NO: 7889 - DNA, 203 bp, synthetic construct
  source 1..203: mol_type = other DNA
ggcgcgccagtcctgaagacagttgcgctctgctgcgcgactggagtgttcgggacggcttacctcgtgcctcgtcatcttttcgcagagaagtacgacaagatcatgctggacggccgagccttgacagacagtgacttcagagtgtttgagtttgaggtaaaagtaaaaggacaggacatgctctccgactcggaccgatg

SEQ ID NO: 7890 - DNA, 203 bp, synthetic construct
  source 1..203: mol_type = other DNA
ggcgcgccagtcctcctgcaaatgaaagcccacatcgaccctccccctcacaccgaggggttggtagtggacaccagagaagttgaggagcgcgtgcatgtcatgcgcaagactaaacttgcacccaccgtggctcacggtgtgtttcagcctgaatttggacccgccgccctgtcgaacaacgacaacgactcggaccgatg

SEQ ID NO: 7891 - DNA, 203 bp, synthetic construct
  source 1..203: mol_type = other DNA
ggcgcgccagtcctacgcctgaacgaaggcgtggttctggacgaggtcatcttctccaaacacaagggcgatgccacaatgtctgaggctgacaaaagactgttccgtctgtgcgctgctgattatgcctcgcatcttcacaatgtgctggggacagccaactctccactgagcgtgtttgaagccatcgactcggaccgatg

SEQ ID NO: 7892 - DNA, 203 bp, synthetic construct
  source 1..203: mol_type = other DNA
ggcgcgccagtcctccctgatgttgattggcaacgatttggcactcactttgcccagtacaaaaacgtttgggacattgattattcggcctttgatgctaaccattgcagtgacgccatgaacatcatgttcgaggaggtcttccgtgaggaatttggatttcatccgaacgctgtttggattctcaacgactcggaccgatg

SEQ ID NO: 7893 - DNA, 203 bp, synthetic construct
  source 1..203: mol_type = other DNA
ggcgcgccagtcctttcctacggggatgacattgtagttgcaagtgattacgatttggactttgaagctctcaagcctcactttaaatctcttggtcaaacaatcactccagccgacaaaagcgacaaaggttttgttcttggtcagtccatcaccgatgtcactttcctcaagaggcattttcatttcgactcggaccgatg

SEQ ID NO: 7894 - DNA, 203 bp, synthetic construct
  source 1..203: mol_type = other DNA
ggcgcgccagtccttaggctggtcatcgtacctcctctaggctgacaactgtcgcccttttagggcccacgaccttcaagttacggttttagcgtccctcccgcggccgactcgcctacgtgaatgctagctcttcacccgaaggcctgcctttcaccccccccccccataaagaacgttaccgtcttcgactcggaccgatg

SEQ ID NO: 7895 - DNA, 203 bp, synthetic construct
  source 1..203: mol_type = other DNA
ggcgcgccagtcctactggcgggtgctagtaacactcactttgcttcgtagcggagcacatgagcggtgggaacacccccgtggtaacacggacccaccgggccaaaagccacgcctcacggcctcatgtgtgtgcaaccccagcacggcaaattgtttgtgaaacacatcttaaggtaacactgggacgactcggaccgatg

SEQ ID NO: 7896 - DNA, 203 bp, synthetic construct
  source 1..203: mol_type = other DNA
ggcgcgccagtcctccagcactcgccccagcgagatctgtgtgatcaacggggtcaccatgactctggccgatttccacgccggaattttcatcaagggtactgaacacgccgtgttcgctctcaacacatccgagggctggtacgccatagatgatgaggtgttctacccgtggacacccgaccctgcgactcggaccgatg

SEQ ID NO: 7897 - DNA, 203 bp, synthetic construct
  source 1..203: mol_type = other DNA
ggcgcgccagtcctacagcgtgcttgcgtacgtgccctacgaccaggaacccctggacgtagattggcaggaccgcgcaggcctgttccttcgtggagcgggtcagtcgtcccctgccactgggtcacaaaaccaatctggcaacactggtagtataatcaacaactactacatgcagcagtaccaaacgactcggaccgatg

SEQ ID NO: 7898 - DNA, 203 bp, synthetic construct
  source 1..203: mol_type = other DNA
ggcgcgccagtcctaggagacaactcttctggaggaccgcatcctcactacacgccacaacacaactacatccacaacacagagttctgttggcgtgacatacggttacgcctcgggggaccgtttcttgcctggacccaacaccagtgggctcgagacacgcgtcgaacaagcggagagattcttcacgactcggaccgatg

SEQ ID NO: 7899 - DNA, 203 bp, synthetic construct
  source 1..203: mol_type = other DNA
ggcgcgccagtcctttcttgtcgccatggtccccgagctacaagagttggagaagcgtgacgtttcacaactcacgctctttcctcaccagttcatcaacccgcgcaccaacaccaccgcccacattgtggtgccatacgtgggtgtcaacagacacgaccaggcaaagatgcacaaggcgtggacaccgactcggaccgatg

SEQ ID NO: 7900 - DNA, 203 bp, synthetic construct
  source 1..203: mol_type = other DNA
ggcgcgccagtccttcgtggtggcggtgctcgcaccgctaaccacttccaacatgggacaggacaacgtcgaggtgtatgcaaacatcgcacccaccaacgtgcacgttgctggagagaggccaatgaaacaaggcatcattcccgtggcctgcaacgatggctacggtggcttccagaacaccgatccgactcggaccgatg

SEQ ID NO: 7901 - DNA, 203 bp, synthetic construct
  source 1..203: mol_type = other DNA
ggcgcgccagtcctccaagaccgcagatccaatctacggtctagtgtccaacccaccgcgcacagcgtttcccggtaggttcactaacctgctagacgtcgctgaagcgtgtccaacattcctggactttgacggcacaccttacgtcaaaaccaggcacaacagtggtagcaagatactagcacacacgactcggaccgatg

SEQ ID NO: 7902 - DNA, 203 bp, synthetic construct
  source 1..203: mol_type = other DNA
ggcgcgccagtcctcgcacgaccctgactcggcggtgcttgtctcggtcagcgctggcgctgatcttgaatttcggctcccgattaaccctgcgacccaaacaactagtgcaggtgagggtggtgacgttgtgacaaccgatgtcacgacacatggcggagttgtggacacaccgcgacgccaacacacgactcggaccgatg

SEQ ID NO: 7903 - DNA, 203 bp, synthetic construct
  source 1..203: mol_type = other DNA
ggcgcgccagtcctccaacgtggagttcctgctggacaggttcacacacattggtacgatcaccgcctcaaagacaatcgacctcatggacacgaaggaacacacattggtgggcgcaatcctgcgctcggctacgtactacttctgtgacctggaggttgctgtcttgggctcggaaaaatggactgcgactcggaccgatg

SEQ ID NO: 7904 - DNA, 203 bp, synthetic construct
  source 1..203: mol_type = other DNA
ggcgcgccagtcctcgtgggttcccaacggttgcccacacaccgaacgcgtggaggacaacccagttgttcacgcgaagaacggtgtagcccgttttgccctgccatacacagcaccacacagggttcttgctacagtgtacaatggtaactgcaaatactccaaaacccagcacgttgtagcacgcccgactcggaccgatg

SEQ ID NO: 7905 - DNA, 203 bp, synthetic construct
  source 1..203: mol_type = other DNA
ggcgcgccagtcctgtggcgacatggcagtgttggcacaacgcgttgagagtgaaatcacaagatgcaggcccacaacattcaacttcgggagactgttgtgtgaaacaggtgaggtctactaccggatgaaaagagctgagctgtattgcccacgacccttgcgggtcaggtacacgcataccactgcgactcggaccgatg

SEQ ID NO: 7906 - DNA, 203 bp, synthetic construct
  source 1..203: mol_type = other DNA
ggcgcgccagtccttggcgatcatgctagctgacaccggtctcgagattctggacagcaccttcgtcgtgaagaaaatctccgacgcgctctccagcgttttccacgtcccggcccctgtcttcagtttcggagccccgattctgttggcaggtttggtcaaggtcgcctccacgttcttccggtccacgactcggaccgatg

SEQ ID NO: 7907 - DNA, 203 bp, synthetic construct
  source 1..203: mol_type = other DNA
ggcgcgccagtcctagaaccctgacggcaaggacttcaagtacttcgcccagatggtctccaccacagggttcatcccacccatggcttcgctcgaagataagggaaaaccgttcaacagcaaggtcatcattgcgacgagcaacctttattctgggttcacacctaggacgatggtctgccccgacgcgactcggaccgatg

SEQ ID NO: 7908 - DNA, 203 bp, synthetic construct
  source 1..203: mol_type = other DNA
ggcgcgccagtcctacggactcgacgccatggagcctgacacagcacccggtcttccctgggccctccaggggagacgccgcggagctctcatcgatttcgagaacggcactgtcggacccgagattgaacaggcactgaagctcatggagaagaaggagtacaagttcacctgccaaaccttcctgacgactcggaccgatg

SEQ ID NO: 7909 - DNA, 203 bp, synthetic construct
  source 1..203: mol_type = other DNA
ggcgcgccagtcctacacggaacacgcctacgagaacaagcgcatcactgttgaaggtggaatgccctcgggttgctccgccaccagcatcatcaacaccattctcaacaacatctacgtgctctacgccctgcgtagacactatgagggagtcgagctgtcgcactacaccatgatttcctacggggcgactcggaccgatg

SEQ ID NO: 7910 - DNA, 203 bp, synthetic construct
  source 1..203: mol_type = other DNA
ggcgcgccagtcctcacatgtcgccagtgtcagttgaaggtacgaatgtcatcatgttgattcttggattgaatattagtttgtataatgaaattaagcgcactttgaatgtagatagcataccaatggtacttaatttaaatgaattcagtagtatagttaaatcaattagcagtaaatggtataatcgactcggaccgatg

SEQ ID NO: 7911 - DNA, 203 bp, synthetic construct
  source 1..203: mol_type = other DNA
ggcgcgccagtcctgttgatgaattggataaattgccaatgtcaataaaatcaacggaggaactgattgaaatgaagaattctggaactttaactgaagaatttgagctactgatctccaactcagaagatgacaatgagtgaaattactaatgtcactatctaattatacagtatttagccatcacacgactcggaccgatg

SEQ ID NO: 7912 - DNA, 203 bp, synthetic construct
  source 1..203: mol_type = other DNA
ggcgcgccagtcctatattgtcaccatttctcagagcacaaaattatggtattaatcttccaatcacaggctccatggacactgcatacgctaattcaacgcaagaagaaacattcctcacttctacactttgcctatattatccgactgaggctgcgactgaaataaacgataattcatggaaagaccgactcggaccgatg

SEQ ID NO: 7913 - DNA, 203 bp, synthetic construct
  source 1..203: mol_type = other DNA
ggcgcgccagtcctacactgtcacaactatttcttacgaaagggtggccaactggatccgtatattttaaagaatatactaacattgcatcgttttctgttgatccgcagttgtattgtgattataacgtagtactaatgaaatatgacgcgacgttgcaattggatatgtcagaacttgcggatctacgactcggaccgatg

SEQ ID NO: 7914 - DNA, 203 bp, synthetic construct
  source 1..203: mol_type = other DNA
ggcgcgccagtcctaattgcagagcaacagattcaaaattttcaggtagctaattggttacattttgttaattataatcagtttagacaagtagtgattgatggagtgttaaatcaagtcttgaatgataatataagaaatggtcatgtagtcaaccaattaatggaagctctgatgcaattatctagcgactcggaccgatg

SEQ ID NO: 7915 - DNA, 203 bp, synthetic construct
  source 1..203: mol_type = other DNA
ggcgcgccagtccttgaaaaattgcaattaacatcagtaacatcattatgtatgctaattggaaatgctacggttataccgagtccgcaaacattgttccattactataatgtgaatgtcaattttcattcaaattataatgaaagaattaatgacgcagttgcaattataactgcggcaaatagattcgactcggaccgatg

SEQ ID NO: 7916 - DNA, 203 bp, synthetic construct
  source 1..203: mol_type = other DNA
ggcgcgccagtcctttgattttagagcgtcaatgcatatgttaacgtctaacctaacatttaccgtatattcagatttgcttgcgttcgtttcagctgatactgttgaaccaattaatgctgttgcttttgataatatgcgcatcatgaacgaactgtaaacgccaaccccattgtggagatatgacccgactcggaccgatg

SEQ ID NO: 7917 - DNA, 203 bp, synthetic construct
  source 1..203: mol_type = other DNA
ggcgcgccagtccttcgaatggtgagtcaaggcagctaaagtttggtaggaaaacaattttttcaactaaaaagaatatgcatgtcatggatgatatggctaacgaaagatacacgcctggtataataccaccagtgaatgttgataaaccaataccattaggaagaagagatgttccaggaagaaggcgactcggaccgatg

SEQ ID NO: 7918 - DNA, 203 bp, synthetic construct
  source 1..203: mol_type = other DNA
ggcgcgccagtcctgaaattttgatactattagactatcattccagttaatgagaccaccaaacatgacaccagcagtagcagtactattcccgaatgcacagccattcgaacatcatgcaacagtgggattgacacttagaattgagtctgcagtttgtgagtctgtactcgccgatgcaagtgaaacgactcggaccgatg

SEQ ID NO: 7919 - DNA, 203 bp, synthetic construct
  source 1..203: mol_type = other DNA
ggcgcgccagtcctggatataagtggtcagaaatatcatttaagccagcgaattatcaatacacatatactcgtgatggtgaagaagttaccgcacatactacttgttcagtgaatggcgttaatgacttcagttttaatggaggatatttaccaactgattttgttgtatctaaatttgaagtaattcgactcggaccgatg

SEQ ID NO: 7920 - DNA, 203 bp, synthetic construct
  source 1..203: mol_type = other DNA
ggcgcgccagtcctaaagagaattcatacgtctatatcgattactgggatgattcacaagcatttcgtaacgtggtgtatgtccgatcgttagcagcaaacttgaattcagttatgtgtactggaggcagctataattttagtctaccagttggacaatggcctgttttaactgggggagcagtttctcgactcggaccgatg

SEQ ID NO: 7921 - DNA, 203 bp, synthetic construct
  source 1..203: mol_type = other DNA
ggcgcgccagtcctggttcatctatacgttcgattggatcttcagcatcagcatggacggatgtatcaacacaaataactgatatatcgtcatcagtaagttcagtttcgacacaaacgtcaactatcagtagaagattgagactaaaggaaatggcaacacaaactgagggtatgaattttgatgatcgactcggaccgatg

SEQ ID NO: 7922 - DNA, 203 bp, synthetic construct
  source 1..203: mol_type = other DNA
ggcgcgccagtcctttaaaaatttgaacgataattacggcattactaagcaacaagcatttaatcttttaagatctgacccaagagttttacgtgaattcattaatcaggacaatcctataattagaaatagaattgaacaactgattatgcaatgcaggttgtgagtaatttctagaggatgtgacccgactcggaccgatg

SEQ ID NO: 7923 - DNA, 203 bp, synthetic construct
  source 1..203: mol_type = other DNA
ggcgcgccagtcctcacaccccactgactgactcctttggatcttgacctcggaatgcctacttgacctcccacttgcctctcccttttcggattgccggtggtgcctggcggaaaaagcacaagtgtgttgttggctaccaaactcctacccgacaaaggtgcgtgtccgcgtgctgagtaatgggacgactcggaccgatg

SEQ ID NO: 7924 - DNA, 203 bp, synthetic construct
  source 1..203: mol_type = other DNA
ggcgcgccagtccttaggagatgccaataacaggctcgcccatgagtagagcatggactgcggtgcatgtgacttcggtcaccaggggcatagcattgctcacccctgaatcaagtcatcgagatttctctgacctctgaagtgcactgtggttgcgtggctgggaatccacgcttgaccatgtactgcgactcggaccgatg

SEQ ID NO: 7925 - DNA, 203 bp, synthetic construct
  source 1..203: mol_type = other DNA
ggcgcgccagtcctcttgatagagtcgcggctggccgactcatgggttaaagtcagttgacaagacacatggcttcttcaattctgatctctgactccaccttcgcccccatcctcacccacaagctctctcgacgtgtcaggcgacaccccgttgcctggcatcccagagagaacacccggctgtcccgactcggaccgatg

SEQ ID NO: 7926 - DNA, 203 bp, synthetic construct
  source 1..203: mol_type = other DNA
ggcgcgccagtccttacatcacagccatggaagagttggatgcttgctacatcaacgaacaacaccggctcttcccccttccccgtccctctcattggtacaactgtctctactgtcaacatccctcggaggacggtgacactctcatgtcgctggcctgtgagtacgatgaagactgcccccaccatcgactcggaccgatg

SEQ ID NO: 7927 - DNA, 203 bp, synthetic construct
  source 1..203: mol_type = other DNA
ggcgcgccagtcctaggcctctttccaagttctttgctgaaaaccctcctcctgcttcccttgcagggaaaatgaatctctctgacttttctgacctcaccctctccacaccttgccaaatcgtgcgccagggaaattcaaccactaacatctacggaagtaataacaatgttactactgacgttggtcgactcggaccgatg

SEQ ID NO: 7928 - DNA, 203 bp, synthetic construct
  source 1..203: mol_type = other DNA
ggcgcgccagtcctgcaaacggttggactcctacggttaacacaggtcttggtgatggtcctgtctcctcttctgctgacgatcttgctggtcgctgtggtggatcctccaccgctagcaaggattcctccaaatcctctaaggttaaggttcacaactttaaccattggtgggaacctgctgcagctcgactcggaccgatg

SEQ ID NO: 7929 - DNA, 203 bp, synthetic construct
  source 1..203: mol_type = other DNA
ggcgcgccagtcctaaagctctctcccgtggcgttgacaaagcgctcgacgggattgagggcgccggcaaacttgccggtagtgccatcaaaagcaagctctcaggtgcccgccctggcccctcccctaatctcatagctctcaacccctcttccacccaatctggtaatgctatgatcacaacgggtcgactcggaccgatg

SEQ ID NO: 7930 - DNA, 203 bp, synthetic construct
  source 1..203: mol_type = other DNA
ggcgcgccagtccttccactgctcctgtggttgttgcttaccctcccaccccttctgtccctctccccaatccagatgctccctcacaacctggcccgtctggtgaccgtacatggttgctagacagtctcgaatggaccaccgaggacccatccttctggtgcctcgctggtccaaacgggatgcaacgactcggaccgatg

SEQ ID NO: 7931 - DNA, 203 bp, synthetic construct
  source 1..203: mol_type = other DNA
ggcgcgccagtcctacaatggctgagacgactggcgaaaaagttgccgaggctgtgattgaacctgtccttcttgctgctactggaactcctatttcttttgtcactaacctcttcgcccaatggcgaggggagctccagctttcccttcttttcactggttctgctcaacactttgggcgtcttgcacgactcggaccgatg

SEQ ID NO: 7932 - DNA, 203 bp, synthetic construct
  source 1..203: mol_type = other DNA
ggcgcgccagtcctactcttggtactgtctctatctgggtgatgaatccactcaccggaccatcatccgctcccccctctgctgtgatccaggctttcgtttctgctggggaatccttcaccttgcgtggtatccaagctcctggattccaaatccaggctgctgacgatgctgacgctcccactccacgactcggaccgatg

SEQ ID NO: 7933 - DNA, 203 bp, synthetic construct
  source 1..203: mol_type = other DNA
ggcgcgccagtcctgtttccaacattgagtctggttctgctactactgttcctgaacctcgtaccaccttctcctacactgacaatcctactccccctgacaccaacctacagcgtttcttctccatttacagacccatctttgtgaatggtcaggattactctgtgggcttcactgctgaggctggccgactcggaccgatg

SEQ ID NO: 7934 - DNA, 203 bp, synthetic construct
  source 1..203: mol_type = other DNA
ggcgcgccagtcctgtccgtcctaagggccgttcccgcattgtgcgtcagtgcttgactaacgatgtccccacccccacactctgtccagatgtgcgggtatacattgtcaaggtccagcgcatgacgtacacccattgggcactccgcgcggtccattcagatcgcgtggaacaaatttctctctcccgactcggaccgatg

SEQ ID NO: 7935 - DNA, 203 bp, synthetic construct
  source 1..203: mol_type = other DNA
ggcgcgccagtcctaacactggcttctctctcctccttggcttgggcgctcttgcccttctgtctggttgtgccgccgtgcaagcgtcgaaaggcggtataattcgacagggtcttctgtctcttgaagctcctcctgaggttgtccaggctgcaaaccgtgttgctgaatcaattgagaccactgctcgactcggaccgatg

SEQ ID NO: 7936 - DNA, 203 bp, synthetic construct
  source 1..203: mol_type = other DNA
ggcgcgccagtccttcggtagtgcgtgaggctgacctagccaggtctaccctcaatatctcaatggcagcaaaccgagttgctgagtcgattgaaaccaccgccaccgcagtgcgcgaggctgacctcgctagatcgaccctcaacatctcaatggctgcgtctgacatcagaatggcagcgacacagcgactcggaccgatg

SEQ ID NO: 7937 - DNA, 203 bp, synthetic construct
  source 1..203: mol_type = other DNA
ggcgcgccagtcctgtttcttccagtctgaacggcttcactgacatgctttcctctttctccaaaaccttcactcagggtgcttccaaaatgctgagtgatggtatttccactttccttacttgggtggccaaagtctttggttaccttcttgtcctctttggatctcccactccgatgtccatagctcgactcggaccgatg

SEQ ID NO: 7938 - DNA, 203 bp, synthetic construct
  source 1..203: mol_type = other DNA
ggcgcgccagtccttcctctgagcgcactccggtgtccgcgatcacggacgccatcacgcgctgtcgcgagctcaccaaggtggctgccgacgctaagtctggctctcactcttccttcctcctccaggccttgcgtaactaccaacttgctcttaattctgcacgcaaggcccaatctggtccccgtcgactcggaccgatg

SEQ ID NO: 7939 - DNA, 203 bp, synthetic construct
  source 1..203: mol_type = other DNA
ggcgcgccagtcctccagaacccgttgtgatctacctctatggtccaccgggaactggcaagtccctccttgcttctctccttgctagagttcttgctcagaagttatctggtaacccagatgacgtctactctccttcttctgccgtctgcgaatacttcgacggttacactggccaggtcgtccaccgactcggaccgatg

SEQ ID NO: 7940 - DNA, 203 bp, synthetic construct
  source 1..203: mol_type = other DNA
ggcgcgccagtcctctgggaaaggaacttacaatcatccatttccctaccatccgccaacatcgcgatctccgtcgctttattggctaccacccctatcccactggacatcttatttccactctctctggccctcctgtttacctgcggttttccaaaaaccgtatggttactcttgacctccccggtcgactcggaccgatg

SEQ ID NO: 7941 - DNA, 203 bp, synthetic construct
  source 1..203: mol_type = other DNA
ggcgcgccagtcctgttgtggaagaacctacagcttatggttacaaagcccccaccttccagggtctctgtggtgcacctctcatcacggatgatccagcaggtgttaagctgttgggactccacgttgccggggttactggttgctctggcttctctgtaccaatctctacctatcttcctgagatccgactcggaccgatg

SEQ ID NO: 7942 - DNA, 203 bp, synthetic construct
  source 1..203: mol_type = other DNA
ggcgcgccagtcctaaagtcacattaggcctcacacgtgtggtcgaagctgcacccatccacgctatcatcgctggtaggatgctgcttggtggactcattgagtacatgcaggcaaatcctggcaagcatggtagtgctgttggttgcaacccagacctacactggactaaattcttcttcaaattccgactcggaccgatg

SEQ ID NO: 7943 - DNA, 203 bp, synthetic construct
  source 1..203: mol_type = other DNA
ggcgcgccagtccttgtcactaccctcaagtctttgatctggattacaagtgttttgatgccaccctcccttcctgtgccttccgcattgttgagaaacacctcgaacgcctcattggagacgaacgggtaacccgttacatcgagaccatacgacactcgcgccatgtctttggcaacgagacgtatcgactcggaccgatg

SEQ ID NO: 7944 - DNA, 203 bp, synthetic construct
  source 1..203: mol_type = other DNA
ggcgcgccagtcctccatcattcatcaaggagttctacgacaggtacaccccacttgttgtgactccagcaaacaaaacagacactttcccggaaaactccaccatctatgacgtcacgtttctgaaacgttggtttgtgcctgatgacattcgaccattctacatccacccggtcatggatccagaccgactcggaccgatg

SEQ ID NO: 7945 - DNA, 203 bp, synthetic construct
  source 1..203: mol_type = other DNA
ggcgcgccagtcctcgatgccgggaaggccatttcgtttgctaccacattgggagtgaacaagtgccacgtacagatcatggacctcgggcacatgtgtgacgccaccatgagttatgagtgccctatgctggatgagggagtggaaccagatgatgtcgattgctggtgcaacacgacatcaacttgcgactcggaccgatg

SEQ ID NO: 7946 - DNA, 203 bp, synthetic construct
  source 1..203: mol_type = other DNA
ggcgcgccagtccttgtcttggaacatggaggctgcgttaccgtgatggcacaggacaagccaacagtcgacatagagttggtcacgacgacggttagtaacatggccgaggtaagatcctattgctacgaggcatcgatatcggacatggcttcggacagtcgttgcccaacacaaggtgaagcctacgactcggaccgatg

SEQ ID NO: 7947 - DNA, 203 bp, synthetic construct
  source 1..203: mol_type = other DNA
ggcgcgccagtcctagtcgggggtgtgttcaactcactgggtaagggcattcaccagatttttggagcagccttcaaatcactgtttggaggaatgtcctggttctcacagatcctcataggcacgctgctagtgtggttaggtttgaacacaaagaatggatctatctccctcacatgcttggccctcgactcggaccgatg

SEQ ID NO: 7948 - DNA, 203 bp, synthetic construct
  source 1..203: mol_type = other DNA
ggcgcgccagtcctagtcaagcaggcctgggaagaggggatctgtgggatctcatccgtttcaagaatggaaaacatcatgtggaaatcagtagaaggggagctcaatgctatcctagaggagaatggagttcaactgacagttgttgtgggatctgtaaaaaaccccatgtggagaggtccacaaagcgactcggaccgatg

SEQ ID NO: 7949 - DNA, 203 bp, synthetic construct
  source 1..203: mol_type = other DNA
ggcgcgccagtccttgaggaatgtccaggcaccaaggtttacgtggaggagacatgcggaactagaggaccatctctgagatcaactactgcaagtggaagggtcattgaggaatggtgctgtagggaatgcacaatgcccccactatcgtttcgagcaaaagacggctgctggtatggaatggagatcgactcggaccgatg

SEQ ID NO: 7950 - DNA, 203 bp, synthetic construct
  source 1..203: mol_type = other DNA
ggcgcgccagtcctaggactactgttactcacaaggagtgggaagcggagctggccccctagtgaagttctcacagccgttggcctgatatgtgcactggccggagggtttgccaaggcagacattgagatggctggacccatggctgcagtaggcttgctaattgtcagctatgtggtctcgggaaacgactcggaccgatg

SEQ ID NO: 7951 - DNA, 203 bp, synthetic construct
  source 1..203: mol_type = other DNA
ggcgcgccagtcctgagtgtggacatgtacattgaaagagcaggtgacatcacatgggaaaaggacgcggaagtcactggaaacagtcctcggcttgacgtggcactggatgagagtggtgacttctccttggtagaggaagatggtccacccatgagagagatcatactcaaggtggtcctgatggccgactcggaccgatg

SEQ ID NO: 7952 - DNA, 203 bp, synthetic construct
  source 1..203: mol_type = other DNA
ggcgcgccagtcctactcagcgaggtacagcttttggccgtacctcccggagagagggccagaaacattcagaccctgcctggaatattcaagacaaaggacggggacatcggagcagttgctctggactaccctgcagggacctcaggatctccgatcctagacaaatgtggaagagtgataggactcgactcggaccgatg

SEQ ID NO: 7953 - DNA, 203 bp, synthetic construct
  source 1..203: mol_type = other DNA
ggcgcgccagtccttgatgcgtttcctgactctaactcaccaatcatggacacagaagtggaagtcccagagagagcctggagctcaggctttgattgggtgacagaccattctgggaaaacagtttggttcgttccaagcgtgagaaacggaaatgaaatcgcagcctgtctgacaaaggctggaaacgactcggaccgatg

SEQ ID NO: 7954 - DNA, 203 bp, synthetic construct
  source 1..203: mol_type = other DNA
ggcgcgccagtcctgcgggtcatacagctcagcaggaagacttttgagacagaatttcagaaaacaaaaaatcaagagtgggactttgtcataacaactgacatctcagagatgggcgccaacttcaaggctgaccgggtcatagactctaggagatgcctaaaaccagtcatacttgatggtgagagcgactcggaccgatg

SEQ ID NO: 7955 - DNA, 203 bp, synthetic construct
  source 1..203: mol_type = other DNA
ggcgcgccagtcctagtcatcttggctgggcccatgcctgtcacgcatgctagtgctgctcagaggagaggacgtataggcaggaaccctaacaaacctggagatgagtacatgtatggaggtgggtgtgcagagactgatgaaggccatgcacactggcttgaagcaagaatgcttcttgacaacatcgactcggaccgatg

SEQ ID NO: 7956 - DNA, 203 bp, synthetic construct
  source 1..203: mol_type = other DNA
ggcgcgccagtcctcgctggaaaaagaggagcggctttgggagtaatggaggccctgggaacactgccaggacacatgacagagaggtttcaggaagccattgacaacctcgccgtgctcatgcgagcagagactggaagcaggccttataaggcagcggcagcccaactgccggagaccctagagaccgactcggaccgatg

SEQ ID NO: 7957 - DNA, 203 bp, synthetic construct
  source 1..203: mol_type = other DNA
ggcgcgccagtcctgtttttattactggtggtgctcatacccgagccagagaagcaaagatctccccaagataaccagatggcaattatcatcatggtggcagtgggccttctaggtttgataactgcaaacgaacttggatggctggaaagaacaaaaaatgacatagctcatctaatgggaaggagcgactcggaccgatg

SEQ ID NO: 7958 - DNA, 203 bp, synthetic construct
  source 1..203: mol_type = other DNA
ggcgcgccagtccttggcatgggcaaagggatgccatttatgcatggggaccttggagtcccgctgctaatgatgggttgctattcacaattaacacccctgactctgatagtagctatcattctgcttgtggcgcactacatgtacttgatcccaggcctacaagcggcagcagcgcgtgctgcccacgactcggaccgatg

SEQ ID NO: 7959 - DNA, 203 bp, synthetic construct
  source 1..203: mol_type = other DNA
ggcgcgccagtcctggctggagctctgatcacagcagcgacctccaccttgtgggaaggctctccaaacaaatactggaactcctctacagccacctcactgtgcaacatcttcagaggaagctatctggcaggagcttcccttatctatacagtgacgagaaacgctggcctggttaagagacgtggcgactcggaccgatg

SEQ ID NO: 7960 - DNA, 203 bp, synthetic construct
  source 1..203: mol_type = other DNA
ggcgcgccagtcctaggtgggacgggagagactctgggagagaagtggaaagctcgtctgaatcagatgtcggccctggagttctactcttataaaaagtcaggtatcactgaagtgtgtagagaggaggctcgccgtgccctcaaggatggagtggccacaggaggacatgccgtatcccggggaagcgactcggaccgatg

SEQ ID NO: 7961 - DNA, 203 bp, synthetic construct
  source 1..203: mol_type = other DNA
ggcgcgccagtccttgcaaagatcagatggttggaggagagaggatatctgcagccctatgggaaggttgttgacctcggatgtggcagagggggctggagctattatgccgccaccatccgcaaagtgcaggaggtgagaggatacacaaagggaggtcccggtcatgaagaacccatgctggtgcacgactcggaccgatg

SEQ ID NO: 7962 - DNA, 203 bp, synthetic construct
  source 1..203: mol_type = other DNA
ggcgcgccagtcctaagctatgggtggaacatagttcgtctcaagagtggagtggacgtcttccacatggcggctgagccgtgtgacactctgctgtgtgacataggtgagtcatcatctagtcctgaagtggaagagacacgaacactcagagtgctctctatggtgggggactggcttgaaaaaagcgactcggaccgatg

SEQ ID NO: 7963 - DNA, 203 bp, synthetic construct
  source 1..203: mol_type = other DNA
ggcgcgccagtcctaccaggggccttctgtataaaggtgctgtgcccatacaccagcactatgatggaaaccatggagcgactgcaacgtaggcatgggggaggattagtcagagtgccattgtgtcgcaactccacacatgagatgtactgggtctctggggcaaagagcaacatcataaaaagtgtcgactcggaccgatg

SEQ ID NO: 7964 - DNA, 203 bp, synthetic construct
  source 1..203: mol_type = other DNA
ggcgcgccagtcctatacggccaacaaagagtcttcaaagaaaaagtggacaccagggtgccagatccccaagaaggcactcgccaggtaatgaacatagtctcttcctggctgtggaaggagctggggaaacgcaagcggccacgcgtctgcaccaaagaagagtttatcaacaaggtgcgcagcaacgactcggaccgatg

SEQ ID NO: 7965 - DNA, 203 bp, synthetic construct
  source 1..203: mol_type = other DNA
ggcgcgccagtccttctcagaccagctgaaggaggaaaaacagttatggacatcatttcaagacaagaccagagagggagtggacaagttgtcacttatgctctcaacacattcaccaacttggtggtgcagcttatccggaacatggaagctgaggaagtgttagagatgcaagacttatggttgttcgactcggaccgatg

SEQ ID NO: 7966 - DNA, 203 bp, synthetic construct
  source 1..203: mol_type = other DNA
ggcgcgccagtcctaccctcgactggatggagcaattgggaagaagtcccgttctgctcccaccacttcaacaagctgtacctcaaggatgggagatccattgtggtcccttgccgccaccaagatgaactgattggccgagctcgcgtctcaccaggggcaggatggagcatccgggagactgcctgcgactcggaccgatg

SEQ ID NO: 7967 - DNA, 203 bp, synthetic construct
  source 1..203: mol_type = other DNA
ggcgcgccagtccttcttgcaaaatcatatgcgcagatgtggcagctcctttatttccacagaagagaccttcgactgatggctaatgccatttgctcggctgtgccagttgactgggtaccaactgggagaaccacctggtcaatccatggaaagggagaatggatgaccactgaggacatgctcatcgactcggaccgatg

SEQ ID NO: 7968 - DNA, 203 bp, synthetic construct
  source 1..203: mol_type = other DNA
ggcgcgccagtcctaggagaagctgggaaaccaagctcatagtcaggccgagaacgccatggcacggaagaagccatgctgcctgtgagcccctcagaggacactgagtcaaaaaaccccacgcgcttggaagcgcaggatgggaaaagaaggtggcgaccttccccacccttcaatctggggcctgacgactcggaccgatg

SEQ ID NO: 7969 - DNA, 203 bp, synthetic construct
  source 1..203: mol_type = other DNA
ggcgcgccagtcctccttttcggcctaaagaagatccttatgaagttgctgggagggtttggaccagttaggctggttctagccttccttgccttcttcaaattcacatcgctgcgcccttcccctggactcctcaagagatggagctcggtagggaagaaagaggccagcagaaccctcaaagggttcgactcggaccgatg

SEQ ID NO: 7970 - DNA, 203 bp, synthetic construct
  source 1..203: mol_type = other DNA
ggcgcgccagtcctacctggcgaggatggcatcaacaggtgcatactgcaggccatggatgttggcgaactctgcgctcataccatgacgtatgaatgcccaatccttgataagttggttgaacctgaagacatagactgctggtgcaatgcttcggccacctgggtgatgtacgggacgtgtttgcacgactcggaccgatg

SEQ ID NO: 7971 - DNA, 203 bp, synthetic construct
  source 1..203: mol_type = other DNA
ggcgcgccagtcctgacagtcatgggtgaaaacagacccaccatcgacatagagcttctcaagacagctgcctccaacatggctcatgcaagggcctactgctatgaggcgaccataagtgatacagtcatggagacaagatgcccgacacaaggagaagcagtgtctgacaaaaaaggggatggcaacgactcggaccgatg

SEQ ID NO: 7972 - DNA, 203 bp, synthetic construct
  source 1..203: mol_type = other DNA
ggcgcgccagtccttatcggaaaggcagtgcaccaggttctgggcggagccttcaggacgctgtttggtggcatgaattggttcaccaagatcctgatcggtgggctactgtgctggctgggagtgaactcccgtagcacgtcgctggcagcagggttcatcacattgggggcaatcctcatctttttcgactcggaccgatg

SEQ ID NO: 7973 - DNA, 203 bp, synthetic construct
  source 1..203: mol_type = other DNA
ggcgcgccagtcctctctacgcacacaatttggagtgagggagtggaggagagtcatttgatcatcccacacacactagcaggaccacgctcttggcacaacaccaggaaaggataccagacccaggtcaaggggccttgggctgaaggtgagcttgaattggtttttgaccactgcccaggaaccaccgactcggaccgatg

SEQ ID NO: 7974 - DNA, 203 bp, synthetic construct
  source 1..203: mol_type = other DNA
ggcgcgccagtcctggtcactctcatggacttgggcaggtacatgttcctggtggggacagcgttcgctgaagtgaactctggtagagacgtggcccatctggcgttgattgccactttcaaagttaggccggcattgctaacaacatatctatggagattgcactggggcacaagggaagagataggcgactcggaccgatg

SEQ ID NO: 7975 - DNA, 203 bp, synthetic construct
  source 1..203: mol_type = other DNA
ggcgcgccagtcctgagaaggagctggcccccaacagaagctctatccgccgtagggatgttgggcctggtgatgggcgcgacgatgaagcccggagctgagctgtcagggccactcgtagcctccggcctcctgctggtttgctacatcatatctggaaaaggcacagatctttttttagagcgcgccgactcggaccgatg

SEQ ID NO: 7976 - DNA, 203 bp, synthetic construct
  source 1..203: mol_type = other DNA
ggcgcgccagtccttgcggaactgtcctggtgtccggacgcagcggtttcaggcaccagcccaaggcttgatgtgaagatcacagaaggtggagatatggaactgattgatgataaaggaccatccacagaatctatcgtcctcaaggcaaccctcgtggctgtgtgtggaatgtggccgctggcaatcgactcggaccgatg

SEQ ID NO: 7977 - DNA, 203 bp, synthetic construct
  source 1..203: mol_type = other DNA
ggcgcgccagtcctggcaccaggtaaaggagcagagaatgtgcagaccaaacctgggatattcaacacagccacagggaccataggggcggttgcattggattaccccgctggcacctctggctcacccatcctaaacagtgaagggaaggttgtgggcttgtacgggaacggtgtgctggtgggcggcgactcggaccgatg

SEQ ID NO: 7978 - DNA, 203 bp, synthetic construct
  source 1..203: mol_type = other DNA
ggcgcgccagtcctaagctcatatgtgagtgccatatcccaggtcaagcaccctgagacccaaccacaggtggtcagtgacgacatgttcaggaaaaagaacttgaccattcttgacctccatcccggggcgggaaagaccagacgcatcctgcctgagatagtgaaacaagctattgacaggaggatcgactcggaccgatg

SEQ ID NO: 7979 - DNA, 203 bp, synthetic construct
  source 1..203: mol_type = other DNA
ggcgcgccagtcctgaggacagtcatcttggccccgacgagagttgttgccgcggagatgggtgaggctctgaaggggctgcccgttagatacatgaccacagccgtgcagagagagcacacaggaaccgagatcgtggatgtcatgtgccatgcaacattcaccatgcggttgatacagcccatgcgcgactcggaccgatg

SEQ ID NO: 7980 - DNA, 203 bp, synthetic construct
  source 1..203: mol_type = other DNA
ggcgcgccagtcctagatgacatggaaatcatggttcccgataaaccctggaataaagggtttgaatgggtcaccgactatcctggcaagactgtgtggtttgttcctagtgtccgcaatgggaatgagatagcatgttgtctggaaaaggcaggaaagaaaaccattcagctaaataggaaaagcttcgactcggaccgatg

SEQ ID NO: 7981 - DNA, 203 bp, synthetic construct
  source 1..203: mol_type = other DNA
ggcgcgccagtcctcaacacagagtatcagagaacaaagaatgaacaatgggactttgtgatcacaacagacatctcggagatgggcgccaactttgacgctgagcgcgtgattgactcacgaaaatgcataaaaccagtcattctggaggaaggcagggttaacctggtgggaccaatcccagtgaccgactcggaccgatg

SEQ ID NO: 7982 - DNA, 203 bp, synthetic construct
  source 1..203: mol_type = other DNA
ggcgcgccagtcctcgcctcaagcgccgctcagagaagagggaggatcggcagaaatccgagtagaacaggtgacgagtaccgatactcgggggggaccgttgaggatgatagtgaccacgcccactggacagaagccaaaatcctccttgacaatgtgcagatgccagacaggataataccccagctcgactcggaccgatg

SEQ ID NO: 7983 - DNA, 203 bp, synthetic construct
  source 1..203: mol_type = other DNA
ggcgcgccagtcctctatggacctgagcaaggaaaagtgaatgacgttgacgggatctacagactgcgggagccagagaaaaaagtgttcattgagcttctcaagagagctgaattgccagtgtggctaacctaccaggtcgcgtcagcgggcatacagtacaatgacaaaaaatggtgctttgatggcgactcggaccgatg

SEQ ID NO: 7984 - DNA, 203 bp, synthetic construct
  source 1..203: mol_type = other DNA
ggcgcgccagtcctaacgggcggtggatgcttgctgatgatgaagagcaaacccatagggaaaatgactgcgggactggtggtgacattggtagcagccggcctgtgttggcaagccaacgtcagtaaggttgtgatcgccagcgggatgaccgtgaccttgctcctgctgatagtgctcgtcccagacgactcggaccgatg

SEQ ID NO: 7985 - DNA, 203 bp, synthetic construct
  source 1..203: mol_type = other DNA
ggcgcgccagtcctacggctcgaacttgatttgaaacctgcaaccacctggacactgtacgcagtcattaccattatcttgtcacccttcgtgcagcacagcatcattaccacatacaacaacttctcattgacagcaataggcaaccaggccgggattctgttcggaatggggacgggagtccccttcgactcggaccgatg

SEQ ID NO: 7986 - DNA, 203 bp, synthetic construct
  source 1..203: mol_type = other DNA
ggcgcgccagtcctctacagaacttgggcttacctagggagttacaccaccgagccaaagggaacatccgcctccatggtgaacggagtcgtgaagcttctcacgaagccctgggatgtggtgagcggagttgtgaacatagccatgaccgacacaaccccttttgggcaacagagagtgttcaaggacgactcggaccgatg

SEQ ID NO: 7987 - DNA, 203 bp, synthetic construct
  source 1..203: mol_type = other DNA
ggcgcgccagtcctcgccgatgacacagcaggatgggacactcgtgttacggaagcagacttggatgacgaagcgctcatcatagagagcatggacagagagcacgcccagctggcttcggtgctcacggaaatggcttacaagaacaaagtggtttgtgtgctgaggccgggaaaaggggaaaccctcgactcggaccgatg

SEQ ID NO: 7988 - DNA, 203 bp, synthetic construct
  source 1..203: mol_type = other DNA
ggcgcgccagtcctgatggatgtgattagccgcagggaccaaagagggagtgggcaggtggtgacatacgcactgaacacctttacaaatgagaaagtccagctcattagatgcatggaggccgagggcgtcctagaagagagtgacgcagagcacctgatggatgagagcaaagtcaacaaatggctcgactcggaccgatg

SEQ ID NO: 7989 - DNA, 203 bp, synthetic construct
  source 1..203: mol_type = other DNA
ggcgcgccagtccttgtgcggcctgcgagccccctgggactatcggtatccaggctaaacaaaaaccgttgcacctcattgggctggtgcgtaaaatgacattgcggggcccaagccggctaagctgtaaccggtggaaggactaggaggttagaggagaccccccgcgcccataaccaacataaaaccgactcggaccgatg

SEQ ID NO: 7990 - DNA, 203 bp, synthetic construct
  source 1..203: mol_type = other DNA
ggcgcgccagtcctgctgtaaccggtggaaggactaggaggttagaggagaccccccgcgcccataaccaacataaaacagcatattgacacctgggaaagaccggagactctgttggctttccccacaccagccccctggcacagagcgccagatcgggggttggtgtggagcaacccaacaggactcgactcggaccgatg

SEQ ID NO: 7991 - DNA, 203 bp, synthetic construct
  source 1..203: mol_type = other DNA
ggcgcgccagtcctgatatctcggatcaagaggatgctcgatggactactcagaggagtaggaccagtcagaattgtcttggcgatcttaacctttttcaaatttacagctttgaaaccaacggcaggattgttgagacgatggaagctagtgggggtggttgaggccacccgccacttgaaaagcttcgactcggaccgatg

SEQ ID NO: 7992 - DNA, 203 bp, synthetic construct
  source 1..203: mol_type = other DNA
ggcgcgccagtcctggcggttatgatcccaactgctggaggaaacaaccgatgcgttgtgaaagctctggatgtcggattgatgtgccctgatgacatcacgtatttatgtcccaagctagaggatgggtatgacccagaggatatagactgctggtgcaacaccacggagatctacatccactacggcgactcggaccgatg

SEQ ID NO: 7993 - DNA, 203 bp, synthetic construct
  source 1..203: mol_type = other DNA
ggcgcgccagtcctccggtgcaccccaacgcgacacgcgagacgatcgaggcggtctatcacagtgcaccatcacggagagagcttgctcgaagcaaagaatacaccatggatggactcaaccaaggctaccaaatacttgaccaaggtggaaaactgggccatacgtaaccctggatacgcactagccgactcggaccgatg

SEQ ID NO: 7994 - DNA, 203 bp, synthetic construct
  source 1..203: mol_type = other DNA
ggcgcgccagtcctaagctgtgtgaccattacagcaaaggacaagcccacaatcgatgtgaagatgatgaacatggaagccactgacttggcgcttgtgagatcatattgttacgagcctaaaatcactgatgttagtactgaaccaagatgccccaccatgggagaggcccacaacaccaaagccaacgactcggaccgatg

SEQ ID NO: 7995 - DNA, 203 bp, synthetic construct
  source 1..203: mol_type = other DNA
ggcgcgccagtccttaaccaggagtacgtgtgtaagaaaggttatactgacagaggttggggtaatggttgtggactgttcggaaagggcagtattcacacatgcgccaaatttgagtgcaccaataaggctgagggaagaattgtgcagaaggaaaatgttcatttcgagttggctgtgtttgtgcacgactcggaccgatg

SEQ ID NO: 7996 - DNA, 203 bp, synthetic construct
  source 1..203: mol_type = other DNA
ggcgcgccagtcctagggcatgggacagttgttgtggaactcagctattctgggtctgatggaccatgtcgtatacccatatcaatgacagccaaccttcaggatttgaccccgataggaaggctcataacggtcaatccatatgtgtctacatcatcatcggggacaaaagtggttgttgagcttgacgactcggaccgatg

SEQ ID NO: 7997 - DNA, 203 bp, synthetic construct
  source 1..203: mol_type = other DNA
ggcgcgccagtcctacgggaaaaaggaatctgtggtgtaaggtccgtgggaagactggagcataacatgtggaattcaatcaagcatgagctgaatgccatacttgaggacaacgggccagacttgacagtcgtcgttgaacagccaactggtagatttaggaaaacccaccggcgtttagtgtggaccgactcggaccgatg

SEQ ID NO: 7998 - DNA, 203 bp, synthetic construct
  source 1..203: mol_type = other DNA
ggcgcgccagtcctaggcaccaaagtgacagtcaccccaacatgcagggatagggttgcctccgccagaacaacaacggcaagcggtaagctgatcacagattggtgctgtaggtcatgcactctccctccattgcggtacatgacaaagagcggctgctggtatggaatggagattagacctacagtcgactcggaccgatg

SEQ ID NO: 7999 - DNA, 203 bp, synthetic construct
  source 1..203: mol_type = other DNA
ggcgcgccagtccttgccaccctcttaggcgtggcactggcaatgataaccatggcgttgcacgactggaacatgaccatacccagcttgttgaattcaggagccacggcgtggctgttgctgcgcgcagtgagtgaagggaccgtcagcgcggcctgtattcccattctcggacttttggctccaggcgactcggaccgatg

SEQ ID NO: 8000 - DNA, 203 bp, synthetic construct
  source 1..203: mol_type = other DNA
ggcgcgccagtcctaatgaaaataattggaattgatgtatttcggatcgggctgcttatcatcggagttatgtcactcctgaaagaaagaaacaatgccatcgcaaaaaagaaaggtggagtgctgattggtttggccctggcccaagacggctgggtgaatccactggtgtacgcaggactgacgttcgactcggaccgatg

SEQ ID NO: 8001 - DNA, 203 bp, synthetic construct
  source 1..203: mol_type = other DNA
ggcgcgccagtccttgacctgtggttggagcgagctggagacatctcgtggattgaggatgcccaaataacaggaagctcacaacggtatgacgttgagatagattgtgatgggaacatgaaattgatgaatgatcaaggagtccctttttccatttgggcccttaggacaggactcattctagcatccgactcggaccgatg

SEQ ID NO: 8002 - DNA, 203 bp, synthetic construct
  source 1..203: mol_type = other DNA
ggcgcgccagtcctagctggagtaggagtgatgtttgatggggttttccacacgatgtggcatgtgacgaatggggccaccattaacgtgggggacggttgcctagtcccctattgggctagtgtaagagaggacttgatatcgtatggaggaccttggaagatgggcacgaaatggaacggggttgacgactcggaccgatg

SEQ ID NO: 8003 - DNA, 203 bp, synthetic construct
  source 1..203: mol_type = other DNA
ggcgcgccagtccttaatggcattcttgtcggagcaggcagcttcgttagcatgatttcccaaggccagcgaatggaagaagagattccgcaagtgttcagtgaagacatgctgaggaaaagacagctaactgtgcttgacttgcacccaggctcaggaaaaacaaggaaagtgcttccccaaattgtcgactcggaccgatg

SEQ ID NO: 8004 - DNA, 203 bp, synthetic construct
  source 1..203: mol_type = other DNA
ggcgcgccagtcctgtcacgccttctcacgccacaacgtgttcccaactacaacttgtttgtgatggatgaagcccatttcaccgaccccgcgagcatagctgcccgaggatacatctcaaccaaagtggagctaggcgaggcggcagccattttcatgacggccacccctccaggaacgcgtgaccccgactcggaccgatg

SEQ ID NO: 8005 - DNA, 203 bp, synthetic construct
  source 1..203: mol_type = other DNA
ggcgcgccagtcctttgtggcaagagatcagccattggcgtgtctgaagtggtcaaaatgcttccagagcatttcgcacacagaatgggagaatccatggacaatctgtacatgttgaccacttctgagaaaggtagcagggctcacagggaagcgctagaggagctaccagaaacactggaaacaatcgactcggaccgatg

SEQ ID NO: 8006 - DNA, 203 bp, synthetic construct
  source 1..203: mol_type = other DNA
ggcgcgccagtcctaaggagaacagcagcaggtgtgatgaaaaatccagtggttgatggaatcgtggcaacggacgtaccggatctagaagcaagcacaccaatcactgagaagaaatttggacaggtcatactaattgtggtagccttgtgctcagtttttctgaagcctggaacaacatcactaaccgactcggaccgatg

SEQ ID NO: 8007 - DNA, 203 bp, synthetic construct
  source 1..203: mol_type = other DNA
ggcgcgccagtcctctccaccacatggcatcatgacacagaaaatccatacaaaacctggaactaccatggaagttatgaagttaaagcaacaggatcagccagttccatggttaatggagtcgtgaaggtgttgtcaaagccttgggatgccttgcagaacgtagtaaacatggccatgactgacaccgactcggaccgatg

SEQ ID NO: 8008 - DNA, 203 bp, synthetic construct
  source 1..203: mol_type = other DNA
ggcgcgccagtccttagccacgcggcccttggtgcaatctttaaagaacagaacaagtgggcatcagctcgggaagcagtggaggacccagcgttttgggagttggtggatcaggaacgcgaggcgcaccttcaaggaaagtgtgagacatgcatctacaacatgatgggaaagagagaaaagaaaatcgactcggaccgatg

SEQ ID NO: 8009 - DNA, 203 bp, synthetic construct
  source 1..203: mol_type = other DNA
ggcgcgccagtcctgaaagtgatgcggcctgggagggaaggtatcaccgtgatggatgtgatttccagggaagaccagagaggaagtggacaagtcgtcacctacgcgttgaataccttcaccaatttgtgtgtccaattgattagatgcatggaaggagaaggactgctgaagcctgaagaagttgacgactcggaccgatg

SEQ ID NO: 8010 - DNA, 203 bp, synthetic construct
  source 1..203: mol_type = other DNA
ggcgcgccagtcctccccgagtggaaaccctcaacgggatggaggaactggcaagacgtccctttctgttcacatcatttccacgagttaaacatgaaggatggcagaaccatcgttgtcccatgcagacaccaggatgaactgataggaagggcacgattgtcaccaggatctgggtggtccctcaccgactcggaccgatg

SEQ ID NO: 8011 - DNA, 203 bp, synthetic construct
  source 1..203: mol_type = other DNA
ggcgcgccagtccttgaaacagcatgtctgagcaaagcttatggccagatgtggctactcatgtactttcacagacgtgacctgcggctgatggccaatgccatatgttcatctgtgccagtctcatgggtgcccacgggaagaaccacctggtcaattcacggaaaaggagaatggatgacaacagacgactcggaccgatg

SEQ ID NO: 8012 - DNA, 203 bp, synthetic construct
  source 1..203: mol_type = other DNA
ggcgcgccagtcctagatatgttgagagtctggaacagggtgtggattgaggagaacgaacacatggaagacaagacccctgtggcctcatggaacgatgtgccgtacctcggaaagcgcgaggacagttggtgtggaagtctgatagggcacagaacacgatcaacctgggcagagaacatatacaccgactcggaccgatg

SEQ ID NO: 8013 - DNA, 203 bp, synthetic construct
  source 1..203: mol_type = other DNA
ggcgcgccagtcctctcggagagctccctggcgttggagaggataggcacccagagtcaggccacaggttttgtgccactagcatgcagtgctgcctgagcaaagacatgccccaggtggactgggtaaacaaagccgcaaggcccccgtggcccaagcaagggaatggtgtgacccttgtgtaaggacgactcggaccgatg

SEQ ID NO: 8014 - DNA, 203 bp, synthetic construct
  source 1..203: mol_type = other DNA
ggcgcgccagtccttggaggaggagctcctccgaagaaggagagagatcgaggaggccaaaaggtctcgctccctgggacttcaagctccatcggatgggaccgtggcaaacgggtcaagggactcggcggacgaaagggactgctcggcaagctggggctgggatgggggtcttttttacagaaagacgactcggaccgatg

SEQ ID NO: 8015 - DNA, 203 bp, synthetic construct
  source 1..203: mol_type = other DNA
ggcgcgccagtcctcatcatccaagccatcatgcacctggtcctagtcctacacgccctgttcatgtccattgaccaacgctttaaggcgctcacccggcgggtgcgcgccctcgagaatcgacgatctgccaatcccctactgctcgccactatcatctgcgcggtcgccaccttgtgtggcaccatcgactcggaccgatg

SEQ ID NO: 8016 - DNA, 203 bp, synthetic construct
  source 1..203: mol_type = other DNA
ggcgcgccagtcctggtgatcgacatgcaagtgtcctccgctaaaggcgtgcaaatttacgaagggaaaacaaaccggactgactacttgcacttgttcaagcttccaaaagatggatgttggaacggagtgctggtttccaaacactgtcctaaggtcggcgacttggccaaggacttggaggccaccgactcggaccgatg

SEQ ID NO: 8017 - DNA, 203 bp, synthetic construct
  source 1..203: mol_type = other DNA
ggcgcgccagtccttgactgcggatctacatggagcgaattcacactgcgatataatcgatgtgtgggaaagaagcgcgtcaagcgggctaccgaacaaccgaaagcggacctacttgcggagatggagatggtaacgttcaagaccatccgtcaaaacaagacgattttcattatcgctctgctctgcgactcggaccgatg

SEQ ID NO: 8018 - DNA, 203 bp, synthetic construct
  source 1..203: mol_type = other DNA
ggcgcgccagtccttgacataccagtcaccttccgatttgctaagctcggaaacgcggctatgacttgtcgcttggaatcagagcaactcctgcttgattattaccacgttaccggcaacaaacgcgaaggactattcctgcggtcccaggtggacaattggcctggagtcatatcgtcttctgggggcgactcggaccgatg

SEQ ID NO: 8019 - DNA, 203 bp, synthetic construct
  source 1..203: mol_type = other DNA
ggcgcgccagtcctgttccgcgattgccaaggattaaaatcatcggtgtttgttcagagtggctttggatacagtggggttgttatcaccacgctgttgcaaccaacgaacgagagctgctcactcaacatggtgtgtcatggatgtcagttgctatcgacgaaaatggtgtttggggctggaaaacccgactcggaccgatg

SEQ ID NO: 8020 - DNA, 203 bp, synthetic construct
  source 1..203: mol_type = other DNA
ggcgcgccagtcctaacgtcccgtgccttcgtcggctgtgggaaccacactggttcactcttgattggcggtgcatctgtccccattgaatgtgtgatgaaccccatctctcaaggatggaggctaacccgacacgttgtggacaagtaccgacgattcggagtaccaggagttgcaggagtttggcgcgactcggaccgatg

SEQ ID NO: 8021 - DNA, 203 bp, synthetic construct
  source 1..203: mol_type = other DNA
ggcgcgccagtcctcgatttcgttggaggcttctccctcgggaacctgataaccaactcgacgttgctcgtcctcctagcagcgctggcattcctcgacaagcgtgttgtggtgctcctgctagtctgtggatacttctactacacacgtgctgatgtgggttgtggatttgatcccgacaggaagatcgactcggaccgatg

SEQ ID NO: 8022 - DNA, 203 bp, synthetic construct
  source 1..203: mol_type = other DNA
ggcgcgccagtcctcgtggtcgtgaaaccggttgagaaaccgagtgaagcgtgcccgacgtacctggccggttcatatgttaagaacgatgtcggagggtacactgatggcatgatgtggatgcgtagccgtaaggtgaatggctcatgggagatgttcgagcttgagacgacccaaagccaccaatgcgactcggaccgatg

SEQ ID NO: 8023 - DNA, 203 bp, synthetic construct
  source 1..203: mol_type = other DNA
ggcgcgccagtcctcatttggccacaggagtacacatttgatctcacgactcacaacgatagtacattgtttatgccagcccattacggagcgccgatgtccaaagccaaccacatccctgggtacggaactcaacacgagttcccgtggtacaaggccgagataaaattgcggcagggaccagttcccgactcggaccgatg

SEQ ID NO: 8024 - DNA, 203 bp, synthetic construct
  source 1..203: mol_type = other DNA
ggcgcgccagtccttgcgcattcaaagctcatcatcgagaacgagggtgttgaaatagacgagatggatcagatgttcccaaaaaccgtctctccaatccctggagctgaagctttgcttcaggatttccgggacagcctgccagtagatggatcttctcctttactggtgggcgtgcttctacacctcgactcggaccgatg

SEQ ID NO: 8025 - DNA, 203 bp, synthetic construct
  source 1..203: mol_type = other DNA
ggcgcgccagtcctcatgaacccattgttgggtatcacgtccatgctcttctgctggtttactgaagcatacgtgtggttgccgaggttgatcttcggcacgagcaatcgccgctctggggtgaacgacgttctgctagcccctcctgtctacgcggacgagattgatgttgaaagcgactttggacacgactcggaccgatg

SEQ ID NO: 8026 - DNA, 203 bp, synthetic construct
  source 1..203: mol_type = other DNA
ggcgcgccagtcctcataccggatggaacttacaggatagtggcccattgcacctttttcaagtatcacacaggagccggctatgccaaaggtggtgttttccacacactatggcatgtcacatcaggagcttgtgtctactgggagggcagagcggttcgtatgcactcggctgacatctaccgcgacgactcggaccgatg

SEQ ID NO: 8027 - DNA, 203 bp, synthetic construct
  source 1..203: mol_type = other DNA
ggcgcgccagtcctaaagacgcgcaaggtcttggttgccgaagcacaggaacacatcaaacaaacaaagagattgctcatcctaacaccaacacgagttgtcaaagatgaagtcatccgagcgattggtgaagcttgtccaggcgtggtcattggctcaaatctagccatgtaccggcgaaacgcagtcgactcggaccgatg

SEQ ID NO: 8028 - DNA, 203 bp, synthetic construct
  source 1..203: mol_type = other DNA
ggcgcgccagtcctcacggtagcatgccacgccacgctaacgcagtatgtcatggagaaaggcattgacagcatcaaattttcaaagatcataatggatgaatgccactttcttgatccgctgtcgattgcttgtcgtggaatcatggattaccataacgcgaagggagtcaacgtcacttacatgagcgactcggaccgatg

SEQ ID NO: 8029 - DNA, 203 bp, synthetic construct
  source 1..203: mol_type = other DNA
ggcgcgccagtcctgttggagaaagtcggcatcacagaagcctcggcaatccagcggcgtggaagaactggacggcgtgaagaagggcagtacatataccccatcggggttgagcttgaacatgagcccgcgaactgggcttgctggactgaggctcagatggtgcttgaccaaatgatgtgtgggcccgactcggaccgatg

SEQ ID NO: 8030 - DNA, 203 bp, synthetic construct
  source 1..203: mol_type = other DNA
ggcgcgccagtcctgaagctcaagatccggactgaagcaggggatcacgcgtacgcccccaggttccacgacgaccggtttgagaaatgcaacgaactggaaaagcgcacgaaattgtcaatctttctcaaacaacggagcgtcctcaattttgatgtcctcggtgtggctcatggcctgtatgtcgccgactcggaccgatg

SEQ ID NO: 8031 - DNA, 203 bp, synthetic construct
  source 1..203: mol_type = other DNA
ggcgcgccagtcctgttgacctcaatcaacatggaaatgctcggtaacacgtttcgcgacacaatcgaaaacctgcatgtcatatcaaatgtggacgacccttacgtctctgatttcacgatggggcaatctctgaatgcttggacagcagtcctcatcggggccgccgccagtacgatcctgctgttcgactcggaccgatg

SEQ ID NO: 8032 - DNA, 203 bp, synthetic construct
  source 1..203: mol_type = other DNA
ggcgcgccagtcctccacttcctgcgaggactgtttgccaatgaagctcaatcggcgtccgtgattggaggagttcaagtgtcggctattgcttgggagataatgattcccgtggctttttcagctttcttcgccacgacgttcgttacaaagatctacggcatcctgatcggggctatcttcttgatcgactcggaccgatg

SEQ ID NO: 8033 - DNA, 203 bp, synthetic construct
  source 1..203: mol_type = other DNA
ggcgcgccagtcctgttctggttcatcgtacatccaaaccgtctggcaacccgctcgctggtgaagactgacacttgcggaatcgggtaccggtggaaagagatattgaattctcttgacaagaacgcgtttgatcagtacaggtcccgaggtgtcaatgaaacggataagggagactatgtttctcgcgactcggaccgatg

SEQ ID NO: 8034 - DNA, 203 bp, synthetic construct
  source 1..203: mol_type = other DNA
ggcgcgccagtcctgttccggacaaaagggcataacctagccacattgaaagctggcgtcgacgtgtatgccgagccgccaaaagattgcaacacgatcgtctgcgacattggagaaagcgattctcgtggtgatgtggagcgaacccgcacgttgaaggtactgggcttgcttgagaagtggttggacgactcggaccgatg

SEQ ID NO: 8035 - DNA, 203 bp, synthetic construct
  source 1..203: mol_type = other DNA
ggcgcgccagtcctgcacaacccaaatgcagcttttgcctgcaaggtcttgtctccctatcacatcgaagtgcttcgaaaactggagacgttacaacacaagtacggaggccgggtcgttcggctgtcgtatagccggaactccaccgctgaaatgtattacatctcgggcgttcgggcaaacattgtcgactcggaccgatg

SEQ ID NO: 8036 - DNA, 203 bp, synthetic construct
  source 1..203: mol_type = other DNA
ggcgcgccagtcctaaatctgcacacctggtttgttgatcgtgaacatccttaccagtccttcaactaccacggatcattcgccactgacgacatttcccccggtgggcaaacggtgaatcctatgatgcggcgcatcatgtggccgtgggactttctcactcgtgtcaccacattcatgatgacggacgactcggaccgatg

SEQ ID NO: 8037 - DNA, 203 bp, synthetic construct
  source 1..203: mol_type = other DNA
ggcgcgccagtcctcgtgtctacgtattcgcagcaaaagatccttagggagaaggtcgacacgctaacagtcgagccggacacacgcacgaggagcttgaaccggctaatcatgaaacatttttcacgcctgttcaagaagcgaggactacgaccccgaatcctagctccctctgactacgtcaacaacgactcggaccgatg

SEQ ID NO: 8038 - DNA, 203 bp, synthetic construct
  source 1..203: mol_type = other DNA
ggcgcgccagtcctgtctcctaggtactctagctgggagcaagttgagttctgttcccaccatttccacgccttggtgcttagagacggacgagagattatcgctccttgccgtgaccaacatgaaatcattgggagagctcggatccagaaaggaggtgtggttgacatgtcagctgccgggtgcttcgactcggaccgatg

SEQ ID NO: 8039 - DNA, 203 bp, synthetic construct
  source 1..203: mol_type = other DNA
ggcgcgccagtcctggccaaagctcacgctcaaatgtgggggttgtactacttccaccggcgagacctgcggctaggattcgctgcaatcgtgtcggctgttccctcgaattgggttccaacgggccgcgtctcatggtctgtgcaccagcatgctgagtggatgacaacacaagacatgctggaggtcgactcggaccgatg

SEQ ID NO: 8040 - DNA, 203 bp, synthetic construct
  source 1..203: mol_type = other DNA
ggcgcgccagtcctatggaacaccgtttggattgtgaacaacccgtggatgaggaccaaagaccttgtcaaagcttggacggacatcccgtatttacctaagtcaaaggacatagcgtgcggcagtttgattggcgaacgtgacagagcttcgtggtccaagaacatcgtggccactgttgagacagccgactcggaccgatg

SEQ ID NO: 8041 - DNA, 203 bp, synthetic construct
  source 1..203: mol_type = other DNA
ggcgcgccagtcctgcgctgaacaagcttggtatcttggcaactaccactggatggtttccagcccgcgcaaggaaggacacgtaaatcacgtgttcttgggagttgacgactctccgcccccagtccccaggtcagggtatgactccgtggtgttgaaaggacactaaacaagcttggcatcttggccgactcggaccgatg

SEQ ID NO: 8042 - DNA, 203 bp, synthetic construct
  source 1..203: mol_type = other DNA
ggcgcgccagtcctagcggctagagtgaagaacctagccgttaaagtaaaaaacaaaacaaaacaaagtgcaagaggtttgcgagggttcctcttgtttctagtggcccaaattttctgggctagaaaactaaccccgcaggttaaaagattgtggagaatggtggacaaagtgcaaggtctccggatcgactcggaccgatg

SEQ ID NO: 8043 - DNA, 203 bp, synthetic construct
  source 1..203: mol_type = other DNA
ggcgcgccagtcctcctgaagaacattaggaacatcgttaccaatctgatgaagggactggctggtcgcaagaaaaagcgaagcttgacagtacccttggtccttttgctgattccactgattgcttactcagctactgtcacccgtcaacgcggattggggcttttgctcaacgtcacttttgctgacgactcggaccgatg

SEQ ID NO: 8044 - DNA, 203 bp, synthetic construct
  source 1..203: mol_type = other DNA
ggcgcgccagtcctcgttgggaagacctatgaggttgaggggggcaattgctctgtcaacactttggatgcgggcaaatggtgtgaagattatgtggagtatgagtgcgtcactctctctgagggtgaagagcctgacgacctggattgttggtgctacggagtggacaatgtccgtgtcacctatggcgactcggaccgatg

SEQ ID NO: 8045 - DNA, 203 bp, synthetic construct
  source 1..203: mol_type = other DNA
ggcgcgccagtcctggtggctttagcatactttgttggcacatcaaatgtgcagagggtagttattgccatcttgcttcttggcattggaccagcttattcaacacactgcttaggaattccaaaaagggacttcataaggggacttgatggaaacacctgggtgtcagtggttttagaacagggcagcgactcggaccgatg

SEQ ID NO: 8046 - DNA, 203 bp, synthetic construct
  source 1..203: mol_type = other DNA
ggcgcgccagtcctgggagccaagaaagatgattgggaaaatcacacaaaattggtgacttttgttccgaccacaggaacatcaactgttgcttttacaggctatggaaactttggcttagagtgtcacgttcagatgatggtggacctcagcaattcctatctggtgaaagtaggaactgatgcctgcgactcggaccgatg

SEQ ID NO: 8047 - DNA, 203 bp, synthetic construct
  source 1..203: mol_type = other DNA
ggcgcgccagtcctgctggtcaacaaacaatgggttcacgatattactctcccatggcagagtggaacaggaggacattggagagacaagcatttcatggttgactttgaagaaccacatgcagtcactatgaaggcgttggtcctgggtagccaagaaggggctcttagaacagctctgtctggtgccgactcggaccgatg

SEQ ID NO: 8048 - DNA, 203 bp, synthetic construct
  source 1..203: mol_type = other DNA
ggcgcgccagtcctaatggttgtggaactaaattctaatagatattcccttaaaggaggtcatgtgacgtgtaaggcgtacatgaacaatctcatcctgaaaggttcaacctactcaatgtgcaaaagagggatgtcctttgctaagcaaccagttgagacagaccatggaacagcagtgatgcagatcgactcggaccgatg

SEQ ID NO: 8049 - DNA, 203 bp, synthetic construct
  source 1..203: mol_type = other DNA
ggcgcgccagtccttggtgctgccttccatgcaatttttggtggtctcagttggataaccaagatattgattggagggttgctcatctggctgggtctcaactctcggagtagttcaatgtcaatgggcttcatatgcattggagccttgctgcttgtgctggccacaggagttggagcagaagtgggcgactcggaccgatg

SEQ ID NO: 8050 - DNA, 203 bp, synthetic construct
  source 1..203: mol_type = other DNA
ggcgcgccagtccttgatagagcaaagtcagtaagatcaacaacagatagtggaaagatcatacctgaatggtgctgccgcagttgcaccatgcctccagtgagtttctgggggcctgacggctgctggtattccatggaagttaggccaaaacacaccaatgaagcacatctggtgaaatcctgggtcgactcggaccgatg

SEQ ID NO: 8051 - DNA, 203 bp, synthetic construct
  source 1..203: mol_type = other DNA
ggcgcgccagtccttggagagaccatggctgctgttgggctggttggagtgcttgctggcatgggactgaaggacatgaacggaatgcttggaccagtggccgttggtggagtgttactaattgtaatgagtctttcaggaaaggttgatgggctggtaatcaagaaagtggctgacgtgacctgggacgactcggaccgatg

SEQ ID NO: 8052 - DNA, 203 bp, synthetic construct
  source 1..203: mol_type = other DNA
ggcgcgccagtccttgaggatgctgagattagtggagcatcacaccgttatgatgtggaacaaactgacacaggtgagttcaagttacgaaatgaagaacccgccccctggattcaggtggctgtcttgacaatagctatccttagtgcagccacacatcctgcttgtcttgccgtggtcacaattggcgactcggaccgatg

SEQ ID NO: 8053 - DNA, 203 bp, synthetic construct
  source 1..203: mol_type = other DNA
ggcgcgccagtccttcctgtgaatgtgcaaaccacgcccagtgttttccaactgaaaaacggaaaagaaataggagccgttaatcttgactatcctagcggtacctctggctcaccaatattaaacaaaaatggagatgtcattggcctatatggaaatggaatattgattggaaataacacctacgtcgactcggaccgatg

SEQ ID NO: 8054 - DNA, 203 bp, synthetic construct
  source 1..203: mol_type = other DNA
ggcgcgccagtcctatacggagtggaaggcaccaaaacaacaacaagtccgggagaaacacgactaagagaagaccaacggaaagtgttccgagagctggtcaagagacttgacatgccggtttggttttcatggcaggtcgcgaaggcaggtctcaaggtgcaggacagaagctggtgttttgatggcgactcggaccgatg

SEQ ID NO: 8055 - DNA, 203 bp, synthetic construct
  source 1..203: mol_type = other DNA
ggcgcgccagtccttttgttaggcttgcaaggatttcctgaatttctgtctgggaaaatgcgggaagcgatcgacacagtaacagtcctatacactagtgacactggaagtagagcctacaaacacgcactagcaatgatgcccgaagctacaacaattttcctactggtgatgctggctatcatttgcgactcggaccgatg

SEQ ID NO: 8056 - DNA, 203 bp, synthetic construct
  source 1..203: mol_type = other DNA
ggcgcgccagtcctactcattgagggcgacaccaatgcttattggaatggacctattgctgtagcgttttcaggattgatgagaggaaactactatgcaaccattggacttgcctacaatggatggttggccaaacagacaaggagaggcaaagcagctggagtgaccctgggggaagtttggaagagcgactcggaccgatg

SEQ ID NO: 8057 - DNA, 203 bp, synthetic construct
  source 1..203: mol_type = other DNA
ggcgcgccagtcctgcagctgaacatgttagggaaacaagaatttgagaggtacaaagtgccagacattactgaagtggacgggaccgcagctaggcgttacctgaaagaaggacgaacagatgtgggaatcagcgtctctcgaggagcagccaaaatcagatggcttcacgagcgcggctacctcagcgactcggaccgatg

SEQ ID NO: 8058 - DNA, 203 bp, synthetic construct
  source 1..203: mol_type = other DNA
ggcgcgccagtcctgcctagtgggaaagccatcatagaaggggacgtgtttcttcccactggaacgcgaagcgttgccagtgaagcgggcaccatagaccatgaggcgctcaagctcagagttgaccagattaaggcagagtactcaaagacttggacacatgattcaaaccacccatatcgaacatgcgactcggaccgatg

SEQ ID NO: 8059 - DNA, 203 bp, synthetic construct
  source 1..203: mol_type = other DNA
ggcgcgccagtcctgaagagtgcaagtgaggctgtccaggatccacagttctggaaactggttgatgatgagaggaagctgcatctgcaaggccaatgccggacatgtgtgtacaacatgatggggaaacgtgaaaagaaaccctctgaatttggcaaagcaaagggaagcagggcgatctggtacatcgactcggaccgatg

SEQ ID NO: 8060 - DNA, 203 bp, synthetic construct
  source 1..203: mol_type = other DNA
ggcgcgccagtccttatttcaagaagggatcaaagagggtccgggcaagtggtcacttatgccctgaacaccgtgactaatcttaaggttcaactcatacgcatggcggaggcagagcatgtcattacaaattttgatgttgacacagttagccagaagaccctgcaggacttgagatgctggcttgacgactcggaccgatg

SEQ ID NO: 8061 - DNA, 203 bp, synthetic construct
  source 1..203: mol_type = other DNA
ggcgcgccagtcctgatgtatttccaccgcagagaccttagagttatggccaacgcaatcaactcgaccgttcctgtggattgggttccaactggaaggacaacatggtctattcatggaaagggagaatggatgaccactgaagacatgctgcaggtgtggaacagagtttggatagaagacaatcccgactcggaccgatg

SEQ ID NO: 8062 - DNA, 203 bp, synthetic construct
  source 1..203: mol_type = other DNA
ggcgcgccagtcctcctttgcaaataggcagtggtgcatctcccaatgtacaaatgactctcacgcttactccaactggatctgttttcaatggcttgagacatcccaaaccagctgcccaatcaccctttcctactagaccctttcatcactcatttcagtttagttcaactgtgccagatgtgactcgactcggaccgatg

SEQ ID NO: 8063 - DNA, 203 bp, synthetic construct
  source 1..203: mol_type = other DNA
ggcgcgccagtcctgaaccctgttatggtatgactgttgttccacccaaagacttcatgccagccccaataacagatttggtttctcttgcgaaggtgccaaccttttgcacagttaccgaaaacaagccatatttcgaggtcaacaataataaatcagatgcccccgtttttcagtctaacgtggttcgactcggaccgatg

SEQ ID NO: 8064 - DNA, 203 bp, synthetic construct
  source 1..203: mol_type = other DNA
ggcgcgccagtcctctttctgaccctcactatgcccacaccctagttgcaggtttgggtcgttactttggaaattacagaggtagtttacaattcactttgatctcagctacaacaagcatgacccgtggaaaactgctgtgttgttacacccctccaggtgctgacaaaccaaccactgttgaacaacgactcggaccgatg

SEQ ID NO: 8065 - DNA, 203 bp, synthetic construct
  source 1..203: mol_type = other DNA
ggcgcgccagtcctgcaatgatgtctacttatgctatatgggatttaggacttcagtccacctttgaatttgttgtgcctttcatatctactgttgactttagagtaaatgttgtctctacttcctcagccgtcaacgtagatggttggttttcaattttcaaactaaatgctctaacctacccagcacgactcggaccgatg

SEQ ID NO: 8066 - DNA, 203 bp, synthetic construct
  source 1..203: mol_type = other DNA
ggcgcgccagtcctgttttgatgcttgcccctaatccctctttctgtggtgctgcctataccgtttttgctatgtttgaccagacaggaacaacaggtgcgaagaaaagacttttgtttggtcagggtgattatcatctttacagatcttgtcccttcacttactatactgcagatctggaagtaacacgactcggaccgatg

SEQ ID NO: 8067 - DNA, 203 bp, synthetic construct
  source 1..203: mol_type = other DNA
ggcgcgccagtcctaaatttatggtctatattagatacaaaaatttcagaggttatgtgcccagacctttaccccgtcttgttcaaccaaacccgagttcacgcgtcaggatggctgcttcagatggtttagcccctagaaagtacttatcctatagaaaaatacagctttcaggtgatgtagaaacacgactcggaccgatg

SEQ ID NO: 8068 - DNA, 203 bp, synthetic construct
  source 1..203: mol_type = other DNA
ggcgcgccagtccttctgatcgtggtgcagttgaaagacgcatcacttttgacattggagtaacccccggttcagcagcaacccgaaacggtaagctggaccttgctatcgccctgaagccagatggacccggtgaatttccttacaactgtgactgtcagcttttacacacaactggacttgcacttcgactcggaccgatg

SEQ ID NO: 8069 - DNA, 203 bp, synthetic construct
  source 1..203: mol_type = other DNA
ggcgcgccagtccttacggcttgacagatgttgcagccgttaagataagcaatggcccggagtggaaaaacctttcaaaactctttctgaaccttgaaactgaactcttgcccggaacgaggattacggttttgtctaacgacaacatcaacatgttaagagaaggttcttttcttcgttatgaagaacgactcggaccgatg

SEQ ID NO: 8070 - DNA, 203 bp, synthetic construct
  source 1..203: mol_type = other DNA
ggcgcgccagtcctagactaaacccaggtgttgattttgattcagtcattttctctaaacacgtgaataacgtggtaattgataaagacacttcaatttggcagtctttgaagctcgctgcccaggtttatgctcaaaggttaaagaatattgacaaagagcctcttacagttgaagaggcaattgctcgactcggaccgatg

SEQ ID NO: 8071 - DNA, 203 bp, synthetic construct
  source 1..203: mol_type = other DNA
ggcgcgccagtcctggaattcctggacttgaccgcttggaccccaaaactgcttcaggtttgccctacaaaaagacaaggaaacagatgattgactttcaaaaatgtgagatcactgatgaccaacttaagtgtagacttggaatgtggcttgcaggcagaaaaccagaaactctttatcaaacatttcgactcggaccgatg

SEQ ID NO: 8072 - DNA, 203 bp, synthetic construct
  source 1..203: mol_type = other DNA
ggcgcgccagtcctgttgaatcggttcattgctatgaggacaagcgcatcaccatacgtggtgggctgccttcaggcactgctggaacttcaataatcaacactatcattaataacataatcttgcacgctgctttctattatacctactctaactttgaatgggatgatttacagatgcttgcttatcgactcggaccgatg

SEQ ID NO: 8073 - DNA, 203 bp, synthetic construct
  source 1..203: mol_type = other DNA
ggcgcgccagtccttgggctccagttatggaaatttcaaatttacaggctatgctttcttggtataaacctggaacactgaatgaaaaactggaaagtgtgtcccgcctcgcccacttttgtggagaggaggaatacaatgaattgttcaagccgtttgttgaggacggctttgacataaagccctggcgactcggaccgatg

SEQ ID NO: 8074 - DNA, 203 bp, synthetic construct
  source 1..203: mol_type = other DNA
ggcgcgccagtcctgcggagacttaggcctcacagattgtgttttgtgttattggatgctggatggtcacgttggagactgcatgtggcagtcttgaaacgtgtggtttgacgtctatccattatggcagtgggtggagtactgcaaagatgtcaccgtgctttacacggtttttgaaccccacaccgcgactcggaccgatg

SEQ ID NO: 8075 - DNA, 203 bp, synthetic construct
  source 1..203: mol_type = other DNA
ggcgcgccagtcctaggagacctgaggaatttccatgtggctttgccaggagttgtagcgatgctgtgtgtgtgtgcggatttcccctcatggcaacatgagcctcacaggccaaaagccctgtccgaaaggacccacacagtggagcaaccccagctccctcctacaaagctttgtgagaatgaactcgactcggaccgatg

SEQ ID NO: 8076 - DNA, 203 bp, synthetic construct
  source 1..203: mol_type = other DNA
ggcgcgccagtcctattgttaataacttttattcaaaccagtattatgcttctattgatgcttctgcccaaggtgttgggacctctactactcctgaaaacggcaacgtatctggctttcttggacttgcaggtagtgcttttaatgctctctctcttctcgcctcaccacgaaccgagacaggaatgcgactcggaccgatg

SEQ ID NO: 8077 - DNA, 203 bp, synthetic construct
  source 1..203: mol_type = other DNA
ggcgcgccagtcctacaccagaacaatttatgattttccctcaccaacttataaatcctaaagacacaaatgttgccacagtacgtgtgccgtacattaatattgctccaacaaatgatactacagtacatacagtatggacagctgttgttatggttcttgtacctcttaacttttcttctggtgctcgactcggaccgatg

SEQ ID NO: 8078 - DNA, 203 bp, synthetic construct
  source 1..203: mol_type = other DNA
ggcgcgccagtcctgttgattacatgcccttacccattacagatttagttgagcttgctaaagtgcccagttttgttactgtggcaaacagtgacacgactagcgagcgtagtttcccttatttctctgttagtaacacagaacaaggcagaaatcttttcaaatccagtgtagttctcagcgacttacgactcggaccgatg

SEQ ID NO: 8079 - DNA, 203 bp, synthetic construct
  source 1..203: mol_type = other DNA
ggcgcgccagtcctacttatgctatctgggatttgggattacaatcaaccttcaattttgtagtcccttttatatctgcttctgacttcagatttaacacctcttctgtatctaatgctttgaactctgatggttggatcacagtgtggcttatgaaccctctaacatatcctcccagtacacctcctcgactcggaccgatg

SEQ ID NO: 8080 - DNA, 203 bp, synthetic construct
  source 1..203: mol_type = other DNA
ggcgcgccagtccttccctttctccctgtgcgtcagtgtgtggccagcctatctcttccttcctgtttgctcaacgagcgaatcccaagaaaactctaaagctgcgctcaggtgatgaattcttgtatagatgttgccctttttcttacattaaatgtgaccttgagtttactgtggtcccccctgcgcgactcggaccgatg

SEQ ID NO: 8081 - DNA, 203 bp, synthetic construct
  source 1..203: mol_type = other DNA
ggcgcgccagtccttctcccagacattgcaaggcaataaatgactacaacagaggtgactcctttcagagaccgaccaactcttttgaattcatggacagacttgtggaatgtgctaccaagcttgggaaagtccaaattgcaacttatttcagaaattttactacagctgattctgatacaagcagacgactcggaccgatg

SEQ ID NO: 8082 - DNA, 203 bp, synthetic construct
  source 1..203: mol_type = other DNA
ggcgcgccagtcctccagagccagttgttgttgttttgcgcgggaaaccaggcgtaggcaaatctgctgcagctactgttatggcagctgcagtatctaaattgttggtaggaagtcaatcagtgtacaccctttccccagatacggaacatatggatggatatcacggacagtttgtgactttgatgcgactcggaccgatg

SEQ ID NO: 8083 - DNA, 203 bp, synthetic construct
  source 1..203: mol_type = other DNA
ggcgcgccagtcctgatgaccttggacaaaacccagacggagaagacttcagatgtttctgtcaaatggtttcttgtgctcagtacagacctgctatggctgaccttaaagacaaaggaatcctgtttacatccagactgttgattgctactactaatctcccagattttaaccctgttactatctctcgactcggaccgatg

SEQ ID NO: 8084 - DNA, 203 bp, synthetic construct
  source 1..203: mol_type = other DNA
ggcgcgccagtcctagatttgaggatgaggtaccgactaatgtaggtaacatgccctttgtaatgctttacaaatcaacctcttattttggaatgtgtggctcagttgtatgtagcagatttgttgatggtggaggaataattggaatgcactgcgcaggtggaggcggagtcagtgttggaactcgtcgactcggaccgatg

SEQ ID NO: 8085 - DNA, 203 bp, synthetic construct
  source 1..203: mol_type = other DNA
ggcgcgccagtcctcggtatgatccgcgattaaatgagggagtcaacttggatgaggtgatcttctcaaaacatactcaaaacactcttgttgagaaaggatccactttcagaagcgcccttgacatggcagcagaaatttatggtgaaaagtttagaggaaatgatttctctcccctttcagttgaacgactcggaccgatg

SEQ ID NO: 8086 - DNA, 203 bp, synthetic construct
  source 1..203: mol_type = other DNA
ggcgcgccagtcctcattaccagacatttcttaaggatgaaatcaggcccattgaaaaggtcaaagcaggaaagactagaataattgatgttcctcctcttgatcatgtcatcgcttttagaatgctctttggcagattcattgcccactaccacttaaactttggcttcaaaacaggctctgctattcgactcggaccgatg

SEQ ID NO: 8087 - DNA, 203 bp, synthetic construct
  source 1..203: mol_type = other DNA
ggcgcgccagtcctggttgtgacccagatgtcgcttgggcttcttttggctttgaactcagtggctttccttatctgtatgattttgattactcaaactttgatgcttctcacagtacttcaatatttgaaatcttagaacagaaattcttttccccagaattaggttttgatcctagatgctcacttcgactcggaccgatg

SEQ ID NO: 8088 - DNA, 203 bp, synthetic construct
  source 1..203: mol_type = other DNA
ggcgcgccagtcctctcttgaaatcccttgcagtttcaacccactgttatgagaacaagagactccagattgctggaggacttccctctggcacggcaggtacctcagtactgaacaccgtgataaacaacattatctttcacggtgcactataccacacttacactaattttgagcgggatgacatccgactcggaccgatg

SEQ ID NO: 8089 - DNA, 203 bp, synthetic construct
  source 1..203: mol_type = other DNA
ggcgcgccagtcctaaagttgctggagtttgggctccagtgatggaaactgaaaacctcgaggcaatgttgtcttggtacaaaccaggaactcttaatgaaaagctccagagtgtctcaagacttgcccacttctcaggacgtgacgtgtatgaccaccttttcaagcccttcattcgtgatgggtttcgactcggaccgatg

SEQ ID NO: 8090 - DNA, 203 bp, synthetic construct
  source 1..203: mol_type = other DNA
ggcgcgccagtcctctggcaaataacctaggggactaggttttcctttttattttaaagttgtcaatatgggtgcaaataacagcaaagaatctgtgaacagctctggcaataatggcacaactgttaataacttttatgctaataattattatggctctattgatgcttctgcccagggagttgggacgactcggaccgatg

SEQ ID NO: 8091 - DNA, 203 bp, synthetic construct
  source 1..203: mol_type = other DNA
ggcgcgccagtcctcctcttctactcccgaaaacggtactgtatctggttttcttggaatggcaagttctgcttttaatgcactttccttattggcttccccaaaggtagaaaactctttatacactgaagacagacttttgacacggaaagctggcaacacatctgtaaattcgcaggctgcagaagcgactcggaccgatg

SEQ ID NO: 8092 - DNA, 203 bp, synthetic construct
  source 1..203: mol_type = other DNA
ggcgcgccagtccttcatgacacagaagctcagtttgtatcaacctccggctgaggaaattgcccactcacactattctactcagacaataacaccaaacaaaaatgtatcttttgatctagccgacatgactgcagagcaaatgatgttgtttcctcatcaactcatcaaccccaaagatacaaatgcgactcggaccgatg

SEQ ID NO: 8093 - DNA, 203 bp, synthetic construct
  source 1..203: mol_type = other DNA
ggcgcgccagtccttgcaccacgcttcttctacggctcaaagccctatcccaaccagacctttccaccactctttccagttcagctcaactgttccagatgtcactgagccttgttatggaatgactgttaatcctcccaaagattacatgcctgaaccagtgggtgatttggtttccttagcgaaagcgactcggaccgatg

SEQ ID NO: 8094 - DNA, 203 bp, synthetic construct
  source 1..203: mol_type = other DNA
ggcgcgccagtccttaggaagtctagttactgtgtcttaccctagcaactcagatcaaccttactttgagatttcaaacaccaaaaaggacactcctcttttcaagtgcaatgttctactttctgaccctcactttcagcacactttggtgtctaatttaggtaagtactttgcaaactatagaggatcgactcggaccgatg

SEQ ID NO: 8095 - DNA, 203 bp, synthetic construct
  source 1..203: mol_type = other DNA
ggcgcgccagtcctctttacagttttcttttatttcagctactactggcatgactaagggcaagttgcttctttcctacaccccaccaggaagtggtgcaccaaccactttggagcaagcaatgaatggcacgtactcaatttgggacattggtttacaatccaccttcaactttgttgtgccctacacgactcggaccgatg

SEQ ID NO: 8096 - DNA, 203 bp, synthetic construct
  source 1..203: mol_type = other DNA
ggcgcgccagtccttatcagctgtggactttagattgtgtgctgcctctgctagctccgtggtaaacacggatggatggtttacagtgtggttgttgaactctcttacttaccctccaggaacccctccaacccagaatgtagtggtcatgttatcagcaggtgaagacttttcctacagaaaccccacgactcggaccgatg

SEQ ID NO: 8097 - DNA, 203 bp, synthetic construct
  source 1..203: mol_type = other DNA
ggcgcgccagtccttaagtccagcttggacccaaagcccaggttctaccccgcatgacaatgcggagaaaggtaccattgagaattgtgatgcatccttgaacagtggacatagtgtttctctgccaactcctcactctaatgttagatttttctttgatagatacagatttttggggttgttagaaacgactcggaccgatg

SEQ ID NO: 8098 - DNA, 203 bp, synthetic construct
  source 1..203: mol_type = other DNA
ggcgcgccagtcctctgtcacggttcacttagccacggaagcttctactgagtctagtacaaccactgttacatctagtctttcatcttcaggtagtttgtttacacttaatcctacattttatggcaaaaatggctttccagtctctttcatgatacctttctgtagtcctctcaccctcctccctccgactcggaccgatg

SEQ ID NO: 8099 - DNA, 203 bp, synthetic construct
  source 1..203: mol_type = other DNA
ggcgcgccagtcctagaaagatagcaaagatgttgagggaccatacaatggacctgacaagaaatcactcaaggttttgaaattaaaggctcagagtcctatgttagatctggaaaagaaagttttcaaaaatgtgttgccttttggacttgtatataatggaaaaacctatcaacaatcttgcttggcgactcggaccgatg

SEQ ID NO: 8100 - DNA, 203 bp, synthetic construct
  source 1..203: mol_type = other DNA
ggcgcgccagtcctttgtctctactgaggaaggaaccagagtgcacgtaccgcgtgtcagcaagctgaaaagaactcatgcctcataccctgcaacctctaaatatggacctgctgctttgacccgcaatgaccctcggctcaaccctggtgtggatctcgatgaaatgattttctccaaacacaaagcgactcggaccgatg

SEQ ID NO: 8101 - DNA, 203 bp, synthetic construct
  source 1..203: mol_type = other DNA
ggcgcgccagtcctactttgactattcaaactttgatgcaagtcattccacttccatatttgaaatcttggaagaggaattctttaccccagaaaatggttttgatgtgagatgctctctactgctaaaatctttatcctgttctactcactgttgtgaaaacaaacggcttaccataataagtggttcgactcggaccgatg

SEQ ID NO: 8102 - DNA, 203 bp, synthetic construct
  source 1..203: mol_type = other DNA
ggcgcgccagtcctgaggagttattcgaaccgtttgtcaagaacggtttcgaaatactgccatggaaacagcttcacttggagtggctcaataaatttggctattaattgttgaactggttaatattctttatcaattggtttaatttggtttaatttggcatttattgggtgtattcaaattttatacgactcggaccgatg

SEQ ID NO: 8103 - DNA, 203 bp, synthetic construct
  source 1..203: mol_type = other DNA
ggcgcgccagtcctctacgcgggcggagtgatactcccgctccttcttggacaggcggcctccacgctctttgtggatcttaaggctgccaagtcactggtgtttgaagtgaagaatggagagacactagggcgtttcatgtggctttgccagggattgtagcgatgctgtgtgtgtgtgcggatttccgactcggaccgatg

SEQ ID NO: 8104 - DNA, 203 bp, synthetic construct
  source 1..203: mol_type = other DNA
ggcgcgccagtcctttaaaaactcagctaccattactgacaagcagctcgcactaccagggtttaggtctttcaacaggtcaagggacaatatctgaaaagggttctattgatgctgctggtacaattcctcaacaactcttcatatatccacaccagttgattaacccaaaagacacaaacatagcccgactcggaccgatg

SEQ ID NO: 8105 - DNA, 203 bp, synthetic construct
  source 1..203: mol_type = other DNA
ggcgcgccagtcctcaccctgctcctaatgtacaaacagcaatacctgttagaatgacacaaaattctggacagttttccacaactcttcctgctagaatggaaccatgttatggcttaactcccaaccccaccagagactttcttcccccagtagtcgaagatttactcagcatagcaaaagtccctcgactcggaccgatg

SEQ ID NO: 8106 - DNA, 203 bp, synthetic construct
  source 1..203: mol_type = other DNA
ggcgcgccagtcctgatggttatcctgactattcaaggactgttggtgcatacggtgtggcccctgcaaaccactttggcactttgactgtagctgctaatgatgaaggttacaaattctttgtttatgttagatacaaaaacttcaaagggtatgtccccaagaccctacctccacaaccactgtttcgactcggaccgatg

SEQ ID NO: 8107 - DNA, 203 bp, synthetic construct
  source 1..203: mol_type = other DNA
ggcgcgccagtcctccttctgcttacttagctgcttccgctgtgctcattgcggacggcatttctttccttgactggtatgaaaaaataaaaagatttcttggttctcgttttcgagttccacctcctatcttcactcttgcccaaggaccagatcttagagacttagttactttctttaatgctgctcgactcggaccgatg

SEQ ID NO: 8108 - DNA, 203 bp, synthetic construct
  source 1..203: mol_type = other DNA
ggcgcgccagtcctatcaagagcaaaaggactacaagcggaatgcttgaaggactggtggtgcagtcgcccaaaattgtaggctacaccaaggacgacgagggcgtcgtcattgttgactgtctcgaggattggcacagaattcgagacaagaaaagaaagcaacaggctcttgagatggttgcagagcgactcggaccgatg

SEQ ID NO: 8109 - DNA, 203 bp, synthetic construct
  source 1..203: mol_type = other DNA
ggcgcgccagtcctgagatgcaaattcaacatgacaaacattctcagaccatttccttgataaaacagtttctctcagggctcggtgtggtggctgctgttggagccgcctttgccgcaggcaaggtactgaaaaacatgatgacctcagaccgggcacaggatgaaccagactctgaatcccaggagcgactcggaccgatg

SEQ ID NO: 8110 - DNA, 203 bp, synthetic construct
  source 1..203: mol_type = other DNA
ggcgcgccagtcctctctttgttggaaaaagggttttccttgtgaacaaacatgcaattgactcagttgaacaaaaatttcaagttgcaggaaaaacatatgacttggatgatgttgatgtggcaattcttgacacggaatatggacttacggatgttgcagctgtcaagctcaacacaggcccagaacgactcggaccgatg

SEQ ID NO: 8111 - DNA, 203 bp, synthetic construct
  source 1..203: mol_type = other DNA
ggcgcgccagtccttggaaaaacctttcaaaactctttgtttcactggacacgactctacacccaggaaccaggataacgattttgtctaacgaccaacttaacatggtgagagagggtagttttctcagaaatgaggatgacatacccaccaatattggcccaataccttttgtcatgctttataagcgactcggaccgatg

SEQ ID NO: 8112 - DNA, 203 bp, synthetic construct
  source 1..203: mol_type = other DNA
ggcgcgccagtcctgcttcctcttactttggtatgtgtggttctgctgttgtgaccagaattggtgattgtcccggaattcttggtctccattgtgctggcggtgggggtgtgtgtgtggcttccagagttacaaaaagaatggtagaaactgtcctaaaatacttttatccacctcaggtacagggacgactcggaccgatg

SEQ ID NO: 8113 - DNA, 203 bp, synthetic construct
  source 1..203: mol_type = other DNA
ggcgcgccagtccttatgactttgattactcaaactttgatgcttctcattcagagtccatctttgaacttcttaaacagtttgttttcaccaaagacaatggttttgatcacagatgctctctcatgattgattctctggttacctcgacccactgctatgagcaacaaagaatgaccattcgcggccgactcggaccgatg

SEQ ID NO: 8114 - DNA, 203 bp, synthetic construct
  source 1..203: mol_type = other DNA
ggcgcgccagtccttaccccacccaaggggggagaaagaggtgatagtgggcatacgcgatttaccaaggaaaggtgattgcaggacaggcaatcgcctggggccggtgagtggcttgttcataaagccggggcctattttctatcaggattaccctggtccagtatatcacagagccccccttgagccgactcggaccgatg

SEQ ID NO: 8115 - DNA, 203 bp, synthetic construct
  source 1..203: mol_type = other DNA
ggcgcgccagtcctgttgtaggctacagaggcatgaatggaacaaacatggctggtgtaattggtataacatagagccttggatatggttgatgaataagacccaagccaacctaaccgaaggcacaccccctaaagaatgtgcagtgacctgcagatatgacaaggatcaggagatcaatgttgtaacgactcggaccgatg

SEQ ID NO: 8116 - DNA, 203 bp, synthetic construct
  source 1..203: mol_type = other DNA
ggcgcgccagtcctcgcaggccagagacagacccacaaccctgaccgggtgtaagaagggtaagaaattctctttcgcaggtgaagtagtcgatggcccttgcaatttcaacatatctgctgaagacatgctttacgatgaaatagggtgtgcaggcgttttccaggaaatggctcaacacatagttgcgactcggaccgatg

SEQ ID NO: 8117 - DNA, 203 bp, synthetic construct
  source 1..203: mol_type = other DNA
ggcgcgccagtcctggtatactaacaactgtacccctgcctgcttgcctatgaatactaggattgtgggaccaggcaagtttgataccaacggggacgatggaaaaatcttacacgagatgggtggccacctatctgagctggccatattggcacttgtggtaatgtcagacttcgcacccgaatcagcgactcggaccgatg

SEQ ID NO: 8118 - DNA, 203 bp, synthetic construct
  source 1..203: mol_type = other DNA
ggcgcgccagtcctcccacaagaacctggacttagccggaatattcctcagtaacgcaccaatcgtgttaatggtgctaaccctgtgggcagatctactgaccctcatcctagtcctaccaacctatgaattaacaaaattgtactacatcagaagggtgaaaaaggatgtagagaggagttggctagcgactcggaccgatg

SEQ ID NO: 8119 - DNA, 203 bp, synthetic construct
  source 1..203: mol_type = other DNA
ggcgcgccagtcctggaacttggtaatgaaacacaagatcagaaatgaaactattagggcgtggtatgaggaagaagaaatttacggaatgccaaaaatcatcacattgatcaaagctgcctcgctaagtcagagtaaacactgtatcctatgcactgtatgtgagagacgtgattggaagggtggcacgactcggaccgatg

SEQ ID NO: 8120 - DNA, 203 bp, synthetic construct
  source 1..203: mol_type = other DNA
ggcgcgccagtcctgttgccctaagtgcggtcgttccggcaggcccatatcatgcggaatgactctggctgactttgaagaaaaacattataagaagatcttcataagagagggagaattggacggaccttttaggcaggaagccagaggttatttacagtacatagcaagggggcagcttttcctaacgactcggaccgatg

SEQ ID NO: 8121 - DNA, 203 bp, synthetic construct
  source 1..203: mol_type = other DNA
ggcgcgccagtcctggaacttaccaatactggcaaccaaagtaaagctattaatggtggggaacctgggatccgaagtaggcgacctcgaacatcttggctgggttttgaggggacctgcggtgtgcaaaaagatcgtatcccacgagaagtgccatactgggatagccgacaaattgacagctttctcgactcggaccgatg

SEQ ID NO: 8122 - DNA, 203 bp, synthetic construct
  source 1..203: mol_type = other DNA
ggcgcgccagtcctttggaatcatgcccagagggactactcctagagcgccggtcaggttccctacatcactaataaagatcaggagagggttagagacaggatgggcttatacacaccaaggagggataagttcagtagaccatgtaacagcagggaaagacctgttggtctgtgactctatgggcacgactcggaccgatg

SEQ ID NO: 8123 - DNA, 203 bp, synthetic construct
  source 1..203: mol_type = other DNA
ggcgcgccagtcctttacttgtgtgactgcctcaggtacaccagctttctttgatctgaagaacttaaaaggctggtctgggctgcccatatttgaagcatccagcggcagggttgttggaagagtcaaagttgggaagaatgaggagtctaaacccactaagctcatgagtggaatacaaacagtgtcgactcggaccgatg

SEQ ID NO: 8124 - DNA, 203 bp, synthetic construct
  source 1..203: mol_type = other DNA
ggcgcgccagtcctctgcggcagagtcagtataccaatacatgaaacaaaagcatcccagtattgccttcaacctcagaataggggagatgaaagaaggagacatggctactgggataacatatgcctcatatgggtacttctgccaaatgccccaaccaaaattgagagcagcgatggtggaatactcgactcggaccgatg

SEQ ID NO: 8125 - DNA, 203 bp, synthetic construct
  source 1..203: mol_type = other DNA
ggcgcgccagtccttgatgaagggggaagacctgggatcaaacttcctggatatagctggacttaagataccaacagaagagatgaagggaaatatgttggtgttcgtacccactaggaatatggctgtggaggtggcaaagaagttgaaggctaagggttacaactcaggctattattatagtggagcgactcggaccgatg

SEQ ID NO: 8126 - DNA, 203 bp, synthetic construct
  source 1..203: mol_type = other DNA
ggcgcgccagtccttaaagaggatggcagtgactgcaggtgagcaggcacagaggcggggtagagtaggacgggtaaaacctggcaggttctacaggagtcaggaagctgcatccggttcgaaagactaccactacgacttgctgcaagctcaacgctacggaatagaagatggcataaacataacaacgactcggaccgatg

SEQ ID NO: 8127 - DNA, 203 bp, synthetic construct
  source 1..203: mol_type = other DNA
ggcgcgccagtcctagtcctttagggaaatgaattacgattggagcctctatgaggaagacagcttgttaataacccaattggaagtcctcaacaatctcctgatatcagatgacctcccggctgcagtgaagaacattatggccaggactgaccacccagaacccatacagctagcttataatagctcgactcggaccgatg

SEQ ID NO: 8128 - DNA, 203 bp, synthetic construct
  source 1..203: mol_type = other DNA
ggcgcgccagtcctaccctggtagtcaacagaccagcgagacaggaaaagccctaaaacaggtatcaggtttatccacagctgaaaacgccctcctagtagccctgttttcatacgtgggctaccaagcgttgtctaagaggcacatacccgtggtcacagacatatacaccatagaagaccaaagaccgactcggaccgatg

SEQ ID NO: 8129 - DNA, 203 bp, synthetic construct
  source 1..203: mol_type = other DNA
ggcgcgccagtcctgtgatggcttaatggggacaggcttgagtgcagccatggaaatgatgtcccaaaacccagtctcggtgggaatagctgtgatgctgggggtgggagctgtagcagcccataatgcaattgaatcaagtgaacaaaagaggacactattaatgaaagtgtttgtaaaaaatttttcgactcggaccgatg

SEQ ID NO: 8130 - DNA, 203 bp, synthetic construct
  source 1..203: mol_type = other DNA
ggcgcgccagtcctatggaaacctaagagtgaccaggtactatgataaagatggtgcagagttgaaaccggtaattaaactggaaaaacaggctgagctgtactacaaaggggccacactaagagtagactttagcaacggaaagagtgtaactgcaactgacaagtgggaggtggaccatgcaacgacgactcggaccgatg

SEQ ID NO: 8131 - DNA, 203 bp, synthetic construct
  source 1..203: mol_type = other DNA
ggcgcgccagtcctacttgaagagactaattgaactagtccacaagaacaaattggaggaaaaggcaataccccaagctacagtaacaacctggctagcatacacctttgtcaacgaggatgttggaacgataaggccatcttttggggaaagagtgttgcctgaaagcccgggtgacccgagtttgccgactcggaccgatg

SEQ ID NO: 8132 - DNA, 203 bp, synthetic construct
  source 1..203: mol_type = other DNA
ggcgcgccagtcctgcagctggatctaccaaaacacagtaaaggagaatgatttgagacccttatttgaggaactgttactgcagtgcccccctggtggtagacaaaccaaaggacatgtagcatctgcataccaactagcacaagggaactgggagcctataagttgcaatgtaaatatgggtacaacgactcggaccgatg

SEQ ID NO: 8133 - DNA, 203 bp, synthetic construct
  source 1..203: mol_type = other DNA
ggcgcgccagtccttaccagcaagaagggtcaaaacacatccttatgaagcatacttgaaattaaaagatcttttaaatgagcataagatgagggtggaaactggctgtgctgacttaaaagaccataataggtggatactaaggaaagtgaagcaccaagggaacttaagaacgaggtacatcttaacgactcggaccgatg

SEQ ID NO: 8134 - DNA, 203 bp, synthetic construct
  source 1..203: mol_type = other DNA
ggcgcgccagtcctatgctaaagtcagattggcaatcaccaaagtgatgtacaaatgggtcaagcaaaaacctgtggtgataccggggtacgaaggaaaaaccccactttttcaaatcttcgataaagtaaagaaggagtgggatggcttcaacgacccggtagcagtgagttttgacacaaaggcttcgactcggaccgatg

SEQ ID NO: 8135 - DNA, 203 bp, synthetic construct
  source 1..203: mol_type = other DNA
ggcgcgccagtcctaaggagcgcagatattgtatgaatctggcaaaccacagaaaatactagaaggagaccaaatgaaggtggcttacagatttgaagacatagagttttgttcccacacaccaatccccgttagatggtcagacaatagtagtggttacatggccggcaggaacaccgccacggtaccgactcggaccgatg

SEQ ID NO: 8136 - DNA, 203 bp, synthetic construct
  source 1..203: mol_type = other DNA
ggcgcgccagtcctttgcaaaaatggccactaggctagactcaagtggggagaggggcactgccgcatatgagaaggcagtggcattcagcttcctcctaatgtattcctggaaccctttaattaggaggatatgtctgttgaccttatcgtcaaaaccagaggtagacccctctaaacaagccacttcgactcggaccgatg

SEQ ID NO: 8137 - DNA, 203 bp, synthetic construct
  source 1..203: mol_type = other DNA
ggcgcgccagtcctggaaggaagaaggtaactggcttgtcaatgccgaccggctagtttctagcaagactggcaaaatgtatatccccgatgaagggcacaccttgcaaggcaagtattatgaagaactgagactaactaggccagggggacccactataagggtgggaatagacagataccgtcttgcgactcggaccgatg

SEQ ID NO: 8138 - DNA, 203 bp, synthetic construct
  source 1..203: mol_type = other DNA
ggcgcgccagtcctctgaccctggaaacggaagacggtactgctattgattctatcaattataaacttccggctgacgcttgcctcgtaggacttccgattgagaaacactgcccgctcgtgagcaagctcgccgacctggacaacattgactgtggctcaacgactgaagagtttaggctgaaataccgactcggaccgatg

SEQ ID NO: 8139 - DNA, 203 bp, synthetic construct
  source 1..203: mol_type = other DNA
ggcgcgccagtcctaatagatgtcaagtcacgcccagaaagcgtaggagctctcaaccacggccggcttcgcacactggcctaatcgaagaagttgagctcttgaccttcaaatttatgcgtgagcacatgcctattttcgtcgtttgccttctcgttgtctccgttgctcggaaatggcccatgtggcgactcggaccgatg

SEQ ID NO: 8140 - DNA, 203 bp, synthetic construct
  source 1..203: mol_type = other DNA
ggcgcgccagtcctgaatggggactaggacaagttgccacgtgcgttgaagtccaatgcctgaccatggtaaatgtatctgtgctcgttgactcagttattcaggccactgccagtatggaactccatgggcaccaagactcaagagccgtgttgcgtgatgttcccacggtatttcatttcggggaccgactcggaccgatg

SEQ ID NO: 8141 - DNA, 203 bp, synthetic construct
  source 1..203: mol_type = other DNA
ggcgcgccagtcctggccacgtagaactcgcggacagtgtcgtccctgttgactgtctcgtcacaccggtagcccaggcttggaggcttatgactcatgtggccggtcgatactcaaaacatggcatggctggtatcggaagcgtctgggaggacctggtgcggaactttcacttttcgtggagttggcgactcggaccgatg

SEQ ID NO: 8142 - DNA, 203 bp, synthetic construct
  source 1..203: mol_type = other DNA
ggcgcgccagtcctggagccttcgtgtggaagcagcttggcagtggcccaatgaaagatcactccgttgagctcgacgactatgctttcaccaacttgtacattcgcgacatgttcgatggtacaaacaaaccttgtttgatatgcgaggacacattgcagtgcgccgccctgagacgagccgcagtccgactcggaccgatg

SEQ ID NO: 8143 - DNA, 203 bp, synthetic construct
  source 1..203: mol_type = other DNA
ggcgcgccagtcctgccgcaagaattgctatgcatccaggggtgatgtatgtgaacaccactctatcgtacaacagaacttttgttgaaacgcgaaaacgggttttgacagtgacgctggaatctttggagtataaagtaggatcctacgtcacacatggtcgtcttgagggggacatgggatatctgcgactcggaccgatg

SEQ ID NO: 8144 - DNA, 203 bp, synthetic construct
  source 1..203: mol_type = other DNA
ggcgcgccagtcctgcccgcacacgagcgacgacgtggtcacggttgattcttacaactgtcgcgatgcttacttttggcctacccaacattttttcctcggtgggcttgtcggcatgggtgttgttagttgcgtcatcggcatatcaacctatcgacgtcgtcatgaacctctggataatcctccagcgactcggaccgatg

SEQ ID NO: 8145 - DNA, 203 bp, synthetic construct
  source 1..203: mol_type = other DNA
ggcgcgccagtcctattggggcctatcgtgggatgactcaggaccttccaccagagatcctcacgttttgcttgataatgggatggaaaacggcattggcgctaggtaccgttgccttactgacgcaaggtacgagcgctttttacaagtggacgcagaaatcactagagtccaaaagctcctacaggcgactcggaccgatg

SEQ ID NO: 8146 - DNA, 203 bp, synthetic construct
  source 1..203: mol_type = other DNA
ggcgcgccagtcctacgggggacgtgcctgacgggatcgcccttgaagaagatgaagggggaaacttccgtgaccttcgaggaacatatagcgatgaggggatcactattggccaagacatggggtctgcccagatcccagagaccatggtcatcatattgattggttgtgccctcacgtctgcttctcgactcggaccgatg

SEQ ID NO: 8147 - DNA, 203 bp, synthetic construct
  source 1..203: mol_type = other DNA
ggcgcgccagtcctatctatcgaattaatgtacgtagcttcatggaaaaccgacagcgtggagtaggtgtggcaaaaaacggagttttccacacgttaatgcatgtcactcgtggagagcccctcaaatggcgagaaaagctagtgtccttacattcgggaagtgctttacgagatgtagtgtcgtatcgactcggaccgatg

SEQ ID NO: 8148 - DNA, 203 bp, synthetic construct
  source 1..203: mol_type = other DNA
ggcgcgccagtcctatcgtttcggaagtcaaagcaaattttgacgcggggttgaggaccataatcctgacacccactcgggttgtcatggctgaagttatggaagccctcgggcaagccggaataacgtgtgaccggaaccttatgtattgtcgcagaaatttggtgacagttgcctgtcacgccacgcgactcggaccgatg

SEQ ID NO: 8149 - DNA, 203 bp, synthetic construct
  source 1..203: mol_type = other DNA
ggcgcgccagtcctttcacaaaatttgtgttgtcgcatggcgtaaagaaaattggggtggcgctcattgtcatggatgagtgtcacttcatggatcccatgtcaatagctgcccggggagtaatggagcatctacatgagaagggaacgaaactcatgtatttgagtgccaccccccctggacactcccgactcggaccgatg

SEQ ID NO: 8150 - DNA, 203 bp, synthetic construct
  source 1..203: mol_type = other DNA
ggcgcgccagtcctccccttcatcgcgcaaacttcacagctaattacgctcgggctagtagcgacgaaacctctctggttgtttccactgacatttcggaaatgggggccaatttgggtgttgatatggttatcgacacccgcaaggttctccggcccctcgtagcatccgagaatagaatcaagttgcgactcggaccgatg

SEQ ID NO: 8151 - DNA, 203 bp, synthetic construct
  source 1..203: mol_type = other DNA
ggcgcgccagtcctcccgaagaggccatgtacagccaaccccctgggcgctataccttagttggggaagacctgctccgctttatgaagttcctggacaaagacgatattcctacctggctcgcttggcattgggcagaggcggccgaccgcagacattctgccctcttccagggtaatagcactggccgactcggaccgatg

SEQ ID NO: 8152 - DNA, 203 bp, synthetic construct
  source 1..203: mol_type = other DNA
ggcgcgccagtcctaatccccggtcgcacatccacgacgtaatggatttcggatcaatgctgtcggccattggattgattgacatgaacttcctgttttataagtttttgcatattgccatgcgagccctcggagctatggcccctttcagtaaatttcgcgccctagaaaagtccaccacgataggtcgactcggaccgatg

SEQ ID NO: 8153 - DNA, 203 bp, synthetic construct
  source 1..203: mol_type = other DNA
ggcgcgccagtcctcttggctgtggacgtggcggctggagccaaagagtggttatggaggagacagtgacgtccgttcatgggttcacaattggtggcaatgacaaggaaaacccccagcgatttgtcacacgtggatataatttgaccagcctcaagcccggggtggacgtctacaaactggagccacgactcggaccgatg

SEQ ID NO: 8154 - DNA, 203 bp, synthetic construct
  source 1..203: mol_type = other DNA
ggcgcgccagtcctaagcgatgtgacacaatcatgtgtgacatcggtgaaagtgacccaaatctcaccaaagagcggacaagaacactaaaagtcttacagctattggagacttggttatctatcaaccctgaggcccaatttgtatgcaaggtcctatccccctactcccttgaggtgttgcggaagcgactcggaccgatg

SEQ ID NO: 8155 - DNA, 203 bp, synthetic construct
  source 1..203: mol_type = other DNA
ggcgcgccagtcctgttgaatccctccagcaaaagtacaaaggtaagctcgtgcgcttggcacacagtaggaatagcacggctgaaatgtattacatatcaggaaataggtccaacgccgtaagggacgcttatatgaccctggctgctttaataggaagattttcgcgacacattgacagtgtattccgactcggaccgatg

SEQ ID NO: 8156 - DNA, 203 bp, synthetic construct
  source 1..203: mol_type = other DNA
ggcgcgccagtcctctcccggagccaacactaccgcgaggaaccagagctgatccagcagctagcgtgtctgccatgaatgttgatgacatggttgatcgtgtcagaaaggtccaacaggaaaacagcgcgacatggttcattgacccggaacacccgtataaaagctttagatattttgggtcttttcgactcggaccgatg

SEQ ID NO: 8157 - DNA, 203 bp, synthetic construct
  source 1..203: mol_type = other DNA
ggcgcgccagtcctctggaatttgaggccttggggttcctaaatgctgatcactgggtcagtcgtgaaaactttcctgggggtgtgggtggagtgggtgtcaattactttggcaactacctaaaggaaatttcgctcaaaggcaagtatctctttgctgacgatatagcagggtgggatacgaaggtgcgactcggaccgatg

SEQ ID NO: 8158 - DNA, 203 bp, synthetic construct
  source 1..203: mol_type = other DNA
ggcgcgccagtcctagttctgaagaccttgaggatgaagagactctcttaaccgaactgactgcaaaccccttccaccgcgccctaatcgccgccacaatgaagttggcttaccggaacatagtggcgatgtttccccgcacccacacgcgatacggtagcggcaccgttatggatgtcgtcgggcgccgactcggaccgatg

SEQ ID NO: 8159 - DNA, 203 bp, synthetic construct
  source 1..203: mol_type = other DNA
ggcgcgccagtcctgcgggagatgatgttgtagtgtcgacaatgaatcggtcatttgcctcttccttagactacttggagctgacgggaaagacccgtaaaaacgttccacgaggtgccccttcaaaaatggaaagcgactggcaaaaagtcgaattttgctcacatcactaccacgaactttccctccgactcggaccgatg

SEQ ID NO: 8160 - DNA, 203 bp, synthetic construct
  source 1..203: mol_type = other DNA
ggcgcgccagtcctgccgctatcacctccgccgtcccttccaactggtttccagtcgggcgaacatcctggtcagtacatcaatttcacgaatggatgacgacatccgacatgctccgcgtttggaacgatgtgtggatatacaataacccgtggatcagagtgaaggacccaattggctcatgggatcgactcggaccgatg

SEQ ID NO: 8161 - DNA, 203 bp, synthetic construct
  source 1..203: mol_type = other DNA
ggcgcgccagtccttatggcaggcgggcttgtggacggcttcggcccacccacagcaagaatgccatcatctgtcctcacccccaattttcccttttcttcccctgcaaccattacgcttactcgcatgtgcattgagtggtgcatgtgttgaacaaacagctacactcacatgggggcgggttttcccgactcggaccgatg

SEQ ID NO: 8162 - DNA, 203 bp, synthetic construct
  source 1..203: mol_type = other DNA
ggcgcgccagtccttcttctgttcacgatggagggctctaacggattctcgagttcgttggctggcctttcttcatcgcgctcttctctacgcctcctcactcattttctctccctccccaccttacccgttaacatctatctcaatgctcgccgtcactccggctggtatcgctccccccccaccttcgactcggaccgatg

SEQ ID NO: 8163 - DNA, 203 bp, synthetic construct
  source 1..203: mol_type = other DNA
ggcgcgccagtcctacccgttaacatctatctcaatgaacaatttgacaatctctgcctggcggctttgcgctatccgggccacaaattgtatccctctgtccacactctgttccctgatgtttcacccctcaagattccccactctgtccccgcctttgctcacctcgtccagcgacaggggctgcgcgactcggaccgatg

SEQ ID NO: 8164 - DNA, 203 bp, synthetic construct
  source 1..203: mol_type = other DNA
ggcgcgccagtcctgcggcaaggaaactccatcaccaacatctacggcaatggcaacgacgtcaccacagacgtcggcgccaatgggatgtccctccccattgccgtaggtgacatgcctaccgcctctacctctgaagcccctcttggttccaacaaaggtggctcttccacttccccaaaatccaccgactcggaccgatg

SEQ ID NO: 8165 - DNA, 203 bp, synthetic construct
  source 1..203: mol_type = other DNA
ggcgcgccagtcctctctcaaaccacagctcttcttgctcttcccggcaacatcgccggtggtgccccctctgcaacagttaatgccaacaacacttccatctcttcccaagctcttttaccctctgttaatccttacccttccacccctgctgtctcactccccaatcccgacgctcccactcaggtcgactcggaccgatg

SEQ ID NO: 8166 - DNA, 203 bp, synthetic construct
  source 1..203: mol_type = other DNA
ggcgcgccagtccttggccccgccgccgaccgccagtggctcgtcgacaccctctcttggtctgagacgatcgcaccccttactgtcttctctggacccaaggctctcacccctggcgtctacccccccactattgaacccaacactggtgtctatcctctaccagctgcactctgtgtttcccatcccgactcggaccgatg

SEQ ID NO: 8167 - DNA, 203 bp, synthetic construct
  source 1..203: mol_type = other DNA
ggcgcgccagtccttgaatctgtcttttccactgcctacaatgctcacgcctacttcaactgtggcttcgatgtcacagtcgtcgtgaacgcttcccagttccacggcggctcgctgatcgtcttggccatggctgaaggtctgggcgacatcaccccagctgattcttccacttggttcaacttccccgactcggaccgatg

SEQ ID NO: 8168 - DNA, 203 bp, synthetic construct
  source 1..203: mol_type = other DNA
ggcgcgccagtcctcgacgttcgccttccccagtgccccgcccttggtttccaatcgggagccgatggtgcagaagtccaacctgcccccaccagcgacctctctgatggtaaccccaccaccgaccctgcccctcgtgacaactttgactacccccaccaccctgttgatccttccactgacctagccgactcggaccgatg

SEQ ID NO: 8169 - DNA, 203 bp, synthetic construct
  source 1..203: mol_type = other DNA
ggcgcgccagtcctcaatgtctctgccccttcccaaccctgcactttctacgtcttctatgcccccccgggtgcatctgtcccttctgtgcagactctcgcagaactctctttcttcacccacactgccactcctctcaacctggcagcaccaaccaacatcactgtctccatcccttactcctcccccgactcggaccgatg

SEQ ID NO: 8170 - DNA, 203 bp, synthetic construct
  source 1..203: mol_type = other DNA
ggcgcgccagtcctccagtctgttctctgtacgtcctttggaggtttcggcctccaaaacggcggagatgcaggtaacctccactccaacacatggggtactctcatcctctatgttgatctcccccaatctgacagtgtctctgtttctgcttacatctccttccgtgactttgaagcgtacgtccccgactcggaccgatg

SEQ ID NO: 8171 - DNA, 203 bp, synthetic construct
  source 1..203: mol_type = other DNA
ggcgcgccagtcctccgccagactcctggcgttggccctgtgcccacgagcacctccatcgttcgtgtcgctcggcccacccccaaaccccgcacggctcgccgccaaggcggcaccctcgcggacctcatcctctcccccgaaagccgatgcttcattgtcgcccacactactgcccccttctactccgactcggaccgatg

SEQ ID NO: 8172 - DNA, 203 bp, synthetic construct
  source 1..203: mol_type = other DNA
ggcgcgccagtcctcatccttctggtcaaccccgacgaggagtatgccatcagcatgttctctcatggcgacgagtcaatcctccagtactcgtcgcgctctggcactcgcctcacccccactgccccagccttcttcctctgtgctgctgcatctgttgacacagtcctcccctactccatctctcacgactcggaccgatg

SEQ ID NO: 8173 - DNA, 203 bp, synthetic construct
  source 1..203: mol_type = other DNA
ggcgcgccagtcctatcacacctttggcttaccgatctgactggcattcctctccgcgcagtccccccccttactctcttcctctccgcgggagccgccctgtgtgccggcgcacaaacgctgatagccgtcgcacagggtggttctaccccggaaaccccacccactcccaaccgcgctctcctccgcgactcggaccgatg

SEQ ID NO: 8174 - DNA, 203 bp, synthetic construct
  source 1..203: mol_type = other DNA
ggcgcgccagtccttcgtcagggccttggcgatctcccggatgcggcgaaaggactttccgccgcgctcgagagtgttgccagggtcgctggcgatgccaacattgccacctcctcccaagccattgctacctccattaactctctttccaactccattgatggtgctacttctttcatgcaaaacttcgactcggaccgatg

SEQ ID NO: 8175 - DNA, 203 bp, synthetic construct
  source 1..203: mol_type = other DNA
ggcgcgccagtcctgcacattcgcctgaatgtgacggcacgtgacggtgtggccttctcagcggcggctgctctccaaccctccaaccccccttctgcaactcgctattgcaaatttgctaaccctctcactcagttttctatgtttaatctggctgtcgattacaaatcagttgtccttcccaacaccgactcggaccgatg

SEQ ID NO: 8176 - DNA, 203 bp, synthetic construct
  source 1..203: mol_type = other DNA
ggcgcgccagtcctccctctcacctgctttgatgaactggttgactttgttctgagctcccttcgcgaccgggcttcggtgaactcgctcctctctggcatggtgcgcactgacgtcacacgccaaggtgggaacgctgatgcccccgctccttctgcagctcctctcccctctgttatcccatctgtcgactcggaccgatg

SEQ ID NO: 8177 - DNA, 203 bp, synthetic construct
  source 1..203: mol_type = other DNA
ggcgcgccagtcctcccatcccaggaccccttcacccgtgcggttaacgagaaccgccctgtctctttcctctccaagatctggtcgtggcgagctcccatcttcgccgcctcctctttcctttctctcatcgctgcaactctcaccattgtccgttgtctccgtgacctgcggtccactcagggtgccgactcggaccgatg

SEQ ID NO: 8178 - DNA, 203 bp, synthetic construct
  source 1..203: mol_type = other DNA
ggcgcgccagtcctatacagtgggactcctgttccgaaaccacggaaaaaggatctcccaaaacaacctgtgtactctgggcctgtccgccggcagggtttcgaccccgccgtcatgaagatcatgggcaatgtggactcttttgtcaccctctcgggtactaaacccatctggactatgtcctgcctcgactcggaccgatg

SEQ ID NO: 8179 - DNA, 203 bp, synthetic construct
  source 1..203: mol_type = other DNA
ggcgcgccagtcctcggttcgccgatgattgccactgatcctggcggcttgggtatcctcggtatccacgtcgctggggtggctggctacaacggcttctccgcacgcctcacccccgagcgtgtccaagctttcctttcccacctggctacaccccaatctgtcctctactttcacccacccatgggcgactcggaccgatg

SEQ ID NO: 8180 - DNA, 203 bp, synthetic construct
  source 1..203: mol_type = other DNA
ggcgcgccagtcctcccgcctgcgcacgtctctcgtcgcagccggctccatcccatccctcccgcctttggtgctttccccatcaccaaagaaccagcagccctttctaggaaggaccctcgcctccccgagggcaccgacctggatgccatcaccctcgccaagcacgacaagggcgacatcgcgaccgactcggaccgatg

SEQ ID NO: 8181 - DNA, 203 bp, synthetic construct
  source 1..203: mol_type = other DNA
ggcgcgccagtcctgccctggccttgcatggaggaggcggctgactggtacttctcccagcttcctgataacctccctgtcctctcccaggaagatgccattcgtggtctcgaccacatggatgccatcgacctctcccaatctcctggctacccttggacgacacagggccggtcccgccggtccctcgactcggaccgatg

SEQ ID NO: 8182 - DNA, 203 bp, synthetic construct
  source 1..203: mol_type = other DNA
ggcgcgccagtcctgttcgacgaggatggcaaccctctccctgagctccaggaagccatcgattccgtctgggacggtggctcctacatctatcaatctttcctcaaggatgagttgcgccccacggcaaaagccagagctggaaaaacccggattgtggaggcggctccgatacaagcaattgtagtcgactcggaccgatg

SEQ ID NO: 8183 - DNA, 203 bp, synthetic construct
  source 1..203: mol_type = other DNA
ggcgcgccagtccttggacgtcgcctccttggttctctcatcaaccacctccagggtaaccctctccagcatggcagtgccgttgggtgcaatcctgacatccactggactcaaatcttccactcactcacctctttctctaatgtctggtctattgattactcttgctttgatgccactatcccctccgactcggaccgatg

SEQ ID NO: 8184 - DNA, 203 bp, synthetic construct
  source 1..203: mol_type = other DNA
ggcgcgccagtccttgctgacaaggcttctgactttcctgactcttcttccatctttgacatcactttccttaaacgctattttgtccctgatgatatccacccccacctcatccatcctgtgatggatgagcaaaccctcaccaactcaatcatgtggttgcgtggcggggagtttgaggaggtgttcgactcggaccgatg

SEQ ID NO: 8185 - DNA, 203 bp, synthetic construct
  source 1..203: mol_type = other DNA
ggcgcgccagtcctgcggtcactcgagactcttgcctttcactcgggaccgaagaactactcggcttggtgtgagaaaatcaaggctaagattcgagagaacggctgtgacgccactttcactccctactccgtcctccaacgtggttgggtttccacctgcatgactggaccctaccccctcaccggcgactcggaccgatg

SEQ ID NO: 8186 - DNA, 203 bp, synthetic construct
  source 1..203: mol_type = other DNA
ggcgcgccagtccttttcgaccgccttatggcaggcgggcttgtggacggcttcggcccacccacagcaagaatgccatcatctgtcctcacccccatttctcccctccttcccctgcaaccattacgcttactcgcatgtgcattgagtggtgcacgtgttgaacaaacagctacactcacgtggggcgactcggaccgatg

SEQ ID NO: 8187 - DNA, 203 bp, synthetic construct
  source 1..203: mol_type = other DNA
ggcgcgccagtcctgcgggttttcccgcccttcggcctctcgcgaggcccacccttccccttcctcccataactacagtgctttggtaggtaagcatcctgatcccccgcggaagctgctcgcgtggcaactgtggggacccagacaggttatcaaaggcacccggtctttccgcctccaggagtatccgactcggaccgatg

SEQ ID NO: 8188 - DNA, 203 bp, synthetic construct
  source 1..203: mol_type = other DNA
ggcgcgccagtcctcgtagtcgtcttccggcttgtccggcgcatgtttggtgaaccggtggggtaaggttggtgtgcccaacgcccgtactttggtgacaactcaagaccacccaggaatgccagggaggtaccccgcctcacggcgggatctgaccctgggctaattgtctacggtggttcttcttgcgactcggaccgatg

SEQ ID NO: 8189 - DNA, 203 bp, synthetic construct
  source 1..203: mol_type = other DNA
ggcgcgccagtcctcttccatttctttcttctgttcatgatggagggctctaacggattttcgagttcgttggctggcctttcctcatcacgctcttcacttcgcctcctcactcatcttctttccctcccccccccgaatcgcgacgcccgccgccactctggctggtaccgctccccccccaccctcgactcggaccgatg

SEQ ID NO: 8190 - DNA, 203 bp, synthetic construct
  source 1..203: mol_type = other DNA
ggcgcgccagtcctccccgtcaatgtctacctcaatgaacaatttgacaatctttgcctggcggctttgcgctacccaggctgcaaattatacccctctgtttacactctatttccagatgtctcacccttcaagatcccccaatccatccccgcctttgcccaccttgtccagcgacaggggttgcgcgactcggaccgatg

SEQ ID NO: 8191 - DNA, 203 bp, synthetic construct
  source 1..203: mol_type = other DNA
ggcgcgccagtcctatccaacggcaacgttgttcgcggatcccgctactccaagtggtgggagcccgcggccgcacgcgccttggatcgtgctcttgaccatgctgttgacgcgactgacgcagttgctggcgccgcctccaagggcatcaaggctggagccaccaagctctccaacaagcttgctggcgactcggaccgatg

SEQ ID NO: 8192 - DNA, 203 bp, synthetic construct
  source 1..203: mol_type = other DNA
ggcgcgccagtcctccacgcaatcatcaatctggctaattctaattctgctaccctcaaacttccttacattggagtcactccaaacacctccactgaaggacttcacaactattggaccattctctttgcccctctgactcctcttgctgtcccgaccggctcccccacctctgtcaaagtctccctcgactcggaccgatg

SEQ ID NO: 8193 - DNA, 203 bp, synthetic construct
  source 1..203: mol_type = other DNA
ggcgcgccagtcctccaatggcgtggctctctacagatctctctcatcttcactggtcctgctcagtgctacggccgccttcttcttgcttacacccctccctccgccaatcctcccaccaccatcgaggaagccaacaacggcacctacgatgtctgggatgtgaatggcgactccacctacactttcgactcggaccgatg

SEQ ID NO: 8194 - DNA, 203 bp, synthetic construct
  source 1..203: mol_type = other DNA
ggcgcgccagtccttgacgtccgcctcccacagtgtcctgcccttggcttccagtcgggagctgatggcgcagaagtccaacctgcccccaccagtgacctctctgatggtaaccccaccactgaccccgctcctcgtgacaactttgactaccctcaccaccctgttgatccttccactgacctagccgactcggaccgatg

SEQ ID NO: 8195 - DNA, 203 bp, synthetic construct
  source 1..203: mol_type = other DNA
ggcgcgccagtcctcaacgtctctgctcctcttcaagcttgcaccttctacatcttttatgcccctcccggtgcatctgtcccttctacgcagacccttgcagaactctctttcttcactcatactgccacccctctcaacttagctgctccaactaacatcactgtctctatcccttatgcctctcccgactcggaccgatg

SEQ ID NO: 8196 - DNA, 203 bp, synthetic construct
  source 1..203: mol_type = other DNA
ggcgcgccagtccttcggcaaacccctggtgtcggtcccatccccacgagcacctccatcgttcgtgtcgcccggcccactcccaaaccccgcagggtccgccgtcaaggtggtactcttgcagacctcatccttacccccgagagtcgttgcttcattgttgcacatactactgccccctactactccgactcggaccgatg

SEQ ID NO: 8197 - DNA, 203 bp, synthetic construct
  source 1..203: mol_type = other DNA
ggcgcgccagtcctcttctctggccttgccccgaagaaccccacctctcctctccaacacctctttgccaagctcatcaaatgggtgaccaaaatcatcggttcactcatcatcatctgcaacaaccccaccccctcagcactcattggtgtttccctcatgctctgcggtgacctcgccgaggacatcgactcggaccgatg

SEQ ID NO: 8198 - DNA, 203 bp, synthetic construct
  source 1..203: mol_type = other DNA
ggcgcgccagtcctcgagaagattatgtcccacatcaagaatcttctcgagtggcttggggtcctcgtcaaagatgaccccaggaccaaactcaactcgcagcatgagaaaattctggaactctacactgactctgttactgcttcttcaactcccccctctgagctttctgcggacgccattgggtccgactcggaccgatg

SEQ ID NO: 8199 - DNA, 203 bp, synthetic construct
  source 1..203: mol_type = other DNA
ggcgcgccagtcctcaacctggacctggccaagcaacttctcactctctcgcatgctgccaactctgtcacccacatccagttgtgcacacgcgctatcaccaactactctacagctctctctgccatctcccttgtcggtacacctggcacgcggccagagccactggtcgtgtacctgtacggacccgactcggaccgatg

SEQ ID NO: 8200 - DNA, 203 bp, synthetic construct
  source 1..203: mol_type = other DNA
ggcgcgccagtcctccctgggactggcaaatccctcctcgcttctctcctcgcttctactcttgctcaggccctctctggtgaccccaacaattactactcaccttcttcccctgactgcaaattctacgatggttactctggccagcctgtccactacatcgacgacatcgggcaagaccccgatggcgactcggaccgatg

SEQ ID NO: 8201 - DNA, 203 bp, synthetic construct
  source 1..203: mol_type = other DNA
ggcgcgccagtcctcccactctcctgcttcgatgaactgattgactttatcttgggctctcttcgcgatcgggcctcggtgaactcccttctctctggcatggtgcgcaccgacgtagcacgccagggcgggaacgctgacgcccccgctccctctgcagctcctctcccctctgtcctcccctctgtcgactcggaccgatg

SEQ ID NO: 8202 - DNA, 203 bp, synthetic construct
  source 1..203: mol_type = other DNA
ggcgcgccagtccttccttcccaggaccctttcgtccgtgcggtgaacgagaaccgcccggtctctttcctctccaagatctggtcgtggcgtgctcctatcttcgccgcctcctctttcctttccctcattgctgcaaccctcaccattgtccgctgtctccgtgacctgcggtccacccagggtgccgactcggaccgatg

SEQ ID NO: 8203 - DNA, 203 bp, synthetic construct
  source 1..203: mol_type = other DNA
ggcgcgccagtcctctggccttgcatggaagaggcggctgactggtacttctcccagctccctgacagcctcccagtcctctctcaggaagatgccattcgtggtctcgaccacatggatgccatcgacctctctcagtctcctggctatccttggacaacacagggccggtcccgccggtctctgttcgactcggaccgatg

SEQ ID NO: 8204 - DNA, 203 bp, synthetic construct
  source 1..203: mol_type = other DNA
ggcgcgccagtcctgcgtcgtcttcttggttctctcatcaaccacctccagggtaaccctctccagtatggcagcgccgttggatgcaaccctgacatccactggactcaaatcttccactctctcactcccttctctaatgtctggtctattgattactcttgctttgacgccaccatcccctctgtcgactcggaccgatg

SEQ ID NO: 8205 - DNA, 203 bp, synthetic construct
  source 1..203: mol_type = other DNA
ggcgcgccagtcctaagtcctaaaaacccttaacttggtcatactactcaactcagcaaaatgggagctcaggtatcaacacaaaagactggtgcgcatgagacgggtctaaatgcgagcggcaattcggttatacattacactaacatcaatttttacaaagactctgcatcaaactccctgaacagcgactcggaccgatg

SEQ ID NO: 8206 - DNA, 203 bp, synthetic construct
  source 1..203: mol_type = other DNA
ggcgcgccagtcctactattcggacagaacatgctgtaccattatttaggtagaacgggctacactgttcacgttcaatgcaacgcctcaaagttccaccaagggtgtctcctggtagtgtgcgtgcccgaagccgaaatggggtgtgccacagttgataggacggttactgaggagtatttatcaaacgactcggaccgatg

SEQ ID NO: 8207 - DNA, 203 bp, synthetic construct
  source 1..203: mol_type = other DNA
ggcgcgccagtcctggtgctatgtacaccggggagtaaccaattcctgacatcagatgactttcaatccccctctgcaatgccgcagttcgacgcaaccccccaaatgcacataccaggacaagtgagaaatctaatggaaatcgctgaggtggattcagtagtgccagtgaataacttatcacgctacgactcggaccgatg

SEQ ID NO: 8208 - DNA, 203 bp, synthetic construct
  source 1..203: mol_type = other DNA
ggcgcgccagtccttcgcttcgtccacgacgatgtgtataccagtgcagggtacattactgcttggtaccaaaccaccatagttgtccccccaaaaactccgacagattgcaagctgatgtgtttcgtgtcggcctgcaatgacttctcggtgcgtatgttgagagacacccctcacatagaacaggacgactcggaccgatg

SEQ ID NO: 8209 - DNA, 203 bp, synthetic construct
  source 1..203: mol_type = other DNA
ggcgcgccagtcctgcacacacacggtgccttcggccagcagtccggtgctgtgtatgtcggtaactatagagtggtaaatagacacttggccacgcataatgattggcaaaattgcgtgtgggaagactacaacagagaccttctcgtgagcacaacgactgcccatggttgtgataccattgccagcgactcggaccgatg

SEQ ID NO: 8210 - DNA, 203 bp, synthetic construct
  source 1..203: mol_type = other DNA
ggcgcgccagtcctatgtgagcaagtcaacctgctcaaggagacgctggttggtcaagactccattctagagaaatccctcaaagccctggtcaaaattatatcagccttggttatagttgtaaggaatcacgacgacctcgtaacagtgacagccaccctagcactcattgggtgctctgcatcgcccgactcggaccgatg

SEQ ID NO: 8211 - DNA, 203 bp, synthetic construct
  source 1..203: mol_type = other DNA
ggcgcgccagtccttgacgagtgctgtcctgtcaatttcaagaagtgctgcccactagtgtgtggtaaagccatccagtttatcgacagaagaacacaaatgaggtattcgttggacatgcttgtgaccgagatgttcagagaatacaaccacagacatagtgtgggggcgacacttgaggcactcttcgactcggaccgatg

SEQ ID NO: 8212 - DNA, 203 bp, synthetic construct
  source 1..203: mol_type = other DNA
ggcgcgccagtcctagactacggcttcctcaatctgggtggaacacccaccaagcgcatgctaatgtacaacttccccacgcgtgcagggcagtgtggtggtgtcctgatgtcaacgggtaaagtccttgggatacacgtcggcggaaatgggcaccagggtttttcagcagccctgttacgccattacgactcggaccgatg

SEQ ID NO: 8213 - DNA, 203 bp, synthetic construct
  source 1..203: mol_type = other DNA
ggcgcgccagtccttttaaccacaagtgcaggttatccttatgttgcccttggtatcaagaagagagatattttatctaagaagaccaaggatctgacaaagctgaaggagtgtatggacaagtatgggctgaatctccctatggtcacatatgttaaggatgagctgagatcggcagaaaaggtggccgactcggaccgatg

SEQ ID NO: 8214 - DNA, 203 bp, synthetic construct
  source 1..203: mol_type = other DNA
ggcgcgccagtccttaaaggtaagtccaggttaattgaggcatcaagtctaaatgattcagtagctatgaggcaaaccttcgggaacttgtacaaaacattccatctgaacccaggtatagtgacaggcagcgcagttggttgtgatcccgacttgttttggagtaaaatcccagtcatgcttgacggcgactcggaccgatg

SEQ ID NO: 8215 - DNA, 203 bp, synthetic construct
  source 1..203: mol_type = other DNA
ggcgcgccagtcctaattaggtggaccaaagaccccaaaaacacccaggatcatgtgcgatccttatgcctattggcttggcataatggggagcaagaatatgaagagtttgtgtccaaaatcaggagcgttccagtgggacgctgcctgaccctgccagcgttctcaactttgcgcaggaggtggctcgactcggaccgatg

SEQ ID NO: 8216 - DNA, 203 bp, synthetic construct
  source 1..203: mol_type = other DNA
ggcgcgccagtcctaaggtcttagaaactctcaactttattttgacactcaatacagcaaaatgggagctcaagtatcaacgcagaagactggggcacatgagactagcttgaacgccaacgggagttcggtcattcactacaccaacatcaactactacaaggatgcagcctcaaattcagcaaacacgactcggaccgatg

SEQ ID NO: 8217 - DNA, 203 bp, synthetic construct
  source 1..203: mol_type = other DNA
ggcgcgccagtccttggtaggttacggtgtgtggccagagtacttgtctgacaaggaggcgacagcggaggatcaaccaacacaaccagatgttgcaacatgcagattctacaccttagattcagtgcagtgggaaaagaactctgcaggatggtggtggaaattccctgaggctttaagtgatatggcgactcggaccgatg

SEQ ID NO: 8218 - DNA, 203 bp, synthetic construct
  source 1..203: mol_type = other DNA
ggcgcgccagtcctgcctattcggtcaaaatatgatgtaccattacttaggacgggcaggttacacgattcacgtgcaatgcaatgcttcaaagttccatcaagggtgtttgcttgtggtctgcgttcctgaggcggagatgggtggtgctaaagtcggacaggcattcgaggcagatgcactagccacgactcggaccgatg

SEQ ID NO: 8219 - DNA, 203 bp, synthetic construct
  source 1..203: mol_type = other DNA
ggcgcgccagtcctcactgaacacacctggcagtagtcagttcctgacgtctgatgacttccagtccccttgtgcactaccgcaatttgatgtcacaccacccatgaaaattcccggtgaagtccacaatttaatggagatagcagaggttgactcggtcgtgccggtaaacaacgttaacggcactacgactcggaccgatg

SEQ ID NO: 8220 - DNA, 203 bp, synthetic construct
  source 1..203: mol_type = other DNA
ggcgcgccagtcctctgaccaaatggacatgttcagaatcccagtgacaatagggaacaagacccaagatcaagtatttggagtgagattgcagcctggactagacagtgtcttcaaacacacactacttggagagatcctgaattattatgctcattggtccgggagcataaaactaacattcatgtcgactcggaccgatg

SEQ ID NO: 8221 - DNA, 203 bp, synthetic construct
  source 1..203: mol_type = other DNA
ggcgcgccagtccttctgcggatccgcgatggcaactggcaagttccttattgcgtactcccctccgggtgcggacccaccgactaacagaaaaggggccatgctgggcaaaaatatagtatgggacatcggactgcaatccagttgcgtactgtgtatgccgtggatcagccaaactcattatagaccgactcggaccgatg

SEQ ID NO: 8222 - DNA, 203 bp, synthetic construct
  source 1..203: mol_type = other DNA
ggcgcgccagtccttactgcaaggtgacgtagaggaagcagtgagaaaagccattgtccacgtggctgacaccatacgcagtggcccaagtaactccgaaagtgtgccagccctgacggcagctgagaccggacacacctcgcaggtgactcctagtgacaacatacaaactaggcatgttaagaactcgactcggaccgatg

SEQ ID NO: 8223 - DNA, 203 bp, synthetic construct
  source 1..203: mol_type = other DNA
ggcgcgccagtcctaccactccagatcagaatcatccatagaaaatttcctggggagatcggcatgtgtgtacatgaaggactataagaacaaagataatgacatgacaaacaaatacgtcgcatggacaatcaacacaagacagatggtacaaatgaggcgtaagttggagatgttcacgtatgtgccgactcggaccgatg

SEQ ID NO: 8224 - DNA, 203 bp, synthetic construct
  source 1..203: mol_type = other DNA
ggcgcgccagtcctctccaatcactagcacaatacgtgtttatttcaagcctaaacacgtaagggtatggatcccgcgagcacctaggctatgtccctacgagaaagcagggagcgtggactttaaaccgactgcaattacctcaaccagagcaaccatcaacactgttcacagcaccactcgacccacgactcggaccgatg

SEQ ID NO: 8225 - DNA, 203 bp, synthetic construct
  source 1..203: mol_type = other DNA
ggcgcgccagtccttgcacacatatgggccgtttggtcaacaatcaggtgcagtgtatgtgggcaattacagagtggtcaacaggcacctggcaacccattctgattggcaaaattgcgtgtgggaggattccaacagggacctcttggttagtacaacaacggcgcacggctgtgacaccattgccacgactcggaccgatg

SEQ ID NO: 8226 - DNA, 203 bp, synthetic construct
  source 1..203: mol_type = other DNA
ggcgcgccagtcctggtgccaatgcactacaggggtgtacttttgtgcttcaaaaaacaagcactatccagtcgtttttgagggaccgggacttgtagaagtccaggagagtgagtactaccccagaagataccagtcccatgtactcctcgcagcaggcttttccgagcccggggattgtggtggaacgactcggaccgatg

SEQ ID NO: 8227 - DNA, 203 bp, synthetic construct
  source 1..203: mol_type = other DNA
ggcgcgccagtccttcttgaggtgcgaacatggagtcatcggcatcgtgaccatgggtggtgaaggtgttgttggtttcgctgatgtaagggaccttttgtggttagaggatgatgccatggagcaaggggttagagattatgttgagcaacttggcaacgcctttggttcgggcttcaccaatcaaacgactcggaccgatg

SEQ ID NO: 8228 - DNA, 203 bp, synthetic construct
  source 1..203: mol_type = other DNA
ggcgcgccagtccttttgtgaacaggttaacctattgaaagagtcattggttggtcaagactccatcctggaaaagtcacttaaagctttggtgaaaatcatatcagcactggtcatcgtagtaagaaaccatgatgatctcatcacagtaaccgcaaccctagctctgattggttgcaccacctctccgactcggaccgatg

SEQ ID NO: 8229 - DNA, 203 bp, synthetic construct
  source 1..203: mol_type = other DNA
ggcgcgccagtcctcagaggtgagagaaaaacacgaattcttaaacaggctgaaacaactgcccctgttggaaagccagattgccaccattgaacaaagcgccccttcacagagtgatcaagagcaactgttctccaatgtgcagtacttcgcacactactgtaggaagtacgcccccctgtatgctgcgactcggaccgatg

SEQ ID NO: 8230 - DNA, 203 bp, synthetic construct
  source 1..203: mol_type = other DNA
ggcgcgccagtcctttcaaggtccaccagtatacaaagagatcaaaattagcgtggcaccagaaacccccccccccccggccatagcagacctgttgaagtcagtagacagtgaggcggttagagagtactgcaaggaaaagggatggttggtacctgagattcactccaccctgcaaattgaaaagccgactcggaccgatg

SEQ ID NO: 8231 - DNA, 203 bp, synthetic construct
  source 1..203: mol_type = other DNA
ggcgcgccagtcctacttcaatgatgaacagggtgaaatcgagtttatcgagagctccaaggaggctggtttcccagttattaacacccccagcaaaacaaagcttgaacccagtgtattccatcacgtatttgagggaaataaggagccagcagtgttgaggaatggggaccccagattgaaggccacgactcggaccgatg

SEQ ID NO: 8232 - DNA, 203 bp, synthetic construct
  source 1..203: mol_type = other DNA
ggcgcgccagtcctactttgaggaagccatcttttctaaatacattggaaatgtgaacacgaacgtggatgagtacatgatggaagccgttgaccattatgctggacagttggcaactttggacatcagcacagaaccaatgaagctcgaggacgccgtctatggcactgaaggtctggaagcactggcgactcggaccgatg

SEQ ID NO: 8233 - DNA, 203 bp, synthetic construct
  source 1..203: mol_type = other DNA
ggcgcgccagtcctatctctctactagtgcagggtacccctatgttgcacttggtatcaaaaagagagacattttgtccaagaaaaccaaggacctgacaaagctgaagggatgtatggacaagtacgggctaaatctcccgatggtcacctatgtgaaggatgagctgagatcagcagagaaggttgcgactcggaccgatg

SEQ ID NO: 8234 - DNA, 203 bp, synthetic construct
  source 1..203: mol_type = other DNA
ggcgcgccagtcctccaagggtaaatccaggctaattgaggcatcaagtctgaatgattcagtggccatgaggcagacctttggaaacctgtacaaaacatttcacctaaaccctggcatagtgacaggcagtgcagttggctgtgaccccgatctgttctggagcaagattccagtcatgcttgacgcgactcggaccgatg

SEQ ID NO: 8235 - DNA, 203 bp, synthetic construct
  source 1..203: mol_type = other DNA
ggcgcgccagtcctctatcagatggactaaagatcctaagaacactcaggaccatgtgcgatctttgtgcttattggcctggcacaatggagagcaagaatatgaagaatttgtgtcaaaaatcaggagcgtcccagtagggcgctgcttgaccttgcctgcgttctccactctacgcaggaaatggccgactcggaccgatg

SEQ ID NO: 8236 - DNA, 203 bp, synthetic construct
  source 1..203: mol_type = other DNA
ggcgcgccagtcctatttttcacaagatccctcaaaattcacaaagcccgtagtagatgctctcaccgaagctgctgttcctttgaaatcaccatcagcagaagcttgcggttatagtgaccgcgtgttacaattgacactaggcaattctactattaccacacaggaagctgctaacattgtggtggcgactcggaccgatg

SEQ ID NO: 8237 - DNA, 203 bp, synthetic construct
  source 1..203: mol_type = other DNA
ggcgcgccagtcctccatgcctggagaagatggctctgaattcatagacccgctgttcttggacaacggtacgatgttgcaacaggcaactgttttcccccaccagtggataaatttgagaactaacaacagcgcaaccattatagttccatatatcaacaacataccagcagactcccctgttcgaccgactcggaccgatg

SEQ ID NO: 8238 - DNA, 203 bp, synthetic construct
  source 1..203: mol_type = other DNA
ggcgcgccagtcctttttaactacctctgatgactgttctgaaggtttgttaccaaattttcattctactcccgaaattttcatccctggtcaagtgaataatttactcgaattagtgcaaattgagacaatgatgacagtcaataatacagcaacccaggcttcaggagtgggtagaatcacgattccgactcggaccgatg

SEQ ID NO: 8239 - DNA, 203 bp, synthetic construct
  source 1..203: mol_type = other DNA
ggcgcgccagtcctctgtttcagtgcaaagtgatgtggacactcaaattgcaggtttcacaattaatcctggtagtgatggagtgtttcagtcaacataccttgggcaaatttgcagatacttcaacaactggtcagggagcattgaaatcactttcatgttctgtggatccttcatggcaacaggcacgactcggaccgatg

SEQ ID NO: 8240 - DNA, 203 bp, synthetic construct
  source 1..203: mol_type = other DNA
ggcgcgccagtcctcaatcccctttatgtccacatgtgcagcttatgcttggttttacgatggttatccaagatcatatggaccagatgccgaagcattaaataaatcatatggcatattaccagcaaatcaatttggcaccttttgcatgagattacttggtagtgctctgaagactacattgacagcgactcggaccgatg

SEQ ID NO: 8241 - DNA, 203 bp, synthetic construct
  source 1..203: mol_type = other DNA
ggcgcgccagtcctttagaatctacatgaggccaaagcatatcaaatgttgggcacccagaccatttaggatgttgccatatgttgaaaagaatagaccatcctacaaatcaccccctacagatccaatcaagaatcggactagtatcaccacaacgggagcatttggacaacaaagtggagctgtctcgactcggaccgatg

SEQ ID NO: 8242 - DNA, 203 bp, synthetic construct
  source 1..203: mol_type = other DNA
ggcgcgccagtcctacaaacacttcccagtgtgtttccagggtccgggtctcacatttattgaggccaatgagtactacccagcgcgatatcagtcccacgtgcttctagccgttggccatgcgcaaccaggcgattgtggtggcattttacgatgtgaacatggagtggtgggaatcctaacagcagcgactcggaccgatg

SEQ ID NO: 8243 - DNA, 203 bp, synthetic construct
  source 1..203: mol_type = other DNA
ggcgcgccagtcctcagaagaagtaccaccaccaccagccattgcagaccttttaaagtcagtggactcagaggaggtcagaaactattgtgaatcaaaaggatggatagtacctgccatggaaattaatgttgagagacacatcaatagagcaatgactattctccaagctgtgtccacctttgttgcgactcggaccgatg

SEQ ID NO: 8244 - DNA, 203 bp, synthetic construct
  source 1..203: mol_type = other DNA
ggcgcgccagtccttaatgtacaacttcccaaccaaatcaggacaatgcggaggcatactcatggctacaggtaaggtgttaggaatccatgttggtggcaatgggcaccagggctttgctgcaactcttttgagatcatatttcagtgaagagcaaggtgagattgaatggatggagaccaacaaggcgactcggaccgatg

SEQ ID NO: 8245 - DNA, 203 bp, synthetic construct
  source 1..203: mol_type = other DNA
ggcgcgccagtcctagtcaggttatcccataatcaatgcaccaaccaagacaaaactagaacccagcgtctttcatgatgtttttgagggaaagaaggagcctgctgtgttgaacccccgtgatcccaggttgagagttgattttgaagaagctatcttctccaaatatgtgggtaatgttaacacaccgactcggaccgatg

SEQ ID NO: 8246 - DNA, 203 bp, synthetic construct
  source 1..203: mol_type = other DNA
ggcgcgccagtcctcggtctggttcgcagctctaaaaatattgctggagaaaattggatacaccaacaatgagaccaagtacattgattatttgtgtaactcctatcacctttacaaaaataaacattattttgttagagggggcatgccatctggttgctcagggacttccatcttcaacagtatgacgactcggaccgatg

SEQ ID NO: 8247 - DNA, 203 bp, synthetic construct
  source 1..203: mol_type = other DNA
ggcgcgccagtcctccagtgggtcgatgccttttgcttccggcttattcgacacttagacggaaatggcttgactctttctaaattatatacaatcaatttaaatgattaggctaattggctaaccctgtcacgtatctggacgtgacaaaacgtgacaggggtaaatttagcacatccagagtgcttcgactcggaccgatg

SEQ ID NO: 8248 - DNA, 203 bp, synthetic construct
  source 1..203: mol_type = other DNA
ggcgcgccagtccttgttttcttgttttgccgtgcatttagaataagagacaacttaaacctccgattcggcaacacagggaataatctcaccagacccggcagtgtcttcaggcttcatagccccaagatggagagtcgggcccacaaagcatggatgacgcacaccgcatcaggtttcgaaacagacgactcggaccgatg

SEQ ID NO: 8249 - DNA, 203 bp, synthetic construct
  source 1..203: mol_type = other DNA
ggcgcgccagtcctttaccataagattttaacagcaggattgtcagtccaacaaggcattgtgagacaacgggtcattcaagtccaccaggttacaaacctagaagaaatatgccaattgatcattcaagcctttgaagctggtgttgattttcaagagagtgcagacagtttcttgctgatgctatgcgactcggaccgatg

SEQ ID NO: 8250 - DNA, 203 bp, synthetic construct
  source 1..203: mol_type = other DNA
ggcgcgccagtccttttacatcatgcttatcagggtgactacaagcaattcttggaaagcaatgcagtcaagtaccttgagggtcatggctttcgctttgaggtcaggaaaaaggaaggagtcaagcgactcgaagaattgcttcctgctgcatccagtggcaagagcatcaggagaacactggctgccgactcggaccgatg

SEQ ID NO: 8251 - DNA, 203 bp, synthetic construct
  source 1..203: mol_type = other DNA
ggcgcgccagtcctcggactgtttcctcagctttctgcaattgccctaggtgtcgcaacggcacacggcagtaccctggcaggagtaaatgtgggggaacagtatcagcaactacgagaagcagccactgaggcagaaaaacaattgcagaaatacgctgaatctcgcgagcttgaccatctaggtctcgactcggaccgatg

SEQ ID NO: 8252 - DNA, 203 bp, synthetic construct
  source 1..203: mol_type = other DNA
ggcgcgccagtccttcccagaaaccgcacggccgagaatcgatccccagcattcaaaatgcgttattaagaaaaaacatatgatgaagattaaaaccttcatcaacattgcacagactttgatccttaggagtttattctagctatctacaaaacgggtccaaaacggaatgatttccactagggctgcgactcggaccgatg

SEQ ID NO: 8253 - DNA, 203 bp, synthetic construct
  source 1..203: mol_type = other DNA
ggcgcgccagtcctcttttcaccaactggtccaggtaatttgcaagctaggaaaagacaattctgcattggacattattcatgctgagttccaagccagccttgctgaaggtgattctccccaatgtgccctgatccaaataacaaaacggatccccatcttccaggatgccactccgcccacaattccgactcggaccgatg

SEQ ID NO: 8254 - DNA, 203 bp, synthetic construct
  source 1..203: mol_type = other DNA
ggcgcgccagtcctctcaccttcagacatcaacgcatggcagtcccaaacaccggtgagggaggcgcccggcgacaacacatgatgataggctgatcttcgggataagagacatgaaaaaccaaaaagccgtttacatccagatccaagatcaagagtggcttggaaataaggggcacttgttctttgcgactcggaccgatg

SEQ ID NO: 8255 - DNA, 203 bp, synthetic construct
  source 1..203: mol_type = other DNA
ggcgcgccagtccttggtgaatgtaatatctggcccgaaagtgctgatgaagcaaatcccaatctggcttcctctgggtgtctctgaccagaagacatatagctttgattcaaccactgctgccattatgctagcatcatataccatcactcattttggcaaaacctcaaatccccttgtgagaatcacgactcggaccgatg

SEQ ID NO: 8256 - DNA, 203 bp, synthetic construct
  source 1..203: mol_type = other DNA
ggcgcgccagtcctaaactccagctgtgtcaactggcacgctccgcccagggatctcattccatcccaaattaaggcctatcctgctaccaggaagagctggaaagaagggctccaactccgatctaacatctcctgacaaaatccaggctataatgaatttcctacaagacctcaaaattgtaccaacgactcggaccgatg

SEQ ID NO: 8257 - DNA, 203 bp, synthetic construct
  source 1..203: mol_type = other DNA
ggcgcgccagtccttcgatccaaccaagaatatcatgggtattgaagtgccagaactcctggttcacaggctgactgggaagaagacaactaccaagaatggtcaaccaatcattccaattctgctaccaaagtacattggtcttgatcctctatctcaaggtgatctcacaatggtgatcactcaggcgactcggaccgatg

SEQ ID NO: 8258 - DNA, 203 bp, synthetic construct
  source 1..203: mol_type = other DNA
ggcgcgccagtcctaaggcagccaagcagcagcccccgagccgagcccaaacccattacacccgagcccaacacccatccagcaacccacaaccgtcaaacgcacagatggacaagcaaagaacatcaagccaggagcaacacagaccccaagtctaagctgatcaacccctcccgcaatcccaccaacgactcggaccgatg

SEQ ID NO: 8259 - DNA, 203 bp, synthetic construct
  source 1..203: mol_type = other DNA
ggcgcgccagtcctcgccagcaaaaatcccccaactcgataccaaccccaagcaaatcagctcaaaccgtctatctctccccgcttcactccacaccccagattcagcaaacgatcaacgcacttcttatgccacagcttatattaagaaaaagaacttgatgaagattaaggcaaccagtggtgctacgactcggaccgatg

SEQ ID NO: 8260 - DNA, 203 bp, synthetic construct
  source 1..203: mol_type = other DNA
ggcgcgccagtccttcttcatctctttgatttgagtcttaagtgaatacacaggttctaatactgttcttctgtccaacggtataattcagccaggcctaagacagtagctaatcacagtcatcatgggagcgtcagggattctgcaattgccccgtgagcgcttcaggaaaacatctttctttgtttcgactcggaccgatg

SEQ ID NO: 8261 - DNA, 203 bp, synthetic construct
  source 1..203: mol_type = other DNA
ggcgcgccagtcctgggtaataatcctattccataaagtcttttcaatcccgttgggggttgtacacaacaataccctacaagtgagtgatattgacaagtttgtgtgccgagacaaactctcttcaactagccaattgaagtcagtcgggttgaacttggagggcaatggagtagcaactgatgtaccgactcggaccgatg

SEQ ID NO: 8262 - DNA, 203 bp, synthetic construct
  source 1..203: mol_type = other DNA
ggcgcgccagtccttacacaaagtctcaggaactggaccatgcccaggaggactcgcctttcacaaagaaggagccttcttcctgtatgaccgactcgcatcaacaatcatttatcggggtacaacctttgccgaaggagttattgcatttctgatcttgcctaaggcgcgaaaggattttttccagtcgactcggaccgatg

SEQ ID NO: 8263 - DNA, 203 bp, synthetic construct
  source 1..203: mol_type = other DNA
ggcgcgccagtcctcagtagaggcacgggaccatccagccccacggtccccaacaccacagaaagccacgccgaacttggcaagacaaccccaaccacactcccagaacagcacactgccgccagtgccattccaagagccgtgcaccccgacgaactcagtggacctggcttcctgacgaacacaatcgactcggaccgatg

SEQ ID NO: 8264 - DNA, 203 bp, synthetic construct
  source 1..203: mol_type = other DNA
ggcgcgccagtcctacggggggttacaaatctcctgacaggatccagaagaaagcgaagggatgtcactcccaatacacaacccaaatgcaacccaaacctgcactattggacagccttggatgagggtgctgccataggtttagcctggataccatacttcgggccagcagctgagggaatttacaccgactcggaccgatg

SEQ ID NO: 8265 - DNA, 203 bp, synthetic construct
  source 1..203: mol_type = other DNA
ggcgcgccagtccttgaaggcataatggagaatcaaaatggattgatctgtggattgaggcagctggccaacgaaacgacacaagctcttcaattgttcttaagggcaactactgagttgcgtacattctctatactaaatcggaaagcaatagacttcttgctccaaagatggggaggaacatgtcacgactcggaccgatg

SEQ ID NO: 8266 - DNA, 203 bp, synthetic construct
  source 1..203: mol_type = other DNA
ggcgcgccagtcctaaatctcaacttagcttgctatgtgaaagccacttacggcgagaaggacttggtcaagaccaatcagagtcagttctggaggtatatcaacgcttacacagcgataaaggtgggaatttcgaggcagcactatggcagcagtgggatcggcaatcattgataatgttcataacacgactcggaccgatg

SEQ ID NO: 8267 - DNA, 203 bp, synthetic construct
  source 1..203: mol_type = other DNA
ggcgcgccagtcctatgaacaccagaaaaccaggaccagtcaaattctccctcctccatgaatcaaccttgaagacacttgctaaaaaacctgcgacccagatgcaagcactaatcttagaattcaatagttctctcgctatttaactcaactcatcaaaatgctaacttgtgatccttaagctgcaccgactcggaccgatg

SEQ ID NO: 8268 - DNA, 203 bp, synthetic construct
  source 1..203: mol_type = other DNA
ggcgcgccagtcctcttagacttttgataagaatactaactattgatgattgtctttgacatgaggataagaacactgcccattagatagatggggttcaccattaatacacaattacccaatcatgttaacagcagttagatccctcaagtatatcaagttcattctaccctttgcattgtcactctcgactcggaccgatg

SEQ ID NO: 8269 - DNA, 203 bp, synthetic construct
  source 1..203: mol_type = other DNA
ggcgcgccagtccttattccgcatactccttaaatccccaactaaagaactgtagactaccgaaacatatataccgactaaaatatgacaccactgttacagagtttttgagtgatgtgccggtagcaacattgccagcggattttttagtacctacatttcttaggactctatcaggaaatggttctcgactcggaccgatg

SEQ ID NO: 8270 - DNA, 203 bp, synthetic construct
  source 1..203: mol_type = other DNA
ggcgcgccagtcctcaaatgtttcactggtatgatcttgcaattctagcacgtagagggcgactaaatagagggaataatcgctcaacatggtttgcaagtgataatttggtagatatcctaggttatggagattatattttttggaaaataccattatcactactaccagtggatacacaaggcctccgactcggaccgatg

SEQ ID NO: 8271 - DNA, 203 bp, synthetic construct
  source 1..203: mol_type = other DNA
ggcgcgccagtcctccacatgcagccaaggactggtatcatgaatcggttttcaaggaggctattcaaggccatacacacatcgtgtccatctctacagcagatgtcttaatcatgtgtaaggacataatcacctgtcgatttaatactttactgattgctgctgtggcaaatctagaggattcagttcgactcggaccgatg

SEQ ID NO: 8272 - DNA, 203 bp, synthetic construct
  source 1..203: mol_type = other DNA
ggcgcgccagtcctcattcagattaccctttaccagaaacagtgtctgacctatacaaagcaggagattatttaatctcattgctaggatcagaaggttacaaagtcataaaattccttgagccgttatgcttagcaaagatccaactctgctcaaattacactgagaggaaaggaagattcctcactcgactcggaccgatg

SEQ ID NO: 8273 - DNA, 203 bp, synthetic construct
  source 1..203: mol_type = other DNA
ggcgcgccagtcctgcagtttttgaacccaatgttcttggttataacccaccgaataaatttgctacaaaaagggtacctgagcaattccttgaacaggagaatttctcaatagagagtgtcctacattatgctcaacgtctggaatatcttctcccggagtaccggaacttctctttttcactcaagcgactcggaccgatg

SEQ ID NO: 8274 - DNA, 203 bp, synthetic construct
  source 1..203: mol_type = other DNA
ggcgcgccagtcctgagaaggagttaaacattggacgagcttttgggaaattgccatatccaacacgcaatgttcaaactctgtgcgaagctttgttagcagatggtttggcgaaagcattcccaagcaatatgatggttgtgacagagcgcgagcaaaaagaaagccttttgcatcaagcgtcttggcgactcggaccgatg

SEQ ID NO: 8275 - DNA, 203 bp, synthetic construct
  source 1..203: mol_type = other DNA
ggcgcgccagtcctccacagtgttatatacatgtgagtgattattataaccccccacatggagtctctctcgaaaaccgagaaaatccaccagaaggtccaagctcttaccgtggtcatctaggcgggattgagggacttcaacaaaaactctggacaagcatctcatgtgcacagatttcattagttcgactcggaccgatg

SEQ ID NO: 8276 - DNA, 203 bp, synthetic construct
  source 1..203: mol_type = other DNA
ggcgcgccagtcctgaaatcaaaaccggttttaaactgcgatctgcggtaatgggtgacaatcaatgtataactgtactctctgtatttcccctcgaaactgagtctagtgagcaagaattaagttctgaagataatgccgctagagtagctgctagcttagcaaaagtcacaagtgcctgcggcatccgactcggaccgatg

SEQ ID NO: 8277 - DNA, 203 bp, synthetic construct
  source 1..203: mol_type = other DNA
ggcgcgccagtccttttttaaaacctgatgaaacttttgttcactcaggtttcatttattttggcaaaaaacaatatttgaatggagtacaattacctcaatcactgaaaactgctactagaattgcacccttgtcagatgctatctttgatgatcttcaagggacactagctagcataggcacggctcgactcggaccgatg

SEQ ID NO: 8278 - DNA, 203 bp, synthetic construct
  source 1..203: mol_type = other DNA
ggcgcgccagtccttgtatactagaacaactaaatgtcatctggctcaaaccatatgagcattgccctaaatgtgcaaagtcagcaaaccctaaaggggaaccttttgtttctattgcaattaaaaaacatgtagtaagtgcttggcctgatcaatcacgacttagttggacaattggagatggcatccgactcggaccgatg

SEQ ID NO: 8279 - DNA, 203 bp, synthetic construct
  source 1..203: mol_type = other DNA
ggcgcgccagtccttcagcaagagatagtaatattatcttccagaatgtcattaattttgctgttgcactttttgatctacgatttaggaacgtggctacttcttctatacaacatcatcgggctcatcttcatttgtcaaagtgttgcacgcgagaggttccagcccaatatttagtttatacatcacgactcggaccgatg

SEQ ID NO: 8280 - DNA, 203 bp, synthetic construct
  source 1..203: mol_type = other DNA
ggcgcgccagtcctctagctaaaactgttatccaatctataatttctgacagcaacaattcatcaacggatccaatcagtagtggggaaacacgatcattcaccactcacttcttgacatatcctaagattggactactatatagttttggtgcactcatcagttattatctaggcaacaccattattcgactcggaccgatg

SEQ ID NO: 8281 - DNA, 203 bp, synthetic construct
  source 1..203: mol_type = other DNA
ggcgcgccagtcctagaaccaaaaaattgactcttaacaacttcatatattacctagctactcaaatacataatttacctcatcgctcgttgagaatccttaaacctactttgaaacacgctagtgttatctcgagattaataagtattgactctcacttctcaatttatattggaggaactgctggtcgactcggaccgatg

SEQ ID NO: 8282 - DNA, 203 bp, synthetic construct
  source 1..203: mol_type = other DNA
ggcgcgccagtccttataacgaaagaccctctatcagaaagtctgaggggacaacagagattgtaaggcttactcggcagctgagggcaataccagacaccacaatatattgccgcttcacgggaatagtttcttcaatgcactataagctcgatgaagtcctttgggaatttgataattttaagtctcgactcggaccgatg

SEQ ID NO: 8283 - DNA, 203 bp, synthetic construct
  source 1..203: mol_type = other DNA
ggcgcgccagtcctggacaaataaaagtcactttaaacaattctgcaagccagattaccgatattactaatccaagttggttggcagaccaaaaatctaggatccctaagcaagtagagattataaccatggatgctgaaacaacagaaaacattaatcggtcaaaattgtacgaagcagtccaacagcgactcggaccgatg

SEQ ID NO: 8284 - DNA, 203 bp, synthetic construct
  source 1..203: mol_type = other DNA
ggcgcgccagtcctataaaaggtcgtattacaaaattggtaaatgattaccttaagttctttctaataatacaagccttaaagcacaattgcacatggcaagaggaactaagagctcttccagatctaattagtgtctgcactcgattctatcatactcgaaactgttcatgtgaaaaccggttcctacgactcggaccgatg

SEQ ID NO: 8285 - DNA, 203 bp, synthetic construct
  source 1..203: mol_type = other DNA
ggcgcgccagtcctgtacagactttatacttatcacgcatgcaggattcggaaatcaaactaatagatagattgaccggccttcttagtctatgtccaaatggtttttttcggtaaggactcttgacgtacaaactccacatagttatacaatggtaccaggacactatatgtaaattgaccctaagacgactcggaccgatg

SEQ ID NO: 8286 - DNA, 203 bp, synthetic construct
  source 1..203: mol_type = other DNA
ggcgcgccagtcctaccaagagcaggcccaaagggccattaggccacatctgctgagcctgcagaacacgcaggacttacttagcagaagagagcgcgtgccgaaaccagccaacaaattgacacagctgctcactctgaccctgaattcataaacaatattaagttgacaacagagatactaatccacgactcggaccgatg

SEQ ID NO: 8287 - DNA, 203 bp, synthetic construct
  source 1..203: mol_type = other DNA
ggcgcgccagtcctcgaggaggaaacaacagaagcaaatgctggacaatttctttcatttgctagtctgtttctcccaaaattggttgtcggagaaaaggcctgtctggagaaggttcaacgacaaatccaagtgcacgcagaacaaggtctgattcaatacccgacatcttggcaatcggtgggacacgactcggaccgatg

SEQ ID NO: 8288 - DNA, 203 bp, synthetic construct
  source 1..203: mol_type = other DNA
ggcgcgccagtcctcctccaaaaaacagagcacggagttcgcctgcatcccttggcgcgaacagccaaagtcaaaaatgaggtgagctcttttaaggccgctttagcctcactagcacaacatggagaatatgccccgtttgctcgtctgctgaatctatctggggttaataatcttgagcatgggctcgactcggaccgatg

SEQ ID NO: 8289 - DNA, 203 bp, synthetic construct
  source 1..203: mol_type = other DNA
ggcgcgccagtcctaccttttgatgccatcctttactaccatatgatgaaagaagagcccatcattttcagcactagtgatgggaaggagtatacatatccagactctcttgaagatgagtatccaccctggctcagcgagaaggaagccatgaacgaagacaatagattcataaccatggatggtcacgactcggaccgatg

SEQ ID NO: 8290 - DNA, 203 bp, synthetic construct
  source 1..203: mol_type = other DNA
ggcgcgccagtcctcggttagtactagtatcaacagtactgccagtggtccgaactttccagcaccggatgtaatgatgagtgatacaccctccaactcactccgaccaattgctgatgataacatcgatcatccaagtcatacaccaaccagtgtttcatcagcctttatactcgaggcaatggtgacgactcggaccgatg

SEQ ID NO: 8291 - DNA, 203 bp, synthetic construct
  source 1..203: mol_type = other DNA
ggcgcgccagtcctttggtcctgggatccccgatcacccgttgcggcttctaagaataggaaatcaagccttcttgcaagagtttgtgctgcctccagttcaattgccgcagtatttcacttttgacctgacggctctaaagctgatcactcaacctctcccggcagcaacctggacggatgatactccgactcggaccgatg

SEQ ID NO: 8292 - DNA, 203 bp, synthetic construct
  source 1..203: mol_type = other DNA
ggcgcgccagtcctcgaccggtcctacaggaatacttcgtcctggaatttcctttcatcccaaactgagacctatcctattgccagggaagaccgggaaaagaggatccagctccgatcttacttctcctgataaaatacaagcaataatgaactttctccaagacctcaaactcgtgccgattgatccgactcggaccgatg

SEQ ID NO: 8293 - DNA, 203 bp, synthetic construct
  source 1..203: mol_type = other DNA
ggcgcgccagtccttccaaccagcaacaccatccatacacaggtatcaattgggctgccgcagcatatagacccaatagcaagctgctgtccagaaaatagttccggaaagtaactcaaccatcgcaagcccaatgcagctttcagaaatccgccagcaacccaactccactgtacccccaatattaacgactcggaccgatg

SEQ ID NO: 8294 - DNA, 203 bp, synthetic construct
  source 1..203: mol_type = other DNA
ggcgcgccagtcctaggtttctggaacagggccgtgccctgaaggttacgctttccacaaagaaggcgctttcttcctgtatgatcgactggcatcaacaatcatctatcgaagcaccacgttttcagaaggtgttgtggctttcttgatcctccccgaaactaaaaaggactttttccaatcgccaccgactcggaccgatg

SEQ ID NO: 8295 - DNA, 203 bp, synthetic construct
  source 1..203: mol_type = other DNA
ggcgcgccagtcctccaggatccaggcagcaaccagaagacgaaggtcactcccaccagcttcgccaacaaccaaacctccaagaaccacgaagacttggttccagaggatcccgcttcagtggttcaagtgcgagacctccagagggaaaacacagtgccgaccccacccccagacacagtccccaccgactcggaccgatg

SEQ ID NO: 8296 - DNA, 203 bp, synthetic construct
  source 1..203: mol_type = other DNA
ggcgcgccagtcctgataatgcacaatcaaaatgggctaatttgcgggttgaggcagctagcaaatgagacgactcaagccctacagttattcttgcgtgctaccacggaattgcgcactttctctatattgaatcgaaaagccatcgactttttactccaaagatggggaggaacgtgccacatcttcgactcggaccgatg

SEQ ID NO: 8297 - DNA, 203 bp, synthetic construct
  source 1..203: mol_type = other DNA
ggcgcgccagtcctagcttagtctattgtgtgagagtcatctacgacgagaagggctaggacaggatcaatcagaatctgttcttgaagtgtatcagcgcttacatagcgacaaaggcggaaattttgaggcagccctatggcaacaatgggaccgacagtccttgatcatgtttataacagcatttccgactcggaccgatg

SEQ ID NO: 8298 - DNA, 203 bp, synthetic construct
  source 1..203: mol_type = other DNA
ggcgcgccagtcctgctacatagcgagaaggctattcagaaagtaaagaaacatgcaaccgtaataaaagcattgcgtcccgtaatcatctttgagacatattgtgtgttcaagtacagcattgccaaacattattttgatagccaagggtcatggtatagtgtaatctcagataaacatctaacacccgactcggaccgatg

SEQ ID NO: 8299 - DNA, 203 bp, synthetic construct
  source 1..203: mol_type = other DNA
ggcgcgccagtccttgcagttttcgagcctaatgttcttggatatagtcctccaaacaagttctcaactaagagggttcctgaacagtttcttgaacaagaaaatttctcgattgatagtgttctcacttatgcccagcgcctggattatctacttccacaataccggaatttttctttctcacttaacgactcggaccgatg

SEQ ID NO: 8300 - DNA, 203 bp, synthetic construct
  source 1..203: mol_type = other DNA
ggcgcgccagtcctctgtagtgcaattgactttgtactcaacccaagcggattgaatgtccctgggtcacaagacctaacatcttttttacgtcagatagtgcgtagaacaatcacattgagtgcaaaaaataagctaataaacacattgtttcactcctcagccgatttagaagatgagatggtatgcgactcggaccgatg

SEQ ID NO: 8301 - DNA, 203 bp, synthetic construct
  source 1..203: mol_type = other DNA
ggcgcgccagtcctcctgagtgtgcaggagatccttcaaatgacgccttctcattattcagggaacatcgtacatcggtataatgaccaatacagccctcattctttcatggcaaatagaatgagtaattccgcgacgagattggtggtgtcgacaaatactctcggggagttctcaggtggggggcacgactcggaccgatg

SEQ ID NO: 8302 - DNA, 203 bp, synthetic construct
  source 1..203: mol_type = other DNA
ggcgcgccagtccttaggaccaaaaagctagacctcagtcattttatgtattacttaacaactcaaatccataatttgccacatcgctcgttgaggatacttaagcccacctttaaacatgttagtgtgatatcaagactaatgagtattgatcctcatttttcaatctacatcgggggtacggcaggcgactcggaccgatg

SEQ ID NO: 8303 - DNA, 203 bp, synthetic construct
  source 1..203: mol_type = other DNA
ggcgcgccagtccttgatcgagggctttcggatgctaccagactattccttcgagtggccatttcttccttccttcaatttatcaaaaaatggatcgtggaatacaagacagctattcctctgtgggttatataccctttggagggacaaaatccagatccaattaatagctttctacatctgattatcgactcggaccgatg

SEQ ID NO: 8304 - DNA, 203 bp, synthetic construct
  source 1..203: mol_type = other DNA
ggcgcgccagtcctagccttactgcaaaatgaatcccctcaaaacaacatccaattccaagaagacagaaataatcaacagttgtccgataatctagtttacatgtgcaagagcactgccagtaatttcttccatgcatcacttgcctattggaggagccggcacaaaggacggcccaaaaatcgatccgactcggaccgatg

SEQ ID NO: 8305 - DNA, 203 bp, synthetic construct
  source 1..203: mol_type = other DNA
ggcgcgccagtcctaattcaaactctttacttaacccgtatgcaagactcagaagcaaaattaatggagagattaaccgggtttctaggattgtatcctaatggtattaacgcttaagatccccttagaggcatcgcaatatgactccaaacattaaatgatattgctgtcaatacatctacctgacccgactcggaccgatg

SEQ ID NO: 8306 - DNA, 203 bp, synthetic construct
  source 1..203: mol_type = other DNA
ggcgcgccagtcctgagagcaaggtttattataaaaaacctatacacatgactgcaatgcgtaatttataccgaaacacagtgagggctgcacatgcaggttcctgttgagctttaaaagatcatgcaatataaaatgatatttgtatactaatcatgttagtactaactaacagtactcactgcatacgactcggaccgatg

SEQ ID NO: 8307 - DNA, 203 bp, synthetic construct
  source 1..203: mol_type = other DNA
ggcgcgccagtcctcgtcatagaggacgatgccaagttccttctggagaacggctctctcccgtttggctccacccttgccatggcgcaccgctcccgcccctttcctgctgaccccaaaaccgaaacccaaatcctaaaccatctccactttgctatcaccactctccaccgtgaccccaactacaccgactcggaccgatg

SEQ ID NO: 8308 - DNA, 203 bp, synthetic construct
  source 1..203: mol_type = other DNA
ggcgcgccagtcctccccccctgcacaacccgcctccccgtccgcattcacaaagctgcctgggccttccacgcgttcggctaccgctgcacgctggttggttttgaaccctccactccgtggactctcaaagaagtgaaacaggttctacctgagacacttttccaggaagaatgccatgctttccccgactcggaccgatg

SEQ ID NO: 8309 - DNA, 203 bp, synthetic construct
  source 1..203: mol_type = other DNA
ggcgcgccagtcctcctcccaagccccaccatccaaggcttcacctacctcactcccgaccctatcttcgctgatgtcctacgccgcgtccgaagtggggacttcacagtcttccaatcggacaacgctaaggtttccggcgtcgatgatgactacaccctcatctactcctttggcccccacaccgccgactcggaccgatg

SEQ ID NO: 8310 - DNA, 203 bp, synthetic construct
  source 1..203: mol_type = other DNA
ggcgcgccagtcctatccactaacactggatcgccagccccccagaatcccaatgggccttccaactcctcccgccccaacaaaccccgtatgtccacccttggtcgtgtcaacgatcagctcgcccaagagcgcatccgcactcttcgggccggctccattggcatggacatcccctcccaagcccccgactcggaccgatg

SEQ ID NO: 8311 - DNA, 203 bp, synthetic construct
  source 1..203: mol_type = other DNA
ggcgcgccagtcctcccctgcaccaaacatgctaactttggctctggaacccacctcaacttcccttactccatcctcaattcccaacctggcactgctatctccaacgctttcagcacccattcctattggcgcggagacgccctcattcaggttaccgtcaacagttcaccacaagccagtggtgtcgactcggaccgatg

SEQ ID NO: 8312 - DNA, 203 bp, synthetic construct
  source 1..203: mol_type = other DNA
ggcgcgccagtcctgctgcttgttgctgcaatacctgaaggcgtcgatgtgttgacccctcaatccgcaacccactaccccttcaccctgctgaacctcgctaccaccaattgctgtgcccttctccttcccttcctgtcccctaatcccgtggacccctgcggcctccactttcagtggaacgtcgtcgactcggaccgatg

SEQ ID NO: 8313 - DNA, 203 bp, synthetic construct
  source 1..203: mol_type = other DNA
ggcgcgccagtcctagccctccccatcaccccccttcgcgtccctgccggaaccccctctttcctggacgtctcgtgcatgatggctcctcaggactctgagttctttgcgatgaagacccctgcccaacaaggtgtcaaagtccgcgaaacctcagctactgggaacgcctatgtcacgagctgctccgactcggaccgatg

SEQ ID NO: 8314 - DNA, 203 bp, synthetic construct
  source 1..203: mol_type = other DNA
ggcgcgccagtcctccccatctctctcaccaccccgatctctgggaccctaacccccctaggccaaacccttacccacttctcccaatggcgaggaaccctggatattgatctggtcttctccggatcacagcagaacactggccgcatcctggtgtccaccacacctccagtggctggatgccccgccgactcggaccgatg

SEQ ID NO: 8315 - DNA, 203 bp, synthetic construct
  source 1..203: mol_type = other DNA
ggcgcgccagtcctgaccatggaagctgctatgcgcaacacctgctacatctgggacctcaccacctccgcctccatctccatcaccatcccctacttttcctccaccccatggaaaaccctctcccgctccacttccctatccctctcggtcaaccagctggctggttggctggggctctatgtctacgactcggaccgatg

SEQ ID NO: 8316 - DNA, 203 bp, synthetic construct
  source 1..203: mol_type = other DNA
ggcgcgccagtcctctcccccctttcctgccctgctttcaaccctgatcaggcaaccattgccgtgttcatccgcggtggtgccgatttcgaggccagaattccgtctggtctcgcgaccgccaccatccagggtgatgaggaggtccccgcctcctcaaacgacggtctgaacaccttggagctcagcgactcggaccgatg

SEQ ID NO: 8317 - DNA, 203 bp, synthetic construct
  source 1..203: mol_type = other DNA
ggcgcgccagtcctcctctccggcttcccctccgctggctggagggaaatgacggaggatcgtgctcacgtcaccctctccgttcccttctctgctgaaaatcccgtgattgcctcccgctatctaggtttcccctcttacgaatcatcccaatcccttgccacttccctctactcctttggcaccctcgactcggaccgatg

SEQ ID NO: 8318 - DNA, 203 bp, synthetic construct
  source 1..203: mol_type = other DNA
ggcgcgccagtcctgatcctgcgcacttcacctgaaccgtgcttcgttatccgcaaccagcggctaacgtatgtacactgggccctccgctccggaaacaagcaggtctcaatccagagatctggcttgggcgggcttacgcccgtcatcggctatgaggacctagaaggtgaggtctacgcagaggtcgactcggaccgatg

SEQ ID NO: 8319 - DNA, 203 bp, synthetic construct
  source 1..203: mol_type = other DNA
ggcgcgccagtcctcccccctcacatcttcgccctggctgaagcgcaagttggaagcgagtacccctactccgcaaccaacaactgcaccacctgggtggagaccctgaccaacctctccctccccaacaccggcaattcgcttgccctcggattgggcgccatcggcgtgggagccgctgctgccttcgactcggaccgatg

SEQ ID NO: 8320 - DNA, 203 bp, synthetic construct
  source 1..203: mol_type = other DNA
ggcgcgccagtcctgttcggtagccccacccctctctccgttgccggtctccttgtcgtgatcgcctccgactttgctcctgccgtagtccagtatttcaagaacgtcgggaatccactcgccgctctctactactggattgcacgcaagctaggtctggaaagcgtgaccgccaaggacgccgtcgacgactcggaccgatg

SEQ ID NO: 8321 - DNA, 203 bp, synthetic construct
  source 1..203: mol_type = other DNA
ggcgcgccagtccttgttcgcgctaagagtgaaccctccgcccaactggcccagagtcacgacaccatcatggctctgttccaggactccatctccgccacctcggccccctccctggaccttcctgctgcccgttccaacctcgccaaagcccaatccctgcttcccctggccaccgcagcaaaatccgactcggaccgatg

SEQ ID NO: 8322 - DNA, 203 bp, synthetic construct
  source 1..203: mol_type = other DNA
ggcgcgccagtcctggtgaagaattccgggggcattagcaatgccctggccgcgctgatcccgggcgtcaagccgcttgcacgccagcaagctggtgacgaagtccccatcagcaaggcccccacctgcttcaccaacccttcttacattcccggatctactgaagatctgagttgggacccgaccgacgactcggaccgatg

SEQ ID NO: 8323 - DNA, 203 bp, synthetic construct
  source 1..203: mol_type = other DNA
ggcgcgccagtcctgatcgctgccgtctatgctccaaagatgccccaggtgcgtgacatccgtcgctttatccgggctccaaggatgcatcatgtcggtaccgtgattgccaactccacctctggccctgtgttcatgttggccaacaacgtgaagcacggtgacacaccctaccctgaccttaccggcgactcggaccgatg

SEQ ID NO: 8324 - DNA, 203 bp, synthetic construct
  source 1..203: mol_type = other DNA
ggcgcgccagtcctcgcattctcgaagcagaacaggggtgacctcgacaagccctggcccaccctccccgttgctgttgatctttacttttcccagtgtgatttccccaagctacgcatgctgtcgatggacgaggctatcaacggaactccactccttgacggtctcgatatgaagcagtctgctggcgactcggaccgatg

SEQ ID NO: 8325 - DNA, 203 bp, synthetic construct
  source 1..203: mol_type = other DNA
ggcgcgccagtcctggctggcaaaactcgtctgatcgaggctgcgcccatccatgcgatcatcgctggacgcatgctgctcggaggtctcttcgaacacatgcacgcgcgccctggccagtacgggtctgctgtcggctgtgatcccgactaccattggactccgttcttccactcctttgaccggttcgactcggaccgatg

SEQ ID NO: 8326 - DNA, 203 bp, synthetic construct
  source 1..203: mol_type = other DNA
ggcgcgccagtccttgcagaagtttgggctctggactactcctgtttcgactctactctcccctcctgcgctttcgacctaatcgctgctaaactctctcaaatcatcactcctctccccggcattgccgaggatgccatcgtgaagtacatccggtccattagcgtgtccaagcacgtttttggcgacgactcggaccgatg

SEQ ID NO: 8327 - DNA, 203 bp, synthetic construct
  source 1..203: mol_type = other DNA
ggcgcgccagtccttcgggcgtatctgatgaccggtggcaacccctctggctgtgttggaacctcaatcctcaactccatgattaataactctgtcctgatctctgctttcctcacccacccccagttcaaccctgcggagatgcgcatcctcacctacggtgacgacgtgctctacgccaccacccccgactcggaccgatg

SEQ ID NO: 8328 - DNA, 203 bp, synthetic construct
  source 1..203: mol_type = other DNA
ggcgcgccagtcctcaccatccacccttccttcgtcaaatccttcttcgatcagaacaccaccctaatcgtgacccctgccactaaggccggtgacttcccggatcactccacgatctgggacgttaccttcctgaagcgctggttcgtccccgacgaagagcgcccgtggtacatccaccccgtgatcgactcggaccgatg

SEQ ID NO: 8329 - DNA, 203 bp, synthetic construct
  source 1..203: mol_type = other DNA
ggcgcgccagtcctctactcctatctccaccaccgctggctccagctggtggtctcttaagtctgtgccttccaagcgtgttggaagtaaagccacgccggctcgcccccgtcatagggcaacccccgagtaccggtggtctcgggtctgctgctaaacccagtgggctcgttgccgtcccccattgccgactcggaccgatg

SEQ ID NO: 8330 - DNA, 203 bp, synthetic construct
  source 1..203: mol_type = other DNA
ggcgcgccagtcctgtaccgcaaggatagcaaggtatgaacacttgtggacgaaatggtaagtgatcaattcactttcatggccggaaggtcacgtggcaatcatgccacccaggtaccctcctctgggaggatctgagggtgggctaagcagaccctgccatgtggctgaacttttcccttattgttcgactcggaccgatg

SEQ ID NO: 8331 - DNA, 203 bp, synthetic construct
  source 1..203: mol_type = other DNA
ggcgcgccagtcctacagtgccagtgaattcaaccttttctggagaggttgtggctcgaagttctcggggttctaatcccccccctcccgctccgaaccacaaagagaagaaacccaaagagggtcgtagcaaggcctgggatttcgtgaagaagcttctcccggatccttcaaatgaggtctcgcttcgactcggaccgatg

SEQ ID NO: 8332 - DNA, 203 bp, synthetic construct
  source 1..203: mol_type = other DNA
ggcgcgccagtcctgttccccgcctcctggcgcagtccgatgaccagatcacaaatctggaaaccggaattgcgacagaatttctcccagcccaaattcccatgggcaaccttgatcaatctgaactatctgatttgtttgctatctacaggcctttctggaccggtgaggatttctctcaatctgtccgactcggaccgatg

SEQ ID NO: 8333 - DNA, 203 bp, synthetic construct
  source 1..203: mol_type = other DNA
ggcgcgccagtcctgctgttgcttacattccccccggtggccctatgggtcccgacctgaaacaggcactaaatttccccctggttcagattgatatttccagctatactatcaaagaaattcccataaacattcctcaatcctgtgtgactgaagcaatcccgaccagctattctggttttgctgatcgactcggaccgatg

SEQ ID NO: 8334 - DNA, 203 bp, synthetic construct
  source 1..203: mol_type = other DNA
ggcgcgccagtcctcttacccgtggaacctggggtcgcttatctggctccgggtggggtaccctggtggtagctgctttaccccgtggcggtaaatccctgaggatggcctggtggatggacgcgcgtattactcaagcccgcgtttacatgccccgagttattggtcgcgtaggcggcctgcagagtcgactcggaccgatg

SEQ ID NO: 8335 - DNA, 203 bp, synthetic construct
  source 1..203: mol_type = other DNA
ggcgcgccagtcctctattgaatattgatggttgctcccctcaaacacagttaggagtccttgattttccaccaaccgggcagtgtgttggtcagggtatcattgagaacacgagaattgcagctgagtcggtcagttatgcttcaatgaaccttgagagagcgttgacccaggaacggttagataagcgactcggaccgatg

SEQ ID NO: 8336 - DNA, 203 bp, synthetic construct
  source 1..203: mol_type = other DNA
ggcgcgccagtcctattttggtgcttttggtgtcaaattttaatttgtctactttgactggagttttccttatcctgagtgcagattttattactaaagtcacctttgaagccttcaaggacaatcccttccagttcattggcaaatggatcagtgagaagctggacctgggagttgacgtggatattcgactcggaccgatg

SEQ ID NO: 8337 - DNA, 203 bp, synthetic construct
  source 1..203: mol_type = other DNA
ggcgcgccagtcctgaaccaattctctacgtcaaggaagaagaagaccctgaggaaggtcctagtgggcaggcttttaagccgaaagatttcaatgattgggccaactttttcaaaaatattgattgggctgtgactcgattggtagttttaattgagaagttgatcaaacaaattcaggccgcaaagcgactcggaccgatg

SEQ ID NO: 8338 - DNA, 203 bp, synthetic construct
  source 1..203: mol_type = other DNA
ggcgcgccagtcctactctcctgaaacaagctctcagcaattacacccaggcacaaaattctttgcagcgcactatttttgctgtacgcccagagcctgttgtggtttacatctacggcggtcctgggtctggtaaatctgtcctggctggcctcttagcgcgtgccatttctaaggctctttctggccgactcggaccgatg

SEQ ID NO: 8339 - DNA, 203 bp, synthetic construct
  source 1..203: mol_type = other DNA
ggcgcgccagtcctgaggagaagggaatgtattataccagcaaagtgataattgtaactgctaattttaatcttccaaattatgcttctgctcgtgagcccaaagccctggagcgtcggctgcatttcaagatgtttatgggtggttcccttaatgtagactttgcttgtgcacctgatggcattccacgactcggaccgatg

SEQ ID NO: 8340 - DNA, 203 bp, synthetic construct
  source 1..203: mol_type = other DNA
ggcgcgccagtcctttggaacccgctgttttgcgccggagtgatgggcgtttgttagatggtgttgtgttagatgaggcaatattttctaagcatgataagggtgacatgactgaaccctggaagaatttaccccaagctttttctgtgtattttaatcagttccagaataaggagattaggactttacgactcggaccgatg

SEQ ID NO: 8341 - DNA, 203 bp, synthetic construct
  source 1..203: mol_type = other DNA
ggcgcgccagtcctgaaaatccccaggaatttatttacaccacattcttgaaggatgagctgaggaaagttgagaaagttgagaatggactgacccgggttattgaggctgcccccctgccagtaattctggctggacgcatgcttctcggaggtctgttcgaggagatgcagtcccaacctggtaagcgactcggaccgatg

SEQ ID NO: 8342 - DNA, 203 bp, synthetic construct
  source 1..203: mol_type = other DNA
ggcgcgccagtcctattagcaagtatatatccagcattgcatcttcccgccatgtgtatggaaacaagatttatctgatgcttggtggcatgccttctggctgtgtaggcacttcaatcctgaacacaatttgtaataactgctttgtgctttctgcccttttagagcataaggattttgacataaatcgactcggaccgatg

SEQ ID NO: 8343 - DNA, 203 bp, synthetic construct
  source 1..203: mol_type = other DNA
ggcgcgccagtcctgaaagggggcccggcggggcaacacccgtcggtccctctttccgtccaagccgcggacgttaaactgtggcacggttgtgcctaggtgcaaccctgctactaatggcggtacccctgcccttagtatgcatgtttgtatgaatggaatctgtagtgatgccctgctttggggtccgactcggaccgatg

SEQ ID NO: 8344 - DNA, 203 bp, synthetic construct
  source 1..203: mol_type = other DNA
ggcgcgccagtccttaactcacttgagactaaccagggtgcaaatgggcttactgcgacagttccggtcaactcaaccttttcgggtgaggttactgctagggctcctcgcaatcctccagccctgccccaaccgccgccggcccataaggagaagaaaccgaagactactgatgggaaaaagccttgcgactcggaccgatg

SEQ ID NO: 8345 - DNA, 203 bp, synthetic construct
  source 1..203: mol_type = other DNA
ggcgcgccagtcctattagccttcacaaaggcttttcaaaccaacgcctactacagatgtggctgggaagtgttaatggaagtcaatggcacattctttcatcagggggctatagctgtggttgcaattccagaggttcagacaactgctgcgttcactggtagtctaggccgcactcttgcgtaccccgactcggaccgatg

SEQ ID NO: 8346 - DNA, 203 bp, synthetic construct
  source 1..203: mol_type = other DNA
ggcgcgccagtcctgcatgctattctcaacatcagaacttctaaccaagccagactgctcttgccatatgcttctgccaatcgcttcgacccgaccactggtgctgttttcaagagtgattcagggcttcctgggcttggcaccctttcttaccaccaacaatgggtgctagtcgtgtgggttatttccgactcggaccgatg

SEQ ID NO: 8347 - DNA, 203 bp, synthetic construct
  source 1..203: mol_type = other DNA
ggcgcgccagtcctaccactgcaagtgctgtcaaatgaatccaatcttactgtgaatttgctggtccgtcctctccaagctgaattcatgggtcctcactatgcttatggacaaccctttgttgtcagggaggttgtgggttcttctggatttgctaatacccaacccatgcaggagtttaatgcaatcgactcggaccgatg

SEQ ID NO: 8348 - DNA, 203 bp, synthetic construct
  source 1..203: mol_type = other DNA
ggcgcgccagtccttaccatttgggacatcggtctaaattcaactctgtcctttgtgattcctttttgcagctcaacttcttggaaatccattggtgcttcttcaggccttgaattctcacaggcgcttggcatgctgtatatagctgtctataaccctctggtaacgccatatggggcacccaatgccgactcggaccgatg

SEQ ID NO: 8349 - DNA, 203 bp, synthetic construct
  source 1..203: mol_type = other DNA
ggcgcgccagtcctctctcttgtaggggtgacccttgttacaacaagagctgagttcctggatatgttattagatagtgaaggctactccgcccaaacacagataggagtccttgattacccccccagtgcccagtgcacgggacaggggatcattgagaataccagaattgcagctgagtctgttagcgactcggaccgatg

SEQ ID NO: 8350 - DNA, 203 bp, synthetic construct
  source 1..203: mol_type = other DNA
ggcgcgccagtcctttatgcctccatgaacctggagagagtgctgactcaagagaagctggaccgcatctctgagatttctaaatctttcatgctggccagcgagaatgtccaccaggcagttgagggaatcaacaccgccctcaatgcaattactcccatcttatccacctccccgcttattgaagtcgactcggaccgatg

SEQ ID NO: 8351 - DNA, 203 bp, synthetic construct
  source 1..203: mol_type = other DNA
ggcgcgccagtccttggtttgctggctcgtgcaatttcaaaggcactgactgggaaggtcgatgacatctatgcaccctcatcatttggaactgagcatttcgatggttaccaccaacagacggtccatatgattgatgatcttggtcaagctgtggatgggtcagactgggcaaatttctgcaatatcgactcggaccgatg

SEQ ID NO: 8352 - DNA, 203 bp, synthetic construct
  source 1..203: mol_type = other DNA
ggcgcgccagtcctattaaatgtggattttgcttgtgctcctgatggcacacctatgagacatttcaaatctggatgccctcttctgaggaactcggcaggattgctgaaagattctgggtccattctgccctgcaagttcaaggatgctgatgatttggttgacttggtggtggctgaggtgcgaagcgactcggaccgatg

SEQ ID NO: 8353 - DNA, 203 bp, synthetic construct
  source 1..203: mol_type = other DNA
ggcgcgccagtccttacttcttttaaaattgggaatgttatgtatgttaaggatgatgtgaagatgacccgcattggcgaagctgttctcttctacctgcctaatgtgccacaagggaaaaacctcctcaggtttgtcaaggctcgctcaattaagggagtcaaggctggcttcctggctggcaacatcgactcggaccgatg

SEQ ID NO: 8354 - DNA, 203 bp, synthetic construct
  source 1..203: mol_type = other DNA
ggcgcgccagtcctggatggcgtaccaaacatggtgcgagtgtgggagttaaccacgttccgtggaattgaaacccaggatggaatcttcaatgagcattgcttgggctatcgctgtgcttcttatgcaggcctgtgtggggctcctttggtcctggaggatcctgctgactatagaattgctggaatcgactcggaccgatg

SEQ ID NO: 8355 - DNA, 203 bp, synthetic construct
  source 1..203: mol_type = other DNA
ggcgcgccagtccttaaggaaattaggaccctctctcttcatgaggcaattaatgggactcccctgctggatggtattgacatgaatcagtctccaggctatccatatataacacaggggcggtcaaggcggtccctgtttacctggaatgaagaagggttttgggagcccactgatgaactgaaggtcgactcggaccgatg

SEQ ID NO: 8356 - DNA, 203 bp, synthetic construct
  source 1..203: mol_type = other DNA
ggcgcgccagtccttcctgattttgatttggactcttactatgtgatagcatatggtgatgatgtagtttatgcaactaatcctccaattagtccaagctttgtgaagaaattttatgatgagcatacccccctaaaagttactcctgctgataaaggctcaaccttcaatgaaaactctacaatattcgactcggaccgatg

SEQ ID NO: 8357 - DNA, 203 bp, synthetic construct
  source 1..203: mol_type = other DNA
ggcgcgccagtcctcttctttgaggatatgatggagcgcgctccaacattagatggagttcgcaaatctgctgcttctgtatatgattctgttggaactggtatgtgtattgctttatctggtattttgtcatttgttgctatagtatgtttaggtattacagatttgtcaactgcttctttcaataacgactcggaccgatg

SEQ ID NO: 8358 - DNA, 203 bp, synthetic construct
  source 1..203: mol_type = other DNA
ggcgcgccagtccttgatgtcaaaggcaagagtgacacatatattgcaccttcatttgtcattgctacttctaatgttgaccctttcacttttgagcctaagtctattcattctgttgatgcctttgtgcgtagattaaatatagtagtggaagtagatatagatgataattttgctaagtatgttcacgactcggaccgatg

SEQ ID NO: 8359 - DNA, 203 bp, synthetic construct
  source 1..203: mol_type = other DNA
ggcgcgccagtcctccgggtattctctacaacctggcttggtccttatgataaccctattgctgcttgtgcttatttaaatgctacattgcctgcccgcttttgtacttataatgctcaatttgctgattgttatgtgtctgatgctattattgatgattgcctacaccgttattattctgaagaggacgactcggaccgatg

SEQ ID NO: 8360 - DNA, 203 bp, synthetic construct
  source 1..203: mol_type = other DNA
ggcgcgccagtcctgaaatatgtggtgcaagatgaaggcaatgatgttgtgactatgttagaatcccatcaggattatgccattaagaagcctttagtggaatctcatcaagatgctaaattaattaaacctatcgtagagtcacaccaggaggttaaattaattaagccacttgtcgagtcccaccacgactcggaccgatg

SEQ ID NO: 8361 - DNA, 203 bp, synthetic construct
  source 1..203: mol_type = other DNA
ggcgcgccagtcctgtcaggttatagtatagattggacagatatcattgctgagtcatcaaatgatcataatgcccaggatattagtaagtcaattttgtctaaaaatttagttaggattatgaagcctgattcttcttactacacacatggattgtttgttaaaggacgaatgttgttgatgcctaacgactcggaccgatg

SEQ ID NO: 8362 - DNA, 203 bp, synthetic construct
  source 1..203: mol_type = other DNA
ggcgcgccagtcctgaaggaacacgtcgagctcattatcagcaaagctcgtaagggcattgttgatactgagctcggggtgttcacggcgaccctgaaggatgagcggagacctttggctaaagtggaggcgaacaaaacgcgagtgttcgctgctaccaatcaggctttagcattagctcagcgtagcgactcggaccgatg

SEQ ID NO: 8363 - DNA, 203 bp, synthetic construct
  source 1..203: mol_type = other DNA
ggcgcgccagtcctgtattttcttagttatcttgaacatgtaatgcttaatcgcgtagacaatgagataggtttgggtgtgaatgtgtattcgtatgattggtctagaatagtcaataaattgcatcatgtaggttctaaggttattgctggggatttttccaattttgatggttcactcaactcccacgactcggaccgatg

SEQ ID NO: 8364 - DNA, 203 bp, synthetic construct
  source 1..203: mol_type = other DNA
ggcgcgccagtcctaaattgcatgtataatatgttaatatttagatatgtttatcttcttgctcacgaggaaaatggctttcccttgtctcttgctaattttagtgggaatctcgctgctgtcttctatggcgatgattctctttgttgtgtctccgataaagtgtgtgagtggtttaatcagcactccgactcggaccgatg

SEQ ID NO: 8365 - DNA, 203 bp, synthetic construct
  source 1..203: mol_type = other DNA
ggcgcgccagtcctgataacacggcttatggctgtcaccggccatgtatatactgatgaaaccaagagtggttcaccaccaccgtatcgcgatatttctgaggtgacattccttaagagagaattcgtgaaacgcgactcattatggatcgctccactatctaaaaacacaatagaagatatgtgtatcgactcggaccgatg

SEQ ID NO: 8366 - DNA, 203 bp, synthetic construct
  source 1..203: mol_type = other DNA
ggcgcgccagtccttggattccttcttgctcaacaggaacgcggaggagctcatgattccgagcttctaagcttacttctttcagagtagttagggaccgttgacgacagctccacgtatatgctcattacgcccactgcggaaacaatgtgatgctgtggtgtatacgtggtcaagctagcggcgtgcgactcggaccgatg

SEQ ID NO: 8367 - DNA, 203 bp, synthetic construct
  source 1..203: mol_type = other DNA
ggcgcgccagtcctaacacgcgtcaggagatctccccagccaccatgggctaggttggcagccaggttttaacttggtggggagtaaaatagcctgctccaattcaaaattctgatacttctataatggattcttccgttactaacactggtggtttgatgccctcggctactatttccaattcagagcgactcggaccgatg

SEQ ID NO: 8368 - DNA, 203 bp, synthetic construct
  source 1..203: mol_type = other DNA
ggcgcgccagtcctacccttacagaacaacaacttatcacaaattatgaacagccatcaattagacaaatttctttacctgatgacatagttaaaggttcctcttttattgcctccaaattagctaatattgcttatatgcgttgcgattatgagttgtatcttcgggtccagggttctccatttcttcgactcggaccgatg

SEQ ID NO: 8369 - DNA, 203 bp, synthetic construct
  source 1..203: mol_type = other DNA
ggcgcgccagtcctcagggtcttctcttgctttggaataagatgaatgcggatcaaacttctaagattcgttcctcaattactgaacaccttcgctctattacttcttttcctggtgtcacacttaatatgcaatccgactcaagatctgttaagctagtaattccttatactagtgaatttcaagttcgactcggaccgatg

SEQ ID NO: 8370 - DNA, 203 bp, synthetic construct
  source 1..203: mol_type = other DNA
ggcgcgccagtccttctaaggatcgtgatctttctaaagtttctccctatgagaatattcctgctaagggtttcacacatggtgttggttttgattatggtgtatccactttcgcttttcctgataacgctattgatcctactattgctaatcctgagtccattgatgagatgtctattcaatatttgcgactcggaccgatg

SEQ ID NO: 8371 - DNA, 203 bp, synthetic construct
  source 1..203: mol_type = other DNA
ggcgcgccagtcctgcttctcggccgtatatgttggataggtataccatcaaaggtggaaatactccctcgccgtcaggtactgttgttgctgatatccctattagtcctgtcaattactctctctatggtagtattatccgtgattatagaaccatttttggtgctcctgtcagtctagctgttgcgcgactcggaccgatg

SEQ ID NO: 8372 - DNA, 203 bp, synthetic construct
  source 1..203: mol_type = other DNA
ggcgcgccagtcctatggcttcatggtggcgagctaaaattcaccttaatcttcagttcgcaaagacacaataccaccagtgtcgtttacttgttcagtatcttccctatggttctgatgttcaatctcttgaaaatgttctttcccaaattattgatatatcccatgttgatgagagtggtattgatcgactcggaccgatg

SEQ ID NO: 8373 - DNA, 203 bp, synthetic construct
  source 1..203: mol_type = other DNA
ggcgcgccagtcctttatgctttccttctattttcacaaataaatggatgcgttcttatgatcctgccactgaaggctacactgctgggtgcgcgcctggaagaattcttatttctgtgcttaatcctctaatttctgctagtactgttaatgatgacattgttatgatgccatggcttacttgggaacgactcggaccgatg

SEQ ID NO: 8374 - DNA, 203 bp, synthetic construct
  source 1..203: mol_type = other DNA
ggcgcgccagtccttcttttcagatttccgctttgcgtcatggtgataaggtcacgataacagaggatcctactaagataaatgttagtggtgttagttttctcactggcaccaattcttggaaagctagtttgaaggatagttctggaactttgttaggacgcttagagtatgatggtacttcttttcgactcggaccgatg

SEQ ID NO: 8375 - DNA, 203 bp, synthetic construct
  source 1..203: mol_type = other DNA
ggcgcgccagtccttctagtgattcacctgctagcttaattcctggtaagtataatgtggagcttgatcctgctgataattctgccgtagtcaccattgttgctaacaattcatttggaactgcttctcttgatacacatggtggtgggatggattatgctaaatcagattcttcttctttagttacacgactcggaccgatg

SEQ ID NO: 8376 - DNA, 203 bp, synthetic construct
  source 1..203: mol_type = other DNA
ggcgcgccagtcctgcttaaatctcttaccttaagagtccactctctgagtggttaacccgtcgcgagacgcgtgggttgagttgtcatgacatttgtcagttgtgacgagtgtaactcaacagtttttcctaaccacgcgtcgcgtggcaggttttttaatctgagagttacattcctacccactaacgactcggaccgatg

SEQ ID NO: 8377 - DNA, 203 bp, synthetic construct
  source 1..203: mol_type = other DNA
ggcgcgccagtcctctaaggttcctgacaatagctttatccggctatctagttacctaggtttacttttattagttgaccttaggagtgtaaccagtgtacacttgcttaccttaattggttggctaactagtcgctatgcattttcgtgcatatcggcggattcctaaaaaaaaaaaaaaaaaaaaacgactcggaccgatg

SEQ ID NO: 8378 - DNA, 203 bp, synthetic construct
  source 1..203: mol_type = other DNA
ggcgcgccagtcctgcctgatagggtgccggcgggcgcggtacgtgtggtatagtccgctgtcttggggtatggcgtctactcggttttgttgtcgttttggaatgtcccatgtcggagatgtcgttaccggtgtttgctttacttgtgcacgaataagaaaacagagtttggagttttggaagttaacgactcggaccgatg

SEQ ID NO: 8379 - DNA, 203 bp, synthetic construct
  source 1..203: mol_type = other DNA
ggcgcgccagtcctcatgagcaggctgcgttcttagagacacagtatcatcagttgacactatatccgcaccaaataattaacttgaggacaaccaatgcagccacgattgtggtcccgtataccaacatagcaccggcctcgttttacacgtgtcacaacacgtggaggttgatcataattcctcttcgactcggaccgatg

SEQ ID NO: 8380 - DNA, 203 bp, synthetic construct
  source 1..203: mol_type = other DNA
ggcgcgccagtcctcctgcatttcccatctggacaccatcagaggggttcccactaccaggtaggatgacaaatttgattagtgtggcccgtataccaacatttttgcagggtacaggaggaaacacttatggtttttcggtgcagaacgcaatacctgctgacaacaccacattgtatagtttggatcgactcggaccgatg

SEQ ID NO: 8381 - DNA, 203 bp, synthetic construct
  source 1..203: mol_type = other DNA
ggcgcgccagtcctgaagaggccatgctaggtacaaacatcatctgggattttgggttgcaatcaacgtgtacgtttgtgatcccgtatatttccatatcatctcgccggtttgcgaacacaacaggcaccattttctcatatgatggttatgtgaccgtttggtaccaaactgcggttgtatttgcgcgactcggaccgatg

SEQ ID NO: 8382 - DNA, 203 bp, synthetic construct
  source 1..203: mol_type = other DNA
ggcgcgccagtcctgttgctcgccttgagctcaacgaaatgatctaccagcagcgtattgctgccatcctggaaagagcagtggatgatagtgatgatgaaggttctgagagtgatgctagtgacagtggatactattcgctggatagtatggggctgagtgatttaaccagtgattcagagtttgggcgactcggaccgatg

SEQ ID NO: 8383 - DNA, 203 bp, synthetic construct
  source 1..203: mol_type = other DNA
ggcgcgccagtcctaagcaagtgttaggtattgtcacaaaattagttgccgtagtcacagccatcacacgatctggtggcgaccctgtcatcctggcctcgatgggtgctatgttatcagtagacctcatgaatgcgtgtccttttgaatgggcaaaacaacaagtggcccaactgatggaggtggagcgactcggaccgatg

SEQ ID NO: 8384 - DNA, 203 bp, synthetic construct
  source 1..203: mol_type = other DNA
ggcgcgccagtcctaaacacctgtcaaactccaagaagagaccgcatgaaccaattggactgcttattcatggggctccaggcacagggaagagtcttgcgaccaaactaattgggacaaagttagcaaagaatttaggaaacatggaaccttattttatgccacctgacccgaagtattttgatggccgactcggaccgatg

SEQ ID NO: 8385 - DNA, 203 bp, synthetic construct
  source 1..203: mol_type = other DNA
ggcgcgccagtccttatgctggacagcctgtggtggttatggacgatctaggacaaaacccggatggtgaggacatgaaactactctgtcagatgatatcgtgtgcagagttctacaccccccaagctgatctgcctgacaaagggaaaccttttacatcgtcctttgttcttgcttcaaccaacaaccgactcggaccgatg

SEQ ID NO: 8386 - DNA, 203 bp, synthetic construct
  source 1..203: mol_type = other DNA
ggcgcgccagtcctatgcttgtcaccttacttaccacactttattttatctggaaatcattacctgcaaacccacagggtgcatatgatggcattatccaaaagaacctgagagtcccagaaaaacggaagattgaagtgcaaggccctgaccctgacacccaatatgccctgtcgctgatgaaacaccgactcggaccgatg

SEQ ID NO: 8387 - DNA, 203 bp, synthetic construct
  source 1..203: mol_type = other DNA
ggcgcgccagtcctggacaggaaccagaggaacttgagatcgtgatagaacagtacgctgcccaactccagcccctgttgcccaaggatgtgcatgaacccatgactttgcaacaggtagtggagggatatgggcgtttagatggattagacctgaatacatctcctggttatccgtactgtacgcagcgactcggaccgatg

SEQ ID NO: 8388 - DNA, 203 bp, synthetic construct
  source 1..203: mol_type = other DNA
ggcgcgccagtcctccaatgtggtttaaggccctggacaagctactgcaacgcttaggttttgacacggaagatctgatcataggcttgtgtaattcaacacacatttatgagaaccaactctatagaaccgttggtggcatgccatcaggttgttcagggacatcaatcttcaatactctcatcaaccgactcggaccgatg

SEQ ID NO: 8389 - DNA, 203 bp, synthetic construct
  source 1..203: mol_type = other DNA
ggcgcgccagtcctttgtgccatctcatctggcacaacggtgaagagtcttataacaagtttattgccctggttcgtagcgagccagtggggagagcactacaactcccgccatataaacttttggagagagagtggttagataacttttattgacccggggccacgccgagtaggatcgagggtacacgactcggaccgatg

SEQ ID NO: 8390 - DNA, 203 bp, synthetic construct
  source 1..203: mol_type = other DNA
ggcgcgccagtcctcaagcgtgacattggacagatgctcgacggactgaataagcggaaggcgaaacgtcggggggggagttgctcttggatcattatgttactcccgatagttgctgggctgaagcttggaaactataatggtagagttttggccactttaaataagactgatgtatcagacttgctcgactcggaccgatg

SEQ ID NO: 8391 - DNA, 203 bp, synthetic construct
  source 1..203: mol_type = other DNA
ggcgcgccagtcctcaccccttcacggcatggacggaggtctaggagatcggtgaacgtgcatcaccatggagagagtctacttgaggccaagaacacgccgtggatggattcgaccaaagccactaaatatctcacgaaggttgagaactgggcgttgagaaatcctgggtatgctcttgctgccatcgactcggaccgatg

SEQ ID NO: 8392 - DNA, 203 bp, synthetic construct
  source 1..203: mol_type = other DNA
ggcgcgccagtccttttcataggctggaatctgggaacgacgagaagccaaaagataattttcacaattatgttaatgttaattgccccagcgtacagcttcagctgtctggggatgcagaaccgagactttgttgagggagtgaatggtgttgagtggatcgatgtcgttctggaaggaggcccatgcgactcggaccgatg

SEQ ID NO: 8393 - DNA, 203 bp, synthetic construct
  source 1..203: mol_type = other DNA
ggcgcgccagtccttgtgaccattacggcaaaagacaggccgaccatagacgtcaagatgatgaacatggaggctacggaattagcggttgtgagatcttactgctatgagccgagagtgtcggacgtgacgacagaatccagatgcccaaccatgggagaggctcataatcccaaggcaacttatgccgactcggaccgatg

SEQ ID NO: 8394 - DNA, 203 bp, synthetic construct
  source 1..203: mol_type = other DNA
ggcgcgccagtccttaccatgaacacaaaaagctggcttgttaacagagactggtttcatgatctcaacttaccatggacagggtcatcagcggggacgtggcaaaacaaagagtcattgatagaatttgaggaggcccacgccaccaaacaatcagtggtggctttggcatcacaagaaggagccctcgactcggaccgatg

SEQ ID NO: 8395 - DNA, 203 bp, synthetic construct
  source 1..203: mol_type = other DNA
ggcgcgccagtccttggcactgtcgtggtggaattgtcttatgcaggtaccgatgggccctgtagagttcccatatccatgtcggcagatctgaatgacatgacaccagttggacgcttgataacagtcaacccatacgtgtcgacctcctccacgggtgccaagataatggtggaagtggaacctcccgactcggaccgatg

SEQ ID NO: 8396 - DNA, 203 bp, synthetic construct
  source 1..203: mol_type = other DNA
ggcgcgccagtcctttccattgggaaaggcattcatcaggttttcggctcagcatttaaaagcttatttggaggaatgtcatggactactcaaggcatgttgggggcactgctattgtggatggggctgaatgcaagggacagatccatttctatgacttttctagctgtaggaggaattttagtcttcgactcggaccgatg

SEQ ID NO: 8397 - DNA, 203 bp, synthetic construct
  source 1..203: mol_type = other DNA
ggcgcgccagtcctcctggcagtaaatgtcaatgccgacacggggtgctcaatcgacttggctaggaaagaattgaaatgtggacaaggcatgtttgtcttcaacgatgttgaggcttggaaggataattataagtactatccatccacaccaaggagacttgccaaagtcgtggcagaagctcatgacgactcggaccgatg

SEQ ID NO: 8398 - DNA, 203 bp, synthetic construct
  source 1..203: mol_type = other DNA
ggcgcgccagtcctggctggaatttgtggcatacgatcagtcagcaggctcgagcacaacatgtgggtaagcatcaaacatgagttgaacgcgatcttggaagacaacgccattgacttgactgtggtggttgaagaaaatcctggaagatacgggaaaactaatcagaggctgccgaacgttgatggcgactcggaccgatg

SEQ ID NO: 8399 - DNA, 203 bp, synthetic construct
  source 1..203: mol_type = other DNA
ggcgcgccagtcctatggatggaaatgcgaacagaaaatacaactgattgtgacaccgcagtaatgggcacagcaattaaaggaaatagagctgtgcacagtgacctgagctattggatagagagcaagaataatggaagctggaaactggagagagctgtgctgggcgaggtgaagtcatgcacatgcgactcggaccgatg

SEQ ID NO: 8400 - DNA, 203 bp, synthetic construct
  source 1..203: mol_type = other DNA
ggcgcgccagtcctaggaatcacgtacagtgatctggtcaagtacgtcattctagtggcagctgcatttgctgagagcaatacaggtggtgacattgtgcacttggccatggtggccgcttttaacatccagccaggtttactgattggattcctactgaggaggaagtggagcaatcaggaaagcagcgactcggaccgatg

SEQ ID NO: 8401 - DNA, 203 bp, synthetic construct
  source 1..203: mol_type = other DNA
ggcgcgccagtcctaatagtggggatagatgtggtgagaataggtgtgctaaccctgggaatcctctcactattgaaagagaggagcaatgcaatggcaaaaaagaagggtggcatgctcctgggagtggcatgcgctaccgctggaatcgctagccctttggtgtttgctggtctgcacatggtgctcgactcggaccgatg

SEQ ID NO: 8402 - DNA, 203 bp, synthetic construct
  source 1..203: mol_type = other DNA
ggcgcgccagtcctatggctagagaaagcgagcgacatctcgtggagtgaggaggcgagggtgactggagcatcacagagatttgatgtggaaattgatcaggacggtaatatgagattactgaacgatcctggtgtgtcgctcggtgtttgggcctttcgaactgggcttattctgttatcttcatacgactcggaccgatg

SEQ ID NO: 8403 - DNA, 203 bp, synthetic construct
  source 1..203: mol_type = other DNA
ggcgcgccagtcctagtgggagtcatgcatgagggagtgtttcacaccatgtggcacgtgacgaatggggccgttattcaagcaggagaaggaacactggtcccatattgggcgagtgtacgcaatgatctaatttcctatggtggaccatggaaattggggaagcaatggaatggcgtagatgaagtcgactcggaccgatg

SEQ ID NO: 8404 - DNA, 203 bp, synthetic construct
  source 1..203: mol_type = other DNA
ggcgcgccagtcctgctgctcacacctcagcgagtgccgaattacaacttgttcattatggatgaggctcacttcacagaccccgccagtattgctgccagaggatatatatcaacaaaggtggaactgggagaggcagctgcaatattcatgacagccacacctccaggtacaactgaggcatttcccgactcggaccgatg

SEQ ID NO: 8405 - DNA, 203 bp, synthetic construct
  source 1..203: mol_type = other DNA
ggcgcgccagtcctgctaaataggaagagttttgactcagagtatcctaaatgcaagagtggagaatgggattttgtgataaccactgacatctcagaaatgggagcgaactttggagcgcaacgggtcatagatagtcggaagtgcattaaaccagtgattattgaggatggagaaggaagcgtgcacgactcggaccgatg

SEQ ID NO: 8406 - DNA, 203 bp, synthetic construct
  source 1..203: mol_type = other DNA
ggcgcgccagtcctaatgaatggaccagttcctataacatcagccagtgcagcccagcgtcgtggacgggttggaagggatgtaacacaaattggagatgaataccactactcaggaccaaccagcgaggatgatcatgatttcgctcattggaaagaggccaagatactgctggacaacattaacatcgactcggaccgatg

SEQ ID NO: 8407 - DNA, 203 bp, synthetic construct
  source 1..203: mol_type = other DNA
ggcgcgccagtccttcatcaagaaacctggagcatgccttggccggatttgagaccagcgacggcatgggcggcctacgcaggagctacaacatttctgactcccttgctaaaacacctcataataacagagtatgtgaacttttcactcatggcaatgacagcgcaggctggagcactatttggactcgactcggaccgatg

SEQ ID NO: 8408 - DNA, 203 bp, synthetic construct
  source 1..203: mol_type = other DNA
ggcgcgccagtccttccgtcttggcattatgaccaagacaatccttacaagacttggaactatcatggaagctacgaagtgaaagccacaggctcagccagctcaatggttaatggggtagttaggatactgtcaaaaccttgggacaccttgcaaaacgtggtaaatatggccatgacggacaccaccgactcggaccgatg

SEQ ID NO: 8409 - DNA, 203 bp, synthetic construct
  source 1..203: mol_type = other DNA
ggcgcgccagtcctggaatggaagccctcaaccggttggagaaactggcaagaagtacccttttgctcacaccatttccacgagctgcaaatgaaagatggcagaaagattgtggttccatgtcgagaccaggatgaactaattggaagagccaggctctctccagggtctggctggtcactaacagacgactcggaccgatg

SEQ ID NO: 8410 - DNA, 203 bp, synthetic construct
  source 1..203: mol_type = other DNA
ggcgcgccagtcctaacagcacgcctgagcaaagcatacgctcagatgtggttattgatgtacttccacaggagggacctcagactaatggcaaacgccatctgctcatctgtccctgtctcatgggtccccacaggaaggacaacgtggtcaatccatggaaaaggtgagtggatgacttctgaagacgactcggaccgatg

SEQ ID NO: 8411 - DNA, 203 bp, synthetic construct
  source 1..203: mol_type = other DNA
ggcgcgccagtcctcatttgtttgaagagataggaagaggaagtcaggccagggaatccctgccaccggatgttggatgacggtgctgtctgcgttccaaccccaggaggactgggttaacaaatctgggtgcatggaggagctaagcgttcaataccgtctcggagaactccctggctcacgaagtgcgactcggaccgatg

SEQ ID NO: 8412 - DNA, 203 bp, synthetic construct
  source 1..203: mol_type = other DNA
ggcgcgccagtcctaaagaaagcaaggcccaacctagagtcaagctgtaactctaggggaaggactagaggttagaggagaccccttgcgagtgaacaccacaagaaacagcatattgacacctgggatagactaggagaccctctgtcctaacaacaccagccacttggcacagatcgccgaaagtgcgactcggaccgatg

SEQ ID NO: 8413 - DNA, 203 bp, synthetic construct
  source 1..203: mol_type = other DNA
ggcgcgccagtcctcctttttgaggtgttcctctctaaggaaggccgccgtcggctcaatgtctttatttacacacacaacaaagctgcctggattgtgcgttccaaggttctggtgtcttcaagcaacaacatacaaaagatatctaaccgaggaattgcggcgtccaaaagcgacgtaggtgatcgcgactcggaccgatg

SEQ ID NO: 8414 - DNA, 203 bp, synthetic construct
  source 1..203: mol_type = other DNA
ggcgcgccagtcctccatgaactgtccagtggcggtggcaacataactatgatcaactactatggtgcccaatactcccaggctcatgccaacccttctgttcaaatggacccagagaagttcacaaagcccctcactgatcttgctttagcggggactggtcctgcattgaaatcccccaatgtggacgactcggaccgatg

SEQ ID NO: 8415 - DNA, 203 bp, synthetic construct
  source 1..203: mol_type = other DNA
ggcgcgccagtcctggaggctggttactcagataggatcatgcaaataaccgcaggcaactccactcttacaacacaggaagcagctcaggcgattgtgggttatggtgtttggccagattatgatgttggtgttgggcatgccattgacaaggaaacaaagcctggacctgctgttgagcggttttacgactcggaccgatg

SEQ ID NO: 8416 - DNA, 203 bp, synthetic construct
  source 1..203: mol_type = other DNA
ggcgcgccagtcctcaccctcgatagcatttactggaaccaggattggaagggtcgcgtgattcgcttgcctggcgccctcactgaccttggtatgttcggtcagaactgccaattccacttcctcatgagatcaggattctgcgtccatgtgcaggtcaacgcctcaaaatttcaccaaggaatgttcgactcggaccgatg

SEQ ID NO: 8417 - DNA, 203 bp, synthetic construct
  source 1..203: mol_type = other DNA
ggcgcgccagtcctttgtactcccgctgaaaatgccctgacacacaacttcgtgtctctatacattgttccaattgtcccactgaagttcgagaagggcgcatccacgaccatccctgtgactgtctccatctcgcccatgttcgcagaattctcagggctccgtaacagggtcgttgctcagggtgtcgactcggaccgatg

SEQ ID NO: 8418 - DNA, 203 bp, synthetic construct
  source 1..203: mol_type = other DNA
ggcgcgccagtcctccctactttccagatacctggatctggacagttcgtaaccactatcaagaacgatggtttcccagcattgccccactaccaagagaccccgctccacttcatccctggtgaggtcacgaaccttcttgaagtctgccagattgacacttttgccaaccttgggacatctgagctcgactcggaccgatg

SEQ ID NO: 8419 - DNA, 203 bp, synthetic construct
  source 1..203: mol_type = other DNA
ggcgcgccagtcctggctactggtaagattctcatcgcttacacaccaccaggcggagatgccccagcaacacgcaaggatgccatgctcgcgacccacgttgtgtgggatttggggctccagtcttcagttacattcacagtcccctacatctcccaatcacagtacagatataataacattgatggcgactcggaccgatg

SEQ ID NO: 8420 - DNA, 203 bp, synthetic construct
  source 1..203: mol_type = other DNA
ggcgcgccagtcctgaacatcttctcatatgatggtttcatcagcatgttctatcaaaccaatatagttgttccccctggtgccccatcgacctgccaaattgtcctcctagtttctgctgcaaaggacttcaccctccgcttggctactgacagtgcttacttccagggcctcggcgaagaccttggcgactcggaccgatg

SEQ ID NO: 8421 - DNA, 203 bp, synthetic construct
  source 1..203: mol_type = other DNA
ggcgcgccagtcctgaatcttgtcaatggttctgtgcaaactaccgcccagcaggtacttcgccccgctacaggtttagcttccgaagttcccaatactctttctatccacacaggcgagtcggggattctgactgcaccggaaacaggcgcctcctccaccactgaggctggggctatgattgagaccgactcggaccgatg

SEQ ID NO: 8422 - DNA, 203 bp, synthetic construct
  source 1..203: mol_type = other DNA
ggcgcgccagtcctcaggtcagtgtctactatgtactctgccgcagagacttccatcgaggcatttatgtctcggtatgcaatgttctctgccttcgaccttcgcactggttcaactgctgcgaacggcgaatacagaatcctggacctccgcttctcggaggaatcatctacacacaaggcccttgtcgactcggaccgatg

SEQ ID NO: 8423 - DNA, 203 bp, synthetic construct
  source 1..203: mol_type = other DNA
ggcgcgccagtccttgcaaagtatcgcatgttcacctaccttcgtatggggtatgatgtggtcgctattgtctccccaaaggcaaacatcagggaccgcgtccatatgtcatcaccgcccaaatttcagatgatgttcattccccctggttgcccagcaccccgtcttgtagatggtccggagtggtacgactcggaccgatg

SEQ ID NO: 8424 - DNA, 203 bp, synthetic construct
  source 1..203: mol_type = other DNA
ggcgcgccagtcctcctccccaccacccccagtgtctatttctctgtggaccaacccccggcatccctacggctaccatacatgggcgttatgtccacctttgcctcccgttatgatggcttctattcattccagacaaccaatcctcatagctacggttacttcccaggcaatgacattggcaagctcgactcggaccgatg

SEQ ID NO: 8425 - DNA, 203 bp, synthetic construct
  source 1..203: mol_type = other DNA
ggcgcgccagtcctcatcttcccggtctcccgaactgatttcatcgccccattccaccttttcaacaacagacttgtttttgcaccatatggtgatgatgacttcctccagatcccatacacggcagtgaggtgtgaccttgaacatgatttggtcctggggcgcatggggaagccaattttcacccgcgactcggaccgatg

SEQ ID NO: 8426 - DNA, 203 bp, synthetic construct
  source 1..203: mol_type = other DNA
ggcgcgccagtccttttgtgtggctcccctctcctgacgcgtgatggcattgtggctatggccacagcaggcagtgactcagttagttatttcacaaacctccaccttgtggagtggctcaatgtggagcccttagccgaagaacagggcatttcagattggttcagtgactttgcctcacaactgggcgactcggaccgatg

SEQ ID NO: 8427 - DNA, 203 bp, synthetic construct
  source 1..203: mol_type = other DNA
ggcgcgccagtcctatgtggaaagatgcgccaactcaaactgggcgctgatatctacggggtgcagcgaaaccaggccacacatcagattgtcaagtattaccaaaaggctatgtctatacttcaggcaatgacccaagggcgctccgaaccggtggcgcttttggtacacggcaccccaggaacaggcgactcggaccgatg

SEQ ID NO: 8428 - DNA, 203 bp, synthetic construct
  source 1..203: mol_type = other DNA
ggcgcgccagtcctgaagagcttagccacagaaattattggcagggccctcacgcagaagttgggtggcaacaggccatactctctcccacctgacccaaaacactttgatggttacgcccagcaacctgtcgtcatcatggatgatgttggtcaaaaccctgacggcgaggatctcaaactcttctgcgactcggaccgatg

SEQ ID NO: 8429 - DNA, 203 bp, synthetic construct
  source 1..203: mol_type = other DNA
ggcgcgccagtcctggttgataccgactataaaaggaatgacaagcttactgcaaacactgcacttgacaggtgcaaccatcctgcaaccaactttaagcactgctgtcctcttatctgtggtaaggccatccgtctcaaggacatgaggacaatgaagatgttcacactcgatgaggtggtgtcaatcgactcggaccgatg

SEQ ID NO: 8430 - DNA, 203 bp, synthetic construct
  source 1..203: mol_type = other DNA
ggcgcgccagtcctgctctacgcggagcatctaaaccgccaggggtgcggttctaagctcgaggcaatcttccaaggccccggcactaatgacatcatttcgtgtgaatggaatgctgaagcaaagaggaggggcgtcgctctcgtcacagaggatgagtggtttgagactgactacgacaaagaagacgactcggaccgatg

SEQ ID NO: 8431 - DNA, 203 bp, synthetic construct
  source 1..203: mol_type = other DNA
ggcgcgccagtcctttcaacaatggactggatcaagaaactttcctacggtctctccatcttgtcatccctcaccgctgtctgtggcttcatttacatgctttacaagatttttgcctcggttcagggcccctacacaggaactgcccaaaagacactcaagaagcctgaactcaagcgcaaagctgtcgactcggaccgatg

SEQ ID NO: 8432 - DNA, 203 bp, synthetic construct
  source 1..203: mol_type = other DNA
ggcgcgccagtccttgaagtggacctcgatgaggcgatgtttgccaagcacaagggtaacacagacattcccattgatgaagagcttgggattgccatagaccactacacagagcagattagaccccttatgcccattaaccttacagaacctttgacaatggaggaggtcgtctatgggacagataacgactcggaccgatg

SEQ ID NO: 8433 - DNA, 203 bp, synthetic construct
  source 1..203: mol_type = other DNA
ggcgcgccagtcctccttgaggggcttgacctctcaacctccgctggatttccatatgtcattaagaacaccaggaagagggaccttattcctgagcgtggccaacccttaacaaaattgcttgatgcccttgacctctatggctacgacctcccgtatgtcacataccttaaggatgagctcagacccgactcggaccgatg

SEQ ID NO: 8434 - DNA, 203 bp, synthetic construct
  source 1..203: mol_type = other DNA
ggcgcgccagtcctaattgacaaagtcaggaaggggaagacccgcctgatagagtgcagttccatgaatgacacaatcaggatgaagaccacttttggtcgcttgtttcagactttccatgcaaatccaggtaccgtcaccggatcagctgttggttgcaacccggatcttgactggagcaaattctacgactcggaccgatg

SEQ ID NO: 8435 - DNA, 203 bp, synthetic construct
  source 1..203: mol_type = other DNA
ggcgcgccagtcctcgtgtatgaggttgagggaggtatgccttcaggatgttctgggacatccatcttcaattcaatcataaataacctcataattaggacacttgtgttgaagtcttataaatcaattgacttggatcgcctgcgcatcattgcgtacggtgatgacgtgattatatcttaccctcacgactcggaccgatg

SEQ ID NO: 8436 - DNA, 203 bp, synthetic construct
  source 1..203: mol_type = other DNA
ggcgcgccagtcctccagctggatgctgctgcactcgcggagtgcggcaaggattacaatttgacaatgacacctgcagacaagtcagacacattcaatgaggtaacatgggacaacgtcacctttcttaagcgacgatttgttccagacaagcacttcccattcttggtccaccccgtcttcccaatcgactcggaccgatg

SEQ ID NO: 8437 - DNA, 203 bp, synthetic construct
  source 1..203: mol_type = other DNA
ggcgcgccagtcctcaagcaccgtctgggaagatgttccgctgtggctgccaaacctggtaacaggtgccccagtgtgtgtagtcttcctccagtctccggactggcagtcttgtgtaaagatgcagtgtaaggttcaagtgccaaatccctggaaggagtgaccctctactgccctaggaatgctgtcgactcggaccgatg

SEQ ID NO: 8438 - DNA, 203 bp, synthetic construct
  source 1..203: mol_type = other DNA
ggcgcgccagtcctgcaggtacccccaacttcggttggggatctgagcacaggctaattgtctacgggtagtttcatttcccatcctctcttttttggcatcatggcgaacacacgggtttcacgatctgtgctctccgctgttgccaaaacttctacccacagagtctatcacacagttcttgactgcgactcggaccgatg

SEQ ID NO: 8439 - DNA, 203 bp, synthetic construct
  source 1..203: mol_type = other DNA
ggcgcgccagtcctctatgacaggctctacctcaattcctacccccaaatgctctaccccctaccccgctcaccctctttcccttgccccttctgcatgtatgatgaagacctggaatttctctcacccgagtcgctctgcggcgagggcgctgagccatgttggaagtgcatgtcaaagtccccccgcgactcggaccgatg

SEQ ID NO: 8440 - DNA, 203 bp, synthetic construct
  source 1..203: mol_type = other DNA
ggcgcgccagtcctcggagcgctccaacaacttctcaaatttccccacctctcccccgcacagatgcccctcgccgtgaaacaactcaaacggcaggggaattctgtcaccaacatctacggcaatggtaacaacgtcactactgacgttggtgccaatggctggtcccccaccgtgtccactggactcgactcggaccgatg

SEQ ID NO: 8441 - DNA, 203 bp, synthetic construct
  source 1..203: mol_type = other DNA
ggcgcgccagtcctcggtgatgcccctgtctctgcatcagcagacaccatccccggtcgctccgggggtgcgtcttctgacaaaactggatctgtttcagtctcctcaggcaacaaggtgggctcccgcttctccaagtggtgggagccggctgccgcgcgcgctcttgagcgtgcgaccgatgccaccgactcggaccgatg

SEQ ID NO: 8442 - DNA, 203 bp, synthetic construct
  source 1..203: mol_type = other DNA
ggcgcgccagtcctctccctggaatccccttccttccccatctccacagaatccaattggggcactcaatctggccaagccccgactgcctatccccttcccttttctttcgtgcgtgcgtacccggacaccccctgggctgccatgtacgacacccactccatgtggaattgtggttggcgtgtgcacgactcggaccgatg

SEQ ID NO: 8443 - DNA, 203 bp, synthetic construct
  source 1..203: mol_type = other DNA
ggcgcgccagtcctggtcaccgtcaacggttcgcagttccacgctggagccctcatcctttacatggtcccggaagcgactactcaaaccatcgagtcatctcgtcgcaatgccgggttcgtgtacccctatgtcatcctcaacctctatgagagcaacactgctaccattgaggtcccctacatttccgactcggaccgatg

SEQ ID NO: 8444 - DNA, 203 bp, synthetic construct
  source 1..203: mol_type = other DNA
ggcgcgccagtcctggcagatgaaccaggcgaacgcctggcgatccttcctgtctccccttctgccattgctggcacaggtactcccatatcctatgtcctctctctcttctcccaatggcgcggtgagctcgccgcccaccttctcttcacaggttcttcccagcactatggccgcttggtcgtgtgcgactcggaccgatg

SEQ ID NO: 8445 - DNA, 203 bp, synthetic construct
  source 1..203: mol_type = other DNA
ggcgcgccagtcctccaagttccccttgaccccatccactggcaaagtgacgccgatgtctccggcctcactgctatgctttcctgtttcacctatatctctgctgatctccgcatcaccttgcggatttctaaccccaatgggctaccaatctccctcatggtggcctttgccccccctggatcaaccgactcggaccgatg

SEQ ID NO: 8446 - DNA, 203 bp, synthetic construct
  source 1..203: mol_type = other DNA
ggcgcgccagtcctgaagactgttgccatcgtgcggcaaggcgctcgccacacccttggtgacgtcccaccagacgacacagtctacatcatccgtgcgcgtagaccaacttacgtgcactgggccctccggaaagtcactcctgatggaagtgccaaacaaatttccctttcccgtgaaggcctcaccgactcggaccgatg

SEQ ID NO: 8447 - DNA, 203 bp, synthetic construct
  source 1..203: mol_type = other DNA
ggcgcgccagtcctcgccgtggtcgcatacgaaccatgtgaaggtgagatctatcgggaagtcccactctcctcctggtccattgccgaacttcaactcggcagcccgtgggattacagtgccaccaacaactgtacgcacttcgtccaacgggccaccaatgtggatctccccaacaccggcttctccgactcggaccgatg

SEQ ID NO: 8448 - DNA, 203 bp, synthetic construct
  source 1..203: mol_type = other DNA
ggcgcgccagtccttctcacctggctcgccaaaatcttcggctatctccttgtcctctttggttccccctccccaatgtccatctctggacttctagtcatcatctgtgctgatcttgccccccatgcccgggatttcttcactgcctcgggcaatgtcctctcctccctccacttctggatcgcgaccgactcggaccgatg

SEQ ID NO: 8449 - DNA, 203 bp, synthetic construct
  source 1..203: mol_type = other DNA
ggcgcgccagtcctgttcctgaaccaatccctcagaaattacaccttggccctttctcaacaccgcaagcgccaggtcggcccccgaccggaacccgtggtggtctacctctacggaccccccgggaccgggaagtccctcttggccgccctccttgcccaaacccttgcccaacgcatatccggtgacgactcggaccgatg

SEQ ID NO: 8450 - DNA, 203 bp, synthetic construct
  source 1..203: mol_type = other DNA
ggcgcgccagtcctagaaaaaggtacacattacacttctcgtgtcattgtgattacctccaacttccatgagcccaatgagcgcgcagcgcgctcgatgggagccctcaagaggcgcgtccaccttcggatcaacgtcacctccaatggcgtgaggtttgacccggtgaacgcgctcaacccaatccccgactcggaccgatg

SEQ ID NO: 8451 - DNA, 203 bp, synthetic construct
  source 1..203: mol_type = other DNA
ggcgcgccagtccttggaacccaatccaaatacttcacctctcaaacccctctcacccttttccaagccaacgtggtccgcttggaccgcgattcaatctggacaccctccttctccaacatggacgagctcgtggacgctatcatggcgcgcatggaccgttcatccggtgtttcaaattctcttgccgactcggaccgatg

SEQ ID NO: 8452 - DNA, 203 bp, synthetic construct
  source 1..203: mol_type = other DNA
ggcgcgccagtcctctccctcatcaagcgtcagggcaaccgcgtggtcgaagcaactccccgggaaatccccgaggagtatgctgacgagctcgtggaagccttggcacaccacagggctgtaccctgttccctctccctctcccacgccatctccaacaacaccccccttgaaaccatctcccagaccgactcggaccgatg

SEQ ID NO: 8453 - DNA, 203 bp, synthetic construct
  source 1..203: mol_type = other DNA
ggcgcgccagtcctcctctggcgctacaggaaacccatcttcgccgccaccaccttcctggcggtggtcggattcctttgctccatcatccccctcgctagatcaatctggcagggccgcgaagactcttcctcgcagccccaagcggcgtactcaggtgtgccgcaccaaaagtcaaaacccaaaaccgactcggaccgatg

SEQ ID NO: 8454 - DNA, 203 bp, synthetic construct
  source 1..203: mol_type = other DNA
ggcgcgccagtccttcccaaacccatccccacccaacatatccagcgccaggggatctctcccgcaatccctggcatttcccagaatgtcgttcacgtcgagtccggaaacggcctcgagaagaatgtcatgtctggcttctacctcttctcccgctacctacttgtccccacccacctacgtgagcccgactcggaccgatg

SEQ ID NO: 8455 - DNA, 203 bp, synthetic construct
  source 1..203: mol_type = other DNA
ggcgcgccagtcctccaccacaagaccctcctcgtgggcgttgacgcctacgattgggccaccctccctaccctcgagcttggtgagctcaccctagtccataccccaacctctcgccagtacaaggacatgcgccgcttcatcggcgcacacccctatcccactggccttcttgtctcccaacttaacgactcggaccgatg

SEQ ID NO: 8456 - DNA, 203 bp, synthetic construct
  source 1..203: mol_type = other DNA
ggcgcgccagtcctatcagccccgctctatgtccgcttctccggcaaccgcgtgcttgacatgaacttccccggtgccatcgtctgtgagcaggcgtacggctaccacgcagctacctttgaaggtctgtgtggtgccccgcttgtcacggacgatcctgccggggtcaagatccttggattgcacgtcgactcggaccgatg

SEQ ID NO: 8457 - DNA, 203 bp, synthetic construct
  source 1..203: mol_type = other DNA
ggcgcgccagtcctggccggagtggctggtacgagtggtttctcagcccccctccataccattctccctgaaatcctcagatttgccactacccaccaatccctcatcatccccactggagaggcgaagcccggagtcaacatcaaccggaactcgcgcctccgtccctctcccgcctatggtgccttcgactcggaccgatg

SEQ ID NO: 8458 - DNA, 203 bp, synthetic construct
  source 1..203: mol_type = other DNA
ggcgcgccagtcctcgttctcacccaggaacaggcgatccatggaacccccaacatggaagggcttgatatggggcaggctgcgggtttcccatggaatacccaaggccggtcccgtcgatcgctctttgatgaacctgaacctgggtactttgtccccaaacctgaactccaggtagagattgaccgcgactcggaccgatg

SEQ ID NO: 8459 - DNA, 203 bp, synthetic construct
  source 1..203: mol_type = other DNA
ggcgcgccagtcctttcccacggtagtgcggttggttgcaaccctgacgtccactggaccgagttcttctacaagttctctgagttctcacaagtgtttgatctggactacaagtgctttgatgcaactctgccttctgctgccttctcccttgtggctaaacacctggagcgcctcaccggtgaccccgactcggaccgatg

SEQ ID NO: 8460 - DNA, 203 bp, synthetic construct
  source 1..203: mol_type = other DNA
ggcgcgccagtcctccgtgttgtgaaatacatcgaatccatccgccattcccatcacatctatggcaaccagatgtatgacatgatcgggggaaacccctccggatgtgtggccacttccatcctcaacaccatcatcaacaacatctgcgtgctatcggccctaatccagcacgtggacttttcccccgactcggaccgatg

SEQ ID NO: 8461 - DNA, 203 bp, synthetic construct
  source 1..203: mol_type = other DNA
ggcgcgccagtccttaccaaatttcagatcctcgcgtacggtgacgacgtcatctacgcgacggaacccccaatccacccctcctttatcagagacttctaccagcgtcacaccccgctggtggtcacccctgctaacaagggctctgatttcccccccacgtccacgatctatgaagtcaccttcctcgactcggaccgatg

SEQ ID NO: 8462 - DNA, 203 bp, synthetic construct
  source 1..203: mol_type = other DNA
ggcgcgccagtcctcaaacgctggtttgttccagatgacaggcgcccattctacattcaccctgtgatggaccctgacacctacgagcaatcagtgatgtggttgcgtgatggagactttcaagacgtggtcacctcactctgtcatttggccttccacagcggacccaagacatatgagcgttggtgcgactcggaccgatg

SEQ ID NO: 8463 - DNA, 203 bp, synthetic construct
  source 1..203: mol_type = other DNA
ggcgcgccagtcctcatgaaagtgcgcgagcagtgcctcaagtctgggttcgctccaaatttcctcccctactcttacctccaactccgctggcttaatatgctggcagcctgatagttagggaacccaaccacggtggaatacccgtggtgctagttagttagaaccctttactctcctccatggtgcgactcggaccgatg

SEQ ID NO: 8464 - DNA, 203 bp, synthetic construct
  source 1..203: mol_type = other DNA
ggcgcgccagtcctatataaagaccacccacaatctttcgggtgagcccctaagccatggttgtactgtgctatcttctaagacgtcctccctctggacgcactttccccccggtgccgcgcctcccctgggagctgcacccggggaccggggtagtctttgaacttttctaactgttcttaaaaaaacgactcggaccgatg

SEQ ID NO: 8465 - DNA, 203 bp, synthetic construct
  source 1..203: mol_type = other DNA
ggcgcgccagtcctgaaacccgtatacaccggaccttttctcccctccctctccacttacctttttcccctcttcggcatgaaacaaggattattcaagtggaaacgcgatttaatatgcggctggccaccgcggaataacggcaattgtgtatctgctggaagccaagcctgcctagccgatagccccgactcggaccgatg

SEQ ID NO: 8466 - DNA, 203 bp, synthetic construct
  source 1..203: mol_type = other DNA
ggcgcgccagtcctttgaccgggtgtgtaggatagcccaggaaccagcaatacgcgacaggttatggtagagtagatacctagccaggggcaatgggactgcattgcatatccctaatgaaccattgagatttctctggtcattacccggtgatggttactagaggggggcctctagtactagatctacgactcggaccgatg

SEQ ID NO: 8467 - DNA, 203 bp, synthetic construct
  source 1..203: mol_type = other DNA
ggcgcgccagtccttgactcataataattggacaatatatattacacctgttgtgccattggattatgtcaccggctcctccaccaatgttcctgttacaatttccattgcaccaatggcagcctctttttctggtttgcgcaatgctgttcaacctagttttagtgttcatacgcagggtgttcctgcgactcggaccgatg

SEQ ID NO: 8468 - DNA, 203 bp, synthetic construct
  source 1..203: mol_type = other DNA
ggcgcgccagtcctctgtttcctttacattggatgtttctaataatagtgtgtcaaatgctgccatagcccattgggatatggacatgggaagcgtgctgttttcaaccacctacatggcaaggtgtgccaaatggtactcccagcatcgtggagggatacgtgtgaccttcatgttctgtggctcagcgactcggaccgatg

SEQ ID NO: 8469 - DNA, 203 bp, synthetic construct
  source 1..203: mol_type = other DNA
ggcgcgccagtcctccatggcaactggcaagttgcttcttgcattcacaccacccggcggttcggcgccagccacccgcagggacgcaatgcttggcacacatgagatctgggatttgggcttgcaatcctccatcacactcgttgttccgtggatctcccagacggcttatcgctttaaccaaccttcgactcggaccgatg

SEQ ID NO: 8470 - DNA, 203 bp, synthetic construct
  source 1..203: mol_type = other DNA
ggcgcgccagtcctttggcgatgaacttggcaaagtcatcactgaagcagcccaacatgccctgcagcccctagatgttaaacctgtcaacggacccagcgtcccagctggcctgtccattcaggttggtgatgcatctgcactaacagcccccgagactggggcaacggctgcaacagaagcaccctcgactcggaccgatg

SEQ ID NO: 8471 - DNA, 203 bp, synthetic construct
  source 1..203: mol_type = other DNA
ggcgcgccagtcctctactccttgtgtgtatcaaaagtcaagtgctgatgcccccatttctttgcgacttccctttatgggcccagcctctgcttattgtgtgacctatgatggatatcccaattatcgtattggacaaaaatatggtgagtttcctggaaatgattttggtacaatttgttttagatcgactcggaccgatg

SEQ ID NO: 8472 - DNA, 203 bp, synthetic construct
  source 1..203: mol_type = other DNA
ggcgcgccagtcctttatcaatttgacgggcggtaaccaagtgcaggatattaaacatcgcattttgatgcttgcccgacccacccaggtctccgccttttgcccgcgaccaattgtttcacttgcgcaacatcgacctgctgctgttaccaatgggagaattgcatatgttagggatggacctgatgcgactcggaccgatg

SEQ ID NO: 8473 - DNA, 203 bp, synthetic construct
  source 1..203: mol_type = other DNA
ggcgcgccagtcctatgttgttccagaaggtgatggaaccgatagggttcttagagcagcaaattgtgggccccgtctgaaggtcggaaagagaatgaatccagagtgctgccctccccatttgtacagattttttgaggattgttatcagtgctgggatgttgataatgaagtttctttccattgctcgactcggaccgatg

SEQ ID NO: 8474 - DNA, 203 bp, synthetic construct
  source 1..203: mol_type = other DNA
ggcgcgccagtcctttcctctttcccctcgtgagtgcttgattcctgctcatctttatgttgctgatcttgtgttttccaagcatattgctgggcccagggcagagataccctatcgaaagaagtgggctgattataccatggatttggtttgcttggaacttgctgaagattattttcaaaccattgcgactcggaccgatg

SEQ ID NO: 8475 - DNA, 203 bp, synthetic construct
  source 1..203: mol_type = other DNA
ggcgcgccagtcctaaggtctccgtgatatgatgaatgatgttgcccgtgagctgggtcacagctttggtgattccaccatgactggtgtggcaaatgtgattgaagatgctgtcaagcagtatacctttaataaagccaatgcacaaatgtcttatgttaaacagattattaagtggcttgtgaaggcgactcggaccgatg

SEQ ID NO: 8476 - DNA, 203 bp, synthetic construct
  source 1..203: mol_type = other DNA
ggcgcgccagtccttccagtcattgacaaaaggtcggactgagcccgttgccatgcttgtccatggcacacctggctccggcaaatcccttgccacagaaattgttggccgcctgctttcccaaaggtatggcggctcccgaccctattcattgccaccagaccccaaacattttgatggatatgccccgactcggaccgatg

SEQ ID NO: 8477 - DNA, 203 bp, synthetic construct
  source 1..203: mol_type = other DNA
ggcgcgccagtcctttagacctcccactgtgtcagaaccccaagcccttaagcgtagattttttgtggatgttaatattgaagttcagaaggattatatggttcaaaatggtaaacttgctgctgatgttgccttgaccccctgcaatcatcaggcagcaaattttaaggtttgctgtcctatgatttcgactcggaccgatg

SEQ ID NO: 8478 - DNA, 203 bp, synthetic construct
  source 1..203: mol_type = other DNA
ggcgcgccagtcctagagtgattatgataggatgcctcctgtgcttaagacgtatgaagaattgagaaaggaagggattgaaaggcctgcgccaaaagaagtgcttgacttggttcgtgctgtgcccaccccagaggtttttgattattgtcgggttcagggttggatgctacccgttgaggtcagaccgactcggaccgatg

SEQ ID NO: 8479 - DNA, 203 bp, synthetic construct
  source 1..203: mol_type = other DNA
ggcgcgccagtccttgcgtcgggttgtcaagacacaaggacctgacatggaatttgtcaataagctgttcaagcagagcattttctccgtgaagacggagaaagggtggttctctggcttgggcttacactctcagtggcttttgcttcccaaacattctgagcctggatatgagattgagatgaatgcgactcggaccgatg

SEQ ID NO: 8480 - DNA, 203 bp, synthetic construct
  source 1..203: mol_type = other DNA
ggcgcgccagtcctttaaagatgaattaagacccaagaagaaaattgcagctgggaagtcaaggctgattgagtgttcatcactcaatgataccatccgcatgaagcgggtctttggccacctcttccaaacctttcacgcaaatcctggtaccgtgactggctctgctgttggctgcaatcctgatgcgactcggaccgatg

SEQ ID NO: 8481 - DNA, 203 bp, synthetic construct
  source 1..203: mol_type = other DNA
ggcgcgccagtccttcgttccggatgaggagtttccttttctgattcatccctgctttccaatgaaggaaatttacgagtccattcgttggtctcgttctgctgcagcaactgaagaacacgttcagtcattgtgttatcttgcctggcacaatggccgttctgtgtatgaggattttattgagaagacgactcggaccgatg

SEQ ID NO: 8482 - DNA, 203 bp, synthetic construct
  source 1..203: mol_type = other DNA
ggcgcgccagtcctttcgcactgtgcctgttggtagagccttgaaactcccttcgtacagtgtactgcgccagcaatggcttgatcagttttaagtagttaattgctagtgtagtttttaggcttaagtttagttgttaagtttaagcagtttgttatagtaagttaagtttaggtttaagttagtgtcgactcggaccgatg

SEQ ID NO: 8483 - DNA, 203 bp, synthetic construct
  source 1..203: mol_type = other DNA
ggcgcgccagtcctgataacccctgaccgggtgtgtaggataggaaaggtgcccactgtgggcgacaggttatggtagagtggatacctagccaggggcaatgggactgctttgcatatccctaatgaagtattgagatttctctgctcattacccggtgatggttgtgtggggggggccccatacaccgactcggaccgatg

SEQ ID NO: 8484 - DNA, 203 bp, synthetic construct
  source 1..203: mol_type = other DNA
ggcgcgccagtccttagatccatactgcctgatagggtcgcggctggccgaccataacctgtatagtcagttgaattcagccaagatgtgtttctttttccacacaaagaccaacgatattagcccaatgacaagaaagacttctgttgaacgcctcatgtccccagggcctaagtgcctagacatggcgactcggaccgatg

SEQ ID NO: 8485 - DNA, 203 bp, synthetic construct
  source 1..203: mol_type = other DNA
ggcgcgccagtcctgtggtaatattacgcagataaattactatggttcagactatgcgtcggctcatggtgctgcacagacccgcctagatcccgattctctggcacgacccttggctaaccttgctgatatgactggtcccgcattaaaatctcccacagtggaggaggctggcttctctgatcgcacgactcggaccgatg

SEQ ID NO: 8486 - DNA, 203 bp, synthetic construct
  source 1..203: mol_type = other DNA
ggcgcgccagtcctcaagaaccggtcttggctacggaataaagctgcctgcagctcttacagacttaggagtttttggtcagaattgccaatttcattttctgtgtcatactggttactgcgtccacgtgcaagtgaatgcatcgaaattccatcagggtatgctgttagtctgcgccatacccgattcgactcggaccgatg

SEQ ID NO: 8487 - DNA, 203 bp, synthetic construct
  source 1..203: mol_type = other DNA
ggcgcgccagtcctgtaaagttgatgggagagataatgctactgtttataatttggaagcaaaagatcttgaagattatccaaggtttcaattgactctttatcctcaccagtttataaacctgagaacaaataattctgcaacccttatactcccatatgttgctgcatcacctgctgaatccccaccgactcggaccgatg

SEQ ID NO: 8488 - DNA, 203 bp, synthetic construct
  source 1..203: mol_type = other DNA
ggcgcgccagtccttcacccataataattggactgtttatgttacatatatagtggagctttcatatatgaatgggtcctcaacggaagttccaattacagtttcagtggcacctatgtcatgctcatttagcgggttgcggtctaaggttacacgccctgaacatcaaggggtaccagtgtttgaagcgactcggaccgatg

SEQ ID NO: 8489 - DNA, 203 bp, synthetic construct
  source 1..203: mol_type = other DNA
ggcgcgccagtcctttcccgggtctggacagtttgtaacaacaatacgtaattcggggtttcctattttaccggattatgaggagaccccaaaccatggcattccaggccgtgtgagaaaccttatggaagtgtgtggggtggacacgttttgtaactgtgcgacctccaccaccactgatgaacaaccgactcggaccgatg

SEQ ID NO: 8490 - DNA, 203 bp, synthetic construct
  source 1..203: mol_type = other DNA
ggcgcgccagtcctcaggcaagctgctgttggcctacacccctccagggggagcagctcccgccacacgcaaagaggcaatgcttgggacacatgtggtgtgggatattggattgcagtcatccattacaatggttgttccctgggtttcccaaacagtatataggtataatcatccaaaagaagaaacgactcggaccgatg

SEQ ID NO: 8491 - DNA, 203 bp, synthetic construct
  source 1..203: mol_type = other DNA
ggcgcgccagtcctatatgttcacctatattaggtgcgcctttgatttggtcatagttacatctgtaaatggttcttctggcgcaaagaatggcctacccatggttcaggccctctactgtcctcctgggtgtccaacgcccactaaccaagacactatggagtggtatcttccgaccacccctagtgcgactcggaccgatg

SEQ ID NO: 8492 - DNA, 203 bp, synthetic construct
  source 1..203: mol_type = other DNA
ggcgcgccagtccttgattcccggtcatctttatgttgctgatcttaagtttcagaggacaaatggtgcttatccccatgagattccctataggaagaagtgggctgactggacaatggacctggtttgcctgcagctggaccgcgatttctttgaaaccagagtgcatctgtgtaagaggcaatgctcgactcggaccgatg

SEQ ID NO: 8493 - DNA, 203 bp, synthetic construct
  source 1..203: mol_type = other DNA
ggcgcgccagtcctgtaagaatacatggactgtctgtgatacaactgagcataatgttgcaatccgctgtggggatgcaacttttcaaaaggatgtttgggttgatggtcctgtcacatctagtggacattggcaaagaaatttgttacgtgttgagatccccatccgtcctggccattgtggtagcccgactcggaccgatg

SEQ ID NO: 8494 - DNA, 203 bp, synthetic construct
  source 1..203: mol_type = other DNA
ggcgcgccagtcctaacctgtggcagttttgattcatggggctcctggtttaggtaagtcattagtgacagaagttgtcggacgacaattgtcacgctactatggagctggacggccctactcattgccacctgatcccaagcattttgatggttatgcccagcaacctgttgtgattatggatgatccgactcggaccgatg

SEQ ID NO: 8495 - DNA, 203 bp, synthetic construct
  source 1..203: mol_type = other DNA
ggcgcgccagtccttgggacaaaacccagatggagaagattgtaagctgctgtgtcaaatggtatcctcaacagagtttataacccctatggcttctttggatgacaagggaatgccttttacatctgattttgttcttgcgtcaactaacctgtcagcccttaaaccacccactgtgtcagagccgacgactcggaccgatg

SEQ ID NO: 8496 - DNA, 203 bp, synthetic construct
  source 1..203: mol_type = other DNA
ggcgcgccagtcctatgctattcgacggcgattcttcattgatgctgccatcgaaccctcaaaggattaccttaaaccaagtgggcatcttgatgcggatacttcgcttacccaatgtgatcatgctgctgtgaattttgcaaaatgttgtccccttatttgtgggaaagccctggttttgaaagatccgactcggaccgatg

SEQ ID NO: 8497 - DNA, 203 bp, synthetic construct
  source 1..203: mol_type = other DNA
ggcgcgccagtcctatatggagtttgtaaataagctatttaagcagagcatcttttctgttaagactaagaagggctggttttctggacttggcttgcatactcagtggcttttacttccgaaacactctgaacccgaggatgttatagaaatgaatgatgtagagtataagtgtttagatatagtgacgactcggaccgatg

SEQ ID NO: 8498 - DNA, 203 bp, synthetic construct
  source 1..203: mol_type = other DNA
ggcgcgccagtccttagccttggggaaatctaggcttatcgagtgttcctcattgaatgataccatcctgatgaaaagagtatatggccgcttgtttcaaacattccatgcaaatccaggaaccattacaggatcagccgtggggtgtaacccagatgtggattggtcaaagttttatgcggagatggcgactcggaccgatg

SEQ ID NO: 8499 - DNA, 203 bp, synthetic construct
  source 1..203: mol_type = other DNA
ggcgcgccagtccttccttgtccatccctgttttccaatgaaggaggtttttgaatccattcgctggtgcaagtcagcggccgcaactgaagaacatgttcaatcgttgtgctatttagcctggcataatggagagcatgtgtataatgattttcttgataagattcgctctgtgcctgtaggtagagcgactcggaccgatg

SEQ ID NO: 8500 - DNA, 203 bp, synthetic construct
  source 1..203: mol_type = other DNA
ggcgcgccagtcctgaaattcaaccatcaccacccaggaggcagtaaatgcagtggtcgcgtatggttgttggccatcatttgactcaggagctggggaggccatagataagttaactgatccaggtccctctgtggacaggttctacactctggactcaattgagtggagcaccaccacacaaggctcgactcggaccgatg

SEQ ID NO: 8501 - DNA, 203 bp, synthetic construct
  source 1..203: mol_type = other DNA
ggcgcgccagtcctatagctattggaccctacttctagttcccctggttcctctcgagtatagttcaggggctacaactcggattcccgtgactatatcaattgcccctatgtgctcatcattttctggcctgaggaaccggataccccttgctcaaggtattccaacattccaagtaccgggatccgcgactcggaccgatg

SEQ ID NO: 8502 - DNA, 203 bp, synthetic construct
  source 1..203: mol_type = other DNA
ggcgcgccagtcctagcaatttgtcactaccctccgcaatcctggttacccactgtacccggagtaccagaagacaccaccccatcatataccaggtagggtaacaaatttgatggaggtggcggaggtggacactttatgcaatctatcagatactgaggtgttgtacatcaatgcaacagggtctgcgactcggaccgatg

SEQ ID NO: 8503 - DNA, 203 bp, synthetic construct
  source 1..203: mol_type = other DNA
ggcgcgccagtcctcaccattgggcgagaacctgggcacctgggatctttcattacagggtaatttattatcccccacctacctcggtcgcctgtcgagattctatacccattatagaggctctatcaacttgactttcatgttctgtggctcagccatggccacgggaaagttcctcatctcctatacgactcggaccgatg

SEQ ID NO: 8504 - DNA, 203 bp, synthetic construct
  source 1..203: mol_type = other DNA
ggcgcgccagtcctccctgtggtaccagaccgccgttgtcaccccaccaaattgtcccaatcagtgtgcgcttgtttgtttcgcttctgcctgcaaggactttgagatgagattgcctgttgattcagcctatttccaaggactaggtgatgacctttcgaaggtgataacaagtgtcacgaaggacacgactcggaccgatg

SEQ ID NO: 8505 - DNA, 203 bp, synthetic construct
  source 1..203: mol_type = other DNA
ggcgcgccagtccttcacccaaccacttatggagccggtaactggtactgtggcgtcactaccacaacagctctcactgcaggtgggtgacggctcggctctcgcagcacctgagactggggtctcggcgactactgagccggagcagatgatggagacgagggtttcaacagtgctatacagcaagtcgactcggaccgatg

SEQ ID NO: 8506 - DNA, 203 bp, synthetic construct
  source 1..203: mol_type = other DNA
ggcgcgccagtcctgcctcaaggctgccccagcctcctttagaataccctttatgggcatctcgtccgcttatgcctccttctacaatggttactccactttcacaccacaagctgcaaaatatggcgaatttccagggaactacctgggtgatctgtgggtgcgccttgttgctgataattcacgtccgactcggaccgatg

SEQ ID NO: 8507 - DNA, 203 bp, synthetic construct
  source 1..203: mol_type = other DNA
ggcgcgccagtcctctggtagtgcatccacggtggtggtcaatgtccaggcattctgccggccagtcaattttgagggctacctacctcgccctatagtttcactcaagcctaatgtcagggtggggccctccagggggcgtgttgaattcgttgagacaggtgtctccatggagattggggtcggcccgactcggaccgatg

SEQ ID NO: 8508 - DNA, 203 bp, synthetic construct
  source 1..203: mol_type = other DNA
ggcgcgccagtcctcaacaaacctcatgttttctcatggcgctgtgtaccacttctccgagtacaaaccagtgtggatgtccatgacttatgacgttgcagtcttgaagctagagaaacctaccttccattgtagcccccccatctgtctacatggttgtagatcaggatggctcaagtgtgtgactacgactcggaccgatg

SEQ ID NO: 8509 - DNA, 203 bp, synthetic construct
  source 1..203: mol_type = other DNA
ggcgcgccagtcctccacagcgaccaacaggaaacagtccttctttaccaagatgtctgagataccgtattttcaggcgatggagcagggccctggtgattggctagcgggcatctttgaaaatatggggggtgcttttggtgaggggctcatacaaccaattaaggacaaactggatgacatccgggcgactcggaccgatg

SEQ ID NO: 8510 - DNA, 203 bp, synthetic construct
  source 1..203: mol_type = other DNA
ggcgcgccagtcctccaacctcacgcccaataccatacggagtgaccttaccaagaccacgatcaccacccttgtaaagattatctgcgccatggtcctcatatccaaggcctacgacaaggtggagaccgcagcccttgtgggtacaatgttaggcgttgatttcctctctaaagacccatttgagtcgactcggaccgatg

SEQ ID NO: 8511 - DNA, 203 bp, synthetic construct
  source 1..203: mol_type = other DNA
ggcgcgccagtcctgacggacccacttcatcaagggcctggagaagctacccatgcttatggagacctttgataagatttccacctcccgtggacagtacagtccggaaaccgtcaagcgtgtttgcaccgctttccgtgagttgaagcgtggggctgacatttatggtggtgagaggaatttcgccacgactcggaccgatg

SEQ ID NO: 8512 - DNA, 203 bp, synthetic construct
  source 1..203: mol_type = other DNA
ggcgcgccagtcctcccatcctgcgaccaacttcaagaggtgctgcccacttatatgtggaaaggccgtgaaactgaaagatcggaagtcaggtatcacctactccgttgatgaccttctcacctgcctctatagggagtcagcgcgtcgtcagaggtgtggggataagctagacgctcttttccaggcgactcggaccgatg

SEQ ID NO: 8513 - DNA, 203 bp, synthetic construct
  source 1..203: mol_type = other DNA
ggcgcgccagtcctgtattgaagatgaaatcaggatgctgccagacgcttacagacaaaagatgaaggtaaaacatcagatccatgatggtgacctagggtttgagcgtgtacagatggtccctgacccagaggagtggttcgaaactgattgggataagatgcctcatatcctgaagacgatcgacgcgactcggaccgatg

SEQ ID NO: 8514 - DNA, 203 bp, synthetic construct
  source 1..203: mol_type = other DNA
ggcgcgccagtcctaacaggtggcaacgggactatcaatcctagcgagtatcgcaaccctcgcctccttcatatatttagcctataggatgtttgcctctaggcagggtccttattcaggagaatcacccgcccccctcaaggcaccagttccccgtagggttgtggtaacccaaggtcctgactctgcgactcggaccgatg

SEQ ID NO: 8515 - DNA, 203 bp, synthetic construct
  source 1..203: mol_type = other DNA
ggcgcgccagtcctacaatgagcaaggtgctctcgaactcaccttgatcagaatcaaccgtcccaccaaattcagagatattaggaaattcttcccccctgccttttcagcggagagagactgcacacttgttgtgaataacaagaacttccctagggtgatgctccccgtgggtgcagtcacggcctcgactcggaccgatg

SEQ ID NO: 8516 - DNA, 203 bp, synthetic construct
  source 1..203: mol_type = other DNA
ggcgcgccagtcctcgtttatggagggggccattgtgtccacatctcaggccccaaggcctatcaacctcaacacaaagaccaccctaaggccgtccgtgttctacgacacctttaaaggggagaaagaacctgcagccctacatgtcaaggacagacgcctcgaggtagaccttgagaaggccatgtcgactcggaccgatg

SEQ ID NO: 8517 - DNA, 203 bp, synthetic construct
  source 1..203: mol_type = other DNA
ggcgcgccagtccttctcaaagtacaagggcaaccttgacgttgagttcccaccagagctgtccctggctgtggaccaatacgttgagcagatcagaccattgatacccccggatgtgactgaccccctatccttggaggacgttgtttatggcattgacaacctcgagggacttgatttgaacacgtcgactcggaccgatg

SEQ ID NO: 8518 - DNA, 203 bp, synthetic construct
  source 1..203: mol_type = other DNA
ggcgcgccagtcctcatcggggtgttctggcacgtccatcttgaattcgataatcaacaacctcattatcaagaccctggtacttaggacttacaaaggtgtggatctggaccaaatgaagatcctagcctacggggatgacgttatagtgacctaccccttccagctggatgcatcgatagtggcagcgactcggaccgatg

SEQ ID NO: 8519 - DNA, 203 bp, synthetic construct
  source 1..203: mol_type = other DNA
ggcgcgccagtcctgacttcattgccaaggtgcgcactgtacctgtagggagggctttgtcattgcccacctaccgcgtgctgcgcgcattttggcttgatctattttgatccccatcaatactcaactaccagtccaatcataggctaatactgatagttgaagacatttaattgagattggcaattcgactcggaccgatg

SEQ ID NO: 8520 - DNA, 203 bp, synthetic construct
  source 1..203: mol_type = other DNA
ggcgcgccagtcctgaacgctccgccactgccatgtatagcgtgcaatgcataaatggtgcactacatgatacgagggaatgggaaaccctccatggccgaatgcagggtgacagcctgccggcggatgcctgttgttagtataatccgttgtttgccacatggattccacagtctcttttccagcatcgactcggaccgatg

SEQ ID NO: 8521 - DNA, 203 bp, synthetic construct
  source 1..203: mol_type = other DNA
ggcgcgccagtcctctctccaaggggcacaatgtaagaaacttaaggcctgccggccgaagatgtattgtgaccaggggtactgtcatgctagttgtcgaaggcataggtcggctttgaggtgttgtctttgcagcaaggcctatgaagaagaggacttgaaggttgaagcattagagtatccttgctcgactcggaccgatg

SEQ ID NO: 8522 - DNA, 203 bp, synthetic construct
  source 1..203: mol_type = other DNA
ggcgcgccagtcctggacacagatatatctgggtgatcggaaaatgcattggatatgtgatgcacatctaggatgtacgacgcattgctgttgttgtgatggtcagtttcagggacagttgtctagcaccatgtctggtaacaaacacataggggcttctggcggttccactgtgaattatattaactcgactcggaccgatg

SEQ ID NO: 8523 - DNA, 203 bp, synthetic construct
  source 1..203: mol_type = other DNA
ggcgcgccagtcctattatggtgctgagtatgcaaatgcagcgaatgcccccacccaaaacttggatccagcagccttcactgacccagtcacagagttagcttcctctagttttgtacccgatctacaaagcccatctgctgaacaatgtgggtactctgatcgaattttgatggttacggccggtacgactcggaccgatg

SEQ ID NO: 8524 - DNA, 203 bp, synthetic construct
  source 1..203: mol_type = other DNA
ggcgcgccagtcctgtgccacgcttgtgttgccatatcttaacatcacaccagcgtgtctacccaaaatccattgtccatggtcattgaacttgatcatcctggctgacctggactatgctgcaggcgctgccaccactattccaataacggtatcagttgccccccagtgttctgagttcgctggcccgactcggaccgatg

SEQ ID NO: 8525 - DNA, 203 bp, synthetic construct
  source 1..203: mol_type = other DNA
ggcgcgccagtccttttcaccaaatggttctgtggcgccccccgataccgaatcacaatgggcaacatcccttaacccagtgacaacatttagattgcagcaaaattggtctagtgtccgaatcccgtttttatctactgctcattatttctccaccttctttaacggttatggcacatttgataaaacgactcggaccgatg

SEQ ID NO: 8526 - DNA, 203 bp, synthetic construct
  source 1..203: mol_type = other DNA
ggcgcgccagtcctacctgattaagggaattgaaaagaccattctggcctttgaaccggaagatgacaatcatggggtcctcgatgtccttgagtgggtcacaaagttagtgtgcgcaacaacgataatcgtcagggggcaccatgacccagccatagtgacctcatgttgcgtaatgttgggtgtagcgactcggaccgatg

SEQ ID NO: 8527 - DNA, 203 bp, synthetic construct
  source 1..203: mol_type = other DNA
ggcgcgccagtcctttaaagagctgatagattgggtcaaggatctggttgtcaaaatgaagcaccaggaaactatggctgatgaattgaagttttatcttaatgagtggtttctgtatcagaaggacccatccaaatttacgcgtggttctgttatcaaattgtgtgataaattactagagattaaagcgactcggaccgatg

SEQ ID NO: 8528 - DNA, 203 bp, synthetic construct
  source 1..203: mol_type = other DNA
ggcgcgccagtcctgtaaggcattgtctaaattttatagagttcaagaaccctactcgctcccacctgatccaaagtattttgatggttataaagggcagatggtcacaatcatggatgacttgggacagaaccccgacggagcagatttccaattcttgtgtcagatgatttcgacagttgacttttcgactcggaccgatg

SEQ ID NO: 8529 - DNA, 203 bp, synthetic construct
  source 1..203: mol_type = other DNA
ggcgcgccagtcctacccaccgatggctgacttggcagataaaggagcaccatttattagtgattttgttctagcatccacgaatttgagaactttcaatcctccaacgatttcagacgtaggagcaataaaccggaggtttttcattgacacaaccattgatctgagtaaggactattgcaatgcagcgactcggaccgatg

SEQ ID NO: 8530 - DNA, 203 bp, synthetic construct
  source 1..203: mol_type = other DNA
ggcgcgccagtcctctgggaaattggatgtgcagaaggcattggcgaagtgtgatcatgaggtggatgtgctttacactaagcattgttgcccactactctgtgggaaagcggtaaagttggtggacaagaagggaaacaagttttcggtgaatgaagtgattggattactggtctcggaggctgagacgactcggaccgatg

SEQ ID NO: 8531 - DNA, 203 bp, synthetic construct
  source 1..203: mol_type = other DNA
ggcgcgccagtcctgaaaaagaaaagttgggatcaatgttgacggtttatttcagggaccaaccgctccaaaaccaattctggagactgtgacagttagtggttcagctttgcccgaggatgttgctgatgctttgatggccaatcaagccggagacaatttgattgatcaattggaacaggcaggatcgactcggaccgatg

SEQ ID NO: 8532 - DNA, 203 bp, synthetic construct
  source 1..203: mol_type = other DNA
ggcgcgccagtcctcacaactgcaaaaaccggtggttgggaccgttaatgtacaaggaccaggagcaccaaatccagatttccagtttgcccaaaagatccaaaagaagagcttacttccacttgtgactggagcaggcccctacacggcagtgggaatttttggtagaacagttctgctcccgaagccgactcggaccgatg

SEQ ID NO: 8533 - DNA, 203 bp, synthetic construct
  source 1..203: mol_type = other DNA
ggcgcgccagtcctactatgtggaacaactcaggcccctgttaccagaggatgtcactgagcccctgaccctagatcaggccattgaagggtaccatggattgcaaaaattggactcggccacaagtgctggttttccctacaacaccatgggaataacaaagaaacaattgatggcaaatgacaggacgactcggaccgatg

SEQ ID NO: 8534 - DNA, 203 bp, synthetic construct
  source 1..203: mol_type = other DNA
ggcgcgccagtccttcttttgtgaaaacccaggcacagcgaccgggatggctgttggatgcaatccagacagggattggactagatttcaagctgaatttgattcttcatatgtgataagctttgactacaaaaattttgatgctagtctatcaccaatgtggtttgccgccctgcaaggagtactgccgactcggaccgatg

SEQ ID NO: 8535 - DNA, 203 bp, synthetic construct
  source 1..203: mol_type = other DNA
ggcgcgccagtcctagggacttggatttgatgagaatgatgtcgaattcatcattgaccacatgtgcttttccgtccatttatggggtgacaccttcgtgcacattgaaggtggaatgccatcaggttgctccggaacatccatctttaacagcatgatcaacaatatcattttgaaaacaatcattccgactcggaccgatg

SEQ ID NO: 8536 - DNA, 203 bp, synthetic construct
  source 1..203: mol_type = other DNA
ggcgcgccagtcctccttggagctgcacaccttcctcaaacgcggcttcaagagagatgatgaatttgatttcttggtgcatccaaccatggacaagacagcaatctatgagtcgctgcgctggacgcgcgaccccaaggactttcaggaccatgtccgatgtctgtgtgaactgatgtggcaccatgcgactcggaccgatg

SEQ ID NO: 8537 - DNA, 203 bp, synthetic construct
  source 1..203: mol_type = other DNA
ggcgcgccagtccttaggagatgtctacaacaggctcgcccatgagtagagcatggactgcggtgcatgtgacttcggtcaccacgggcatagcattgctcacccgtgaatcaagtcatcgagatttctctgacctctgaagtgcactgtggttgcgtggctgggaatccacgcttgaccatgtactgcgactcggaccgatg

SEQ ID NO: 8538 - DNA, 203 bp, synthetic construct
  source 1..203: mol_type = other DNA
ggcgcgccagtcctcaatctatcatccacccttctaagcctgtccagaaggatcctgaggacatcctcgaggattccgaatggccagacaacatcttacaccctgaacccccttcttttactaccgatgctgagcaaaattggcatgaccgcttggcatctgcttccttgcctggacccacccaggcacgactcggaccgatg

SEQ ID NO: 8539 - DNA, 203 bp, synthetic construct
  source 1..203: mol_type = other DNA
ggcgcgccagtccttccaccgctcctgtggtctgtgcttaccctcccaccccttctgttcctcttcctaatccagatgctccctctgtccctggtccgtctggtgaccgtacttggctgttggacactctcgaatggaccactgagaatccacaactgtggaacttggctggtccaaacgggatgcaacgactcggaccgatg

SEQ ID NO: 8540 - DNA, 203 bp, synthetic construct
  source 1..203: mol_type = other DNA
ggcgcgccagtccttattctgctctccaaaacctcactttccctgtttcttcttctgctaattggggaacacaagataactccccacccactgcctaccctctccctttctcttttgtccacgcttatccagactgcccttggacggctatgcatgatacccactctatgtggaattgtggatggcgccgactcggaccgatg

SEQ ID NO: 8541 - DNA, 203 bp, synthetic construct
  source 1..203: mol_type = other DNA
ggcgcgccagtcctatccaagtggtggttaatggttctcagtttcatgctgggtgtttagcattggtcatggtccccgagtactccgccggagagctcgcccagggccgtctaaatgccatcttcacttttccctacgccctcctcaacctctaccaaggtaacaccgcctcaatagaggtcccttaccgactcggaccgatg

SEQ ID NO: 8542 - DNA, 203 bp, synthetic construct
  source 1..203: mol_type = other DNA
ggcgcgccagtcctaacactggtttttctcttctccttggtctgggcgctctcgccctcctgtctggttgcgcagccgtgcaagcgtcgaaaggacgcgtgacccgacagggcctcctctctcttgaagcccccccagaggtcgtccaggctgctaaccgtgtcgctgactccattgagaccactgcccgactcggaccgatg

SEQ ID NO: 8543 - DNA, 203 bp, synthetic construct
  source 1..203: mol_type = other DNA
ggcgcgccagtcctgtttcctccagcctgaacggtttcactgatatgctctcttccttttccaagaccttcactcaaggtgcttccaaagtgctgagagatggtatctctaccttccttacctgggtggccaaagtctttggttaccttcttgtcctctttggatctcccactccgatgtccatagctcgactcggaccgatg

SEQ ID NO: 8544 - DNA, 203 bp, synthetic construct
  source 1..203: mol_type = other DNA
ggcgcgccagtcctggtctattggtcatcatctgtgctgaccttgctcctcaagcctctgaatacttccactcttgtagctctgtccttggttccctttactactggattgctaccaagcttggtctctctgtcactcctgaggaggcacacgcagcaacggtagaacaccaaggtgttcgtgactaccgactcggaccgatg

SEQ ID NO: 8545 - DNA, 203 bp, synthetic construct
  source 1..203: mol_type = other DNA
ggcgcgccagtcctattctttctgagtctaaacctgtacccacttccctttcctttgagcgggctgtctcacagaatgctcctctttcggtggttaaccagctctggaactaccgaaaacccatctttgcctgtactactttccttactgtgattggtttcgttcttaccatcattgctgtggcgcgtcgactcggaccgatg

SEQ ID NO: 8546 - DNA, 203 bp, synthetic construct
  source 1..203: mol_type = other DNA
ggcgcgccagtcctgacaatgtctatcccattgctactgaatcccctactattggtcgcagcgcaagctgtggcttctttcttttctctcgattctttctagcccctactcatatcatcccggatgatacgacccgcatctctgtaggtccagatgtctttgactgggcgacactccaacacaaacgccgactcggaccgatg

SEQ ID NO: 8547 - DNA, 203 bp, synthetic construct
  source 1..203: mol_type = other DNA
ggcgcgccagtcctctgggaaaagaactcactatcatccattttcctactattcgccaacatcgtgacctccgtcgctttattggtgaacatccctaccctactggacatcttatttctactctttctggtcctcctgtctacctacgattctccaagaaccgttgggttactcttgaccttcctggccgactcggaccgatg

SEQ ID NO: 8548 - DNA, 203 bp, synthetic construct
  source 1..203: mol_type = other DNA
ggcgcgccagtcctcaggcagcaggttacccgtggaacaccatggggcgctcgcgccgttcactctttgtccaacagaatgggatgtggttacctcttccagagttggaagttgaaatcaacaaaactcttgaagatccctattacttctactctactttccttaaagatgaacttagacccacctctcgactcggaccgatg

SEQ ID NO: 8549 - DNA, 203 bp, synthetic construct
  source 1..203: mol_type = other DNA
ggcgcgccagtcctccgtcattcatcaaggagttttatgacaagcacacaccacttgttgtaactccagcaaataaaacagacaccttcccggaaaactccaccatctatgacgtcacgtttctgaaacgttggtttgtgcctgatgacattcgaccattctatatccacccggtcatggacccagaccgactcggaccgatg

SEQ ID NO: 8550 - DNA, 203 bp, synthetic construct
  source 1..203: mol_type = other DNA
ggcgcgccagtccttatcttcagacccgctggttaaacctcctggcagcgtgagacaccagatacactcttgctctgtatcgctttgtgtagaatagactcatgctttcctaagaccggaactctcatccggcactttcacccacctgccctgccttcattttgaagctgcacccagggaggtggtcccgactcggaccgatg

SEQ ID NO: 8551 - DNA, 203 bp, synthetic construct
  source 1..203: mol_type = other DNA
ggcgcgccagtcctgaaaccagtgacacggagagggtggccagtcagtgaggctttgactgctgtgggattgacattcgcgttggcaggaggaatagcccagtttgatgacagcagcatggcgattccattagccgttggcgggattatgctggtggtggcagtggtaacaggcttctctacagacttcgactcggaccgatg

SEQ ID NO: 8552 - DNA, 203 bp, synthetic construct
  source 1..203: mol_type = other DNA
ggcgcgccagtcctaagcaatgaaggtgttggcgacatttaagaaaattcttggaaatctgatgaaaacccttcaaacccggaaaaagagaccgaatagacgatctgctgggagtaatggaatgatgatgctagccttgattgggactgctatggcagccacgagtatgactaaagacgataccatctcgactcggaccgatg

SEQ ID NO: 8553 - DNA, 203 bp, synthetic construct
  source 1..203: mol_type = other DNA
ggcgcgccagtcctgtaaggggatttctgttgtactgacctatggaaggtgcaagactaattccactaccccggcacctcagcgtcgcagatcaagaagatctatcatgatacctacacacagtacgggtggattgcaccaaggaaccgaaggatggcacaggaccaataatgtgaagaacttcctcacgactcggaccgatg

SEQ ID NO: 8554 - DNA, 203 bp, synthetic construct
  source 1..203: mol_type = other DNA
ggcgcgccagtcctaaggggtgtcaggaggtacctgggtagatgtggtcttggaccgtaaaggatgcgtgacaatatcagcaaccggaaaaccgaccatagacgtacggatggttaagatggaagcctccaatttggcatccgtgcgaacatactgtctggaagcttccacctcggaaatttcatccgcgactcggaccgatg

SEQ ID NO: 8555 - DNA, 203 bp, synthetic construct
  source 1..203: mol_type = other DNA
ggcgcgccagtcctttgaatgcctgatggactttgggattgatttggatgacgtttacacggccgatatgtcaggaaagtggtggttggttaagcgtgattggtatcatgacattgctctcccatggacagcaccctccgctgacttttggcatgacatggacagattggtggaatttagcacaccaccgactcggaccgatg

SEQ ID NO: 8556 - DNA, 203 bp, synthetic construct
  source 1..203: mol_type = other DNA
ggcgcgccagtcctatgccactaagcagagtgtgtataccctaggtgaccaagaaggagccatgtccactgccctaggtgatgcggccgttattgaatacatgtcatcaggaagcaaggtggtctttcgtacagggttcctaaaatgtagagtcaagatggaaaatctgagattgaaaggctccacatcgactcggaccgatg

SEQ ID NO: 8557 - DNA, 203 bp, synthetic construct
  source 1..203: mol_type = other DNA
ggcgcgccagtcctatatgcaatgttccaaggagttctctattctgaagaggcccaccgccaccccgtatggaactgtcatcatgcaggtgaagtacgcgcagactgatgtcccgtgtcgtgtgccagtgggcgttcatgagaggccaggtggtgagcaagttggacgtattataacagcccatcctacgactcggaccgatg

SEQ ID NO: 8558 - DNA, 203 bp, synthetic construct
  source 1..203: mol_type = other DNA
ggcgcgccagtcctggaacacttttagggttgaggagtttggcacgggaatcatgaaaacaaaagtgtttttggatataaacccgactttaacgagatactgcgataccgaattgcttggagcagctgtgaaaggaaaccattctgctcatggtgatcctggtttgtggatggtctctgagaaagaagcgactcggaccgatg

SEQ ID NO: 8559 - DNA, 203 bp, synthetic construct
  source 1..203: mol_type = other DNA
ggcgcgccagtcctgaagtgagtggaaactcacgagcctgtcactatccgagagtaggaggtgtttgtggcctgattctcatactgtctggggacgtggagttgaagagaccaaactcatccttcctgccaatcttggagggccagtgtcacacatgaacactagatatggctactcaacccagatctcgactcggaccgatg

SEQ ID NO: 8560 - DNA, 203 bp, synthetic construct
  source 1..203: mol_type = other DNA
ggcgcgccagtcctctggaccatggaacaatgttccactagacgtggtctttgagacctgtcctggaacgacggttaatgtcactagaacatgtgtggggagatcggcatcggcaaggtcaacaactgacagtgggaagatcataccggagtggtgttgcagagcctgcaccatgcctcccttgacatcgactcggaccgatg

SEQ ID NO: 8561 - DNA, 203 bp, synthetic construct
  source 1..203: mol_type = other DNA
ggcgcgccagtccttccctggaatggtttcgaaagccttaccccttttatgttgtctggctccgttgcctttagctgttatgactaacgccacgagagctagtgtggcaactttggcagttggaaccatgttggccggtgccaagggcaagtcagtgaaaaaatccctaccatggttttcagctttgacgactcggaccgatg

SEQ ID NO: 8562 - DNA, 203 bp, synthetic construct
  source 1..203: mol_type = other DNA
ggcgcgccagtcctctgcggcccttatattcaccgcatatgccataagcggcaaggccaacgacatattccttgagaaagctggtgagatgacatggagccatgatgctcagctatctggatcaagtccaagagtggacgtcaaagttggtgagagtggggattttcggcttcgccacgagtctgaagcgactcggaccgatg

SEQ ID NO: 8563 - DNA, 203 bp, synthetic construct
  source 1..203: mol_type = other DNA
ggcgcgccagtcctactcgtggctgaaaacaggcgtaacagctggctgtctcatcatggccggcttccatccccttgccataccggttgcgggattgatttggtatggatatgtgaaacatgaccgtagaggtggagtcttgtgggacattccacacccatcaacatccaaagccggagacactgagacgactcggaccgatg

SEQ ID NO: 8564 - DNA, 203 bp, synthetic construct
  source 1..203: mol_type = other DNA
ggcgcgccagtcctgctatggtggaccatggagattgaatggaacgtgggacgggactactgaagtgcaacttatagcagtgtcacctggcaaagttcctatcaacgtccaaacgaaacctggaaaattcgtgctcactgatggacgtgagataggagcagttgtgttggactatccgcccggaacatcgactcggaccgatg

SEQ ID NO: 8565 - DNA, 203 bp, synthetic construct
  source 1..203: mol_type = other DNA
ggcgcgccagtcctatttgcatccaggcgctggtaagactaggcgagtcctacctgagatactgcgtgaagctgtgaagaaaaatctgaagacattggtccttgcacccacacgggttgttgcacgagagatggctgaagcattagctggactaccagtgcggtaccaaacaccatctgtcagtcaagcgactcggaccgatg

SEQ ID NO: 8566 - DNA, 203 bp, synthetic construct
  source 1..203: mol_type = other DNA
ggcgcgccagtcctactcaaccggtcgtgaactaatagacttgatgtgtcatgcaacattcacgtatcgtcagttgactcctggacggatggtgaattaccaattgtacgtcatggatgaggcccatttcacggatcctgcgagtattgccgcacggggaatcatttcaacaagagtcagtcttggggcgactcggaccgatg

SEQ ID NO: 8567 - DNA, 203 bp, synthetic construct
  source 1..203: mol_type = other DNA
ggcgcgccagtcctaagctgcagccatgttcatgacagccactcctccgggaacgacagacgctttccctgagtcaaacgggcatatagaagatgaagaaagggaagtgcctgatgctgcttggagtgctggctttgattggataaccgaattcaacggcaaaaccatttggttcgccccatccattacgactcggaccgatg

SEQ ID NO: 8568 - DNA, 203 bp, synthetic construct
  source 1..203: mol_type = other DNA
ggcgcgccagtcctatggagacatggcgcattggattgaggctaagattctcatggacaacatcacagtgcctgggggactttatcctcaattctatgaacctgagcgaatgaaatgtccagcgaccgatgggtttcacagacttgatgacaagaaaagggctgttcttcgcgatctcataaggcgcgcgactcggaccgatg

SEQ ID NO: 8569 - DNA, 203 bp, synthetic construct
  source 1..203: mol_type = other DNA
ggcgcgccagtcctaccaacgagtctaccaggaacgtgcttctttgaaaagtttcacggaatttgcagagggcagaaggagttacatgcctattttagatgtggttgggaaactgccccagcattttagtgatcgtgccattgatgcagctgacactattcgaactgttctcacagccaatcctgactcgactcggaccgatg

SEQ ID NO: 8570 - DNA, 203 bp, synthetic construct
  source 1..203: mol_type = other DNA
ggcgcgccagtcctcacgatcttaccgactggcaatagacaatctgccggaagcggctgaaactgctatgcttataggcatgctggtttctgtcaccatgggttccatcatgtttttgatgatgcccaaaggcataacccggatgtccttgggattgattgtcatgattatggcaacttggttcatgtcgactcggaccgatg

SEQ ID NO: 8571 - DNA, 203 bp, synthetic construct
  source 1..203: mol_type = other DNA
ggcgcgccagtcctcgttgatgcacttcgcccttatcctacccggattgaaagctaaagctgcccgggaagcacaaagtaggaccgccgctggaatctcaaaaaatcctttgatagatggtgtgaatactacggcgattccactcccatcagccattgaccctatgtttgagaaaaaactcggactgtcgactcggaccgatg

SEQ ID NO: 8572 - DNA, 203 bp, synthetic construct
  source 1..203: mol_type = other DNA
ggcgcgccagtcctggatgttgcttatagtttcgtctctagcggtgcttcttaatcgaagcacgctgcatatgactgaacttggaatccttggctcagctgctatatctcctctaatagagggacaagcttcggccatctggaacacttcagttgcagcctccgtgtgtaacttgatgcgtgggagctcgactcggaccgatg

SEQ ID NO: 8573 - DNA, 203 bp, synthetic construct
  source 1..203: mol_type = other DNA
ggcgcgccagtcctagaagaagattgtgcgcgtcaaaggatacacaaaaggtggaccaggacatgaggaaccagtgcccgttcaatcatacgggtggaacctcgtaacgatgaggtccaacgttgatgtgttctacttagggactgagaaatgcgacacgctggtttgtgacataggagaatcatcatcgactcggaccgatg

SEQ ID NO: 8574 - DNA, 203 bp, synthetic construct
  source 1..203: mol_type = other DNA
ggcgcgccagtccttagtgaaagagatgtcaaaaccgtgggacacgatttatggagttacaagtgtttgcatgacagacactactccattcggtcagcagcgcgtgtttaaggagaaggtggacaccaaggctagtgaaccaaaggcaggcatccgtgaggttatgcgcataactaaccgttggctcccgactcggaccgatg

SEQ ID NO: 8575 - DNA, 203 bp, synthetic construct
  source 1..203: mol_type = other DNA
ggcgcgccagtcctctaacctaaaagtccagcttatacgcatggctgaatctgaaggcgtcattcatggagatgacgttgaaacactatctagcagtgggcgtataaacttggaaatgtggcttgtcatgaacggggcagaccgtcttaagcgcatggcatgcagtggtgatgatgtcgttgtaaaaccgactcggaccgatg

SEQ ID NO: 8576 - DNA, 203 bp, synthetic construct
  source 1..203: mol_type = other DNA
ggcgcgccagtcctaggacatctcctgcggttcgctcatagggacacggtctagagctacctgggctgataacatcaagacagcagtcaatcaagtccgtggaatcataggaagggacgaaaagtatatggactatttggccattcaaaatcgcttcatgccccctctccaatttagattgggaagcgcgactcggaccgatg

SEQ ID NO: 8577 - DNA, 203 bp, synthetic construct
  source 1..203: mol_type = other DNA
ggcgcgccagtcctgatgttgggacctggttatccattaagacagcagtcgggaacggatcatgcatcgttatggctacagatgtggggacttggtgtgaagacactgttacgtatctttgtcccaaattggacggtgctgctgagcctgacgacattgattgttggtgtaaagttgtatcagtttatcgactcggaccgatg

SEQ ID NO: 8578 - DNA, 203 bp, synthetic construct
  source 1..203: mol_type = other DNA
ggcgcgccagtcctgttacctatggtaggtgtagacgagatggggtgagtagacgcagcagacgatctgttgctctcgcaccgcatgggacaggaaaccttcacacaggagaggcaccaatgtggaaatcacacactgacgctagtaaatacttgcagcgagtcgaacggtgggctctgagaaatccacgactcggaccgatg

SEQ ID NO: 8579 - DNA, 203 bp, synthetic construct
  source 1..203: mol_type = other DNA
ggcgcgccagtcctgttttggacgtgcacgggtgtgtgactattgcagcagaaggtaaaccaacagtggatttcaagttgacgaagttggagatgacgaaacttgcaaaggtgcgagcgtactgcctcactgcctccgtatcagacatcacagtcgaaagtggatgtccaggaacaggcgaaattcatcgactcggaccgatg

SEQ ID NO: 8580 - DNA, 203 bp, synthetic construct
  source 1..203: mol_type = other DNA
ggcgcgccagtcctgagcaagtcttgatcgtagacacagcctcacgctggtggatggtcaagagagactggttccaggacttagcacttccatggacatcaccgtcagcagacttctggcatgatcgtgaccggttagttgaatttggagttccgcatgctacgcgacaatctgtatactccattggacgactcggaccgatg

SEQ ID NO: 8581 - DNA, 203 bp, synthetic construct
  source 1..203: mol_type = other DNA
ggcgcgccagtcctgatcaagaaggagcatttttcactgccgtggcaaaagccccgtcagtcgagtggaactctgacaaagtcaagttagcgaccggattcctgaaatgcagaatcaagcttggcaacatgaagctgaaagggtcaacatacgtcacgtgtgcgcaagcgttcacctttgcgaagcggcgactcggaccgatg

SEQ ID NO: 8582 - DNA, 203 bp, synthetic construct
  source 1..203: mol_type = other DNA
ggcgcgccagtcctccagtggacacaggtcatgggacagtcgtgttccaagtatcatatgctggaacagatgcgccatgtaaaataccagtggccgtgactgacaaaccaaacggcgagcatgtcgggagattggtgacagcacacccattcatagcgaaacagaatgagaaggcagtcgttgaagttcgactcggaccgatg

SEQ ID NO: 8583 - DNA, 203 bp, synthetic construct
  source 1..203: mol_type = other DNA
ggcgcgccagtcctacccgaaacacaacaggactgcagtacggatggaagtcgtggggcaagacaatgtttgtttcagtgccaatagccgagaacactttcataatcgatggaaatgatgaaggagagtgtgcctcggacaaacgcgcttggaatacatttaagatagaggagtttggcacaggaatacgactcggaccgatg

SEQ ID NO: 8584 - DNA, 203 bp, synthetic construct
  source 1..203: mol_type = other DNA
ggcgcgccagtcctatgaaaaccaaagtcttcctggatttggctgacgcacaaacagaatactgcgacacggaactgttgggagctgctgtgaaaggcaacaagtctgttcatggcgaccccggattgtggatgactgcttctaaggaatcaggcgactggaaactggaatcattgtcaatgacggagcgactcggaccgatg

SEQ ID NO: 8585 - DNA, 203 bp, synthetic construct
  source 1..203: mol_type = other DNA
ggcgcgccagtccttcaccacgggaaagtaccattttggcttcagcagcagtcgttctgcaaatttgtgcggctgcatggcaatcaacaaagtctatgcaagtgctgaatgctcttgctatgggatggctgtacatcagagccattgtggtacccggagctctttccaaagcaatgcccctcatttgccgactcggaccgatg

SEQ ID NO: 8586 - DNA, 203 bp, synthetic construct
  source 1..203: mol_type = other DNA
ggcgcgccagtcctatgtgcgtcccaggcgtgttgagcctgacgccacatgctataagagtcagcatggttacaatagcggcaggcactctcatcaaaggcacgaagggaacatcagttcggaagcacatgccctattttttaggactagtaggagccgtggccggactggatccattaggtatgcttcgactcggaccgatg

SEQ ID NO: 8587 - DNA, 203 bp, synthetic construct
  source 1..203: mol_type = other DNA
ggcgcgccagtcctggttctacgcaagtaggagtgggagtgatgaaagactcagtgtttcacacaatgtggcacgtcacccgtggcgcctctctaacgagtggtaacggtagaatggatccatattgggcggatgttcgagaagatctcatcagctacggtgggccatggaagctcaacagcacttggcgactcggaccgatg

SEQ ID NO: 8588 - DNA, 203 bp, synthetic construct
  source 1..203: mol_type = other DNA
ggcgcgccagtcctggaactcttgatgcattcccagaatccaatagccatattgaagatgaggaaagggaaattccagacaaggcatggagcaccggattcgaatggattacagattacacaggcaaaactgtgtggtttgttccatcaattcgaactgggaacatcatagcgagctgcctcgcgaggcgactcggaccgatg

SEQ ID NO: 8589 - DNA, 203 bp, synthetic construct
  source 1..203: mol_type = other DNA
ggcgcgccagtcctgtcccttctgagagagtagtgttgggatctccaaaacccataagcccagctagtgcagcacagcgtagagggagagtgggtcgagaccccactcagcttggtgaccagtacatttacggaggcgaggttggtgacgacttctccaacatggtgcactggacagaagcgaagatccgactcggaccgatg

SEQ ID NO: 8590 - DNA, 203 bp, synthetic construct
  source 1..203: mol_type = other DNA
ggcgcgccagtcctttaatggacaacatcatggtaccaggcggtctgtacccacagttctacgagccggaggctgacatgctaagtgaaacggatggacacttcaggctggatatgaccaaacgtgacgtattcaaggatttggtgcgcaaggcagacttacccatatggctggcttatcaggtggcccgactcggaccgatg

SEQ ID NO: 8591 - DNA, 203 bp, synthetic construct
  source 1..203: mol_type = other DNA
ggcgcgccagtcctaagcatggtcatgaatacaaagacagaagctggtgccatagtgggccatctggacatctcatctacgatgattacggacagacagttgaatacaagcttgtgaatggcgagaggaagatactgcaaccaagatggattgaccaacgcacataccaggagaaaacagcactcaagcgactcggaccgatg

SEQ ID NO: 8592 - DNA, 203 bp, synthetic construct
  source 1..203: mol_type = other DNA
ggcgcgccagtcctgctttcatcgaatttgctgagggacgccgaagttatgttcctataatagaagtgctcggcaaacttccacagcatttcgccgacaaaactattgatgcggctgacaccttcaagactgtgcttacagccactccaggaagtagagcatacaggcttgcagttgacaacctaccccgactcggaccgatg

SEQ ID NO: 8593 - DNA, 203 bp, synthetic construct
  source 1..203: mol_type = other DNA
ggcgcgccagtcctgatgcagcagagacggcaatattcgtgacgatggtagggttcatgaccatgggaatactaattttcctgatggcacccaaaggcatgacacgcatgtcgctgggattcatgaccatcatggcagctacgtattttctgtgggcttcaggcatggctggatatcaaatagcggcacgactcggaccgatg

SEQ ID NO: 8594 - DNA, 203 bp, synthetic construct
  source 1..203: mol_type = other DNA
ggcgcgccagtcctcaagcaggaatactgctatcaatggataaaggaacgccatttttcaacttggactggggcgtcattctgttgggagtggggtgttggtctagcataacggggacaaccttgttgtgtgcgatcggactctcctgcgttcacttctcaatgactctacctggagtcagggctaaacgactcggaccgatg

SEQ ID NO: 8595 - DNA, 203 bp, synthetic construct
  source 1..203: mol_type = other DNA
ggcgcgccagtccttcgctaaaaggggttccccgtagaggagtcaccataagcaacacccgagggatggaatggaaacgcaaactaaacgcaatgaacaaggaaacctttcagagatacagacgagatgggatagttgaggtggacagaacagcagcgcgggaagctttaaagagtggaaatgtaacacgactcggaccgatg

SEQ ID NO: 8596 - DNA, 203 bp, synthetic construct
  source 1..203: mol_type = other DNA
ggcgcgccagtcctggaggtcacgctgtatcccggggttcagcaaagctcagatggctggtagataaaggatatttacgcctgatgggggatgtcacagacttgggatgcgggcgaggtggatggtgttattacgcagcagctcaaagaaacgttgtatctgtacgaggcttcaccaaaggaggtgaccgactcggaccgatg

SEQ ID NO: 8597 - DNA, 203 bp, synthetic construct
  source 1..203: mol_type = other DNA
ggcgcgccagtcctggacacgaagaacccattccggtgcagacttatggatggaacattgtcactctgcgtagcaaagtggacgttttctacatgcctacacacatgacagacactctattgtgtgacattggagagtcatcgtctaacatgctagtagaagaagagaggaccctacgcgtgctgaatcgactcggaccgatg

SEQ ID NO: 8598 - DNA, 203 bp, synthetic construct
  source 1..203: mol_type = other DNA
ggcgcgccagtcctctggttgaagagtggatcagaaagagtaagccaactcacttttgttgcaaggttcttgctccatacatgccaaatgtattggagaagatagacaagctaatgaaagttcatggaggtgctttagtgagagtgccactctcccgcaacagcacacatgagatgtattgggtatctcgactcggaccgatg

SEQ ID NO: 8599 - DNA, 203 bp, synthetic construct
  source 1..203: mol_type = other DNA
ggcgcgccagtcctctcacgtacatgaacaaggttgtgagagtgatgaggccaggcaagggaggaaagacgctaatggacatcattagcaggaaggaccagagaggtagcggacaggtcgtgacttaccccctcaacacgtggacaaacctcaaggtgcagttgattaggatggctgaaggcgaaggacgactcggaccgatg

SEQ ID NO: 8600 - DNA, 203 bp, synthetic construct
  source 1..203: mol_type = other DNA
ggcgcgccagtcctatggccaagatcagaaaagatatcaatgaatggaagccctcaacaggctggaacagttgggagggtgtgccgttttgttcacaccatttccacaagctcagcttaaaggatggaagaacactcacagttccatgcagagatcaggacgaacttattggaagagctagagtgtctcgactcggaccgatg

SEQ ID NO: 8601 - DNA, 203 bp, synthetic construct
  source 1..203: mol_type = other DNA
ggcgcgccagtcctcctggagcagggtggacgttgcgagaaaccgcaggactcagtaaggcgtatgcgcaaatgtggatgctgatccacttccacagaagggatctacgaaccatcgcgttcgcaatttgcagtgcagtgcctaaagactgggttcccacaggaaggacatcgtggtccatccatgctcgactcggaccgatg

SEQ ID NO: 8602 - DNA, 203 bp, synthetic construct
  source 1..203: mol_type = other DNA
ggcgcgccagtcctcccgagctggacaaggcatgtgtactagcggttagaggagacccccccaaaaatgaagggcactatatcgacacttgggaaagaccagaggtactcgctgattcaccgccaccagactacacggcacagcgcgccggaaaaggtagtttggaggttgtaaaacaacaagtatctcgactcggaccgatg

SEQ ID NO: 8603 - DNA, 203 bp, synthetic construct
  source 1..203: mol_type = other DNA
ggcgcgccagtcctgcttttgaccagtggctctgggttacttagccaagtccctttctcttattttcactagtttatgttgtgtgttgtctgttttgttttgtttaaattgtatacaagatccttcccgccgacacagacctcgacagtctggtgtaggagggttggtgatattaatttgccccaaaacgactcggaccgatg

SEQ ID NO: 8604 - DNA, 203 bp, synthetic construct
  source 1..203: mol_type = other DNA
ggcgcgccagtcctgagtgaccgtgatacgtggaaaccatgagtacatgtgtatccgtggaggatcgcccgggactggattccatatcccattgccatcccaacaaacggagggtatacccaccacgtgcgcgtttgcagtgggaatctgcaaatttagtcatactgcctgatagggtgtgggcctgccgactcggaccgatg

SEQ ID NO: 8605 - DNA, 203 bp, synthetic construct
  source 1..203: mol_type = other DNA
ggcgcgccagtccttgcttttggaagaatcggtcgtttcctgcttatggcacatcacgatattttcagttctttcgtggttcgttccatattaagattcaggtcaatgctgctgcaggttctgccggttcttttgtcgttgtctatgtgccaaatgaccattatcagagttggaataataaggatttgcgactcggaccgatg

SEQ ID NO: 8606 - DNA, 203 bp, synthetic construct
  source 1..203: mol_type = other DNA
ggcgcgccagtccttgtatttttgattggcaggctagccatgctccaacaaccaagtctccgatttttgggcgtggctataagatacgagagcttggtaatttgggtccattgtcaacagcctatcagttttggcgtggttctattattttcactctcaccatttttgctagcagttttcaccgtggccgactcggaccgatg

SEQ ID NO: 8607 - DNA, 203 bp, synthetic construct
  source 1..203: mol_type = other DNA
ggcgcgccagtcctaacgtgtatgttgaaacccgattggctcacaataatgcatcttccaacgttataaaatgcgcactttttgtgcgtggcggcgaggattttgagttcttggcgccatgcggtgacactgtcaagttccatggttggggatcggatatggatgaagctgatcctttggatgacatgcgactcggaccgatg

SEQ ID NO: 8608 - DNA, 203 bp, synthetic construct
  source 1..203: mol_type = other DNA
ggcgcgccagtcctatatttgccaaagatcatatgcaccttgattatttctttggtcgtggatggtatgtcatgaaacataactatgagggcgagagccgtgcccctttttatattgatgtggatgctccatcgtctatgccaggcgctgcaatgaatttcttttctttctgggctggggaggttaaccgactcggaccgatg

SEQ ID NO: 8609 - DNA, 203 bp, synthetic construct
  source 1..203: mol_type = other DNA
ggcgcgccagtcctttccatgttgtcaacaatagtgatgacccaatggctgtcactcatagttattcgcatgaggctagcactgttggtcccgctgaaggtctagggttgataattgtgccgcctcgtgagatgatatcatttgcagcccctttctattcctggtcgccattgcggactgtgcttgctcgactcggaccgatg

SEQ ID NO: 8610 - DNA, 203 bp, synthetic construct
  source 1..203: mol_type = other DNA
ggcgcgccagtccttctgaattttctagtgtaagacttgtgtcgtctcaaacagccgcttttgtggatgccctttttaatggtgatttgtataaactctctgaacaattcctttcaatgatggatattggttctgattctgactataaacaattaatcaaggagacgttgggatcgtaccctcctgaacgactcggaccgatg

SEQ ID NO: 8611 - DNA, 203 bp, synthetic construct
  source 1..203: mol_type = other DNA
ggcgcgccagtcctatgaacccatttgagtcacagagtttggctgcatttaatgctttgtccttgagtgctcgtaattgtacatggtggattgagctcttccagaaattgcacacgttcgtgcgtgacttattgaaaccagatacttcggcaaagtttcatgaatggtgtaggaaaaataagatgctccgactcggaccgatg

SEQ ID NO: 8612 - DNA, 203 bp, synthetic construct
  source 1..203: mol_type = other DNA
ggcgcgccagtcctgacatgcgtaagagcatgttagctgttaagctagggcaagaatatcagaatacgtgtgctcgtgaggagccccttggtgtgctgctacgtggcgaacctggacaaggaaaatcctttatgacacatctgctcgtgcgtagtgtttgcaatgctatgggctggaaggtttctgagcgactcggaccgatg

SEQ ID NO: 8613 - DNA, 203 bp, synthetic construct
  source 1..203: mol_type = other DNA
ggcgcgccagtcctagtgtgtttagccaccctacatcaagtgagttctttgatgggtatgctgggcaaccgattcatcttatcgatgattttgggcagaatgtggaggaacctgaatataaagttttgtgccagtgtatgtcttccataccattttctgtgcctatggcttcgcttgaggaaaagggtcgactcggaccgatg

SEQ ID NO: 8614 - DNA, 203 bp, synthetic construct
  source 1..203: mol_type = other DNA
ggcgcgccagtcctttgccttatacttcaaagttagttattgccacgacaaataaatcagattggtcatctcgtaccttgtgcgctccaggtgctttgaagcgccggtttcctattgtttataccgttcgcgcacggaggactttaaccaagaatggccttcttgatgtcaacgcacatatgagtgcacgactcggaccgatg

SEQ ID NO: 8615 - DNA, 203 bp, synthetic construct
  source 1..203: mol_type = other DNA
ggcgcgccagtcctgatatggtgtcccttcttggccctgctgttccagttgcttcagtgttcgactattgcgctagcactggtgttgtacccatgttaaagcaagcgtcggaatctgtccttaagtggtttgattcgtgtgttgacagcatggtgtcgtttgttacacgtaacaaaaagtggattgctcgactcggaccgatg

SEQ ID NO: 8616 - DNA, 203 bp, synthetic construct
  source 1..203: mol_type = other DNA
ggcgcgccagtccttttggtgctttaactatgagtgtgttaggtattgctatatctatgcttaaggaattggacagccagcgtccctataatcagaccgcccataagatgcctgttactaagctcacgcgtgggcgacgtgtgcttgtttcccaaggcccttataatgaattccagcattattctaaacgactcggaccgatg

SEQ ID NO: 8617 - DNA, 203 bp, synthetic construct
  source 1..203: mol_type = other DNA
ggcgcgccagtccttactgtgtttttctccattctgggtctattacacttcatggccttgcatttggtggtaattcttttttgttttacacacatggccttgctactcttgagcgctatgataattgggtgcttgactataatgggtccatgtttgatttagatattgaaactgtggatgagttataccgactcggaccgatg

SEQ ID NO: 8618 - DNA, 203 bp, synthetic construct
  source 1..203: mol_type = other DNA
ggcgcgccagtcctaagattgaacaaggccttacaaggtgcattgaaagtagcgattttgactatgtttttagtgccaaaagagtcttttgcaagctgttccggcaactttatgattctgaccctattgagactggatttgctgttggtatcaactgtattgctgactggaagaatttgttggacggccgactcggaccgatg

SEQ ID NO: 8619 - DNA, 203 bp, synthetic construct
  source 1..203: mol_type = other DNA
ggcgcgccagtcctatgtatgattacatttatgattttgatctgaaaggatatgatggttctataccacgtcagctcatgatagatgcttgtcgtgtcttgagtgaaagttgtagtgatgaagagttagcctacaatttactccacaaaactgtggattcacagcatgtggtaggtaaccagcttttgcgactcggaccgatg

SEQ ID NO: 8620 - DNA, 203 bp, synthetic construct
  source 1..203: mol_type = other DNA
ggcgcgccagtcctacagtttctggtggaatggcttcaggatcaccttttacaactattgtcaatacagcttgtaatatccttgcaaatatgactgttcttgaggaggagggtgttgagtatacgctagtgtgttatggtgatgatatactagtctccacctccgatcccatttctgtcaatgactatcgactcggaccgatg

SEQ ID NO: 8621 - DNA, 203 bp, synthetic construct
  source 1..203: mol_type = other DNA
ggcgcgccagtcctgttgacaaaatggggcaatattttgggttcactgtcaagcttgatggtgattatcccaagactaaaaataattttacttttctaaaacggagaactacttactggaacggcattccagttggagcgatggaagttggccttttgttgcaacatcttgggtattgtcggtcagtgcgactcggaccgatg

SEQ ID NO: 8622 - DNA, 203 bp, synthetic construct
  source 1..203: mol_type = other DNA
ggcgcgccagtccttccctacccaagccccagtacaccactatggagttctttatatcccagcgcgtggtggacgcactgtgaggtattccgataccaccccactcgcacttcctggatagtgcgttagatatgcccgacatatcgcttccaggaccaaagccccccttttctctttcccaaccagctcgactcggaccgatg

SEQ ID NO: 8623 - DNA, 203 bp, synthetic construct
  source 1..203: mol_type = other DNA
ggcgcgccagtccttcgccactcaagctgtaattccatgtccggtctttccggccttagtatcatggaaatgtggtcgtgctcaaatgaaattgagttgacattgatcaatgaaagttgcactgaactttgctaaactggctagcgccacctggtgtgtgccgttggtctcctcacatggtaacatgtcgactcggaccgatg

SEQ ID NO: 8624 - DNA, 203 bp, synthetic construct
  source 1..203: mol_type = other DNA
ggcgcgccagtccttatggatgaatgagtagaccccctgaaggtaccccattacatgggatctgatcagggccacattctgcgtgtctccccgcacttgtggttaaaaccatgaaagttcatcccaaacaatcttttcctcttctttttcttttagtggtgacaacctactggattggtgattaccaacgactcggaccgatg

SEQ ID NO: 8625 - DNA, 203 bp, synthetic construct
  source 1..203: mol_type = other DNA
ggcgcgccagtccttaacatataatgtaacaggaaataacaattcctttgacactgaccaaggattaatggcttctggatccgttgcagccactggacatggaaatgcttctgccactgatgtaacctcccctgaccccatccaagctaatgccacaaaacccactaaacccaagcccactcgctctacgactcggaccgatg

SEQ ID NO: 8626 - DNA, 203 bp, synthetic construct
  source 1..203: mol_type = other DNA
ggcgcgccagtccttcccctctaaagctgcttcttttgacgttattgctatgacctcctcccgcggtgtagatacccccccttcgacgacccgctctgctgagaaccctgcttcaatcctccaatcggcacgaactcgcaatcagactaatgctatggcatctgatgtaaaggctgaagaaactggttcgactcggaccgatg

SEQ ID NO: 8627 - DNA, 203 bp, synthetic construct
  source 1..203: mol_type = other DNA
ggcgcgccagtcctctgctcccaacacgcaaggactagtgaccatgcccgccgctggttccggcgatggttacacatattcagcccagacccgcgactttcatcccgtgatgcaagccccaccacccctcccgcatgtagatcaccttcccgggcaaatttcatctttttctgaattggcaatgtgtccgactcggaccgatg

SEQ ID NO: 8628 - DNA, 203 bp, synthetic construct
  source 1..203: mol_type = other DNA
ggcgcgccagtcctctcaaactgcatctggtagattgatagtgtcctacaccccccccggttttgctgccccatctaggcttactgatttatccccttctgctaaacatctttgggatttgacttcatgttcttctgtctccatccttatccccaactgtttccctggtggctgggtccctaccctcccgactcggaccgatg

SEQ ID NO: 8629 - DNA, 203 bp, synthetic construct
  source 1..203: mol_type = other DNA
ggcgcgccagtcctttttcaatttcaaaggatttggactcatgcctcagtattccccaatcaagaccaatactcccttctatcaacccccatgcttcctgagcaatgcccgcatcccctccaagcgccaaggaggtgaagccattgacatatctggtgaaccagtgtatgtgattcgggcacctcgcccgactcggaccgatg

SEQ ID NO: 8630 - DNA, 203 bp, synthetic construct
  source 1..203: mol_type = other DNA
ggcgcgccagtcctctttccgcaactgtacccactttgtagaagctttgactggatacaacctgcagaactcaggacttggcataactctaggattaggtgctgctgctgttgccactgcttcagtgggcgtcgcaaaaacgctccttgacgctcacttccgctccctccctcagccccgtccccgtccgactcggaccgatg

SEQ ID NO: 8631 - DNA, 203 bp, synthetic construct
  source 1..203: mol_type = other DNA
ggcgcgccagtcctttaggaattataatactaggatgactgccctcaccaacaatgtccccgccccccgtcccgagcccgttgtcctgtatatctatggtccccctggtactggaaaatctctgcttgctaccctccttgcttcgatttttgcttaccacctttccggtgatccgaacgatgtcttttcgactcggaccgatg

SEQ ID NO: 8632 - DNA, 203 bp, synthetic construct
  source 1..203: mol_type = other DNA
ggcgcgccagtcctcgcaacctcctggaagttatgagtactttgatggataccatggtcaatctgttcacattgtggatgatattggccaggcggtcgatggatccgactgggttcatttcccgcaaatggtgtctacctcacccttcaagccccccatggcggcgcttgaagataaggggatgctctcgactcggaccgatg

SEQ ID NO: 8633 - DNA, 203 bp, synthetic construct
  source 1..203: mol_type = other DNA
ggcgcgccagtcctacttcacctccgattgtcctttccttaggttagaaacttgtaggcttactgtagatatggccaatgtaggagataaaatggatttcaaatttaggcacgtagatcaaattgtagatgaggttctcttgatgattcaggctaaacaccataatatcaatacctttaaacacttgacgactcggaccgatg

SEQ ID NO: 8634 - DNA, 203 bp, synthetic construct
  source 1..203: mol_type = other DNA
ggcgcgccagtcctatgaggatgtgcaagtgcaatcctccattccgactgaagtcgaggaagcgattcgtgaaaacaaaccgctttctttcgtccagaaggtatggagttggcgcaagcccatctttgtcggtaccgctgttctgtccatgattacttctttgtctgtgctcttctctctgacctatacgactcggaccgatg

SEQ ID NO: 8635 - DNA, 203 bp, synthetic construct
  source 1..203: mol_type = other DNA
ggcgcgccagtccttgtgtggtgccccccttgttctttccactcctgctggccctcgccttgtcggtgtacatgtagccggtgtcgctggcgttaccggttacgccgatccacttgtggatcttctgcacgccttcaaggatgctatgccccaatccctaattgtagacattccccgctctggccctccgactcggaccgatg

SEQ ID NO: 8636 - DNA, 203 bp, synthetic construct
  source 1..203: mol_type = other DNA
ggcgcgccagtccttcgctggtagaatgatctttggccaactttttgccctcttccattccaatcctggtatgtttggctctgctgttggttgtgaccctgattttcattggactcccttcgcccattcctttaaacccttccggaatgtgtggtctcttgactattcctgttttgattctaccctcccgactcggaccgatg

SEQ ID NO: 8637 - DNA, 203 bp, synthetic construct
  source 1..203: mol_type = other DNA
ggcgcgccagtcctcctctatcttcaattcgatgatcaataacatttgtgtgttgtctgccctcatctcccgtcctgactttgttcccacccctaacaattataggattcttgcttatggtgatgatgttttgtatgcttgtaccccagacttccacccccgtgatcttaaggctttctatgataaatcgactcggaccgatg

SEQ ID NO: 8638 - DNA, 203 bp, synthetic construct
  source 1..203: mol_type = other DNA
ggcgcgccagtcctggaccccgctgcaagtgacccctgctactaaagaaggtgatttccctaactcctcttctctctctgatgtcacttttctgaagcgatggtttgtcccggatgaaactatcccttactactatcaccctgtgattgagcccgatacttatgaacagagtgttatgtggtctagggcgactcggaccgatg

SEQ ID NO: 8639 - DNA, 203 bp, synthetic construct
  source 1..203: mol_type = other DNA
ggcgcgccagtcctgtggcgaatttcaggataccgtcacttctctctgctttcttgctcaccacgctggtccccgcaactacaccaattggattgctgccgtccgtgatgcttgtaaacgcaatggctatgaccctcccattttcttagaatattcttatcttcagatgcgctggatgcaacttgtgtcgactcggaccgatg

SEQ ID NO: 8640 - DNA, 203 bp, synthetic construct
  source 1..203: mol_type = other DNA
ggcgcgccagtcctctggctaactgcctaggcctgcttggcagtataataaatcaggtgctctggccgagctaaatggctagttgtaggacttacaacctgcacctagggccgccgccatctgggttttcactcaggtggtacctcccatgcggtatctcatactcctaggtctatcccaatgagttccgactcggaccgatg

SEQ ID NO: 8641 - DNA, 203 bp, synthetic construct
  source 1..203: mol_type = other DNA
ggcgcgccagtcctagaaagtgtggttgtcccaatgcttaagccacatttaaacgctcattgggaagagttacctagggagcctgtatgtgttgtaggttatgagatttgttcaaaatgtagcatacaggataggtgttttagaacagtcgattggttacgtccccaagatgtagtgtgtaattcatgcgactcggaccgatg

SEQ ID NO: 8642 - DNA, 203 bp, synthetic construct
  source 1..203: mol_type = other DNA
ggcgcgccagtcctcagtgcggcttcacctaaatgtggtgaagagatggatacagaaagtagttgtgtccgagaagaaggtgaaatggatgtagattatagtgatcctttatctttgttatatgaaggaattcgtcacaattatatccccccagttgattatgagtatgaatgtggagatgataaggtcgactcggaccgatg

SEQ ID NO: 8643 - DNA, 203 bp, synthetic construct
  source 1..203: mol_type = other DNA
ggcgcgccagtccttatatgtactgtagtttgtggaggtatgcgttttgctgctttgggtgattctcattctgaagctcaagtgaatgctgttaaaaatttcttatctgttgttggtcatattatttgtcctgaaacccacatgtttgctttatctactatacctcaacgatcgagtgaatccttggacgactcggaccgatg

SEQ ID NO: 8644 - DNA, 203 bp, synthetic construct
  source 1..203: mol_type = other DNA
ggcgcgccagtcctcatctcttcaacattagcctcatttaagaatgttttagataagatttatgcatggcttccttctactaacccagacattattgcattagttaaggatatttttgtttcgcttttctttgctataatcactcgatctcttacacctttggttcaaggcatatctagttatgctttcgactcggaccgatg

SEQ ID NO: 8645 - DNA, 203 bp, synthetic construct
  source 1..203: mol_type = other DNA
ggcgcgccagtccttgcacctcgctctatccatagtgctgatgcctttttgcgtaggttggatatacaagtgcgtgtggatgtagatagtaagtttgctcggtatgtacccagcgtggcagctcagcggaaagttccagatgaaagtaaaatttggttgcatcagaatcctggtaaaacattgctagacgactcggaccgatg

SEQ ID NO: 8646 - DNA, 203 bp, synthetic construct
  source 1..203: mol_type = other DNA
ggcgcgccagtccttaagactgaagttccactccccgacttacctagtgaattggaagagtatgcaggagctttccctgcagcgcacggttcagcgacaatgtgctttgctactgactggttgggacagttcactaatctgaccgagtccctgaatttattgaacaaaacatttagccctcgtttcgtcgactcggaccgatg

SEQ ID NO: 8647 - DNA, 203 bp, synthetic construct
  source 1..203: mol_type = other DNA
ggcgcgccagtcctttgtaaggtaaaggcattgttgtctgaaggtggttcattgatgcaattagtaggtgctcgatcgtgtgtgttcgcgtgtgatttgtgcaagcgcgttaagaaaggtgatttaaatttgcgtgttcgtagtagatctgatggaaccataacctttgtgccgagtgacgttcgtcgcgactcggaccgatg

SEQ ID NO: 8648 - DNA, 203 bp, synthetic construct
  source 1..203: mol_type = other DNA
ggcgcgccagtcctaagtccaggtaaaccaggaaaacagacgtggctaggttcaggtgagttcatagtagataatgtggaccttaaaaaacatgttgatatgatagttgagaaagcacagaatggtgtagttgatgtaggtttaggtgtttttgcagcgaccttgaaggatgagcgtcgtcctttggacgactcggaccgatg

SEQ ID NO: 8649 - DNA, 203 bp, synthetic construct
  source 1..203: mol_type = other DNA
ggcgcgccagtcctgaaagtcgctgcaaataagactcgagtgtttgctgcttctaatcaagggttggctttggccattcgtagatattatctagcatttatggaacatgttatgactaacagaattgataatgaaattggtttgggagttaatgtttattcttatgattggacgcgtattgtgaataacgactcggaccgatg

SEQ ID NO: 8650 - DNA, 203 bp, synthetic construct
  source 1..203: mol_type = other DNA
ggcgcgccagtccttgtcttttatggtgatgattcattgtgttgtgtgtcagataaggtgtgtgagtggtttaatcagcatgtcatcacccgtttaatgttggtgactggacatgattacactgatgaaacaaagagtgggtctccacctccttatcgctctttgtctgaagtgtcgtttctaaagcgcgactcggaccgatg

SEQ ID NO: 8651 - DNA, 203 bp, synthetic construct
  source 1..203: mol_type = other DNA
ggcgcgccagtcctatggtttgttattcaacgtgcgtgtaccccaggcagccccgaaaacacgcgtcaggagacagttccaaccactttgggcgaagttggtggctacgcttgcgtagtggaacttatttattgcctgctattcctactgaaattaataatgatacttcttcctcttctgctggacttcgactcggaccgatg

SEQ ID NO: 8652 - DNA, 203 bp, synthetic construct
  source 1..203: mol_type = other DNA
ggcgcgccagtccttggcagactactgataaagagattgctcccactatgtctcatagtgaactagtatcagatttcaatcagcctttccttaaagaaatttctcttccggatgatattgtgcgtaaatctccttttatgtccgctaagcttgcaaatattgcttttgttcgcagtgattatgaaattcgactcggaccgatg

SEQ ID NO: 8653 - DNA, 203 bp, synthetic construct
  source 1..203: mol_type = other DNA
ggcgcgccagtcctggtctggatgaaatgtcgattgagtacctagctctgcgtccctatgtacttcagcgttacaccatcaaaggtggtgatacgcctgatcctactaaaactgtcatagctgatatccccattagtcctgttaatttttccttgtttggtgctgttataaagaactatcgtactcttcgactcggaccgatg

SEQ ID NO: 8654 - DNA, 203 bp, synthetic construct
  source 1..203: mol_type = other DNA
ggcgcgccagtcctcttgtgaccaatcatcctattatttctgaaccgattggaccttcttatgtggcgcaagatttttcatccggagatactattattattgctcaggataccctcgttacttgtgcttttgcccagtcgaccaccaatttcagtgtttctttaactaaagaggatgtttcaaccaatcgactcggaccgatg

SEQ ID NO: 8655 - DNA, 203 bp, synthetic construct
  source 1..203: mol_type = other DNA
ggcgcgccagtcctcgtagatcaagtccagttgatattgttcgtggtgcttctgttaccttacctggtatcaatttcggcactgacaattcgctgcgacagagtttggtgaatgtaatttcctatatgtaccgttttactcatggaagcatttcttataaaattatacctaaagagaagggagatctgcgactcggaccgatg

SEQ ID NO: 8656 - DNA, 203 bp, synthetic construct
  source 1..203: mol_type = other DNA
ggcgcgccagtccttacatcacgactgttagcccagatgtggtggagaagaatcctaatgcttatcagtttgatactaatcgtgctatgcactttatcaatacttctttgaacccaattgcccaagtcactcttcccttttatagcccggcagagaacttggtattggattcgcgctcttttccccaacgactcggaccgatg

SEQ ID NO: 8657 - DNA, 203 bp, synthetic construct
  source 1..203: mol_type = other DNA
ggcgcgccagtcctttgagtgatctagtcattggcaatttagacaggtctgaaaatgaatattttgttcttgctagtgctggtgatgatcatactttttctcaattggctggatgtcctgcttttacttatgggccatccaggacttaaatctccgatgggagtgcaccctatgggtgtttgacccgccgactcggaccgatg

SEQ ID NO: 8658 - DNA, 203 bp, synthetic construct
  source 1..203: mol_type = other DNA
ggcgcgccagtcctggaattgagtgtctggtacactctgtgtaacagtgaaaacaatgtgatcacttcggtgagctagtagcctgtggaccaacaactggtaacagttgcctcaggggccaaaagccacggtgtttacagcaccctactggtttgattggagcaatccaagatgtcacagagttagtacgactcggaccgatg

SEQ ID NO: 8659 - DNA, 203 bp, synthetic construct
  source 1..203: mol_type = other DNA
ggcgcgccagtcctattgccaagcagtccgtactggtatcttgacataccgtgcagttttggatagtgaaggatgccctgacggtacccataggtaacaagtgacactatggatctaagcaggggctcactctacgctgctttacagctggctgtgagttaaaaaacgtctagctatccacaacctagcgactcggaccgatg

SEQ ID NO: 8660 - DNA, 203 bp, synthetic construct
  source 1..203: mol_type = other DNA
ggcgcgccagtcctaattcaacacgctttcatggtggtgctttgggtgtttttatggtgccacagtttgtttacactagccaaactgatttgactggaccaaaacccttgatggcaacagattatccacttttcaaccagcaacagttgtttctgtttccacaccaaatcttgaatcctcggactaatcgactcggaccgatg

SEQ ID NO: 8661 - DNA, 203 bp, synthetic construct
  source 1..203: mol_type = other DNA
ggcgcgccagtcctcagggtgaggacacccagataacacctgccgaaactgggcagactcctgaggttacagctgaaaattccaaccagaatgtggtgccaattccatacgcacctcagaggatttcacatagcgctgtgcgcttttggtatgacagatttttcttagctgacagccttcaggtcaaccgactcggaccgatg

SEQ ID NO: 8662 - DNA, 203 bp, synthetic construct
  source 1..203: mol_type = other DNA
ggcgcgccagtcctatagttaaatggctgccgagccactgcaggacacaaccaccacctttcccctcttcagatgaaaacccagatgatggaagtaaagatattaagaaagaaagtgcctctagtggcttcagcctgctagttgtctttaaaaattcttctaaacctctttcagtgaattcaggtgaccgactcggaccgatg

SEQ ID NO: 8663 - DNA, 203 bp, synthetic construct
  source 1..203: mol_type = other DNA
ggcgcgccagtcctatcaaacctaaaacagatgatgtgccattgattgatttgaccaacatggggccaaagattgactaccccggctcccataatccatttggagaatcactggccgacaagctggttcaggaaaatgagagattagttgctgaagcgcaggctgagtatgcacgccgtagtgctaatcgactcggaccgatg

SEQ ID NO: 8664 - DNA, 203 bp, synthetic construct
  source 1..203: mol_type = other DNA
ggcgcgccagtcctggagtttggaagcaacaagaagaagatgcctccgaggaacgctttagggaaagaatgcaagtgtaccctcagatgatggaacagtatgaacagtacaagaattctcctagacaccagaaatggaatgactgcaagacatggtttgatgagatgcggaaacttgcagtattgcatcgactcggaccgatg

SEQ ID NO: 8665 - DNA, 203 bp, synthetic construct
  source 1..203: mol_type = other DNA
ggcgcgccagtccttgttcagcacccctccatatggtgaaagctgacatacatttgttctctagtgcgtgcttgaagtttaaagaccgcatggctagatgcgagtgtagtttggttggagtctatgatagggtgatgaactctcacaaaagaaggaatgatttggccaataaattagttgaaatttttcgactcggaccgatg

SEQ ID NO: 8666 - DNA, 203 bp, synthetic construct
  source 1..203: mol_type = other DNA
ggcgcgccagtcctcttgcagtgcgtggcaggctggttgtaatgaacttccacttgtggaatgatgcaacacacctgcagcttgatggagaatggatgccacgtgacaccatacccgcagtgagacccgctgcaaacggcatccccacagaacttgtcttcatgaactgggcaaaaaccccaggaaggcgactcggaccgatg

SEQ ID NO: 8667 - DNA, 203 bp, synthetic construct
  source 1..203: mol_type = other DNA
ggcgcgccagtcctgtactgaagtataaagcccaaacagcaccagggttttgtggcagtgttgttgttgttgacaacggcatctggaagaaagtatttggattgcattgtgctggagcacatggtgttgggatggcagcaattatctcgcgcgagatggttgatgctatttcacagcttgctgaattccgactcggaccgatg

SEQ ID NO: 8668 - DNA, 203 bp, synthetic construct
  source 1..203: mol_type = other DNA
ggcgcgccagtcctcacgttggtgaccgtactgatggaccattagccatgattagaggagcccgcttttatgcacgacttgtgcgagcaaagtgtggacaggtgaatgaacgactgtcgctgcacgaggcagtctttggaacagacaaccttgacccaatggaccagacgcgctctcctgggtggccgcgactcggaccgatg

SEQ ID NO: 8669 - DNA, 203 bp, synthetic construct
  source 1..203: mol_type = other DNA
ggcgcgccagtccttacatcggtaccaagagacgcccagacctgctttggcagacggatgaaggcttggacatggatccggtgctgcgtgccgaactgatgctcatgatggaaggaaatttttcccaccacaaatttgttacctttcttaaagatgagctcagggacaaagaaaaagtgaaacaaggccgactcggaccgatg

SEQ ID NO: 8670 - DNA, 203 bp, synthetic construct
  source 1..203: mol_type = other DNA
ggcgcgccagtccttttgttgatgtggattattcgggatttgatgcaacacactctaccttttcctttcaatgcctgaaaatttttcttcaggagcttggatttgatgatgtggccttgaaatatgtggattctttgtgtgattcaacccacatttgggatgatgagatttttaaaatttcaggaggacgactcggaccgatg

SEQ ID NO: 8671 - DNA, 203 bp, synthetic construct
  source 1..203: mol_type = other DNA
ggcgcgccagtcctactgtccaggagaagctgttgtccgttgcccgcttggcgcaacatcgtggcgagcaggactacaaggctcttatggaaccttttgagtcttgtggctattttgttcctagctttgatgaccttgaacttgagttcttttctcttttctttggttgagttaggtgatggagttttcgactcggaccgatg

SEQ ID NO: 8672 - DNA, 203 bp, synthetic construct
  source 1..203: mol_type = other DNA
ggcgcgccagtcctaggacataggacagatgttggatggactcaacaagagaggaaagaagaaaagaggaggaagcactggtggtttgcttttgattattagcttctcatgtgcgtgtgcccttaaggtgggatcgtacaatggaaagccgctgatcactgtaaaccaaacggacgtgcagaacccaacgactcggaccgatg

SEQ ID NO: 8673 - DNA, 203 bp, synthetic construct
  source 1..203: mol_type = other DNA
ggcgcgccagtcctgcacgccgacgagacatgccagacggtcaagaagagcgatcacagtccatcatcatggcgaaagcctattggaagcgaagaacacaccatggatggactcaacaaaagccacaaagtacttgactaaggttgagaactgggctattcgaaatccaggatacgctctagccgcagcgactcggaccgatg

SEQ ID NO: 8674 - DNA, 203 bp, synthetic construct
  source 1..203: mol_type = other DNA
ggcgcgccagtcctgtgtgactataacggcgaaagacaaaccaacaattgatgtcaaaatgatgaacatggaggcaactgacttggccctcgtccgctcttattgctatgaacccaaaataaccgatgtcagtacagagccacgctgcccaaccatgggagaggcccacaatacaaaggcatccagtccgactcggaccgatg

SEQ ID NO: 8675 - DNA, 203 bp, synthetic construct
  source 1..203: mol_type = other DNA
ggcgcgccagtccttgaccatgaacatgaagagctggctagtgaacagagactggttccatgatttaaatctgccatggaccggttcagcagcaggaaattggcaaaatagagagtcactagttgaatttgaggaggcgcacgccaccaagcaatcagtggttgctttggcctctcaagaaggagccccgactcggaccgatg

SEQ ID NO: 8676 - DNA, 203 bp, synthetic construct
  source 1..203: mol_type = other DNA
ggcgcgccagtccttgcacgcggcactggccggagcaattcctgtgaagtacacaagcagcaagctggaaatgacatcaggacacttgaaatgtagggtaaaattgcaaggattgaagttaaaaggaatgacttacccaatgtgctctaacaaattcagcctagctaggaatcccacagacacggggccgactcggaccgatg

SEQ ID NO: 8677 - DNA, 203 bp, synthetic construct
  source 1..203: mol_type = other DNA
ggcgcgccagtcctcctttggcgactcgttcatcctagttggtagtggagaaaatcaaattaaatatcagtggcataagagtgggagctcaattggtaaagcatttgtttccaccctcaagggagcccagcgtatggtggcacttggggatactgcctgggatttcggatcagtaggaggtttctttacgactcggaccgatg

SEQ ID NO: 8678 - DNA, 203 bp, synthetic construct
  source 1..203: mol_type = other DNA
ggcgcgccagtcctggaaaggaatatgtggagtcagatcagtgagccggttggaacacaacatgtgggattcgatcaagcatgaactcaatgccattctggaagacaacggggaggatttgacagtcgtggtggaaccaattgtgggacgtctcaggtcgacacagcgaagattgacgtggacggaagcgactcggaccgatg

SEQ ID NO: 8679 - DNA, 203 bp, synthetic construct
  source 1..203: mol_type = other DNA
ggcgcgccagtcctaagagttggaatatggatggaagaaatgggggaaaaccctctttacgagtccaggcatgtcaaacagaacttttgtggtggatgggccaaaaacgaaagagtgtcccgatgacaagagagcttggaacagcttgtacgttgaggactttggatttggcatcacatccactagagcgactcggaccgatg

SEQ ID NO: 8680 - DNA, 203 bp, synthetic construct
  source 1..203: mol_type = other DNA
ggcgcgccagtcctcaacagtgaaagtgacttcgacctgccatgacagggcagcatcagctcgaaccaccactgccagcgggaagctcattcaagactggtgttgcaggtcatgcacactcccaccattgagatacatgacaaaaagtggatgctggtatgccatggaaatccggccgacaacacacgcgactcggaccgatg

SEQ ID NO: 8681 - DNA, 203 bp, synthetic construct
  source 1..203: mol_type = other DNA
ggcgcgccagtcctgtgaggacacccttatcaagtctaaggtgagcgcattcagaggcgatggcatggaaccatttcaactgggggttctcttgatgtttgtggccacacaggaagtcttgcggaagagatggacagcaggcatggcattaccagcaatgctcatgtttttatgtgctttgatctttgcgactcggaccgatg

SEQ ID NO: 8682 - DNA, 203 bp, synthetic construct
  source 1..203: mol_type = other DNA
ggcgcgccagtcctttttggttggaattgccctttcaatgttgaccttggccatgcaagattgggacatgacaatcccgagcctgcttaactcgggagcggccgcttggttgctgctgagagctgtgagtgagggaacagtaagtgccgtctgcattccagtgctgggcatgctggctcctggacttccgactcggaccgatg

SEQ ID NO: 8683 - DNA, 203 bp, synthetic construct
  source 1..203: mol_type = other DNA
ggcgcgccagtcctgcatcgcgggaattgacgtggttcgcataggattgctgatcatagggattatgtcgctgatgagggaacgcaacaatgcagcagcaaaaaagaaaggaggattgttgataggactggccctagcagaatctgggttgatcagccctcttgtttatgccggactaaccttggcaccgactcggaccgatg

SEQ ID NO: 8684 - DNA, 203 bp, synthetic construct
  source 1..203: mol_type = other DNA
ggcgcgccagtccttaaaaccaaacatgaggagaggatggccggtgagtgaagcactgacagccgttggattgacgttcgcactggctggtggcatcgcacattttgatgaaggaaatatggccattccgttagcagtgggcggcataatgttggttgtggcagttgtgacagggttcacaacagatccgactcggaccgatg

SEQ ID NO: 8685 - DNA, 203 bp, synthetic construct
  source 1..203: mol_type = other DNA
ggcgcgccagtcctacaacccttatctccttccagtgacgttgggagcttattggctcacagtcaaggctccgaaacgtagcggagcgatttgggatgttccagcaccaaaggaaagaaggaaagcagaaattagcacgggggtgtttagaatcatggccagaggaatttttggaaaataccaagctgcgactcggaccgatg

SEQ ID NO: 8686 - DNA, 203 bp, synthetic construct
  source 1..203: mol_type = other DNA
ggcgcgccagtcctggttgttaacaccacaaagggtgcctaactacaacttattcgttatggatgaagcacatttcactgacccagccagcattgcggctcgtgggtacatttccacaaaagttgacctaggagaagcggcagccatattcatgactgcgacaccaccaggaacgagagatgcctttccgactcggaccgatg

SEQ ID NO: 8687 - DNA, 203 bp, synthetic construct
  source 1..203: mol_type = other DNA
ggcgcgccagtcctaattaaatgggccagttcccatcacagcggctagtgcagcacaaaggaggggaagagtgggcagaaatccagtgcaagttggggatgaataccactttgctggaccgaccagtgaggatgatcacgatttcgcccattggaaggaagcgaagatcttgctagacaacatcaacccgactcggaccgatg

SEQ ID NO: 8688 - DNA, 203 bp, synthetic construct
  source 1..203: mol_type = other DNA
ggcgcgccagtccttaccaaacggactggtggcgcaattgtatgagcctgaacgagagaaggtcttttccattgatggggagtacaggctgagaactgagcaacggaaaaactttgtagagttcttgagaacgggagacctgccagtttggatatcgcacaaactggctgacgctggaatagcttacacgactcggaccgatg

SEQ ID NO: 8689 - DNA, 203 bp, synthetic construct
  source 1..203: mol_type = other DNA
ggcgcgccagtccttaggaaaagggatgccctttgtgtccatggacctgtcagtgcctcttcttttactcggatgttggggacagttcaccatgaccaccacactcacgacaatcgtgttgttgattgtgcactatgcattcctcgtgccaggatggcaagctgaagcaatgcgtgcagcgcaaaggacgactcggaccgatg

SEQ ID NO: 8690 - DNA, 203 bp, synthetic construct
  source 1..203: mol_type = other DNA
ggcgcgccagtcctggacagctgctggagtgatgaagaatccagtggtggatggaatagtcgccacagacatacctgatctagacgccagtactccgattacagagaagaaattcggccaagttattctaatagttgtgggagtctgtgcagttttcctaaaaccagggaccatgtcgctaacagagtcgactcggaccgatg

SEQ ID NO: 8691 - DNA, 203 bp, synthetic construct
  source 1..203: mol_type = other DNA
ggcgcgccagtcctccgcaaaactacggtggatggtcgagagaggttttgtgaagccacacggaaaggttatagacttgggctgcggcagaggaggctggagttattactgcgccaccttaaaattagttcaagaggtgaagggttacacaaaagggggaccaggtcatgaagaacctgtgatgatgccgactcggaccgatg

SEQ ID NO: 8692 - DNA, 203 bp, synthetic construct
  source 1..203: mol_type = other DNA
ggcgcgccagtcctgagttgaagatttctgtgtaaaaattctttgtccatacatgcccaaggtgcttaaagagctggaaaagatgcaattaagatggggaggtggcctgatccgggttccactttcgaggaattccaaccatgagatgtactgggtgagtggagccagtggaaacatcacaaattccgcgactcggaccgatg

SEQ ID NO: 8693 - DNA, 203 bp, synthetic construct
  source 1..203: mol_type = other DNA
ggcgcgccagtcctccaccacatggcactatgactcggagcacccttacaaaacttggaactatcatggaagttatgaagtcaaagcgaccggatcagctagctccatggtgaatggggtggtccgggtgctctcgaaaccatgggacacactgcagagtgtggtgaacatggccatgactgacacaacgactcggaccgatg

SEQ ID NO: 8694 - DNA, 203 bp, synthetic construct
  source 1..203: mol_type = other DNA
ggcgcgccagtcctgtgaatttggaaaagcaaaaggtagccgggccatctggtacatgtggttaggttcaagatatcttgaatttgaagctctggggttcttaaacgaagaccattggatgagcagagagaacacacttggaggagtcgagggcttaggcctgcagaagcttggatacgtgctgagagcgactcggaccgatg

SEQ ID NO: 8695 - DNA, 203 bp, synthetic construct
  source 1..203: mol_type = other DNA
ggcgcgccagtcctaagtaatgagaccaggagctgatggcataacagtgatggacgtcatctcacgggaagaccagagagggagtggacaggtggtaacatatgcactcaacacgttcaccaacctttgtgtgcagctcatacgatgcatggaaggagagggtttgctgaagccagaggaggtggagacgactcggaccgatg

SEQ ID NO: 8696 - DNA, 203 bp, synthetic construct
  source 1..203: mol_type = other DNA
ggcgcgccagtcctttgttttagaccttagaagatagatttagatttattttagggcgatagtcaggccaggcaatgcctgccaccggaagttggatgacggtgctgtctgcgctccaaccccaggcggactgggttaacaaagtggtgatccaggagacgcaaagcgttcactaccgtttcggagaacgactcggaccgatg

SEQ ID NO: 8697 - DNA, 203 bp, synthetic construct
  source 1..203: mol_type = other DNA
ggcgcgccagtcctctccctggcgttcgaatggaacactgcccaaagtcaggccgtaggttttacgccactagcatgcagtgctgcctgagacaagacatgccccaggaggactgggaaaacaaagccgttaaggcccccgcggcccaagcaagggaatggtgtgccccttgtggaaggtctagaggtcgactcggaccgatg

SEQ ID NO: 8698 - DNA, 203 bp, synthetic construct
  source 1..203: mol_type = other DNA
ggcgcgccagtcctaaaacaaagccgttaaggcccccgcggcccaagcaagggaatggtgtgccccttgtggaaggtctagaggttagaggagaccccgcggaaatcaaagcaaggcccaacctggcaaagctgtaaaccaggggaaggactagaggttagaggagaccccttgcgagtgaacaccaccgactcggaccgatg

SEQ ID NO: 8699 - DNA, 203 bp, synthetic construct
  source 1..203: mol_type = other DNA
ggcgcgccagtcctagaacagtcgtcagtagttcaacgctggtaaaccccagccttgagatgctacgtggacgagggcatgcccaagacacaccttaacctggacgggggtcgtccaggtgaaagtacccatctttgggtgctgggagtacagcctgatagggcgctgcagaggcccactgacaggctcgactcggaccgatg

SEQ ID NO: 8700 - DNA, 203 bp, synthetic construct
  source 1..203: mol_type = other DNA
ggcgcgccagtcctatgacaggggtaggggggaggtgaggacaactctggaaaaacttccacgtaagggagattgtaggagtggcaatcaactaggaccggtaagtggaatttacataaaaccaggtccgatttactaccaagattatgcaggcccagtctaccacagagcaccattagaactatttgcgactcggaccgatg

SEQ ID NO: 8701 - DNA, 203 bp, synthetic construct
  source 1..203: mol_type = other DNA
ggcgcgccagtcctgggatagaccaacaaccctaacggggtgcaagaagggtaagaagttttcttttgcgggtatcattatggagagcccctgcaacttcaacgtctctgcggaggacatcttatatggggataatgggtgtggtaacctcttccaggacacggctttgtacgtcgttgacggagtcacgactcggaccgatg

SEQ ID NO: 8702 - DNA, 203 bp, synthetic construct
  source 1..203: mol_type = other DNA
ggcgcgccagtccttatacttggttcttcatttcaccatcccccagtcttatgagaaccccaaagactgtgataagaatcagttaaacctgaccattggtcttagaacagaagacgtcgtgccctcatcagtctggaacattggtaagtatgtttgcatcaggccggactggtggccttacgagacaacgactcggaccgatg

SEQ ID NO: 8703 - DNA, 203 bp, synthetic construct
  source 1..203: mol_type = other DNA
ggcgcgccagtcctgggcgcaagggcaatttacttgtgagaaaaactataggtatgctatagcaaaaacaactgatgtggggttgcttggtgctgaaggcttgaccaccacttggagggaatacaaaaacaattttgaacttgatgatggattactgagagcagtatgcaaatctggtttcttcacttcgactcggaccgatg

SEQ ID NO: 8704 - DNA, 203 bp, synthetic construct
  source 1..203: mol_type = other DNA
ggcgcgccagtcctggaagtataacgcaacccttctgaacggtagtgctttcaatctcgtttgcccaattgggtggactggggtagtggaatgtacagtgataagtgagtccactctgcacaccgaagtcgtgaaggtgttcaggagagataagccattcccatctaggaaatactgtgttgacaccacgactcggaccgatg

SEQ ID NO: 8705 - DNA, 203 bp, synthetic construct
  source 1..203: mol_type = other DNA
ggcgcgccagtcctatgaaactggatatagactggtggatggaaccacatgtaacagacatggggtgataatagaccagacaggtagccatgagtgcctaataggcaagaccaaaataaaagtgtatccagttgatgacaaactggggccaatgccttgcagacctaaggagattatatccagtgaagcgactcggaccgatg

SEQ ID NO: 8706 - DNA, 203 bp, synthetic construct
  source 1..203: mol_type = other DNA
ggcgcgccagtcctctgttggcatagtagtgtcgatgctgattgccagaagagaccccacgacaataccacttataataactgttgtaaccttgaggactacggggctggcaggtgggctagcaacagacttggccatagcgaccgtaacaacagtgctactaatgtggaccttcattagtgattactcgactcggaccgatg

SEQ ID NO: 8707 - DNA, 203 bp, synthetic construct
  source 1..203: mol_type = other DNA
ggcgcgccagtccttactagagatatcctactatctccacaggaagatcatagaagaagttgcagggggaacaaacttgctatccagatttatggcagcattgatagagactaactggactcttgataacaacgaggtcagggggttaaaaaaattctacctactatccagcagagtcaggagccttacgactcggaccgatg

SEQ ID NO: 8708 - DNA, 203 bp, synthetic construct
  source 1..203: mol_type = other DNA
ggcgcgccagtccttgcctagaggtacgacaccaagggcaccggtgaggttccctacgtcactgctgaaaatcaggagggggctagaaactggatgggcgtacactcaccaaggcggcatcagttcagttgaccacgttacatttggaaaagacctgcttgtttgtgattccatgggtaggacaagggcgactcggaccgatg

SEQ ID NO: 8709 - DNA, 203 bp, synthetic construct
  source 1..203: mol_type = other DNA
ggcgcgccagtcctccacagatttaacagacttggtgaggaagataacagctatgaatagaggagaatttaaacagataaccttagcaacaggtgcaggaaagaccactgagctccctaggtcagtcatagaagaaataggtcggcacaagaggatactcgtcttgatcccactaagagcagcagcagcgactcggaccgatg

SEQ ID NO: 8710 - DNA, 203 bp, synthetic construct
  source 1..203: mol_type = other DNA
ggcgcgccagtcctagtctgtataccagtatatgaggcaaaagcaccccagtatatcattcaatctgagaattggcgagatgaaggaaggagacatggctactggtataacctatgcttcttatggatacttctgtcagatgcctcagcccaagcttagagcagccatggttgagtattcttacatctcgactcggaccgatg

SEQ ID NO: 8711 - DNA, 203 bp, synthetic construct
  source 1..203: mol_type = other DNA
ggcgcgccagtcctggctggcttttgggggggagacactgtccgaccatataaaacaagctgccactgatctagtagtctattatatcatcaatagaccccagttcccgggggatactgagacccaacaggaagggaggaaatttgtggctagcctcttggtgtcagcccttgctacatacacgtacacgactcggaccgatg

SEQ ID NO: 8712 - DNA, 203 bp, synthetic construct
  source 1..203: mol_type = other DNA
ggcgcgccagtccttattaggcactggagttagcgcagcaatggaaataatgtcacaaaatcctgtatcggttggaattgctgtgatgctgggagtgggtgcagtggccgcccacaatgccatagagtcaagtgaacagaaaaggacactattgatgaaagtatttgtaaaaaactttcttgaccaggcgactcggaccgatg

SEQ ID NO: 8713 - DNA, 203 bp, synthetic construct
  source 1..203: mol_type = other DNA
ggcgcgccagtcctctgccactgatgaattggtgaaagagagccctgaaaagataataatggccctgtttgaagcagtgcaaacggtaggaaaccctcttaggttgatttaccatctgtacggggtcttctacaaaggatgggaagctaaggaactagcagaaaggacagcaggaagaaacctattcacgactcggaccgatg

SEQ ID NO: 8714 - DNA, 203 bp, synthetic construct
  source 1..203: mol_type = other DNA
ggcgcgccagtccttggccgaggtggaagtagacctactgagatacgtggactacaaaggtacattccttactagagagaccctggaggctctaagcctggggagaccaaaaccaaaagatctaacgaaagcagaagcaatgaggttgctccatccggaatcagggctggtagagttgcctgactggtcgactcggaccgatg

SEQ ID NO: 8715 - DNA, 203 bp, synthetic construct
  source 1..203: mol_type = other DNA
ggcgcgccagtcctttatgcaagtagagaacaagcacaacaacttgacccctctgttcgaagagctcatgcttcgatgcccgcctgggaaacagatgaggtccgagcacatggtcaccgcataccaattggcccagggcaactggatgccaaccagctgtaatgtattcttagggacaataccggccacgactcggaccgatg

SEQ ID NO: 8716 - DNA, 203 bp, synthetic construct
  source 1..203: mol_type = other DNA
ggcgcgccagtcctgagtagctgaacagctccagagggaaggccacaagcacaacgtgtacaacaagattataggctctaccatgacggcagtggggattaggctagaaagattaccggtagtgagagctcaaactgacaccaccagtttccaccaggctataagagataagatagacaagagggaaacgactcggaccgatg

SEQ ID NO: 8717 - DNA, 203 bp, synthetic construct
  source 1..203: mol_type = other DNA
ggcgcgccagtcctacttgcaaaccccaggcctacacggcaagctgctggaaatattcaacaccctgaagaaaaatgatttggcacaaacatatgatgctgtagaatgggaagaactagaacgtggagtaaaccgaaagggtgctgctggattcttcgagcataaaaacataggagaagttttgaacacgactcggaccgatg

SEQ ID NO: 8718 - DNA, 203 bp, synthetic construct
  source 1..203: mol_type = other DNA
ggcgcgccagtccttcagactggcaatcacaaaagtgatgtataagtgggtgaaacagaagccggtggtaatacctgggtatgaaggcaagacgcccttgtttgaggtctttgacaaggtaaagaaagagtgggaccagttccacaacccagtggccgtaagttttgacacaaaagcatgggacacaccgactcggaccgatg

SEQ ID NO: 8719 - DNA, 203 bp, synthetic construct
  source 1..203: mol_type = other DNA
ggcgcgccagtccttggcaaccaggttggactctagtggagaaagagggacaacggcatatgaaaaagccgttgcgttcagttttctattgatgtactcatggaaccccttggttaggaggatttgcttgctcacgttgtctactgagccagaagtgaagccaagcaaggcgacaacttattactacgcgactcggaccgatg

SEQ ID NO: 8720 - DNA, 203 bp, synthetic construct
  source 1..203: mol_type = other DNA
ggcgcgccagtcctaaatcccggccgcgtgttgtgattgtgttagggcaggtgacagtcggcagggtcgaccccctgcttcaggaccactgtcttcctggacgaccgttgctgaaaaagggccgccacggtctgtagctcgccgacgcttctaattcaggccggaggaccacgctccgtaatcgagcccgactcggaccgatg

SEQ ID NO: 8721 - DNA, 203 bp, synthetic construct
  source 1..203: mol_type = other DNA
ggcgcgccagtcctcaagtactcaaaccccagcacccctgggtcacgccctacgccgcccttttaacgcttcggctaatagggtctatccggcgggttgacaaagggcgcagggttacctggtactacgagcttgggtgtccctgggagtaatcccagggtgccatgctgcagcgcaggcgggcgaggcgactcggaccgatg

SEQ ID NO: 8722 - DNA, 203 bp, synthetic construct
  source 1..203: mol_type = other DNA
ggcgcgccagtcctgtggtgcctcggcctaggggaagagcgcaagtgaccccgtgctgcataaatccccccccttttttctacatgggtgttccatgtgccgccaagatggcgctgttgttgcttttcctggccggcgtggctgctgccccctcgcatctctgcgagtgggaaggcaaaccttacttgcgactcggaccgatg

SEQ ID NO: 8723 - DNA, 203 bp, synthetic construct
  source 1..203: mol_type = other DNA
ggcgcgccagtcctcattcatggcttgcttacgttgcaggtgttgggggcgtcggggagctgtatggcgcggggctcatcgcgggtctcgctgctgtttcagctgtcccggcttctactccccctttaaactgctctgttgagtgcgcttgggggtatgaggtaatgcttggcccggtcaggtcctggcgactcggaccgatg

SEQ ID NO: 8724 - DNA, 203 bp, synthetic construct
  source 1..203: mol_type = other DNA
ggcgcgccagtcctctccttgagcttggttcctcttccgggttttggctgcttcagcttcctggcgctctctggtcttttgttgcaagtgttagtcctgtttttcttgttctgttggccttgctcttcttggaggggcgctggcctctaattgtagctcttgtcgccatccggttgctagtttgcccgcgactcggaccgatg

SEQ ID NO: 8725 - DNA, 203 bp, synthetic construct
  source 1..203: mol_type = other DNA
ggcgcgccagtcctgcatctttgcgcatgggagagaatgagtcttgcatttgtggccctaaaatttctgaccatctacgagctatccaatatgtcaactacactcctggccttcgcatccagctgcgtgcgtccccccaggttgcgttacacggagcgcttgttccgttgacgctgacctacgggccgcgactcggaccgatg

SEQ ID NO: 8726 - DNA, 203 bp, synthetic construct
  source 1..203: mol_type = other DNA
ggcgcgccagtcctctcaggggtggtattgtttgggcttaccctcttgatggcatggcttggttccctgtggaatccttttctgttcctcccaccggttgggactgcactgtcaatactgattatcagttttgggagtgcgtcgactccacacgataccggcgggctatagtgtgccgtgcattcacgcgactcggaccgatg

SEQ ID NO: 8727 - DNA, 203 bp, synthetic construct
  source 1..203: mol_type = other DNA
ggcgcgccagtcctaccactacctccagtaacacctcttcccctacccaactttgctttgactatgtcggcccatcccaggatccttgcaagatctatgcttggcaaaacatctctgcttgctttcgaagaggctggggcaacctgacctctgcgtttgctggccttgctggggtgccgggtgccttgcgactcggaccgatg

SEQ ID NO: 8728 - DNA, 203 bp, synthetic construct
  source 1..203: mol_type = other DNA
ggcgcgccagtcctttggctatcctcgccatcgcggttcttggtcggccggggaggtctgccttgggcttggaggtgtgctttgatgtgtcagggcccgggtgggatgtgccggatggaattctaccatggtgctttgctggtgttgtgtccgggctgttaattcacctggccacattcaaccactggcgactcggaccgatg

SEQ ID NO: 8729 - DNA, 203 bp, synthetic construct
  source 1..203: mol_type = other DNA
ggcgcgccagtccttattgctttgttgctatttgctttgatctctttgatatgttccttgaagcttgcctctgttctcaaccctctgtgtcgagtgtggctgctcttttggaggttgccgcgcgcgcccgcagcagtagtctagttcgctggattattgtgcgggcgcgtgcgaggggtgtgttgctccgactcggaccgatg

SEQ ID NO: 8730 - DNA, 203 bp, synthetic construct
  source 1..203: mol_type = other DNA
ggcgcgccagtccttatcaacatcggggtgatgtgccctggagggctgtctcgttcctgaaggaattggagtgcgcgctggagcccgtttctgtctctgctgaggatctggaagtcgtgcgtgacgcggcaggtgtcctggagtgcggtaagttcttcaggggtaagcctgtcgtcgcgcgccgcggccgactcggaccgatg

SEQ ID NO: 8731 - DNA, 203 bp, synthetic construct
  source 1..203: mol_type = other DNA
ggcgcgccagtcctgctgcgagccggtctatgggtacctgtgtggggggtgtcatgttcacaacgtggcactcctcgcaggggcgcacattggctggtccgactggtcctctcaatccgcggtggtggtcggtcagtgacgacactgccgcttacccaattcccttaggttccagatgtatggacgtccgactcggaccgatg

SEQ ID NO: 8732 - DNA, 203 bp, synthetic construct
  source 1..203: mol_type = other DNA
ggcgcgccagtccttgcacctgtggcacccggagcgcatgggtaatgcgtcgtgatgggggcctagcccatggagagttgtcaccagtgaatgaagtcaggttggatgtctctggcagggtccgtgctttccgcggggcctccggcagtcctgtcatgtgtgaccaggggcacgtggtgggcatgatgcgactcggaccgatg

SEQ ID NO: 8733 - DNA, 203 bp, synthetic construct
  source 1..203: mol_type = other DNA
ggcgcgccagtcctgtgtcggtcctccatcgagggcctgatgccttcgctgtccgctatgttgagccctggaaggccttacctgcagatgttcagagcccactgtcccccctctctcctcctccggtcccagcaatgggagcctatgaggagaggtcgctgttcgtgccgacggggtccggaaagtcccgactcggaccgatg

SEQ ID NO: 8734 - DNA, 203 bp, synthetic construct
  source 1..203: mol_type = other DNA
ggcgcgccagtcctaccctggtccctgccagttacgccaaggaagggcacaaggtccttgttctaaatcctagcgtggccacgaccgcgtcgatgctcgattacatgaaggagctgactggtgtcagccccagcgtgttttgcgggcacggggcgaacgcgatcacgcggcggacgcagagcaagattcgactcggaccgatg

SEQ ID NO: 8735 - DNA, 203 bp, synthetic construct
  source 1..203: mol_type = other DNA
ggcgcgccagtcctgccgtgtcttggtataatatgacctctgaccaggcagcgcgcctcctgcgggcctacgcaggttgcgcgtatacttgtcacatctctacacacattgaggatgccacgcgtgcagttgcggcgctgagcgctttctccacgcaccctcaagtcactcggttgcgcaatgcatcccgactcggaccgatg

SEQ ID NO: 8736 - DNA, 203 bp, synthetic construct
  source 1..203: mol_type = other DNA
ggcgcgccagtcctgcgatcgctgaggctcttggtgagagtgtcacggagacggctgctggaccgattctgttggtgggcttggctgcggctgcggccctggccattggggattataccggaagcctggtcgtggtagccgaagtggtggttgagcccggagggaatccagtccccccttctgggccccgactcggaccgatg

SEQ ID NO: 8737 - DNA, 203 bp, synthetic construct
  source 1..203: mol_type = other DNA
ggcgcgccagtcctgtgaagaatacatctgttggtcagggcttcctgcgagcgtggacggcgcttacaggaaatatcggccctgtggtgtccctggtgacggcggcgtgggcggcggggcggtcccccccccttgcctgcgcggcctccctcctacttggtctgcaagctgctctcccgctggagacgcgactcggaccgatg

SEQ ID NO: 8738 - DNA, 203 bp, synthetic construct
  source 1..203: mol_type = other DNA
ggcgcgccagtcctcgactgccttgcgcaattctggccggggctatcggtacttgtactggtacccccgaagcagggttgggcatgatgggagcgtttatggttggaggtgcagtggggtctcttagcgtcttcggcttcctcttggaggtcttgggcggctgggaggccacagctactactgcttctcgactcggaccgatg

SEQ ID NO: 8739 - DNA, 203 bp, synthetic construct
  source 1..203: mol_type = other DNA
ggcgcgccagtcctccaagagggcaagtcctgccagacggatatttccttgaggaggacgtcactgctcgtgcaagcgaactccttaagcggatgtccatctccagggctgtcatgagtgtgctggaatgtgttcatcagcagtatgagactaggacagatggcagtgtgttttggacgatcgttgcccgactcggaccgatg

SEQ ID NO: 8740 - DNA, 203 bp, synthetic construct
  source 1..203: mol_type = other DNA
ggcgcgccagtcctgcttgccttgacggtgcgaggcggtttcttgactggatcattgcttatgtgaaggacaggataccatcagtggctatccctctcgtgtcatgtcaacgaggctacaccggcccttgggttggttcgggggcagttacagctaactgcacctgcggagcactcttcacggcgcatcgactcggaccgatg

SEQ ID NO: 8741 - DNA, 203 bp, synthetic construct
  source 1..203: mol_type = other DNA
ggcgcgccagtcctaccgttcgagaggcgggagttccgctagatgaccgaggcatgcccgagattatcccccctccccccccaacgcctgcgttgcaggggggtgcggtggctaatactcctgacaatatcttgttggctccacctctatcacaggccactcctcagtatgttaccagaattttcacccgactcggaccgatg

SEQ ID NO: 8742 - DNA, 203 bp, synthetic construct
  source 1..203: mol_type = other DNA
ggcgcgccagtcctcatcgggctcttgcggctactggagccctggaggtcgccaccggcgtcacccccacgcagtccgggtcgagcaccgacggggacactcctgcctcggcagaggcgggtcgtgtttctcgcgtgatgcaggccgttcggtctgcattcgattccgtgctgggtgatggaggcgtccgactcggaccgatg

SEQ ID NO: 8743 - DNA, 203 bp, synthetic construct
  source 1..203: mol_type = other DNA
ggcgcgccagtccttcatcaatcactcccagtgatgtggagagagagatggagatcttcgcgtgcaaccatgctaatgcgccactggtccgtgctttggggaaatactatgcatcaggtcccatggtgaacgggagcggtgtggaagtcggagttcggcattgccgggcttccggagtttacaccactcgactcggaccgatg

SEQ ID NO: 8744 - DNA, 203 bp, synthetic construct
  source 1..203: mol_type = other DNA
ggcgcgccagtccttcctctgcaaattcaattacatgttggcttaaggtttctgctgcctgtcgcaagataggcttgcaaaacccgtccttccttatccatggagatgactgcctcatcatttgtgagcgtaccgatgagccttgcgctgcgcgtctgaaagcggcgctcgcctcatacggttatgcccgactcggaccgatg

SEQ ID NO: 8745 - DNA, 203 bp, synthetic construct
  source 1..203: mol_type = other DNA
ggcgcgccagtccttacacgttgagctacccttggcatccattgactaggcatgtgttgattccgacactgcttacccctttgtttgccgctgggaagtctccacgtgagactatctgttgtgaggtcgcgggcaaccgcatccactttccgctcttatcattaccatcgattttggtctcgttgcaccgactcggaccgatg

SEQ ID NO: 8746 - DNA, 203 bp, synthetic construct
  source 1..203: mol_type = other DNA
ggcgcgccagtcctggccaggacgtcctagatgttcgggccgattcaacaaagacactgtcagaagcacaaaaagcattgcaggccttgtcgatgcgggggctgagctggtaccgcaagagggctaccatcctgcgcacccgcctcatcagggctgggggagagtgggcctacctcgcacgcacgttgcgactcggaccgatg

SEQ ID NO: 8747 - DNA, 203 bp, synthetic construct
  source 1..203: mol_type = other DNA
ggcgcgccagtcctgggctcgacacggctatagagctaatgacgcgccatgcccacttaattgtggggatgtcgtggatggcctatttccttgcggctctggtgtgactccagccgatgcccttacagggcattcttccttcctgctcccctaactctgcgtgagatcggggcaggtactgtgcgcttcgactcggaccgatg

SEQ ID NO: 8748 - DNA, 203 bp, synthetic construct
  source 1..203: mol_type = other DNA
ggcgcgccagtcctctctctaactcttcgtgagattgaggggcttgcagtctttccgccaatctaactctacgtgagattttggcgggcctccctgctcccctaactctgcgtgagatcggggcaggctctgttcgcttctctctaactcttcgtgagattgaggagcttgcagttcttccgccaatccgactcggaccgatg

SEQ ID NO: 8749 - DNA, 203 bp, synthetic construct
  source 1..203: mol_type = other DNA
ggcgcgccagtcctatgaggagatcaagaagtacgagaagctggagacggaggaggagcgtgtggcccgcagccgggagatcttcgactcatacatcatgaaggagctgctggcctgctcgcatcccttctcgaagagtgccactgagcatgtccaaggccacctggggaagaagcaggtgcctccggcgactcggaccgatg

SEQ ID NO: 8750 - DNA, 203 bp, synthetic construct
  source 1..203: mol_type = other DNA
ggcgcgccagtcctatctcttccagccatacatcgaagagatttgtcaaaacctccgaggggacgtgttccagaaattcattgagagcgataagttcacacggttttgccagtggaagaatgtggagctcaacatccacctgaccatgaatgacttcagcgtgcatcgcatcattgggcgcgggggctcgactcggaccgatg

SEQ ID NO: 8751 - DNA, 203 bp, synthetic construct
  source 1..203: mol_type = other DNA
ggcgcgccagtcctttggcgaggtctatgggtgccggaaggctgacacaggcaagatgtacgccatgaagtgcctggacaaaaagcgcatcaagatgaagcagggggagaccctggccctgaacgagcgcatcatgctctcgctcgtcagcactggggactgcccattcattgtctgcatgtcatacgcgactcggaccgatg

SEQ ID NO: 8752 - DNA, 203 bp, synthetic construct
  source 1..203: mol_type = other DNA
ggcgcgccagtcctcgttccacacgccagacaagctcagcttcatcctggacctcatgaacggtggggacctgcactaccacctctcccagcacggggtcttctcagaggctgacatgcgcttctatgcggccgagatcatcctgggcctggagcacatgcacaaccgcttcgtggtctaccgggacccgactcggaccgatg

SEQ ID NO: 8753 - DNA, 203 bp, synthetic construct
  source 1..203: mol_type = other DNA
ggcgcgccagtcctctctggggtgcatgctcttcaagttgctgcgggggcacagccccttccggcagcacaagaccaaagacaagcatgagatcgaccgcatgacgctgacgatggccgtggagctgcccgactccttctcccctgaactacgctccctgctggaggggttgctgcagagggatgtcacgactcggaccgatg

SEQ ID NO: 8754 - DNA, 203 bp, synthetic construct
  source 1..203: mol_type = other DNA
ggcgcgccagtcctaccggagattgggctgcctgggccgaggggctcaggaggtgaaagagagcccctttttccgctccctggactggcagatggtcttcttgcagaagtaccctcccccgctgatccccccacgaggggaggtgaacgcggccgacgccttcgacattggctccttcgatgaggaggcgactcggaccgatg

SEQ ID NO: 8755 - DNA, 203 bp, synthetic construct
  source 1..203: mol_type = other DNA
ggcgcgccagtcctcggtggaggagacgcagatcaaggagcgcaagtgcctgctcctcaagatccgcggtgggaaacagttcattttgcagtgcgatagcgaccctgagctggtgcagtggaagaaggagctgcgcgacgcctaccgcgaggcccagcagctggtgcagcgggtgcccaagatgaagacgactcggaccgatg

SEQ ID NO: 8756 - DNA, 203 bp, synthetic construct
  source 1..203: mol_type = other DNA
ggcgcgccagtcctatgatgccacaccaagctgtgccaccctgggctctgtgggctgcactctgtgcccatgggcactgctgggtggcccatcccccctcaccaggggcaggcacagcacagggatccgacttgaattttcccactgcaccccctcctgctgcagaggggcaggccctgcactgtcctcgactcggaccgatg

SEQ ID NO: 8757 - DNA, 203 bp, synthetic construct
  source 1..203: mol_type = other DNA
ggcgcgccagtcctgtgctgctaccctccctgctgtcccctcttgccccaacccccagcacccgggctcagggaccacagcaaggcacctgcaggttgggccatactggcctcgcctggcctgaggtctcgctgatgctgggctgggtgcgaccccatctgcccaggacggggccggccaggtgggcgcgactcggaccgatg

SEQ ID NO: 8758 - DNA, 203 bp, synthetic construct
  source 1..203: mol_type = other DNA
ggcgcgccagtcctcgacgccccacgtacgggaacgccgccaaaaccttcgggacagctatgcgggttgacaatcccagtggggggccggggaccagctgattacttgtcctgcgagttcctcttgagactggccgaaaggcagccacggggccaccaaggcggcgcagcgctgcatgcggcaaggggcgactcggaccgatg

SEQ ID NO: 8759 - DNA, 203 bp, synthetic construct
  source 1..203: mol_type = other DNA
ggcgcgccagtcctgttgttcccgagacgaggtttacttctgtttcggggacggatgtctggtggcttatggctgtactgtttgcacacagtcttgctggaagctctaccggcctggggtggctactcggcccgggtccgaaccaggtgagctgctggggagatttgggagtgtaattggtccggtgtcgactcggaccgatg

SEQ ID NO: 8760 - DNA, 203 bp, synthetic construct
  source 1..203: mol_type = other DNA
ggcgcgccagtcctcggcttcggcttacaccgctggagtcctcgggttgggtgaaccttacagtttggccttcttggggacgttcctcaccagtcgcctctcacggattcccaacgtcacctgcgtgaaggcttgtgaccttgagtttacctacccaggcttgtccatcgattttgactgggcgtttacgactcggaccgatg

SEQ ID NO: 8761 - DNA, 203 bp, synthetic construct
  source 1..203: mol_type = other DNA
ggcgcgccagtcctcaccttgtgcttcttgcgtcgttgaccagaggccgctgaaatgtggttcctgcgtccgcgactgctgggagacggggggtcctgggttcgatgagtgcggtgtcggtactcggatgacgaagcacctcgaggccgtcctggttgatggaggtgtggagtccaaggtgacaacgccgactcggaccgatg

SEQ ID NO: 8762 - DNA, 203 bp, synthetic construct
  source 1..203: mol_type = other DNA
ggcgcgccagtcctaaggcaacagacagcaggtttacagtggtcagcgaaggtcttcgccggcttggttgcttactgacatggtcctggccctgttggtggtgatgaagttggctgaggctagagttgtccccctgtttatgctggcaatgtggtggtggttgaatggagcatctgctgccactattgcgactcggaccgatg

SEQ ID NO: 8763 - DNA, 203 bp, synthetic construct
  source 1..203: mol_type = other DNA
ggcgcgccagtcctctctcggcaaggtggtggatttagatatgcccgctgagttgtcagactttcgcgggtcttctggatcaccaatcttgtgcgatgagggtcatgctgttggcatgctgatttcggtgcttcatagggggagtagggtttcctcggtgcggtataccaaaccttgggaaactctcccgactcggaccgatg

SEQ ID NO: 8764 - DNA, 203 bp, synthetic construct
  source 1..203: mol_type = other DNA
ggcgcgccagtcctagttgcacgtcaccgacccgacctcaattttggggatgggtcgggcgaggttactcgctcgcgagtgcggcgtacgcctcctgcttttcgctacggcgaccccaccggtctctccgatggcgaagcatgaatctattcatgaggagatgttgggcagtgagggggaggtcccctcgactcggaccgatg

SEQ ID NO: 8765 - DNA, 203 bp, synthetic construct
  source 1..203: mol_type = other DNA
ggcgcgccagtcctgcgccacagacgcactttccactggttacactggcaattttgacaccgtaacagactgtggtttaatggttgaggaggtagtggaagtgaccctggacccgaccatcactatcggtgtgaagaccgtcccggcccctgccgaactgagggctcagaggcgtggtaggtgtggcccgactcggaccgatg

SEQ ID NO: 8766 - DNA, 203 bp, synthetic construct
  source 1..203: mol_type = other DNA
ggcgcgccagtcctacctacattatacctccctactgtgcagacattactacaagaggacagtgcctgttggcgtcatgggcaatgctgagggagcagtcccccttgtgcctactggcggtggaatcaggacttaccaaattgggacttctgactggtttgaggctgtggtcgtgcatgggacaatcacgactcggaccgatg

SEQ ID NO: 8767 - DNA, 203 bp, synthetic construct
  source 1..203: mol_type = other DNA
ggcgcgccagtcctcggtgcacgccaccagttgctatgagttgaaagctgctgacgttcggagggcggtgcgagccggcccgacttacgttggtggcgtaccttgcagctggagcgcgccgtgtactgcgcctgcgctcgtttacaggctaggccagggcatcaaaatcgatggagcgcgccgactgtcgactcggaccgatg

SEQ ID NO: 8768 - DNA, 203 bp, synthetic construct
  source 1..203: mol_type = other DNA
ggcgcgccagtccttgccctgtgacttagcacagggagcgcgccaccccccggtatctggcagtgttgccggtagtggttggacagatgaggacgagagggacttggtggaaaccaaggctgccgccatcgaggccattggggcggccttgcacctcccttcaccggaggctgctcaggccgctctagcgactcggaccgatg

SEQ ID NO: 8769 - DNA, 203 bp, synthetic construct
  source 1..203: mol_type = other DNA
ggcgcgccagtcctacccggacggtcaccaactgtttgacgagcgaggtccgatagaggtatctactcctatatgtgaagtgattggggacatcaggcttcagtgtgaccaaattgaggaaactccaacatcttactcttacatctggtcaggggcgcccttgggtactgggagaagtgtcccccaaccgactcggaccgatg

SEQ ID NO: 8770 - DNA, 203 bp, synthetic construct
  source 1..203: mol_type = other DNA
ggcgcgccagtcctccatgacgcgccctatagggacccatctgacttgtgacactaccaaagtttatgttactgaccctgatcgggccgctgagcgggccgagaaggttacaatctggaggggtgataggaagtatgacaagcattatgaggctgtcgttgaggctgtcctgaaaaaggcagccgcgacgactcggaccgatg

SEQ ID NO: 8771 - DNA, 203 bp, synthetic construct
  source 1..203: mol_type = other DNA
ggcgcgccagtcctcgaagtctcatggctggacctattcccaggctatagctaaagttaggcgccgagcagccgctggatacggcagcaaggtgaccgcctccacattggccactggttggcctcacgtggaggagatgctggacaaaatagccaggggacaggaagttcctttcacttttgtgaccacgactcggaccgatg

SEQ ID NO: 8772 - DNA, 203 bp, synthetic construct
  source 1..203: mol_type = other DNA
ggcgcgccagtcctagcgagaggttttcttctccaaaactacccgtaagcccccaagattcatagttttcccacctttggacttcaggatagctgaaaagatgattctgggtgaccccggcatcgttgcaaagtcaattctgggtgacgcttatctgttccagtacacgcccaatcagagggtcaaagcgactcggaccgatg

SEQ ID NO: 8773 - DNA, 203 bp, synthetic construct
  source 1..203: mol_type = other DNA
ggcgcgccagtcctctatggtttccccagatggggttcccttggggtaccgccagtgtaggtcgtcgggcgtgttaacaactagctcggcgaacagcatcacttgttacattaaggtcagcgcggcctgcaggcgggtggggattaaggcaccatcattctttatagctggagatgattgcttgatcacgactcggaccgatg

SEQ ID NO: 8774 - DNA, 203 bp, synthetic construct
  source 1..203: mol_type = other DNA
ggcgcgccagtcctccccccccccggcactgggtgcaagccccagaaaccgacgcctactgaagtagacgtaatggccccgcgccgaaccggcgaccggccaaaaggtggtggatgggtgatgacagggttggtaggtcgtaaatcccggtcatcctggtagccactataggtgggtcttaaggggagcgactcggaccgatg

SEQ ID NO: 8775 - DNA, 203 bp, synthetic construct
  source 1..203: mol_type = other DNA
ggcgcgccagtcctgctacggtccctcttgcgcatatggaggaaaagcgcacggtccacaggtgttggtcctaccggtgtaataaggacccggcgctaggcacgccgttaaaccgagcccgttactcccctgggcaaacgacgcccacgtacggtccacgtcgcccttcaatgtctctcttgaccaatcgactcggaccgatg

SEQ ID NO: 8776 - DNA, 203 bp, synthetic construct
  source 1..203: mol_type = other DNA
ggcgcgccagtcctgccttactcctctcttggtgtgcgtggcggccctcctcctgctggagcagcgtattgtcatggtcttcctcctggtcactatggcgggcatgtcgcaacgcgcgcccgcctcagtgttggggtcacggcctttcgaggccgggttgacttggcagtcttgttcttgcaggtcgacgactcggaccgatg

SEQ ID NO: 8777 - DNA, 203 bp, synthetic construct
  source 1..203: mol_type = other DNA
ggcgcgccagtcctacgggtcccgcgtgccgacgggggagagggtttgggaacgtgggaacgtcacacttttgtgtgactgccccaacggtccttgggtgtgggtcccggccctttgccaggcaatcggatggggcgaccctatcactcattggagccacggacaaaatcagtggcccctttcttgtccgactcggaccgatg

SEQ ID NO: 8778 - DNA, 203 bp, synthetic construct
  source 1..203: mol_type = other DNA
ggcgcgccagtcctcccaatttgtctacggcgccgtttcagtgacctgcgtgtggggttctgtgtcttggtttgcttccactgggggtcgcgactccaaggttgatgtgtggagtttggttccagttggctctgccagctgcaccatagccgcactgggatcttcggatcgcgacacagtggttgagccgactcggaccgatg

SEQ ID NO: 8779 - DNA, 203 bp, synthetic construct
  source 1..203: mol_type = other DNA
ggcgcgccagtccttctccgagtggggaattccctgcgccacttgtatcctggacaggcggcctgcctcgtgtggcacctgtgtgagggactgctggcccgagaccgggtcggtacgtttcccattccacaggtgtggcgcgggaccgaggctgaccagagaccttgaggctgtgcccttcgtcaatacgactcggaccgatg

SEQ ID NO: 8780 - DNA, 203 bp, synthetic construct
  source 1..203: mol_type = other DNA
ggcgcgccagtcctctgatgggttcatacatgttcagggccacttgcaggaggtggatgcgggcaacttcattccgcccccacgctggttgctcttggactttgtatttgtcctgttatacctgatgaagctggcagaggcacggttggtcccgctgatcctcctcctgctatggtggtgggtgaacccgactcggaccgatg

SEQ ID NO: 8781 - DNA, 203 bp, synthetic construct
  source 1..203: mol_type = other DNA
ggcgcgccagtccttgtggaagctcgctcggggggctttcccgctggcattactgatggggatttccgccactcgcggccgcacctctgtgcttggcgccgaattctgctttgatgtcacctttgaagtggacacgtcagtcttgggttgggtggttgctagtgtggtggcttgggccatagcgctcccgactcggaccgatg

SEQ ID NO: 8782 - DNA, 203 bp, synthetic construct
  source 1..203: mol_type = other DNA
ggcgcgccagtccttgatgttggtggttgtggccatggtcctcctcttcggccttttcgacgcgctcgattgggccttggaggagctccttgtgtcgcggccttcgttgcgtcgtttggcaagggtggtggagtgttgtgtgatggcgggcgagaaggccactaccgtccggcttgtgtccaagatgtcgactcggaccgatg

SEQ ID NO: 8783 - DNA, 203 bp, synthetic construct
  source 1..203: mol_type = other DNA
ggcgcgccagtcctggaaaagcacacgcgtccctttggagtatggaaacatggggcacaaggtcctgattctcaacccgtcggttgccactgtgagggccatgggcccttacatggagaggctggcggggaaacatcctagcattttctgtggacacgacacaacagctttcacacggatcacggactcgactcggaccgatg

SEQ ID NO: 8784 - DNA, 203 bp, synthetic construct
  source 1..203: mol_type = other DNA
ggcgcgccagtcctctactgcgactcccccgggctcgcctatgactcagcatccatccataattgagacaaagctggacgttggtgagatccccttttatgggcatggtatccccctcgagcgtatgaggactggtcgccaccttgtattctgccattccaaggcggagtgcgagagattggccggcccgactcggaccgatg

SEQ ID NO: 8785 - DNA, 203 bp, synthetic construct
  source 1..203: mol_type = other DNA
ggcgcgccagtcctagttctccgcgcggggggttaatgccatcgcctattataggggtaaggacagttccatcatcaaagacggagacctggtggtttgtgcgacagacgcgctctctaccgggtacacaggaaacttcgattctgtcaccgactgtgggttggtggtggaggaggtcgttgaggtgacgactcggaccgatg

SEQ ID NO: 8786 - DNA, 203 bp, synthetic construct
  source 1..203: mol_type = other DNA
ggcgcgccagtcctcccttgatcccaccattaccatttccttgcggactgtccctgcttcggctgaattgtcgatgcagcggcgcggacgcacggggagaggtcggtcgggccgctactactacgctggggtcggtaaggctcccgcgggggtggtgcggtctggtccggtctggtcggcagtggaagcgactcggaccgatg

SEQ ID NO: 8787 - DNA, 203 bp, synthetic construct
  source 1..203: mol_type = other DNA
ggcgcgccagtcctgtggtgaccaggccacccctcaacccgtggtgcaggtccccccggtagaccatcggccggggggggagtctgcgccacgggatgccaagacagtgacagatgcggtggcagccatccaggtgaactgcgattggtctgtgatgaccctgtcgatcggggaagtcctcaccttggcgactcggaccgatg

SEQ ID NO: 8788 - DNA, 203 bp, synthetic construct
  source 1..203: mol_type = other DNA
ggcgcgccagtcctctcaggctaagacagccgaggcctacgcagctacttccaggtggctcgctggctgctacacggggacgcgggccgtccccactgtatcaattgttgacaagctcttcgccgggggttgggccgccgtggtgggtcactgtcacagcgtcattgctgcggcggtggctgcctatgcgactcggaccgatg

SEQ ID NO: 8789 - DNA, 203 bp, synthetic construct
  source 1..203: mol_type = other DNA
ggcgcgccagtcctccctggtcaacagggagcctaaggtggatgaggtccaggtggggtacgtctgggatctgtgggagtgggtgatgcgccaggtgcgcatggtgatgtctagactccgggccctctgccctgtggtgtcactccccttgtggcactgcggggaggggtggtccggtgaatggcttccgactcggaccgatg

SEQ ID NO: 8790 - DNA, 203 bp, synthetic construct
  source 1..203: mol_type = other DNA
ggcgcgccagtcctacaccccgaaggtggtacccttcgggacgtcggggtgggctgaggtggtggtgacccctacccacgtggtgatcaggcgcacgtcctgttacaaactgcttcgccagcaaattctttcagcagctgtagctgagccctactacgttgatggcattccggtctcttgggaggctgcgactcggaccgatg

SEQ ID NO: 8791 - DNA, 203 bp, synthetic construct
  source 1..203: mol_type = other DNA
ggcgcgccagtcctacgcgagagcgccggccatggtctagggtccgggccaaagtgttaccattgatggggagcgctacacccttccgcaccagttgcggatgcggaatgtggcgccctctgaggtttcatctgaggtcagcatcgagatcgggacggagactgaagactcagaactgactgaggccgcgactcggaccgatg

SEQ ID NO: 8792 - DNA, 203 bp, synthetic construct
  source 1..203: mol_type = other DNA
ggcgcgccagtcctcggttacggagagcagctcagatgagaagaccctgtcggtgacctcctcgcaggaggacaccccgtcctcagactcatttgaagtcatccaagagtctgatactgctgaatcagaggaaagcgtcttcaacgtggctctttccgtactaaaagccttatttccacagagcgatgcgactcggaccgatg

SEQ ID NO: 8793 - DNA, 203 bp, synthetic construct
  source 1..203: mol_type = other DNA
ggcgcgccagtccttggtgggcaatgaacttacctttgaatgtgacaagtgtgaggcacgccaagagacccttgcctccttctcctacatatggtccggggtcccacttactcgggccactccggccaaaccaccagtggtgaggccggtggggtccttgttggtggcagacaccaccaaggtctacgcgactcggaccgatg

SEQ ID NO: 8794 - DNA, 203 bp, synthetic construct
  source 1..203: mol_type = other DNA
ggcgcgccagtccttcattgtgttcccccccctggacttccggatagctgaaaagctcattctgggagacccggggcgggttgcaaaggccggtgttgggggggcttacgccttccagtacacccccaaccagcgggttaaggagatgctaaagctgtgggaatcaaagaagaccccgtgcgccatctcgactcggaccgatg

SEQ ID NO: 8795 - DNA, 203 bp, synthetic construct
  source 1..203: mol_type = other DNA
ggcgcgccagtcctttaaaactggatccaggttgttcccacctggatttcccacagggagtggtactctgttattacggtaactttgtacgccagttttatctcccttcccccatgtaacttagaagtttttcacaaagaccaatagccggtaatcagccagattactgaaggtcaagcacttctgttcgactcggaccgatg

SEQ ID NO: 8796 - DNA, 203 bp, synthetic construct
  source 1..203: mol_type = other DNA
ggcgcgccagtccttagcctgcgtggctgcctgcacaccctatgggtgtgaagccaaacaatggacaaggtgtgaagagccccgtgtgctcgctttgagtcctccggcccctgaatgtggctaaccttaaccctgcagctagagcacgtaacccaatgtgtatctagtcgtaatgagcaattgcgggacgactcggaccgatg

SEQ ID NO: 8797 - DNA, 203 bp, synthetic construct
  source 1..203: mol_type = other DNA
ggcgcgccagtcctgggttggtggtggaaactacctgatgcactcaaggacatgggtatttttggtgaaaacatgttttatcattacctgggtaggagtggatacacaatacatgtgcagtgtaatgctagtaaatttcaccagggtacactaattgttgctctgatacctgagcatcagattgcaagcgactcggaccgatg

SEQ ID NO: 8798 - DNA, 203 bp, synthetic construct
  source 1..203: mol_type = other DNA
ggcgcgccagtccttttcacccactggacagggagtctccgtttcagcttcatgttttgtggtactgccaacactactgttaagcttttgttggcatacacaccacctggtatcgcagaacccaccacaagaaaggatgcaatgctaggcactcatgttatatgggatgtggggttgcagtctacaatcgactcggaccgatg

SEQ ID NO: 8799 - DNA, 203 bp, synthetic construct
  source 1..203: mol_type = other DNA
ggcgcgccagtcctatcaatggtagtgccatggattagcgctagtcattatagaaacacatcaccaggtagatctacatctgggtacataacatgctggtatcagactagattagtcattccacctcagaccccaccaacagctagattgttatgttttgtatctgggtgcaaagacttttgcttgcgcgactcggaccgatg

SEQ ID NO: 8800 - DNA, 203 bp, synthetic construct
  source 1..203: mol_type = other DNA
ggcgcgccagtcctcatggcacgagatactaacctacacctgcaaagtggtgcaatagcacagaaccctgttgagaattatatagatgaagttcttaatgaagttttagttgtcccaaatattaatagtagtaaccccacaacatcaaattctgccccagcattagatgctgcagaaacagggcacaccgactcggaccgatg

SEQ ID NO: 8801 - DNA, 203 bp, synthetic construct
  source 1..203: mol_type = other DNA
ggcgcgccagtccttctacaagaaatggctcaaattagaaggaaatttgaattgttcacctatactaggtttgattctgaaataaccctagttccatgcatttccgcccttagtcaggacattggacacatcacaatgcaatacatgtatgttccaccaggtgcaccggtgcccaatagtagggacgacgactcggaccgatg

SEQ ID NO: 8802 - DNA, 203 bp, synthetic construct
  source 1..203: mol_type = other DNA
ggcgcgccagtccttgtgaccagaccaattatcactacagctggccccagtgacatgtatgttcatgtaggtaaccttatttatagaaatcttcatcttttcaactctgagatgcatgaatctattttggtatcttattcatcagatttaatcatttaccgaacaaacactgtaggtgatgattacatcgactcggaccgatg

SEQ ID NO: 8803 - DNA, 203 bp, synthetic construct
  source 1..203: mol_type = other DNA
ggcgcgccagtcctacatatacatgccataaacccagtaggaaatatcagcaagaaaattattaaatggatgttgagaataatatcagcaatggtcataataattagaaactcttctgacccccaaactatattagcaacactcacactgattgggtgttctggatcaccctggagatttttaaaggacgactcggaccgatg

SEQ ID NO: 8804 - DNA, 203 bp, synthetic construct
  source 1..203: mol_type = other DNA
ggcgcgccagtccttgaccaacagagtgtagtaataatggatgacattatgcagaatccagccggggatgacatgacactgttctgccaaatggtttctagtgttacatttataccaccaatggctgatctaccagataaaggcaaggcttttgattctaggtttgtattatgcagcacaaatcattccgactcggaccgatg

SEQ ID NO: 8805 - DNA, 203 bp, synthetic construct
  source 1..203: mol_type = other DNA
ggcgcgccagtcctatttgtgtgtggaaaagcagtttctttcaaagatcgtaactcttgcaacaaatacagccttgcgcaggtgtacaacataatgattgaagaagacagacggagaagacaagtggttgatgtcatgacagctatattccaagggccaattgatatgaaaaacccaccaccacctgccgactcggaccgatg

SEQ ID NO: 8806 - DNA, 203 bp, synthetic construct
  source 1..203: mol_type = other DNA
ggcgcgccagtccttattactgacttgctccagtctgttagaacccctgaagttattaagtattgtgagggtaatagatggataattccagcagaatgcaagatagaaaaggagttgaacttggctaacacaatcataacaatcattgcaaatgttattggtatggcgagaataatatatgttatttacgactcggaccgatg

SEQ ID NO: 8807 - DNA, 203 bp, synthetic construct
  source 1..203: mol_type = other DNA
ggcgcgccagtcctcaaaaccaaattgcagcctagtgttttctatgatgtattccctggttcaaaagaaccagctgtgttgtctgaaaaagatgcccggttacaagttgatttcaatgaagcactattttctaaatacaaagggaatacagattgctccattaatgaccacataagaattgcatcatccgactcggaccgatg

SEQ ID NO: 8808 - DNA, 203 bp, synthetic construct
  source 1..203: mol_type = other DNA
ggcgcgccagtcctacattatgcagcacaactcattaccttagatattgacccaaaacctattacacttgaggacagtgtctttggcactgatggattagaggctcttgatttgaacactagcgcaggatttccatatattgcaatgggagttaaaaagagagatttaataaacaacaagaccaaggacgactcggaccgatg

SEQ ID NO: 8809 - DNA, 203 bp, synthetic construct
  source 1..203: mol_type = other DNA
ggcgcgccagtcctttcaaagttccacttgaatcctggaattgttactggatcagcagttggatgtgatccagaggtgttttggtcaaaaataccagcaatgttggatgataaatgtattatggcttttgattatacaaattatgatggtagtatacaccctatttggtttgaagctcttaaacaggtcgactcggaccgatg

SEQ ID NO: 8810 - DNA, 203 bp, synthetic construct
  source 1..203: mol_type = other DNA
ggcgcgccagtcctactggtagatctatcatttaatccaacattaatagatagactatgcaagtctaaacacatcttcaaaaatacatactatgaagtggagggaggtgtaccatctgggtgttcaggtactagtatttttaacactatgatcaataatattatcataaggaccttagtgttagatgccgactcggaccgatg

SEQ ID NO: 8811 - DNA, 203 bp, synthetic construct
  source 1..203: mol_type = other DNA
ggcgcgccagtcctatacaagaatatagatctagataagcttaagataattgcctatggtgatgatgtcatattctcatacatacatgaactggacatggaggctatagcaatagagggtgttaaatatggtttgactataactcctgctgataaatctaacacatttgtaaaattagactatagcaacgactcggaccgatg

SEQ ID NO: 8812 - DNA, 203 bp, synthetic construct
  source 1..203: mol_type = other DNA
ggcgcgccagtcctaaagaaaacctcctgtacattcaactacacaaaaactttgaagaacaggtactatgagcccagggacagctacttccagcaatatatgcttaagggtgagtatcagtactggtttgacctggatgcgactgaccgccactcagattacttcgcagaatttgttgtcttggtggtcgactcggaccgatg

SEQ ID NO: 8813 - DNA, 203 bp, synthetic construct
  source 1..203: mol_type = other DNA
ggcgcgccagtcctttatgaaggagacccgatatctgcctacaaggaagtcatcggccacaacctttttgatcttaagagaacaagctttgagaagctggccaagttaaatcttagcatgtctgtactcggggcctggactagacacaccagtaaaagactactacaagactgtgtcaatataggtgtcgactcggaccgatg

SEQ ID NO: 8814 - DNA, 203 bp, synthetic construct
  source 1..203: mol_type = other DNA
ggcgcgccagtcctcacctacggaaaccttgttacgacttttacttcctctagatagtcaagttcgaccgtcttctcagcgctccgccagggccgtgggccgaccccggcggggccgatccgagggcctcactaaaccatccaatcggtagtagcgacgggcggtgtgtacaaagggcagggacttaacgactcggaccgatg

SEQ ID NO: 8815 - DNA, 203 bp, synthetic construct
  source 1..203: mol_type = other DNA
ggcgcgccagtcctaaccttgttacgacttttacttcctctagatagtcaagttcgaccgtcttctcagcgctccgccagggccgtgggccgaccccggcggggccgatccgagggcctcactaaaccatccaatcggtagtagcgacgggcggtgtgtacaaagggcagggacttaatcaacgcaagcgactcggaccgatg

SEQ ID NO: 8816 - DNA, 203 bp, synthetic construct
  source 1..203: mol_type = other DNA
ggcgcgccagtcctcgacttttacttcctctagatagtcaagttcgaccgtcttctcagcgctccgccagggccgtgggccgaccccggcggggccgatccgagggcctcactaaaccatccaatcggtagtagcgacgggcggtgtgtacaaagggcagggacttaatcaacgcaagcttatgaccccgactcggaccgatg

SEQ ID NO: 8817 - DNA, 203 bp, synthetic construct
  source 1..203: mol_type = other DNA
ggcgcgccagtcctttcctctagatagtcaagttcgaccgtcttctcagcgctccgccagggccgtgggccgaccccggcggggccgatccgagggcctcactaaaccatccaatcggtagtagcgacgggcggtgtgtacaaagggcagggacttaatcaacgcaagcttatgacccgcacttactgcgactcggaccgatg

SEQ ID NO: 8818 - DNA, 203 bp, synthetic construct
  source 1..203: mol_type = other DNA
ggcgcgccagtccttagtcaagttcgaccgtcttctcagcgctccgccagggccgtgggccgaccccggcggggccgatccgagggcctcactaaaccatccaatcggtagtagcgacgggcggtgtgtacaaagggcagggacttaatcaacgcaagcttatgacccgcacttactgggaattcctccgactcggaccgatg

SEQ ID NO: 8819 - DNA, 203 bp, synthetic construct
  source 1..203: mol_type = other DNA
ggcgcgccagtcctcgaccgtcttctcagcgctccgccagggccgtgggccgaccccggcggggccgatccgagggcctcactaaaccatccaatcggtagtagcgacgggcggtgtgtacaaagggcagggacttaatcaacgcaagcttatgacccgcacttactgggaattcctcgttcatggggcgactcggaccgatg

SEQ ID NO: 8820 - DNA, 203 bp, synthetic construct
  source 1..203: mol_type = other DNA
ggcgcgccagtcctcccggcggggccgatccgagggcctcactaaaccatccaatcggtagtagcgacgggcggtgtgtacaaagggcagggacttaatcaacgcaagcttatgacccgcacttactgggaattcctcgttcatggggaataattgcaatccccgatccccatcacgaatggggttcacgactcggaccgatg

SEQ ID NO: 8821 - DNA, 203 bp, synthetic construct
  source 1..203: mol_type = other DNA
ggcgcgccagtcctggcctcactaaaccatccaatcggtagtagcgacgggcggtgtgtacaaagggcagggacttaatcaacgcaagcttatgacccgcacttactgggaattcctcgttcatggggaataattgcaatccccgatccccatcacgaatggggttcaacgggttacccgcgcctgcccgactcggaccgatg

SEQ ID NO: 8822 - DNA, 203 bp, synthetic construct
  source 1..203: mol_type = other DNA
ggcgcgccagtcctaaccatccaatcggtagtagcgacgggcggtgtgtacaaagggcagggacttaatcaacgcaagcttatgacccgcacttactgggaattcctcgttcatggggaataattgcaatccccgatccccatcacgaatggggttcaacgggttacccgcgcctgccggcgtagggtcgactcggaccgatg

SEQ ID NO: 8823 - DNA, 203 bp, synthetic construct
  source 1..203: mol_type = other DNA
ggcgcgccagtcctcgacgggcggtgtgtacaaagggcagggacttaatcaacgcaagcttatgacccgcacttactgggaattcctcgttcatggggaataattgcaatccccgatccccatcacgaatggggttcaacgggttacccgcgcctgccggcgtagggtaggcacacgctgagccagtccgactcggaccgatg

SEQ ID NO: 8824 - DNA, 203 bp, synthetic construct
  source 1..203: mol_type = other DNA
ggcgcgccagtcctgggcagggacttaatcaacgcaagcttatgacccgcacttactgggaattcctcgttcatggggaataattgcaatccccgatccccatcacgaatggggttcaacgggttacccgcgcctgccggcgtagggtaggcacacgctgagccagtcagtgtagcgcgcgtgcagcccgactcggaccgatg

SEQ ID NO: 8825 - DNA, 203 bp, synthetic construct
  source 1..203: mol_type = other DNA
ggcgcgccagtcctcaagcttatgacccgcacttactgggaattcctcgttcatggggaataattgcaatccccgatccccatcacgaatggggttcaacgggttacccgcgcctgccggcgtagggtaggcacacgctgagccagtcagtgtagcgcgcgtgcagccccggacatctaagggcatcacgactcggaccgatg

SEQ ID NO: 8826 - DNA, 203 bp, synthetic construct
  source 1..203: mol_type = other DNA
ggcgcgccagtcctactgggaattcctcgttcatggggaataattgcaatccccgatccccatcacgaatggggttcaacgggttacccgcgcctgccggcgtagggtaggcacacgctgagccagtcagtgtagcgcgcgtgcagccccggacatctaagggcatcacagacctgttattgctcaatcgactcggaccgatg

SEQ ID NO: 8827 - DNA, 203 bp, synthetic construct
  source 1..203: mol_type = other DNA
ggcgcgccagtccttacccgcgcctgccggcgtagggtaggcacacgctgagccagtcagtgtagcgcgcgtgcagccccggacatctaagggcatcacagacctgttattgctcaatctcgggtggctgaacgccacttgtccctctaagaagttgggggacgccgaccgctcgggggtcgcgtaaccgactcggaccgatg

SEQ ID NO: 8828 - DNA, 203 bp, synthetic construct
  source 1..203: mol_type = other DNA
ggcgcgccagtcctgggtaggcacacgctgagccagtcagtgtagcgcgcgtgcagccccggacatctaagggcatcacagacctgttattgctcaatctcgggtggctgaacgccacttgtccctctaagaagttgggggacgccgaccgctcgggggtcgcgtaactagttagcatgccagagtctcgactcggaccgatg

SEQ ID NO: 8829 - DNA, 203 bp, synthetic construct
  source 1..203: mol_type = other DNA
ggcgcgccagtcctacgctgagccagtcagtgtagcgcgcgtgcagccccggacatctaagggcatcacagacctgttattgctcaatctcgggtggctgaacgccacttgtccctctaagaagttgggggacgccgaccgctcgggggtcgcgtaactagttagcatgccagagtctcgttcgttatcgactcggaccgatg

SEQ ID NO: 8830 - DNA, 203 bp, synthetic construct
  source 1..203: mol_type = other DNA
ggcgcgccagtcctagccccggacatctaagggcatcacagacctgttattgctcaatctcgggtggctgaacgccacttgtccctctaagaagttgggggacgccgaccgctcgggggtcgcgtaactagttagcatgccagagtctcgttcgttatcggaattaaccagacaaatcgctccaccaacgactcggaccgatg

SEQ ID NO: 8831 - DNA, 203 bp, synthetic construct
  source 1..203: mol_type = other DNA
ggcgcgccagtcctatcacagacctgttattgctcaatctcgggtggctgaacgccacttgtccctctaagaagttgggggacgccgaccgctcgggggtcgcgtaactagttagcatgccagagtctcgttcgttatcggaattaaccagacaaatcgctccaccaactaagaacggccatgcaccacgactcggaccgatg

SEQ ID NO: 8832 - DNA, 203 bp, synthetic construct
  source 1..203: mol_type = other DNA
ggcgcgccagtccttgttattgctcaatctcgggtggctgaacgccacttgtccctctaagaagttgggggacgccgaccgctcgggggtcgcgtaactagttagcatgccagagtctcgttcgttatcggaattaaccagacaaatcgctccaccaactaagaacggccatgcaccaccacccacggcgactcggaccgatg

SEQ ID NO: 8833 - DNA, 203 bp, synthetic construct
  source 1..203: mol_type = other DNA
ggcgcgccagtcctcaatctcgggtggctgaacgccacttgtccctctaagaagttgggggacgccgaccgctcgggggtcgcgtaactagttagcatgccagagtctcgttcgttatcggaattaaccagacaaatcgctccaccaactaagaacggccatgcaccaccacccacggaatcgagaaacgactcggaccgatg

SEQ ID NO: 8834 - DNA, 203 bp, synthetic construct
  source 1..203: mol_type = other DNA
ggcgcgccagtcctgtctcgttcgttatcggaattaaccagacaaatcgctccaccaactaagaacggccatgcaccaccacccacggaatcgagaaagagctatcaatctgtcaatcctgtccgtgtccgggccgggtgaggtttcccgtgttgagtcaaattaagccgcaggctccactcctggtgcgactcggaccgatg

SEQ ID NO: 8835 - DNA, 203 bp, synthetic construct
  source 1..203: mol_type = other DNA
ggcgcgccagtccttaaccagacaaatcgctccaccaactaagaacggccatgcaccaccacccacggaatcgagaaagagctatcaatctgtcaatcctgtccgtgtccgggccgggtgaggtttcccgtgttgagtcaaattaagccgcaggctccactcctggtggtgcccttccgtcaattcctcgactcggaccgatg

SEQ ID NO: 8836 - DNA, 203 bp, synthetic construct
  source 1..203: mol_type = other DNA
ggcgcgccagtcctacggccatgcaccaccacccacggaatcgagaaagagctatcaatctgtcaatcctgtccgtgtccgggccgggtgaggtttcccgtgttgagtcaaattaagccgcaggctccactcctggtggtgcccttccgtcaattcctttaagtttcagctttgcaaccatactcccccgactcggaccgatg

SEQ ID NO: 8837 - DNA, 203 bp, synthetic construct
  source 1..203: mol_type = other DNA
ggcgcgccagtcctgaaagagctatcaatctgtcaatcctgtccgtgtccgggccgggtgaggtttcccgtgttgagtcaaattaagccgcaggctccactcctggtggtgcccttccgtcaattcctttaagtttcagctttgcaaccatactccccccggaacccaaagactttggtttcccggaacgactcggaccgatg

SEQ ID NO: 8838 - DNA, 203 bp, synthetic construct
  source 1..203: mol_type = other DNA
ggcgcgccagtccttcaatctgtcaatcctgtccgtgtccgggccgggtgaggtttcccgtgttgagtcaaattaagccgcaggctccactcctggtggtgcccttccgtcaattcctttaagtttcagctttgcaaccatactccccccggaacccaaagactttggtttcccggaagctgcccggccgactcggaccgatg

SEQ ID NO: 8839 - DNA, 203 bp, synthetic construct
  source 1..203: mol_type = other DNA
ggcgcgccagtcctaatcctgtccgtgtccgggccgggtgaggtttcccgtgttgagtcaaattaagccgcaggctccactcctggtggtgcccttccgtcaattcctttaagtttcagctttgcaaccatactccccccggaacccaaagactttggtttcccggaagctgcccggcgggtcatgggcgactcggaccgatg

SEQ ID NO: 8840 - DNA, 203 bp, synthetic construct
  source 1..203: mol_type = other DNA
ggcgcgccagtcctgtgtccgggccgggtgaggtttcccgtgttgagtcaaattaagccgcaggctccactcctggtggtgcccttccgtcaattcctttaagtttcagctttgcaaccatactccccccggaacccaaagactttggtttcccggaagctgcccggcgggtcatgggaataacgccgcgactcggaccgatg

SEQ ID NO: 8841 - DNA, 203 bp, synthetic construct
  source 1..203: mol_type = other DNA
ggcgcgccagtcctctccactcctggtggtgcccttccgtcaattcctttaagtttcagctttgcaaccatactccccccggaacccaaagactttggtttcccggaagctgcccggcgggtcatgggaataacgccgccgcatcgccggtcggcatcgtttatggtcggaactacgacggtatctgacgactcggaccgatg

SEQ ID NO: 8842 - DNA, 203 bp, synthetic construct
  source 1..203: mol_type = other DNA
ggcgcgccagtcctttcagctttgcaaccatactccccccggaacccaaagactttggtttcccggaagctgcccggcgggtcatgggaataacgccgccgcatcgccggtcggcatcgtttatggtcggaactacgacggtatctgatcgtcttcgaacctccgactttcgttcttgattaatgaaacgactcggaccgatg

SEQ ID NO: 8843 - DNA, 203 bp, synthetic construct
  source 1..203: mol_type = other DNA
ggcgcgccagtcctcaaccatactccccccggaacccaaagactttggtttcccggaagctgcccggcgggtcatgggaataacgccgccgcatcgccggtcggcatcgtttatggtcggaactacgacggtatctgatcgtcttcgaacctccgactttcgttcttgattaatgaaaacattcttggcgactcggaccgatg

SEQ ID NO: 8844 - DNA, 203 bp, synthetic construct
  source 1..203: mol_type = other DNA
ggcgcgccagtcctttggtttcccggaagctgcccggcgggtcatgggaataacgccgccgcatcgccggtcggcatcgtttatggtcggaactacgacggtatctgatcgtcttcgaacctccgactttcgttcttgattaatgaaaacattcttggcaaatgctttcgctctggtccgtcttgcgccgactcggaccgatg

SEQ ID NO: 8845 - DNA, 203 bp, synthetic construct
  source 1..203: mol_type = other DNA
ggcgcgccagtcctggaagctgcccggcgggtcatgggaataacgccgccgcatcgccggtcggcatcgtttatggtcggaactacgacggtatctgatcgtcttcgaacctccgactttcgttcttgattaatgaaaacattcttggcaaatgctttcgctctggtccgtcttgcgccggtccaagacgactcggaccgatg

SEQ ID NO: 8846 - DNA, 203 bp, synthetic construct
  source 1..203: mol_type = other DNA
ggcgcgccagtcctcggcgggtcatgggaataacgccgccgcatcgccggtcggcatcgtttatggtcggaactacgacggtatctgatcgtcttcgaacctccgactttcgttcttgattaatgaaaacattcttggcaaatgctttcgctctggtccgtcttgcgccggtccaagaatttcacctccgactcggaccgatg

SEQ ID NO: 8847 - DNA, 203 bp, synthetic construct
  source 1..203: mol_type = other DNA
ggcgcgccagtcctgccgccgcatcgccggtcggcatcgtttatggtcggaactacgacggtatctgatcgtcttcgaacctccgactttcgttcttgattaatgaaaacattcttggcaaatgctttcgctctggtccgtcttgcgccggtccaagaatttcacctctagcggcgcaatacgaatgccgactcggaccgatg

SEQ ID NO: 8848 - DNA, 203 bp, synthetic construct
  source 1..203: mol_type = other DNA
ggcgcgccagtcctcgccggtcggcatcgtttatggtcggaactacgacggtatctgatcgtcttcgaacctccgactttcgttcttgattaatgaaaacattcttggcaaatgctttcgctctggtccgtcttgcgccggtccaagaatttcacctctagcggcgcaatacgaatgcccccggccgtcgactcggaccgatg

SEQ ID NO: 8849 - DNA, 203 bp, synthetic construct
  source 1..203: mol_type = other DNA
ggcgcgccagtcctggtcggaactacgacggtatctgatcgtcttcgaacctccgactttcgttcttgattaatgaaaacattcttggcaaatgctttcgctctggtccgtcttgcgccggtccaagaatttcacctctagcggcgcaatacgaatgcccccggccgtccctcttaatcatggcctcacgactcggaccgatg

SEQ ID NO: 8850 - DNA, 203 bp, synthetic construct
  source 1..203: mol_type = other DNA
ggcgcgccagtcctacgacggtatctgatcgtcttcgaacctccgactttcgttcttgattaatgaaaacattcttggcaaatgctttcgctctggtccgtcttgcgccggtccaagaatttcacctctagcggcgcaatacgaatgcccccggccgtccctcttaatcatggcctcagttccgaaaacgactcggaccgatg

SEQ ID NO: 8851 - DNA, 203 bp, synthetic construct
  source 1..203: mol_type = other DNA
ggcgcgccagtcctctgatcgtcttcgaacctccgactttcgttcttgattaatgaaaacattcttggcaaatgctttcgctctggtccgtcttgcgccggtccaagaatttcacctctagcggcgcaatacgaatgcccccggccgtccctcttaatcatggcctcagttccgaaaaccaacaaaatcgactcggaccgatg

SEQ ID NO: 8852 - DNA, 203 bp, synthetic construct
  source 1..203: mol_type = other DNA
ggcgcgccagtccttcgaacctccgactttcgttcttgattaatgaaaacattcttggcaaatgctttcgctctggtccgtcttgcgccggtccaagaatttcacctctagcggcgcaatacgaatgcccccggccgtccctcttaatcatggcctcagttccgaaaaccaacaaaatagaaccgcggcgactcggaccgatg

SEQ ID NO: 8853 - DNA, 203 bp, synthetic construct
  source 1..203: mol_type = other DNA
ggcgcgccagtcctgaaaacattcttggcaaatgctttcgctctggtccgtcttgcgccggtccaagaatttcacctctagcggcgcaatacgaatgcccccggccgtccctcttaatcatggcctcagttccgaaaaccaacaaaatagaaccgcggtcctattccattattcctagctgcggtatccgactcggaccgatg

SEQ ID NO: 8854 - DNA, 203 bp, synthetic construct
  source 1..203: mol_type = other DNA
ggcgcgccagtcctttggcaaatgctttcgctctggtccgtcttgcgccggtccaagaatttcacctctagcggcgcaatacgaatgcccccggccgtccctcttaatcatggcctcagttccgaaaaccaacaaaatagaaccgcggtcctattccattattcctagctgcggtatccaggcggctccgactcggaccgatg

SEQ ID NO: 8855 - DNA, 203 bp, synthetic construct
  source 1..203: mol_type = other DNA
ggcgcgccagtcctggtccgtcttgcgccggtccaagaatttcacctctagcggcgcaatacgaatgcccccggccgtccctcttaatcatggcctcagttccgaaaaccaacaaaatagaaccgcggtcctattccattattcctagctgcggtatccaggcggctcgggcctgctttgaacactctcgactcggaccgatg

SEQ ID NO: 8856 - DNA, 203 bp, synthetic construct
  source 1..203: mol_type = other DNA
ggcgcgccagtcctgcgccggtccaagaatttcacctctagcggcgcaatacgaatgcccccggccgtccctcttaatcatggcctcagttccgaaaaccaacaaaatagaaccgcggtcctattccattattcctagctgcggtatccaggcggctcgggcctgctttgaacactctaattttttcacgactcggaccgatg

SEQ ID NO: 8857 - DNA, 203 bp, synthetic construct
  source 1..203: mol_type = other DNA
ggcgcgccagtcctcgcaatacgaatgcccccggccgtccctcttaatcatggcctcagttccgaaaaccaacaaaatagaaccgcggtcctattccattattcctagctgcggtatccaggcggctcgggcctgctttgaacactctaattttttcaaagtaaacgcttcgggccccgcgggacactcgactcggaccgatg

SEQ ID NO: 8858 - DNA, 203 bp, synthetic construct
  source 1..203: mol_type = other DNA
ggcgcgccagtcctccgtccctcttaatcatggcctcagttccgaaaaccaacaaaatagaaccgcggtcctattccattattcctagctgcggtatccaggcggctcgggcctgctttgaacactctaattttttcaaagtaaacgcttcgggccccgcgggacactcagctaagagcatcgaggggcgactcggaccgatg

SEQ ID NO: 8859 - DNA, 203 bp, synthetic construct
  source 1..203: mol_type = other DNA
ggcgcgccagtccttaatcatggcctcagttccgaaaaccaacaaaatagaaccgcggtcctattccattattcctagctgcggtatccaggcggctcgggcctgctttgaacactctaattttttcaaagtaaacgcttcgggccccgcgggacactcagctaagagcatcgagggggcgccgagagcgactcggaccgatg

SEQ ID NO: 8860 - DNA, 203 bp, synthetic construct
  source 1..203: mol_type = other DNA
ggcgcgccagtcctctcagttccgaaaaccaacaaaatagaaccgcggtcctattccattattcctagctgcggtatccaggcggctcgggcctgctttgaacactctaattttttcaaagtaaacgcttcgggccccgcgggacactcagctaagagcatcgagggggcgccgagaggcaaggggcgcgactcggaccgatg

SEQ ID NO: 8861 - DNA, 203 bp, synthetic construct
  source 1..203: mol_type = other DNA
ggcgcgccagtcctctagctgcggtatccaggcggctcgggcctgctttgaacactctaattttttcaaagtaaacgcttcgggccccgcgggacactcagctaagagcatcgagggggcgccgagaggcaaggggcggggacgggcggtggctcgcctcgcgggggaccgcccgcccgctcccaagacgactcggaccgatg

SEQ ID NO: 8862 - DNA, 203 bp, synthetic construct
  source 1..203: mol_type = other DNA
ggcgcgccagtcctttcaaagtaaacgcttcgggccccgcgggacactcagctaagagcatcgagggggcgccgagaggcaaggggcggggacgggcggtggctcgcctcgcgggggaccgcccgcccgctcccaagatccaactacgagctttttaactgcagcaactttaatatacgctattggagcgactcggaccgatg

SEQ ID NO: 8863 - DNA, 203 bp, synthetic construct
  source 1..203: mol_type = other DNA
ggcgcgccagtcctcactcagctaagagcatcgagggggcgccgagaggcaaggggcggggacgggcggtggctcgcctcgcgggggaccgcccgcccgctcccaagatccaactacgagctttttaactgcagcaactttaatatacgctattggagctggaattaccgcggctgctggcaccagaccgactcggaccgatg

SEQ ID NO: 8864 - DNA, 203 bp, synthetic construct
  source 1..203: mol_type = other DNA
ggcgcgccagtcctagagcatcgagggggcgccgagaggcaaggggcggggacgggcggtggctcgcctcgcgggggaccgcccgcccgctcccaagatccaactacgagctttttaactgcagcaactttaatatacgctattggagctggaattaccgcggctgctggcaccagacttgccctccacgactcggaccgatg

SEQ ID NO: 8865 - DNA, 203 bp, synthetic construct
  source 1..203: mol_type = other DNA
ggcgcgccagtcctgggggcgccgagaggcaaggggcggggacgggcggtggctcgcctcgcgggggaccgcccgcccgctcccaagatccaactacgagctttttaactgcagcaactttaatatacgctattggagctggaattaccgcggctgctggcaccagacttgccctccaatggatcctccgactcggaccgatg

SEQ ID NO: 8866 - DNA, 203 bp, synthetic construct
  source 1..203: mol_type = other DNA
ggcgcgccagtcctagaggcaaggggcggggacgggcggtggctcgcctcgcgggggaccgcccgcccgctcccaagatccaactacgagctttttaactgcagcaactttaatatacgctattggagctggaattaccgcggctgctggcaccagacttgccctccaatggatcctcgttaaaggatcgactcggaccgatg

SEQ ID NO: 8867 - DNA, 203 bp, synthetic construct
  source 1..203: mol_type = other DNA
ggcgcgccagtccttacgagctttttaactgcagcaactttaatatacgctattggagctggaattaccgcggctgctggcaccagacttgccctccaatggatcctcgttaaaggatttaaagtggactcattccaattacagggcctcgaaagagtcctgtattgttatttttcgtcactacctcccgactcggaccgatg

SEQ ID NO: 8868 - DNA, 203 bp, synthetic construct
  source 1..203: mol_type = other DNA
ggcgcgccagtcctatacgctattggagctggaattaccgcggctgctggcaccagacttgccctccaatggatcctcgttaaaggatttaaagtggactcattccaattacagggcctcgaaagagtcctgtattgttatttttcgtcactacctccccgggtcgggagtgggtaatttgcgcgcctcgactcggaccgatg

SEQ ID NO: 8869 - DNA, 203 bp, synthetic construct
  source 1..203: mol_type = other DNA
ggcgcgccagtcctggagctggaattaccgcggctgctggcaccagacttgccctccaatggatcctcgttaaaggatttaaagtggactcattccaattacagggcctcgaaagagtcctgtattgttatttttcgtcactacctccccgggtcgggagtgggtaatttgcgcgcctgctgccttcccgactcggaccgatg

SEQ ID NO: 8870 - DNA, 203 bp, synthetic construct
  source 1..203: mol_type = other DNA
ggcgcgccagtcctagacttgccctccaatggatcctcgttaaaggatttaaagtggactcattccaattacagggcctcgaaagagtcctgtattgttatttttcgtcactacctccccgggtcgggagtgggtaatttgcgcgcctgctgccttccttggatgtggtagccgtttctcaggctccccgactcggaccgatg

SEQ ID NO: 8871 - DNA, 203 bp, synthetic construct
  source 1..203: mol_type = other DNA
ggcgcgccagtccttccaatggatcctcgttaaaggatttaaagtggactcattccaattacagggcctcgaaagagtcctgtattgttatttttcgtcactacctccccgggtcgggagtgggtaatttgcgcgcctgctgccttccttggatgtggtagccgtttctcaggctccctctccggaatcgactcggaccgatg

SEQ ID NO: 8872 - DNA, 203 bp, synthetic construct
  source 1..203: mol_type = other DNA
ggcgcgccagtcctggcctcgaaagagtcctgtattgttatttttcgtcactacctccccgggtcgggagtgggtaatttgcgcgcctgctgccttccttggatgtggtagccgtttctcaggctccctctccggaatcgaaccctgattccccgtcacccgtggtcaccatggtaggcacggcgactcgactcggaccgatg

SEQ ID NO: 8873 - DNA, 203 bp, synthetic construct
  source 1..203: mol_type = other DNA
ggcgcgccagtccttcgtcactacctccccgggtcgggagtgggtaatttgcgcgcctgctgccttccttggatgtggtagccgtttctcaggctccctctccggaatcgaaccctgattccccgtcacccgtggtcaccatggtaggcacggcgactaccatcgaaagttgatagggcagacgttcgcgactcggaccgatg

SEQ ID NO: 8874 - DNA, 203 bp, synthetic construct
  source 1..203: mol_type = other DNA
ggcgcgccagtcctgtggtagccgtttctcaggctccctctccggaatcgaaccctgattccccgtcacccgtggtcaccatggtaggcacggcgactaccatcgaaagttgatagggcagacgttcgaatgggtcgtcgccgccacggggggcgtgcgatcggcccgaggttatctagagtcaccaacgactcggaccgatg

SEQ ID NO: 8875 - DNA, 203 bp, synthetic construct
  source 1..203: mol_type = other DNA
ggcgcgccagtcctgaatcgaaccctgattccccgtcacccgtggtcaccatggtaggcacggcgactaccatcgaaagttgatagggcagacgttcgaatgggtcgtcgccgccacggggggcgtgcgatcggcccgaggttatctagagtcaccaaagccgccggcgcccgccccccggccggggccgactcggaccgatg

SEQ ID NO: 8876 - DNA, 203 bp, synthetic construct
  source 1..203: mol_type = other DNA
ggcgcgccagtcctctgattccccgtcacccgtggtcaccatggtaggcacggcgactaccatcgaaagttgatagggcagacgttcgaatgggtcgtcgccgccacggggggcgtgcgatcggcccgaggttatctagagtcaccaaagccgccggcgcccgccccccggccggggccggagaggggcgactcggaccgatg

SEQ ID NO: 8877 - DNA, 203 bp, synthetic construct
  source 1..203: mol_type = other DNA
ggcgcgccagtcctgtcaccatggtaggcacggcgactaccatcgaaagttgatagggcagacgttcgaatgggtcgtcgccgccacggggggcgtgcgatcggcccgaggttatctagagtcaccaaagccgccggcgcccgccccccggccggggccggagaggggctgaccgggttggttttgatcgactcggaccgatg

SEQ ID NO: 8878 - DNA, 203 bp, synthetic construct
  source 1..203: mol_type = other DNA
ggcgcgccagtcctcacggggggcgtgcgatcggcccgaggttatctagagtcaccaaagccgccggcgcccgccccccggccggggccggagaggggctgaccgggttggttttgatctgataaatgcacgcatcccccccgcgaagggggtcagcgcccgtcggcatgtattagctctagaattaccgactcggaccgatg

SEQ ID NO: 8879 - DNA, 203 bp, synthetic construct
  source 1..203: mol_type = other DNA
ggcgcgccagtcctcccgaggttatctagagtcaccaaagccgccggcgcccgccccccggccggggccggagaggggctgaccgggttggttttgatctgataaatgcacgcatcccccccgcgaagggggtcagcgcccgtcggcatgtattagctctagaattaccacagttatccaagtaggagcgactcggaccgatg

SEQ ID NO: 8880 - DNA, 203 bp, synthetic construct
  source 1..203: mol_type = other DNA
ggcgcgccagtcctggggctgaccgggttggttttgatctgataaatgcacgcatcccccccgcgaagggggtcagcgcccgtcggcatgtattagctctagaattaccacagttatccaagtaggagaggagcgagcgaccaaaggaaccataactgatttaatgagccattcgcagtttcactgtacgactcggaccgatg

SEQ ID NO: 8881 - DNA, 203 bp, synthetic construct
  source 1..203: mol_type = other DNA
ggcgcgccagtccttcccccccgcgaagggggtcagcgcccgtcggcatgtattagctctagaattaccacagttatccaagtaggagaggagcgagcgaccaaaggaaccataactgatttaatgagccattcgcagtttcactgtaccggccgtgcgtactcagacatgcatggcttaatctttgacgactcggaccgatg

SEQ ID NO: 8882 - DNA, 203 bp, synthetic construct
  source 1..203: mol_type = other DNA
ggcgcgccagtcctgggcggcccgccggcggggacaggcgggggaccggctatccgaggccaaccgaggctccgcggcgctgccgtatcgttccgcctgggcgggattctgacttagaggcgttcagtcataatcccacagatggtagcttcgccccattggctcctcagccaagcacatacaccaaacgactcggaccgatg

SEQ ID NO: 8883 - DNA, 203 bp, synthetic construct
  source 1..203: mol_type = other DNA
ggcgcgccagtcctccggcggggacaggcgggggaccggctatccgaggccaaccgaggctccgcggcgctgccgtatcgttccgcctgggcgggattctgacttagaggcgttcagtcataatcccacagatggtagcttcgccccattggctcctcagccaagcacatacaccaaatgtctgaacccgactcggaccgatg

SEQ ID NO: 8884 - DNA, 203 bp, synthetic construct
  source 1..203: mol_type = other DNA
ggcgcgccagtcctcaggcgggggaccggctatccgaggccaaccgaggctccgcggcgctgccgtatcgttccgcctgggcgggattctgacttagaggcgttcagtcataatcccacagatggtagcttcgccccattggctcctcagccaagcacatacaccaaatgtctgaacctgcggttcctcgactcggaccgatg

SEQ ID NO: 8885 - DNA, 203 bp, synthetic construct
  source 1..203: mol_type = other DNA
ggcgcgccagtcctcgaggctccgcggcgctgccgtatcgttccgcctgggcgggattctgacttagaggcgttcagtcataatcccacagatggtagcttcgccccattggctcctcagccaagcacatacaccaaatgtctgaacctgcggttcctctcgtactgagcaggattaccatggcaacacgactcggaccgatg

SEQ ID NO: 8886 - DNA, 203 bp, synthetic construct
  source 1..203: mol_type = other DNA
ggcgcgccagtcctcggcgctgccgtatcgttccgcctgggcgggattctgacttagaggcgttcagtcataatcccacagatggtagcttcgccccattggctcctcagccaagcacatacaccaaatgtctgaacctgcggttcctctcgtactgagcaggattaccatggcaacaacacatcatccgactcggaccgatg

SEQ ID NO: 8887 - DNA, 203 bp, synthetic construct
  source 1..203: mol_type = other DNA
ggcgcgccagtcctgtatcgttccgcctgggcgggattctgacttagaggcgttcagtcataatcccacagatggtagcttcgccccattggctcctcagccaagcacatacaccaaatgtctgaacctgcggttcctctcgtactgagcaggattaccatggcaacaacacatcatcagtagggtaacgactcggaccgatg

SEQ ID NO: 8888 - DNA, 203 bp, synthetic construct
  source 1..203: mol_type = other DNA
ggcgcgccagtcctgcctgggcgggattctgacttagaggcgttcagtcataatcccacagatggtagcttcgccccattggctcctcagccaagcacatacaccaaatgtctgaacctgcggttcctctcgtactgagcaggattaccatggcaacaacacatcatcagtagggtaaaactaacctgcgactcggaccgatg

SEQ ID NO: 8889 - DNA, 203 bp, synthetic construct
  source 1..203: mol_type = other DNA
ggcgcgccagtcctgcacatacaccaaatgtctgaacctgcggttcctctcgtactgagcaggattaccatggcaacaacacatcatcagtagggtaaaactaacctgtctcacgacggtctaaacccagctcacgttccctattagtgggtgaacaatccaacgcttggtgaattctgcttcacaatcgactcggaccgatg

SEQ ID NO: 8890 - DNA, 203 bp, synthetic construct
  source 1..203: mol_type = other DNA
ggcgcgccagtccttcctctcgtactgagcaggattaccatggcaacaacacatcatcagtagggtaaaactaacctgtctcacgacggtctaaacccagctcacgttccctattagtgggtgaacaatccaacgcttggtgaattctgcttcacaatgataggaagagccgacatcgaaggatcaaacgactcggaccgatg

SEQ ID NO: 8891 - DNA, 203 bp, synthetic construct
  source 1..203: mol_type = other DNA
ggcgcgccagtcctgtaaaactaacctgtctcacgacggtctaaacccagctcacgttccctattagtgggtgaacaatccaacgcttggtgaattctgcttcacaatgataggaagagccgacatcgaaggatcaaaaagcgacgtcgctatgaacgcttggccgccacaagccagttatccctgtgcgactcggaccgatg

SEQ ID NO: 8892 - DNA, 203 bp, synthetic construct
  source 1..203: mol_type = other DNA
ggcgcgccagtccttagtgggtgaacaatccaacgcttggtgaattctgcttcacaatgataggaagagccgacatcgaaggatcaaaaagcgacgtcgctatgaacgcttggccgccacaagccagttatccctgtggtaacttttctgacacctcctgcttaaaacccaaaaggtcagaaggatcgcgactcggaccgatg

SEQ ID NO: 8893 - DNA, 203 bp, synthetic construct
  source 1..203: mol_type = other DNA
ggcgcgccagtcctgcttggtgaattctgcttcacaatgataggaagagccgacatcgaaggatcaaaaagcgacgtcgctatgaacgcttggccgccacaagccagttatccctgtggtaacttttctgacacctcctgcttaaaacccaaaaggtcagaaggatcgtgaggccccgctttcacggtcgactcggaccgatg

SEQ ID NO: 8894 - DNA, 203 bp, synthetic construct
  source 1..203: mol_type = other DNA
ggcgcgccagtcctcaatgataggaagagccgacatcgaaggatcaaaaagcgacgtcgctatgaacgcttggccgccacaagccagttatccctgtggtaacttttctgacacctcctgcttaaaacccaaaaggtcagaaggatcgtgaggccccgctttcacggtctgtattcgtactgaaaatccgactcggaccgatg

SEQ ID NO: 8895 - DNA, 203 bp, synthetic construct
  source 1..203: mol_type = other DNA
ggcgcgccagtcctcgtcgctatgaacgcttggccgccacaagccagttatccctgtggtaacttttctgacacctcctgcttaaaacccaaaaggtcagaaggatcgtgaggccccgctttcacggtctgtattcgtactgaaaatcaagatcaagcgagcttttgcccttctgctccacgggaggtcgactcggaccgatg

SEQ ID NO: 8896 - DNA, 203 bp, synthetic construct
  source 1..203: mol_type = other DNA
ggcgcgccagtcctcagttatccctgtggtaacttttctgacacctcctgcttaaaacccaaaaggtcagaaggatcgtgaggccccgctttcacggtctgtattcgtactgaaaatcaagatcaagcgagcttttgcccttctgctccacgggaggtttctgtcctccctgagctcgccttaggacacgactcggaccgatg

SEQ ID NO: 8897 - DNA, 203 bp, synthetic construct
  source 1..203: mol_type = other DNA
ggcgcgccagtcctctcctgcttaaaacccaaaaggtcagaaggatcgtgaggccccgctttcacggtctgtattcgtactgaaaatcaagatcaagcgagcttttgcccttctgctccacgggaggtttctgtcctccctgagctcgccttaggacacctgcgttaccgtttgacaggtgtaccgcccgactcggaccgatg

SEQ ID NO: 8898 - DNA, 203 bp, synthetic construct
  source 1..203: mol_type = other DNA
ggcgcgccagtcctggtcagaaggatcgtgaggccccgctttcacggtctgtattcgtactgaaaatcaagatcaagcgagcttttgcccttctgctccacgggaggtttctgtcctccctgagctcgccttaggacacctgcgttaccgtttgacaggtgtaccgccccagtcaaactccccacctgcgactcggaccgatg

SEQ ID NO: 8899 - DNA, 203 bp, synthetic construct
  source 1..203: mol_type = other DNA
ggcgcgccagtcctatcgtgaggccccgctttcacggtctgtattcgtactgaaaatcaagatcaagcgagcttttgcccttctgctccacgggaggtttctgtcctccctgagctcgccttaggacacctgcgttaccgtttgacaggtgtaccgccccagtcaaactccccacctggcactgtccccgactcggaccgatg

SEQ ID NO: 8900 - DNA, 203 bp, synthetic construct
  source 1..203: mol_type = other DNA
ggcgcgccagtcctcccgctttcacggtctgtattcgtactgaaaatcaagatcaagcgagcttttgcccttctgctccacgggaggtttctgtcctccctgagctcgccttaggacacctgcgttaccgtttgacaggtgtaccgccccagtcaaactccccacctggcactgtccccggagcgggtcgactcggaccgatg

SEQ ID NO: 8901 - DNA, 203 bp, synthetic construct
  source 1..203: mol_type = other DNA
ggcgcgccagtcctcggtctgtattcgtactgaaaatcaagatcaagcgagcttttgcccttctgctccacgggaggtttctgtcctccctgagctcgccttaggacacctgcgttaccgtttgacaggtgtaccgccccagtcaaactccccacctggcactgtccccggagcgggtcgcgcccggccgactcggaccgatg

SEQ ID NO: 8902 - DNA, 203 bp, synthetic construct
  source 1..203: mol_type = other DNA
ggcgcgccagtcctcggggacaccgggggggcgccgggggcctcccacttattctacacctctcatgtctcttcaccgtgccagactagagtcaagctcaacagggtcttctttccccgctgattccgccaagcccgttcccttggctgtggtttcgctggatagtaggtagggacagtgggaatctccgactcggaccgatg

SEQ ID NO: 8903 - DNA, 203 bp, synthetic construct
  source 1..203: mol_type = other DNA
ggcgcgccagtcctgggggggcgccgggggcctcccacttattctacacctctcatgtctcttcaccgtgccagactagagtcaagctcaacagggtcttctttccccgctgattccgccaagcccgttcccttggctgtggtttcgctggatagtaggtagggacagtgggaatctcgttcatccatcgactcggaccgatg

SEQ ID NO: 8904 - DNA, 203 bp, synthetic construct
  source 1..203: mol_type = other DNA
ggcgcgccagtcctcgggggcctcccacttattctacacctctcatgtctcttcaccgtgccagactagagtcaagctcaacagggtcttctttccccgctgattccgccaagcccgttcccttggctgtggtttcgctggatagtaggtagggacagtgggaatctcgttcatccattcatgcgcgtcgactcggaccgatg

SEQ ID NO: 8905 - DNA, 203 bp, synthetic construct
  source 1..203: mol_type = other DNA
ggcgcgccagtcctccacttattctacacctctcatgtctcttcaccgtgccagactagagtcaagctcaacagggtcttctttccccgctgattccgccaagcccgttcccttggctgtggtttcgctggatagtaggtagggacagtgggaatctcgttcatccattcatgcgcgtcactaattagcgactcggaccgatg

SEQ ID NO: 8906 - DNA, 203 bp, synthetic construct
  source 1..203: mol_type = other DNA
ggcgcgccagtccttacacctctcatgtctcttcaccgtgccagactagagtcaagctcaacagggtcttctttccccgctgattccgccaagcccgttcccttggctgtggtttcgctggatagtaggtagggacagtgggaatctcgttcatccattcatgcgcgtcactaattagatgacgaggccgactcggaccgatg

SEQ ID NO: 8907 - DNA, 203 bp, synthetic construct
  source 1..203: mol_type = other DNA
ggcgcgccagtcctatgtctcttcaccgtgccagactagagtcaagctcaacagggtcttctttccccgctgattccgccaagcccgttcccttggctgtggtttcgctggatagtaggtagggacagtgggaatctcgttcatccattcatgcgcgtcactaattagatgacgaggcatttggctaccgactcggaccgatg

SEQ ID NO: 8908 - DNA, 203 bp, synthetic construct
  source 1..203: mol_type = other DNA
ggcgcgccagtcctaccgtgccagactagagtcaagctcaacagggtcttctttccccgctgattccgccaagcccgttcccttggctgtggtttcgctggatagtaggtagggacagtgggaatctcgttcatccattcatgcgcgtcactaattagatgacgaggcatttggctaccttaagagagcgactcggaccgatg

SEQ ID NO: 8909 - DNA, 203 bp, synthetic construct
  source 1..203: mol_type = other DNA
ggcgcgccagtcctagctcaacagggtcttctttccccgctgattccgccaagcccgttcccttggctgtggtttcgctggatagtaggtagggacagtgggaatctcgttcatccattcatgcgcgtcactaattagatgacgaggcatttggctaccttaagagagtcatagttactcccgccgttcgactcggaccgatg

SEQ ID NO: 8910 - DNA, 203 bp, synthetic construct
  source 1..203: mol_type = other DNA
ggcgcgccagtcctccccgctgattccgccaagcccgttcccttggctgtggtttcgctggatagtaggtagggacagtgggaatctcgttcatccattcatgcgcgtcactaattagatgacgaggcatttggctaccttaagagagtcatagttactcccgccgtttacccgcgcttcattgaattcgactcggaccgatg

SEQ ID NO: 8911 - DNA, 203 bp, synthetic construct
  source 1..203: mol_type = other DNA
ggcgcgccagtcctccgttcccttggctgtggtttcgctggatagtaggtagggacagtgggaatctcgttcatccattcatgcgcgtcactaattagatgacgaggcatttggctaccttaagagagtcatagttactcccgccgtttacccgcgcttcattgaatttcttcactttgacattcagacgactcggaccgatg

SEQ ID NO: 8912 - DNA, 203 bp, synthetic construct
  source 1..203: mol_type = other DNA
ggcgcgccagtcctggctgtggtttcgctggatagtaggtagggacagtgggaatctcgttcatccattcatgcgcgtcactaattagatgacgaggcatttggctaccttaagagagtcatagttactcccgccgtttacccgcgcttcattgaatttcttcactttgacattcagagcactgggcacgactcggaccgatg

SEQ ID NO: 8913 - DNA, 203 bp, synthetic construct
  source 1..203: mol_type = other DNA
ggcgcgccagtccttcgctggatagtaggtagggacagtgggaatctcgttcatccattcatgcgcgtcactaattagatgacgaggcatttggctaccttaagagagtcatagttactcccgccgtttacccgcgcttcattgaatttcttcactttgacattcagagcactgggcagaaatcacatcgactcggaccgatg

SEQ ID NO: 8914 - DNA, 203 bp, synthetic construct
  source 1..203: mol_type = other DNA
ggcgcgccagtcctgtaggtagggacagtgggaatctcgttcatccattcatgcgcgtcactaattagatgacgaggcatttggctaccttaagagagtcatagttactcccgccgtttacccgcgcttcattgaatttcttcactttgacattcagagcactgggcagaaatcacatcgcgtcaacacgactcggaccgatg

SEQ ID NO: 8915 - DNA, 203 bp, synthetic construct
  source 1..203: mol_type = other DNA
ggcgcgccagtcctgcgtcactaattagatgacgaggcatttggctaccttaagagagtcatagttactcccgccgtttacccgcgcttcattgaatttcttcactttgacattcagagcactgggcagaaatcacatcgcgtcaacacccgccgcgggccttcgcgatgctttgttttaattaaacacgactcggaccgatg

SEQ ID NO: 8916 - DNA, 203 bp, synthetic construct
  source 1..203: mol_type = other DNA
ggcgcgccagtcctctaccttaagagagtcatagttactcccgccgtttacccgcgcttcattgaatttcttcactttgacattcagagcactgggcagaaatcacatcgcgtcaacacccgccgcgggccttcgcgatgctttgttttaattaaacagtcggattcccctggtccgcaccagttctacgactcggaccgatg

SEQ ID NO: 8917 - DNA, 203 bp, synthetic construct
  source 1..203: mol_type = other DNA
ggcgcgccagtcctagagtcatagttactcccgccgtttacccgcgcttcattgaatttcttcactttgacattcagagcactgggcagaaatcacatcgcgtcaacacccgccgcgggccttcgcgatgctttgttttaattaaacagtcggattcccctggtccgcaccagttctaagtcggctgccgactcggaccgatg

SEQ ID NO: 8918 - DNA, 203 bp, synthetic construct
  source 1..203: mol_type = other DNA
ggcgcgccagtcctttactcccgccgtttacccgcgcttcattgaatttcttcactttgacattcagagcactgggcagaaatcacatcgcgtcaacacccgccgcgggccttcgcgatgctttgttttaattaaacagtcggattcccctggtccgcaccagttctaagtcggctgctaggcgccggcgactcggaccgatg

SEQ ID NO: 8919 - DNA, 203 bp, synthetic construct
  source 1..203: mol_type = other DNA
ggcgcgccagtcctgcgcctcgtccagccgcggcgcgcgcccagccccgcttcgcgccccagcccgaccgacccagcccttagagccaatccttatcccgaagttacggatccggcttgccgacttcccttacctacattgttccaacatgccagaggctgttcaccttggagacctgctgcggatatcgactcggaccgatg

SEQ ID NO: 8920 - DNA, 203 bp, synthetic construct
  source 1..203: mol_type = other DNA
ggcgcgccagtcctcagccgcggcgcgcgcccagccccgcttcgcgccccagcccgaccgacccagcccttagagccaatccttatcccgaagttacggatccggcttgccgacttcccttacctacattgttccaacatgccagaggctgttcaccttggagacctgctgcggatatgggtacggcccgactcggaccgatg

SEQ ID NO: 8921 - DNA, 203 bp, synthetic construct
  source 1..203: mol_type = other DNA
ggcgcgccagtcctcgccccagcccgaccgacccagcccttagagccaatccttatcccgaagttacggatccggcttgccgacttcccttacctacattgttccaacatgccagaggctgttcaccttggagacctgctgcggatatgggtacggcccggcgcgagatttacaccctctcccccggacgactcggaccgatg

SEQ ID NO: 8922 - DNA, 203 bp, synthetic construct
  source 1..203: mol_type = other DNA
ggcgcgccagtcctcgaccgacccagcccttagagccaatccttatcccgaagttacggatccggcttgccgacttcccttacctacattgttccaacatgccagaggctgttcaccttggagacctgctgcggatatgggtacggcccggcgcgagatttacaccctctcccccggattttcaagggcgactcggaccgatg

SEQ ID NO: 8923 - DNA, 203 bp, synthetic construct
  source 1..203: mol_type = other DNA
ggcgcgccagtcctagcccttagagccaatccttatcccgaagttacggatccggcttgccgacttcccttacctacattgttccaacatgccagaggctgttcaccttggagacctgctgcggatatgggtacggcccggcgcgagatttacaccctctcccccggattttcaagggccagcgagagcgactcggaccgatg

SEQ ID NO: 8924 - DNA, 203 bp, synthetic construct
  source 1..203: mol_type = other DNA
ggcgcgccagtcctttcccttacctacattgttccaacatgccagaggctgttcaccttggagacctgctgcggatatgggtacggcccggcgcgagatttacaccctctcccccggattttcaagggccagcgagagctcaccggacgccgccggaaccgcgacgctttccaaggcacgggcccctccgactcggaccgatg

SEQ ID NO: 8925 - DNA, 203 bp, synthetic construct
  source 1..203: mol_type = other DNA
ggcgcgccagtcctcaacatgccagaggctgttcaccttggagacctgctgcggatatgggtacggcccggcgcgagatttacaccctctcccccggattttcaagggccagcgagagctcaccggacgccgccggaaccgcgacgctttccaaggcacgggcccctctctcggggcgaacccattcccgactcggaccgatg

SEQ ID NO: 8926 - DNA, 203 bp, synthetic construct
  source 1..203: mol_type = other DNA
ggcgcgccagtcctaccttggagacctgctgcggatatgggtacggcccggcgcgagatttacaccctctcccccggattttcaagggccagcgagagctcaccggacgccgccggaaccgcgacgctttccaaggcacgggcccctctctcggggcgaacccattccagggcgccctgcccttcacacgactcggaccgatg

SEQ ID NO: 8927 - DNA, 203 bp, synthetic construct
  source 1..203: mol_type = other DNA
ggcgcgccagtcctggcccggcgcgagatttacaccctctcccccggattttcaagggccagcgagagctcaccggacgccgccggaaccgcgacgctttccaaggcacgggcccctctctcggggcgaacccattccagggcgccctgcccttcacaaagaaaagagaactctccccggggctcccgcgactcggaccgatg

SEQ ID NO: 8928 - DNA, 203 bp, synthetic construct
  source 1..203: mol_type = other DNA
ggcgcgccagtcctgagatttacaccctctcccccggattttcaagggccagcgagagctcaccggacgccgccggaaccgcgacgctttccaaggcacgggcccctctctcggggcgaacccattccagggcgccctgcccttcacaaagaaaagagaactctccccggggctcccgccggcttctccgactcggaccgatg

SEQ ID NO: 8929 - DNA, 203 bp, synthetic construct
  source 1..203: mol_type = other DNA
ggcgcgccagtcctccctctcccccggattttcaagggccagcgagagctcaccggacgccgccggaaccgcgacgctttccaaggcacgggcccctctctcggggcgaacccattccagggcgccctgcccttcacaaagaaaagagaactctccccggggctcccgccggcttctccgggatcggtcgactcggaccgatg

SEQ ID NO: 8930 - DNA, 203 bp, synthetic construct
  source 1..203: mol_type = other DNA
ggcgcgccagtcctagggccagcgagagctcaccggacgccgccggaaccgcgacgctttccaaggcacgggcccctctctcggggcgaacccattccagggcgccctgcccttcacaaagaaaagagaactctccccggggctcccgccggcttctccgggatcggtcgcgttaccgcactggacgccgactcggaccgatg

SEQ ID NO: 8931 - DNA, 203 bp, synthetic construct
  source 1..203: mol_type = other DNA
ggcgcgccagtcctggacgccgccggaaccgcgacgctttccaaggcacgggcccctctctcggggcgaacccattccagggcgccctgcccttcacaaagaaaagagaactctccccggggctcccgccggcttctccgggatcggtcgcgttaccgcactggacgcctcgcggcgcccatctccgccgactcggaccgatg

SEQ ID NO: 8932 - DNA, 203 bp, synthetic construct
  source 1..203: mol_type = other DNA
ggcgcgccagtcctggaaccgcgacgctttccaaggcacgggcccctctctcggggcgaacccattccagggcgccctgcccttcacaaagaaaagagaactctccccggggctcccgccggcttctccgggatcggtcgcgttaccgcactggacgcctcgcggcgcccatctccgccactccggatcgactcggaccgatg

SEQ ID NO: 8933 - DNA, 203 bp, synthetic construct
  source 1..203: mol_type = other DNA
ggcgcgccagtcctcctctctcggggcgaacccattccagggcgccctgcccttcacaaagaaaagagaactctccccggggctcccgccggcttctccgggatcggtcgcgttaccgcactggacgcctcgcggcgcccatctccgccactccggattcggggatctgaacccgactccctttcgatcgactcggaccgatg

SEQ ID NO: 8934 - DNA, 203 bp, synthetic construct
  source 1..203: mol_type = other DNA
ggcgcgccagtcctccctgcccttcacaaagaaaagagaactctccccggggctcccgccggcttctccgggatcggtcgcgttaccgcactggacgcctcgcggcgcccatctccgccactccggattcggggatctgaacccgactccctttcgatcggccgagggcaacggaggccatcgcccgtcgactcggaccgatg

SEQ ID NO: 8935 - DNA, 203 bp, synthetic construct
  source 1..203: mol_type = other DNA
ggcgcgccagtcctccccggggctcccgccggcttctccgggatcggtcgcgttaccgcactggacgcctcgcggcgcccatctccgccactccggattcggggatctgaacccgactccctttcgatcggccgagggcaacggaggccatcgcccgtcccttcggaacggcgctcgcccatctctcacgactcggaccgatg

SEQ ID NO: 8936 - DNA, 203 bp, synthetic construct
  source 1..203: mol_type = other DNA
ggcgcgccagtcctcccgccggcttctccgggatcggtcgcgttaccgcactggacgcctcgcggcgcccatctccgccactccggattcggggatctgaacccgactccctttcgatcggccgagggcaacggaggccatcgcccgtcccttcggaacggcgctcgcccatctctcaggaccgactgcgactcggaccgatg

SEQ ID NO: 8937 - DNA, 203 bp, synthetic construct
  source 1..203: mol_type = other DNA
ggcgcgccagtccttctccgggatcggtcgcgttaccgcactggacgcctcgcggcgcccatctccgccactccggattcggggatctgaacccgactccctttcgatcggccgagggcaacggaggccatcgcccgtcccttcggaacggcgctcgcccatctctcaggaccgactgacccatgttccgactcggaccgatg

SEQ ID NO: 8938 - DNA, 203 bp, synthetic construct
  source 1..203: mol_type = other DNA
ggcgcgccagtcctcggtcgcgttaccgcactggacgcctcgcggcgcccatctccgccactccggattcggggatctgaacccgactccctttcgatcggccgagggcaacggaggccatcgcccgtcccttcggaacggcgctcgcccatctctcaggaccgactgacccatgttcaactgctgttcgactcggaccgatg

SEQ ID NO: 8939 - DNA, 203 bp, synthetic construct
  source 1..203: mol_type = other DNA
ggcgcgccagtcctcgatcggccgagggcaacggaggccatcgcccgtcccttcggaacggcgctcgcccatctctcaggaccgactgacccatgttcaactgctgttcacatggaacccttctccacttcggccttcaaagttctcgtttgaatatttgctactaccaccaagatctgcacctgcggcgactcggaccgatg

SEQ ID NO: 8940 - DNA, 203 bp, synthetic construct
  source 1..203: mol_type = other DNA
ggcgcgccagtcctagggcaacggaggccatcgcccgtcccttcggaacggcgctcgcccatctctcaggaccgactgacccatgttcaactgctgttcacatggaacccttctccacttcggccttcaaagttctcgtttgaatatttgctactaccaccaagatctgcacctgcggcggctccacccgactcggaccgatg

SEQ ID NO: 8941 - DNA, 203 bp, synthetic construct
  source 1..203: mol_type = other DNA
ggcgcgccagtcctccgtcccttcggaacggcgctcgcccatctctcaggaccgactgacccatgttcaactgctgttcacatggaacccttctccacttcggccttcaaagttctcgtttgaatatttgctactaccaccaagatctgcacctgcggcggctccacccgggcccgcgccctaggcttcgactcggaccgatg

SEQ ID NO: 8942 - DNA, 203 bp, synthetic construct
  source 1..203: mol_type = other DNA
ggcgcgccagtcctggaacggcgctcgcccatctctcaggaccgactgacccatgttcaactgctgttcacatggaacccttctccacttcggccttcaaagttctcgtttgaatatttgctactaccaccaagatctgcacctgcggcggctccacccgggcccgcgccctaggcttcaaggctcaccgactcggaccgatg

SEQ ID NO: 8943 - DNA, 203 bp, synthetic construct
  source 1..203: mol_type = other DNA
ggcgcgccagtcctactgacccatgttcaactgctgttcacatggaacccttctccacttcggccttcaaagttctcgtttgaatatttgctactaccaccaagatctgcacctgcggcggctccacccgggcccgcgccctaggcttcaaggctcaccgcagcggccctcctactcgtcgcggcgtacgactcggaccgatg

SEQ ID NO: 8944 - DNA, 203 bp, synthetic construct
  source 1..203: mol_type = other DNA
ggcgcgccagtcctccacttcggccttcaaagttctcgtttgaatatttgctactaccaccaagatctgcacctgcggcggctccacccgggcccgcgccctaggcttcaaggctcaccgcagcggccctcctactcgtcgcggcgtagcgtccgcggggctccgggggcggggagcggggcgtgggccgactcggaccgatg

SEQ ID NO: 8945 - DNA, 203 bp, synthetic construct
  source 1..203: mol_type = other DNA
ggcgcgccagtcctctcgtttgaatatttgctactaccaccaagatctgcacctgcggcggctccacccgggcccgcgccctaggcttcaaggctcaccgcagcggccctcctactcgtcgcggcgtagcgtccgcggggctccgggggcggggagcggggcgtgggcgggaggaggggaggaggcgtcgactcggaccgatg

SEQ ID NO: 8946 - DNA, 203 bp, synthetic construct
  source 1..203: mol_type = other DNA
ggcgcgccagtcctcacccgggcccgcgccctaggcttcaaggctcaccgcagcggccctcctactcgtcgcggcgtagcgtccgcggggctccgggggcggggagcggggcgtgggcgggaggaggggaggaggcgtgggggggggggcgggggaaggaccccacacccccgccgccgccgccgccgcgactcggaccgatg

SEQ ID NO: 8947 - DNA, 203 bp, synthetic construct
  source 1..203: mol_type = other DNA
ggcgcgccagtccttccgacgcacaccacacgcgcgcgcgcgcgcgccgcccccgccgctcccgtccactctcgactgccggcgacggccgggtatgggcccgacgctccagcgccatccattttcagggctagttgattcggcaggtgagttgttacacactccttagcggattccgacttccatggcgactcggaccgatg

SEQ ID NO: 8948 - DNA, 203 bp, synthetic construct
  source 1..203: mol_type = other DNA
ggcgcgccagtcctcgccgcccccgccgctcccgtccactctcgactgccggcgacggccgggtatgggcccgacgctccagcgccatccattttcagggctagttgattcggcaggtgagttgttacacactccttagcggattccgacttccatggccaccgtcctgctgtctatatcaaccaacacgactcggaccgatg

SEQ ID NO: 8949 - DNA, 203 bp, synthetic construct
  source 1..203: mol_type = other DNA
ggcgcgccagtccttccactctcgactgccggcgacggccgggtatgggcccgacgctccagcgccatccattttcagggctagttgattcggcaggtgagttgttacacactccttagcggattccgacttccatggccaccgtcctgctgtctatatcaaccaacaccttttctggggtctgatgacgactcggaccgatg

SEQ ID NO: 8950 - DNA, 203 bp, synthetic construct
  source 1..203: mol_type = other DNA
ggcgcgccagtcctactgccggcgacggccgggtatgggcccgacgctccagcgccatccattttcagggctagttgattcggcaggtgagttgttacacactccttagcggattccgacttccatggccaccgtcctgctgtctatatcaaccaacaccttttctggggtctgatgagcgtcggcatcgactcggaccgatg

SEQ ID NO: 8951 - DNA, 203 bp, synthetic construct
  source 1..203: mol_type = other DNA
ggcgcgccagtcctacggccgggtatgggcccgacgctccagcgccatccattttcagggctagttgattcggcaggtgagttgttacacactccttagcggattccgacttccatggccaccgtcctgctgtctatatcaaccaacaccttttctggggtctgatgagcgtcggcatcgggcgccttcgactcggaccgatg

SEQ ID NO: 8952 - DNA, 203 bp, synthetic construct
  source 1..203: mol_type = other DNA
ggcgcgccagtcctccatccattttcagggctagttgattcggcaggtgagttgttacacactccttagcggattccgacttccatggccaccgtcctgctgtctatatcaaccaacaccttttctggggtctgatgagcgtcggcatcgggcgccttaacccggcgttcggttcatcccgcagcgcccgactcggaccgatg

SEQ ID NO: 8953 - DNA, 203 bp, synthetic construct
  source 1..203: mol_type = other DNA
ggcgcgccagtccttcagggctagttgattcggcaggtgagttgttacacactccttagcggattccgacttccatggccaccgtcctgctgtctatatcaaccaacaccttttctggggtctgatgagcgtcggcatcgggcgccttaacccggcgttcggttcatcccgcagcgccagttctgcttcgactcggaccgatg

SEQ ID NO: 8954 - DNA, 203 bp, synthetic construct
  source 1..203: mol_type = other DNA
ggcgcgccagtcctaggtgagttgttacacactccttagcggattccgacttccatggccaccgtcctgctgtctatatcaaccaacaccttttctggggtctgatgagcgtcggcatcgggcgccttaacccggcgttcggttcatcccgcagcgccagttctgcttaccaaaagtggcccactaggcgactcggaccgatg

SEQ ID NO: 8955 - DNA, 203 bp, synthetic construct
  source 1..203: mol_type = other DNA
ggcgcgccagtccttccgacttccatggccaccgtcctgctgtctatatcaaccaacaccttttctggggtctgatgagcgtcggcatcgggcgccttaacccggcgttcggttcatcccgcagcgccagttctgcttaccaaaagtggcccactaggcactcgcattccacgcccggctccacgccacgactcggaccgatg

SEQ ID NO: 8956 - DNA, 203 bp, synthetic construct
  source 1..203: mol_type = other DNA
ggcgcgccagtcctaacaccttttctggggtctgatgagcgtcggcatcgggcgccttaacccggcgttcggttcatcccgcagcgccagttctgcttaccaaaagtggcccactaggcactcgcattccacgcccggctccacgccagcgagccgggcttcttacccatttaaagtttgagaataggcgactcggaccgatg

SEQ ID NO: 8957 - DNA, 203 bp, synthetic construct
  source 1..203: mol_type = other DNA
ggcgcgccagtcctctggggtctgatgagcgtcggcatcgggcgccttaacccggcgttcggttcatcccgcagcgccagttctgcttaccaaaagtggcccactaggcactcgcattccacgcccggctccacgccagcgagccgggcttcttacccatttaaagtttgagaataggttgagatcgtcgactcggaccgatg

SEQ ID NO: 8958 - DNA, 203 bp, synthetic construct
  source 1..203: mol_type = other DNA
ggcgcgccagtcctatgagcgtcggcatcgggcgccttaacccggcgttcggttcatcccgcagcgccagttctgcttaccaaaagtggcccactaggcactcgcattccacgcccggctccacgccagcgagccgggcttcttacccatttaaagtttgagaataggttgagatcgtttcggccccacgactcggaccgatg

SEQ ID NO: 8959 - DNA, 203 bp, synthetic construct
  source 1..203: mol_type = other DNA
ggcgcgccagtcctccttaacccggcgttcggttcatcccgcagcgccagttctgcttaccaaaagtggcccactaggcactcgcattccacgcccggctccacgccagcgagccgggcttcttacccatttaaagtttgagaataggttgagatcgtttcggccccaagacctctaatcattcgcttcgactcggaccgatg

SEQ ID NO: 8960 - DNA, 203 bp, synthetic construct
  source 1..203: mol_type = other DNA
ggcgcgccagtcctcatcccgcagcgccagttctgcttaccaaaagtggcccactaggcactcgcattccacgcccggctccacgccagcgagccgggcttcttacccatttaaagtttgagaataggttgagatcgtttcggccccaagacctctaatcattcgctttaccggataaaactgcgtggcgactcggaccgatg

SEQ ID NO: 8961 - DNA, 203 bp, synthetic construct
  source 1..203: mol_type = other DNA
ggcgcgccagtcctcattccacgcccggctccacgccagcgagccgggcttcttacccatttaaagtttgagaataggttgagatcgtttcggccccaagacctctaatcattcgctttaccggataaaactgcgtggcgggggtgcgtcgggtctgcgagagcgccagctatcctgagggaaacttccgactcggaccgatg

SEQ ID NO: 8962 - DNA, 203 bp, synthetic construct
  source 1..203: mol_type = other DNA
ggcgcgccagtcctgccagcgagccgggcttcttacccatttaaagtttgagaataggttgagatcgtttcggccccaagacctctaatcattcgctttaccggataaaactgcgtggcgggggtgcgtcgggtctgcgagagcgccagctatcctgagggaaacttcggagggaaccagctactagacgactcggaccgatg

SEQ ID NO: 8963 - DNA, 203 bp, synthetic construct
  source 1..203: mol_type = other DNA
ggcgcgccagtcctcgggcttcttacccatttaaagtttgagaataggttgagatcgtttcggccccaagacctctaatcattcgctttaccggataaaactgcgtggcgggggtgcgtcgggtctgcgagagcgccagctatcctgagggaaacttcggagggaaccagctactagatggttcgattcgactcggaccgatg

SEQ ID NO: 8964 - DNA, 203 bp, synthetic construct
  source 1..203: mol_type = other DNA
ggcgcgccagtcctacccatttaaagtttgagaataggttgagatcgtttcggccccaagacctctaatcattcgctttaccggataaaactgcgtggcgggggtgcgtcgggtctgcgagagcgccagctatcctgagggaaacttcggagggaaccagctactagatggttcgattagtctttcgccgactcggaccgatg

SEQ ID NO: 8965 - DNA, 203 bp, synthetic construct
  source 1..203: mol_type = other DNA
ggcgcgccagtcctagtttgagaataggttgagatcgtttcggccccaagacctctaatcattcgctttaccggataaaactgcgtggcgggggtgcgtcgggtctgcgagagcgccagctatcctgagggaaacttcggagggaaccagctactagatggttcgattagtctttcgcccctataccccgactcggaccgatg

SEQ ID NO: 8966 - DNA, 203 bp, synthetic construct
  source 1..203: mol_type = other DNA
ggcgcgccagtccttaggttgagatcgtttcggccccaagacctctaatcattcgctttaccggataaaactgcgtggcgggggtgcgtcgggtctgcgagagcgccagctatcctgagggaaacttcggagggaaccagctactagatggttcgattagtctttcgcccctatacccaggtcggacgcgactcggaccgatg

SEQ ID NO: 8967 - DNA, 203 bp, synthetic construct
  source 1..203: mol_type = other DNA
ggcgcgccagtccttcgtttcggccccaagacctctaatcattcgctttaccggataaaactgcgtggcgggggtgcgtcgggtctgcgagagcgccagctatcctgagggaaacttcggagggaaccagctactagatggttcgattagtctttcgcccctatacccaggtcggacgaccgatttgccgactcggaccgatg

SEQ ID NO: 8968 - DNA, 203 bp, synthetic construct
  source 1..203: mol_type = other DNA
ggcgcgccagtcctctaatcattcgctttaccggataaaactgcgtggcgggggtgcgtcgggtctgcgagagcgccagctatcctgagggaaacttcggagggaaccagctactagatggttcgattagtctttcgcccctatacccaggtcggacgaccgatttgcacgtcaggaccgctagggaccgactcggaccgatg

SEQ ID NO: 8969 - DNA, 203 bp, synthetic construct
  source 1..203: mol_type = other DNA
ggcgcgccagtcctgctttaccggataaaactgcgtggcgggggtgcgtcgggtctgcgagagcgccagctatcctgagggaaacttcggagggaaccagctactagatggttcgattagtctttcgcccctatacccaggtcggacgaccgatttgcacgtcaggaccgctacggacctccaccagacgactcggaccgatg

SEQ ID NO: 8970 - DNA, 203 bp, synthetic construct
  source 1..203: mol_type = other DNA
ggcgcgccagtcctataaaactgcgtggcgggggtgcgtcgggtctgcgagagcgccagctatcctgagggaaacttcggagggaaccagctactagatggttcgattagtctttcgcccctatacccaggtcggacgaccgatttgcacgtcaggaccgctacggacctccaccagagtttcctctgcgactcggaccgatg

SEQ ID NO: 8971 - DNA, 203 bp, synthetic construct
  source 1..203: mol_type = other DNA
ggcgcgccagtcctgtggcgggggtgcgtcgggtctgcgagagcgccagctatcctgagggaaacttcggagggaaccagctactagatggttcgattagtctttcgcccctatacccaggtcggacgaccgatttgcacgtcaggaccgctacggacctccaccagagtttcctctggcttcgccctcgactcggaccgatg

SEQ ID NO: 8972 - DNA, 203 bp, synthetic construct
  source 1..203: mol_type = other DNA
ggcgcgccagtcctcttcggagggaaccagctactagatggttcgattagtctttcgcccctatacccaggtcggacgaccgatttgcacgtcaggaccgctacggacctccaccagagtttcctctggcttcgccctgcccaggcatagttcaccatctttcgggtcctaacacgtgcgctcgtgctcgactcggaccgatg

SEQ ID NO: 8973 - DNA, 203 bp, synthetic construct
  source 1..203: mol_type = other DNA
ggcgcgccagtccttagatggttcgattagtctttcgcccctatacccaggtcggacgaccgatttgcacgtcaggaccgctacggacctccaccagagtttcctctggcttcgccctgcccaggcatagttcaccatctttcgggtcctaacacgtgcgctcgtgctccacctccccggcgcggcggcgactcggaccgatg

SEQ ID NO: 8974 - DNA, 203 bp, synthetic construct
  source 1..203: mol_type = other DNA
ggcgcgccagtccttcgcccctatacccaggtcggacgaccgatttgcacgtcaggaccgctacggacctccaccagagtttcctctggcttcgccctgcccaggcatagttcaccatctttcgggtcctaacacgtgcgctcgtgctccacctccccggcgcggcgggcgagacgggccggtggtgccgactcggaccgatg

SEQ ID NO: 8975 - DNA, 203 bp, synthetic construct
  source 1..203: mol_type = other DNA
ggcgcgccagtcctgacgaccgatttgcacgtcaggaccgctacggacctccaccagagtttcctctggcttcgccctgcccaggcatagttcaccatctttcgggtcctaacacgtgcgctcgtgctccacctccccggcgcggcgggcgagacgggccggtggtgcgccctcggcggactggagagcgactcggaccgatg

SEQ ID NO: 8976 - DNA, 203 bp, synthetic construct
  source 1..203: mol_type = other DNA
ggcgcgccagtcctttgcacgtcaggaccgctacggacctccaccagagtttcctctggcttcgccctgcccaggcatagttcaccatctttcgggtcctaacacgtgcgctcgtgctccacctccccggcgcggcgggcgagacgggccggtggtgcgccctcggcggactggagaggcctcgggatcgactcggaccgatg

SEQ ID NO: 8977 - DNA, 203 bp, synthetic construct
  source 1..203: mol_type = other DNA
ggcgcgccagtcctgcatagttcaccatctttcgggtcctaacacgtgcgctcgtgctccacctccccggcgcggcgggcgagacgggccggtggtgcgccctcggcggactggagaggcctcgggatcccacctcggccggcgagcgcgccggccttcaccttcattgcgccacggcggctttcgtgcgactcggaccgatg

SEQ ID NO: 8978 - DNA, 203 bp, synthetic construct
  source 1..203: mol_type = other DNA
ggcgcgccagtcctgtgcgccctcggcggactggagaggcctcgggatcccacctcggccggcgagcgcgccggccttcaccttcattgcgccacggcggctttcgtgcgagcccccgactcgcgcacgtgttagactccttggtccgtgtttcaagacgggtcgggtgggtagccgacgtcgccgcccgactcggaccgatg

SEQ ID NO: 8979 - DNA, 203 bp, synthetic construct
  source 1..203: mol_type = other DNA
ggcgcgccagtcctagaggcctcgggatcccacctcggccggcgagcgcgccggccttcaccttcattgcgccacggcggctttcgtgcgagcccccgactcgcgcacgtgttagactccttggtccgtgtttcaagacgggtcgggtgggtagccgacgtcgccgccgaccccgtgcgctcgctccgcgactcggaccgatg

SEQ ID NO: 8980 - DNA, 203 bp, synthetic construct
  source 1..203: mol_type = other DNA
ggcgcgccagtccttcggccggcgagcgcgccggccttcaccttcattgcgccacggcggctttcgtgcgagcccccgactcgcgcacgtgttagactccttggtccgtgtttcaagacgggtcgggtgggtagccgacgtcgccgccgaccccgtgcgctcgctccgccgtccccctcttcgggggacgactcggaccgatg

SEQ ID NO: 8981 - DNA, 203 bp, synthetic construct
  source 1..203: mol_type = other DNA
ggcgcgccagtcctcattgcgccacggcggctttcgtgcgagcccccgactcgcgcacgtgttagactccttggtccgtgtttcaagacgggtcgggtgggtagccgacgtcgccgccgaccccgtgcgctcgctccgccgtccccctcttcgggggacgcgcgcgtggccccgagagaacctccccccgactcggaccgatg

SEQ ID NO: 8982 - DNA, 203 bp, synthetic construct
  source 1..203: mol_type = other DNA
ggcgcgccagtcctgcggggaggaggggtgggagagcggtcgcgccgtgggaggggtggcccggcccccccacgaggagacgcccgcgcgcccccgcgggggagacccccctcgcgggggattccccgcgggggtgggcgccgggaggggggagagcgcggcgacgggtctcgctccctcggccccggcgactcggaccgatg

SEQ ID NO: 8983 - DNA, 203 bp, synthetic construct
  source 1..203: mol_type = other DNA
ggcgcgccagtcctcgcgggggagacccccctcgcgggggattccccgcgggggtgggcgccgggaggggggagagcgcggcgacgggtctcgctccctcggccccgggattcggcgagtgctgctgccgggggggctgtaacactcggggggggtttcggtcccgccgccgccgccgccgccgccaccgactcggaccgatg

SEQ ID NO: 8984 - DNA, 203 bp, synthetic construct
  source 1..203: mol_type = other DNA
ggcgcgccagtcctagcgcggcgacgggtctcgctccctcggccccgggattcggcgagtgctgctgccgggggggctgtaacactcggggggggtttcggtcccgccgccgccgccgccgccgccaccgccgccgccgccgccgccccgacccgcgcgccctcccgagggaggacgcggggccggggcgactcggaccgatg

SEQ ID NO: 8985 - DNA, 203 bp, synthetic construct
  source 1..203: mol_type = other DNA
ggcgcgccagtcctcgccgccgccgccccgacccgcgcgccctcccgagggaggacgcggggccggggggcggagacgggggaggaggaggacggacggacggacggacggggccccccgagccaccttccccgccgggccttcccagccgtcccggagccggtcgcggcgcaccgccgcggtggaaacgactcggaccgatg

SEQ ID NO: 8986 - DNA, 203 bp, synthetic construct
  source 1..203: mol_type = other DNA
ggcgcgccagtcctggggaagggagggcgggtggaggggtcgggaggaacggggggcgggaaagatccgccgggccgccgacacggccggacccgccgccgggttgaatcctccgggcggactgcgcggaccccacccgtttacctcttaacggtttcacgccctcttgaactctctcttcaaagttccgactcggaccgatg

SEQ ID NO: 8987 - DNA, 203 bp, synthetic construct
  source 1..203: mol_type = other DNA
ggcgcgccagtcctggcgggaaagatccgccgggccgccgacacggccggacccgccgccgggttgaatcctccgggcggactgcgcggaccccacccgtttacctcttaacggtttcacgccctcttgaactctctcttcaaagttcttttcaactttcccttacggtacttgttgactatcggtctcgactcggaccgatg

SEQ ID NO: 8988 - DNA, 203 bp, synthetic construct
  source 1..203: mol_type = other DNA
ggcgcgccagtcctgccgccgggttgaatcctccgggcggactgcgcggaccccacccgtttacctcttaacggtttcacgccctcttgaactctctcttcaaagttcttttcaactttcccttacggtacttgttgactatcggtctcgtgccggtatttagccttagatggagtttaccacccgctcgactcggaccgatg

SEQ ID NO: 8989 - DNA, 203 bp, synthetic construct
  source 1..203: mol_type = other DNA
ggcgcgccagtccttgaatcctccgggcggactgcgcggaccccacccgtttacctcttaacggtttcacgccctcttgaactctctcttcaaagttcttttcaactttcccttacggtacttgttgactatcggtctcgtgccggtatttagccttagatggagtttaccacccgctttgggctgcacgactcggaccgatg

SEQ ID NO: 8990 - DNA, 203 bp, synthetic construct
  source 1..203: mol_type = other DNA
ggcgcgccagtcctcgcggaccccacccgtttacctcttaacggtttcacgccctcttgaactctctcttcaaagttcttttcaactttcccttacggtacttgttgactatcggtctcgtgccggtatttagccttagatggagtttaccacccgctttgggctgcattcccaagcaacccgactcccgactcggaccgatg

SEQ ID NO: 8991 - DNA, 203 bp, synthetic construct
  source 1..203: mol_type = other DNA
ggcgcgccagtcctctcttaacggtttcacgccctcttgaactctctcttcaaagttcttttcaactttcccttacggtacttgttgactatcggtctcgtgccggtatttagccttagatggagtttaccacccgctttgggctgcattcccaagcaacccgactccgggaagacccgggcccggcgcgactcggaccgatg

SEQ ID NO: 8992 - DNA, 203 bp, synthetic construct
  source 1..203: mol_type = other DNA
ggcgcgccagtccttttcacgccctcttgaactctctcttcaaagttcttttcaactttcccttacggtacttgttgactatcggtctcgtgccggtatttagccttagatggagtttaccacccgctttgggctgcattcccaagcaacccgactccgggaagacccgggccccgcgcgccgggggccgactcggaccgatg

SEQ ID NO: 8993 - DNA, 203 bp, synthetic construct
  source 1..203: mol_type = other DNA
ggcgcgccagtccttcttgaactctctcttcaaagttcttttcaactttcccttacggtacttgttgactatcggtctcgtgccggtatttagccttagatggagtttaccacccgctttgggctgcattcccaagcaacccgactccgggaagacccgggccccgcgcgccgggggccgctaccggccgactcggaccgatg

SEQ ID NO: 8994 - DNA, 203 bp, synthetic construct
  source 1..203: mol_type = other DNA
ggcgcgccagtcctttgactatcggtctcgtgccggtatttagccttagatggagtttaccacccgctttgggctgcattcccaagcaacccgactccgggaagacccgggccccgcgcgccgggggccgctaccggcctcacaccgtccacgggctgggcctcgatcagaaggacttgggccccccacgactcggaccgatg

SEQ ID NO: 8995 - DNA, 203 bp, synthetic construct
  source 1..203: mol_type = other DNA
ggcgcgccagtcctgtctcgtgccggtatttagccttagatggagtttaccacccgctttgggctgcattcccaagcaacccgactccgggaagacccgggccccgcgcgccgggggccgctaccggcctcacaccgtccacgggctgggcctcgatcagaaggacttgggccccccacgagcggcgccgactcggaccgatg

SEQ ID NO: 8996 - DNA, 203 bp, synthetic construct
  source 1..203: mol_type = other DNA
ggcgcgccagtcctcgctttgggctgcattcccaagcaacccgactccgggaagacccgggccccgcgcgccgggggccgctaccggcctcacaccgtccacgggctgggcctcgatcagaaggacttgggccccccacgagcggcgccggggagcgggtcttccgtacgccacatgtcccgcgcccccgactcggaccgatg

SEQ ID NO: 8997 - DNA, 203 bp, synthetic construct
  source 1..203: mol_type = other DNA
ggcgcgccagtccttgcattcccaagcaacccgactccgggaagacccgggccccgcgcgccgggggccgctaccggcctcacaccgtccacgggctgggcctcgatcagaaggacttgggccccccacgagcggcgccggggagcgggtcttccgtacgccacatgtcccgcgccccgccgcggggccgactcggaccgatg

SEQ ID NO: 8998 - DNA, 203 bp, synthetic construct
  source 1..203: mol_type = other DNA
ggcgcgccagtcctgggccgctaccggcctcacaccgtccacgggctgggcctcgatcagaaggacttgggccccccacgagcggcgccggggagcgggtcttccgtacgccacatgtcccgcgccccgccgcggggcggggattcggcgctgggctcttccctgttcactcgccgttactgagggaacgactcggaccgatg

SEQ ID NO: 8999 - DNA, 203 bp, synthetic construct
  source 1..203: mol_type = other DNA
ggcgcgccagtcctccgtccacgggctgggcctcgatcagaaggacttgggccccccacgagcggcgccggggagcgggtcttccgtacgccacatgtcccgcgccccgccgcggggcggggattcggcgctgggctcttccctgttcactcgccgttactgagggaatcctggttagtttcttctcccgactcggaccgatg

SEQ ID NO: 9000 - DNA, 203 bp, synthetic construct
  source 1..203: mol_type = other DNA
ggcgcgccagtcctacttgggccccccacgagcggcgccggggagcgggtcttccgtacgccacatgtcccgcgccccgccgcggggcggggattcggcgctgggctcttccctgttcactcgccgttactgagggaatcctggttagtttcttctcctccgctgactaatatgcttaaattcagcggcgactcggaccgatg

SEQ ID NO: 9001 - DNA, 203 bp, synthetic construct
  source 1..203: mol_type = other DNA
ggcgcgccagtcctcccacgagcggcgccggggagcgggtcttccgtacgccacatgtcccgcgccccgccgcggggcggggattcggcgctgggctcttccctgttcactcgccgttactgagggaatcctggttagtttcttctcctccgctgactaatatgcttaaattcagcgggtcgccacgtcgactcggaccgatg

SEQ ID NO: 9002 - DNA, 203 bp, synthetic construct
  source 1..203: mol_type = other DNA
ggcgcgccagtcctgcttccgtagaggccagctggttgctacgcagcaacaggaaacattccgcgctaccgagtactttctactcccgaccaggcattgctctctctggagaccctcggcggtggttgctgtattttgacttggagtaaggatgacttttcgggccacagatagtgaatttgacctgacgactcggaccgatg

SEQ ID NO: 9003 - DNA, 203 bp, synthetic construct
  source 1..203: mol_type = other DNA
ggcgcgccagtcctgattacagtgccaaccttactcccaaagtttgccacgaaatatctcgcttctgttattttcgcatggttctggtatattgacttttgaaacaaaagacatcattctgtttatagcattctgtttttagtagtgggatttccatctacaaaatatagtaattctcgatcgctgaacgactcggaccgatg

SEQ ID NO: 9004 - DNA, 203 bp, synthetic construct
  source 1..203: mol_type = other DNA
ggcgcgccagtcctatgtcctacaactgctgctgtggaaacttctcctcccattcctgtgagggctacctgtgctactcaggctactcccgtggtggctcctcgtaccccagcaacctggtctacagcactgaacctttgatctcccagcacctgccagctgggttcctctctctgcaagggctttcacgactcggaccgatg

SEQ ID NO: 9005 - DNA, 203 bp, synthetic construct
  source 1..203: mol_type = other DNA
ggcgcgccagtcctagcgtgccccgggcccggcggaggaggcggctgcagttggagtggagtcttgggagcgctgctggcagcgacttctcagcgaagcaagtgtctgagactgagagtccctaacagcggcagcggcggccacggcggcggctggggccgaggtgtgttctactccctcttctgggacgactcggaccgatg

SEQ ID NO: 9006 - DNA, 203 bp, synthetic construct
  source 1..203: mol_type = other DNA
ggcgcgccagtcctgcccccgccccctactcccttccctcaggccccaggaagttgcaagagtaccatttgtcgcacactcggggaccgcgggtggccggaggagatgaaaccgtcttggctgcagtgtcgtaaagtcaccagcgccggggggctcggagggcccttgcctgggtcctctccggcccgcgactcggaccgatg

SEQ ID NO: 9007 - DNA, 203 bp, synthetic construct
  source 1..203: mol_type = other DNA
ggcgcgccagtcctggaatacctaggcctccagactactccccctaactcatatttagattcctgaagcttctgcacatgtagttcctagagctgctgcttattaaaatgtcaacatcttcatcttctagctgggacaacctcttagagtctctctctctcagcacagtatggaattggatacaagcacgactcggaccgatg

SEQ ID NO: 9008 - DNA, 203 bp, synthetic construct
  source 1..203: mol_type = other DNA
ggcgcgccagtcctgcgggattccaaggcctcatcgagtgcgggtatctggctgtggattcgccgccgtcctgctggacgcctggaggctcgaaccccgccgcccccctaccccaggctttactcccaccccggcttccgcccactgtgctgcccttcctcggacctgggctgtcgggagagctggagcgactcggaccgatg

SEQ ID NO: 9009 - DNA, 203 bp, synthetic construct
  source 1..203: mol_type = other DNA
ggcgcgccagtcctggctaccatggtaacaggttccagggtaacagaggagggagctgggtcctgtttactcccagtcctgccgatgaggattctgaccgtagacactgaattgtcccgtacctatccgtgctctttctgtgttctcaccagggctgagctcgaactgccacctctgccagcaggacccgactcggaccgatg

SEQ ID NO: 9010 - DNA, 203 bp, synthetic construct
  source 1..203: mol_type = other DNA
ggcgcgccagtcctacgtgtgtatgtgtgtgtgtgtgtattgggtttctctctcccttgtaagaacacagccagcccgccctctcctgctgttgctgcagctctgacttgctttttcctgcctccttcctctcctctctcttcttgcttagcttcttgccttctgatactactcccaagatggaggctcgactcggaccgatg

SEQ ID NO: 9011 - DNA, 203 bp, synthetic construct
  source 1..203: mol_type = other DNA
ggcgcgccagtcctagatgtccccggccggcgagagcgggcgccggggttcgctctgagtcgcgtggcaggccgcgctgcgtccaccgctgccgagttcagagccgcgcaccgcccgccgccgcaggtcgggttcccagcgctactcccaagacaccgctcagccatgaagatgcatttctgtatccccgactcggaccgatg

SEQ ID NO: 9012 - DNA, 203 bp, synthetic construct
  source 1..203: mol_type = other DNA
ggcgcgccagtcctcgaggctgcaccagcgcctggcaccatgaggacgcctgggcctctgcccgtgctgctgctgctcctggcgggagcccccgccgcgcggcccactcccccgacctgctactcccgcatgcgggccctgagccaggagatcacccgcgacttcaacctcctgcaggtctcggagcccgactcggaccgatg

SEQ ID NO: 9013 - DNA, 203 bp, synthetic construct
  source 1..203: mol_type = other DNA
ggcgcgccagtcctcctctcttccagggctgccgtccacactctcccggtcagagtcctgggaccacatggggacgctgccatggcttcttgccttcttcattctgggtctccaggcttgggatactcccaccatcgtctcccgcaaggagtggggggcaagaccgctcgcctgcagggccctgctgacgactcggaccgatg

SEQ ID NO: 9014 - DNA, 203 bp, synthetic construct
  source 1..203: mol_type = other DNA
ggcgcgccagtccttaattttgccctaggtctggccaggaggcctcacatccagagacctgcccccgctcttgcagtgccagggccatggggctccggagccaccacctcagcctgggccttctgcttctgtttctactccctgcagagtgcctgggagctgagggccggctggctctcaagctgttccgactcggaccgatg

SEQ ID NO: 9015 - DNA, 203 bp, synthetic construct
  source 1..203: mol_type = other DNA
ggcgcgccagtcctcccgctgcctgcaagtcagcctggctccgagtcacgtgtcagtgcctgaggcagagactgcgagaaaaaaacgcgcttcattccttcttccaccgccatactgtattttatactaaatctcatttttattccaacattttactcccgctcggattaaagcaaggagagccaatccgactcggaccgatg

SEQ ID NO: 9016 - DNA, 203 bp, synthetic construct
  source 1..203: mol_type = other DNA
ggcgcgccagtccttcttttggtgcagaaggtgacgggaaacaggccgcagacctgaacttccaaccgtatgtaggcgagaagccggtgccgatactcccactatcccacaatgtcccactgggccccagagtggaagagggcggaggctaatccaagagaccttggggccagctgggatgtcaggggcgactcggaccgatg

SEQ ID NO: 9017 - DNA, 203 bp, synthetic construct
  source 1..203: mol_type = other DNA
ggcgcgccagtcctgaaacagattcggaatatgtgaagctcgcgaaacaaggtggcaggcccgatttgttgaagcactttgcccctggaaccaggaaaggctctccagtggcctactccctgccagactggtatatccaccacagcaagccaccgacagccagccagcaagaagtgcgggctgtctcccgactcggaccgatg

SEQ ID NO: 9018 - DNA, 203 bp, synthetic construct
  source 1..203: mol_type = other DNA
ggcgcgccagtcctagtaggagtggagagcgtgcgtgagtgagtgtgtgtgtgtgtgtgtgtgtgtgtgcatgcgtgtgtgaagaatgcacactatctcctgttggtaagtgtgtgcttactccctgaccagatgctgcggtgcacggggcagccaccatctctgcatgcatgtctgtgatgtcttcccgactcggaccgatg

SEQ ID NO: 9019 - DNA, 203 bp, synthetic construct
  source 1..203: mol_type = other DNA
ggcgcgccagtcctgctaatgctgctgctgaagagatccgttatacccacattctcaatcgggtactccctccagacatccgtatattggcctgggcccctgtagaaccaagcttcagtgctaggttcagctgccttgagcggacttaccgctattttttccctcgtgctgatttagatattgtaacccgactcggaccgatg

SEQ ID NO: 9020 - DNA, 203 bp, synthetic construct
  source 1..203: mol_type = other DNA
ggcgcgccagtcctgtgcaaataaggtttctgtggtgagacaccagataaactcaacttcctctttcaacaacaaatgtgtcagttatcagcaggatccatgccgccagagtaaagctttctaccctttactccctgcaaagaaacaagagtgcttatcccagctaagctccagggaaccataaatcccgactcggaccgatg

SEQ ID NO: 9021 - DNA, 203 bp, synthetic construct
  source 1..203: mol_type = other DNA
ggcgcgccagtcctagtttgcttggagctcctggggcctaacaaaaagaaacctgccatgctgctcttcctcctctctgcactggtcctgctcacacagcccctgggctacctggaagcagaaatgaagacctactcccacagaacaatgcccagtgcttgcaccctggtcatgtgtagctcagtggacgactcggaccgatg

SEQ ID NO: 9022 - DNA, 203 bp, synthetic construct
  source 1..203: mol_type = other DNA
ggcgcgccagtcctgcccatggctgagacctctctcccagagctggggggagaggacaaagccacgccttgccccagcatcctggagctggaggagctcctgcgggcagggaagtcttcttgcagccgtgtggacgaagtttggcccaaccttttcataggagatgcagctggtccttactccctgcccgactcggaccgatg

SEQ ID NO: 9023 - DNA, 203 bp, synthetic construct
  source 1..203: mol_type = other DNA
ggcgcgccagtcctgacctgcggctccgccccagaggccgccatcttcctgaccacccgaaaggccggacctactccccggtgcatcttgggatcagggcggggccctgagcgccgccatgcttttgtacggcaggatcgcaaagcacgccgggaccggttggtttggttttgaagacgtggatggcgcgactcggaccgatg

SEQ ID NO: 9024 - DNA, 203 bp, synthetic construct
  source 1..203: mol_type = other DNA
ggcgcgccagtcctagcttcttctagaagcaggccctgaacaggacgtgggtaagagatccgctgtcccttgagacttggcctactcccggcactccgcggacagccccagcctgcggacagccccagcctgcgtcacttgtccgcatgccagctccacccgggcggacccacacatggttcctacttcgactcggaccgatg

SEQ ID NO: 9025 - DNA, 203 bp, synthetic construct
  source 1..203: mol_type = other DNA
ggcgcgccagtcctggcccgcagtcctactcccgccgagacccgccgctccggtcctgccccgaactgcccacggccggcagcgcttccaggccctgaaaaaaactctcttcctgtgtctggccagaggtatagagagagacaggttcaactctaaggcctgaaaaggaacaaggcccaccggaagcacgactcggaccgatg

SEQ ID NO: 9026 - DNA, 203 bp, synthetic construct
  source 1..203: mol_type = other DNA
ggcgcgccagtcctggccgcaggtttgactcccgtgcggtgcggcccagcagccacaaagctcccgctgccattgctccttgtactcccgccgtcactgccgctgtccaacccctcccccggggcttgcgcggcggctcccacacccctcggcccgtgtacgcgctctgcacctgcctgcccgaaaaccgactcggaccgatg

SEQ ID NO: 9027 - DNA, 203 bp, synthetic construct
  source 1..203: mol_type = other DNA
ggcgcgccagtcctattggactcctagatccgcgagggcgcggcgcagccgagcagcggctctttcagcattggcaaccccaggggccaatatttcccacttagccacagctccagcatcctctctgtgggctgttcaccaactgtacaaccaccatttcactgtggacattactccctcttacagatcgactcggaccgatg

SEQ ID NO: 9028 - DNA, 203 bp, synthetic construct
  source 1..203: mol_type = other DNA
ggcgcgccagtcctctttccgacactctttgggaagagaatctctaatgacggcaacagtggagaacctaacgttccagaaggacactttgggaaatgctgttgacaaaaacacatccagattggagctccgttcttactcccttgcagggcgccacggctcgacagagccactcgtcctcgcctggtcgactcggaccgatg

SEQ ID NO: 9029 - DNA, 203 bp, synthetic construct
  source 1..203: mol_type = other DNA
ggcgcgccagtcctcccgaggagccgggccccggccgctgtccagccgctccgtgccccgcgcgtcctgcgccgccgccaccgcctcctggggagacgcagccacttgcccgccatggatactcccagggtcctgctctcggccgtcttcctcatcagttttctgtgggatttgcccggtttccagcacgactcggaccgatg

SEQ ID NO: 9030 - DNA, 203 bp, synthetic construct
  source 1..203: mol_type = other DNA
ggcgcgccagtcctaagtgttgcgcaggcgcatccgatcgactcggtaggtggggatctcttggagacggcgacccaggcatctggggagccacagaagtcgtactcccttaaaccctgctttgctccccctgtggatgtaaccccttagctggcattttgcatctcaattggcttgtgatggaggcgcgactcggaccgatg

SEQ ID NO: 9031 - DNA, 203 bp, synthetic construct
  source 1..203: mol_type = other DNA
ggcgcgccagtcctgagcagagccctttcacacacctcaggaacacctttcggctgcccgctccccagacacacctgcagccctgcccagccggctttgctcacccactgcttgtaaatgccccagatatgagccagcccaggccccgctacgtggtagacagagccgcatactcccttaccctcttccgactcggaccgatg

SEQ ID NO: 9032 - DNA, 203 bp, synthetic construct
  source 1..203: mol_type = other DNA
ggcgcgccagtcctccctgggatactcccctcccagggtgtctggtggcaggcctgtgcctatccctgctgtccccagggtgggccccgggggtcaggagctccagaagggccagctgggcatattctgagattggccatcagcccccatttctgctgcaaacctggtcagagccagtgttccctccacgactcggaccgatg

SEQ ID NO: 9033 - DNA, 203 bp, synthetic construct
  source 1..203: mol_type = other DNA
ggcgcgccagtccttttttcacccgcgctctccccccttactccctcagcctcccacccgggatggagccatgtgcggcgtggagtccccgcggtgggagagagaatgtaatggacatcggtctgaccaacgagaagcccaacccggaactctcttactccggctccttccagccagcccccggcaaccgactcggaccgatg

SEQ ID NO: 9034 - DNA, 203 bp, synthetic construct
  source 1..203: mol_type = other DNA
ggcgcgccagtcctaatctctacgttcaaagtctaactttgacagacaaccttacttccagcgaagtctactcccctccctccggagggaagaatgggctgcggttaagcgtttgccctggtgtcagggccaactgcttcgaagcgccagactttcggagactgtgggtggggagcattaagcgggaacgactcggaccgatg

SEQ ID NO: 9035 - DNA, 203 bp, synthetic construct
  source 1..203: mol_type = other DNA
ggcgcgccagtcctagcggggagagacaagaaaggggtcaagttagctcagctgggcccagcctctcctctgtctctcctcggtctcagctctgggcgagcagcggcctgtctgaagagcatgcagcccccttactccccgcctggcctcgccatccctgcccccccagcctgacccccggccccagccgactcggaccgatg

SEQ ID NO: 9036 - DNA, 203 bp, synthetic construct
  source 1..203: mol_type = other DNA
ggcgcgccagtcctcagggcgacgggagctttccggagctgctggtactcccgattggagacgtagaaccgttacttgtcgagggccttagcggccgccgtgaccctctcggggatcccacgatgttcttctacctgagcaagaaaatttccattcccaataacgtgaagctgcagtgtgtatcctggcgactcggaccgatg

SEQ ID NO: 9037 - DNA, 203 bp, synthetic construct
  source 1..203: mol_type = other DNA
ggcgcgccagtcctttgctgagcgcagtccagagggctgcgctgctcgtcccctcggctggcagaagggggtgacgctgggcagcggcgaggagcgcgccgctgcctctggcgggctttcggcttgaggggcaaggtgaagagcgcaccggccgtggggtttaccgagctggatttgtatgttgcacccgactcggaccgatg

SEQ ID NO: 9038 - DNA, 203 bp, synthetic construct
  source 1..203: mol_type = other DNA
ggcgcgccagtcctgttttgactgaaaatgccgtcggtttcgaaagcggcggcagcggcgctgagcgggtcccccccgcagactgagaagccgacccactacaggtacctgaaggagttcaggacggagcagtgccccctgttttcacagcacaagtgcgcgcagcaccggccgttcacctgcttccacgactcggaccgatg

SEQ ID NO: 9039 - DNA, 203 bp, synthetic construct
  source 1..203: mol_type = other DNA
ggcgcgccagtcctgcagcgccgagggaggctgccagtgcgtgaggaagagagctagagactggacaggggagacagagcagcgtcggagccgcgcaggggacgggagtgagagcgggagtgagagcaggaacgacgcagagcggccgtcgccgtgcccgggtctcagggcgcctggctgaagtgagccgactcggaccgatg

SEQ ID NO: 9040 - DNA, 203 bp, synthetic construct
  source 1..203: mol_type = other DNA
ggcgcgccagtcctgcagcgcaaggttggataagacgccgccgctcacgcccgctatcaggttctcataccggacgtggcggaataccgtgctccacgccgacgacccggacgccgactggccctggcccgtcataggctcggggcccgtcgacaccacggcgcccagggccgcggaggtgggacgcgcgactcggaccgatg

SEQ ID NO: 9041 - DNA, 203 bp, synthetic construct
  source 1..203: mol_type = other DNA
ggcgcgccagtcctggggaggggccgggcggggggctggcggcagcggcggatggactcgcgggtatcggagctgttcggcggctgctgccggcccggagggggcccggccgtgggcggaaccctcaaggctaggggggccggcagcagcagcggctgcggggggccaaagggaaagaagaagaacggcgactcggaccgatg

SEQ ID NO: 9042 - DNA, 203 bp, synthetic construct
  source 1..203: mol_type = other DNA
ggcgcgccagtcctatggcctcgctggacctgccgtaccgctgcccccgctgcggggagcacaagcgcttccggagcctgtcgtcgctgcgcgcgcacctggagtacagccacacctacgagacgctctacatcctctccaagaccaacagcatctgcgacggcgccgccgccgccgcggccgccgcccgactcggaccgatg

SEQ ID NO: 9043 - DNA, 203 bp, synthetic construct
  source 1..203: mol_type = other DNA
ggcgcgccagtccttaggcggatgccgccatgcagcactacggggtgaacggctactcactgcacgccatgaactcactcagcgccatgtacaacctgcaccagcaggcagcccagcaggcccagcatgcccccgactaccggccttcagtgcatgcgcttacattggctgagcgcctggctggctgtcgactcggaccgatg

SEQ ID NO: 9044 - DNA, 203 bp, synthetic construct
  source 1..203: mol_type = other DNA
ggcgcgccagtcctcgcgggcgttcgggggcggggcctgttccctctgctctgggtctccgccggcgcccgccccgccagcctcacctgcgcggcacgtgacccgcaccgcccgtgggcaccttgaaggcggatcccgcgcgcccccgctcctgcaggctgtttttcttcaaataaagaacatggtgacgactcggaccgatg

SEQ ID NO: 9045 - DNA, 203 bp, synthetic construct
  source 1..203: mol_type = other DNA
ggcgcgccagtcctacttccggggtccgtcccggttcccggccgttgccacgacgacgaagctgccggccaatggctggcggatgggcccaaggttcccggcgtgcagcgcggctgcctgagggcggcaggctcatggcgccggcgtcgcggttgctcgcgctctgggcgctggcggctgtggctctacgactcggaccgatg

SEQ ID NO: 9046 - DNA, 203 bp, synthetic construct
  source 1..203: mol_type = other DNA
ggcgcgccagtcctctctctcggcgtttccgctgtcagggccctgcggtgtgactcgcgggctcagctggttggtccggccgtagcacctccgcgccgtcgccatgtcgcggtttttcaccaccggttcggacagcgagtccgagtcgtccttgtccggggaggagctcgtcaccaaacctgtcggagcgactcggaccgatg

SEQ ID NO: 9047 - DNA, 203 bp, synthetic construct
  source 1..203: mol_type = other DNA
ggcgcgccagtcctgtcaggccccgggcaggccgggagtggcgtgctgggcgtgcgcggctgcggtacggcgtgttggtcccagcggttcagctgaggtagggacgtgctgtaggccggaatgttaccggctgttggatctgcggatgaggaggaggatcctgcggaggaggattgtcctgaattggtcgactcggaccgatg

SEQ ID NO: 9048 - DNA, 203 bp, synthetic construct
  source 1..203: mol_type = other DNA
ggcgcgccagtcctgacgtcaggccccggccaggccgggagtggcgtgctgggcgtgcgcggctgcggtacggcgtgttggtcccagcggttcagctgaggtagggacgtgctgtaggccggaatgttaccggctgttggatctgtggatgaggaagaggatcctgcggaggaggattgtcctgaattcgactcggaccgatg

SEQ ID NO: 9049 - DNA, 203 bp, synthetic construct
  source 1..203: mol_type = other DNA
ggcgcgccagtcctagacttcctccttcacttgcctggacgctgcgccacatcccaccggcccttacactgtggtgtccagcagcatccggcttcatggggggacttgaaccctgcagcaggctcctgctcctgcctctcctgctggctgtaagtgattgcagttgctctacggtgagcccgggcgtgcgactcggaccgatg

SEQ ID NO: 9050 - DNA, 203 bp, synthetic construct
  source 1..203: mol_type = other DNA
ggcgcgccagtcctcagcaccaaagcggccgttctcggattccggagcgttctggagccccgagagacgccccggggttctagaagctccccggcggcgcccagtcccggcttcattcgggcgtccctccgaaacccactcgggtgcacgggtcgtcggcgagccgcgaccgggtcctggcgcgcacccgactcggaccgatg

SEQ ID NO: 9051 - DNA, 203 bp, synthetic construct
  source 1..203: mol_type = other DNA
ggcgcgccagtcctgggagctggagcctcaacagcctccagcgagcccgggacccgccgacagcccgagaaaccagccgaaggacgcggggcggggtcgccgccgccgccacggggtgctccctccctcccgcccaagtccggccacctggtcttcccctcggccccggccgtctcagactcatcaaacgactcggaccgatg

SEQ ID NO: 9052 - DNA, 203 bp, synthetic construct
  source 1..203: mol_type = other DNA
ggcgcgccagtccttccccaacaaacagtacctgggatggagccctagggtaatcgcagccacgggatgggtcgaggtgacaggcttcagggaccacacttcggcctttgcccgaccttccacaacttaagcgaagagaggccaccagccgtaacagggcgttaaagcccaggggaagattggtccttcgactcggaccgatg

SEQ ID NO: 9053 - DNA, 203 bp, synthetic construct
  source 1..203: mol_type = other DNA
ggcgcgccagtcctatgggcctgctggccagtgctggtttgttgctgttgctggtcatcggccaccccagaagcctaggactgaagtgtggaattcgcatggtcaacatgaaaagtaaggaacctgccgtgggatctagattcttctctagaattagtagttggagaaattcaacagtgactggacatcgactcggaccgatg

SEQ ID NO: 9054 - DNA, 203 bp, synthetic construct
  source 1..203: mol_type = other DNA
ggcgcgccagtcctcgggtgagtcccacttcccgacagcctggctcggccagcgactgggcggggagaccaaggatggaagtgggcttaccggccattaccctctttctcaccagcgccagcagccctgtggtggcgacgacgatggaccaggagccagtgggcggtgtggaacgaggagaagccgtccgactcggaccgatg

SEQ ID NO: 9055 - DNA, 203 bp, synthetic construct
  source 1..203: mol_type = other DNA
ggcgcgccagtcctatgtcctatccgcagggctacttgtaccagccgtccgcctcgctggcgctctactcgtgcccggcgtacagcaccagcgtcatttcggggccccgcacggatgagctcggccgctcttcttcgggctccgcgttctcgccctacgctggctcgactgccttcacggcgccctcgcgactcggaccgatg

SEQ ID NO: 9056 - DNA, 203 bp, synthetic construct
  source 1..203: mol_type = other DNA
ggcgcgccagtcctgggggacagagaaagtgatgtgcgccttctaaagcctcgcccagcgccgccgaagcagcttcacctctccaactttctcccaccgactgcttgtcttgaccctgccctccaccctccccagagccacttcgggtgcgcgctcttgggtaaagggggggtcaccggctgtctgggcgactcggaccgatg

SEQ ID NO: 9057 - DNA, 203 bp, synthetic construct
  source 1..203: mol_type = other DNA
ggcgcgccagtcctgagccctgctgccctccagccgggctcctccagccgggctcctccaccggcccttgcaggggcgcagagagctcggcgcccgcccttccgctcgcctttttcgtcagccggctggaggagcatgggtccgggaggtctctgggctgaggcggcgacagctcctctagttccacccgactcggaccgatg

SEQ ID NO: 9058 - DNA, 203 bp, synthetic construct
  source 1..203: mol_type = other DNA
ggcgcgccagtcctgggtagaagcggcagagaccgcatattccggaggggctggctccaggccacgcgagccggagctggagacatttccagagccttgaggatggcaccggccctcgcacgctcaactcctgctcctcctcttcgcaatgagtaaacgacgcagattaaagcaaggagagccaatcacgactcggaccgatg

SEQ ID NO: 9059 - DNA, 203 bp, synthetic construct
  source 1..203: mol_type = other DNA
ggcgcgccagtcctttccctaggtcttttcggaggcggagtttagtatccaagtccgcgggtgtgagcgcgcgcgtgtgtccgcgcgcctcgcccggcgcccccgccagtcctgccggaagatggtcaacgaccggtggaagaccatgggcggcgctgcccaacttgaggaccggccgcgcgacaagccgactcggaccgatg

SEQ ID NO: 9060 - DNA, 203 bp, synthetic construct
  source 1..203: mol_type = other DNA
ggcgcgccagtcctccagtctcctggcgactttccctatatcgcagagactcatccctctgaccccagcccggaagcactgtccctcggagtccgagacttccacctgggtcgtgtccaaggccccggcgactccccggactcggggtgccgggccaacctccccgccgaggcccacccgccgtcgctcgactcggaccgatg

SEQ ID NO: 9061 - DNA, 203 bp, synthetic construct
  source 1..203: mol_type = other DNA
ggcgcgccagtcctggtgcgcatgcgcccggagagctgaagggcgcgcggtgccgacagggagcttccttggctggcatggcggcgagcgcgctgcgaggcctgccagtggctggcggaggcgagagtagcgagagcgaggatgatggctgggagattgggtatctcgaccggacgtctcagaaattgcgactcggaccgatg

SEQ ID NO: 9062 - DNA, 203 bp, synthetic construct
  source 1..203: mol_type = other DNA
ggcgcgccagtcctcgccaatcggtgcagactccggttctccccaaccccgggcctgggcagctgggcactggggcgccgttccccacccggcgcggacttcggaaccggccctgggactgactggctctaccactcgagcgcgtctccgctggacccggaaccccggtcggtccattccccgcgaagcgactcggaccgatg

SEQ ID NO: 9063 - DNA, 203 bp, synthetic construct
  source 1..203: mol_type = other DNA
ggcgcgccagtcctatttccaggaacttcctcctcccccaccggccttcaccttttgttccctatcctgggccagttctctcgcaggtcccagatgtccagttccagatgcctggacccagagtgtgggggaaatatctctggagaagccctcactccaaaggctgtccaggcgcaatgtggtggctgcgactcggaccgatg

SEQ ID NO: 9064 - DNA, 203 bp, synthetic construct
  source 1..203: mol_type = other DNA
ggcgcgccagtccttctttcctttctttccgcctatcttttttctgctgccgctccgggtccgggccattttccgggccgggcgcactaaggtgcgcggccccggggcccagtatatgacccgccgtcctgctatccttcgcttcccccgccccatgtggctgcggggccgcggcggcgctgcccactcgactcggaccgatg

SEQ ID NO: 9065 - DNA, 203 bp, synthetic construct
  source 1..203: mol_type = other DNA
ggcgcgccagtcctccacgttacggatcggcttactccgcggagttggcctcatttctgcagtcggcgctccctgtagtttctcctctcgaacgccaggtggagcaaccggccggataccgccacagccctggcaggcggcgctgtgatgcctgagctgatcctgtatgttgcaatcactctatccgtcgactcggaccgatg

SEQ ID NO: 9066 - DNA, 203 bp, synthetic construct
  source 1..203: mol_type = other DNA
ggcgcgccagtcctgagttgcagtttgagagcagttccgggcagggaggcgcctttgctgccctcacagacttggcccctagcagtgcagaactacaagtcccagggatcctagcgaccgtccgtccgtagtcaagttgccggtggaattggcccaggatgacagctggagaatggagtcagttttatcgactcggaccgatg

SEQ ID NO: 9067 - DNA, 203 bp, synthetic construct
  source 1..203: mol_type = other DNA
ggcgcgccagtcctcccgggacagccctcggagaaactgcatcatcctcactaatgatccacttcctcctcagggaataaaggctcagggaccggcagttctactctagagcccaccagcctctcagagcctccggtgactggcctgtgtctccccctggatggacatgtggacggcgctgctcatcccgactcggaccgatg

SEQ ID NO: 9068 - DNA, 203 bp, synthetic construct
  source 1..203: mol_type = other DNA
ggcgcgccagtcctatttccgcttccgcctccttctttctcgacaagatggccacaccggcggtaccagtaagtgctcctccggccacgccaaccccagtcccggcggcggccccagcctcagttccagcgccaacgccagcaccggctgcggctccggttcccgctgcggctccagcctcatcctcacgactcggaccgatg

SEQ ID NO: 9069 - DNA, 203 bp, synthetic construct
  source 1..203: mol_type = other DNA
ggcgcgccagtcctggagaattgagcctgggaggcgggtccggagagggctatggaaagccgccggcggggaatcccggccgtagagggacagtggataggtgcccgaggcctacagctggcctggggctcgtgtctgggcttcggacgttggggcccggtggcccaccctttccgtagttgtcccaacgactcggaccgatg

SEQ ID NO: 9070 - DNA, 203 bp, synthetic construct
  source 1..203: mol_type = other DNA
ggcgcgccagtcctggagcctgccgctccccgcgctcgtagcgcgggcctggggactggggatcccgccgccgggccgcagcatggggcgcttccgcgggggcctgcggtgcatcaagtacctgctgcttggcttcaacctgctcttctggctggctggatcggccgtcattgcttttggactatggtcgactcggaccgatg

SEQ ID NO: 9071 - DNA, 203 bp, synthetic construct
  source 1..203: mol_type = other DNA
ggcgcgccagtcctaaacaataacaaacgggaggaggaagcgattctggggtttctgtgttgaacggttcttgtccgcgaagatgcgcttcggcctctgtcaggggacttgaacgggcttagtgggcttcagccagcttttctccaccggttccccacggggacccccccccccccccggccgttgcacgactcggaccgatg

SEQ ID NO: 9072 - DNA, 203 bp, synthetic construct
  source 1..203: mol_type = other DNA
ggcgcgccagtcctagccaaggcttactgaggctggtggagggagccactgctgggctcaccatggaccgccggatgtggggggcccacgtcttctgcgtgttgagcccgttaccgaccgtattgggccacatgcacccagaatgtgacttcatcacccagctgagagaggatgagagtgcctgtctacgactcggaccgatg

SEQ ID NO: 9073 - DNA, 203 bp, synthetic construct
  source 1..203: mol_type = other DNA
ggcgcgccagtcctcgactccgctggtcagcgccaagtgacttacgcccccgaccctgagccgggaccgctaggcgaggaggatcagatctccgctcgagaatctgaaggtgccctggtcctggaggagttccgtcccagcccgcggtctcccgggccgccctcctgaccggccggctcccggttcggcgactcggaccgatg

SEQ ID NO: 9074 - DNA, 203 bp, synthetic construct
  source 1..203: mol_type = other DNA
ggcgcgccagtcctcggccagtcctcggtcctcaggcttgtggctccgttgagcaccggccgccgggcctctgggtccgtcgagtggagactctctgaaaagcgtgggctccgtggcctccggcgcggccgcggcgggtcggtctcctagatcatccgggaagcccacgggaccctcaggcgggcaggcgactcggaccgatg

SEQ ID NO: 9075 - DNA, 203 bp, synthetic construct
  source 1..203: mol_type = other DNA
ggcgcgccagtcctgcgcagccgcggtgggaggaggcaccggccgcgcggcgggaggaggtgccggccgagcaccgcagacagcgccgggaagatgagcacggaaggtggtggccgtcgctgccaggcacaagtgtcccgccgcatctccttcagcgcgagccaccgattgtacagtaaatttctaagcgactcggaccgatg

SEQ ID NO: 9076 - DNA, 203 bp, synthetic construct
  source 1..203: mol_type = other DNA
ggcgcgccagtcctacaggcagcgcatggggggctgggcgaggtcgccgcgtataaatagtgagatttccaatggaaaggcgtaaataacagcgctggtgatccacccgcgcgcacgggccgtcctctccgcgcggggagacgcgcgcatccaccagccccggctgctcgccagccccggccccagcccgactcggaccgatg

SEQ ID NO: 9077 - DNA, 203 bp, synthetic construct
  source 1..203: mol_type = other DNA
ggcgcgccagtcctgccgcagctgctgcacccacccccaccctgcccggccctttctgcaccgtcatctcctgccccgccgaggcttgacccccccgacaatgggcaacgcgcaggagcggccgtcagagactatcgaccgcgagcggaaacgcctggtcgagacgctgcaggcggactcgggactgccgactcggaccgatg

SEQ ID NO: 9078 - DNA, 203 bp, synthetic construct
  source 1..203: mol_type = other DNA
ggcgcgccagtcctgtccgttggccagatcaactcgccgcgtgggccggccgttccctgagagtctgagcgctcgccgcacccccttccgagcttctattggccgtagcagacgtccgtctgccgctatctccgccccaatacggaagcggcctagtcctccggctccgacagctgggtgtccaggcccgactcggaccgatg

SEQ ID NO: 9079 - DNA, 203 bp, synthetic construct
  source 1..203: mol_type = other DNA
ggcgcgccagtcctatggctcgtactaaacagacagctcggaaatccaccggcggtaaagcgccacgcaagcagctggctaccaaggctgctcgcaagagcgcgccggctaccggcggcgtgaaaaagcctcaccgttaccgcccgggcactgtggctctgcgcgagatccgccgctaccaaaagtcgcgactcggaccgatg

SEQ ID NO: 9080 - DNA, 203 bp, synthetic construct
  source 1..203: mol_type = other DNA
ggcgcgccagtcctatgtcctcccgcagcccccggcccccgccccgccgtagccgccgccgcctgccgcgcccctcctgctgctgctgctgctgccgccgttcgcacctcaacgaggacaccggccgcttcgtgctgctggcggcgctcatcggcctctacctggtggcgggtgccacagtcttctcgcgactcggaccgatg

SEQ ID NO: 9081 - DNA, 203 bp, synthetic construct
  source 1..203: mol_type = other DNA
ggcgcgccagtcctccgggaaacctgccattcttcgctgctgatcgcgggattctttttggatagggttgacgttcgtggatagactcatatctgtgaccagtgtccgccaccgcggatggcaagagacctgatgggaccggccctgccgcccggcttcaaggcccgcggaacagcggaggacgaagacgactcggaccgatg

SEQ ID NO: 9082 - DNA, 203 bp, synthetic construct
  source 1..203: mol_type = other DNA
ggcgcgccagtcctggatttgatccccatcctggtgcagctccgagacgctcctgggctgcgcgcgcttttgggctgcgccaccgacagagacatctggaagccggagctagtggaagactctgcctcacctgcctccttgaaggaaacacggggaagccaggactggccgtcacgttggtgacaaatcgactcggaccgatg

SEQ ID NO: 9083 - DNA, 203 bp, synthetic construct
  source 1..203: mol_type = other DNA
ggcgcgccagtcctctctgaaggcatggcgcgtacgaagcagactgctcgcaagtccaccggcggcaaggctccgcgcaagcagctggccaccaaggcggctcggaagagcgctccggccaccggcggtgtcaagaagccccatcgctatcggcctggtacagtggctctccgcgagattcgccgctacgactcggaccgatg

SEQ ID NO: 9084 - DNA, 203 bp, synthetic construct
  source 1..203: mol_type = other DNA
ggcgcgccagtcctctccggctgcttgtagcactggtctcactgtccccgccgtcagccaccggttccttatccgtctcattccccattgtggcttggctgagccggtcgccaggcctcgctgtcctcctttgccttcctctctcctcagcggccgtactttgcgccgtacctcacctggcctgcaggcgactcggaccgatg

SEQ ID NO: 9085 - DNA, 203 bp, synthetic construct
  source 1..203: mol_type = other DNA
ggcgcgccagtccttttcgccagtccgtccggccgttccgcattaggtccgggataactaggtggagtaggtgtgcggcccgccgccggacagcccgctcgctgtttctttaagcccccgcctgcgtcttcacggccctctcccgttctgctggaaagctgacgtggggcaatccgttcagaccctcccgactcggaccgatg

SEQ ID NO: 9086 - DNA, 203 bp, synthetic construct
  source 1..203: mol_type = other DNA
ggcgcgccagtcctaatctcgactttcgcatttgagattccagacaggactcggctctccctctttcatacccaggggaaactgagtccctcacccccttcaagaccccaggccgctcctcgctcccgcccctcgaggcccttcgccggctctgcctcctcccccttcccgaccccaccggccataagcgactcggaccgatg

SEQ ID NO: 9087 - DNA, 203 bp, synthetic construct
  source 1..203: mol_type = other DNA
ggcgcgccagtcctacccagtgattgtatttgatgacttttaagctttcatatgccgttatttaatacctgtcacttccaaatgagagatgtaagggcaacggccgttagcgttctgttttggatcaggctctggagtggacgcccctagcttaggggtccttctaggcagccagaaacctgcggaaacgactcggaccgatg

SEQ ID NO: 9088 - DNA, 203 bp, synthetic construct
  source 1..203: mol_type = other DNA
ggcgcgccagtcctgggtggtggatctgtcggtcccgttttcccgtcgcacgtggtggccactgttggcttctgaatggtttgcaaggcggatatccacgccaaggcctttggatcggccgtgggtacatccgtctgagccgttcctttccatcgcagagcggcggcctccggcggcgctctccagtccgactcggaccgatg

SEQ ID NO: 9089 - DNA, 203 bp, synthetic construct
  source 1..203: mol_type = other DNA
ggcgcgccagtcctcttcatctctccatctctgcgctgctgccggctgcgccatccagcacccagactccagcaccggccgaggacccccactccggctgcagggaccctgtcccagcgagaccgcaggcatgtcatccgaaaagtcaggactcccagactcagtccctcacacttctccgccgccctcgactcggaccgatg

SEQ ID NO: 9090 - DNA, 203 bp, synthetic construct
  source 1..203: mol_type = other DNA
ggcgcgccagtcctactcccggttcgcggcgctgggagcggccgtgacgtcaggcgcccggctgctcctcacttgctctgagacaggtgcggcaagtctactgcgggctggtccgggctcctcaggttcagacccgaccgttatccagtcggttcgtggagaggagaggtgcactttacaggtccccgcgactcggaccgatg

SEQ ID NO: 9091 - DNA, 203 bp, synthetic construct
  source 1..203: mol_type = other DNA
ggcgcgccagtcctagctgcgccggtgactgaggggccgggcagtggagaagtggtggcggcgggcggcgggcggcaaaggagcagccatgagggccgggcccagtcaccgaccgtgctgaggagtcatggaagagtttttaaaccagtgtgagccactgccccatgttgtgttgatgccaatctgcccgactcggaccgatg

SEQ ID NO: 9092 - DNA, 203 bp, synthetic construct
  source 1..203: mol_type = other DNA
ggcgcgccagtccttgcgcggcgcatgcgtggcccggggtctcggggcgttgctgggaaacatctgccgttggttgcggcgggcaccggccgacatggcggcagcggtggcggctgcgctggcgcggcttttggcggcctttctgctcctcgcggcccaggtggcctgtgagtacggcatggtgcacgcgactcggaccgatg

SEQ ID NO: 9093 - DNA, 203 bp, synthetic construct
  source 1..203: mol_type = other DNA
ggcgcgccagtcctgcgggagagaggaggaggcggcggcggggcagtgaaactacggtagctgccccctgagctggtggtgtggctttgtggggagggcgtagttcctaatcccctttccgggcagccgccggggctcggggctgtgagcggccgtgaggctgcctccccgggccccctgcctccgcccgactcggaccgatg

SEQ ID NO: 9094 - DNA, 203 bp, synthetic construct
  source 1..203: mol_type = other DNA
ggcgcgccagtccttcctggtctccatgtcatctgccagaaaggccacctgcgccagcacctcctgagaccggccttcaaagacacgacgcatgccgctctgccgtccggagcacttaatgcctagagccagcagggtcccagtggccgcgtcactgcctctgagccacgcggtcattccaactcaaccgactcggaccgatg

SEQ ID NO: 9095 - DNA, 203 bp, synthetic construct
  source 1..203: mol_type = other DNA
ggcgcgccagtccttccaaactccctgaacttcggggacagtcccccgaagcggcgaaactctcagggttggcaaccctgcccagggacccccatcccgggcggcgctccggacgccctcccctcaccgcgcccccgcagacacgtgcctggactccgagggcttctggagccaccggccgggccacgcgactcggaccgatg

SEQ ID NO: 9096 - DNA, 203 bp, synthetic construct
  source 1..203: mol_type = other DNA
ggcgcgccagtcctgccccgggaccgaggggcagccaacccaatgaaaccaccgcgtgttcgcgcctggtagagatttctcgaagacaccagtgggcccgttccgagccctctggaccgcccgtgtggaaccaaacctgcgcgcgtggccgggccgtgggacaacgaggccgcggagacgaaggcgcacgactcggaccgatg

SEQ ID NO: 9097 - DNA, 203 bp, synthetic construct
  source 1..203: mol_type = other DNA
ggcgcgccagtcctagtcccggggagcgcaccggaagttctcgcctggcccaggcgcggggtccaagatggtggcgctaggagccgcgacccagtgatagcggccgtggaggggcccccgaccgagcgggaggttgggggtagcctggagattctgaagacaggaataagatgaaggaatggaaatcacgactcggaccgatg

SEQ ID NO: 9098 - DNA, 203 bp, synthetic construct
  source 1..203: mol_type = other DNA
ggcgcgccagtccttcggcccagaccgtcgcagctacagggggcctcgagccccggggtgagcgtccccgtcccgctcctgctccttcccatagggacgcgcctgatgcctgggaccggccgctgagcccaaggggaccgaggaggccatggtaggagcgctcgcctgctgcggtgcccgctgaggcccgactcggaccgatg

SEQ ID NO: 9099 - DNA, 203 bp, synthetic construct
  source 1..203: mol_type = other DNA
ggcgcgccagtcctgcagtacacgggaggcttttaattccattgtggagaggacggcgttatttttattaactggaggcgacggcggctgcggcggcggcgggacccgcctcctccggggtatgaaaatcggcagtgggttcctgagtggcggcggaggtaccggcagtagcggtggtagcggctccgcgactcggaccgatg

SEQ ID NO: 9100 - DNA, 203 bp, synthetic construct
  source 1..203: mol_type = other DNA
ggcgcgccagtcctacgactgcgtgggtgagtcgtctataaaaactcatctctgcgcgtctcttcgccacattcgcttcctgctttcggtgtgtctgttgtgtcttgttgcgggcaccgcagtcgccgtgaagatggcgtctaccagccgtttggatgctcttccaagagtcacatgtccaaaccatccgactcggaccgatg

SEQ ID NO: 9101 - DNA, 203 bp, synthetic construct
  source 1..203: mol_type = other DNA
ggcgcgccagtcctctgggctgatccggggctcggccaagctgaggcggcggcgcccggccgtgcgcccagcttgcaggcgcctggctctcacgatgatgaagaagaagaagtttaagtttaaggtggacttcgagctcgaggagctctcctcagtgcccttcgtcaatggggtcctcttctgcaagacgactcggaccgatg

SEQ ID NO: 9102 - DNA, 203 bp, synthetic construct
  source 1..203: mol_type = other DNA
ggcgcgccagtcctcgatgtgacgccgcgcgccccggggtcctcggcgcctgcgccctctcctataaagcagacgccgcgccgcgctgcgacgctgtagtggcttcgtcttcggtttttctcttccttcgctaacgcctcccggctctcgtcagcctcccgccggccgtctccttaacaccgaacacccgactcggaccgatg

SEQ ID NO: 9103 - DNA, 203 bp, synthetic construct
  source 1..203: mol_type = other DNA
ggcgcgccagtcctgtcgtagagagggggcggggcggccattggggctcctcattggggtgcttggggcgcaccccatcgggtaccgggcgtcccggaattgtgggggacaaaaaggctctgcagtctcggctgaggggtctcaccgacaaaagaggggaagccggccgccgcccaccgcccgccgcccgactcggaccgatg

SEQ ID NO: 9104 - DNA, 203 bp, synthetic construct
  source 1..203: mol_type = other DNA
ggcgcgccagtcctctgcctcccccccgctcccgctcccctgagcccagccagaccccgcgccgcccgcgccccgctcgactccggaggctcccgcagccccggcgtccgccccgctgccccctcccccgggggccatgggggcgcccccgggctaccggccctcagcttgggtgcatctcctccacccgactcggaccgatg

SEQ ID NO: 9105 - DNA, 203 bp, synthetic construct
  source 1..203: mol_type = other DNA
ggcgcgccagtcctgcacacacgggcgcgcacacacacgcgcgtacacactgggtctccaggcagcggccgtcgccgcatccccggcagcagctccaggcaaagtgacagaggacagtgctgctgtgagtttgacgaagtggacatcacctgcagtcagtccagagctgcccagtcttgaatataatccgactcggaccgatg

SEQ ID NO: 9106 - DNA, 203 bp, synthetic construct
  source 1..203: mol_type = other DNA
ggcgcgccagtcctccacgtgtccccggtcaccggccctgcccccgggccctgtgcttataacctgggatgggcacccctgccagtcctgctctgccgcctgccaccgctgcccgagcccgagtggttcactgcactgtgaaaacagattccagacgccgggaactcacgcctccaatcccagacgctcgactcggaccgatg

SEQ ID NO: 9107 - DNA, 203 bp, synthetic construct
  source 1..203: mol_type = other DNA
ggcgcgccagtcctttgaaaatctactctatcagctgctgtggttgccaccattctcaggaccctcgccatgaaagcccttatgctgctcaccctgtctgttctgctctgctgggtctcagctgacattcgctgtcactcctgctacaaggtccctgtgctgggctgtgtggaccggcagtcctgccgcgactcggaccgatg

SEQ ID NO: 9108 - DNA, 203 bp, synthetic construct
  source 1..203: mol_type = other DNA
ggcgcgccagtcctttcccaggaaagcccaggtgctggctgccagctgctgcgccccccatgtagaaggtgcacctcctgggagcaggcacgtcttttggctcttctgaccatggagagataggacggtccctgcagcccgcgcgacagaaagctgtgccgccaccaccggccgcgcccgtccttcggcgactcggaccgatg

SEQ ID NO: 9109 - DNA, 203 bp, synthetic construct
  source 1..203: mol_type = other DNA
ggcgcgccagtcctgaagtcgggggtgggtccctccggacgccgaagtgggctcgggatgcggggctgggaccctcccgattccggggcggattccggacgccgggaccggccattactggtgccgggttgggcttctccagatgccggggctgggtccttcccaaggttgagacaaaaggatgccaccgactcggaccgatg

SEQ ID NO: 9110 - DNA, 203 bp, synthetic construct
  source 1..203: mol_type = other DNA
ggcgcgccagtcctggaggggcggggtgagaaggctgcgcgcgggtaaaggggccgcctcgagcggggtccgagcgttcagcggacgcgcgcggcctcgatctctggactcgtcacctgcccctccccctcccgccgccgtcacccaggaaaccggccgcaatcgccggccgacctgaagctggtttccgactcggaccgatg

SEQ ID NO: 9111 - DNA, 203 bp, synthetic construct
  source 1..203: mol_type = other DNA
ggcgcgccagtcctctctctccctctgtctccctccctctctctctcccgccgcgcccgcctcccgcccgccctcgctccctccactcctctcccctcccctccccggcactgcagcaccagccgtctgcagctccggccgccacttgcgcctctccagcctccgcaggcccaaccgccgccagcacccgactcggaccgatg

SEQ ID NO: 9112 - DNA, 203 bp, synthetic construct
  source 1..203: mol_type = other DNA
ggcgcgccagtcctagacagcctgcccccaccggccctcttgtgtggctacagctgggtgctgggaaggggcctcctactggaggggccgggtgggctggggtccccagtctccccgttgtccttttcctagaggagatcgccaagcacaaggggcccccggtgttcactcaggaggagagatacaagcgactcggaccgatg

SEQ ID NO: 9113 - DNA, 203 bp, synthetic construct
  source 1..203: mol_type = other DNA
ggcgcgccagtcctgagccgcaggcagagcgtccggcggccgggagggacgcggagccacagcccgacgcacggacggagggacgccggagcccgcctgaccatgtggaagctgggccggggccgagtgctgctggacgagccccccgaggaggaggacggcctgcgtggggggccgccaccggccgccgactcggaccgatg

SEQ ID NO: 9114 - DNA, 203 bp, synthetic construct
  source 1..203: mol_type = other DNA
ggcgcgccagtcctgaaaacttcctggagaaggatggattttaccctgtaaaagaagaaagacatggatgcataagaagagggttgaagagggggaggcctcagacttctcgctggcctgggattcctccgtgacagcagcaggaggcctagaaggagagccagagtgcgatcagaaaaccagccgtgcgactcggaccgatg

SEQ ID NO: 9115 - DNA, 203 bp, synthetic construct
  source 1..203: mol_type = other DNA
ggcgcgccagtcctaggctccaccttttgtgtttcccgcacagtcaatcaaaataggaaaaaaaaatcccgggaccgctccggccgtgtccgccgccgcttcccgcatcctctcccgccgccgccgccttcgctcctcaccatgtgtaaggcggcggggagccccgcctgaggtgccctaaacacactcgactcggaccgatg

SEQ ID NO: 9116 - DNA, 203 bp, synthetic construct
  source 1..203: mol_type = other DNA
ggcgcgccagtcctacccggagccgtgcccagtccacgccggccgtgcccggcggccttaagaacccggcaacctctgccttcttccctcttccactcggagtcgcgctccgcgcgccctcactgcagcccctgcgtcgccgggaccctcgcgcgcgaccgccgaatcgctcctgcagcagagccaaccgactcggaccgatg

SEQ ID NO: 9117 - DNA, 203 bp, synthetic construct
  source 1..203: mol_type = other DNA
ggcgcgccagtcctggaagccgggattcgccctccggggagcgattggtcctcgggaggggcggggaggtggacgcgggtaccggcggtcgtcgggtcggcagcctttggtcagttggcagcggcaagcgcgctgcggttccggtggcgccatgtcgttctgcagcttcttcgggggcgaggttttcccgactcggaccgatg

SEQ ID NO: 9118 - DNA, 203 bp, synthetic construct
  source 1..203: mol_type = other DNA
ggcgcgccagtcctagacttctctcaactcaacaaaaacccacctcccattgccatgtattgctgtgctctccgctcctgcagcgtccccaccggccctgccaccaccttctgctcatttgataaaagctgccgctgtggagtctgcctacccagcacctgcccacatgagatcagcctccttcagcccgactcggaccgatg

SEQ ID NO: 9119 - DNA, 203 bp, synthetic construct
  source 1..203: mol_type = other DNA
ggcgcgccagtccttgccaccgcccgggctccgtgccgccaagttttcattttccaccttctctgcctccagtcccccagcccctggccgagagaagggtcttaccggccgggattgctggaaacaccaagaggtggtttttgttttttaaaacttctgtttcttgggagggggtgtggcggggcaggcgactcggaccgatg

SEQ ID NO: 9120 - DNA, 203 bp, synthetic construct
  source 1..203: mol_type = other DNA
ggcgcgccagtcctgcaggtgtggtgttcatcccgggtcgaccggccgctcgcgctgccctgaaactctagtcgccagagaggcggcatgggtttccggaagttctcccccttcctggctctcagtatcttggtcctgtaccaggcgggcagcctccaggcggcgccattcaggtctgccctggagagcgactcggaccgatg

SEQ ID NO: 9121 - DNA, 203 bp, synthetic construct
  source 1..203: mol_type = other DNA
ggcgcgccagtcctgggcacgatgcggcaacccgccgttcggttggtgcgcctgggtcgggtgccgtacgccgagctactggggctgcaggaccgctggctgcggcggctgcaggccgagccaggcattgaggccccgtcggggactgaggcgggcgcgctcctgctctgcgagcccgcggggcccgtcgactcggaccgatg

SEQ ID NO: 9122 - DNA, 203 bp, synthetic construct
  source 1..203: mol_type = other DNA
ggcgcgccagtcctagaagccgcagcccaggcggcggtccctcccgctgtcgccgcccgggtgtagcgcatcacccggagcccaccggccgcaggtgcctcctccggccccagggggccccgggagccctgaagggcgaagcggcagggacgcctctcttgggcgaagaggcggcctcaccgccccggcgactcggaccgatg

SEQ ID NO: 9123 - DNA, 203 bp, synthetic construct
  source 1..203: mol_type = other DNA
ggcgcgccagtcctgtgagggttgaatgtaagatggcgcccagggagctgtgaggagaaaaccctgtcggtcttggagcgacgacggcagaaccagggtccctggcggtgcggcggggccggcgggtgcagcggaggcggcggcggcggcggcagtgacgtcgccgggaaccctaaggactctgcaatcgactcggaccgatg

SEQ ID NO: 9124 - DNA, 203 bp, synthetic construct
  source 1..203: mol_type = other DNA
ggcgcgccagtcctgggtccccggaggcccccgggctctgcccctccagctagagaggcagccgaaccctagcggcctggaaggggccgggaaaccgcggccagctggcaaggagtggcccccgggggcggggcgccggcgggtgtgtgagtagcccgcccggcccgggtccgagttccagccccgcgcgactcggaccgatg

SEQ ID NO: 9125 - DNA, 203 bp, synthetic construct
  source 1..203: mol_type = other DNA
ggcgcgccagtcctaaggcgatggcccgcgccccgagcgcaggctagcgtgcctgggtgcccggccatgggctgtatcggctctcggagcccggcgggtcaggcatttctggggaccaacagctggccgaggctcagggatagagacggctgctccagctaaaggtgaatgttggagacacagtcgcgcgactcggaccgatg

SEQ ID NO: 9126 - DNA, 203 bp, synthetic construct
  source 1..203: mol_type = other DNA
ggcgcgccagtccttgccgggagagtgaggccgcgggggctgggaagggaccggtgtatgggggacagcaggcgaaggtcactcgggaaccagcccagctctgaggctgcgggcaggtcggaaagggagcaggacggcgacccccgtggcctccagagctctgtgtacgagagccggcgggtcacagacgactcggaccgatg

SEQ ID NO: 9127 - DNA, 203 bp, synthetic construct
  source 1..203: mol_type = other DNA
ggcgcgccagtcctactccctctctggatgtgtctgctgccgccattgtgcggcgctggtcccctcagagggttcctgctgctgccggtgccttggaccctccccctcgcttctcgttctactgccccaggagcccggcgggtccgggactcccgtccgtgccggtgcgggcgccggcatgtggctgtcgactcggaccgatg

SEQ ID NO: 9128 - DNA, 203 bp, synthetic construct
  source 1..203: mol_type = other DNA
ggcgcgccagtcctagagacgcggcaagggggcggggccaaaggccctaagctcggcgttccagagagtggggagggggcaagtgtcagtcaggacgggagtccggcgggttacagcggaggcctaggtggcagacagggggcccgggccgctgcgtgttgtccacccaagatggagttcctcctgggcgactcggaccgatg

SEQ ID NO: 9129 - DNA, 203 bp, synthetic construct
  source 1..203: mol_type = other DNA
ggcgcgccagtccttccacgtctcccggaagcggtagcagggccccggcgggtcggggaggaggtttactcagcttgggccccctccgggccagccgccgagggggcgcggcccaggacggcggctaggccgtagtgcagcctctccggagtcctcaggtttgccaataggattatcctgctgccatccgactcggaccgatg

SEQ ID NO: 9130 - DNA, 203 bp, synthetic construct
  source 1..203: mol_type = other DNA
ggcgcgccagtcctgcctcgcagccacccctcctgcgtctccacaaatggtccgacccgcaagcaagggggcgggtccggctttgaaaagccggcgggtcgggccttgaggtggaaggcgggaaaatggcggattcctcggggcgaggcgctgggaagcctgcaaccggccccacaaattctagcagtcgactcggaccgatg

SEQ ID NO: 9131 - DNA, 203 bp, synthetic construct
  source 1..203: mol_type = other DNA
ggcgcgccagtcctaaaattaaattgacaggctggattctgcaaagatctttggacatttaagtatcttcgaccggcgcgaaaagaggcggcctgaccttggaagtgggacggggtcctgcagcgggtccttccggcgggtgacattcagccggcggttcggggcgacggactctccattccagaacccgactcggaccgatg

SEQ ID NO: 9132 - DNA, 203 bp, synthetic construct
  source 1..203: mol_type = other DNA
ggcgcgccagtcctgacttccggcacgaaggggcggggctgggctcgtggctgagccagcagctgcagcagctacgggagtggccgggtggccggcgggtgccagccgccatggaggccgtgccccgcatgcccatgatctggctggacctgaaggaggccggtgactttcacttccagccagctgtgcgactcggaccgatg

SEQ ID NO: 9133 - DNA, 203 bp, synthetic construct
  source 1..203: mol_type = other DNA
ggcgcgccagtcctgagagcggcgcctgatgacgaccgggagggcggggcccgtctggggcgccggcgggtgcgtttgaatctggtccgagcgcgggaaacggcgggtccccgagcccagggttacaaaataaatgccatttgaacagtgccatctgtcatggaaaaacgtgagacgtttgtacaagccgactcggaccgatg

SEQ ID NO: 9134 - DNA, 203 bp, synthetic construct
  source 1..203: mol_type = other DNA
ggcgcgccagtcctgctgtgacagccacacgccccaaggcctccaagatgagctacacgttggactcgctgggcaacccgtccgcctaccggcgggtaaccgagacccgctcgagcttcagccgcgtcagcggctccccgtccagtggcttccgctcgcagtcgtggtcccgcggctcgcccagcacccgactcggaccgatg

SEQ ID NO: 9135 - DNA, 203 bp, synthetic construct
  source 1..203: mol_type = other DNA
ggcgcgccagtcctgggtggactccgagccggcctgtcaggcaagagccgggcaggtgcggtggcggaagtgcagggacggaggccgaagcggagcggtctagggagccgcggccgcgggtcacccggcgggtagcagttgctgagtgtcagctagacagcagcgactagggctcgggcgccggcgagcgactcggaccgatg

SEQ ID NO: 9136 - DNA, 203 bp, synthetic construct
  source 1..203: mol_type = other DNA
ggcgcgccagtcctcggcggaccccgtaccctggcagcatcggagcaccggcgggtgaaggcaaggtccctggactggtcatatacctcttgtggccctggcagaatcaagatgaggccctgtcatgcctccccagtgaggcctacagtctgagcagacagcatggcctgccactggcagtgaacacccgactcggaccgatg

SEQ ID NO: 9137 - DNA, 203 bp, synthetic construct
  source 1..203: mol_type = other DNA
ggcgcgccagtccttgagatcgtgtttcatttcaggaagatatatgcgtcaggaaaatttctatcttcttttgtattatcaaggagatatttggagcagagtcaaccctctcagttacataaaataaaaaatggcatattcttggcaaacggatccaaatcctaatgaatcacacgaaaagcagtatgcgactcggaccgatg

SEQ ID NO: 9138 - DNA, 203 bp, synthetic construct
  source 1..203: mol_type = other DNA
ggcgcgccagtccttgcgggagagactggaattcaagagagtcaaatgtgctgggaaagactttctgggcaaaaggaataagcaaaggtgtgcaaaggtaaggaagcaggaaacctttgcacatcttgagaactcgccggccagaggcctgtgaaggagcgcagtggtcaggcaggagaggcagtcggcgactcggaccgatg

SEQ ID NO: 9139 - DNA, 203 bp, synthetic construct
  source 1..203: mol_type = other DNA
ggcgcgccagtccttataaagccgcgctgcccgggagccgctcggccacgtccaccggagcatcctgcactgcagggccggtctctcgctccagcagagcctgcgcctttctgactgggtccggaacactgaaaccagtcatcactgcatctttttggcaaaccaggagctcagctgcaggaggcaggcgactcggaccgatg

SEQ ID NO: 9140 - DNA, 203 bp, synthetic construct
  source 1..203: mol_type = other DNA
ggcgcgccagtccttcagaactcacacttcttcctggcaaagaagtgcccaggacgggagctggggagccagggctgatctaggaggctgggagccaggtgacaggatggccccaaagagagttgtgcagctgtccctgaagatgcctacccatgccgtgtgtgtggtgggagtcgaggcacatgtggcgactcggaccgatg

SEQ ID NO: 9141 - DNA, 203 bp, synthetic construct
  source 1..203: mol_type = other DNA
ggcgcgccagtcctgagtggagctcagtgccagaggaggggattcccggcgccgggggacagagccccttttttcttttgccgaaagaccctttctgctggggagcctcttgtgtccagcctaggcccgcgtgcagcgccgacggatgaccgtcttcttggcaagaaagtgaataaacttaattgagacgactcggaccgatg

SEQ ID NO: 9142 - DNA, 203 bp, synthetic construct
  source 1..203: mol_type = other DNA
ggcgcgccagtcctatggggctcaataagtctgcttccaccttccagcttactggcttcccaggcatggagaaggcacatcactggatattcatcccattattggcagcctacatctccatacttcttggcaatggcactcttctctttctcatcaggaatgatcataacctccatgagcccatgtaccgactcggaccgatg

SEQ ID NO: 9143 - DNA, 203 bp, synthetic construct
  source 1..203: mol_type = other DNA
ggcgcgccagtcctgccgggaccatggtcaccctcggctgagtttccggcggcgactttgattattggcaaataaccaccataacaataccgagcccccgggcttgcaccgcacgcactgactccgcgagcccgcacacggccgcgtcgcccgccaccgggccctgagcgccagccccaaacgagccgcgactcggaccgatg

SEQ ID NO: 9144 - DNA, 203 bp, synthetic construct
  source 1..203: mol_type = other DNA
ggcgcgccagtcctgaggcgaggcggggcgcgactgggttcgcggccgcgtgcagaggtgcaggcagagcagcctcggaaccgagacgatgcgtgcgctccgcgaccgagccgggctcctcctctgcgtgctgctgctggcggcgctgctggaggcggcgctagggctccccgtgaagaagccgcggccgactcggaccgatg

SEQ ID NO: 9145 - DNA, 203 bp, synthetic construct
  source 1..203: mol_type = other DNA
ggcgcgccagtcctgccccgccccgcccctgcgcggaagtctatccgggctttcgcgtcaccaccctgcccacctgggtggcgcgtggcttacgcaacggtcactgggctcctgggccgctcccgggccagcgagggctgcgaaagaagttgtagcatgcataccacagaatcaaaaaatgaacatttcgactcggaccgatg

SEQ ID NO: 9146 - DNA, 203 bp, synthetic construct
  source 1..203: mol_type = other DNA
ggcgcgccagtcctatctaccttatctggtcggtcatctctgtaacctccctaccaaggactaattggtctttaaaactcctcaatgcaccgggcgcggtggctcacgcctgtaatcccagcactttgggaggccgaggcgggcagatcacgaggtcaggaaatcgagaccatcttggctaacaagaacgactcggaccgatg

SEQ ID NO: 9147 - DNA, 203 bp, synthetic construct
  source 1..203: mol_type = other DNA
ggcgcgccagtcctgtttgttaggggcagaagcctcccattacggagcacgagagagtccatgaaggtccccgcgactcccggactggagaaaacggctcttgcgatggggcgaagtccgagctgcggcgggcgttggtccgtgcagggaagtgggaatcgttaggttcgttctggacccgccgcccccgactcggaccgatg

SEQ ID NO: 9148 - DNA, 203 bp, synthetic construct
  source 1..203: mol_type = other DNA
ggcgcgccagtcctgcatcctttcaatgacctgttttcttctgtaaccacaggttcggtggtgagaggaagcctcgcagaatccagcagaatcctcacagaatccagcagcagctctgctggggacatggtccatggtgcaacccacagcaaagccctgacctgacctcctgatgctcaggagaagcccgactcggaccgatg

SEQ ID NO: 9149 - DNA, 203 bp, synthetic construct
  source 1..203: mol_type = other DNA
ggcgcgccagtcctgaccttaggacccgcgggctccagggctactgtccgtccgccactgcgcgccagcaggtcctggtctccgctctccaacagctgaaaggccggcgcagtgaacacagaaacgaaaaccaagaaatgccttattccacaaacaaagagttgatacttggcatcatggtgggcactcgactcggaccgatg

SEQ ID NO: 9150 - DNA, 203 bp, synthetic construct
  source 1..203: mol_type = other DNA
ggcgcgccagtcctggagaaggggtggggcagggtatcgctgactcagcagcttccaggttgctctgatgatatattaaggctcctgaatcctaagagaatgttggtgaagatcttaacaccacgccttgagcaagtcgcaagagcgggaggacacagaccaggaaccgagaagggacaagcacatggcgactcggaccgatg

SEQ ID NO: 9151 - DNA, 203 bp, synthetic construct
  source 1..203: mol_type = other DNA
ggcgcgccagtcctacttcgctgtgaagatggcgtcgggcagcgggacaaaaaacttggactttcgccgaaagtgggacaaagatgaatatgagaaactcgccgagaagaggctcacggaagagagagaaaagaaagatggaaaaccagtgcagcctgtcaagcgagagcttttacggcatagggactcgactcggaccgatg

SEQ ID NO: 9152 - DNA, 203 bp, synthetic construct
  source 1..203: mol_type = other DNA
ggcgcgccagtcctaccccgagcgcggccgcggacgaagatggcgaccgccatgtacttggagcactatctggacagtatcgagaaccttccctgcgaacttcagaggaacttccagctgatgcgagagctggaccagaggacggaagataagaaagcagagattgacatcctggctgcagagtacatcgactcggaccgatg

SEQ ID NO: 9153 - DNA, 203 bp, synthetic construct
  source 1..203: mol_type = other DNA
ggcgcgccagtcctctatcaaggaagaaattgccaaaccatgtctttttttctgttttcagagtagttcacaacagatctgagtgttttaattaagcatggaatacagaaaacaacaaaaaacttaagctttaatttcatctggaattccacagaaccttcggctcgcgtgcttctgagctgctgtggcgactcggaccgatg

SEQ ID NO: 9154 - DNA, 203 bp, synthetic construct
  source 1..203: mol_type = other DNA
ggcgcgccagtccttgagaagaaaagagagttgacattgggtggcggggaatggagaagaagaacccatgaaggaaactgaggaagagcagccagacgaataggaggaaaaccaggagaagatggtctttggagtccaaatgaagagttctgaggaggaagtggtccacagcgtcaaacttgtgcacccgactcggaccgatg

SEQ ID NO: 9155 - DNA, 203 bp, synthetic construct
  source 1..203: mol_type = other DNA
ggcgcgccagtcctcgcccgcccagccccgggggcagggagagcctagattacggaagtaccgcgagcaaggagcgcggaatcggggagcgtccggagctagctggatcctctaggcaggatggtgatgggaatctttgcaaattgtatcttctgtttgaaagtgaagtacttacctcagcagcagaacgactcggaccgatg

SEQ ID NO: 9156 - DNA, 203 bp, synthetic construct
  source 1..203: mol_type = other DNA
ggcgcgccagtcctacacaggaagctgagccggcttggggcccagcatacacaggcccccaggacccctggggagagggccccgctgggctggccctgcagggaccatggaatccagagctgaagggggctcccctgctgtgtttgattggttcttcgaagcggcctgccctgcctccctgcaggaggcgactcggaccgatg

SEQ ID NO: 9157 - DNA, 203 bp, synthetic construct
  source 1..203: mol_type = other DNA
ggcgcgccagtcctactctgatgaacactgctctcctgcctagagataccactgagtccagaagcaagacctgtgagagtgcacagtgccacttcgccccatggctgaagatggtttgcccaaaatttattctcatcctccaacagaaagcagtaaaacaccaactgcagcaaccattttctttggggcgactcggaccgatg

SEQ ID NO: 9158 - DNA, 203 bp, synthetic construct
  source 1..203: mol_type = other DNA
ggcgcgccagtcctgtgtgcggtgcccttcggccggcctgagccccagagtcagctcccctttctcgcccagcgcccccaggccgctcccggggctcacggaatagtaaagaaacacatcataaaacctcccaggacataaaggtgagcacagaccctgtttggatcaagtcagttcctggagcctgacgactcggaccgatg

SEQ ID NO: 9159 - DNA, 203 bp, synthetic construct
  source 1..203: mol_type = other DNA
ggcgcgccagtcctaagtgcgactgccagctgccgaggcgttcggtcctgctgttgcggccgctgccccagggctgcggggacgctcccggagccctgcctgttccctgtccatccaggccagcagctgaaggagcctcacctgcctcccttctctgagtagcacggatttgaggagaagcagcgaagcgactcggaccgatg

SEQ ID NO: 9160 - DNA, 203 bp, synthetic construct
  source 1..203: mol_type = other DNA
ggcgcgccagtcctgcggagtgattccccacccctgctccatctagctctttccagtgcagccactgccgccgcccaggagccctcgtcccctgccttgtccccctactcgttcccgctcccacggcatggagcaggacactgccgcagtggcagccaccgtggcagccgcggatgcgaccgccactacgactcggaccgatg

SEQ ID NO: 9161 - DNA, 203 bp, synthetic construct
  source 1..203: mol_type = other DNA
ggcgcgccagtcctactctaccaaggacagcccaagaactggtctagcctggcagccttttccctcgggtagtagaggctgcccctctgacagggagtttgtggtcagcgagtgggcccttgggggtcttgggctgtcacagggactccagaaagccatgcagagccttgtgccatgaaggacttctccgactcggaccgatg

SEQ ID NO: 9162 - DNA, 203 bp, synthetic construct
  source 1..203: mol_type = other DNA
ggcgcgccagtcctgcaggcacaaactcatccatccccagttgattggaagaaacaacgatgactcctgggaagacctcattggtgtcactgctactgctgctgagcctggaggccatagtgaaggcaggaatcacaatcccacgaaatccaggatgcccaaattctgaggacaagaacttcccccggcgactcggaccgatg

SEQ ID NO: 9163 - DNA, 203 bp, synthetic construct
  source 1..203: mol_type = other DNA
ggcgcgccagtcctctcctctgactcaacaatgccatcagcactgaaaaggctgagccctgactacagctcttgcagacagaaaaattcgctgcaagtacagcactttctagattgctcctggagtgtgggaacaacagtctctcctgtccacgttactgaatccagaaaaaaggtgaacttacgaaccgactcggaccgatg

SEQ ID NO: 9164 - DNA, 203 bp, synthetic construct
  source 1..203: mol_type = other DNA
ggcgcgccagtccttctgccggcgcctgtccggacccgggcccctctccgctttcggccggcctcgggcaccgggcttctggagctcccggagccctgcctgttccctgtccatccaggccagcagctgaaggagcctcacctgcctcccttctctgagtagcacggatttgaggagaagcagcgaagcgactcggaccgatg

SEQ ID NO: 9165 - DNA, 203 bp, synthetic construct
  source 1..203: mol_type = other DNA
ggcgcgccagtcctccatagtgatctttgcagtgacccagcatcactgtttcttggcgtgtgaagataacccaaggaattgaggaagttgctgagaagagtgtgctggagatgctctaggaaaaaattgaatagtgagacgagttccagcgcaagggtttctggtttgccaagaagaaagtgaacatccgactcggaccgatg

SEQ ID NO: 9166 - DNA, 203 bp, synthetic construct
  source 1..203: mol_type = other DNA
ggcgcgccagtccttcttgagcctaggaggtggaggctgcagtgatctgtgattgtacctttgcactccagcctgggtgacagagcatgacgctgtctctaaaagaataataataataagcattccataaaaattatggaatggagaaatcatgaatggggtctcggaggggaccagaggctgcagtgcgactcggaccgatg

SEQ ID NO: 9167 - DNA, 203 bp, synthetic construct
  source 1..203: mol_type = other DNA
ggcgcgccagtcctacgcctgcagtccccgcgccgtgcccggaatgcgagctgcacgcagggctctcccaagttcccaccgagccgaataaaaagcgtcctcccgcagctctccgccaaagacggacattgactccaggactccacagaatggagcaagaatgagaggaaaaaggccggcagaaaagccgactcggaccgatg

SEQ ID NO: 9168 - DNA, 203 bp, synthetic construct
  source 1..203: mol_type = other DNA
ggcgcgccagtcctgtcccaggagactacagcaaacgagtgtatcaaggagtgagagtgaagcatacagtcaaagatctcctggcagaaaaacgatccgggcagacaagtaactcaagacttaatggcagcgtcagttcctctcagtctccatttgtgcagatgccaggttcgccggtcacgtcaggtcgactcggaccgatg

SEQ ID NO: 9169 - DNA, 203 bp, synthetic construct
  source 1..203: mol_type = other DNA
ggcgcgccagtcctagctaacaggccactagtatcctactaaagcttttgtctggataggagcaacatgcatgtttacagtcttgcagtgtgctgagagctggtggccagtgggactgagtgagctgtgtgccgtgtattgacccgcttcctagtcctgaattcctttcagaagctccggcagggaggcgactcggaccgatg

SEQ ID NO: 9170 - DNA, 203 bp, synthetic construct
  source 1..203: mol_type = other DNA
ggcgcgccagtccttaaaccatacttgatcctaaattcctgtacttcctcaggccatccgagcatgaaacgctgtcacctacccacatccgctggctgtgacgcttgtcaaagtgttctctatcggctgcatgcctagaccaccaaagcgttctgaccggacagtgtcactggagaaggcggcgcgaccgactcggaccgatg

SEQ ID NO: 9171 - DNA, 203 bp, synthetic construct
  source 1..203: mol_type = other DNA
ggcgcgccagtcctccttccagaaggagaaggatttttctccctgctctgcagccaagtgaaagagattagtccctaaacctgtgaaatcgaccagagctgtgtgattaccagggcttgagagaggactcgaaaagaaaaggagaaataaatcaaacagcctgtcagttcctttggccacgtcagaagcgactcggaccgatg

SEQ ID NO: 9172 - DNA, 203 bp, synthetic construct
  source 1..203: mol_type = other DNA
ggcgcgccagtcctgggttaaaggtcttgtgatatgtcacaatcccaactaagggcaggacccaggcagaaaaggagagtcacttcctttgatgattggtccagagatacattacaatttcccctgaggacagctctcatgcagaagaggaactgaatatactgcatggctcaggtatctgcagatttcgactcggaccgatg

SEQ ID NO: 9173 - DNA, 203 bp, synthetic construct
  source 1..203: mol_type = other DNA
ggcgcgccagtcctgaaggacgggggaggaccgctgcttccggcgccgtaactgctgccatcttctccgcgctatggctgcgttcggccgtcaggtccttgattggcaccgcctgatccccctcacctgggcctgtatggctaggcagactcctcatcttggagaacagagaaggacgacagcttcttcgactcggaccgatg

SEQ ID NO: 9174 - DNA, 203 bp, synthetic construct
  source 1..203: mol_type = other DNA
ggcgcgccagtcctcccctcggggaccccctgaggaccctcggattccccccaactcccctgccctctaaaaccacttcaattcctcaactcttcccccggcccgcaggaacccccgccatggcccgttcttacggcggccgggtgctggctgcaatgaccctgctgggcatcgcggcggccgtgctgcgactcggaccgatg

SEQ ID NO: 9175 - DNA, 203 bp, synthetic construct
  source 1..203: mol_type = other DNA
ggcgcgccagtcctgaccccggaggcaccacccacatccgtctaacatcacttccttcagagtttgaaaaaaaaaaatctgggaagtagaggtgttgtgctgagcggcgctcggcgaactgtgtggaccgtctgctgggactccggccctgcgtccgctcagccccgtggccccgcgcacctactgcccgactcggaccgatg

SEQ ID NO: 9176 - DNA, 203 bp, synthetic construct
  source 1..203: mol_type = other DNA
ggcgcgccagtcctgctccctccttcacctccccctttggcactgcctgtcacctcctttataaagcctggctcttttatcaccgccacttggccctcactgccgccgccagctctgggctccatggactggtcccgtctgaggtgcccctgaccgtccctgccctcaccccaccccggatcccggcacgactcggaccgatg

SEQ ID NO: 9177 - DNA, 203 bp, synthetic construct
  source 1..203: mol_type = other DNA
ggcgcgccagtccttgctcctctacctgctctactctcaatccgccagaatcatgggctgctgtggctgttctggaggctgtggctctggctgtgggggctgtggctccggcagtgggggctgtggctctggctgtgggggctgtggctccagctgctgtgtgcccatttgctgctgcaagcctgtgtcgactcggaccgatg

SEQ ID NO: 9178 - DNA, 203 bp, synthetic construct
  source 1..203: mol_type = other DNA
ggcgcgccagtcctatggagaatagcacagaagtgacagagtttatcctcttgggattaacagatgaccccaatcttcagatacccctcctcctggcatttttattcatctacctcatcaccctgcttgggaatgggggaatgatggtgatcatccactcagactcccatctccacactccaatgtaccgactcggaccgatg

SEQ ID NO: 9179 - DNA, 203 bp, synthetic construct
  source 1..203: mol_type = other DNA
ggcgcgccagtcctagctctttccactacggctgtattgcactggtgagtccgggcccatggatgagaaattgatgcgaggatcaatacaagcttaatttgaattaataaaaggaaatattttctccctttgaacttatctccgtaaagccattgtgcctcctcttgggggtcacgtgttcacaatcacgactcggaccgatg

SEQ ID NO: 9180 - DNA, 203 bp, synthetic construct
  source 1..203: mol_type = other DNA
ggcgcgccagtcctagttgcttggaggagcttggagaaaccagaagtgagatccaggagaagtaaggccctggagtgccaggagcccttctcccaaagatggagaaataaatgaagaaatacaggaaaataagcattgggtgttttgcaatggctacacaaactagtcatgtcttccatggtcaagaacgactcggaccgatg

SEQ ID NO: 9181 - DNA, 203 bp, synthetic construct
  source 1..203: mol_type = other DNA
ggcgcgccagtcctatgtggcagaagaatcagacctctctggcagacttcatccttgaggggctcttcgatgactcccttacccaccttttccttttctccttgaccatggtggtcttccttattgcggtgagtggcaacaccctcaccattctcctcatctgcattgatccccagcttcatacaccacgactcggaccgatg

SEQ ID NO: 9182 - DNA, 203 bp, synthetic construct
  source 1..203: mol_type = other DNA
ggcgcgccagtcctatggcctcccgcagcgcgggcaccctactgaccgagttcaatgccgcctacgtgccccctggactcatgcccgggtaccagggccacgtccccactgtggccttctcctttggcgctccctacggcaccaccaccctcaagtacttccaggaccaccgcaacagagccatggagcgactcggaccgatg

SEQ ID NO: 9183 - DNA, 203 bp, synthetic construct
  source 1..203: mol_type = other DNA
ggcgcgccagtcctcaccttagggtgtcctctgagacagactcttatttcctcaataaagagaaagactcttattccctcagcggccagctcctcgcctcccctcggccgtagccacctcagtggtcaccgtcttcaccgtggtcgcctcagcccgctcgccaccccagttgaggcgctgctggtgtccgactcggaccgatg

SEQ ID NO: 9184 - DNA, 203 bp, synthetic construct
  source 1..203: mol_type = other DNA
ggcgcgccagtcctcaatccatctaaatccttctcaattgctgccaccatgactcgttacttctgctgtggaagctacttcccaggataccctatctatgggaccaacttccatgggaccttcagagccacccccttgaactgtgttgtgcctctgggctctcccctgaactatggctgtggatgcaacgactcggaccgatg

SEQ ID NO: 9185 - DNA, 203 bp, synthetic construct
  source 1..203: mol_type = other DNA
ggcgcgccagtcctggggatctcatttctccccagggggctctaggctgtggatgtgagaaggggagcaagggaggcagatggcgacaaggaacagccccatgcccctgggcacggctcagggtgaccctggagaggcaggaacacggcccggccctgacgccagcctccgggacacaggtgcggccacgactcggaccgatg

SEQ ID NO: 9186 - DNA, 203 bp, synthetic construct
  source 1..203: mol_type = other DNA
ggcgcgccagtccttgccagcccatggccgagcctgccctcctccccgccgcccagatggagaggctggccccagggcccctagcctcaccgtgtcctcggatcccgcgggcccgcattgccaggcgctgcgcccagcgctgggccgacctgggctgcagctctggcccctcctcaggccgaatggatcgactcggaccgatg

SEQ ID NO: 9187 - DNA, 203 bp, synthetic construct
  source 1..203: mol_type = other DNA
ggcgcgccagtcctccatgacccactgttgctccccttgctgtcagcctacctgctgcaggaccacctgctggaagcccaccactgtgaccacctgcagcagcacaccctgctgccagccctcctgctgtgtgtctagctgctgccagccttgctgccgcccagcttgctgtcaaaacacctgctgcacgactcggaccgatg

SEQ ID NO: 9188 - DNA, 203 bp, synthetic construct
  source 1..203: mol_type = other DNA
ggcgcgccagtcctatggcaacggtgaacacagatgccacagataaagacatatccaagttcaaggtcaccttcactttggtggtctccggaatagagtgcatcactggcatccttgggagtggcttcatcacggccatctatggggctgagtgggccaggggcaaaacactccccactggtgaccgccgactcggaccgatg

SEQ ID NO: 9189 - DNA, 203 bp, synthetic construct
  source 1..203: mol_type = other DNA
ggcgcgccagtcctagttctgtttctttcctgcgttgatcttggacagtaactgtactatgtaaggaattgtcggtggctggcgacggtatcttagctggttttcagaaaccctcattcctcccttgactgattcaccacttgaacctcatatgacgtagaagaagcctacctatgtccccttcacatcgactcggaccgatg

SEQ ID NO: 9190 - DNA, 203 bp, synthetic construct
  source 1..203: mol_type = other DNA
ggcgcgccagtcctatggacaacccacaggctctgccactcttcctactcctggcctccttggtagggatcctcaccctcagagcctcttctggacttcagcaaaccaacttctcctctgccttctcttcagactcaaagagctcttcccaggggctgggtgtggaagttccctccatcaaacctccccgactcggaccgatg

SEQ ID NO: 9191 - DNA, 203 bp, synthetic construct
  source 1..203: mol_type = other DNA
ggcgcgccagtccttcactcactcacacacctcccccagctcacctcctccccactccagcatggccgcctccaccatgtccatctgctccagcgcctgcaccaactcctggcaggtggacgactgcccagagagctgctgtgagctcccctgcggcacccccagctgctgtgccccagccccctgcccgactcggaccgatg

SEQ ID NO: 9192 - DNA, 203 bp, synthetic construct
  source 1..203: mol_type = other DNA
ggcgcgccagtcctcactgctcttctgcagtagtgtcacaccactcagtgcagggcccaccaagaagaaagcagtgtcaggatccacatggcactatggtaactttgtgaaaggggacattttctccctctgaacttctcttcataaagtcattgtgcttcctcttggggatcacctgttcagtctcacgactcggaccgatg

SEQ ID NO: 9193 - DNA, 203 bp, synthetic construct
  source 1..203: mol_type = other DNA
ggcgcgccagtcctcctggcaccagaagggggacattccggaactagatatgaagagacttttctccctgaagttccccggacccaattagatgttgtacccaggctggttaccctggtaacaggcgtcgcggtttgtcaaggaactgagagaagaggcttaagaaaattattcaccactcataagtccgactcggaccgatg

SEQ ID NO: 9194 - DNA, 203 bp, synthetic construct
  source 1..203: mol_type = other DNA
ggcgcgccagtcctagggaggaggaaggatgggcggtgttggcgtagccgcagggaggtgactgaagcgagcctggcctcttgcatcctccgcctgtgtacctccctcccctttttttccgccttctgccagcagaagcagcagccgcagcacctgagccgctactgccgctcactcaggacaacgctcgactcggaccgatg

SEQ ID NO: 9195 - DNA, 203 bp, synthetic construct
  source 1..203: mol_type = other DNA
ggcgcgccagtcctgagttaggtgacgctgcggggcgggcggacagactgcgggacggacggtggacgctgggacgcgtttgtagctccggccccgccgttccgacccccgccgccgtcgccgccatgacggggctagcactgctctactccggggtcttcgtggccttctgggcctgcgcgctggcccgactcggaccgatg

SEQ ID NO: 9196 - DNA, 203 bp, synthetic construct
  source 1..203: mol_type = other DNA
ggcgcgccagtcctggaatcaggttttgaaactgacttccagagctccactgcctccctgcaccatgccctacaacttctgcctgcccagcctgagctgccgcaccagctgctcctcccggccctgtgtgccccccagctgccacggctacaccctgcccggggcctgcaacatccctgccaatgtgacgactcggaccgatg

SEQ ID NO: 9197 - DNA, 203 bp, synthetic construct
  source 1..203: mol_type = other DNA
ggcgcgccagtcctcggactgggaggcagggctctggctcacgcttgtaatcccaacattttgggaggacgaagccagcctcatcgcttaagcacaggagttcgaggactgggaggtggaggttgtggtgcctgtatcacctgcccttctgctgacactcctgcctgctgttcctgactacagccatccgactcggaccgatg

SEQ ID NO: 9198 - DNA, 203 bp, synthetic construct
  source 1..203: mol_type = other DNA
ggcgcgccagtcctgagattttggactctgtcttcagctggacactccctccctgcaccatgtcttacagttgtggcctgcccagcctgagctgccgcaccagctgctcctcccggccctgtgtgccccccagctgccacggctgcaccctgcccggggcctgcaacatccccgccaatgtgagcaaccgactcggaccgatg

SEQ ID NO: 9199 - DNA, 203 bp, synthetic construct
  source 1..203: mol_type = other DNA
ggcgcgccagtccttgtattggggctgacaggggggcgggttattagggctgaggatgggaggatgctcagggtattggggtcagggtggcattagcccagctcaagccgggccgggctgactcagcatcctgccccagccagcttccatccctgacacctctgcactcccttgggcagagatgggagcgactcggaccgatg

SEQ ID NO: 9200 - DNA, 203 bp, synthetic construct
  source 1..203: mol_type = other DNA
ggcgcgccagtcctcctgcttttggttcttacagtagtcggcgtaggccttaggtgggttcgtgcgccttctacctcgctgtttcggttttcctggctcctcggcccttttctcccctgttgcagctgggagcggacgaagcgcgaagctgggattttttactgtctcctgaagaatttaacacaaaccgactcggaccgatg

SEQ ID NO: 9201 - DNA, 203 bp, synthetic construct
  source 1..203: mol_type = other DNA
ggcgcgccagtcctcgctctgattgtttcgattcttccaaaatcagagacagagtgctcccggtgccatgaacggagacgatgcctttgtacggagacctagggttggttctcaaataccagagaagatgcaaaaggccttcgatgatattgccaaatacttctctgagaaagagtgggaaaagatgacgactcggaccgatg

SEQ ID NO: 9202 - DNA, 203 bp, synthetic construct
  source 1..203: mol_type = other DNA
ggcgcgccagtcctgactcatctcattcaccaattgcttctgacgtcctgcagtgacactccctaatgaaaaagccgctgtgccagatccttagagtgtctggtgatccctaataaaccagactgtggcctttttaacgagcagacgcccccacgaaggcagtggcagctcccaagccaggcggcacccgactcggaccgatg

SEQ ID NO: 9203 - DNA, 203 bp, synthetic construct
  source 1..203: mol_type = other DNA
ggcgcgccagtcctgctgtgagggttactatgctccctctttgccgccgtctcctcctcttgcccgcgcaggcacccctctggctgctcagtcctgcctcagtgtcaaaccagaagagaagtaaaattcaacaaaaatttatgtgtggagttccttcttaaaagaagaaaaaagtgattatttagactcgactcggaccgatg

SEQ ID NO: 9204 - DNA, 203 bp, synthetic construct
  source 1..203: mol_type = other DNA
ggcgcgccagtcctgtcaattggccaatctcttctcccagggaaaaaaaaaagtaaatcaaacctttgagaagcatttgctggttgaagtgctttctgtctagtgagggggtctgtggatttctagtttatgataaataggactttaaaaaccagggacgggagggcgagtgttcaggttctagagctcgactcggaccgatg

SEQ ID NO: 9205 - DNA, 203 bp, synthetic construct
  source 1..203: mol_type = other DNA
ggcgcgccagtcctggtcgcggctgtggccgggggaagtgaatggttttacccagagggccctgcgccgcctttctccgctggcaacggcgccgctccccgctcctcctccccagccatggcgttcacgttcgcggccttctgctacatgctggcgctgctgctcactgccgcgctcatcttcttcgccgactcggaccgatg

SEQ ID NO: 9206 - DNA, 203 bp, synthetic construct
  source 1..203: mol_type = other DNA
ggcgcgccagtcctggccgcagtggaaggagcaggcgcttgagctcgagcgacggcgctggcggagacgccggctgctcctcccctccccgccgcttttcctaaaaggattgtacaccttagaagtgcttaaggaagagtgatgaagctctgaatcgtgtcctgcagcagattcgagtgccacccaagcgactcggaccgatg

SEQ ID NO: 9207 - DNA, 203 bp, synthetic construct
  source 1..203: mol_type = other DNA
ggcgcgccagtcctttcctccctcccttacgtccccgagtgcggcagtaccgcctccttcccagccgcgcggcttcctccagacctctcggcgcgggtgagccctattcccagaggcaggtggtgctgaccctgtaacccaaaggaggaaacagctggctaagctcatcattgttactggtgggcacccgactcggaccgatg

SEQ ID NO: 9208 - DNA, 203 bp, synthetic construct
  source 1..203: mol_type = other DNA
ggcgcgccagtcctggccacaacctccattctcccagaaaagaagaaatgctcatctgaaattcatcacctctctggagtcttcaaactgaccaagcattgaaaagaacacagtttcagaaaacagtttccagtgcctctggccttcctactgaaagcagacacagagtgcatgaagaccgttcaaatcgactcggaccgatg

SEQ ID NO: 9209 - DNA, 203 bp, synthetic construct
  source 1..203: mol_type = other DNA
ggcgcgccagtcctgtcagccggcgctggggggggtcggtgtggggtagaatggccgctgccgccgtcacccgcgggaccccgggagcacagactccccctccccccggcccctcaggccgggggtgaccttgccccctggagccctcaccatgaataccaaggacaccaccgaggttgctgaaaacacgactcggaccgatg

SEQ ID NO: 9210 - DNA, 203 bp, synthetic construct
  source 1..203: mol_type = other DNA
ggcgcgccagtcctgccctggggcggagtccttaccccaaccccagcttcactgcacatagccgagcccgacgggcctcctcccatctccatcctggacacctggcggagcccgtgctgagagcctccgccagctcccatctgttccccgaggagggcggggggctcaggctggagccagagcggtagcgactcggaccgatg

SEQ ID NO: 9211 - DNA, 203 bp, synthetic construct
  source 1..203: mol_type = other DNA
ggcgcgccagtcctacctgcggaagccatacacccacgggagcccacacctcttggtctgggtcggccacacagagctctaccaccggctcatccacggagaggggctccgtttattcctggagagatgacgaatttgacgaagccagttcacagtcagtgcagcggttactctgggaggtggaggaacgactcggaccgatg

SEQ ID NO: 9212 - DNA, 203 bp, synthetic construct
  source 1..203: mol_type = other DNA
ggcgcgccagtcctcagctcattctggatgaatgaatgattacactaagtgtcctccacattcctctgtgggctcacttcatggactcactttgcgtgcttgttaaatgtgctgtgttgctcccaagaccatgtaaagcctactgaccactaacctccctcacagcagaaactagacgtcaggttaaacgactcggaccgatg

SEQ ID NO: 9213 - DNA, 203 bp, synthetic construct
  source 1..203: mol_type = other DNA
ggcgcgccagtcctgggatgagagggagagacaacgtgtgtcttacacatctcccaacagccgacttagatgtgatccgttctcccagagggagcaggtttctttgaacttttcctttttatgtacagcatagtgctgagcagatcactgcactgtgcaggagttttaacgacagtcaggccaacggccgactcggaccgatg

SEQ ID NO: 9214 - DNA, 203 bp, synthetic construct
  source 1..203: mol_type = other DNA
ggcgcgccagtcctgccgcgggtcttctcccttcactctccacatttggggatcaggtccggcacctgctgcgccagacaggccttgctgggcacgcgcctctgagagtccaaggaggtggcttccagagctgcagcacttcaggccggctccggtggagcgatcagaggtgaggggcttggctgggccgactcggaccgatg

SEQ ID NO: 9215 - DNA, 203 bp, synthetic construct
  source 1..203: mol_type = other DNA
ggcgcgccagtcctagcatcgcgacccgccccgtcccgtccagtctggcctgggcgccgcgggaacgctgtcctggctgccgccacccgaacagcctgtcctggtgccccggctccctgccccgcgcccagtcatgaccctgcgcccctcactcctcccgctccatctgctgctgctgctgctgctcacgactcggaccgatg

SEQ ID NO: 9216 - DNA, 203 bp, synthetic construct
  source 1..203: mol_type = other DNA
ggcgcgccagtcctctgagggcggccccctttccttaacagtctcctcgctacagatcgtctgctccctcagcctcgcccgagacccacttccccagtctcgcccgggtggaggtcgacgaggaggagacaagagtcacccttcctccaggcggcgccggccccctcacccgcgggtgtgtcctataacgactcggaccgatg

SEQ ID NO: 9217 - DNA, 203 bp, synthetic construct
  source 1..203: mol_type = other DNA
ggcgcgccagtcctcacagtgtcaagcccacagctctccaaggaggaagatggtccaggctgggagcatccccttagcagcagcctctgatcccttggccaagcaggagggaaccattagcagcctgaggagctggctggctgggagcctcggggaccgcccagccttgctcccagctcacccacaagcgactcggaccgatg

SEQ ID NO: 9218 - DNA, 203 bp, synthetic construct
  source 1..203: mol_type = other DNA
ggcgcgccagtcctcaacattccctcgctctggttctcgccccattgggaaactcggccccacgcttcccacttttctggatgaggtgtcccctttctccccactaaaatgtcaaataacctacggagggtcttcctgaaacccgcagaggaaaattcaggcaacgcctcgcgttgatccataatgagcgactcggaccgatg

SEQ ID NO: 9219 - DNA, 203 bp, synthetic construct
  source 1..203: mol_type = other DNA
ggcgcgccagtcctcctactgtagacagccttgttctacagatcctcccagaaatctctgggccaggtggaacccagggtcagagagggatgggagagagattccccaggctctcagagaagatcagcagaaagtctgcaagaccctaagaaccatcagccctcagctgcacctcctcccctccaaggcgactcggaccgatg

SEQ ID NO: 9220 - DNA, 203 bp, synthetic construct
  source 1..203: mol_type = other DNA
ggcgcgccagtccttgagccctgcggaacctcggcgctcggccccaccccgcccgtacctgcacttatttattgttgttatttcttaccgcggagccccgcagtcgggtcctcccgcccgctcccgcgcagcgctagcattctccagtccctcagtcccttcccgcgcggtgcgccgcagccgaggcgcgactcggaccgatg

SEQ ID NO: 9221 - DNA, 203 bp, synthetic construct
  source 1..203: mol_type = other DNA
ggcgcgccagtcctgagcggcccgagcatcttctgaaccgggttctggagcggcttgctggaggggctaccagggacagcgccgcctcagatatcctgctggatgacattgtccttacccattctctcttcctcccgacggagaaatttctgcaggagctacaccagtactttgttcgggcaggaggccgactcggaccgatg

SEQ ID NO: 9222 - DNA, 203 bp, synthetic construct
  source 1..203: mol_type = other DNA
ggcgcgccagtcctttatctcacccgggaggctgtaaaaatctccgtccttaacagtaacaccatcaggtcctatcagttaagagctgcttgttatttgcatgcattcttataattaaatctcctaacaaccctgtaagcaaaattctgtggcatctctggaatactacctgagaatttttgtgtgcccgactcggaccgatg

SEQ ID NO: 9223 - DNA, 203 bp, synthetic construct
  source 1..203: mol_type = other DNA
ggcgcgccagtcctggacttgccatgaggtgttgaagccttgtttcactgagttggagagactggacctaaatggcgcagcatgactttgctccagcctggcttaatttccctactccaccatcatcaacaaaggtcctgaccagcagtttgaaatcgtcattgaattttgagaagcattctgaaaaccgactcggaccgatg

SEQ ID NO: 9224 - DNA, 203 bp, synthetic construct
  source 1..203: mol_type = other DNA
ggcgcgccagtcctcactcttcagggagagaatgtggactttagcatttgaactgaatatttgagattgaagatttctgaataatcccccttagcacctctggtactgtaccgtaccttgcctttctgtccaggtttggtggaattgacctatatataaatggtataaagaggggaggtgggaatgaacgactcggaccgatg

SEQ ID NO: 9225 - DNA, 203 bp, synthetic construct
  source 1..203: mol_type = other DNA
ggcgcgccagtcctgggttatatgatctctttggctttagggaattactccataccagctctgagatttccagctcagcgatgcccccaggtccctgggagagctgcttctgggtggggggcctcattttgtggctcagcgttggaagttcaggggatgcacctcctaccccacagccaaagtgcgctcgactcggaccgatg

SEQ ID NO: 9226 - DNA, 203 bp, synthetic construct
  source 1..203: mol_type = other DNA
ggcgcgccagtcctagtcccgccctccttgctgtcacaggtgcagcctgtcctctccttcccctgaccagcccagcatccacatagtctacacagagctccccttgctgcccagacaagctgaaggaccacaggaaaagccatggagacttcagcatcctcctcccagcctcaggacaacagtcaagtcgactcggaccgatg

SEQ ID NO: 9227 - DNA, 203 bp, synthetic construct
  source 1..203: mol_type = other DNA
ggcgcgccagtccttttgtctcttcctgagaaacgagcaaacctgaaagctactctctcagcttcagagggaaaaaatggttgtagatttctggacttgggagcagacatttcaagaactaatccaagaggcaaaaccccgggccacatggacgctgaagttggatggcaaccttcagctagactgcccgactcggaccgatg

SEQ ID NO: 9228 - DNA, 203 bp, synthetic construct
  source 1..203: mol_type = other DNA
ggcgcgccagtcctttttgcacacacacgaatacaaagagccatacgaccttcggaccctacagcttggggcctgggctcctctgaccatcctcattgagaaaggaaagtgagtccagagaagttgatgcttcctacctgttggagcggcccagcagtgtaagcgtggttgttactgccccatccgcccgactcggaccgatg

SEQ ID NO: 9229 - DNA, 203 bp, synthetic construct
  source 1..203: mol_type = other DNA
ggcgcgccagtcctgtcgcgcaggtcccaccccgcctgcccgcgccgcccattggtcccgagcgcgatgacttggcgggcggagcaggaaggaaaccgctcccgagcacggcggcggcgtcgtctcccggcagtgcagctgccgctaccgccgccctctgcccgccggcccgtctgtctacccccagccgactcggaccgatg

SEQ ID NO: 9230 - DNA, 203 bp, synthetic construct
  source 1..203: mol_type = other DNA
ggcgcgccagtcctcccgcaatcctgctccaagagatcttaagctggaggcaccaggtctgaattccagactcctccccaccacccacacttcacctccaactggagcatgaccacagacccattcagggaggctggcggactcttcatcctggacagtcccttactgtatgtcaagtagagctgagacgactcggaccgatg

SEQ ID NO: 9231 - DNA, 203 bp, synthetic construct
  source 1..203: mol_type = other DNA
ggcgcgccagtcctcctgaagaccccggaagtgcaactcgaacttggtcggggcgcggatcccgagagggaaagtcataacaaccgcacgagggagttcgactggcgaactggaaggccacgcctcctcccgcctgccccctcagccctgtggctgggggcagagctcagactgtcttctgaagattgcgactcggaccgatg

SEQ ID NO: 9232 - DNA, 203 bp, synthetic construct
  source 1..203: mol_type = other DNA
ggcgcgccagtcctatccgccccctgcctcatccaggcttcgccccagtcagtctccggcagcttctcgcggcttcgcaagccccttcccgtgatgccccgcgcctggctgtcgcggttgccgggcaacgcgctgtccatgtcgcgggcctcgctgggactccctgggagatgaggccgcgaggtctccgactcggaccgatg

SEQ ID NO: 9233 - DNA, 203 bp, synthetic construct
  source 1..203: mol_type = other DNA
ggcgcgccagtcctgacgccgatgcggagctgagctggctttcctccagggctctggactccctgctgagcaagagagaaagaggcccgcccttccaccaggacgcctgaccctggggtccttcccaaacccgggtctcttccgactccgggcccaacagtttgtgcgattaaagtgaagaaacaatgcgactcggaccgatg

SEQ ID NO: 9234 - DNA, 203 bp, synthetic construct
  source 1..203: mol_type = other DNA
ggcgcgccagtcctgagcagcctccggccgccgccgcgcagagctgccagagtggactgcactgcttctcccagcggggcaggatggcggtttcatgtctggttggataaggccttgcctgcggaaaccagctccatccccaggccctagcagaggctcgcgtgtccccgtccccaggtcaggtcaggcgactcggaccgatg

SEQ ID NO: 9235 - DNA, 203 bp, synthetic construct
  source 1..203: mol_type = other DNA
ggcgcgccagtcctgggacaaggcgtcggttctcgcctgagggccaaaccttgcccctgcccaccttcctcacccccgccatttccaggactcacatccaaaggcgacagcaccaggatttgctcccgcctttggcacagaggaggacgggtccctctctcagcctggccagtctttcccagggcttgcgactcggaccgatg

SEQ ID NO: 9236 - DNA, 203 bp, synthetic construct
  source 1..203: mol_type = other DNA
ggcgcgccagtcctacatttgtgatcacctggtcacacacctgggcaggaggctgcccctcctccctggtttgaggaagcaggaaaaggtacccgcgagagacagccagcagttctgtggagcagcggtggccggctaggatgggctgtctctggggtctggctctgccccttttcttcttctgctggcgactcggaccgatg

SEQ ID NO: 9237 - DNA, 203 bp, synthetic construct
  source 1..203: mol_type = other DNA
ggcgcgccagtcctgcctgccccagcagcggcctgatctgggttccgctgattcctttcgtaaccgcaccacacccgagctacaatctctggacaaaattttaagagaaactccctcagaactcctaaaggtaaacaaaagcaggcagattgaggatggcagtcagaatatgaagtgaccatatatggcgactcggaccgatg

SEQ ID NO: 9238 - DNA, 203 bp, synthetic construct
  source 1..203: mol_type = other DNA
ggcgcgccagtcctcaggccctgtgtcttgctcagtccacgtgactctgctttctcatcctaggcctcaggagccgggacactccctgagtcctctgggagcccttaagccacactgagaacacagaccctgggagaagcagccagcagtgaggaatcctggaaccccttcccagggagagccttccccgactcggaccgatg

SEQ ID NO: 9239 - DNA, 203 bp, synthetic construct
  source 1..203: mol_type = other DNA
ggcgcgccagtcctgagtcggcgccacgagggggccgagcagggtgcggcggcggcggggcgctccggggaggccaggacagctgatggttgtggcagaaacatctcaaggtagctggtccgcccccacttccccatctacctcttgtcctccccccaacaccaccaccaccctggctcccctccctccgactcggaccgatg

SEQ ID NO: 9240 - DNA, 203 bp, synthetic construct
  source 1..203: mol_type = other DNA
ggcgcgccagtcctcgcctcggcctttgagccccgcccccgccgtgcaaaaacaaccagaggctgctctgcttgagggtgaagccgcctcccagttttccctccccctctacccccacccccatagttctctccaccaggtccagtgacaattggatgatgcagccttgataatcatccgattccagacgactcggaccgatg

SEQ ID NO: 9241 - DNA, 203 bp, synthetic construct
  source 1..203: mol_type = other DNA
ggcgcgccagtcctctcagtgaagcaacgaggatgccggggagagggaaggggctgggctctgggcggtgccaagtctgtgagggggcgcggtcaccgcccagggttcccacgaacgccaaggcggccacgtcctgctccccctggtgaagaagctgccctgggcttgtcgtcctagggtctccagaccgactcggaccgatg

SEQ ID NO: 9242 - DNA, 203 bp, synthetic construct
  source 1..203: mol_type = other DNA
ggcgcgccagtcctaatgttcggggtggcaccagcccactgccacagccccagtccaccatgccacccatgctgtggctgctgctccactttgctgccccggcactggggttctacttttccatcagctgccccagtggtaagcagtgccaacaggccctactctcaggcaatgatattctcctgtatcgactcggaccgatg

SEQ ID NO: 9243 - DNA, 203 bp, synthetic construct
  source 1..203: mol_type = other DNA
ggcgcgccagtcctcgcaccacctgctgcaaggctcgggaaggaaggcgaagatagcaccggggcatccccgggagtccgcaaggctttgcgctgcaaatccagtgctaccagtgtgaagaattccagctgaacaacgactgctcctcccccgagttcattgtgaattgcacggtgaacgttcaagaccgactcggaccgatg

SEQ ID NO: 9244 - DNA, 203 bp, synthetic construct
  source 1..203: mol_type = other DNA
ggcgcgccagtcctccaaacaaacttgaagatctcacagacctaatagacacggcctttcctctctgcctctggctttatgtctctttcatcctcctctgcctttcccctgcccttgatcccttctgcaggtcttggctggtttcaggaaacgggtcccatcccatggactcccactctggggagcctcgactcggaccgatg

SEQ ID NO: 9245 - DNA, 203 bp, synthetic construct
  source 1..203: mol_type = other DNA
ggcgcgccagtcctagcaagtccgcggtaagcgctgacgcatgcgcatagctaaccgcacccggttcagctcgcctttcttggccagaggcgccggttggactcacgggcggggcatgatggtggtgggtacgggcacctcgctggcgctctcctccctcctgtccctgctgctctttgctgggatgccgactcggaccgatg

SEQ ID NO: 9246 - DNA, 203 bp, synthetic construct
  source 1..203: mol_type = other DNA
ggcgcgccagtccttacccacccccctgcccgcgccgggcctcgtccgctccccggccccttccccgcgggcgtgtgggtcccgggctggggtctcggcgtccgcgatcccgagcccgctcgcttcggcccccctcaggaggctgcgaggagggtgggtttctccccagtgtagagggtggcggcggccgactcggaccgatg

SEQ ID NO: 9247 - DNA, 203 bp, synthetic construct
  source 1..203: mol_type = other DNA
ggcgcgccagtcctccgtctcctggcaaccagatgcaggggccatggcactcttaacaccccagggagtgaaagaagtcttccaatttcagagaccacaaggtcgggagcgcctgcggaggcttctgaactgggaggagtttgacgaacagagagactcccggaggagcatcctgctggacaccctctcgactcggaccgatg

SEQ ID NO: 9248 - DNA, 203 bp, synthetic construct
  source 1..203: mol_type = other DNA
ggcgcgccagtccttagaaggcagtcttgtgggtgcctcctcccccagccgcaactcaggtctgcagctgggtcctgcctccttccgagtgggccatggccggtacatggctgctacttctcctggcccttgggtgtccagccctacccacaggtgtgggcggcacaccctttccttctctggccccacgactcggaccgatg

SEQ ID NO: 9249 - DNA, 203 bp, synthetic construct
  source 1..203: mol_type = other DNA
ggcgcgccagtcctctcaagtgactgaagcaggcgccgctgccggggaggaaccgatgggagagaaaggccaggctgggccctgacaccgccaggactccccctccaggaaccagggggcttctcctggaagcttaaaggaaaaaatacttaaattatggtaataagaatgcacctggagctcaagatcgactcggaccgatg

SEQ ID NO: 9250 - DNA, 203 bp, synthetic construct
  source 1..203: mol_type = other DNA
ggcgcgccagtcctggaggaggtgaggagggtttgctgggtgggtatgggggagggggagactctgcaggagcctaattccccactctgagctcacccttctgtctgcccgggccctaccccttcccctactctcacccttataatccttttcagcactaggtcttcccgtcacctccacctctctcccgactcggaccgatg

SEQ ID NO: 9251 - DNA, 203 bp, synthetic construct
  source 1..203: mol_type = other DNA
ggcgcgccagtcctacctgtccaggttctgccggccccagccggaagcttactccgcggattgtgcacagttcttgaaggacttgtgccctggggctgcctggcatctgggggcctcctcagagccagggctctttctggttgaggctgagactcactggtgtcatcaggcccctccatgaatgagaccgactcggaccgatg

SEQ ID NO: 9252 - DNA, 203 bp, synthetic construct
  source 1..203: mol_type = other DNA
ggcgcgccagtcctggaacttcccaggcaccctgtgtggccgcactgctccctctggcccaaccatgcctctgtccagccacctgctgcccgccttggtcctgttcctggcagggtcctcaggctgggcctgggtccccaaccactgcaggagccctggccaggccgtgtgcaacttcgtgtgtgactcgactcggaccgatg

SEQ ID NO: 9253 - DNA, 203 bp, synthetic construct
  source 1..203: mol_type = other DNA
ggcgcgccagtcctccctgtcgcctccccggcccctgctatcccacgcaggactggcttcggccgccggggccagcagcttgcgacgtgtccctggggaggcggaatcgctgtgcgccctgagcccgggctcagcccttcgctttccagctgcgtcctgctcccggccgcccagggagcccagtggcgcgactcggaccgatg

SEQ ID NO: 9254 - DNA, 203 bp, synthetic construct
  source 1..203: mol_type = other DNA
ggcgcgccagtcctgcctggttgcccccagccccctccctcctcccaccttcactgtgtcccacccttcctagctttgtgcccggggtgctgagcccttccccgtcagccgggccgcgggaggagggagccgtcaccgaggagctgccgctcgctgccccgggcaggggcacagttgcaaccaaggcacgactcggaccgatg

SEQ ID NO: 9255 - DNA, 203 bp, synthetic construct
  source 1..203: mol_type = other DNA
ggcgcgccagtcctgccggcagtgcgtgtggtgaggcaggacatggcggaggcaggaaaagtgcccttgagcctcgggcttaccggaggagaagcggcagagtggcctctgcagcggtacgcccgctgcataccctcaaacaccagagacccacctgggccatgcctggaagctgggacagccccctgcgactcggaccgatg

SEQ ID NO: 9256 - DNA, 203 bp, synthetic construct
  source 1..203: mol_type = other DNA
ggcgcgccagtcctgccccgtggccacggccccaatcctggccaggcggagattctgcggacattcagggatcggcttcgtcactgagacctcaggcctctgccagccactccccctccccatacccctagtcatcctcggcaggtctcagtcccggctccatctgtgccctcgccccagccgcagctcgactcggaccgatg

SEQ ID NO: 9257 - DNA, 203 bp, synthetic construct
  source 1..203: mol_type = other DNA
ggcgcgccagtcctaaatggagacttaggtcccctgcaaagcagaggggaggctggggtcacagctggccactgagagacccatccccctcagcaccgtggcttcccagctctccctgtcctcctccccccgacatctgccccttccctcctaaccccaggaccaggggacccagatctggagctttgcgactcggaccgatg

SEQ ID NO: 9258 - DNA, 203 bp, synthetic construct
  source 1..203: mol_type = other DNA
ggcgcgccagtcctgggctgagcgaggcgtggcctcaggagcggaggacccccccactctccctcgagcgccgcagtccaccgtagcgggtggagcccgccttggtgcgcagttggaaaacctcggagccccgctggatctcctggctgccacccgcaccccccgccagcctacgccccaccgtagagcgactcggaccgatg

SEQ ID NO: 9259 - DNA, 203 bp, synthetic construct
  source 1..203: mol_type = other DNA
ggcgcgccagtcctgcgctggccgctcgcggagggagaggctgcagagcgagggcaggaggactacttccagcaacccagtctcctgccatgtccgaccccatcacgctgaacgtcggggggaagctctatacaacctcactggcgaccctgaccagcttccctgactccatgctaggcgccatgttccgactcggaccgatg

SEQ ID NO: 9260 - DNA, 203 bp, synthetic construct
  source 1..203: mol_type = other DNA
ggcgcgccagtcctgccaggaactaggaggttctcactgcccgagcagaggccctacacccaccgaggcatggggctccctgggctgttctgcttggccgtgctggctgccagcagcttctccaaggcacgggaggaagaaattacccctgtggtctccattgcctacaaagtcctggaagttttccccgactcggaccgatg

SEQ ID NO: 9261 - DNA, 203 bp, synthetic construct
  source 1..203: mol_type = other DNA
ggcgcgccagtcctcgagcccgccgtgcgcacagctctgcccgccgcccctggagcggatccccagccgtccctgggcgttctcccgggttctagcaaagccccccggggtgcccatcagtttccttgggtgactacagcgtgtgttttttctttcctctttcccctgcctgtgtgcccttctccaggcgactcggaccgatg

SEQ ID NO: 9262 - DNA, 203 bp, synthetic construct
  source 1..203: mol_type = other DNA
ggcgcgccagtcctatcttgtctccctctccttacctgcgtcctcgggggcgtgcgcaccaccccccctcccgcctaggaggggggagggccccctcttggccaccgccttcgcggcctttaaactcccctggagactgcggctactgccaccgccttgcctccactgcctcttcgcgcagcacacagcgactcggaccgatg

SEQ ID NO: 9263 - DNA, 203 bp, synthetic construct
  source 1..203: mol_type = other DNA
ggcgcgccagtcctgttggcagccattttgtgaagagacgaagactgagctgttttggctgcatttctggcctcgagccgcagtcagcttctccccgtagaacccggcagtaggagacttagaatcgaatctcttctccctcccgcctcctgtttttggctttttgagaaaccttatcatccaacacacgactcggaccgatg

SEQ ID NO: 9264 - DNA, 203 bp, synthetic construct
  source 1..203: mol_type = other DNA
ggcgcgccagtcctagacttcctgcccctgctctgcactctcaggtattccctgctcttactccaaaaagatggacccaggtccgaaggggcactgccactgtggggggcatggccatcctccaggtcactgcgggccaccccctggccatggcccagggccctgcgggccacccccccaccatggtccgactcggaccgatg

SEQ ID NO: 9265 - DNA, 203 bp, synthetic construct
  source 1..203: mol_type = other DNA
ggcgcgccagtcctggctcccatggccctcgggcccagcgtggtgaccccgggggatggagccgttcctcaggaggcggctggccttcctgtccttcttctgggacaagatctggccggcgggcggcgagccggaccatggcacccccgggtccctggaccccaacactgacccagtgcccacgctcccgactcggaccgatg

SEQ ID NO: 9266 - DNA, 203 bp, synthetic construct
  source 1..203: mol_type = other DNA
ggcgcgccagtcctccaggctctggagggcgccccggaaaccatggaagtcctcgtcctggccggataccgcgcgcagaaggaggacgagctgagtctggcgcccggggacgtggtccggcaggtgcgctgggtgcccgcgcggggctggcttcgcggagagtttgggggccgctatggcctcttccccgactcggaccgatg

SEQ ID NO: 9267 - DNA, 203 bp, synthetic construct
  source 1..203: mol_type = other DNA
ggcgcgccagtcctagagtgtctggtgatccctaataaaccagactgtggcctttttaacgagcagacgcccccacgaaggcaggaacctgggcaagtctggcctgcgggtctcctgcctgggacttggaacatgggtgaccttcggaggccagatcaccgatgagatggcagagcagctcatgacctcgactcggaccgatg

SEQ ID NO: 9268 - DNA, 203 bp, synthetic construct
  source 1..203: mol_type = other DNA
ggcgcgccagtcctggctcaagactcgcgcacgcgcaccacggcctacctgcgcctgggctgccggtgacctgggccgagccctcccggtcggctaagattgctgaggaggcggcgggtagctggcaggcgccgacttccgaaggccgccgtccgggcgaggtgtcctcatgacttctcttgtggacccgactcggaccgatg

SEQ ID NO: 9269 - DNA, 203 bp, synthetic construct
  source 1..203: mol_type = other DNA
ggcgcgccagtcctaaggcgagatgggcgggctgggagtgcccggcggcgggtcctcagcttcgagccgaggtgcagtgagctggtggggggaccgcgaggcgagcgcgggagcctgggcggcgagccgggtgtgagctgcctgaaaatgcactcggatgccgccgctgtcaattttcagctgaactccgactcggaccgatg

SEQ ID NO: 9270 - DNA, 203 bp, synthetic construct
  source 1..203: mol_type = other DNA
ggcgcgccagtccttcctgcctcggcaaccccgggccctgagggcaggccccaaccgcggaggagcaggagagggcggaggccggcgggccatgccctggtcgtcccgcggcgccctccttcgggacctggtcctgggcgtgctgggcaccgccgccttcctgctcgacctgggcaccgacctgtgggcgactcggaccgatg

SEQ ID NO: 9271 - DNA, 203 bp, synthetic construct
  source 1..203: mol_type = other DNA
ggcgcgccagtcctcctgagccaggaggaagcagcggcgaggtctgcgggaggcatggcgggagctccggacgagcgccggcggggccccgcggcaggggagcagctgcagcagcaacacgtctcttgccaggtcttccccgagcgtctggcccaggggaatccccagcaagggttcttctccagcttcgactcggaccgatg

SEQ ID NO: 9272 - DNA, 203 bp, synthetic construct
  source 1..203: mol_type = other DNA
ggcgcgccagtcctcccagccccgcgctcccaggacctcccgcccgcggagcccactcggattgctctccgcccgggtcggcggaggccccgtctcctgtacccggcgctgggactgctccgcaccgcgcggctccctttcagcagctgcgggagcatgcggaggaggccctgccggccccgcgggtccgactcggaccgatg

SEQ ID NO: 9273 - DNA, 203 bp, synthetic construct
  source 1..203: mol_type = other DNA
ggcgcgccagtcctgtgcattgtgcttccgctcggggaaagaccgcttccggtgcttccgtcgctccttgccgggcataatggccgcgcagcgacccctgcgggtcctgtgcctggcgggcttccggcagagcgagcggggcttccgtgagaagaccggggcgctgaggaaggcgctgcggggtcgcgcgactcggaccgatg

SEQ ID NO: 9274 - DNA, 203 bp, synthetic construct
  source 1..203: mol_type = other DNA
ggcgcgccagtcctctcccccagctgccgacgtggggcgggcagccgccggcggctgggagccgaggcgtcggtgcagacctggagacgggcatgggggggctgcggctgctggctgtggccctcacgtgctgctggtggccgcagggcagccagggtaagaccctgcggggcagcttcagcagcacccgactcggaccgatg

SEQ ID NO: 9275 - DNA, 203 bp, synthetic construct
  source 1..203: mol_type = other DNA
ggcgcgccagtcctggctgcaggcggggccggcgggggcgcagcggcccgggaggaagcagtaccttgaagagaaattggagagggagtcaattcctaggatagcagagagatggacaacagacagaatagatggagtttcacaatggtggccatgtgtctggaattggtgggttcttggtctcactgcgactcggaccgatg

SEQ ID NO: 9276 - DNA, 203 bp, synthetic construct
  source 1..203: mol_type = other DNA
ggcgcgccagtcctgcaggcaacatggccgagaggccggggcctccgggcggcgccgtgtccgcgaccgcgtaccctgacacccccgcggaattccctccgcacctccaggcgggtgcgatgcggcgccgcttttggggcgtattcaactgtctgtgcgccggcgcgttcggggccctggccgccgcccgactcggaccgatg

SEQ ID NO: 9277 - DNA, 203 bp, synthetic construct
  source 1..203: mol_type = other DNA
ggcgcgccagtcctggcatttcattgcttcccctgtccttcctttagctgtaactccggcgggcgtgttgggtgtgtcgttttaggctctgtgacccaggagcaagacgcaataagcgggtgcagtggaggtagaaacgggaaatgcagtaccctttccggaagctactccgcccctcgacagagtctcgactcggaccgatg

SEQ ID NO: 9278 - DNA, 203 bp, synthetic construct
  source 1..203: mol_type = other DNA
ggcgcgccagtcctcctgatcggaggagtgcgggccggagggtgatgggaccatctagcccctaaccatgggcccagaagagaagaccatcatgacagaaaggtctgcagctgttttcatccaggcctggtggcggggcatgctggtgcgacgcacactgctgcatgcagccctcagggcttggatcacgactcggaccgatg

SEQ ID NO: 9279 - DNA, 203 bp, synthetic construct
  source 1..203: mol_type = other DNA
ggcgcgccagtcctccctcacaggaagccggagggtcgctctgatcccgaatctcccacaggcgtgaacctgctctgctgtgtatctttgcggggtggcctgcgctgaggcctgccgcgcgcggtgagtccgcgcagacctgaccctgcgtctcgcagctcggttgaggccgccgccgccttctcgggcgactcggaccgatg

SEQ ID NO: 9280 - DNA, 203 bp, synthetic construct
  source 1..203: mol_type = other DNA
ggcgcgccagtcctcccggcaactttctctgcccgctcccgcgggttgggggctgccgtgccgggggctaactgggggcagcctctggagaacggcttcagagtcccggagacgcccgccacccgcagcctgcccgcggtgggcctgccgtcggatctcggcaccctctcctcccctctccccgaacccgactcggaccgatg

SEQ ID NO: 9281 - DNA, 203 bp, synthetic construct
  source 1..203: mol_type = other DNA
ggcgcgccagtcctggaagcagagctgtgcagctgaggcgccgccgtggagccgccttggagccaccgccccctcgccgcttcgccgctgcgttggggaacctggaccgcggcggcgccgggtttccctcatgatcccgggcgggtggcggcggcggcagaggcggcgggaggatgacctcttaccggcgactcggaccgatg

SEQ ID NO: 9282 - DNA, 203 bp, synthetic construct
  source 1..203: mol_type = other DNA
ggcgcgccagtcctcgcacgcgcggttagtagtcgctgctgcgcggccgccggcgggactggtctgaagagacgcggggaccaagtggcaacgacttggacatctgagctgtcactgccgaaaacaggccgcaagagagataatcaatatgcatttccaagccttttggctatgtttgggtcttctgtcgactcggaccgatg

SEQ ID NO: 9283 - DNA, 203 bp, synthetic construct
  source 1..203: mol_type = other DNA
ggcgcgccagtcctcggggtctccgggaagtcgcggcgccttcggatgtggcggatgcggccgtgagccggcgggggaggtgctgctgctgcctccactgtactcagacccaggtagcacaggattgtccatcctccagcagctcagtgcaacggtgtgaactcagcctgtttcagagcctccacacccgactcggaccgatg

SEQ ID NO: 9284 - DNA, 203 bp, synthetic construct
  source 1..203: mol_type = other DNA
ggcgcgccagtcctttccggtccctgcgggtaatagacaagaaggtcaccctggtggataaagacctcctgaaatttctaaagctggaggagttggtactgagcgccaatcgaatcaaggaggtggatgccaccaatctgccccccacactcaaggtgctggagctctacggcaatgagatcagcagccgactcggaccgatg

SEQ ID NO: 9285 - DNA, 203 bp, synthetic construct
  source 1..203: mol_type = other DNA
ggcgcgccagtcctgctgccttccctgtggcatcatgaagtttcgcgccaagatcaccggcaaaggctgtctagagctgttcattcacgtcagcggcaccgtcgcgaggctagcgaaggtctgcgtgctccgcgtgcgccctgacagcctgtgcttcggccccgcgggttccggcggcctccacgaggcgactcggaccgatg

SEQ ID NO: 9286 - DNA, 203 bp, synthetic construct
  source 1..203: mol_type = other DNA
ggcgcgccagtcctccctagctctgggccgcgcctcacatccctcccagagccgcaacaccccacccggcgggacgccctcgagcagccgctcgttgcgggcctgaagcgcagagcgcctattggccagagcggccgagggcgggaaaagtggccaacggctgcctcggccctcgggctgctgaggagcgactcggaccgatg

SEQ ID NO: 9287 - DNA, 203 bp, synthetic construct
  source 1..203: mol_type = other DNA
ggcgcgccagtcctgctttttgacagctgtctcttgcacagccgcagccaagtccggtgggttcgggaacctgtggcccggctctctgcgcgtccccatcccccgtggccccgaccccggccatgaagcgtatcttctcctgctccagcacacaggtggcggtggagagatggaaccgccatgatcagcgactcggaccgatg

SEQ ID NO: 9288 - DNA, 203 bp, synthetic construct
  source 1..203: mol_type = other DNA
ggcgcgccagtcctgacgcggagcccggcgctgagccctgcgcgcgcgcctgcgggtccgatctggacgaacgcgaggcgttctgcgagagcgaattcgcggtgaacgggatcgtgcacgatgtggacgtgctgggcgcgggcatccggctggtgaccctgctggtggatcgggacgggctgtacaagcgactcggaccgatg

SEQ ID NO: 9289 - DNA, 203 bp, synthetic construct
  source 1..203: mol_type = other DNA
ggcgcgccagtcctagatgggacagcttggcctacagcccggcgggcatcagctcccttgacccagtggatatcggtggccccgttattcgtccaggtgcccagggaggaggacccgcctgcagcatgaacctgtggctcctggcctgcctggtggccggcttcctgggagcctgggcccccgctgtccgactcggaccgatg

SEQ ID NO: 9290 - DNA, 203 bp, synthetic construct
  source 1..203: mol_type = other DNA
ggcgcgccagtcctggaagctggggacagccactcgctcgggagcagcctgagcgtttcctctccgcgtactcgagggaactctctccacgcgttcgagggaacccggaaggggccaggcgggtgagtgcggagggaagcccttgtgccatctgggagtagagccgccgagtcaggagttttagggcccgactcggaccgatg

SEQ ID NO: 9291 - DNA, 203 bp, synthetic construct
  source 1..203: mol_type = other DNA
ggcgcgccagtcctgtgggggcgggctcccggtcccgctatcggcggccggcgggcaggcgactcctgtcccgggtggaggcggcggagccggagccgggggagggggcagcggctgtctcacggaccacggcggcgcccgcagctcctcaccgaaacaaggagaccagtgctggtccagtggctgtgcgactcggaccgatg

SEQ ID NO: 9292 - DNA, 203 bp, synthetic construct
  source 1..203: mol_type = other DNA
ggcgcgccagtcctgcattggtccagtctgggttgaccccgacccgaagtggccctttccttcgcgtcctgaacttcgcttctccgtcggtgtctggtctcttcccgccggcgggctctgcggtggcgggaggagctgtactactcgtgccttagcgcacccttactttcccaggccagaaacgcgaacgactcggaccgatg

SEQ ID NO: 9293 - DNA, 203 bp, synthetic construct
  source 1..203: mol_type = other DNA
ggcgcgccagtccttggagcgccctgggttgcccggccggtccctgccgctgacttgttgacactgcgagcactcagtccctcccgcgcgcctcctccccgcccgccccgccgctcctcctccctgtaacatgccatagtgcgcctgcgaccacacggccggggcgctagcgttcgccttcagccacccgactcggaccgatg

SEQ ID NO: 9294 - DNA, 203 bp, synthetic construct
  source 1..203: mol_type = other DNA
ggcgcgccagtcctaggatccgggctggaagcctctcggagtgctgcctccagccaaggggcggccggcgagtcccagtgagagcggagggtgccagaggtagggggccgagaaacaaagttcccggggcttcctccggggccgcggtcggggctgcgcgtttgaccgcccccctcctcgcgaaggcacgactcggaccgatg

SEQ ID NO: 9295 - DNA, 203 bp, synthetic construct
  source 1..203: mol_type = other DNA
ggcgcgccagtcctcacacgcgcttcctctcttgagctcccgggcgtccggaggcgaaggtcccggagcgttcacgagaatccgggtcccggcgagtccggggtccgctcctccagctgcgcccagggcgcacgagccggccagcctcggggagagggcgcgggggcgctgggggttcttacgggaagcgactcggaccgatg

SEQ ID NO: 9296 - DNA, 203 bp, synthetic construct
  source 1..203: mol_type = other DNA
ggcgcgccagtcctcgtttccccgcggagccccggccgctgcctcccgggacagttcgcacggccacaggggcgcacggcgatgtggcctccgtccagcgcgctggcccgccggggggatgctctggcacctgtcggggtccaggcctagcatggccggcgcgttgcccgacgtcgcctccggctaggcgactcggaccgatg

SEQ ID NO: 9297 - DNA, 203 bp, synthetic construct
  source 1..203: mol_type = other DNA
ggcgcgccagtccttgagcgctctgccgcgggggcgcgggcacagcaggaagcaggtccgcgtgggcgctgggggcatcagctaccggggtggtccgggctgaagagccaggcagccaaggcagccaccccggggggtgggcgactttgggggagttggtgccccgccccccaggccttggcggggtccgactcggaccgatg

SEQ ID NO: 9298 - DNA, 203 bp, synthetic construct
  source 1..203: mol_type = other DNA
ggcgcgccagtcctgcgccgccaggcgtaggcggggtggcccttgcgtctcccgcttccttgaaaaacccggcgggcgagcgaggctgcgggccggccgctgcccttccccacactccccgccgagaagcctcgctcggcgcccaacatggcgggtgggcgctgcggcccgcagctaacggcgctcctcgactcggaccgatg

SEQ ID NO: 9299 - DNA, 203 bp, synthetic construct
  source 1..203: mol_type = other DNA
ggcgcgccagtcctaagtcccagtcctgctgtcccaagggactccggggtcaggtggagcaggcagggcagtctgccacgggctccccaactgaagccactctggggagggtccggccaccagaaaatttgcccagctttgctgcctgttggccatgggtgacctctcatctttgacccccggagggtcgactcggaccgatg

SEQ ID NO: 9300 - DNA, 203 bp, synthetic construct
  source 1..203: mol_type = other DNA
ggcgcgccagtcctggaggctcaatgacagtcgagctttggctaaggctccggggaaagggtctagccatgctgcatgtgacccggggggtctgggggtccagggtccgagtatggccactgttgcccgcgctcctcgggcccccccgggccctctcatcgctggcagccaaaatgggggagtatcgccgactcggaccgatg

SEQ ID NO: 9301 - DNA, 203 bp, synthetic construct
  source 1..203: mol_type = other DNA
ggcgcgccagtcctaaaaccttgaggtgattcatcttccaggctctccttccatcaagtctctcctccctagcgctctgggtccttaatggcagcagccgccgctaccaagatccttctgtgcctcccgcttctgctcctgctgtccggctggtcccgggctgggcgagccgaccctcactctctttgcgactcggaccgatg

SEQ ID NO: 9302 - DNA, 203 bp, synthetic construct
  source 1..203: mol_type = other DNA
ggcgcgccagtcctttttcagcctgtgatttgataaccgccgccgggtggcgtggagcgtcccgagacttcttccttcattgcagcccctcttcttttagttctagactgaagttcgaggaacgcaccacttggctgaaattaggatccagatttcccaaacttccttcggaggaaaaagccctaacgcgactcggaccgatg

SEQ ID NO: 9303 - DNA, 203 bp, synthetic construct
  source 1..203: mol_type = other DNA
ggcgcgccagtcctcctacgcggaactctctcgcggtaattcgaagtaccgcgcctgcgtgctgcagtagcgcctggtggcggtggcagtttgcccgcgggtgtgtgaagggagacagtgtggaggccacagggtactcgccacgatgagcagcaccttagctaagatcgcggagatagaagcagagacgactcggaccgatg

SEQ ID NO: 9304 - DNA, 203 bp, synthetic construct
  source 1..203: mol_type = other DNA
ggcgcgccagtcctcggctctcccacgtctacacccatcacctccagcctgagggcgcaactgagaggaactgagacccaagcagctcagtaaaggccccgcggcgagggcatcggctctcgccggcggatgacgagctgtatcagcggacgcgcatctctctgctgcaacgcgaggccgctcaggcacgactcggaccgatg

SEQ ID NO: 9305 - DNA, 203 bp, synthetic construct
  source 1..203: mol_type = other DNA
ggcgcgccagtcctgccattttcgcgggcggaggcggcccggcgggccctgggagagctgggacgggcggcggccgggtggcctcggccacccgctaattgcatcttttcccggcgtctcgtctgcagagggagcactatgtctgcggaagtccccgaggcagcctccgcggaggagcagaaggaaatcgactcggaccgatg

SEQ ID NO: 9306 - DNA, 203 bp, synthetic construct
  source 1..203: mol_type = other DNA
ggcgcgccagtcctcgggggcgggacttcagcggaggccggagcgaggcgtcgggatgcagcgccccgggcccttcagcaccctctacgggcgggtcttggccccgctgcccgggagggccgggggcgcggcctccggcggaggagggaacagctgggacctcccgggttcccacgtgcggctgccggcgactcggaccgatg

SEQ ID NO: 9307 - DNA, 203 bp, synthetic construct
  source 1..203: mol_type = other DNA
ggcgcgccagtcctaccattagtacctaggaggcagggatcagaggaagtagattcagaggtaaggagaattttggggctatactttcaagaaagtcgtgttcgggacccaggaggtatgggtcagaaggaaaggagcacagcagatactctgccggatctggaggaatggaagtcagcggcgggtctcgactcggaccgatg

SEQ ID NO: 9308 - DNA, 203 bp, synthetic construct
  source 1..203: mol_type = other DNA
ggcgcgccagtcctgagcctgagggaggggtcggcctgcgggtagccagaggctggggcggctgtggagcctgtggtgggagcggcattgtggggcagggaaaaggtgagccgagccgacggaggggacgcgctgcggggcgcccccagtctatggagcggggtaagatggcggaggcggagagcctgcgactcggaccgatg

SEQ ID NO: 9309 - DNA, 203 bp, synthetic construct
  source 1..203: mol_type = other DNA
ggcgcgccagtcctggatccgaaccccggcggctgcgtgcttataggcgcagacgtcagagagcccgcggcttaaagcgcgtcgcctggctagcgccaccccctagccttcttcaaggcctccagggctgggcccaagcgcccgtcgacggcaccctgggcccagaggactcgcgggcctcatctccacgactcggaccgatg

SEQ ID NO: 9310 - DNA, 203 bp, synthetic construct
  source 1..203: mol_type = other DNA
ggcgcgccagtcctgtggcggctgaagcgccgccggcggggctcactgtggtggtgtgagtgggaggcggcggcgctggtggctgcagctggggtgaggcgcgaggcggcgcactcgacggctgactggagcagcggtaaaggcgaggatggagaccgaaggatataagtcaaagagtacagcagaaacgactcggaccgatg

SEQ ID NO: 9311 - DNA, 203 bp, synthetic construct
  source 1..203: mol_type = other DNA
ggcgcgccagtcctgcggggaagtggcggctgaagcgccgccggcggggctcactgtggtggtgtgagtgggaggcggcggcgctggtggctgcagctggggtgaggcgcgaggcggcgcactcgacggctgactggagcagcggatataagtcaaagagtacagcagaaaatgtctactgaagggaccgactcggaccgatg

SEQ ID NO: 9312 - DNA, 203 bp, synthetic construct
  source 1..203: mol_type = other DNA
ggcgcgccagtcctgctctcctttcccgaacctcccggggtgcagcctagagccctcccgcgcggctgactccagagtagaggaagggaggcggcctccggctggtcccccgaagccctcgctgccccgcagatgcggatggccagccagtagcgggcggtggccccgcgtcccgggagcgcacagcacgactcggaccgatg

SEQ ID NO: 9313 - DNA, 203 bp, synthetic construct
  source 1..203: mol_type = other DNA
ggcgcgccagtcctcgagcgtgtcgctcccagtgcgcaagtgcagcaggtggctgcacggggggcgcgggaggaggaggaggaggaggaggaggctggggtggggccggcggcaagtgctgtgatgcggttccggggaggggccgtcgggtagaggctgaataccagtttccgagcggcaaggcagcgcgactcggaccgatg

SEQ ID NO: 9314 - DNA, 203 bp, synthetic construct
  source 1..203: mol_type = other DNA
ggcgcgccagtcctgacgacctcgaggcccttagttgactgggaccggaagtggcgtgtgctcggcctttctgtgttcctggcccgcggccgtcgggtgtgagctgcgccgaccgctctgagggttcgtggcccaccgctccttcgcggtccctgccgccaccgtccacgctcagcgttgtagagaagcgactcggaccgatg

SEQ ID NO: 9315 - DNA, 203 bp, synthetic construct
  source 1..203: mol_type = other DNA
ggcgcgccagtcctctgggaaccggcgggagggcgcctcctcctcccccgccctctctgctgaggatggaagtgacgaaagcagccgaggaggtcacttcctgctggggtggatgaggaggagccggagacgccgcggaggagacgggaccgaagagggaccgtgccgggaagagcaggcgggtgaaacgactcggaccgatg

SEQ ID NO: 9316 - DNA, 203 bp, synthetic construct
  source 1..203: mol_type = other DNA
ggcgcgccagtcctgcgcacgcacgcccaggggagttggggttcgcagggggttgttttcggctctgaagaggtccccgcccaaccttcaaaattctgtccaaaagcagacaagaggatcgccccgcgctgagccggctggtgggcagcaggaggcgcctgatcgccgccggggcgctgggggtggtgcgactcggaccgatg

SEQ ID NO: 9317 - DNA, 203 bp, synthetic construct
  source 1..203: mol_type = other DNA
ggcgcgccagtcctgtctggtccgtgcgcgatcacggcccggcgcgtggctcgggctcgggcggagctggagacgtgtggagctgttcgaggactcgcgggtgtgcagtgcacctatgatatgtgttttagaaatagccgttaaactttggtttgaatgaagaatgtctctcaatccacctatatttccgactcggaccgatg

SEQ ID NO: 9318 - DNA, 203 bp, synthetic construct
  source 1..203: mol_type = other DNA
ggcgcgccagtcctaagtaagatggcggcgaacgcacttccggcgtgtgtccttacgggtgcgtccgggcggctgcttgcaggtgccacccagcgggttccagcttgtttgctgcatagattacaacggtgatggcgggcaaggggtccggctggagccgggcggctctcctccagctccttctcggccgactcggaccgatg

SEQ ID NO: 9319 - DNA, 203 bp, synthetic construct
  source 1..203: mol_type = other DNA
ggcgcgccagtcctttggcggaagagtgtcccgcctcttccgctctacagcggaggtggctgtggcggtggcgctggtggctgcggcggcggcggcggcagcggcgctcgagcggttcctgtcagggtcagccggcgggccccctgggtggtccacctgcaaatcgcggagcggcgccccagggatcgcgactcggaccgatg

SEQ ID NO: 9320 - DNA, 203 bp, synthetic construct
  source 1..203: mol_type = other DNA
ggcgcgccagtcctatgtggccggccggcgcgggcaccaagctgccctgtccccgagactctgcgctccggcgggcggctttctctgggaacctcacggccctgccctctcacctcgtgcccgccggccgcagcgtccgggtcttcatcagcgccaaccctgaagatacgggagcagaaagacaggcgcgactcggaccgatg

SEQ ID NO: 9321 - DNA, 203 bp, synthetic construct
  source 1..203: mol_type = other DNA
ggcgcgccagtcctggaggagcggcccagagcgcgcagctagggcactggcgaaaccccgggacagtccctctccgtgcgggggcggcgcagagcagtcccatccccggggtcccgggcgcggctgactgccggctggttccctgcgcgcagtagctccccgagccgggctgcaccggaggcggcgagcgactcggaccgatg

SEQ ID NO: 9322 - DNA, 203 bp, synthetic construct
  source 1..203: mol_type = other DNA
ggcgcgccagtcctcgccccctccgacgccaccgaggtagcggcttcacctttaaggcggcgcgggggctgctgggaaggccggcgggatggaggcggcgggaccggctcgcgggtgcgggtccgggtgaagcgggaggcagccagagtcggagccgggcccgagcaccaggcgcagacgccacagcccgactcggaccgatg

SEQ ID NO: 9323 - DNA, 203 bp, synthetic construct
  source 1..203: mol_type = other DNA
ggcgcgccagtcctgtgtcagttcgtccggcttcctcacagcccctcactcccggcggctgacagcagcagcggcggcggcgggcggcgcctggcgtttcgaggctgagcggcaccggggttggggcgcggaggaggagcagcagcgggaggaggagccgtgtgccctggcactgagcggccgcggcccgactcggaccgatg

SEQ ID NO: 9324 - DNA, 203 bp, synthetic construct
  source 1..203: mol_type = other DNA
ggcgcgccagtcctatggcatgggagaatcagaccttcaactctgacttcatcctcctgggaatcttcaatcacagccccacccacaccttcctcttctttctggtcctggccatcttttcagtggccttcatgggaaactctgtcatggttctcctcatctacctggacacccagctccacaccccccgactcggaccgatg

SEQ ID NO: 9325 - DNA, 203 bp, synthetic construct
  source 1..203: mol_type = other DNA
ggcgcgccagtccttgctacacaccactctggcttacgcttccagctaacagcggtttgtctgtgtttctggactgaagtgactgatgaaaaacagtagtcaagtctggagggtgattccctttcagttcacttgcctttcagttctggggaaattagaagatttgctctctctctctgcttcttagacgactcggaccgatg

SEQ ID NO: 9326 - DNA, 203 bp, synthetic construct
  source 1..203: mol_type = other DNA
ggcgcgccagtcctggggtctacggcctaggggccggggaagtttgcgccgccgcgaccagtgctgcgatcccgagccgggctccagccccgaggaccaggggtcgggcgggcctgcctacggaaccccgcgggccagcagcagtcgtctcgcgtcctcctgcttggaaaagtgtttaagcttctaaacgactcggaccgatg

SEQ ID NO: 9327 - DNA, 203 bp, synthetic construct
  source 1..203: mol_type = other DNA
ggcgcgccagtccttcagccgaggggctgttggggaactctctgcaggcacagggcacctggtgactgggaagcttctgtttgtgtggacttcttgggaacagcgtcctggtgtgggccaggaggagaggactggagcaccccaggctctgacttcgtgctcctgggatcgtggtgcattgcctggcccgactcggaccgatg

SEQ ID NO: 9328 - DNA, 203 bp, synthetic construct
  source 1..203: mol_type = other DNA
ggcgcgccagtccttcagggcttcccctttcttggtcatcgatccctagagctctggctctttctcttcttggggaactgcttaacgtctacagcaaggcctaataggggacctgagggcacagtcctcaggatgtttcggggagaataggagccagaacctgagcccctaagccattcccctcaccacgactcggaccgatg

SEQ ID NO: 9329 - DNA, 203 bp, synthetic construct
  source 1..203: mol_type = other DNA
ggcgcgccagtcctgggaccccatttctgtgctcatctgcctccttggcaatataaagagcaagcactgaggccccgcctcagagcaccccaaacttgacgccatgaagatcccggtccttcctgccgtggtgctcctctccctcctggtgctccactctgcccagggagccaccctgggtggtcctgcgactcggaccgatg

SEQ ID NO: 9330 - DNA, 203 bp, synthetic construct
  source 1..203: mol_type = other DNA
ggcgcgccagtcctcaggtcttggaagaggctgggggtcccggccttgtgccttacctgcgcccggaggtcgcctccttcttgggagaggatggggacgtggcatagccacccacgcgccgcgggggtcccgagccattaaggggcgtcctggtgggaaggcctttcaagagctgacacactggagggcgactcggaccgatg

SEQ ID NO: 9331 - DNA, 203 bp, synthetic construct
  source 1..203: mol_type = other DNA
ggcgcgccagtccttcgtgaagatagagatggggtttcaccatgttgcccaggctggtcttgaactcagggtccaaacgatccacctaccttggcctcccaacgtgccaggattacaggcatgagccaccacacctggtccatcttgataatttcatactctggcttggcaaagactgaagggaagcccgactcggaccgatg

SEQ ID NO: 9332 - DNA, 203 bp, synthetic construct
  source 1..203: mol_type = other DNA
ggcgcgccagtcctatttgtcaaactgaagaaacccctgaagaagcagtggtgggcaggcgccgacgctgcggcttccagagcattttggcaaatcaaagccagggaccgttgctgggcctcatttccgcaacttttcggctccgaactgcttctttgacttagaagatatcttatcctgccgttgtacgactcggaccgatg

SEQ ID NO: 9333 - DNA, 203 bp, synthetic construct
  source 1..203: mol_type = other DNA
ggcgcgccagtccttcccggggctacgaggcggaagcgaaggcagacgcagtctccgtcgttgacgttagtcgcagtcttcgctgctaacgttttgttatgagttgctaaaatggtgaaatgctgctccgccattggatgtgcttctcgctgcttgccaaattcgaagttaaaaggactgacatttcacgactcggaccgatg

SEQ ID NO: 9334 - DNA, 203 bp, synthetic construct
  source 1..203: mol_type = other DNA
ggcgcgccagtcctctctgatgccttcaggagcttgggcctctcctgctccactcctaaacttcagcttctcagcaaacaggcctcccaagtccctgcttctccctctcaggccttgctaacctcaccagctctagggcctggccaggcctcccaggctccctcctccaccccaaccccttctcactccgactcggaccgatg

SEQ ID NO: 9335 - DNA, 203 bp, synthetic construct
  source 1..203: mol_type = other DNA
ggcgcgccagtcctatgcgctccgagggtgcggcccccgggccggcggcgccgctgtgcggggcgctgagcctgctgctgggcgcgctgctgggcaaagtgatagagggtcacggggtcacagacaacatacagagattctcctcactgccaccttacctacctgtgagctaccacatcctcagagcacgactcggaccgatg

SEQ ID NO: 9336 - DNA, 203 bp, synthetic construct
  source 1..203: mol_type = other DNA
ggcgcgccagtcctttattctggacagttactcttaagaaagttgtcagaagaaacgcatctgcctttttttccaggtgaactgccgtgagttgtccagcatgatagtgtttattttcttggctatggggttaagcttggaaaatgaatacacttcccaaaccaataattgcacatatttaagagagccgactcggaccgatg

SEQ ID NO: 9337 - DNA, 203 bp, synthetic construct
  source 1..203: mol_type = other DNA
ggcgcgccagtccttggacaaccatcagggagccaggacacagaggggcagagcaagtcagcattggcgccccttcctcagatccctatcatcttgggaaacagtagcccagaggttcaggaagatgttaacttaaatgttcggggtgccccagtctgttcagcatggctgaaatccacactccgtatcgactcggaccgatg

SEQ ID NO: 9338 - DNA, 203 bp, synthetic construct
  source 1..203: mol_type = other DNA
ggcgcgccagtcctaactccggctacgggggcccgaagggaccgtgaggcgcagatttgagccgctgttgagatgattcctttccgttcgcggaagagatggggaaactgagggccgcccagtatgcttgctctcttcttggccatgcgctgcagaggcatggagccagtcctgagttacagaaacagcgactcggaccgatg

SEQ ID NO: 9339 - DNA, 203 bp, synthetic construct
  source 1..203: mol_type = other DNA
ggcgcgccagtcctagttgaaacatcctcctacactggagctttataaatattttaaagacaaggattggattagatttgacattagaaatgtaccataatacagaaggcaatggacacctaaagaacagaatgaaaaccttcttaggaaatgaagcttgacacttcacccaccaggccaccacaagacgactcggaccgatg

SEQ ID NO: 9340 - DNA, 203 bp, synthetic construct
  source 1..203: mol_type = other DNA
ggcgcgccagtcctgatgctgcgggctggtacattccccacttgcaaaactctgtggggctgggttcctctcttttctttccaaatatcccaggaagtggatggttttatccaaattcagcagacgagtaaaaagagtcttcgggaggtgcaatagctttctaggaatgaggatattcttcaaggaaacgactcggaccgatg

SEQ ID NO: 9341 - DNA, 203 bp, synthetic construct
  source 1..203: mol_type = other DNA
ggcgcgccagtcctctgctctgtggtacttcctctctggctgatttagcaaacagcacctagacctggggccaggcctttggcagtgggacagatccagggataggctacaccaccctgccctgaccctgggattggcatcagcttccaaccagttcctgccaaagcttgtaagtcctcccgacggcccgactcggaccgatg

SEQ ID NO: 9342 - DNA, 203 bp, synthetic construct
  source 1..203: mol_type = other DNA
ggcgcgccagtcctcacgcggggcccagctggactgccgcgggggattctgggccaagatggcagcaatgaggaaggcgcttccgcggcgactggtgggcttggcgtccctccgggctgtcagcacctcatctatgggcactttaccaaagcgggtgaaaattgtggaagttggtccccgagatggaccgactcggaccgatg

SEQ ID NO: 9343 - DNA, 203 bp, synthetic construct
  source 1..203: mol_type = other DNA
ggcgcgccagtcctgcctctggggttttatattgctctggtattcatgccaaagacacaccagccctcagtcactgggagaagaacctctcataccctcggtgctccagtccccagctcactcagccacacacaccatgtgtgaagaggagaccaccgcgctcgtgtgtgacaatggctctggcctgtcgactcggaccgatg

SEQ ID NO: 9344 - DNA, 203 bp, synthetic construct
  source 1..203: mol_type = other DNA
ggcgcgccagtcctgcagattctgtggttatactcactcctcatcccaaagaatgaaatttaccactctcctcttcttggcagctgtagcaggggccctggtctatgctgaagatgcctcctctgactcgacgggtgctgatcctgcccaggaagctgggacctctaagcctaatgaagagatctcagcgactcggaccgatg

SEQ ID NO: 9345 - DNA, 203 bp, synthetic construct
  source 1..203: mol_type = other DNA
ggcgcgccagtcctatataaggagcgtgggccaggcctgagtattcagcgatggcatttgcatggtggccctgtctcatcttggctctgctctccagcttggcagcctctggcttcccgagaagcccctttcggctgcttgggaaacggagcctcccggaaggggtggccaatggcatcgaggtctaccgactcggaccgatg

SEQ ID NO: 9346 - DNA, 203 bp, synthetic construct
  source 1..203: mol_type = other DNA
ggcgcgccagtcctgctggtcctatcccactgggaccgtcgctgccactcagccagagagccagcatcttggcaagggctgggcctggagtgaagctggaagggctagcatggagagcctgtcacctgggggaccacctggccacccttaccagggggaggcctctacctgctggcagctcacagtgacgactcggaccgatg

SEQ ID NO: 9347 - DNA, 203 bp, synthetic construct
  source 1..203: mol_type = other DNA
ggcgcgccagtcctattgcagaagcctatgagttgattaattctaacaactggatactgtggtttagggcttggaagatgaaaaggaggcctctgagaatgaaacagacatggaagaccccagagaaatccagactgattcttggcgtaaacggggagagagcgaggaaccgtcatctcctcagtccccgactcggaccgatg

SEQ ID NO: 9348 - DNA, 203 bp, synthetic construct
  source 1..203: mol_type = other DNA
ggcgcgccagtcctatggttgagcccttcttgggaacctggaagctggtctccagtgaaaactttgaggattacatgaaagaactgggagtgaatttcgcagcccggaacatggcagggttagtgaaaccgacagtaactattagtgttgatgggaaaatgatgaccataagaacagaaagttctttccgactcggaccgatg

SEQ ID NO: 9349 - DNA, 203 bp, synthetic construct
  source 1..203: mol_type = other DNA
ggcgcgccagtcctgcctagcccacgtccagcgcctgcccggccgccgcttcccgccaccctgccctgcccacccgccaggtactaccattaaagataccttcttctcagcaaatctatgataaaaaatataagtaacagaagaagaaataactgttatttgtcaagtgacaagcttttaatgtcagacgactcggaccgatg

SEQ ID NO: 9350 - DNA, 203 bp, synthetic construct
  source 1..203: mol_type = other DNA
ggcgcgccagtcctgctccgcagctgggaatcacgggactagccttcgtttccttggcaacgcagtacacaagtgctagccctagcagctcgcgatgtgcttcagcagagcagacgctgcggataactacccttttggaacatgtcaacagaggaaactttttcctcacttccatcccccgaatttgacgactcggaccgatg

SEQ ID NO: 9351 - DNA, 203 bp, synthetic construct
  source 1..203: mol_type = other DNA
ggcgcgccagtcctgactggcactttttcttttttctcagcaaactgtacaaaaccaaatctctttttgattttcaaggaaactaggttcctgccaaattttgaatctggacaataaacagacactttgtcctagcatctttctggaatcatttcgggatattttccacaagcaacacagaaacaggacgactcggaccgatg

SEQ ID NO: 9352 - DNA, 203 bp, synthetic construct
  source 1..203: mol_type = other DNA
ggcgcgccagtcctgggaatatgagtgatggtgcctcaaagcagtaactttttgcttagagcttgagagtcaaagttaaggacccacatgtatacttcggctctagcgagtctaaggatgataatatggatacaaaatctattctagaagaacttcttctcaaaagatcacagcaaaagaagaaaatgcgactcggaccgatg

SEQ ID NO: 9353 - DNA, 203 bp, synthetic construct
  source 1..203: mol_type = other DNA
ggcgcgccagtcctccggaagcctcgaggtttagtcccgcccccctctcctcgctgcttaggctccgcggcctccaagctgtagctatgacggcgcgcgggactccgagccgcttcttggccagcgttctccacaacggactgggtcgctatgtgcagcagctgcagcgtctgagcttcagcgtcagccgactcggaccgatg

SEQ ID NO: 9354 - DNA, 203 bp, synthetic construct
  source 1..203: mol_type = other DNA
ggcgcgccagtcctctgtgggtctgtaggttaagggagaagatggcggcgctaggggaacccgtgcggctggagagagatatttgtagagcaattgaattattggaaaaactacaaaggagtggagaagtaccaccacagaaacttcaggctttgcaaagagtccttcaaagtgaattctgcaatgctcgactcggaccgatg

SEQ ID NO: 9355 - DNA, 203 bp, synthetic construct
  source 1..203: mol_type = other DNA
ggcgcgccagtcctcagaggagaaggggaggaacaggaagcctccagctagtcgtttggaatctggcaaccatttctgtcagctttctcattcctagattgatgcagattgcttaattccttgagcttaaccagctcgaaaaagcagtggaagcagctcacacatttttcgtggctaaccctgagcaccgactcggaccgatg

SEQ ID NO: 9356 - DNA, 203 bp, synthetic construct
  source 1..203: mol_type = other DNA
ggcgcgccagtcctatcctcagtctcccagttcaagctaatcattgacagagctttacaatcacaagcttttactgaagctttgataagacagtccagcagttggtggcaaatgaagccaggctgtgcggcaggatctccagggaatgaatggattttcttcagcactgatgaaataaccacacgctacgactcggaccgatg

SEQ ID NO: 9357 - DNA, 203 bp, synthetic construct
  source 1..203: mol_type = other DNA
ggcgcgccagtcctgacaaagacctgcgccggcgcgcgggactctgcgtgaggcgagcgccggggctcccggagcggatccctacctgtttcaaggacctgccagtctgagaagcttcttgtcataaggccatccaggggccacgcacccctaccttgccagcctccagcatgcaggataccgtaacgcgactcggaccgatg

SEQ ID NO: 9358 - DNA, 203 bp, synthetic construct
  source 1..203: mol_type = other DNA
ggcgcgccagtcctcctgtgagctccacctgccccagttctcctggctttaacccctccttggccaaggccagggttgcctgcgggagccaggtgtccgctctccacacctttcacagccccagccctcagagcaacctcagcccagcccagcccagctccagctccagctccagcccgggccccatccgactcggaccgatg

SEQ ID NO: 9359 - DNA, 203 bp, synthetic construct
  source 1..203: mol_type = other DNA
ggcgcgccagtcctaaagtggaagcaaacagcctgcgagcagagcctcctgaggtgtatttcgggtcttgctggggctgagagagaccacagccctttggggggtacaaacaagagttcagttgctgtgaattctgccactgtgcccagctctgaagcctcagctcttgccaaacagacccgagaccccgactcggaccgatg

SEQ ID NO: 9360 - DNA, 203 bp, synthetic construct
  source 1..203: mol_type = other DNA
ggcgcgccagtcctagcagtaccccgtctcgctcggttccgcggcggccacgctccgggagacttccggcagggcgggcgcggggtcttggcgaacggtcttcggaagcggcggcggcgcgatgaccacgctacgggcctttacctgcgacgacctgttccgcttcaacaacattaacttggatccaccgactcggaccgatg

SEQ ID NO: 9361 - DNA, 203 bp, synthetic construct
  source 1..203: mol_type = other DNA
ggcgcgccagtcctgtatgacgtactggtcggtagtaaagattaatatgtaagaaatgtggagctaggatcaagtcatactccacagcctgcctggcaaactatgttttacttctgactttgctctctcgctgagaacattaatctgtcaagctggcgggctcctttgatagcaactttcccaggggccgactcggaccgatg

SEQ ID NO: 9362 - DNA, 203 bp, synthetic construct
  source 1..203: mol_type = other DNA
ggcgcgccagtcctagcctcagccttgcctctccccctcttgctttatctcctcatttctgtgtgcaggcgagcttcttggcctaagggcaggaagagatggcagcgggggagacgcagctctacgccaaggtctccaacaagctcaagagccgcagcagcccctcgctcctggagcccctcctggcccgactcggaccgatg

SEQ ID NO: 9363 - DNA, 203 bp, synthetic construct
  source 1..203: mol_type = other DNA
ggcgcgccagtccttagagaggaggttcacaaacacccacgtagctgcagccacttatcactgcacctcttgccaaagtgcggtccacatacgtgcaatgagaaaggattaaagggacttgtttgataacacacgcaaaactatatttcctttggcttcaaagctctctcaccatattttgggaagttcgactcggaccgatg

SEQ ID NO: 9364 - DNA, 203 bp, synthetic construct
  source 1..203: mol_type = other DNA
ggcgcgccagtcctatggagcttcatgtcctcgtgcaggaagtactcatcgactgatgtggcagactttgctccctggcaaaactaaagaactctcctattcatggaggcgaacactgaggatgctttccacatgaaccctgaagtgaacttctgatacatttcctgcagcaagagaaggcagccaaccgactcggaccgatg

SEQ ID NO: 9365 - DNA, 203 bp, synthetic construct
  source 1..203: mol_type = other DNA
ggcgcgccagtcctagccgcgggtacccctcgctggtccgctgggctgccgtccagcgggagagacaaaagtcgcaagggaaggggaaaaacgaactgagtttgtgtcactgtcttggtggacttttcgagctaacctgtatttgagaaaaacttcagtctcttgggaaaggagaggcagtgacaaaacgactcggaccgatg

SEQ ID NO: 9366 - DNA, 203 bp, synthetic construct
  source 1..203: mol_type = other DNA
ggcgcgccagtcctgtacttcatagactttatcatacttcgtagcatccagtatgttttctttgctaagattattgattttgtattgaagggtcccatgtccatcgttttcaatgctttatctccagggttggagcatgcctgctgtggcagaggtaaaacttcgagatgatcaatatacactggaaccgactcggaccgatg

SEQ ID NO: 9367 - DNA, 203 bp, synthetic construct
  source 1..203: mol_type = other DNA
ggcgcgccagtcctcctgaagaggggggaaaggcatttctgtgctcttcctggtaaagtgtttgaaaatgaacattcagaagaaaacctaaagcacctgaaatgcacaggggacgagaatgagagctgaacaaaaggttcatcctcagttttctccatgcccatgggaagctgtttacccggattgggcgactcggaccgatg

SEQ ID NO: 9368 - DNA, 203 bp, synthetic construct
  source 1..203: mol_type = other DNA
ggcgcgccagtcctatacatgtgacgtccacactgacagtgccctcctgtgggcatggctcaggttgtgcgcagttcctggcacactggctgtaactccgcccctttctctccctctcagtaaagcaagattacgcggtgacatgcctcacagctgatcacgacacacggggatggagagcaagagttcgactcggaccgatg

SEQ ID NO: 9369 - DNA, 203 bp, synthetic construct
  source 1..203: mol_type = other DNA
ggcgcgccagtcctttcatggtgactgggacgagtaggtttcactgtttctcataggagacttgacagcttaaagtaaaaacaaattattttcgtcaaagtttttttttttctcttaactgatttttagcaaacctcagactgagacacaggactcaacggtgtattcctggaaggcaaggtgctatacgactcggaccgatg

SEQ ID NO: 9370 - DNA, 203 bp, synthetic construct
  source 1..203: mol_type = other DNA
ggcgcgccagtcctaatgaggagtgatcatggctacctcagagctgagctgcgaggtgtcggaggagaactgtgagcgccgggaggccttctgggcagaatggaaggatctgacactgtccacacggcccgaggagggctgctccctgcatgaggaggacacccagagacatgagacctaccaccagccgactcggaccgatg

SEQ ID NO: 9371 - DNA, 203 bp, synthetic construct
  source 1..203: mol_type = other DNA
ggcgcgccagtcctagcctgtgcaagtgatttgggagaggaaggggagatgatgtaactggttcggcatgttcccgtcttggccaacatgccttgaattggaacgctacctacagacggagccccggaggatctcagagacctttggtgaggacttggactgtttcctccacgcttcccctcccccgtcgactcggaccgatg

SEQ ID NO: 9372 - DNA, 203 bp, synthetic construct
  source 1..203: mol_type = other DNA
ggcgcgccagtcctgacttctgccctctaaagactaaggcctaattccactggtttctttgaattccgtggtcctaagtccattttcagacaaagtttctgtggaaagacctacggacaaagacatctctccttggcagagtgagctaggattaccagctcttcagccgcagctgaaggcgggagtcccgactcggaccgatg

SEQ ID NO: 9373 - DNA, 203 bp, synthetic construct
  source 1..203: mol_type = other DNA
ggcgcgccagtcctcaccattcctttctcacctggcacaatctcagatttttagactctgaggagcagttggagctaatccacattatggaaatggaaaccaccgaacctgagccagactgtgtagtgcagcctccctctcctcctgatgacttttcatgccaaatgagactctctgagaagatcactcgactcggaccgatg

SEQ ID NO: 9374 - DNA, 203 bp, synthetic construct
  source 1..203: mol_type = other DNA
ggcgcgccagtcctatagcaaaacccaaaacaacagcagatgatatcttccaagtgtctgctcgggacacggcttcagccctctgtggtcccctctccccggggggctttgggattcttgtcaagctccttcaagagcctgcaagcacttaaccagccacccagagttccctcactgaagatctgagccgactcggaccgatg

SEQ ID NO: 9375 - DNA, 203 bp, synthetic construct
  source 1..203: mol_type = other DNA
ggcgcgccagtcctacgagaaggctgcctgatcagagagtccctgaagaagattctgtggctacaggcttcagcagagtgtgagggagaccccggttatttcctcagctatttccaccaaatcctcctgtctttcgtggccaacaccccaggcaaggcttggggcccccgtctgctgctggacgagcccgactcggaccgatg

SEQ ID NO: 9376 - DNA, 203 bp, synthetic construct
  source 1..203: mol_type = other DNA
ggcgcgccagtcctcagtgagaaaagcaagagaataagctaatactcctgtcctgaacaaggcagcggctccttggtaaagctactccttgatcgatcctttgcaccggattgttcaaagtggaccccaggggagaagtcggagcaaagaacttaccaccaagcagtccaagaggcccagaagcaaaccgactcggaccgatg

SEQ ID NO: 9377 - DNA, 203 bp, synthetic construct
  source 1..203: mol_type = other DNA
ggcgcgccagtcctatgcctggtcagaactacagaaccatatctgaatttatcctctctggcttctcagccttcccccagcagctcctgcctgtcttgttcctgctgtacctcctgatgttcctgttcacattgcttggcaaccttcttatcatggccacagtttggattgaacgcagactccacacacgactcggaccgatg

SEQ ID NO: 9378 - DNA, 203 bp, synthetic construct
  source 1..203: mol_type = other DNA
ggcgcgccagtcctatgccccaaattcttatattcacatacctgaatatgttttacttctttccccctttgcagatcttggcagaaaacctcaccatggtcaccgaattcctgttgctgggtttttccagccttggtgaaattcagctggccctctttgtagtttttctttttctgtatctagtcattcgactcggaccgatg

SEQ ID NO: 9379 - DNA, 203 bp, synthetic construct
  source 1..203: mol_type = other DNA
ggcgcgccagtcctatgggggatgtgaatcagtcggtggcctcagacttcattctggtgggcctcttcagtcactcaggatcacgccagctcctcttctccctggtggctgtcatgtttgtcataggccttctgggcaacaccgttcttctcttcttgatccgtgtggactcccggctccatacaccccgactcggaccgatg

SEQ ID NO: 9380 - DNA, 203 bp, synthetic construct
  source 1..203: mol_type = other DNA
ggcgcgccagtcctatggcaaatctgagccagccctccgaatttgtcctcttgggcttctcctcctttggtgagctgcaggcccttctgtatggccccttcctcatgctttatcttctcgccttcatgggaaacaccatcatcatagttatggtcatagctgacacccacctacatacacccatgtaccgactcggaccgatg

SEQ ID NO: 9381 - DNA, 203 bp, synthetic construct
  source 1..203: mol_type = other DNA
ggcgcgccagtcctatgttcctttacctttgcttcatttttcagaggacatgcagtgaggagatggaagaggaaaatgcaacattgctgacagagtttgttctcacaggatttttacatcaacctgactgtaaaataccgctcttcctggcattcttggtaatatatctcatcaccatcatggggaatcgactcggaccgatg

SEQ ID NO: 9382 - DNA, 203 bp, synthetic construct
  source 1..203: mol_type = other DNA
ggcgcgccagtcctactcaaaatggcggcggcggcgtcagcatcagcggcctcctgcccgtatctatcgtggcggcgacgggacccgcctccctgggcgccggagtcatgtgacccacacaatggctgagtggctactctcggcttcctggcaacgccgagcgaaagctatgactgcggccgcgggttcgactcggaccgatg

SEQ ID NO: 9383 - DNA, 203 bp, synthetic construct
  source 1..203: mol_type = other DNA
ggcgcgccagtcctatgcactttctttgccaaaggcaaacgcagaacgtttcagagccatgaggatgcttctgcatttgagtttgctagctcttggagctgcctacgtgtatgccatccccacagaaattcccacaagtgcattggtgaaagagaccttggcactgctttctactcatcgaactctgccgactcggaccgatg

SEQ ID NO: 9384 - DNA, 203 bp, synthetic construct
  source 1..203: mol_type = other DNA
ggcgcgccagtcctgcagacacgaagcctcccgggtggcttacagacgctgccagcatcgccgccgccagaggagaaatgtctgaagtaagacccctctccagagacatcttgatggagaccctcctgtatgagcagctcctggaacccccgaccatggaggttcttggcatgactgactctgaagagcgactcggaccgatg

SEQ ID NO: 9385 - DNA, 203 bp, synthetic construct
  source 1..203: mol_type = other DNA
ggcgcgccagtcctcctggccactcttcctccatcagcctggctggcagcagccttggactccgcccgtggagccctgggcctgttgacccaccagcttaggagcacccaccaagctctgggtaaggaagctcaccttctggggctcttctgggaaaatagaggtcaacgtggaggtaccaggccacccgactcggaccgatg

SEQ ID NO: 9386 - DNA, 203 bp, synthetic construct
  source 1..203: mol_type = other DNA
ggcgcgccagtccttcaatcgccttttatctctggccctgggacctttgcctattttctgattgataggctttgttttgtctttacctccttctttctggggaaaacttcagttttatcgcacgttccccttttccatatcttcatcttccctctacccagattgtgaagatggaaagggtccaaccccgactcggaccgatg

SEQ ID NO: 9387 - DNA, 203 bp, synthetic construct
  source 1..203: mol_type = other DNA
ggcgcgccagtccttaggagaggtgggctccacccacaaaaatggactgctcagaaaaatgagggagagagaaagggtggccactttcccgagccaagaaattccttgaaaaaaaatcagaacatctgaaaccagagagccgatttccttaccgggaggcagttcctggctaacgaagaggaagcacgcgactcggaccgatg

SEQ ID NO: 9388 - DNA, 203 bp, synthetic construct
  source 1..203: mol_type = other DNA
ggcgcgccagtcctaaccaaccttgagctgggaggtacgtgctcttcttgacagacgttggaagaagacctggcctaaagaggtctcttttggtggtccttttcaaagtcttcacctgagccctgctctccagcgaggcgcactcctggcttttgcgctccaaagaagaggtgggatagttggagggccgactcggaccgatg

SEQ ID NO: 9389 - DNA, 203 bp, synthetic construct
  source 1..203: mol_type = other DNA
ggcgcgccagtcctgttgactaagtcaataatcagaatcagcaggtttgcagtcagattggcagggataagcagcctagctcaggagaagtgagtataaaagccccaggctgggagcagccatcacagaagtccactcattcttggcaggatggcttctcatcgtctgctcctcctctgccttgctggcgactcggaccgatg

SEQ ID NO: 9390 - DNA, 203 bp, synthetic construct
  source 1..203: mol_type = other DNA
ggcgcgccagtcctcaagccaattaaggaggactcggtccactccgttacgtgtacatccaacaagatcggcgttaaggtaacaccagaatatttggcaaagggagaaaaaaaaagcagcgaggcttcgccttccccctctcccttttttttcctcctcttccttcctcctccagccgccgccgaatccgactcggaccgatg

SEQ ID NO: 9391 - DNA, 203 bp, synthetic construct
  source 1..203: mol_type = other DNA
ggcgcgccagtccttggtcatctcagttcttttctcaccttgactgcaagatgaaactccttgtgctagctgtgctgctcacagtggccgccgccgacagcggcatcagccctcgggccgtgtggcagttccgcaaaatgatcaagtgcgtgatcccggggagtgaccccttcttggaatacaacaaccgactcggaccgatg

SEQ ID NO: 9392 - DNA, 203 bp, synthetic construct
  source 1..203: mol_type = other DNA
ggcgcgccagtcctgagggaacgggtcctggcggtgctttgcaaagggcccgtgtttctgttgcgggaagctcccgggggtcgcacgtgcgtccgagcccaagcccctcccctccactccccttcctgcgtgccccggagccgccaagcggctacgttcttctcggcccgccgagatggcgctcgacccgactcggaccgatg

SEQ ID NO: 9393 - DNA, 203 bp, synthetic construct
  source 1..203: mol_type = other DNA
ggcgcgccagtcctaggaggattcctggggctggtgtcttctcccagctgctgcttccagtgggcctgggcccaggactggacctccgctggcacccctgagtgcctccctgccaggccatgctgctgtagaccctaacagcgtctcttcctggccaagagaagcctgtccccaagaacaggagagcccgactcggaccgatg

SEQ ID NO: 9394 - DNA, 203 bp, synthetic construct
  source 1..203: mol_type = other DNA
ggcgcgccagtcctgagtctagtctttgttcggggctgtccaaaggacgctagctgttgcacctgttcctccctgcgcgtaagatagaggataaatctcctggcaaagcccagaatgaccacagccctggaacctgaggaccaaaaaggacttctgataattaaggcagaggaccattactggggacacgactcggaccgatg

SEQ ID NO: 9395 - DNA, 203 bp, synthetic construct
  source 1..203: mol_type = other DNA
ggcgcgccagtcctctttctgtctcttcctcgctccctctctttctctcctccctctgccttcccagtgcataaagtctctgtcgctcccggaacttgttggcaatgcctattttttggctttcccccgcgttctctaaactaactatttaaaggtctgcggtcgcaaatggtttgactaaacgtaggcgactcggaccgatg

SEQ ID NO: 9396 - DNA, 203 bp, synthetic construct
  source 1..203: mol_type = other DNA
ggcgcgccagtcctgtccttcccacccttagtcccaggcatctgactaccgggaacctcagccagagtccgggagccccccaccccgtccaggagccaacagagcccccgtcttgctggcgtgagaatacattgctctcctttggttgaatcagctgtccctcttcgtgggaaaatgaaccagaagaccgactcggaccgatg

SEQ ID NO: 9397 - DNA, 203 bp, synthetic construct
  source 1..203: mol_type = other DNA
ggcgcgccagtcctcgcgctggcgccatggcggagcaggagagcctggaattcggcaaggcagacttcgtgctgatggacaccgtctccatgcccgagttcatggccaacctcaggctcagatttgaaaaagggcgcatctatacgttcattggagaagtcgtcgtttctgtgaacccttacaagttgcgactcggaccgatg

SEQ ID NO: 9398 - DNA, 203 bp, synthetic construct
  source 1..203: mol_type = other DNA
ggcgcgccagtcctggagctctccccggtctgacagccactccagaggccatgcttcgtttcttgccagatttggctttcagcttcctgttaattctggctttgggccaggcagtccaatttcaagaatatgtctttctccaatttctgggcttagataaggcgccttcaccccagaagttccaacctcgactcggaccgatg

SEQ ID NO: 9399 - DNA, 203 bp, synthetic construct
  source 1..203: mol_type = other DNA
ggcgcgccagtcctctggggccccgcggggctggccgcctagcgagcctgccggtcgaccccagccagcgcagcgacggggcgctgcctggcccaggcgcacacggaagtgcgcttctctgaagtagctttggaaagtagagaagaaaatccagtttgcttcttggagaacactggacagctgaataacgactcggaccgatg

SEQ ID NO: 9400 - DNA, 203 bp, synthetic construct
  source 1..203: mol_type = other DNA
ggcgcgccagtcctactgcctccgccccttcaggtgcgggaagtctgaagccggtaaacatggccgtcaccgacagcctcagccgggctgcgactgtcttggcaactgtgttgctcttgtccttcggcagcgtggccgctagtcatatcgaggatcaagcagaacaattctttagaagtggccatacacgactcggaccgatg

SEQ ID NO: 9401 - DNA, 203 bp, synthetic construct
  source 1..203: mol_type = other DNA
ggcgcgccagtcctagcaaaaacctcctggcaaaggaggagaggaggttgtgcgggacaaccttctcctgacagaaggatgtcgctgctgagcctgtcttggctgggcctcaggccggtggcagcatccccgtggctgctcctgctggtggtcggggcctcctggctcctggcccgcatcctggcctgcgactcggaccgatg

SEQ ID NO: 9402 - DNA, 203 bp, synthetic construct
  source 1..203: mol_type = other DNA
ggcgcgccagtcctctccctctgccctctccccttgcccaagccccgaggtgggggcctggtgtgaatgctccggccgaagtgaacctgcacccccgcacccgaaggcctctttccggcttctgggcaaggcggccccggtgagctcggccgtcacacatctctgctttttcccaagaagagcaggaacgactcggaccgatg

SEQ ID NO: 9403 - DNA, 203 bp, synthetic construct
  source 1..203: mol_type = other DNA
ggcgcgccagtcctgagccaggcttggcggtcctcagaggggctgataaatcggcgctcgactggcctaggagctgtccgcagggagatttatgacaaagtccagttttcaacaatgctgaaatcaaatgattgcctgttttctttggaaaatttgttttttgaaaaaccagatgaagttgaaaaccacgactcggaccgatg

SEQ ID NO: 9404 - DNA, 203 bp, synthetic construct
  source 1..203: mol_type = other DNA
ggcgcgccagtcctacacccggcagacttcaagagtctcagactgaggagaaagcctttccttctgctgctactgctgctgccgctgcttttgaaagtccactcctttcatggtttttcctgccaaaccagaggcacctttgctgctgccgctgttctctttggtgtcattcagcggctggccagaggcgactcggaccgatg

SEQ ID NO: 9405 - DNA, 203 bp, synthetic construct
  source 1..203: mol_type = other DNA
ggcgcgccagtccttgcgcggcggggctgaggcggccgcggggcccgagcgcagggagtggagcttggtttcgggatctcggtgctgcagacggcgagacctcctgcacagggtgtacagcaagctgtgattcctgggaaaactaaaaaagctctctgaacaacggggcccagagctgatggcagacacgactcggaccgatg

SEQ ID NO: 9406 - DNA, 203 bp, synthetic construct
  source 1..203: mol_type = other DNA
ggcgcgccagtcctatggctactctgatctacgttgataaggaaattggagaaccaggcacccgtgtggctgccaaggatgtgctgaagctggagtctagaccttcaatcaaagcattagatgggatatctcaagttttaacacgacgttttggcaaaacatacgatgctccatcagccttacctaaacgactcggaccgatg

SEQ ID NO: 9407 - DNA, 203 bp, synthetic construct
  source 1..203: mol_type = other DNA
ggcgcgccagtcctaggtctccggattactgcatgcttgcagtgggaggaaaggcctgtctaccatgttctctgcctccccttcatgttctgtgaggagaggggccttgtctggcatgttcaccgaggcattcctgaccactagaactgtgcttggcacagagtaggcacttaataaactcctgctgccgactcggaccgatg

SEQ ID NO: 9408 - DNA, 203 bp, synthetic construct
  source 1..203: mol_type = other DNA
ggcgcgccagtcctttctcgcccaaggacagacctgaatctctagctgcctagaggctgactcaactgaaatcatggcgtttgacagcacttggaaggtagaccggagtgaaaactatgacaagttcatggaaaaaatgggtgttaatatagtgaaaaggaagcttgcagctcatgacaatttgaagccgactcggaccgatg

SEQ ID NO: 9409 - DNA, 203 bp, synthetic construct
  source 1..203: mol_type = other DNA
ggcgcgccagtcctctcctcctcctgctttcctccagtaagtgcatacccgctagtggtctgtacaggcggcacggtttgatggcagagatattttctttccaaactgttcaaaatgatgaacgaagatgcagctcagaaaagcgacagtggagagaagttcaacggcagtagtcagaggagaaaaagcgactcggaccgatg

SEQ ID NO: 9410 - DNA, 203 bp, synthetic construct
  source 1..203: mol_type = other DNA
ggcgcgccagtcctttgtttgttgtgttttccctggcaaacagctggagaaagagcagctcatggagaggctgagagaagcggttttcgcgtcctacccaaactgggagagtaaccttcagcagctggactcaccgattggttttccttcattttcagtgaaatcccattctctggctggagacacagcgactcggaccgatg

SEQ ID NO: 9411 - DNA, 203 bp, synthetic construct
  source 1..203: mol_type = other DNA
ggcgcgccagtcctggagaaaaggcgaatgataaagggcgctccacgcatgcgttaagaagccgccccaactcccccgcggcgttctttcttggaacaaaactagcgcggagccacggaactccgcagtttgcgtagacttgaatttcctattcctcggacgatccatgtggaatccgaaaaatagaacgactcggaccgatg

SEQ ID NO: 9412 - DNA, 203 bp, synthetic construct
  source 1..203: mol_type = other DNA
ggcgcgccagtcctgccttatggtatggttggaagcacggccccagattctctttgtatgcacaaagcagggtcatcagaagcctctcgattcaaaagatgataataccgaaaaacactgcccagtgacagtgaatccttggcatatgaagaaagctttcaaagtcatgaacgaattaagaaggtgagcgactcggaccgatg

SEQ ID NO: 9413 - DNA, 203 bp, synthetic construct
  source 1..203: mol_type = other DNA
ggcgcgccagtcctggggaatgcgctaacaagacaatgtaactttcttacaaattcgttagcaccctttagcgtttacccagaggtgtatctcctgggggcagatttgtaaaactagcatcaacaaccccttacttaaaccagcagccacatttgagggcaacatctacagtaataaattagccgttgcgactcggaccgatg

SEQ ID NO: 9414 - DNA, 203 bp, synthetic construct
  source 1..203: mol_type = other DNA
ggcgcgccagtcctaatcgcagacatgtgtgagcacctgacaatcttggcacaaacgagagatccaatgaaagtccgagtgcagaatacactacaaaccccatttgggcgaaattttagttggcggtagtggcacccagaagccgtggatagaagctatgagcatcggcaacacggcattgagtgtatcgactcggaccgatg

SEQ ID NO: 9415 - DNA, 203 bp, synthetic construct
  source 1..203: mol_type = other DNA
ggcgcgccagtcctccgaataaatggatacagggaaacaataataacatctcacgctaatacaacaaatagcaagatagagacgtagagatcaacattatatacacccataccaagactcaacgataaaaatcgtatgaacaataattgacaagcacactaagacgaatgaattgataatatcaagtacgactcggaccgatg

SEQ ID NO: 9416 - DNA, 203 bp, synthetic construct
  source 1..203: mol_type = other DNA
ggcgcgccagtccttcccaaggcgacgcattcccgcctccagtcccacgtgagtactcggcctataaacatcagccacaccatttgtacgacacactacgcgaacccgaacgccgtgcctgggaccgaagcacttacattcgggcccaccgtatgcgccgcgtgcaggccaggtgctatgcctcccaccgactcggaccgatg

SEQ ID NO: 9417 - DNA, 203 bp, synthetic construct
  source 1..203: mol_type = other DNA
ggcgcgccagtccttcccttcaaccactgcccgctgcaccggacaattcctgaacgcatctgagccagccacgcaccaccgcactacaatgacccgccgctcatgcgtggaacggtctctccaggtgcgcaaatagcgcaccaccctcgcgccgaccctctctgaagaccccaagatccgtagacctccgactcggaccgatg

SEQ ID NO: 9418 - DNA, 203 bp, synthetic construct
  source 1..203: mol_type = other DNA
ggcgcgccagtcctctcagccccatgtcctcccccgctgtcgccattaggccggtagtagatggattacacggtctactagtgctgaatgcgatggtaggtgacgtggtgtgcccccctaccggttataacccacactttctcccgtagatggccccccgccccggggcccactcccctccaggttgacgactcggaccgatg

SEQ ID NO: 9419 - DNA, 203 bp, synthetic construct
  source 1..203: mol_type = other DNA
ggcgcgccagtcctcgtccgcactgcacctgggacagacttccccttccgtgattcggtgtaccccccccggtgttacagcaccgctacgggcaggctggataggttgccctttcttatgccgacaccaacctcttcgtctacctcaccccgtactgcgcctcctcctcacgacgtgaggcacgcttacgactcggaccgatg

SEQ ID NO: 9420 - DNA, 203 bp, synthetic construct
  source 1..203: mol_type = other DNA
ggcgcgccagtcctcgcacctgtgccagcgactatatgctagtaggttaggtagcacgcgcggtctctgcggaatcagcacgtaaacacccgaccccatgccctggctcttacgggttacgtaccaatcggagccgttgggtacgattgtgctacagccccgccttgcagagcagcgtcgcccactaccgactcggaccgatg

SEQ ID NO: 9421 - DNA, 203 bp, synthetic construct
  source 1..203: mol_type = other DNA
ggcgcgccagtccttatccgatgtcctttacaccccgtactctcaggcagtagggcacatggcggccaatctgtcgtgtgctgtatcattaattctccggttcttattgatagttcgaatcggcacgggccacgtttctttaatcggagttctatccgcgtgggaatggacgcccatgagataatctacgactcggaccgatg

SEQ ID NO: 9422 - DNA, 203 bp, synthetic construct
  source 1..203: mol_type = other DNA
ggcgcgccagtcctgggagccgaatcgctcccactgctagcgcacgggcccgccagagccgcaatgctggagccaacgcgaggaccgtatgggcgataagggcgaggggttgccggaatcgatggaaccgtggggcagggcggctcgggcgcgtgcatcgcgggtgaacaacagggagccgttgcgcacgactcggaccgatg

SEQ ID NO: 9423 - DNA, 203 bp, synthetic construct
  source 1..203: mol_type = other DNA
ggcgcgccagtcctggtcccgccgggcacctggttagtgcccacacgcacgacgaggccccatggagaaaggtcccggtctggccagccgaccggcacaggcgaagcaacggcagaccagccctgtcagagccgtccgccccagggcgggaagggataaccgggcgagggaaggttgccgcctgctggcgactcggaccgatg

SEQ ID NO: 9424 - DNA, 203 bp, synthetic construct
  source 1..203: mol_type = other DNA
ggcgcgccagtcctgttttttttcctgcgcgccgtcgcagggtctctccccgagcgaggggatcgcccctgaagcctagagttacccgggccccgcagtagggcgccctgtagtcttccacgggcgagtgggcttgtcgcgaataaccctcgctgttcttcggcggttttcagcgcggtgggctagcccgactcggaccgatg

SEQ ID NO: 9425 - DNA, 203 bp, synthetic construct
  source 1..203: mol_type = other DNA
ggcgcgccagtccttcagccgcatcgacgagcggctgtgagaggccgtggattccatggccggtcacactaaatcggaggatattcagttctgggggaccggcctcgaggcgccacttcctctgtcctccctatttgctctccccccagttggcggaggtgcggcatggtgtggggcggagagctcatcgactcggaccgatg

SEQ ID NO: 9426 - DNA, 203 bp, synthetic construct
  source 1..203: mol_type = other DNA
ggcgcgccagtcctcgggtaaggttgtcttcaatcattatctgaggggcgggccaccattaatcctgcgacctgataggaaacgtttacaagcgcccctctagatcactacagagccgatgccacggcgaacgagacaccacgaaacaatcaggtaagggcaccatcctgccggacacctccgcgccgcgactcggaccgatg

SEQ ID NO: 9427 - DNA, 203 bp, synthetic construct
  source 1..203: mol_type = other DNA
ggcgcgccagtcctcatgcccggcaggtggaccgggcggaacgcccggggcggccgacaagaggtgggcgacctagaccagagacgagcgggcctccgtcagccggacccgtcacccaaacacgcacgtaaggatcgggacgggcgaccgacaaacacatgcggcagggcggcccacagcgcgggcaccgactcggaccgatg

SEQ ID NO: 9428 - DNA, 203 bp, synthetic construct
  source 1..203: mol_type = other DNA
ggcgcgccagtcctcgtgctataatgcacctaaattctgccctcatgaggggtacctaaattacccaccccccgtgcgccggcgaactatgggcttactccctgtcgcctgacccgcccctgtttaccgtgtggctagaacgcagccggccgtacacgtggcagtgccatggacaagaggctgtggagcgactcggaccgatg

SEQ ID NO: 9429 - DNA, 203 bp, synthetic construct
  source 1..203: mol_type = other DNA
ggcgcgccagtcctttgcacctacccgaccaggtacttgttcagtattcccacctcgcccccttgtgtctttaccggctccgccatcaaccttgagcgttcctagttagcctcttatgcagtgtctcggccttggcggcaaagctcctctgcttcgctattaccctccttctgtcaaacagccttgtacgactcggaccgatg

SEQ ID NO: 9430 - DNA, 203 bp, synthetic construct
  source 1..203: mol_type = other DNA
ggcgcgccagtccttatattgtgtgttcacctctgttactctttccgtctcgctccacttggcatccctccccttcggtacccggccctctcctctccgataccagtcttcctgtataagtccctgccttctgttcctttccgtctgcaccctttcgccgccacaccgcccccggctataagcgtttacgactcggaccgatg

SEQ ID NO: 9431 - DNA, 203 bp, synthetic construct
  source 1..203: mol_type = other DNA
ggcgcgccagtcctctaaagtaaaatacagctacccgctcgcttttaggcaacgattccggcgcctgcgaagcaccagacgatctagagcccatcgactttccaaagttctacccacccccctcaagcgtcgaaacgaacctcatcagccggcgagttattaggccaacaccaagaacgctgctatcccgactcggaccgatg

SEQ ID NO: 9432 - DNA, 203 bp, synthetic construct
  source 1..203: mol_type = other DNA
ggcgcgccagtcctgctccacgtacagtgctccaccgccgactatgaaaggagaatcgcacgactagggatgggggcccttaggttcggcttccgcggagcctcccaacatcgcgatatcaaatcggatggcgtaggcgccagaagacaacgacttctgtactctacagaaagaaagccgactccctccgactcggaccgatg

SEQ ID NO: 9433 - DNA, 203 bp, synthetic construct
  source 1..203: mol_type = other DNA
ggcgcgccagtcctccctggataagtttcaccagagtcacgacgcgactgatgcgggggtgcagcctcagaatgtgagacataacacccgtttcccgactcaccaaaccacctatatgtcgcgatggaagatgtgggcgaattccaatgattgggcagtgccccaggcccaggcgtatccccagaaatcgactcggaccgatg

SEQ ID NO: 9434 - DNA, 203 bp, synthetic construct
  source 1..203: mol_type = other DNA
ggcgcgccagtcctctcgactgtacactaacttcgtaccttatattaagactttatcacatggttgtagtattactttttttgttgtgaatagacaatgtcattctctttaatttggtttaaactgaagtaaattcacagtgcttaagtgttgtgcatgtaacagcgtctataattttagtcagctctcgactcggaccgatg

SEQ ID NO: 9435 - DNA, 203 bp, synthetic construct
  source 1..203: mol_type = other DNA
ggcgcgccagtccttctttaatagtttaactgtcgagcgtgtaatctcgaagtccagggtgtatacgttagttctgctatattttgaatatatttaattatgtggtctaaaggggactcatccactgtaggtctaaggtagctaggattgttatgtaatttagcattttgagcgttattcacctggaccgactcggaccgatg

SEQ ID NO: 9436 - DNA, 203 bp, synthetic construct
  source 1..203: mol_type = other DNA
ggcgcgccagtccttacatggggcggcgctcgctagcagccagcttgggcactgccgcacgcggcatctgccttcacacgagagtagtcatgcaggggtaaagtcccccgggcagtcccctctccggtggtccgagtagctagcagtaatctgttgacgcccgatccggagtctcagctgggcaccaccgactcggaccgatg

SEQ ID NO: 9437 - DNA, 203 bp, synthetic construct
  source 1..203: mol_type = other DNA
ggcgcgccagtcctgctatcgccgatggacatggtatcatatggctcggctagtgcccccgatttgacgggcagtcgcggctgcgcccacgcgcaaccagcgtcgccttgcgtcccgcagggccctgccctgccctcggcgtacgcgcttctgcttccagttcgcgcgagtgccatacccactagcctcgactcggaccgatg

SEQ ID NO: 9438 - DNA, 203 bp, synthetic construct
  source 1..203: mol_type = other DNA
ggcgcgccagtccttttatcggtctggagggcgtgatacggcggccgtggtccttagttctcctcccaggctagaacccaggcgcacagaggccgcggccgcgaccacagatgccggtctggccctctccggagcacgcagcgcgggtacggtgacccgtccgttccccatgggcatgtgcacagtttcgactcggaccgatg

SEQ ID NO: 9439 - DNA, 203 bp, synthetic construct
  source 1..203: mol_type = other DNA
ggcgcgccagtcctcttccctcccgtagcacgtgcgccccgcagcgctccgttgctcgaccccaaatcccctgtttgtgttgccgcgccgcgccaggggcgccgggttgcgcggcgtcctccttgcctctcagcgccccctggcctggggtccgcgccctcccccctccgtgacggaccaactgctctcgactcggaccgatg

SEQ ID NO: 9440 - DNA, 203 bp, synthetic construct
  source 1..203: mol_type = other DNA
ggcgcgccagtcctgtgatgccttagatcgcttcgccagcgtaatcttcgttgcccgccacctgtgtccgtgtctctaccttcagttccccgttgagtcttccattcctacggacgtaggatcccggccccccgttccggtcccgtctcgacatcttcctgccgacttgaggtctacttaagtcgctgcgactcggaccgatg

SEQ ID NO: 9441 - DNA, 203 bp, synthetic construct
  source 1..203: mol_type = other DNA
ggcgcgccagtcctctccctagtcccgtgtcgtcaccccctagacgggaaggctccgtcacgccgaccagcgatgggctgcggcgtagttcgacgcctccgggggccccatcctagagacgccgatgattacaaccgttccctcgctgtttcactcccgggatctcgggtgtgtccagacactctatccgactcggaccgatg

SEQ ID NO: 9442 - DNA, 203 bp, synthetic construct
  source 1..203: mol_type = other DNA
ggcgcgccagtcctaatggatcggaacgccccgggcctagtgccgcgcacagccatccgctcgtcagcccaccgcagcacaccacatcacggtctccggcagttgccccgtttcggtcccgtcctgttggacctctaacggtgcttcggagacatcctgccctcggtaccacgttgaacctcggtcctcgactcggaccgatg

SEQ ID NO: 9443 - DNA, 203 bp, synthetic construct
  source 1..203: mol_type = other DNA
ggcgcgccagtcctcctgccccgcacgccgcgctccgtaatctcttcgcccccaacgtcgggccccccttagtcggccccgcctagtattcgcgaggaagtgccacagacgcacgcgcagccgccaccacactcggctcgcaatcgccccctcgcgcctcggacgccccgcgcgatggcatgacgcggcgactcggaccgatg

SEQ ID NO: 9444 - DNA, 203 bp, synthetic construct
  source 1..203: mol_type = other DNA
ggcgcgccagtcctcccacccggtcaccctggtcggcctcggccaccctcccctcggtgtgctgtctggtcccaccccagcccgccccaccccttactgcccagcggaggctcaaacgagcgcctgatcggacccccccaccacggaccaccctgtggagcgaaccggatccgcgcccgcgccgcacacgactcggaccgatg

SEQ ID NO: 9445 - DNA, 203 bp, synthetic construct
  source 1..203: mol_type = other DNA
ggcgcgccagtcctttagcgtttttcgatcggctaataccaatcatacgtcctacgtgtaccccggtgcaccctcccccgtaccaatatgcgatagctcatagggtactgacacgtcactacatctgcgggatacgccttcctggcaaagagacgggtcggatcccgcggtttccgcgagctcctcttcgactcggaccgatg

SEQ ID NO: 9446 - DNA, 203 bp, synthetic construct
  source 1..203: mol_type = other DNA
ggcgcgccagtcctgccgtcccgtcgggcggcgaggctcgctctttgcgctgcgccgcttgactaccaccaggttcggaggggggctcggttccgggccgtgacccggtcgaccatcggtgccgcggcggtgcgctacctaaccgactgcccggcaacccacccctgcgctgcgcagcgctagcggcgcgactcggaccgatg

SEQ ID NO: 9447 - DNA, 203 bp, synthetic construct
  source 1..203: mol_type = other DNA
ggcgcgccagtcctccacccgggcgctaggaccatgccggggtcgagacgccggctctgctaaccgcaacgccggcggggagcccgagggggcccactgcacgagccgcgcctcgggagcgaccgtgccggactcttccaccaggcgtgcctccgtgaatcgtccgccctccggcggcagccgtccctcgactcggaccgatg

SEQ ID NO: 9448 - DNA, 203 bp, synthetic construct
  source 1..203: mol_type = other DNA
ggcgcgccagtcctatccacttgatgcttccgccggtcccggtgcgctaactttccacgttcccccagaagcgagtgacgtttccatttgcggtttaaaaagcatagcattactcttactatacgcaacgatggctcatgccctcgctctctccttagcaccgggttgccgtccctctccccagtcatcgactcggaccgatg

SEQ ID NO: 9449 - DNA, 203 bp, synthetic construct
  source 1..203: mol_type = other DNA
ggcgcgccagtcctaaggtagttcccactgcgacttaactcatgtcaagtcagtccacgcttccgccgcagggcgatctatgaatgagactggccccttaggtcgtagacaaccagtttatgcatcttacagtagtaatcggaggtgtcgcgttggggttgactacagcgtattctccattaatcggacgactcggaccgatg

SEQ ID NO: 9450 - DNA, 203 bp, synthetic construct
  source 1..203: mol_type = other DNA
ggcgcgccagtcctatccttggggacgcatcgcgcaagattttgcgaggctctaaccgcgaagagacgggaaataaaaacccgttgtagggatggaatggcctcctttctctgtacgtccttagaaaacatctagttgcgtcttgtggctgtcttactgaacgaccatcgtccccaactcccatactgcgactcggaccgatg

SEQ ID NO: 9451 - DNA, 203 bp, synthetic construct
  source 1..203: mol_type = other DNA
ggcgcgccagtcctagatacatcaatattatctattagtatacatttcggtcgatgtgtttatactacgagtatctaatcaatttttcgttggttcagaaatcaagtgcctgtgaagtgcttcttcacaaaatacttgaacgttgtttactataaagccggctaatacactacattcagtcatttgcccgactcggaccgatg

SEQ ID NO: 9452 - DNA, 203 bp, synthetic construct
  source 1..203: mol_type = other DNA
ggcgcgccagtcctccgtggcctcatgtctaccacaaccttgcaggattcccgcagcgctaagcgctcgtgccccgagcgatccccactagacggcttcggagccttcccgctgtgtctagacgatctagtgcatcgtagagttggttcgaaccgacgaaactgctcgccgattgcgccatcgttgcgcgactcggaccgatg

SEQ ID NO: 9453 - DNA, 203 bp, synthetic construct
  source 1..203: mol_type = other DNA
ggcgcgccagtcctatgaaaatatctgtacttgtactgaaacgccagtggtgcttgctttcctagtaacaatggaagatgaatttgacgtggaaaattgaataaagtgcttgcaataatatgaggtagacctaactaaattttgatattttatcatacattctacaaaagaacatgtgatgtagctgccgactcggaccgatg

SEQ ID NO: 9454 - DNA, 203 bp, synthetic construct
  source 1..203: mol_type = other DNA
ggcgcgccagtcctttttgataggtttttagatgccgataagttcatgcctaggagtccactcatagaatatctctgatattcttatcggaatgtatattgctgttccgtaccgggttttgaggctcttagattttgtacaattttaactctaattgctgaaactaaggcatgtatatatcgactgggcgactcggaccgatg

SEQ ID NO: 9455 - DNA, 203 bp, synthetic construct
  source 1..203: mol_type = other DNA
ggcgcgccagtccttcgagatcgataacacattgcaagcaccgaagcgtcagcttgaaatgggacctcctgcagccttggactgtccgcacccgaggtagcgggtcaatttcttccggcgcattttcatatttcgaagacacacactagttggaaagtatttgggtcattccagggcttgtgggagaacgactcggaccgatg

SEQ ID NO: 9456 - DNA, 203 bp, synthetic construct
  source 1..203: mol_type = other DNA
ggcgcgccagtcctacggtacctgagagcatacgccgctaatttgaagtacgcggagatatgcgataactaagtaacattgtcagcgtgacgccttgtgggaacccaccctgtctgagaaccgggttatgcgcgataatcactacgacccgattggtgtacaggatccacagtgaaacattcaagcgacgactcggaccgatg

SEQ ID NO: 9457 - DNA, 203 bp, synthetic construct
  source 1..203: mol_type = other DNA
ggcgcgccagtcctccggtcgggcctagggctggtaggtcttcgtcggtgggctgtccctgctcgagtgtcgggcgggctgcttcggaaccttgctaacccgtggactttttatttggtcctccgtcgtgctacctcgagcaaggatagaaagcgacgttgactttttacttctaattcacctccggccgactcggaccgatg

SEQ ID NO: 9458 - DNA, 203 bp, synthetic construct
  source 1..203: mol_type = other DNA
ggcgcgccagtcctaccgggcgagtgacgtagtatcagttctcgtgagggcaagggttggcgcgtgggtccgggtcccgtcgcccgaaccgtctgaaattactagtgttccctgataccgtgttgcacgccggttggacactccttcctattcttacctcaggccatccgatgtcaggttaacacactcgactcggaccgatg

SEQ ID NO: 9459 - DNA, 203 bp, synthetic construct
  source 1..203: mol_type = other DNA
ggcgcgccagtcctcatgcggtaagcctataagatacgcccaaatcgaagcgcacggggtctggcactagtcacgggtcgatgtgcgcgtgccctattcggtagcgctactcccccaacctgagttgtggtttcgcagtactcgtggcatgggaaccaccttggcaagggaaggccacgaagataagacgactcggaccgatg

SEQ ID NO: 9460 - DNA, 203 bp, synthetic construct
  source 1..203: mol_type = other DNA
ggcgcgccagtcctttgtcgaagactatgcaagactatcttgactgtcgtgagtttatacgaacccactttattgggcatgcaatccatactagtttgatgtggtaaccgctactgatgcggtgttctaaaccgccttatgtagatcttagtactatcccacacagatacaaggttttgtgctgtcgacgactcggaccgatg

SEQ ID NO: 9461 - DNA, 203 bp, synthetic construct
  source 1..203: mol_type = other DNA
ggcgcgccagtcctgcaccgctttacaaagttcgtacatccacataccgtttttgacaggagtgcggactttgacgccaataagcgcgtttgtgacctgaggtctgcctggctggtgtcgtagtgtagactgtttacccataagaatgatgtgttcaagacattttcccgtaggttggcgcgaattcgcgactcggaccgatg

SEQ ID NO: 9462 - DNA, 203 bp, synthetic construct
  source 1..203: mol_type = other DNA
ggcgcgccagtcctgacttctccctctctcggagatgatagtcggggtcccatgtgataataattaccctgtcttaattttcaggctctgtccaactcgagcctggatacggatgggatggccctaggagaagcgttctgtacataggtcacgccgcagataggtccgttcaggctggtcccgttcatcgactcggaccgatg

SEQ ID NO: 9463 - DNA, 203 bp, synthetic construct
  source 1..203: mol_type = other DNA
ggcgcgccagtcctctgaacaatacttttgttgattcggtttaaaacggatgtctgtcgtagcgtaaaacccgcgatacactgcatttaagataggtgtagaagtggctagtaatttaaagacatgtaaatggtcttccgtgctatcctattagacagctcgatgcactgaaccaactataaacggtgcgactcggaccgatg

SEQ ID NO: 9464 - DNA, 203 bp, synthetic construct
  source 1..203: mol_type = other DNA
ggcgcgccagtcctaagtagctaaacagtttctaaaaatctcggccttaagttaagagaagccgtaaacgaagtgctgtaatactaattcggacgctcatgggcggcagtttatacgtgtatgtagaagagtaggatcaccattttgatgttaatctctctcctccaaccatagcgctccgatgacaccgactcggaccgatg

SEQ ID NO: 9465 - DNA, 203 bp, synthetic construct
  source 1..203: mol_type = other DNA
ggcgcgccagtccttaagcttttttcaaattactcgttactattgagttgttcattatgtttaacttcacgaaacgggttatgcataagatactttggactgttcaggtgtaagaacaaagtaccaacgagatttaggtgagccctcagttgcctagtcgtggattctttccaataggaataaaccctcgactcggaccgatg

SEQ ID NO: 9466 - DNA, 203 bp, synthetic construct
  source 1..203: mol_type = other DNA
ggcgcgccagtcctaacattacatatacttaggattaccttgctgggtttccttggtaatagagttatatattttggcattaaagtatcctctatgtggatgatcctgacgcgtgattcttccctcgattatttgaatctagataaaaggagggaccataattttttgaatgattaattgctaccgctcgactcggaccgatg

SEQ ID NO: 9467 - DNA, 203 bp, synthetic construct
  source 1..203: mol_type = other DNA
ggcgcgccagtcctaaattgcagtagcatcattcatcgttccgccaaaattagatacatcataccagaatcacctatgctacggtagacattgaatagacagaaggaacgacgacacaggaaagatctcctccaacccccggaacatcataaagacgtacagtagcaatacttgatcgcaccgagtaacgactcggaccgatg

SEQ ID NO: 9468 - DNA, 203 bp, synthetic construct
  source 1..203: mol_type = other DNA
ggcgcgccagtcctacacgagttcattaaagtacctaccaatactggaatctccgccacgattttggctttggtacggtctgttagtaaaaatcgaagtattggtgcggctagtactattgctgcatctaccgatacaagtatagtagtcgcggaaatgagagggggcccagcgatggtaactattttcgactcggaccgatg

SEQ ID NO: 9469 - DNA, 203 bp, synthetic construct
  source 1..203: mol_type = other DNA
ggcgcgccagtcctcatcgagatttgctgtcgtttataatcgaaatgggcatgagataaggacaaagagcataccgcggcccgccgattcgcggattaagagtgaatgcggaaccaacaagcgtttacgaaatgactgatcatgtagttgccttgcatccggtctttacgtacttttagaaaattgtccgactcggaccgatg

SEQ ID NO: 9470 - DNA, 203 bp, synthetic construct
  source 1..203: mol_type = other DNA
ggcgcgccagtcctttcttactctttagtgaaccgactaataaagtttgaaggtgcgtgctaagataggtaagagactctggtcgagagtttcatgtcgtgcttttggctttggggagtgatgtaggggtttcacttactcttaaccgtgagggttactttcttccctggaagtctgaatataatttacgactcggaccgatg

SEQ ID NO: 9471 - DNA, 203 bp, synthetic construct
  source 1..203: mol_type = other DNA
ggcgcgccagtccttaagagggtccgcgttggaaagactcgtgggtcggaatggctttgcaccggtgtcgttgttgccggttttaggcagtaaattcaggcgtgcctacgtaccttagttgctccggctagcctatattgaatttggtgcccatactgacattcctaacactatatgatgttgggaatcgactcggaccgatg

SEQ ID NO: 9472 - DNA, 203 bp, synthetic construct
  source 1..203: mol_type = other DNA
ggcgcgccagtcctctggacctagcaagggattctgtaacactcgtggggatcactacgcgggtttctggcgaatgtttggaccggccagggtgatcacatggaatcacatgtatactgtatgtgggccccgtaagctgtcgtgtgtcctgaccgtgctcttcacaatcttttaagtttgtgtcatggcgactcggaccgatg

SEQ ID NO: 9473 - DNA, 203 bp, synthetic construct
  source 1..203: mol_type = other DNA
ggcgcgccagtcctgccatatgctcaaacgtctcgggacgccatatacgagagaccatggattgggtggcccactatcacctggagacagtcggggctgggttgtaagccatggaaggacagagacagtgacgttatttggagtccataaacacgcgtcttagcgcagtgggcgcgcacgtcataagtcgactcggaccgatg

SEQ ID NO: 9474 - DNA, 203 bp, synthetic construct
  source 1..203: mol_type = other DNA
ggcgcgccagtcctttcaatcaggtgccgcatctacgcaggctgcatcgcggtccaagcgcgcagcagggatccgtcccgtgatgctagggcgtcaagaaggtagcgcgggaaccagatcatcaggaatgtctccgagaggaggatcggggtaactcgggtagcactatgtaaaacgaatgccttcgccgactcggaccgatg

SEQ ID NO: 9475 - DNA, 203 bp, synthetic construct
  source 1..203: mol_type = other DNA
ggcgcgccagtcctctgtcgcggttttcgtagatcaccagcaatgtctccgagggaaagtgtggtggtatacgtgctcttattctcaagtacgcgatactgggtgatttcactttagagcgatgcctcagaaaaatggtactggccaaagagtggggctcattacgccagcggattacaagttgctgccgactcggaccgatg

SEQ ID NO: 9476 - DNA, 203 bp, synthetic construct
  source 1..203: mol_type = other DNA
ggcgcgccagtccttgtgttgaggagctctgtcgtacgccatgtaagtagctcaacccccagctctgggggcgacccctaatgacaggattacgaggctcacggctagacaacaggtaacggtggatgcattctctatcgtgtgacgttggggtcgtcctgtgtggcctcacgtgagcccactagatgcgactcggaccgatg

SEQ ID NO: 9477 - DNA, 203 bp, synthetic construct
  source 1..203: mol_type = other DNA
ggcgcgccagtccttgtccatctctggtctaaaggtcgtgcccgtatgccggaaaagttcggtgaggttgtacttctactctgaagagaaccgcagcgcgcccgcatggcgagtgggggaccgtatatatacaagatttagaccagccaaggaaaatagacttctgtatgacacggttgctctcccgtcgactcggaccgatg

SEQ ID NO: 9478 - DNA, 203 bp, synthetic construct
  source 1..203: mol_type = other DNA
ggcgcgccagtcctgccggaatatagcacattgggaaggcatagcgtctgccgtgtatctagatgatcaagagggctactgctacatagggtgcctgtccaagccctgcggactagccgcacacctcgtccctactcgaaatcttttagaatcgcgaatcgatggtacctgtgcgaggcatacgggttcgactcggaccgatg

SEQ ID NO: 9479 - DNA, 203 bp, synthetic construct
  source 1..203: mol_type = other DNA
ggcgcgccagtcctcgtcatgtgcgttggccggagggcttactacccttcacgttagttctagcgaaatcctgaatgtacctttcttgccactccccgcttcacactgagtgttactgtcgaattgcttggccacttgtctcttaagcctgtcgctactatgtcttcctcaaagtgccaggtaagtttcgactcggaccgatg

SEQ ID NO: 9480 - DNA, 203 bp, synthetic construct
  source 1..203: mol_type = other DNA
ggcgcgccagtcctccgggagtaagcataatacctgtccaactgagatgatgcaaactaacagactcaaacaagtcaggtcaacaataaaaattaaggtaaggagcgaccgggatgcagacgggtgccttggtaaagggaatacgaatccgcagctaccggctcgaagtctccaattgacccacgcaacgactcggaccgatg

SEQ ID NO: 9481 - DNA, 203 bp, synthetic construct
  source 1..203: mol_type = other DNA
ggcgcgccagtcctctgtgaaggcgtattcaacaaggggctgaaggatgcccagaaggtaccccattgtatgggatctgatctggggcctcggtgcacatgctttacatgtgtttagtcgaggttaaaaaacgtctaggccccccgaaccacggggacgtggttttcctttgaaaaacacgatgataacgactcggaccgatg

SEQ ID NO: 9482 - DNA, 203 bp, synthetic construct
  source 1..203: mol_type = other DNA
ggcgcgccagtccttatcggatgcgtattcaacaaggggctgaaggatgcccagaaggtaccccattgtatgggatctgatctggggcctcggtgcacatgctttacatgtgtttagtcgaggttaaaaaacgtctaggccccccgaaccacggggacgtggttttcctttgaaaaacacgatgataacgactcggaccgatg

SEQ ID NO: 9483 - DNA, 203 bp, synthetic construct
  source 1..203: mol_type = other DNA
ggcgcgccagtcctgcagtcgagcgtattcaacaaggggctgaaggatgcccagaaggtaccccattgtatgggatctgatctggggcctcggtgcacatgctttacatgtgtttagtcgaggttaaaaaacgtctaggccccccgaaccacggggacgtggttttcctttgaaaaacacgatgataacgactcggaccgatg

SEQ ID NO: 9484 - DNA, 203 bp, synthetic construct
  source 1..203: mol_type = other DNA
ggcgcgccagtcctattcacccgcgtattcaacaaggggctgaaggatgcccagaaggtaccccattgtatgggatctgatctggggcctcggtgcacatgctttacatgtgtttagtcgaggttaaaaaacgtctaggccccccgaaccacggggacgtggttttcctttgaaaaacacgatgataacgactcggaccgatg

SEQ ID NO: 9485 - DNA, 203 bp, synthetic construct
  source 1..203: mol_type = other DNA
ggcgcgccagtccttgaggtgggcgtattcaacaaggggctgaaggatgcccagaaggtaccccattgtatgggatctgatctggggcctcggtgcacatgctttacatgtgtttagtcgaggttaaaaaacgtctaggccccccgaaccacggggacgtggttttcctttgaaaaacacgatgataacgactcggaccgatg

SEQ ID NO: 9486 - DNA, 203 bp, synthetic construct
  source 1..203: mol_type = other DNA
ggcgcgccagtcctaacttgtcgcgtattcaacaaggggctgaaggatgcccagaaggtaccccattgtatgggatctgatctggggcctcggtgcacatgctttacatgtgtttagtcgaggttaaaaaacgtctaggccccccgaaccacggggacgtggttttcctttgaaaaacacgatgataacgactcggaccgatg

SEQ ID NO: 9487 - DNA, 203 bp, synthetic construct
  source 1..203: mol_type = other DNA
ggcgcgccagtcctcttccactgcgtattcaacaaggggctgaaggatgcccagaaggtaccccattgtatgggatctgatctggggcctcggtgcacatgctttacatgtgtttagtcgaggttaaaaaacgtctaggccccccgaaccacggggacgtggttttcctttgaaaaacacgatgataacgactcggaccgatg

SEQ ID NO: 9488 - DNA, 203 bp, synthetic construct
  source 1..203: mol_type = other DNA
ggcgcgccagtcctgtcctacagcgtattcaacaaggggctgaaggatgcccagaaggtaccccattgtatgggatctgatctggggcctcggtgcacatgctttacatgtgtttagtcgaggttaaaaaacgtctaggccccccgaaccacggggacgtggttttcctttgaaaaacacgatgataacgactcggaccgatg

SEQ ID NO: 9489 - DNA, 203 bp, synthetic construct
  source 1..203: mol_type = other DNA
ggcgcgccagtcctaatttcatgcgtattcaacaaggggctgaaggatgcccagaaggtaccccattgtatgggatctgatctggggcctcggtgcacatgctttacatgtgtttagtcgaggttaaaaaacgtctaggccccccgaaccacggggacgtggttttcctttgaaaaacacgatgataacgactcggaccgatg

SEQ ID NO: 9490 - DNA, 203 bp, synthetic construct
  source 1..203: mol_type = other DNA
ggcgcgccagtccttcgttatatttagaattagaatgtttcttagcggtcgtgtagttatttttatgtcataagtggataatttgttagctcctataacaaaagtctgttgcttgtgtttcacattttggatttcctaatataatgttctctttttagaaaaggtggacaagtcctattttcaagagacgactcggaccgatg

SEQ ID NO: 9491 - DNA, 203 bp, synthetic construct
  source 1..203: mol_type = other DNA
ggcgcgccagtcctgcagtcgatttagaattagaatgtttcttagcggtcgtgtagttatttttatgtcataagtggataatttgttagctcctataacaaaagtctgttgcttgtgtttcacattttggatttcctaatataatgttctctttttagaaaaggtggacaagtcctattttcaagagacgactcggaccgatg

SEQ ID NO: 9492 - DNA, 203 bp, synthetic construct
  source 1..203: mol_type = other DNA
ggcgcgccagtcctaacttgtcatctctagcagtggcgcccgaacagggacctgaaagcgaaagggaaaccagaggagctctctcgacgcaggactcggcttgctgaagcgcgcacggcaagaggcgaggggcggcgactggtgagtacgccaaaaattttgactagcggaggctagaaggagagagacgactcggaccgatg

SEQ ID NO: 9493 - DNA, 203 bp, synthetic construct
  source 1..203: mol_type = other DNA
ggcgcgccagtcctctgtgaagcagagccctgcacccctaattcccggtggaaaactcctgttgccgtttccctccaccggcctggagtctcccagtcttgtcccggcagtgccgccctccccactaagacctaggcgcaaaggcttggctcatggttgacagctcagagagagaaagatctgagggacgactcggaccgatg

SEQ ID NO: 9494 - DNA, 203 bp, synthetic construct
  source 1..203: mol_type = other DNA
ggcgcgccagtccttcgttatacagagccctgcacccctaattcccggtggaaaactcctgttgccgtttccctccaccggcctggagtctcccagtcttgtcccggcagtgccgccctccccactaagacctaggcgcaaaggcttggctcatggttgacagctcagagagagaaagatctgagggacgactcggaccgatg

SEQ ID NO: 9495 - DNA, 203 bp, synthetic construct
  source 1..203: mol_type = other DNA
ggcgcgccagtcctagtgctgccagagccctgcacccctaattcccggtggaaaactcctgttgccgtttccctccaccggcctggagtctcccagtcttgtcccggcagtgccgccctccccactaagacctaggcgcaaaggcttggctcatggttgacagctcagagagagaaagatctgagggacgactcggaccgatg

SEQ ID NO: 9496 - DNA, 203 bp, synthetic construct
  source 1..203: mol_type = other DNA
ggcgcgccagtccttgaggtggcagagccctgcacccctaattcccggtggaaaactcctgttgccgtttccctccaccggcctggagtctcccagtcttgtcccggcagtgccgccctccccactaagacctaggcgcaaaggcttggctcatggttgacagctcagagagagaaagatctgagggacgactcggaccgatg

SEQ ID NO: 9497 - DNA, 203 bp, synthetic construct
  source 1..203: mol_type = other DNA
ggcgcgccagtcctaggtattgcagagccctgcacccctaattcccggtggaaaactcctgttgccgtttccctccaccggcctggagtctcccagtcttgtcccggcagtgccgccctccccactaagacctaggcgcaaaggcttggctcatggttgacagctcagagagagaaagatctgagggacgactcggaccgatg

SEQ ID NO: 9498 - DNA, 203 bp, synthetic construct
  source 1..203: mol_type = other DNA
ggcgcgccagtcctgtcctacacagagccctgcacccctaattcccggtggaaaactcctgttgccgtttccctccaccggcctggagtctcccagtcttgtcccggcagtgccgccctccccactaagacctaggcgcaaaggcttggctcatggttgacagctcagagagagaaagatctgagggacgactcggaccgatg

SEQ ID NO: 9499 - DNA, 203 bp, synthetic construct
  source 1..203: mol_type = other DNA
ggcgcgccagtcctgaaaccctcagagccctgcacccctaattcccggtggaaaactcctgttgccgtttccctccaccggcctggagtctcccagtcttgtcccggcagtgccgccctccccactaagacctaggcgcaaaggcttggctcatggttgacagctcagagagagaaagatctgagggacgactcggaccgatg

SEQ ID NO: 9500 - DNA, 203 bp, synthetic construct
  source 1..203: mol_type = other DNA
ggcgcgccagtcctctgtgaagggtgtgcaaatcacgcctggcagcccctgcccacagtacccgaagatggcaggccttgttcccttcacctaaattcataaacctgggtgtagtggcttctgatgctgatttgtttctcttttcagtaagtgtggacctttgtgtaccagagagaacatcatggtggcgactcggaccgatg

SEQ ID NO: 9501 - DNA, 203 bp, synthetic construct
  source 1..203: mol_type = other DNA
ggcgcgccagtcctgcagtcgaggtgtgcaaatcacgcctggcagcccctgcccacagtacccgaagatggcaggccttgttcccttcacctaaattcataaacctgggtgtagtggcttctgatgctgatttgtttctcttttcagtaagtgtggacctttgtgtaccagagagaacatcatggtggcgactcggaccgatg

SEQ ID NO: 9502 - DNA, 203 bp, synthetic construct
  source 1..203: mol_type = other DNA
ggcgcgccagtcctcttccactggtgtgcaaatcacgcctggcagcccctgcccacagtacccgaagatggcaggccttgttcccttcacctaaattcataaacctgggtgtagtggcttctgatgctgatttgtttctcttttcagtaagtgtggacctttgtgtaccagagagaacatcatggtggcgactcggaccgatg

SEQ ID NO: 9503 - DNA, 203 bp, synthetic construct
  source 1..203: mol_type = other DNA
ggcgcgccagtcctttgcgctcggtgtgcaaatcacgcctggcagcccctgcccacagtacccgaagatggcaggccttgttcccttcacctaaattcataaacctgggtgtagtggcttctgatgctgatttgtttctcttttcagtaagtgtggacctttgtgtaccagagagaacatcatggtggcgactcggaccgatg

SEQ ID NO: 9504 - DNA, 203 bp, synthetic construct
  source 1..203: mol_type = other DNA
ggcgcgccagtcctgaaaccctggtgtgcaaatcacgcctggcagcccctgcccacagtacccgaagatggcaggccttgttcccttcacctaaattcataaacctgggtgtagtggcttctgatgctgatttgtttctcttttcagtaagtgtggacctttgtgtaccagagagaacatcatggtggcgactcggaccgatg

SEQ ID NO: 9505 - DNA, 203 bp, synthetic construct
  source 1..203: mol_type = other DNA
ggcgcgccagtcctctctctcggcggctggagcggacccagcgagtgagggcgcacagccgggacgccgaggcggcgggcgggagacccgcaccagcgcagccggccctcggcgggacgtgacgcagcgcccggggcgcgggtgtatttgatatagtgtttgcaacaaattcgacccaggtgatcaaacgactcggaccgatg

SEQ ID NO: 9506 - DNA, 203 bp, synthetic construct
  source 1..203: mol_type = other DNA
ggcgcgccagtcctagtgctgcaccaggggcgccgccgccggcgctcgcaggccgcggatgaagaagaaaacccggcgccgctcgacccggagcgaggagttgacccggagcgaggagttgaccctgagtgaggaagcgacctggagtgaagaggcgacccagagtgaggaggcgacccagggcgaagcgactcggaccgatg

SEQ ID NO: 9507 - DNA, 203 bp, synthetic construct
  source 1..203: mol_type = other DNA
ggcgcgccagtcctctgtgaagccagaatcaagtgttccgcgtgattgaagacaccccctcgtccaagaatgcaaagcacatccaataaaatagctggattataactcctcttctttctctgggggccgtggggtgggagctggggcgagaggtgccgttggcccccgttgcttttcctctgggaaggcgactcggaccgatg

SEQ ID NO: 9508 - DNA, 203 bp, synthetic construct
  source 1..203: mol_type = other DNA
ggcgcgccagtcctaacttgtcccagaatcaagtgttccgcgtgattgaagacaccccctcgtccaagaatgcaaagcacatccaataaaatagctggattataactcctcttctttctctgggggccgtggggtgggagctggggcgagaggtgccgttggcccccgttgcttttcctctgggaaggcgactcggaccgatg

SEQ ID NO: 9509 - DNA, 203 bp, synthetic construct
  source 1..203: mol_type = other DNA
ggcgcgccagtcctaggtattgccagaatcaagtgttccgcgtgattgaagacaccccctcgtccaagaatgcaaagcacatccaataaaatagctggattataactcctcttctttctctgggggccgtggggtgggagctggggcgagaggtgccgttggcccccgttgcttttcctctgggaaggcgactcggaccgatg

SEQ ID NO: 9510 - DNA, 203 bp, synthetic construct
  source 1..203: mol_type = other DNA
ggcgcgccagtccttatcggatgtgtgagagggaagcgccgcggcctgtatttctagacctgcccttcgcctggttcgtggcgccttgtgaccccgggcccctgccgcctgcaagtcggaaattgcgctgtgctcctgtgctacggcctgtggctggactgcctgctgctgcccaactggctggcaagcgactcggaccgatg

SEQ ID NO: 9511 - DNA, 203 bp, synthetic construct
  source 1..203: mol_type = other DNA
ggcgcgccagtcctgcagtcgagtgtgagagggaagcgccgcggcctgtatttctagacctgcccttcgcctggttcgtggcgccttgtgaccccgggcccctgccgcctgcaagtcggaaattgcgctgtgctcctgtgctacggcctgtggctggactgcctgctgctgcccaactggctggcaagcgactcggaccgatg

SEQ ID NO: 9512 - DNA, 203 bp, synthetic construct
  source 1..203: mol_type = other DNA
ggcgcgccagtcctaatttcatgtgtgagagggaagcgccgcggcctgtatttctagacctgcccttcgcctggttcgtggcgccttgtgaccccgggcccctgccgcctgcaagtcggaaattgcgctgtgctcctgtgctacggcctgtggctggactgcctgctgctgcccaactggctggcaagcgactcggaccgatg

SEQ ID NO: 9513 - DNA, 203 bp, synthetic construct
  source 1..203: mol_type = other DNA
ggcgcgccagtcctgcagtcgacataagagtctatcattgatttctttttgtggtaaaaatcttagttcatgtgaagaaatttcatgtgaatgttttagctatcaaacagtactgtcacctactcatgcacaaaactgcctcccaaagacttttcccaggtccctcgtatcaaaacattaagagtatacgactcggaccgatg

SEQ ID NO: 9514 - DNA, 203 bp, synthetic construct
  source 1..203: mol_type = other DNA
ggcgcgccagtcctgcagtcgacaacacccgagcaaggacgcgactctcccgacgcggggaggctattctgcccatttggggacacttccccgccgctgccaggacccgcttctctgaaaggctctccttgcagctgcttagacgctggatttttttcgggtagtggaaaaccagcagcctcccgcgacgactcggaccgatg

SEQ ID NO: 9515 - DNA, 203 bp, synthetic construct
  source 1..203: mol_type = other DNA
ggcgcgccagtccttgaggtggcaacacccgagcaaggacgcgactctcccgacgcggggaggctattctgcccatttggggacacttccccgccgctgccaggacccgcttctctgaaaggctctccttgcagctgcttagacgctggatttttttcgggtagtggaaaaccagcagcctcccgcgacgactcggaccgatg

SEQ ID NO: 9516 - DNA, 203 bp, synthetic construct
  source 1..203: mol_type = other DNA
ggcgcgccagtcctcttccactcaacacccgagcaaggacgcgactctcccgacgcggggaggctattctgcccatttggggacacttccccgccgctgccaggacccgcttctctgaaaggctctccttgcagctgcttagacgctggatttttttcgggtagtggaaaaccagcagcctcccgcgacgactcggaccgatg

SEQ ID NO: 9517 - DNA, 203 bp, synthetic construct
  source 1..203: mol_type = other DNA
ggcgcgccagtcctaggtattgcaacacccgagcaaggacgcgactctcccgacgcggggaggctattctgcccatttggggacacttccccgccgctgccaggacccgcttctctgaaaggctctccttgcagctgcttagacgctggatttttttcgggtagtggaaaaccagcagcctcccgcgacgactcggaccgatg

SEQ ID NO: 9518 - DNA, 203 bp, synthetic construct
  source 1..203: mol_type = other DNA
ggcgcgccagtcctgtcctacacaacacccgagcaaggacgcgactctcccgacgcggggaggctattctgcccatttggggacacttccccgccgctgccaggacccgcttctctgaaaggctctccttgcagctgcttagacgctggatttttttcgggtagtggaaaaccagcagcctcccgcgacgactcggaccgatg

SEQ ID NO: 9519 - DNA, 203 bp, synthetic construct
  source 1..203: mol_type = other DNA
ggcgcgccagtcctgaaaccctcaacacccgagcaaggacgcgactctcccgacgcggggaggctattctgcccatttggggacacttccccgccgctgccaggacccgcttctctgaaaggctctccttgcagctgcttagacgctggatttttttcgggtagtggaaaaccagcagcctcccgcgacgactcggaccgatg

SEQ ID NO: 9520 - DNA, 203 bp, synthetic construct
  source 1..203: mol_type = other DNA
ggcgcgccagtcctaatttcatcaacacccgagcaaggacgcgactctcccgacgcggggaggctattctgcccatttggggacacttccccgccgctgccaggacccgcttctctgaaaggctctccttgcagctgcttagacgctggatttttttcgggtagtggaaaaccagcagcctcccgcgacgactcggaccgatg

SEQ ID NO: 9521 - DNA, 203 bp, synthetic construct
  source 1..203: mol_type = other DNA
ggcgcgccagtccttgaggtgggagcctccagagggctgtcggcgcagtagcagcgagcagcagagtccgcacgctccggcgaggggcagaagagcgcgagggagcgcggggcagcagaagcgagagccgagcgcggacccagccaggacccacagccctccccagctgcccaggaagagccccagcccgactcggaccgatg

SEQ ID NO: 9522 - DNA, 203 bp, synthetic construct
  source 1..203: mol_type = other DNA
ggcgcgccagtcctaatttcatgagcctccagagggctgtcggcgcagtagcagcgagcagcagagtccgcacgctccggcgaggggcagaagagcgcgagggagcgcggggcagcagaagcgagagccgagcgcggacccagccaggacccacagccctccccagctgcccaggaagagccccagcccgactcggaccgatg

SEQ ID NO: 9523 - DNA, 203 bp, synthetic construct
  source 1..203: mol_type = other DNA
ggcgcgccagtcctgcagtcgacctttcccctcccttccctatccccgacgaccggatcctgaggaggcagctgcggtggcagctgctgagttctcggtgaaggtatttcatttctcctgtcccctcccctccccaccccatctattaatattattcttttgaagattcttcgttgtcaagccgccaacgactcggaccgatg

SEQ ID NO: 9524 - DNA, 203 bp, synthetic construct
  source 1..203: mol_type = other DNA
ggcgcgccagtcctattcaccccctttcccctcccttccctatccccgacgaccggatcctgaggaggcagctgcggtggcagctgctgagttctcggtgaaggtatttcatttctcctgtcccctcccctccccaccccatctattaatattattcttttgaagattcttcgttgtcaagccgccaacgactcggaccgatg

SEQ ID NO: 9525 - DNA, 203 bp, synthetic construct
  source 1..203: mol_type = other DNA
ggcgcgccagtcctcttccactcctttcccctcccttccctatccccgacgaccggatcctgaggaggcagctgcggtggcagctgctgagttctcggtgaaggtatttcatttctcctgtcccctcccctccccaccccatctattaatattattcttttgaagattcttcgttgtcaagccgccaacgactcggaccgatg

SEQ ID NO: 9526 - DNA, 203 bp, synthetic construct
  source 1..203: mol_type = other DNA
ggcgcgccagtccttatcggatttctggcacctacctacctgcttcccgctggggggtggggagttggcccagagtcttaagattggggcagggtggagaggtgggctcttcctgcttcccactcatcttatagctttctttccccagatccgaattcgagatccaaaccaaggaggaaaggatatcacgactcggaccgatg

SEQ ID NO: 9527 - DNA, 203 bp, synthetic construct
  source 1..203: mol_type = other DNA
ggcgcgccagtccttgaggtggttctggcacctacctacctgcttcccgctggggggtggggagttggcccagagtcttaagattggggcagggtggagaggtgggctcttcctgcttcccactcatcttatagctttctttccccagatccgaattcgagatccaaaccaaggaggaaaggatatcacgactcggaccgatg

SEQ ID NO: 9528 - DNA, 203 bp, synthetic construct
  source 1..203: mol_type = other DNA
ggcgcgccagtcctaacttgtcttctggcacctacctacctgcttcccgctggggggtggggagttggcccagagtcttaagattggggcagggtggagaggtgggctcttcctgcttcccactcatcttatagctttctttccccagatccgaattcgagatccaaaccaaggaggaaaggatatcacgactcggaccgatg

SEQ ID NO: 9529 - DNA, 203 bp, synthetic construct
  source 1..203: mol_type = other DNA
ggcgcgccagtcctaggtattgttctggcacctacctacctgcttcccgctggggggtggggagttggcccagagtcttaagattggggcagggtggagaggtgggctcttcctgcttcccactcatcttatagctttctttccccagatccgaattcgagatccaaaccaaggaggaaaggatatcacgactcggaccgatg

SEQ ID NO: 9530 - DNA, 203 bp, synthetic construct
  source 1..203: mol_type = other DNA
ggcgcgccagtcctctgtgaagttcagtacgccacaagcgacacaaatgaacacgccttctcagccccgccagcacttctaccctagccgggcccagcccccgagcagtgcagcctcccgagtgcagagtgcagcccctgcccgccctggcccagctgcccatgtctaccctgctggatcccaagtaacgactcggaccgatg

SEQ ID NO: 9531 - DNA, 203 bp, synthetic construct
  source 1..203: mol_type = other DNA
ggcgcgccagtccttcgttatattcagtacgccacaagcgacacaaatgaacacgccttctcagccccgccagcacttctaccctagccgggcccagcccccgagcagtgcagcctcccgagtgcagagtgcagcccctgcccgccctggcccagctgcccatgtctaccctgctggatcccaagtaacgactcggaccgatg

SEQ ID NO: 9532 - DNA, 203 bp, synthetic construct
  source 1..203: mol_type = other DNA
ggcgcgccagtcctagtgctgcttcagtacgccacaagcgacacaaatgaacacgccttctcagccccgccagcacttctaccctagccgggcccagcccccgagcagtgcagcctcccgagtgcagagtgcagcccctgcccgccctggcccagctgcccatgtctaccctgctggatcccaagtaacgactcggaccgatg

SEQ ID NO: 9533 - DNA, 203 bp, synthetic construct
  source 1..203: mol_type = other DNA
ggcgcgccagtcctaacttgtcttcagtacgccacaagcgacacaaatgaacacgccttctcagccccgccagcacttctaccctagccgggcccagcccccgagcagtgcagcctcccgagtgcagagtgcagcccctgcccgccctggcccagctgcccatgtctaccctgctggatcccaagtaacgactcggaccgatg

SEQ ID NO: 9534 - DNA, 203 bp, synthetic construct
  source 1..203: mol_type = other DNA
ggcgcgccagtcctaggtattgttcagtacgccacaagcgacacaaatgaacacgccttctcagccccgccagcacttctaccctagccgggcccagcccccgagcagtgcagcctcccgagtgcagagtgcagcccctgcccgccctggcccagctgcccatgtctaccctgctggatcccaagtaacgactcggaccgatg

SEQ ID NO: 9535 - DNA, 203 bp, synthetic construct
  source 1..203: mol_type = other DNA
ggcgcgccagtcctgtcctacattcagtacgccacaagcgacacaaatgaacacgccttctcagccccgccagcacttctaccctagccgggcccagcccccgagcagtgcagcctcccgagtgcagagtgcagcccctgcccgccctggcccagctgcccatgtctaccctgctggatcccaagtaacgactcggaccgatg

SEQ ID NO: 9536 - DNA, 203 bp, synthetic construct
  source 1..203: mol_type = other DNA
ggcgcgccagtcctaggtattgccctaccccatccccttattcagcacatgaaataaacaaggggcatccaaatcttgcggcaacgcccccgggacatgcatcgtcccctggactctctcaaaccccttatccctctggacagaatgcaggtccaaccacgctggtataccctcaaacccctcagacacgactcggaccgatg

SEQ ID NO: 9537 - DNA, 203 bp, synthetic construct
  source 1..203: mol_type = other DNA
ggcgcgccagtcctgtcctacaccctaccccatccccttattcagcacatgaaataaacaaggggcatccaaatcttgcggcaacgcccccgggacatgcatcgtcccctggactctctcaaaccccttatccctctggacagaatgcaggtccaaccacgctggtataccctcaaacccctcagacacgactcggaccgatg

SEQ ID NO: 9538 - DNA, 203 bp, synthetic construct
  source 1..203: mol_type = other DNA
ggcgcgccagtcctctctctcgccctaccccatccccttattcagcacatgaaataaacaaggggcatccaaatcttgcggcaacgcccccgggacatgcatcgtcccctggactctctcaaaccccttatccctctggacagaatgcaggtccaaccacgctggtataccctcaaacccctcagacacgactcggaccgatg

SEQ ID NO: 9539 - DNA, 203 bp, synthetic construct
  source 1..203: mol_type = other DNA
ggcgcgccagtcctaatttcatccctaccccatccccttattcagcacatgaaataaacaaggggcatccaaatcttgcggcaacgcccccgggacatgcatcgtcccctggactctctcaaaccccttatccctctggacagaatgcaggtccaaccacgctggtataccctcaaacccctcagacacgactcggaccgatg

SEQ ID NO: 9540 - DNA, 203 bp, synthetic construct
  source 1..203: mol_type = other DNA
ggcgcgccagtcctctgtgaagccttctgatggtgaatgggaactcccttcctcctgcagcagcctgcctgcagctgtcctggtagaacagtgtggacattgcagaagctgtcactgccccagaaagaaagcaccccagagccaaggcaaagagtcttgaaagcgccacaagcagcagctgctgagcccgactcggaccgatg

SEQ ID NO: 9541 - DNA, 203 bp, synthetic construct
  source 1..203: mol_type = other DNA
ggcgcgccagtccttcgttataccttctgatggtgaatgggaactcccttcctcctgcagcagcctgcctgcagctgtcctggtagaacagtgtggacattgcagaagctgtcactgccccagaaagaaagcaccccagagccaaggcaaagagtcttgaaagcgccacaagcagcagctgctgagcccgactcggaccgatg

SEQ ID NO: 9542 - DNA, 203 bp, synthetic construct
  source 1..203: mol_type = other DNA
ggcgcgccagtcctgcagtcgaccttctgatggtgaatgggaactcccttcctcctgcagcagcctgcctgcagctgtcctggtagaacagtgtggacattgcagaagctgtcactgccccagaaagaaagcaccccagagccaaggcaaagagtcttgaaagcgccacaagcagcagctgctgagcccgactcggaccgatg

SEQ ID NO: 9543 - DNA, 203 bp, synthetic construct
  source 1..203: mol_type = other DNA
ggcgcgccagtcctaacttgtcccttctgatggtgaatgggaactcccttcctcctgcagcagcctgcctgcagctgtcctggtagaacagtgtggacattgcagaagctgtcactgccccagaaagaaagcaccccagagccaaggcaaagagtcttgaaagcgccacaagcagcagctgctgagcccgactcggaccgatg

SEQ ID NO: 9544 - DNA, 203 bp, synthetic construct
  source 1..203: mol_type = other DNA
ggcgcgccagtcctgtcctacaccttctgatggtgaatgggaactcccttcctcctgcagcagcctgcctgcagctgtcctggtagaacagtgtggacattgcagaagctgtcactgccccagaaagaaagcaccccagagccaaggcaaagagtcttgaaagcgccacaagcagcagctgctgagcccgactcggaccgatg

SEQ ID NO: 9545 - DNA, 203 bp, synthetic construct
  source 1..203: mol_type = other DNA
ggcgcgccagtcctctctctcgccttctgatggtgaatgggaactcccttcctcctgcagcagcctgcctgcagctgtcctggtagaacagtgtggacattgcagaagctgtcactgccccagaaagaaagcaccccagagccaaggcaaagagtcttgaaagcgccacaagcagcagctgctgagcccgactcggaccgatg

SEQ ID NO: 9546 - DNA, 203 bp, synthetic construct
  source 1..203: mol_type = other DNA
ggcgcgccagtcctgcagtcgaaatatgttcattaccaacactgcagattcccattgagttggtgggggttttgttacctttgttttttttctcagcaaaataattctataactttttgtttgtgacaagaaatggactttcagtttacttaagattaatacttcttgaatgataaaatcattttgcccgactcggaccgatg

SEQ ID NO: 9547 - DNA, 203 bp, synthetic construct
  source 1..203: mol_type = other DNA
ggcgcgccagtcctagtgctgcaatatgttcattaccaacactgcagattcccattgagttggtgggggttttgttacctttgttttttttctcagcaaaataattctataactttttgtttgtgacaagaaatggactttcagtttacttaagattaatacttcttgaatgataaaatcattttgcccgactcggaccgatg

SEQ ID NO: 9548 - DNA, 203 bp, synthetic construct
  source 1..203: mol_type = other DNA
ggcgcgccagtcctgaaaccctaatatgttcattaccaacactgcagattcccattgagttggtgggggttttgttacctttgttttttttctcagcaaaataattctataactttttgtttgtgacaagaaatggactttcagtttacttaagattaatacttcttgaatgataaaatcattttgcccgactcggaccgatg

SEQ ID NO: 9549 - DNA, 203 bp, synthetic construct
  source 1..203: mol_type = other DNA
ggcgcgccagtcctctctctcgaatatgttcattaccaacactgcagattcccattgagttggtgggggttttgttacctttgttttttttctcagcaaaataattctataactttttgtttgtgacaagaaatggactttcagtttacttaagattaatacttcttgaatgataaaatcattttgcccgactcggaccgatg

SEQ ID NO: 9550 - DNA, 203 bp, synthetic construct
  source 1..203: mol_type = other DNA
ggcgcgccagtccttatcggatagtgactcccgttgtcccaaggcttcccagagcgaacctgtgcggctgcaggcaccggcgcgtcgagtttccggcgtccggaaggaccgagctcttctcgcggatccagtgttccgtttccagcccccaatctcagagcggagccgacagagagcagggaaccggccgactcggaccgatg

SEQ ID NO: 9551 - DNA, 203 bp, synthetic construct
  source 1..203: mol_type = other DNA
ggcgcgccagtcctgcagtcgaagtgactcccgttgtcccaaggcttcccagagcgaacctgtgcggctgcaggcaccggcgcgtcgagtttccggcgtccggaaggaccgagctcttctcgcggatccagtgttccgtttccagcccccaatctcagagcggagccgacagagagcagggaaccggccgactcggaccgatg

SEQ ID NO: 9552 - DNA, 203 bp, synthetic construct
  source 1..203: mol_type = other DNA
ggcgcgccagtcctagtgctgcagtgactcccgttgtcccaaggcttcccagagcgaacctgtgcggctgcaggcaccggcgcgtcgagtttccggcgtccggaaggaccgagctcttctcgcggatccagtgttccgtttccagcccccaatctcagagcggagccgacagagagcagggaaccggccgactcggaccgatg

SEQ ID NO: 9553 - DNA, 203 bp, synthetic construct
  source 1..203: mol_type = other DNA
ggcgcgccagtccttgaggtggagtgactcccgttgtcccaaggcttcccagagcgaacctgtgcggctgcaggcaccggcgcgtcgagtttccggcgtccggaaggaccgagctcttctcgcggatccagtgttccgtttccagcccccaatctcagagcggagccgacagagagcagggaaccggccgactcggaccgatg

SEQ ID NO: 9554 - DNA, 203 bp, synthetic construct
  source 1..203: mol_type = other DNA
ggcgcgccagtcctaggtattgagtgactcccgttgtcccaaggcttcccagagcgaacctgtgcggctgcaggcaccggcgcgtcgagtttccggcgtccggaaggaccgagctcttctcgcggatccagtgttccgtttccagcccccaatctcagagcggagccgacagagagcagggaaccggccgactcggaccgatg

SEQ ID NO: 9555 - DNA, 203 bp, synthetic construct
  source 1..203: mol_type = other DNA
ggcgcgccagtcctctgtgaaggcattgcccccagtctcccccaaatttgggcattgtccccgggtcttccaacggactgggcgttgctcccggacactgaggactggccccggggtctcgctcaccttcagcagcgtccaccgcctgccacagagcgttcgatcgctcgctgcctgagctcctggtgcgactcggaccgatg

SEQ ID NO: 9556 - DNA, 203 bp, synthetic construct
  source 1..203: mol_type = other DNA
ggcgcgccagtccttatcggatgcattgcccccagtctcccccaaatttgggcattgtccccgggtcttccaacggactgggcgttgctcccggacactgaggactggccccggggtctcgctcaccttcagcagcgtccaccgcctgccacagagcgttcgatcgctcgctgcctgagctcctggtgcgactcggaccgatg

SEQ ID NO: 9557 - DNA, 203 bp, synthetic construct
  source 1..203: mol_type = other DNA
ggcgcgccagtcctgcagtcgagcattgcccccagtctcccccaaatttgggcattgtccccgggtcttccaacggactgggcgttgctcccggacactgaggactggccccggggtctcgctcaccttcagcagcgtccaccgcctgccacagagcgttcgatcgctcgctgcctgagctcctggtgcgactcggaccgatg

SEQ ID NO: 9558 - DNA, 203 bp, synthetic construct
  source 1..203: mol_type = other DNA
ggcgcgccagtcctagtgctgcgcattgcccccagtctcccccaaatttgggcattgtccccgggtcttccaacggactgggcgttgctcccggacactgaggactggccccggggtctcgctcaccttcagcagcgtccaccgcctgccacagagcgttcgatcgctcgctgcctgagctcctggtgcgactcggaccgatg

SEQ ID NO: 9559 - DNA, 203 bp, synthetic construct
  source 1..203: mol_type = other DNA
ggcgcgccagtcctaacttgtcgcattgcccccagtctcccccaaatttgggcattgtccccgggtcttccaacggactgggcgttgctcccggacactgaggactggccccggggtctcgctcaccttcagcagcgtccaccgcctgccacagagcgttcgatcgctcgctgcctgagctcctggtgcgactcggaccgatg

SEQ ID NO: 9560 - DNA, 203 bp, synthetic construct
  source 1..203: mol_type = other DNA
ggcgcgccagtcctcttccactgcattgcccccagtctcccccaaatttgggcattgtccccgggtcttccaacggactgggcgttgctcccggacactgaggactggccccggggtctcgctcaccttcagcagcgtccaccgcctgccacagagcgttcgatcgctcgctgcctgagctcctggtgcgactcggaccgatg

SEQ ID NO: 9561 - DNA, 203 bp, synthetic construct
  source 1..203: mol_type = other DNA
ggcgcgccagtcctaggtattggcattgcccccagtctcccccaaatttgggcattgtccccgggtcttccaacggactgggcgttgctcccggacactgaggactggccccggggtctcgctcaccttcagcagcgtccaccgcctgccacagagcgttcgatcgctcgctgcctgagctcctggtgcgactcggaccgatg

SEQ ID NO: 9562 - DNA, 203 bp, synthetic construct
  source 1..203: mol_type = other DNA
ggcgcgccagtcctttgcgctcgcattgcccccagtctcccccaaatttgggcattgtccccgggtcttccaacggactgggcgttgctcccggacactgaggactggccccggggtctcgctcaccttcagcagcgtccaccgcctgccacagagcgttcgatcgctcgctgcctgagctcctggtgcgactcggaccgatg

SEQ ID NO: 9563 - DNA, 203 bp, synthetic construct
  source 1..203: mol_type = other DNA
ggcgcgccagtcctgaaaccctgcattgcccccagtctcccccaaatttgggcattgtccccgggtcttccaacggactgggcgttgctcccggacactgaggactggccccggggtctcgctcaccttcagcagcgtccaccgcctgccacagagcgttcgatcgctcgctgcctgagctcctggtgcgactcggaccgatg

SEQ ID NO: 9564 - DNA, 203 bp, synthetic construct
  source 1..203: mol_type = other DNA
ggcgcgccagtcctctctctcggcattgcccccagtctcccccaaatttgggcattgtccccgggtcttccaacggactgggcgttgctcccggacactgaggactggccccggggtctcgctcaccttcagcagcgtccaccgcctgccacagagcgttcgatcgctcgctgcctgagctcctggtgcgactcggaccgatg

SEQ ID NO: 9565 - DNA, 203 bp, synthetic construct
  source 1..203: mol_type = other DNA
ggcgcgccagtcctaatttcatgcattgcccccagtctcccccaaatttgggcattgtccccgggtcttccaacggactgggcgttgctcccggacactgaggactggccccggggtctcgctcaccttcagcagcgtccaccgcctgccacagagcgttcgatcgctcgctgcctgagctcctggtgcgactcggaccgatg

SEQ ID NO: 9566 - DNA, 203 bp, synthetic construct
  source 1..203: mol_type = other DNA
ggcgcgccagtccttatcggatttcctcccaaggctaaactttctaattcccttctttgggctcgggggctcccggagcagggcgagagctcgcgtcgccggaaaggaagacgggaagaaagggcaggcggctcggcgggcgtcttctccactcctctgccgcgtccccgtggctgcagggagccggccgactcggaccgatg

SEQ ID NO: 9567 - DNA, 203 bp, synthetic construct
  source 1..203: mol_type = other DNA
ggcgcgccagtccttgaggtggttcctcccaaggctaaactttctaattcccttctttgggctcgggggctcccggagcagggcgagagctcgcgtcgccggaaaggaagacgggaagaaagggcaggcggctcggcgggcgtcttctccactcctctgccgcgtccccgtggctgcagggagccggccgactcggaccgatg

SEQ ID NO: 9568 - DNA, 203 bp, synthetic construct
  source 1..203: mol_type = other DNA
ggcgcgccagtcctctgtgaagctgccggccggcggccccgcgctcgcccgccccgcttccgcccgctgtcctgctgcacgaacccttccaactctcctttcctcccccacccttgagttacccctctgtctttcctgctgttgcgcgggtgctcccacagcggagcggagattacagagccgccgggcgactcggaccgatg

SEQ ID NO: 9569 - DNA, 203 bp, synthetic construct
  source 1..203: mol_type = other DNA
ggcgcgccagtccttcgttatactgccggccggcggccccgcgctcgcccgccccgcttccgcccgctgtcctgctgcacgaacccttccaactctcctttcctcccccacccttgagttacccctctgtctttcctgctgttgcgcgggtgctcccacagcggagcggagattacagagccgccgggcgactcggaccgatg

SEQ ID NO: 9570 - DNA, 203 bp, synthetic construct
  source 1..203: mol_type = other DNA
ggcgcgccagtccttatcggatctgccggccggcggccccgcgctcgcccgccccgcttccgcccgctgtcctgctgcacgaacccttccaactctcctttcctcccccacccttgagttacccctctgtctttcctgctgttgcgcgggtgctcccacagcggagcggagattacagagccgccgggcgactcggaccgatg

SEQ ID NO: 9571 - DNA, 203 bp, synthetic construct
  source 1..203: mol_type = other DNA
ggcgcgccagtcctagtgctgcctgccggccggcggccccgcgctcgcccgccccgcttccgcccgctgtcctgctgcacgaacccttccaactctcctttcctcccccacccttgagttacccctctgtctttcctgctgttgcgcgggtgctcccacagcggagcggagattacagagccgccgggcgactcggaccgatg

SEQ ID NO: 9572 - DNA, 203 bp, synthetic construct
  source 1..203: mol_type = other DNA
ggcgcgccagtcctaacttgtcctgccggccggcggccccgcgctcgcccgccccgcttccgcccgctgtcctgctgcacgaacccttccaactctcctttcctcccccacccttgagttacccctctgtctttcctgctgttgcgcgggtgctcccacagcggagcggagattacagagccgccgggcgactcggaccgatg

SEQ ID NO: 9573 - DNA, 203 bp, synthetic construct
  source 1..203: mol_type = other DNA
ggcgcgccagtcctaggtattgctgccggccggcggccccgcgctcgcccgccccgcttccgcccgctgtcctgctgcacgaacccttccaactctcctttcctcccccacccttgagttacccctctgtctttcctgctgttgcgcgggtgctcccacagcggagcggagattacagagccgccgggcgactcggaccgatg

SEQ ID NO: 9574 - DNA, 203 bp, synthetic construct
  source 1..203: mol_type = other DNA
ggcgcgccagtcctttgcgctcctgccggccggcggccccgcgctcgcccgccccgcttccgcccgctgtcctgctgcacgaacccttccaactctcctttcctcccccacccttgagttacccctctgtctttcctgctgttgcgcgggtgctcccacagcggagcggagattacagagccgccgggcgactcggaccgatg

SEQ ID NO: 9575 - DNA, 203 bp, synthetic construct
  source 1..203: mol_type = other DNA
ggcgcgccagtcctgtcctacactgccggccggcggccccgcgctcgcccgccccgcttccgcccgctgtcctgctgcacgaacccttccaactctcctttcctcccccacccttgagttacccctctgtctttcctgctgttgcgcgggtgctcccacagcggagcggagattacagagccgccgggcgactcggaccgatg

SEQ ID NO: 9576 - DNA, 203 bp, synthetic construct
  source 1..203: mol_type = other DNA
ggcgcgccagtcctgaaaccctctgccggccggcggccccgcgctcgcccgccccgcttccgcccgctgtcctgctgcacgaacccttccaactctcctttcctcccccacccttgagttacccctctgtctttcctgctgttgcgcgggtgctcccacagcggagcggagattacagagccgccgggcgactcggaccgatg

SEQ ID NO: 9577 - DNA, 203 bp, synthetic construct
  source 1..203: mol_type = other DNA
ggcgcgccagtccttcgttataccccgttcttccctgcggagtgcgctgcgccgcccagccctgtcgccccccggaggtgatccctccctcctgcctgcccgccagcctgacctgtgcccggctcgcgggccgcagcctcggcccccgcgcgcccccggcagctctcggcgcgatgagcatagagacgcgactcggaccgatg

SEQ ID NO: 9578 - DNA, 203 bp, synthetic construct
  source 1..203: mol_type = other DNA
ggcgcgccagtcctcttccactccccgttcttccctgcggagtgcgctgcgccgcccagccctgtcgccccccggaggtgatccctccctcctgcctgcccgccagcctgacctgtgcccggctcgcgggccgcagcctcggcccccgcgcgcccccggcagctctcggcgcgatgagcatagagacgcgactcggaccgatg

SEQ ID NO: 9579 - DNA, 203 bp, synthetic construct
  source 1..203: mol_type = other DNA
ggcgcgccagtcctctctctcgccccgttcttccctgcggagtgcgctgcgccgcccagccctgtcgccccccggaggtgatccctccctcctgcctgcccgccagcctgacctgtgcccggctcgcgggccgcagcctcggcccccgcgcgcccccggcagctctcggcgcgatgagcatagagacgcgactcggaccgatg

SEQ ID NO: 9580 - DNA, 203 bp, synthetic construct
  source 1..203: mol_type = other DNA
ggcgcgccagtcctctgtgaaggcctggcaggcgcacgcgcccagcaccctgcctccggcgatgccgccccagcccctctgatggccctcctctctgctgccactcattccagaacaggaggcatgagcccggaacgcgcttgcttttaggagacagccactttctgtgtggtacgctggattcaaggcgactcggaccgatg

SEQ ID NO: 9581 - DNA, 203 bp, synthetic construct
  source 1..203: mol_type = other DNA
ggcgcgccagtccttatcggatgcctggcaggcgcacgcgcccagcaccctgcctccggcgatgccgccccagcccctctgatggccctcctctctgctgccactcattccagaacaggaggcatgagcccggaacgcgcttgcttttaggagacagccactttctgtgtggtacgctggattcaaggcgactcggaccgatg

SEQ ID NO: 9582 - DNA, 203 bp, synthetic construct
  source 1..203: mol_type = other DNA
ggcgcgccagtcctgcagtcgagcctggcaggcgcacgcgcccagcaccctgcctccggcgatgccgccccagcccctctgatggccctcctctctgctgccactcattccagaacaggaggcatgagcccggaacgcgcttgcttttaggagacagccactttctgtgtggtacgctggattcaaggcgactcggaccgatg

SEQ ID NO: 9583 - DNA, 203 bp, synthetic construct
  source 1..203: mol_type = other DNA
ggcgcgccagtcctagtgctgcgcctggcaggcgcacgcgcccagcaccctgcctccggcgatgccgccccagcccctctgatggccctcctctctgctgccactcattccagaacaggaggcatgagcccggaacgcgcttgcttttaggagacagccactttctgtgtggtacgctggattcaaggcgactcggaccgatg

SEQ ID NO: 9584 - DNA, 203 bp, synthetic construct
  source 1..203: mol_type = other DNA
ggcgcgccagtcctaacttgtcgcctggcaggcgcacgcgcccagcaccctgcctccggcgatgccgccccagcccctctgatggccctcctctctgctgccactcattccagaacaggaggcatgagcccggaacgcgcttgcttttaggagacagccactttctgtgtggtacgctggattcaaggcgactcggaccgatg

SEQ ID NO: 9585 - DNA, 203 bp, synthetic construct
  source 1..203: mol_type = other DNA
ggcgcgccagtcctaggtattggcctggcaggcgcacgcgcccagcaccctgcctccggcgatgccgccccagcccctctgatggccctcctctctgctgccactcattccagaacaggaggcatgagcccggaacgcgcttgcttttaggagacagccactttctgtgtggtacgctggattcaaggcgactcggaccgatg

SEQ ID NO: 9586 - DNA, 203 bp, synthetic construct
  source 1..203: mol_type = other DNA
ggcgcgccagtcctttgcgctcgcctggcaggcgcacgcgcccagcaccctgcctccggcgatgccgccccagcccctctgatggccctcctctctgctgccactcattccagaacaggaggcatgagcccggaacgcgcttgcttttaggagacagccactttctgtgtggtacgctggattcaaggcgactcggaccgatg

SEQ ID NO: 9587 - DNA, 203 bp, synthetic construct
  source 1..203: mol_type = other DNA
ggcgcgccagtcctgtcctacagcctggcaggcgcacgcgcccagcaccctgcctccggcgatgccgccccagcccctctgatggccctcctctctgctgccactcattccagaacaggaggcatgagcccggaacgcgcttgcttttaggagacagccactttctgtgtggtacgctggattcaaggcgactcggaccgatg

SEQ ID NO: 9588 - DNA, 203 bp, synthetic construct
  source 1..203: mol_type = other DNA
ggcgcgccagtcctaatttcatgcctggcaggcgcacgcgcccagcaccctgcctccggcgatgccgccccagcccctctgatggccctcctctctgctgccactcattccagaacaggaggcatgagcccggaacgcgcttgcttttaggagacagccactttctgtgtggtacgctggattcaaggcgactcggaccgatg

SEQ ID NO: 9589 - DNA, 203 bp, synthetic construct
  source 1..203: mol_type = other DNA
ggcgcgccagtcctctgtgaagaaaaaaccaggatcatcacgcgtgagttggataaggctctggatggtgtactgacacacaagcaaggctgcctccattgtctcagcaccgatttctaggcagcaccctctttaataggtgcaaggggggtgcggtgttggtgagtcacactttcgttgcagacaaacgactcggaccgatg

SEQ ID NO: 9590 - DNA, 203 bp, synthetic construct
  source 1..203: mol_type = other DNA
ggcgcgccagtccttatcggataaaacaatttcccataacaccccaataccccaaggacatttaaagctaaattcatctgtaatcaacagagctctacacaatgaccatcgtagtgtttgcgactgaatacgatgccgccaacgtaatttttagtatcctatgtagaagtcccagtgaacatttaatccgactcggaccgatg

SEQ ID NO: 9591 - DNA, 203 bp, synthetic construct
  source 1..203: mol_type = other DNA
ggcgcgccagtcctgcagtcgaaaaacttctgtgaaggtcacatccctagttggattacgccgcttttgaaaaatctagaagttgtttggaaaagagatatctggttcgtatgaataggatgctcttgaagaaagggccttcgggccaaacatctggtcggccatcgaccagaccgccggacccagcgcgactcggaccgatg

SEQ ID NO: 9592 - DNA, 203 bp, synthetic construct
  source 1..203: mol_type = other DNA
ggcgcgccagtcctattcacccaaaagtccatttccgtagcggccgcaaaaacaagaatgtaaaagagccagagactgacatataagcgttgccttgcgcctttcttacaactcatcttaagtgttattttgaactagtcttcgcgtcgacgtgattaacagcagacagccctctgtcacctggaaaacgactcggaccgatg

SEQ ID NO: 9593 - DNA, 203 bp, synthetic construct
  source 1..203: mol_type = other DNA
ggcgcgccagtcctgtcctacaaaacggaagttcagggagggcgaggccgtgccccacatccaggcagcgcaggccgcgggccgctcccctagccaggaagagccgccgtccgcaccgggaccggagaggaagcggaggtctgaagggggacaggtgaggcggaaccaaccctcctggccatgggaggcgactcggaccgatg

SEQ ID NO: 9594 - DNA, 203 bp, synthetic construct
  source 1..203: mol_type = other DNA
ggcgcgccagtcctgaaaccctaaacgttcctgctctcacagatcacgggaccctgccgctgcgcagcagtatccggggagtccagcgcgtgaccgttactgacgccagacgccgcacctgcccctacgtctacaaggccctgggcatagtcgcgccgcgcgtcctctcgagccgcaccttctaaaaacgactcggaccgatg

SEQ ID NO: 9595 - DNA, 203 bp, synthetic construct
  source 1..203: mol_type = other DNA
ggcgcgccagtcctggtgctcaaaagcgctcggtttaaaaagcttctatgcctgaataggtgaccggaggtcggcacctttcctttacaattaatgaccctatgaatacaactgactgttttatcgctgtggtaaacgccatcaaagaggtaatagcacttttcctatcacggactgcaggaaaaatgcgactcggaccgatg

SEQ ID NO: 9596 - DNA, 203 bp, synthetic construct
  source 1..203: mol_type = other DNA
ggcgcgccagtccttcacatccaacacagtgggggcgatagatgccatctgcgcgatctacaatttgaagtactgcgagatcgtttggaataaaaattaacatgattcttccgtctcttccctctcctctgctgcttgaaacgcaatccagttgcattgcttggttgggatttgcatatgctaccgtgcgactcggaccgatg

SEQ ID NO: 9597 - DNA, 203 bp, synthetic construct
  source 1..203: mol_type = other DNA
ggcgcgccagtcctcgtagcctaactgtccagtttaaaaagcttctatgcctgaataggtgaccggaggccggcaccttttccttttatccaacacattttatgaagacaactgactgttttgacgttttgctcgagatctttcacaggttccgacacacgttcaagacagacaggaagatggaattccgactcggaccgatg

SEQ ID NO: 9598 - DNA, 203 bp, synthetic construct
  source 1..203: mol_type = other DNA
ggcgcgccagtcctaccggcagaacttgttaggagacgccctcaatcgtattaaaagccgtgtattcccccgcactaaagaataaatccccagtagacatcatgcgtactgttggtgtatttctggccacctgtcttgtcaccattttcgtcctcccaacatggggcaattgggcatacccatgttgtcgactcggaccgatg

SEQ ID NO: 9599 - DNA, 203 bp, synthetic construct
  source 1..203: mol_type = other DNA
ggcgcgccagtcctagatcaccaactttcggtgctgttgtttaatcacaatgacaggttttacgagggtcgagctggagaccctgtggcttgtcttgtgatggaaagactgatttttccacctgttcgacaggctactatgatatgacgcttgtttcttttattttgcagactaattcaaaactaacacgactcggaccgatg

SEQ ID NO: 9600 - DNA, 203 bp, synthetic construct
  source 1..203: mol_type = other DNA
ggcgcgccagtcctcgatgcgcaagacacttttattttgcaaactcaaataaaggtgctaaaaaatcaaaaaacaacgaacctaaaccaagcacctcaaaaatgtctgaaaatgaaattcaagaccaacagccatcagaacctaatgatggccaacgaggagggggaggaggtgcgaccggcagtgtgcgactcggaccgatg

SEQ ID NO: 9601 - DNA, 203 bp, synthetic construct
  source 1..203: mol_type = other DNA
ggcgcgccagtcctacaagaataagagaccggaccctgaacagaatcgcagattgccagcccttttcccgacccctacggaaagacgagtccaggggccgtcctggcgaggtcaaaacatttagtctggtcttttcagtgtgccaggcactgtgccaagtattttgcttcgatgatttcacgtcatctcgactcggaccgatg

SEQ ID NO: 9602 - DNA, 203 bp, synthetic construct
  source 1..203: mol_type = other DNA
ggcgcgccagtcctcggcgtgaaagcgtgtgattcagtatctgtttttataatacggagagctatcgtgctgagcggaacagagctttggctgtgacgaagatggatgtgtggaagcgtcaacggcttcaagaatgccgtgaattgtgtcctttgcctgtattaatgtcactgtcgaatatgttttcacgactcggaccgatg

SEQ ID NO: 9603 - DNA, 203 bp, synthetic construct
  source 1..203: mol_type = other DNA
ggcgcgccagtcctggctcctgaaggaaaggaaaagcgcatccaagaatggctccaaaagaatggagagaacaggttgtcagccatggcagtcagcggggatgattgtgtggtgaaaccagcagatgacagattcgccacagcactgcatttcctcaacagcatgtctaaggtgaggaaagatactcacgactcggaccgatg

SEQ ID NO: 9604 - DNA, 203 bp, synthetic construct
  source 1..203: mol_type = other DNA
ggcgcgccagtcctgcttcttcaagggaccgtagagactggcagagcactaaaacaggtagttggtctatcaacagctgagaatgccctgttagtagccttattcggctacgtaggatatcaggcgctttcaaagaggcatataccagtagtcacagacatatattcaattgaagatcacaggttggacgactcggaccgatg

SEQ ID NO: 9605 - DNA, 203 bp, synthetic construct
  source 1..203: mol_type = other DNA
ggcgcgccagtcctcagggtgcaagtccctcactgagaggctttatgttgggggccctcttaccaattcaaggggggaaaactgcggctaccgcaggtgccgcgcgagcggcgtactgacaactagctgtggtaacaccctcacttgctacatcaaggcccgggcagcctgtcgagccgcagggctcccgactcggaccgatg

SEQ ID NO: 9606 - DNA, 203 bp, synthetic construct
  source 1..203: mol_type = other DNA
ggcgcgccagtcctaacagagcaagttttggagactaagtgaaagacattgtcggtttgcgcttgtcggcatctgttttcttttagccttgtatttttgttatgttctacttaaaaaaactcctacgccagcttctggctccgttgtgtaaacatgggtcgtacacgcatttgcaattgtttgtgatgcgactcggaccgatg

SEQ ID NO: 9607 - DNA, 203 bp, synthetic construct
  source 1..203: mol_type = other DNA
ggcgcgccagtcctactatgacaatcagtgtcgtcgcggtcgctgttctaaagtccgcacgcacccaccgggactcagattctccccagacgccgaggatggccgtcatggcgccccgaaccctcctcctgctactctcgggggccctggccctgacccagacctgggcgggctcccactccatgaggcgactcggaccgatg

SEQ ID NO: 9608 - DNA, 203 bp, synthetic construct
  source 1..203: mol_type = other DNA
ggcgcgccagtcctatccgcgtaatgaaatacccaatcactgctgacaaaaggataacagaaatggttccggagagaaatgaacaaggacaaactctatggagtaaaatgagtgatgctggatcagatcgagtgatggtatcacctttggctgtaacatggtggaatagaaatggacccgtggcaagtcgactcggaccgatg

SEQ ID NO: 9609 - DNA, 203 bp, synthetic construct
  source 1..203: mol_type = other DNA
ggcgcgccagtcctttagttcaaatgaagggagtgtacataaacacagctttgttgaatgcatcctgtgcagccatggatgacttccaactgatcccaatgataagcaaatgcagaaccaaagaaggaagacggaaaactaacctgtatggattccttataaaaggaagatcccatttgagaaatgaccgactcggaccgatg

SEQ ID NO: 9610 - DNA, 203 bp, synthetic construct
  source 1..203: mol_type = other DNA
ggcgcgccagtcctaatgagaaaatgaagggggtatacattaatactgccttgcttaatgcatcctgtgcagcaatggacgatttccaactaattcccatgataagcaagtgtagaactaaagagggaaggcgaaagaccaatttatatggtttcatcataaaaggaagatctcacttaaggaatgaccgactcggaccgatg

SEQ ID NO: 9611 - DNA, 203 bp, synthetic construct
  source 1..203: mol_type = other DNA
ggcgcgccagtcctgttcaattaatggaatttgaaccatttcaatctttagtccccaaggccattagaagccaatacagtgggtttgtcagaactctattccaacaaatgagagacgtacttgggacatttgacaccacccagataataaagcttctcccttttgcagccgctccaccaaagcaaagccgactcggaccgatg

SEQ ID NO: 9612 - DNA, 203 bp, synthetic construct
  source 1..203: mol_type = other DNA
ggcgcgccagtcctcgtcagtaaatgtgctctctgatgcaaggatcaactctcccgaggagatctggagctgctggtgcggcagtaaagggagtcggaacgatggtgatggaactaattcggatgataaagcgagggattaacgatcggaatttctggagaggtgaaaatgggcgaagaacaagaattcgactcggaccgatg

SEQ ID NO: 9613 - DNA, 203 bp, synthetic construct
  source 1..203: mol_type = other DNA
ggcgcgccagtcctcgggtttgacaaacgattaagaacagctgtcttggctccgactcgggtggtggccgctgaaatagcggaagcactgaaaggacttccaatacggtatctgactccggcagtaaagagggagcataccgggacagagataatagatgtgatgtgtcacgcgactttgacagcgcgcgactcggaccgatg

SEQ ID NO: 9614 - DNA, 203 bp, synthetic construct
  source 1..203: mol_type = other DNA
ggcgcgccagtcctttgggactacaaacgattaagaacagctgtcttggctccgactcgggtggtggccgctgaaatagcggaagcactgaaaggatttccaatacggtatctgactccggcagtaaagagggagcataccggaacagagataatagatgtgatgtgtcacgcgactttgacagcgcgcgactcggaccgatg

SEQ ID NO: 9615 - DNA, 203 bp, synthetic construct
  source 1..203: mol_type = other DNA
ggcgcgccagtcctcatcccacacaaagtacacaacaagcgttttgaaccacgttctatagacgaacgtgtcattcttggaggacttcatgattgcgatggtctcagttgagcattcaccttttaaataatttgcaaagggcgtgaccggatgttttaaagggtccagtcctcctcagatctcaaacacgactcggaccgatg

SEQ ID NO: 9616 - DNA, 203 bp, synthetic construct
  source 1..203: mol_type = other DNA
ggcgcgccagtcctgtatcgcgacactttcgtgatgtagcaagactgaagaaaggtacccccgtcgttggcgtgattaacaacgctgatgttgggagactgattttctctggtgaggcccttacctacaaagacattgtagtgtgcatggacggagacaccatgcccggcctctttgcctacaaagcccgactcggaccgatg

SEQ ID NO: 9617 - DNA, 203 bp, synthetic construct
  source 1..203: mol_type = other DNA
ggcgcgccagtcctgggctgatacagggaagaatttgaaaagttattggacgatagtccgggactttttgaagctcttaacttgggtcatcaggctcattttaaggagaaggttttatcagttttagatttttctactcctggtagaactgctgctgctgtagcttttcttacttttatattggataacgactcggaccgatg

SEQ ID NO: 9618 - DNA, 203 bp, synthetic construct
  source 1..203: mol_type = other DNA
ggcgcgccagtcctagttaagaacatttgtccgtgaggcgggcgcgctgcttagacgccactcgatctcgctcctgtccctggagcacaccctgtgtacctatgtatgacaccgacccccatcgccgcggctcccggcccgggccctatcacggcaaggagcgccggcggtcgcgctcctctgcggcccgactcggaccgatg

SEQ ID NO: 9619 - DNA, 203 bp, synthetic construct
  source 1..203: mol_type = other DNA
ggcgcgccagtcctagaccctgaccacgcctgcttcacgcctcgtttactaatggaatattaataaatatcttcctgttggctctctttgaagtggttgccatggtttcgtttaagcaggtgagggtgccattgtttaccgccatcgcacttgttattgttctactcctggcatactttttgccaccccgactcggaccgatg

SEQ ID NO: 9620 - DNA, 203 bp, synthetic construct
  source 1..203: mol_type = other DNA
ggcgcgccagtccttttgtataaccactcaccacattggtgtgcacctgggttgatggcgggaccgtcgattccctgacgactacgaacacctaaatgaagcggaaggcttcatttggtgaccccgacgtgatagttagggaatagtggtcggccacagacggcgtggcgatcctgtcctcatccgtccgactcggaccgatg

SEQ ID NO: 9621 - DNA, 203 bp, synthetic construct
  source 1..203: mol_type = other DNA
ggcgcgccagtcctaagatcacaccattcaccacattggtgtgcacctgggttgatggcgggaccgttgattccctgacgactacgagcacctgcatgaagcagaaggcttcatttggtgaccccgacgtgatagttagggaatagtggtcggccacagacggcgtggcgatcctgtctccatccgtccgactcggaccgatg

SEQ ID NO: 9622 - DNA, 203 bp, synthetic construct
  source 1..203: mol_type = other DNA
ggcgcgccagtcctgggtttgcaccccggctactcctgctcagcatggctgctttagggactgttctcttcagtgtccggaggctgcactgcagcgtagccgcttgggcgggcggccagtggcgactacagcagggactggctgccaacccctccggctacgggccccttaccgagctcccagactggcgactcggaccgatg

SEQ ID NO: 9623 - DNA, 203 bp, synthetic construct
  source 1..203: mol_type = other DNA
ggcgcgccagtcctctcgaattacgaaagtgtgactcaccaacaccgcaccccccttgcacctattaaagagggtgctgcctagaaatcggtgctgagacaatggaggcagccttgcttgtgtgtcagtacaccatccagagccttatccaactcacgcgtgatgatcctggttttttcaatgttgagcgactcggaccgatg

SEQ ID NO: 9624 - DNA, 203 bp, synthetic construct
  source 1..203: mol_type = other DNA
ggcgcgccagtcctaggatagaacgatttatgacagtaatgtaattcgcgtcagtcgtcggaaacgagaagacagtttactaaaaaagatgagattggagtatggaaacgcacttatactatgacaccctgtatcaatatcaaggcggagtgtatccggctcatatttgcctgccgacagatgtgtgtcgactcggaccgatg

SEQ ID NO: 9625 - DNA, 203 bp, synthetic construct
  source 1..203: mol_type = other DNA
ggcgcgccagtcctccttcctaacggaagtctcgttctttttcgtccttttccccggttgctgcttgctgtcctggtccgcgccagagcccagcgcgcctcgtcgccatgcctcggaaaattgaggaaatcaaggacttcctgctcacagcccgacgaaaggatgccaaatctgtcaagatcaagaaacgactcggaccgatg

SEQ ID NO: 9626 - DNA, 203 bp, synthetic construct
  source 1..203: mol_type = other DNA
ggcgcgccagtcctctgtttgaacgggctctcccttgggtgcttagccccgcccccgtcccactctgccctgttgctgtcgcgccgctgctggttgctgtccctggtggggtggaagacaacccgtgagtattacaccttcatgtgggttactttgcccattgacctaaacaacaaatcagctaaacacgactcggaccgatg

SEQ ID NO: 9627 - DNA, 203 bp, synthetic construct
  source 1..203: mol_type = other DNA
ggcgcgccagtcctcagtacagactgaccaaagctggaaatctttttttcaaaggctttggaagcagttagatctaagtgaccaagaagacgagggggaggatggaggctctgaaccagcgtttcaatgctctagaagaccagctcatggacatatatgaacaagggagtgataaattagaagatcaacgactcggaccgatg

SEQ ID NO: 9628 - DNA, 203 bp, synthetic construct
  source 1..203: mol_type = other DNA
ggcgcgccagtcctcacatgtaactgactgactcctttggattttgacctcagaatgcctacctgacctcccacttgcctctcccttctcggattgccggtggtgcctggcggaaaaagcacaagtgtgttgcaggctaccaaactcctacccgacaaaggtgcgtgtccgcgtgctgagtaatgggacgactcggaccgatg

SEQ ID NO: 9629 - DNA, 203 bp, synthetic construct
  source 1..203: mol_type = other DNA
ggcgcgccagtcctttggaatcactggaccctttaaaacatccggtcacgccctttgcaaattatttaaaaggtgaatgctcaactgagaccatcgcaatcatgaagtcctccaagaatgacacgttcgtctatagaacgtggttcaaaacgcttgttgtgtactttgtgatgtttgtcatgtcggcgcgactcggaccgatg

SEQ ID NO: 9630 - DNA, 203 bp, synthetic construct
  source 1..203: mol_type = other DNA
ggcgcgccagtcctgttcgcgaactggcgtgaattgtgcccaccagagggtgagcccacctgtctgacttggcccccgtgtacataatactcggggtctcggcacccaggcagccttgcgtggtgctatcctgctgcagggcgtttcttaggttctcggtcagacggccgcgctgcgaggcatacagccgactcggaccgatg

SEQ ID NO: 9631 - DNA, 203 bp, synthetic construct
  source 1..203: mol_type = other DNA
ggcgcgccagtcctgcgatgcaagaaaaaggacattgggctaaagattgccccaagaagccaagaggaccccggggaccgcgaccccaggcctccctcctgaccttagacgattagggaggtcagggtcaggagcccccccctgaacccaggataaccctcaaagtcggggggcaacccgtcaccttccgactcggaccgatg

SEQ ID NO: 9632 - DNA, 203 bp, synthetic construct
  source 1..203: mol_type = other DNA
ggcgcgccagtcctaggccaagagaagtgcttacgggcaatctccaaacattgaaaataagggtgcatgaggggtacgaggaattcacaatggtggggaaaagggcaacagctatactcagaaaagcaaccaggagattggttcagctgatagtgagtggaagagacgaacagtcaatagccgaagcacgactcggaccgatg

SEQ ID NO: 9633 - DNA, 203 bp, synthetic construct
  source 1..203: mol_type = other DNA
ggcgcgccagtcctcgttctacagacaccgtgtcctcttgcctgggagaggggaagcagatctgaggacatctctgtgccaggccagaaaccgcccacctgcagttccttctccgggatggacgtggggcccagctccctgccccaccttgggctgaagctgctgctgctcctgctgctgctgcccctcgactcggaccgatg

SEQ ID NO: 9634 - DNA, 203 bp, synthetic construct
  source 1..203: mol_type = other DNA
ggcgcgccagtcctacgaagaaagacttcactaacctattagcacttcaccacttcgatatcgtcgatcccattttcaccgtcaactactacgtttgaagaatgactgtacacaagagccgtattcgacgatcgcgaagcctgtccgtgacacacagaatacaaaaacgacctgatcacagagaaaaacgactcggaccgatg

SEQ ID NO: 9635 - DNA, 203 bp, synthetic construct
  source 1..203: mol_type = other DNA
ggcgcgccagtcctgcgttctgagagaaaaaaccggatgtacaaatgaggagggatgtaaagacttgcagatgaggttctcatagattgttattagtgattatggtgcctcagggttgtagtttagtatgggtgagtgcattatacgtgtcggtgatagcgtctttgcatattattaacaatgaaaatcgactcggaccgatg

SEQ ID NO: 9636 - DNA, 203 bp, synthetic construct
  source 1..203: mol_type = other DNA
ggcgcgccagtcctgtctacttagaggggtatgtgattctggtaggggacggaaggctaaaacggtttccgcccccgtctgaatttttgctttcggtttggagccgaagccgcgccgcgtgtcttgtctgctgcagcatcgttctgtgttgtctctgtttgactgtttttctgtatttgtctgaaagccgactcggaccgatg

SEQ ID NO: 9637 - DNA, 203 bp, synthetic construct
  source 1..203: mol_type = other DNA
ggcgcgccagtcctggcccgctagaggttagtgaaacacagggaacagagaagttgacaataacatattcatcctcaatgatgtgggaaatcaacggtcctgagtcagtgcttgttaacacttatcaatggatcatcaggaattgggagactgtaaagattcaatggtctcaagatcccacaatgctgcgactcggaccgatg

SEQ ID NO: 9638 - DNA, 203 bp, synthetic construct
  source 1..203: mol_type = other DNA
ggcgcgccagtcctgagtacctagatgaactatgattggagcctttatgaggaggacagtctgatgattacacaattggaaattcttaataatttgttgatatcagatgaactaccaatggcagtaaaaaatataatggccaggactgaccacccagaaccaattcagctggcgtacaacagctacgacgactcggaccgatg

SEQ ID NO: 9639 - DNA, 203 bp, synthetic construct
  source 1..203: mol_type = other DNA
ggcgcgccagtcctgagcgcacagccatggaagagctggatgcttgttacatcaacgagcaacaccggctctttccccttccccgtccctcccactggtacaattgtctctattgtcaacatccctcggaagacggcgacaccctcatgtcgctggcttgtgagtacgatgaagactgcccctttcaccgactcggaccgatg

(The sequence listing continues in the following parts.)
